United States Patent Application Publication US 2007/0059710 A1 - sequence listing, part 7

SEQ ID NO: 10059 - DNA, 40000 bp, Homo sapiens
atccattgcttcagtttctaagatttatttctgcattttgttctattttcttaaattctccttaaaatccttctttaatcttctctgctctactacatcctatgtcagagatctgtgattcaaaaataaataaataaataaataaataaycaaaggacggtcaagctagattgcttgggttcaaatcccagtgtagactcaggcaagttccacacacagttcatgcctcagtttcctttcttagaaaagagggatgataatagcacgtacttggaggggaactgaagttccgctgacgctgtgagtgtggaagggcttggtgggcaagagcacactgggcgagtgtgtggttgtggctgtcattgttaccattttgagacttggacagttcatggggctccagttgcagcactggggtccccttgcctggcasaagccccgccacctgcactggggccaagccatcccagcaaccatcggctctttcatgccagtgccagcggaatccgtgcattgagcaatccctggaagggctgcgaaggtcgtgcccgccgccttgattacattttcctcaaaactcaaagttgactgaactttgtattctacatacacacccccatagcatttacagtaagctgaagaaatcctgttgataagctggtgtgttcactatgaaaacaagcctactgtactgtgttttgttcatttcacaagggaaggagaacatggctgtttattcaccatcttccatcttgtgactctccaaacatgtgattcttytttaaaaagttgcatcactttcaccactgttctccagaagacctgtgtcctggcactgtaaamatgagctgggctctggtgttcgtggaatcgctttcttgtttgtgttcatctctttccagtggggctctgcgctggtcctgggcaggtgagggatgtctctcctgttcctccaactcactgttcttggagaacttggtgtccctgcttgggtgccccccgacaatactgcacctagttttgtgctcacctcccctctggacttgcttcaggccaagcaaaaggcatttyactggaatgcgcaaagagtgactcaaccaaggacataggagatggtcactcactgtgtggctgcagcccagggtgggtggacggggctgtcaggtacaggccagaagcgggggtcatcccagaacacagcaggcctggactgaatgccttgccagggtgagtgaacttcattctcttggcaaaggaagcctttgatgggtttggggggacaaaatgacatcccccatgtacaatccctgtaatattgtgactcgcacatcggttgaatgcttcaaagtgtaaagttaccacgtcgggtctgtctttccratgtgcttgcagctatgtragttcagataacctcagagtgagctcgctggaggggcagttccgggaggagtttgtgtccatcgatcacctcttgccagatgacaaggtgactgcattacaccactcagtatatgtgaggtaggtggtcaggcgatgctgttgtctgcacaggtatcgagtcacctgctggatttgtgatgctatgcacaactccacaaggacttaagaggcatgcmtgtgttatctcakatggaaggtgggagttggccacctygatgagactggtggatgcgccaggctgggggtgtgagaacctgagggagtatggcccaataaagaaagggaaggaaatagagtagaagggtaacaatgctgtgagtgtgaccaatgtactgtcatgtgacaggcactctgggtgtgtctggggaatgaaagcaggcaagcaagaaggggggtggggaggaaragaggaaggsagrgagggaggraggaaggaagggagggagggaggaagagagggagggtaaaaggaagaaaaacagaaattaagatagaaatttatccttctttgtttacgaagtattttagcattcattatttattttacatgttttccccaacaactcatggggaaggtaaaaccaggtgttcttaaataaccaccaggtaactgaaacttacagggaccacatgccttgccccaggttagacggtgtgtagcagatacagccaagagttctgaatccaattccatattctctccctgacatctaggcccaaaccctaagatgtgcattttctgctctgggaacagtaggcttgttggtctgtccgtcggggatgaataagcaccccgggacccacctgcagtctggagggacagctcatgtgttgggtgctaaatccacagtctggtgacactagctttctcttrcatgatgagctggggctcaaaaggcagaaaacattacaaagattttgggatccctttcccttcactatgagaaaagcacacaccctggtctccacctgtgtgtgggggtgggggtaggagtgtcaattttggggcaatcacactttattgctctggggaaggagtcctctgccagatgtgtgaacccaggctacaaggagtcctagagagcttgccacgctgtcccttgggcactcttgtgtccctaggggccaggaggtggagaacattgggctgaatcgccatgcaatgacagcgtgacatgttgatagaatatatctccttacacatcctttatcactagctatctaaagcttagaaatacagaacggcctgttgtgtacacaatacttcactgttagttgagtgttttacaatgaattgtgtgacctcatcctcatggttttttttttttttgaacatagactaaaattgtaatctatattcaaagagggggaaatagaatttatttttctgttaccctaagattgagtttttaagagtgttcctttcacagatctggggcatttttcacagagcctactttttctccgctttagggagggatgtgcctctggccacgtggttaccttgcagtgcacaggtaagagttccagaaaggcaggggtccagggggagcaagcacatgctaagtcctatctccttgccctcagagtcctctccccccatggggctctgtatcccttcctcctgggtgccaggcgggaactctgtgtacccctacctgctggaggaggggagcagtgtcatcctcacctgtcggcctcacctgtcaggtgggggagacagccagagcaactcattagcagcggacaggaccaaggcccatgatgtcccatcactctgaagagccttgagtccctgactcagttcccacttcctccttacacgtgcacagtgcccactccaggcctcgggcagtgcccctcgttcctggcagaggggagtgttcacaccacaagggtggggtctggagcagtcagggaggtgcgtgcaccagcggcagtgaggagggggctgcagaaggttcctgcctgctcctgacatcccagggtgttgtcatcactgggggaataggatggggagtggtgctgccaatgctgggcactgaccaagcagggcaggtgcttttcccacygcatcctccacagcacccaccatcctcaggtctccccaagagcctgaccacctcccctgctgagctcccccttgcagcacttgtcttagagctgctgtgagctctgggagcrggggcagtgagggtggggagagaggagcaggtgcatggtggtgacaccatgtcccccaaagaagtctgcagggtggacccacaagcytttgttcccctccatagcctgtggtcatagaaggggctacagctcacgcatcgtgggtggaaacatgtccttgctctcgcagtggccctggcaggccagccttcagttccagggctaccacctgtgcgggggctctgtcatcacgcccctgtggatcrtcactgctgcacactgtgtttatgagtgagtgctgctgaccatcttcccagacccctgttcactcctgggtcatgtcagggtggggctgctttgggtggtgagaagcgggtccagagggaagacagagagactaacctccaagtaatgtacagttggagaggagtctccagcctcactgtggacccatcatcatcagctgggggtaacttgtgaccctgagcttgttttaaggattgtagctcctagagaaagggcagacagaagaggaaggaagctcctgtgctggaggaaacccacaaaaatgaaaggacctagaccttcccatagctaattccagtggaccatgttatggcagagacagggtgagacrgtggtgcgggaggctagaggkaatatgttgggggccaggtactgggtctcttcttaaaatctcagragtttagagtgcaagaaaactacagaaaagacttccaaacacaatggttctccctgatatttttaccccctattttgttgctgtttgatgaacagtrgtgcctgatagactccttgcagtgaccaatgttgagttcagccctcaaatgccaagacgacctcagaggtgctgagagtgaggtctgggaaacacatggggtgtgggtctgtgtttctgtagggcgtggcagtgcagttgcatatacagcataaacaagcagggtgatgggaccacatcttgcctgataacctctcccaccatcttcctaggttttcaggatacctgaggtcaatgagttcagtggttggacttttcctgtgcttcacctcttgctcttctcatttcagcttgtacctccccaagtcatggaccatccaggtgggtctagtttccctgttggacaatccagccccatcccacttggtggagaagattgtctaccacagcaagtacaagccaaagaggctgggcaatgacatcgcccttatgaagctggccgggccactcacgttcaatggtacatctgggtctctatgtggttctgcagctcttcctttgtttcaagaggatttgcaattgctcattgaagcattcttatgatggctgctttataatccttgtcagatattaataattccaactcctgattcatgttggtgttggcatcagttgattatcttttctcattaaaattgtgatgctcctagctcttggtatgacaagtgattttcaattgtatcctggacaatgtggctctcatgtttgcagacttgagtcctacctacattttcaatgttaccctgtttaaatgtagtttgtagatcctggcctacagaatgaatgcactgatgactctgccaggtagattggtgggctgtagttccaacrataattttagagccttcgtgggctgtgtgctttgtctggtgccaccttctccctgttggtgccaccttctccctgttggtgccacctggakgcagaaagagcttcttgaggccagaccagctggggcctctaggtggtggaagagagtcatccatctgtagggacaaagagcactttcctgtccaggagcctattgtggaggggtcactcagccagtgcctcccacctgcctggtttctccaggtagaggggccatcttggttgagaaacagaacctcccaggctggccaggtggtgtggtggagtcctctcatttctttacaagctgaaagatgctgggcaccctcagctccctggaagtacagaaaagttctctcccaaccagcagctcctaaagaccctgtttcttgaaaaagtcaagccctgccctctggacattacgaaaatgccagaagagccacacctgataaaactttcaaacatctcgtagatgcaaacaaagtactaggagactactcccaattaaattaaagccctctttccttcttaagaaagcagggaaagcataataaataggttaattccctcttattgaagcagaatcctgacctgagaccagctgcaggctctacctggcagagtcattactgcatccatcacatggacacgtaatgcccagaaacaaatatttccagagaagcaggaaaatgattatggtggtgccagtytgccaactattattaatgatattggttataggaaatgaggtgccagcacttgtactttgccaaagtttcaagtgagttcttttattccttctctacctctccattactgttctgcacagaaaagctcggggaacctcagggtgtgttcacacgaaagcccgaggtatgtgcagggcactctggctttgggggaggcccacaggatccagccctacacacaggcaaactcgtcgcctccagatatcccaggaaccatagcaatattcatggagccgtgttctatargcaacayccacactgtgatctagccaggagtgggcrcgcgttggcctgagagcctggtctgccccatcgtgttttggtaaatagacattttactggacacagccacacctatgtgggtacctgttacctggggctgtcttcatgctccaatggcagccagagaccgcacagcccacgaagcctacaacattgactattcagccctttccacaaaaggtgtgctgaccctggtctaggttccctcacgctgcsacggtggagggctcttttacagttttaagtgctctgggtgtggtggatggggtaaggggctcctgctgtgagctgatcgttttcaagtaaccaagggcttgaccttccttcccttgggagatagtttgggctcctcagaggcagaagcatagatgagattgttttctcggactcctgcttcaattgagttgtgaactattgtttcccttcaagcagaaatgatccagcctgtgtgcctgcccaactctgaagagaacttccccgatggaaaagtgtgctggacgtcaggatggggggccacagaggatggaggtcagtgggctgaagccaagattcggagtccaggggctcagaacccagagggctgcggagggggctcccccaatgtcccattgtgatgttcccatgggctgcccagataccccggccagggagtgcatgtcagctgctcgggacacagtcagccaaggaactgtgggtcaggagtcacggttccattgttatggggacaacatgaccctgcagaccttctcaggagagagttagaccttctcgaacacagcaggtgtttccctttccctgcccggacccccggccttgttaactgaggacatacagagcccacctagacaaccctcccaggcttcattcagaactcaaagattcgtatttgtgaagactctttgtcttgtgggactttggaagatgtgttctttcatcctacaaagagcaagtggaagcagcagcagatgagatcgctgtaataataagggaagtaggagtggcagtaaccatagtccatgcaaatgaagccygggccaccctttccttagtgtgggtacagagctggtcatgagtcttaggtttttccatcaatcactttctttgttagtaggaagaggattcattttccgtggctgccgtgacaaattatcacagtctgcgtggcttaaaacgatggaaattggccrggtgtgttccctcacacctgtagtcccagcattttgggaggccgagtctatgggatcccttgaggccattagtttgagaccagcctgggcaacatagagagacaccgtctctacaaaaaatacaaaaattagccaggcatggtggcatgcacctgtaatcccagcactttgggaggccaaggcaggaggattgcttgagcccaggagtttgagaccagcctgggcaacatggcaagaccctgtctctacaaaaaattaaaaaaattagcctgggccgggtgcagtggttcatgcctgtaatcccagcactttgggaggccgaggcaagtggaccatttgaggttcaggagtttgagaccagcttggccaatgtggtgagaccctgtctctactaaaaatacaaaaattagccaggcatggtggcgcacacctgtaatcccagctattcaggagactgaggctgtagaatcacttgaacctaggaggcggaggttgcagtgagccgagatcatgccactccactccagcttgggtgacagagcaaggctccatctcaaaamaaacaaacaaacaaacaaacaaacaaaaattagcctgacatggtggtcccagctactcaggaggctggggtgggattgcttgagcccaggrattctaagctgcagtgagccgtgatcatgccatcatactccatcctgggtgacagagtgagactttgcgtttaaaaaaacaaaayaaaacaaaaaaaaagtggagatttatttccacacgcagttgaggtgtctgtagggtggttttcctggaggctctgacccctttcctttgggttctggtggcrgcggctgcagctgcactggcattcctgggcttgtagctggatctccagcctcagcctccttcctcccgtggctttgccccctgtgtctctgtatctcaaacttccctctcctgtgtcttataaggacagcaagtcgttggatttagggtccaccctaaacgctgggagatcttatgttgagattcttaccttaattacatctgcaaagaccctgttccaaataaggttgggctccatagtggcaggtaggcatattttggaggggcccacagttcaacctaacacaggaatttcagtgttttccactcaacaccaattacttgagcccacccccagctgaaggcacccaggagctaacccggatgcttcgagtctgtgggcctacttaccccccacccactggcagtgctgcccacctggccgagggcactcacagctctctgtagtttccaacccacccacatggcccaggcccagttctgtgccagtgtggctggtccagggcctttctagcttcatcagaaccagcacccctggtgtgtggtgggagctgggacaccaatctacgctccccttcctctcatggtgggctctcattccggaccaaccagcccaccagagtcattctgatgacactgggctctgaagaggaggctgtgcaacagcttcatcctcccaggagattctccatcccgctgccgattttcttctcgctgtcaatctgctctgtccagtgcaaaaggtcygacragcccctgtcctgatgtagcttcagctccagcctgtcctggaatcttctcccataatgcattgagctgtttcgccacgttccgggcaggaagctgagtgtcttgtgataccatgtgctcctcagagcagcccctcagggtcctgtcattgtgtgattttgttgtctccatggaatctatggagtctttaaaacaccaagatgcctgggtcacaaaccagctgagttggaggggtccatccctcggtgtcgggggcgtgcttggcccactgcacgtggattaagtctcctgtgactgttgcaacaaacgaccccaaattcgtggcttaaaatgacagaaaggtatcatctcatagttaggaaggtcacaggtccaaactcagtctcagggcgctggcgtcaagtgtgggctgtgctggctcctcctggaggcccttggggaatctgtctcctgcctttcccagcrtctgcactctgcccacactgcttggctcgtgcccctccttggtcttccggggcagcaatgccgcatcttcgaatctctctctgactctctgactctggtccctgctctgtcgtcacagcttctcctccggctcctccaaagacccctgtgacttcgtcaggtccaccctcttacttgggatcatctccccactcaaggcctgtccctcaatgcacctgcaatgtcycatttgccctgtaaggtgacacagtcacaggttctggggattggggtgagaatgtctttggggtcatttttctgctgaccatcccagagttcacaaagacgctgagtgagtgaccctcctgagcctcagtttccctcccataacctggggtgttctgatggctgattgggctggtgccctggggaggtgtcttggccactgttgcccctactcctcctcctctttggacaccttaggggagtcggtggccctgccttgaagcagasyggccccttgcggccactcgtaggagggcaagctcgggcttgaggtgcttcgagacagtgggagtctgctcgtcccacccgcagggccctgtccttttccgctgttgcgwcacaccagagagcatccccctcgtccctcgttccctcacccccctggtctcagcatgcgccttctgtgttttgggccgggcttccttctcacacacatcccctcactcactttgaagcaggtgacgcctcccctgtcctgaaccacgcggccgtccctttgatttccaacaagatctgcaaccacagggacgtgtacggtggcatcatctccccctccatgctctgcgcgggctacctgacgggtggcgtggacagctgccaggtacggggccgcagcggtgggcgaggccgtggcagggtgacccagcccttgggacaggtcgttgccagcgtttccctgtgacaggacaaaaagtaaatttacagggcgtggagaagaaatttgctcaagatatcactccttttcctggctgccagscctgtgtttacccagtgatctggctctgcgtgggtgctgggtggtgggaggggactcatgctgctcccctccaattctgactttgtgggggaccacaggggaggcaggtggtggggaggcaggtggcggggaaccagtgaatctggccctccgaaagctgcagtggctgggactccagttctactaggtggatcacaggtcacctgagggccctggccaggtggaccctccctctcaccagctgcccttgagcttcagagggtcagggtctgcattctggaagggacacacagctggaggcagcaccccaaaggggccgagggacatcctcccttggggatgctgtgtctggaagggctggtgggttcccttctgtaacctgggtcatccattgggacatcatgaaggggggtcccaactccatagcaagcagcctcacacggcagactgtccacagaaagcaatctcgcatggcggtgactgtcccccaatctttgcttctttcctgtcacccagggggacagcggggggcycctggtgtgtcaagagaggaggctgtggaagttagtgggagcgaccagctttggcatcggctgcgcagaggtgaacaagcctggggtgtacacccgtgtcacctccttcctggactggatccacgagcagatggaggtgggtgcggcgccctccccagctcacgttgtccctsgcttttgaccctaaggtcccttaaatgcaaccctggtcttgctataaaaaccagggcgtgacccagtggttgtcaattcagcagcagtgayttggtggctccagggtgtcagacgcttgtgctgaaaacagagatcacagctagtcctgggcagctctgggtgggtgcagcctggcaggcagaggagctggggcccgggaggaagaaggagcctcacgacatgggaaaggaggaggcagcgaggaggagcccctgctgggatggggatgggtcgggcgtgccccgtgtgccaggagcagggagaaagtgggagggggcggggggctgagacagtgcgggagaggaccttgcctgcctgctgaggggctggaacctcgctgggagccagggatgagaggcagcagtcaggagaggcttggggagctytgcattggtggtgtgggggggtggggggtcccggagggggaggcgtggaagtgggaggggcctgcaggggggcayccaacagcgaggctggcttggcaggacccgsgcatggaggggaaacctgagacggtggaggaggaagaaggaggcttagggcttcgctgggaccctggcagctgcgtgctggcaggtgaacrcggcgcctttctcatgtgggcgccggggaaacatttgctggcttgatctcagatgaagtctctccttgggatggtttcaaacacaggaggtcctcacttaatacggttgatgggatcttagaaactgcagctttaggagaaacagtgcgcacaggccctccagcaacgtccttgcttgcaatgtaattttgttataaagtcgatgagaaaaaaaaaattggtttcattatatatcattttgcttaaagtcgtagtttccaagaactaacaatgacgtcaaagtaagtacgttttttttccctaattcaagtgaaatttatataacatacaattcaccwttttaaagtgaacaaccctgtagcatcagcacattcacagggctgtgcagacaccacctttgtcagttcccagcattctcatctcccaaaagacacgcggcaccctagaagcacgcagttactccccactccacttttctccccagcctctggcacccaccagtcagctttctgtctccaaggctcaaagacctttttaaaaagctcatttaatttgaaacaattggccaagaaaggacatcaaatgctgaatgtgcctcaggcgttaattcccgttttgctctcactgattttgtgctttaaatgagaaactaaagaatggtgcccacgggcwcagggtgaggcctgggactgagacctgggctagcttcacctccagcactgccgccctgcagccctgagcaccccctcggggcgtggtgagggctgtgctcgggctssgtggaaagtgcttgctcctgctcaccttgctgggagaggcagcctggccccatactaggcactgagtggcctgctatgctcttcagtataaagctcagcccagccmgcccgcactgtagaaaggaccaggatggacaactgaatgggagacctcctcactgttcagggtgctgtgggagcctggggggcacagaagggtcrcgtgggcacagagggcaaagggcaggaaaggagaagccggtcctccacacgggtctgcagtacatggaggccttcacgggacacagatccccaggggctgagcactgagctggtgatcctaaaagtcccccttaagacactgaaggcgcaaggcagagaagcccaccgccgtgtcttccagctgtcgtgggtgagctggagacaaacgttcaaaatcagtctggggagcccgctcacaacggttccatgayggggccacctcagcccctcccatgtcagcaccgtcctgggccacagagcctgtgaccctccctgtactacagcggagaygacctgcatgaggcccccccagctaacaagggcagagtgtgcctcacatcagatccccgacgtggccccagtgtgactgcacrgcagaatcaacagatctcaaacttaggggtgcagaagcctctctcaggmtgtttgttaaatgtgaagattgcagggcgtttatctggagtctgattgggaggtctggggtgaagaccctggtgaatgtgttgcatgggggcttcagrgcacactgagaaaccctgggagggtcttggaggcagtttcccctgttgtggtgaagctgtggtggaggagctcgtctgtgacgctggctccggcgatgcctggggcccctgctccctgcacaacgccttagtcatccrctgcctccaacccaccagtgcatgcgagagatgcgcagcctcagacacgccctttcccaagtccctcttcagacgtcctaggggagacccagaagagacttcctytcctgggaggctttccagcaggcccgctgtgcgtttcagttgtccattgtgaggaaagtcaacgtgagggcctttggaagactcactgtcttgcggggaagtgtcccgtgtgctagttggtggcatgcccrtggcctcatcttcattttcatccagcacttttctctatctagttgggggtttaaaacaaaattgttgtgactcaaaccagaactcaggaacatagtgccgagacctggaagtttcctacggaagtgacggaactgtcgcagggcggagatgggacctgcggatgcattgctggttggagcttttcatgcctgcctgggatccactcagagctggcagccccagggggaggccaaccttgtcttcatcgtggagaacagccccacaattcccacagggcaaaatgcaggtgcccgctccgtcatcatgttggacggatggctggaagtgctaaaaacaataacgcctttgttttcatttatagagagacctaaaaacctgaaraggaaggggacaagtagccacctgagttcctgaggtgatgaagacagcccgatcctcccctggactcccgtgtaggaacctgcacacgagcagacacccttggagctctgagttccggcaccagtagcaggcccgaaagaggcacccttccatctgattccagcacaaccttcaagctgctttttgttttttgtttttttgagrtggagtctcgctctgttgcccaggctggagtgcagtggcgaaatccctgctcactgcagcctccgcttccctggttcaagcgattctcttgcctcagcttccccagtagctgggaccacaggtgcccgccaccacacccaactaatttttgtatttttagtagagacagggtttcaccatgttggccaggctgctctcaaacccctgacctcaaatgatgtgcctgcttcagcctcccacagtgctgggattacaggcatgggccaccacgcctagcctcacgctcctttctgatcttcactaagaacaaaagaagcagcaacttgcaagggcggcctttcccactggtccatctggttttctctccaggggtcttgcaaaattcctgacgagataagcagttatgtgacctcacgtgcaaagccaccaacagccactcagaaaagacgcaccagcccagaagtgcagaactgcagtcactgcacgttttcatctctagggaccagaaccaaacccaccctttctacttccaagacttattttcacatgtggggaggttaatctaggaatkactcgtttaaggcctattttcatgatttctttgtagcatttggtgcttgacgtattattgtcctttgattccaaataatatgtttccttccctcattgtctggcgtgtctgcgtggactggtgacgtgaatcaaaatcatccactgaattccaggggctccattactgtcatctctcctgtgtgcgttgtggacttggcattcttctgtcggaacaggttgctcagcagatcagcatcagctcgtgtcatacacagaactcaaaagtagagcaaggccaggcaaagtagtgggwgtgagcrgtggccggagggagtgagcrgtggccggagggwgtgagcggtggccggagggagtgagtggtggccagagggtgtgagtggtggccggagggagtgagccctgtacagagggagttagcagtggccggagggtgtgagacctggatggagggtctgagtggtggccayagtgtgtgagtggtgtccggaggaagtgagtggtggctggagggtgtgagacctggatggagggtctcagtggtggcagtagtgtgtgagcagtggccggagagtgtgagtggtggtcagagggagtgcacggtggccagagagcataagtggtgactggatggtatgagcggtggctggacggtgtgagccatggccrgaggttttgagtggcacccgaagggtgtggccggagggagtgagctctggctggagggagtggccagtggcaggaaggtgtgagcaatggccagatggtgtgaggggtggtcagagggagtaagcggtggcttgagggagtgagtggtggccagagggtgtgagtggtggctgaagggtgtgggctgtggccrgagggagtgagcagtgatcagatatgggacctggacggagggtttgagyggtggctggagggtgtgggcagtggctggagggtgtgggtggtgactggagggaatgagcagtggccacaggatgtaagacctgaacggagggttggagtggtggctgtagtgtgtgagcagtggctggagggtgtgagtggtcgttggagggagtgatccctgactggagggactgagcagtgaccggagggtgtgattggtggccagaaggagttggcggtggctggagggtgtgagcggtgtccggagggagtggatggtgtctggagggtgtaccaccaaggacgcctttctgatcgtcctgcgtccatgctcagtcctggatctcctcttccctttctgggtgtgtgtggctctggaagaagctggctaacctgacgaggttacygccctactgtcaccatggaagcatagcgcctcagccactctccctggaggagcctggcctcacactccaatcattcccctctccttctgggttaatttgaggaatgtggtcccgctccaygctgtgggtctgtgcctcaagttccctggccaggaaagtacctgcctcctccaatacctgaggaccccaaccccagggcctcagctgggtgtccttgtaaagggtccctggggtggcagttgcttttttgaccagaggcctggcaggaaacgggcttcrccacagcggatctgggcaatgygaggagagtgaagactgtaaaagtctccttgcggctggtaaaccccccaggctggggcaggggggtgaggggtctgctctggggcctggggaagatggtgtgtggagaggacgcccacctgggctgtggctgagagggggacgtggcctgtcccaggtgatcccaggagggatcctggaggagagcccyggatccacttcctcccaaactcctccctccctccagggccacctacagaaccccctcctgccaaggcacaggtcaggggcagcgggcaggtggggagcgtcaggaggagactgactccccaactgcgcgtcccccttgtggggaatctgggcggctgcggggmcccccactgaaaatgaggggctctcgccagaccgcagggaggtcggctgggcgcaggaaacaagcaatgcctgcacagccacagacgcccccacggccatagatgcctgccggagagggtctgaggtgcggagtcttcagatgtcctgtggcccagccactgcgtctttcagataagaaaactaagacccagagctgtgaaaatgctggcacagggtcccccactgatgatggactggcgctygcctctgcattctctccctcgccacactggaattgtcttcaacargtttttatggataaggttatgtatggtgtggtcttgggttccgcccactctcacagggataaagctcttgtcccgagaaacrgagagtcccgggggcagctccagccgctccaaccctaatgtgggaggccaaactccggcacttggtagttatctcacagctctcccaaggagataggagctgggctttccaagaaagcaattgcaaacatgtacagaatgctagaacaacatccgtgaatctacgctgcccctcattaatggatgctaacctttttaccttatttccctcagattttcttcaacaaaagaaaacattacggagacmtcgaaggcccctttgcgccctaccccgccrccttttcctgcttcctccttcytagacagacccatcatgctgaagtcagtgtctcgttcytgtctacactgtcatcattttgttcatctggatgcagttccaacagtatatcacattgtttcacatagtttggaaatctacattataaatgatatcctactttacaaaccattttaacrgattttttcacttcgctttgttttcaatatttctcattatttattcattttcatcttctgaaagatactcacatacatacatatataatatatgtaaagyataatacatgtatgcaattagttctctatattcatgggttctacatccatggattccagtaatgtcagatcaaaactgttttaaaatccagctgggcacagtggctcacacttgtaatcccagcaytttgggaggctgaggcgggtgcatcacctgaggtcaggagttcgagaccagcctggccaacatggtgaagccctgtctctactaaaaacacaaaaattagctgrgcgtggtggcacatgcctgtaatcccagctactcaggaggctgaggcaggagaatcacttaaacctgggaggtggaggttgcagtaagctgagatcatgccaccgcactccagcctgggcgacagagcaagactctgtctcaaaaaaaaaaagtattttaaaatcttatttacaacatcttaaagatcaaaacttgggtgtgccgcaagtcaagtactatgtagaatctgcagaatgaaatgaggtgtaggtattgcatcaggtattataactaacctagagatggttaaagtgtakgagaggatgcacgtggtttctgcgcactatgtcattttataccagggacttgagcatttgtggattttggcatccctgggkggggggtcctgaaaccagtcccccaggggtactaagggacgactgcattgtattttaagttcattttccctttccctggttaatgaatatttattttgcttttctttccctcctttccttccttccttctttccctgtttccagctgttacaaacaatgctaaaaagaatatctttgcctgtgttttcttctgcccaagtatgaacatgtttctgggattaagagaccaggcctggaaacagaagaatttgctgagctgtaaaatctgtatggcttaaacctcaccgaacactgcccaccttttctccaaatgattgtgcaatttacatcccatttccaagagcccccattttgatccgagaaattagagcagcgaaaaccaccgtcactatgagcaccaccctgggcctggtgcccccgtcctgttttcaataaacttaagctgaccacagaggacaccaggcctyggcccctccctgggtcctgcggtcaggcccctcctggagaccctggcccaggagtggagaccccggtgcaggagtggcagccctggaggaggggctgggtcctgggatggagcgaagaggaacatggccgcccccattctggcccaggctcccctcccagaggggctgcagaaatgtactgactaggtcacccaagaaaagatagtacctttgttaggctagcatgcattttcctcagggcctaatttctcactgaagaagaaaagatttctcctgttgtccatttcttcatgcagctcttcaacagctgtttctcgaatgccaatcaaagccactgttctagggtctggggccacctcaaggcactaggagatgaggacttctgctcccatgcgccctcccgtctgctgcagggaggagtgcaatgaataaataaccaacataatgtgtcagtcacttgttttatccaccaggaggtaataagagctatgaaagagaaagctccgagcaggggaggggagtgaggcatggtacaggagagcaggaggctgtcctctaaaatacaggagtccaggggacyaactgggaaggtgtgggagggggagggagggagccccatagacacaggggagtgaaccacrttcactttgtcagtttttgatggcagctcgtatatactatttttttctccctcctgcccccagcycctcccagaaggagacttaatctgtcgctcaggctggagtgcagtagggtgatctcgactcactgcaacctccgcctcccaggttcaagtgattctcctgacttaacctccagagtagctaggattacaggcacccgccaccatgcctggctaatttttgtattttttttttttgtagagacggggtttcgccatgttggccaggctagtctcaaactcctgactttaagtgatccgcctgctttggcctcccaaagtgttgggattacaggcgtgagccactgcgccaggcctacaatttcattattaaaacaattccactgtaaaagaattagcttaggcctagacggaatgggcttcatgagctccttcccttccccctgcaaggtcacggtggycaccccgtgagccactgttgtcacggccaagcctttttccggccmtctctcactatgaatcacttctgcagtgagtacagtatttaccctggcgggagggcctctcagatatgagtaggacctggattaaggtcaggttggaggagactcccatgggaaagagggactttctgaatctcagatccctcagccaagatgacctcaccacatgtcgtctctgtctatcagcaaatccttccatgtagcttgaccatgtctaggaaacacctttgataaaaatcagtggagattattgtctcagaggatccccgggcctccttaggcaaatgttatctaacgctctttaagcaaacagagcctgccctataaaatccggggctmgggcggcctctcatccctgactcggggtcgcctttggagcagagaggaggyaatggccaccatggagaacaaggtgatctgcgccctggtcctggtgtccatgctggccctcggcaycctggccgaggcccagacaggtaaggcrtgcttcttcctgctctgtggggccacagccagctctggcagcctccgccaggagccactgttttacatacatatttttgagcacctgttttgtgccaggtgctgttctaggcccttaaaagtatatccaatttacaggatsggcaaaagcaggtggagagtaactcagggtggcagggyccccggagaccttcgagaartgcgacgaggagggggctgccttcagtcggggctgttttcctgtgttaggaagactatacaatcctcccaagtgtcatgtttcaaagaggaagtgttggcgtggggtctcagaatagtgcttttgastgttcatgccaacatctcccccaggggcagaccctcccaaggcccatccagataggcccaaatgccggtcccagtgatggccacctgggagaccctctcccacaggcccgaatgcccrtcccagtggtggccaactgggagaccctctcctacaggttcctgggctcccctgggatccatgctctgggagtcaaagccacctctctcatgagtgcgtggctggcaacccatattccctggtgttgtcaagtggatcggttgccctgggtccttctagggagtggasgaggaggccattcttgcttccttgggaagtgtttgcatctcaactcctttacctgcagaatggatcaacggtctgccctagggctgtcaggaaatgctgtgtggcagcatctgcgacttgcactttgccagctgtggggagctgaataacttatttgccgttattaggtacagtttcaaggtgggggcaggagaaagggctttctacgtttccaaagcaagggtttccagagaggcctgaagagggagcgcccagtggtgctgtccgtgcccccactgccctccagccacctcttgatctctgctgtggggtaccgggcctgaggggtgggcttgggcagcgtagaagagcagccagcattgggctgcagtgggaagacccccaagcccatggcagggagcgggggagctttggaacccgagagaggaagtggcctcggtgtacagaacgaactgggtgggtccccgtgctggccacccccaggcccatctgcctgcgcccttgcccccaccccagcccccagctctgccccctgtgctgtgggatcacagaggccgtggcaaactcccctccccaccccacacaccctytggctcaaggctcagagcgtctttgcgggtcactcaggtccatgatcctgttacaactgaaatctagaaaattgtgattacagtttagtgcattcgtgtgtggaaaccatttccatttatttccatcatgcgacaaagacaaagcgggtgggcaagacagagtctgccggaggcagagcaccggggctggaaatcttcctccctgaggaggaaacccccccgacccccaggatgatgatcctccctcaccacggggcctctcttgacccccacagtgtcccgggggtgggcgatgatcaccttcacgtcgcgatggatccagaccccaggagggcaaggttcccatggaagctgctgggcagcgggagctgaacacggatccttcccagcaagccaggaacactttctccaaagacatctcgaggcagtccctgatagcaaagcagacaagagaacagcccctctcggcctcccctggggcgccctcacctgagccagtgtggccagactgagttcctcccctcctatgccccaaggcagggacagggaccggagggtgctctgggctcctctttcaccccctgctgcaggctgtcaaccaccagatcctaataggttgctttctgagacctttgattccgcggagctcagagcctgaagctctggtgttagaacctcttgcataagatcctgcggcagcccccagccagccccatctgtccacgtgtcttcctcctctagatccctttcctcactgccctgcttcaagctgtttcacagcttgtaccctctgtcggctcctcctagaccaccccacccggtcctctyaccttacctgcratgggtttccacctcctgaacacacctgggtctctggaatggcctttgcccatgcggctccatcttcacctggtgaacctcctcctgcagggagcccccctgctttgttcaacctgcttgtcattggcctctccggggagtgccctacccccgtggttaccctgggcaccctgggacgatggccttgcgttgtctcgcacatgttcttgcctttctcctccatcagatccttagactcttttttttttttttttgagatggagtcttgytctgtcactcaggctggagtgcaatggtgcgatcttggctcactacaacctctgcctcctgggttcaagtgattctcctgcctcagcctcccaagtagctgggattacagacgtgtgccacaatgcccgcctaattttttgtatttttagtagagatggggcttcaccattttggtcaggctggtcttgaactcctgacctcaagtgattcacctccttcagcctcccaaagtgctgggattacaggcatgagcctgggcccagatatttagactcttattaatgacttctctggttttaatttctgggtctctctcacctggcacagtgcctggcttttgccatgctagctcccacttctcatgcacacaaatggtgctcagtaaatatttatgtattgagtaaaatttaataatcatttgttgaaattaaaaagtgaataaataagttacctagaaagatgcaaagtccacaaacctggggcaccttgcattttccctgagcgtaatgtttgcacatcaggatgtgaggaccacgtctccctctcatgtcctgagggttttatatccgcctcactggacagttgctgatgtcattggagaaggaagctggatgggtgtgtgcatgataacatcaaggaattcagcccacaacttactttgcttcttacctgtgcactttcagagacgtgtacagtggccccccgtgaaagacagaattgtggttttcctggtgtcacgccctcccagtgtgcaaataagggctgctgtttcgacgacaccgttcgtggggtcccctggtgcttctatcctaataccatygacgtccctccagaaggtatggcctttttatacsatgggttctgaagatttagaattagttagaaaagtcatttaagactacagaggctctgatcagcatcaccagctatgcctttacacagagtcacggccgccagtggtggtgcaatggggtagcctgagtcaggctgcattcaggtccaggaatagaaaggcagggctaagggacttgggaagaaacctgatttccccccggcttctcttcacatctctaaccaaaagcctgggaagagccactgttggtaacgctttctagcttgcctaggatagagggggaaggcatgasgaaatctgaagacatttcatgtattcttttttttttttttttttgaaatggagtctcgctccgttgcccctgagctggagtgcaatggtgcgatcttggctcactgcaatctctgcctcctgagttcaacctcagcttcctagtagctgagattacaggtgtgtgccactacgcccagctaaattttttttgtatttttagtatagacggggtttcaccatgttggccagaccggtcttgaactcttgacctcaggtgatctgcccgcctcagcctcccagagagctgggattacaggcgtgagccaccgtgcccggctgacagttcatgttttctaaagaatgtgcctatggatactttaaagtaaaaactctgtaattgtttaaatgtgaaagaaaatgtttatcctcactaaagcatctctttctccctccccctcacccctgtagaggagtgtgaattttagacacttctgcagggatctgcctgcatcctgacgcggtgccrtccccagcacggtgattagtcccagagctcggctgccacctccaccggacacctcagacacgcttctgcagctgtgcctcggctcacaacacagattgactgctctgactttgactactcaaaattggcctaaaaattaaaagagatcgatattaatctgtgctgttcattcttttaaagaatatgaatgattttcctttctttgaaagtgaagcgcagcgtttcaccctgggctctcgcagaggttctgcatcttctgggcttcctgagctgggatacaagtgggcagctgagtgcagaaagcagggatggtggggtgtacagtaggacagtggggtgtgcagtaggacagtggggtgtgcagtaggacggtggggtgtacagtaggacagtggggtgtgcagtaggacggtggggtgtgcagcgggacggtggggtgtgcagcaggacgcaagtccaagacgcactcttgtccaggcatgaaaatggacaccgactcccctggcatttcttaactactcactgcggatgccccagcgaccaagtgacacaagttagctttccgtttatttgctttcccaaatagaaattggcgtaggagatgaaacctgtagcagaatgtctgaaagcatgtgtaataaaaattgcagagggtggcatggactgacccctccaggaaaacccctccccaacctcagatctgaacgaactagaaaatagaacagcagrggagggatacagaagccaaaatgtcactttattcccactggcccctctgtagcttggcaaggattgggagagggtgtccccccaacctagtcgtccttgctctggggacctcagctcagcaagccccaagctaaatgcaccctgggttcctcctcctcccacctgtccctccatctggtgctcttgtgctgggcacacgttgcacagttatactggagatgggrtcccccgggagctctggaaagctcctgctctctgcagccagacggttccagggaggaagagggaggtgcagaactgagcggggccagctctttccacattaaccagtctggcaaatcattcccaaacccttggctaccacgttcagcagataaagaggcctgagaggccgggagacacccaccaagaagaaccatcaggaacgggaagccccctgccccctgcacacagcagcacacacatgagcygtaataatacatatgtcacgtatgtgtcaggggggccacagacacctcctcttacctctcagatgtgcaaggaagttttagcttttcttttccatctatggtatgtctgatcttacactctctgtctgctaattacaggtaaaaatgagctaamtttatttagtccaattcctcttaaaattcagtttgtcataataatttgcacagcttctgtcagtcacagtctttgggaaygcaytgctcagtctcttacctcgctctactccgtcttgccctctctacccctgggtggggtgaaggagcccctggggtctgcccatgccctttggattcctgctggctcactgtggagcagaagctgggggttctcagagcccagctggtgtgtggcctgtccgttcttcccacagttctccagtgtcagaaaggtgggctttccacacaacrtctcgtagctgactgtttcctggctgtccaccatccgttctttcttacctaactygcactctacgaaggaagggggagaaagaattcactttcccagcccctcttttagccagaagtggycgtgcaattctatgtggcccatgagacayagggggcatctccttgaaggtggggcaggcttctcccttgatgaatgaagagcgccctctggcttcctaggccagcccttgcagcctgcctttgggtgttgtggaaggtgggtgtgatgtggtgttgcaggcagccattatgtaataatgaggtaaggcccaagacctagagccttaataaccctgagctactgatttgagccccccacccaccttgagacatcatgttaaataaacctaagtgtgcttgtgggttaaatcacttctggtttggtttcctgtggcatttcagtatattaccaaggcccatatcttccatctaccayagagcagtgagcctatggcccagccacgatggccaggaacaaccgctctcaccaaggactgtaggcagagccagttaacaaggtgggtcactgccttcctgtggtttccctgggcctccactcagtggagcctgggcaacagggcaaaactctgtttctactaaaaatacaaaaactcgctgagtgtgtggtacatgcctgtagtcccagttactagggaggctgaagtggaaggatttcttgagcccaggaggtggaggctgcagtgagtcgagactgtgctactgcactccagcctgggcgacagagtgagacactgtcttaaaaaaaaaaataaaaagcacccttccacttcagatctgctcaatggagttacatgtcagtttacacttttcttgtaagctgctccttggcttgcaagcagcacccttgtgctgcctcttcccatgcttgtctgtctgtgtgtctggggtctgtgtgtccaaatgtcctcttctcataaggacaccagtcaggtcggattagggcccaccctaacaaccccattttaacttgataaaagaaaaacttggscagacgtggtggctcatgcctgtaatcccagcactttgggaggctgaggcgggcagatcacctgaggtcaggagttcgagacctgcctgaccaacatggagaaaccccatctactaaaaatacaaaatttcccgcrtgtggtggcacattmccataatcccagctactcggagactgaggcaggagaattgcttgaacccgggaagcggaggttgtcgtgagctgagattgtgccactgcactccagcctgggcaacaagagtgaaactccctctcaaaaaaaaaaaaaaaagaaaagaaaagaaaaraaaaaaaaaaaaagaaaagaaaagaaaagaaaagaaaagaaaaacttcagctgaattacatttaaagaagtttaattgagcaaagaactattcacgaatcgggtagcctgctgagtcagagtaggcttagactccagcacagtcayggggtggaagcagatttatggacagagacaggaaagtgaggcacagaaaatggatatgaggcacaaaaacagccsgactggttacagctccgcctttgcctcacttgaacgcagttcggactgttggctgcatttgattggtcagaactcggtgactggcacctcagttcggacagttggctgcatttgattggtcagaactcggtgattggcacaagtgtaggctacggtcggtttacgcctccacctgttacagttcacgatgtacagagaaacctttagtccaaatttaaaatatgtaagggggaagctttaggctaaacttgatttcacaattttaatcacctctttaaaggcgccttctccagatgtgatcccattctgaggcgctgggggttccggcttcaacatagaagaacagagttgggccgtaacagtggtatctgttacctgcaaccaaggagccctggcccatgcagattattacagagtgctgtcaccactgtgtgagayaaggcaattctgctgtgggaggcaagaaaacaaagtggattttgggaaactggaggtatgtcaggtgcatatgggggcacacattcataaggagtattcaaggtggacagtgaaagagtggtcttctgtgagatatgctgtgtgatgagaaggatggaaccaacaagaacgtcattagggagagaaaaggatgagaaggccgcatcacagggaaccgatggtgtgctctaggctgacaactccttcagccctgaaccagcagctcacggtgaccacccaccctgcgcttggccccggaaatgcgcagtaaacatgggctgctctgtggatcgtgcggggctgcagctgagctcacaagccctcccccagaatctcttagacaaagcaagagcatgtgttagccccaggctccctccacctcctggtccccagctgagatgtccattactatgaccctggtggagaaggtggagagacggagaggatgcgtgagttcctcgtggccagaattcaggcrtgtggtccttctacccwcccacacctgtatgaggtgttcaccttctctttcccttcatttttcactaygtgctgtcaatcgatttaataaatagcaggtttcacaccttaatttggtctatgcacacctctgttctgccactggctatgtactcggaggccacagttgcttctagataatttcctacacaacagggttctgttcagggcatttattgaactaaaggtcagaccaggaactaattctcgaaggcaagctgtggcttaagttcatatttgtagggtcactgggaaagatatcgttaacttaagaaaactccctcacctttctttgcaagtagarggaggggtggtttgttgcaatatttaatttttatgagtctgataggaaacatcagctcataagaaagagacacacacctggcaaatcccagtccttgtaacttaccagaaggaagggatggccattaggaagaaggggytccctgacttaaaggtccaagtagacagaagacaccagttggtaacacaagaataaatagtattatttttaaaggatttctgacttgttcttttcagctcttaacagtgccctgagctggacatttttgaggtagcaaacagactaaattagaccaaaccatacatgcccacacatgcacgtgctacaaggggactcagtgaagctaaaggcaagtattggaagrattttctacatttcatctgatctagtctatcagtgtcgagaagtgggaagggctgagcttattatatcctacgtgcaagccagcaggtgagtctgccagtttcctgtttgctrgcagaagacaggagattcctggttcaaagataaatgactttattactcatgctacagcaagcagcatgaagaaaggttacttgtgttggttctctttgcctccaagacccccaagggactgggaccrggaatgggctcasatgggtrcctgcacacacagtgggttgccttataggagagaagccctggacttagggatccaagtgttttataagggacagtgagcttgcctgctctttgcttcagagggagacactttatccactttccaagattgtttgtgacccaaacatccttggagagatagtctggaagaaagaactgttttaattgcctccyatgcatttcgttagtgagggagggatttcaccctaggatgatgggatgactgaacacgccawccccaacacaacataggtgagaacaatagcagtttgtgagtcccatatccttatagctcaggggctgaggacactgtgccatgtggagccacacagaggtggcattcaggagcagagtgaataagcaaaggctgcggaaagcaggctttgtagtatcaagagggcgtagtggctagtggttcycccaggaggatgcaattggcttgtttaaataattctgtgggctggcagaaaactgaaatctgctactcacggataagcaagcacrgtgcctgaycccttgayagggagggttgtttggctaggggaccttatccaygagtagagatgggaggggaactttyggtgaggctgcttgaggccctctctgtttcaccagatgtcaaggcagtacttaatattgtgccttaagtttaggtcttatgccataaggatagttagtttcttattcacaggatgtgcagaaatgtgagaamtttatggagaactgtctcccaacaaccagtatactaaatatcttaatttcaggacaagattatagagggaggaaaaaggattaaggctcacaaggctcatttctgtaacattttcttaagaaaaatagaatacaaatatttccctccattgttatttttaaaytttatttttagacagcttaaggctacaatataggggtatgtgcaacctctcctgagttcaagygattcttctgcttcagcctcctaagtagctgggattgcaagcatgagctaccatgcctgactaattattgtatttttagtagagatggaatttcaccatgttggccaggctgttcctgacctcaggtgatctgcccacctaggcctccctaagtgctgggattgtggcgtgagccactgcrmccagcctggatttttttaaacggctagatagtaartattgtaggttttggaggccttacagtctttgtcacaatgaatcaactctgcaattgttyyygaaagcatattttcagagtatagaacttttccctagcacttacacatgttatcccattgtcttctggtttgcattatcagataaaaagaaatacttgatcaagaatgagtgttgagtaaataatactgtgttatcagtcattattgttattatgttctcctccatgctgtatgtctttgtcttagcctattttctgttgctaagttgaaactggtcatttataagaaatgaacttcatctcttacagttctggagactgggatgtccaaggttgaggggttgtatctcttgagygccttcttgctggtggggactctcagatgtgtcccaaggcagcccagggtattccatggtgagggcgctgagtgtgttcatgtcctagcacaggtctctcttcktataaagccaccaggtccccttccacaataacccatgaatccatcatcccatgaatccattaattcatgagtggattaattcattcatgagagcrgagctctcacgatccaatcacctgttaaaggccccacctctcaatacggccacattggggattaagtttcgacatgagtttggagggacattcaaattatagaagtcttttcctccagctgctttaagagttttttaaatcaccggattttcaacagacgaatcatgctgtgccttgatgtgatatttttggtatttatcttccttgaagttctttgagcctctaagatttgtaggtttatacttttcaccaacttcagaaaaatctaatgaatatttactcaatactcattcttgatcaagtatttctttaaaagatttttttctctcctctcctactggtacatcaattacatgtatgttagattgcttgacattgtctcaccggtcattggaatcttgtttatttgtttagccctttttcactttatgctctagttcgcatagtttatcttgcactggcttcacttcaagtaaactgaccattcctctgcagcatctaatagtatctaatcaaaaacccatacagtgtatttttcatttcagatgttgtattttttatttctaaaatttgtacctggttaatttttagtttccatttatctactgagattcytttttgttcctttattataytatgtttttctttcaatctttgaacattttatgccatgtctaagtctgtttttgttcactgatttttctaatgattatgggccatatttcctagttctctccacacatctagtaacttctgattttctgttagacgttagggatgttatgttgtgtatttaggttttgctgtcttcattagtaaagtgttgaatgctttgctctctcaggtagtgttatcggttgaattatttcccccaaattcatatatgaagccttaaattccattacctaagaatgtgactacatttggagacagtgtcttaaaaggggtaatcaggttaaaatgaggctcttagggygggccctggttcaatttgactggtgtccttataagaaaagagtcgccagagatgtgcgtgcacagaggaaagaccatgtgagatatggggaaaaaaagccatctgcaagcagaaagaggcctcagtagaaaccagatgtgctgacaccctatcttggacttctgggcaccagaattgtgagaaagtacacttctgttggttaagctacacaatgtgtagtattttgttacagcaacctgagtgaactaatacaagcagttaatttacttgcaggttaacttgattcctgcaagacttgttttaaagttttgttcgaatggattttgagtagctttcctctagaaagatcagccttctttttacggcatggcctttattgaatgcttgaagtggtcaacacctctggctgctctgagctcaaatgctttccagccccacgaaccctacactagttgttcagtttagcctccccagtgattgttctgtccccaggggctacttagcctggccttgtgggcacgaacagcatagtatttgatgaaaagctcaaaggacacacttttatatttctggagcttccttctcttaccttgataacccgcctgcctcagaagcttccaattctgacctctgtctcctcagcccgatgggacttcagtgctatttgggttcccctccctgtgctgtagtctggagagcgtctccaggaaaccaaggcagccatgggactccccctattgtttcccttctctcagggatcgctgtctggcactgcctgctgctcagcatctgcagactgttacttatgtagttttagagttactcatggtgggaggctagcctggtaccagtgactccatagtcaaaagcggaagtccacatgggtgatagctgaggtggttcccatttgttgactttctatgtgaactgatggaaagtatcatccccaaagtgtgcaaaatggaagtgagcaggggtggagaaggataracagaaagaggagggcgccagccctgagtgcctggatggcgctgagatcatgcgttgagagtggcaacaattcaaggtaggtgtcggccatgctaggcagatggcataggcacagagacagtgggaaacagcagtgaggaagacggtgggtgaagtgagcactgtggaaatcaggctggagaagcaggaaggaaggatagacaggagggggctcacaggggaataggggattggagggctttaggattcagacaaagggagaatgttaggagcttaggacatcctgggcagaaaggacatttgcataccctctttcagaggtggagctcaagttctgagygtggtcatgggagggtggcagaagtggcagaagtggagtggagatggaagttcctagagatgaggaaaaataaaatctgagcgactgtgaattttgatgaaacatcgaccgccatgttgaagatgsctgggatgtggccaagtcttagcatgacaaggaacacagtgaactcagtgctgaaattcttaacgaaagggacaggctgcacaaaggtcggcagatgacagcagggcagggactccggacatggcgcccttcccagcctgcatctccaaggaggatggtttttgyatgagggtgaagacttggggctcaaagtcaatgtccagcccccagtctgagcccatgtgatggggacgtggccaccaagtacagttgtggaggttgtgaacagctccactttcaactagcgatgccactctattgcagacrtcccatctcgtgtaatggtttcccaactctgtgggcactcagtgtccctgcgtgggggcctgagcaggattccagggaagcatgcctatgacaacacaggcttccgccagggccaggagagtgagagaggctgagaagtggtctcttttgcatgggtcaggtggtcgcagcaggaatcctgaaggggctgcagtgagcggtgggaagtcgagttgatggggaggaagcagagaggagaggtgggtgggaatatgagagaaaacaatgactcagtcacttatatcatgatggtgactaaagtgacagggatgtagaacaaggaaactgaccttgccagagttttcatggatcgagtccctgtggttrcccagtggtgaacagtcagcagagagcctggaggtacttgacccggacccagaggagccctggaggatggagcctggaggacgggggcctggagaatgagggtctggaggacgagggtctggaggaacaggggcctggaggaygagggyctggaggaagagggcctggaggacaggggcctgaaagatgggggcctggaggatgagggtctggaggatgagggtctggaggagcaggggcctggaggatgagggcctggaggacaagagcctggaggacaggggcctgaaagatgggggcctggaggatggggcctggaggatgggggcctggaggacgggggcctggaggatgatggcctgaaggatgaaacctggaggatggagcctggaggatggagcctggaggatgagggcctagaggatgggggcctggaggacaggggcctagaggatggagccctggagaatgggggcctggaggatggagcctgggggacgagggcctggaggatgggggcctggagtatggggcctgctctccagaccctgaggacagccccgtggtggaccaaggattttgggtttcctgcgtctctgggcccctgactgctcaaccatcagaaacagactggcaaccccctgtcatttccctggcgtggggaacttcgggtcccctctgtccttcccaccacacttttccctctttctttccgggtgtctactctctggcttctgtcttctctgtcaggtccacagaatccttctccagcacatcctaccccaggaaggccatgggctgggtcccaggtgccatctttcagaagatgtagagcattcccatggaacaaaaataacccatttcaggggytggctgaaaatgaacttattaaaacctgcctgtcacaggctactccgctgaccctgtcagcctcatctccatggagagcagcccctcctgctgaagatgggacaaagggcatcgtgctgcggttggggaggctctaaccacagccctgggagcagtctcttacctcctctgagatgcttcccttcctcagggagkggacttttccatgctatctgctggcctgtacattttccccagtaaacttggccctaatattttctaaattcctgtggtccctgcccactctatcaatagaaatgcatagcttatcccttcctgggtgtgaccctgtgtgtgcccagccccagacctgcacgtggccggttttccacgctggcagcctggcatgacccaactctctgtccagggcaggaagargtatcaccgagcagggagagagtcacccyggcccggaagcctcgcctgcacagggcacagctgcctcttgcctcctcttcgcctccacggtggaagggctggggccacggggcagagaagaaaggttatctctgcttgttggacaaacagaggggagattataaaacatacccggcagtggacaccatgcattctgcaagccaccctggggtgcagctgarctagacatgggayggcgagacgcccagctcctggcagcgctcctcgtcctggggctatgtgccctggcggggagtgagaaaccctgtaagtgaaggagagggtctttttatgtgctttctttatttctcttaaagaaaaaaaaaaagcacaaccataaattaacttgagagggggaatggctataaaggcatctggcaatgtgtgttgttcacatgggatttgccactgctcaggagggtggctccaagaagggcctccctcctagggaaaggctgagtgacrgcaggtgtcagcgggccccrtgtcgggccaggagggcattcccaccaagggtccttggagtcccagagcactcacctctcgcctggatcttggccttgggtccatctgttcaccctcctctaggagggttttgtttttgtttttttccgagacaggatctggctttgccgcccaggcaggagtgcagtggtgtgatcttggctcactgcaacctctgcctcccaggctcaagtgatcctcccacctcagcckcctgagtagctgaaaccacagttgtggaccatcatgcccggccaatttttttttttgtattgtttgtagagatggggtttcgacatgttgcccaggatggtcttgaactcctgagctcaagcaatctgcccgcctcggcttcctaaagtgctgggattataggtatgagccaccatgcctggcttttttttttttttccttttaaactaatataacaatttcagcaaagccctatcggcttctcaggaggaaacygcattgcttaaatatgggcaagataagactttgtgtttctctatgtggcaacaagacagtagaggcatcccctagaacctctgagagaaggagcagtgtggtctggggtaccagggtggggccgactgagggtctttccacagccccctgccagtgctccaggctgagcccccataacaggacgaactgcggcttccctggaatcaccagtgaccagtgttttgacaatggatgctgtttcgactccagtgtcactggggtcccctggtgtttccaccccctcccaaagcaaggtaatcttccagggaatcttcctgggccagcagctggcaacccaggacccagcttcacaggcggagcccagagcaggggcyggaggaggcccagttgctagtctagggttagcctgggtgggttagtctcgagctagccccggttggttagtctggggctagcccaggttggttagtctagagctagcccaggttggttagtctggggctagcccaggttggttagtctggggctagcccaggttggttagtctagggctagtgtaggctagttagtctaaggctagcccaggttggttagtttggagctagcgcaggttgattagtctggggctagtagcccaggttggttagcctggagctagcccaggttggttagtctagggctagcgtaggctggttagtctggggctagcccaggttggttagtctggagctagcccaggttggttagtctggggctagtagcccaggttggttagtctggggctagcccaggttggttagtctagggctagtgtaggctagttagtctagggctagcccaggttagttagtttggagctagcacaggttgattagtctggggctagtagcctaggttggttagtctggagctagcccaagttggttagtctagggctagcataggctggttagtctggggctagtagcctaggtttgttagtctggagctagcccaggttggttagtctagggctagcgtaggctggttagtctagggctagcccaggttggttaatcggagctagcccaggttggttagtctggagctagcccaggttggttagtctgaggctagtagcccaggttggttagtctggggctagcccaggtttgttagtctggagctagcccaggttgtttagtctggagctagcccaggttggttagtctgggactagcctggactgctagtctagaggtagcctagaggactgctagtctagaggtagtctagggctagcccaggttggttagtctggggctagcccatgttggttagtcttagactagcctggactgctagtctagaggtagcccaggttgtttagtctggtactagcctggactgttagtctagaggtagcccaggttggttaggttggttagtctgggactagtctggactgttagtctagaggtagcccaggttggttagtctgggactagcctggactgttagtctagaggtagcccagattggttagtctgggactagtctggactgctagtctagaggtagcccaggttggttagcctggggccagcctggactgttagtctagaggtaacccaggtcagccaacagtgagatgaaaatttcccacctaccctgtttctacactgttagttctttcaacagacatgtgtgtgtggagccatcagttttactttagttgagaaaaaaatatatatatatatagtaggtctcctctagtttttgaagtgtgacttctgaagaagcttccatggggaaatgaaggtatttaataggacagcagtaacataagggctgacagccctcaaatgttagggaaggaagtgaagccttctagggttctttgggagtgagttttatgttagtgcacgggatcaggacccaagttgtaacgccgacgagtgctcaaaggaaggttgtgtrtgtgtcgtgcacctgtgtgcgtggaaccaggcacgtcctctggagaaggaggattcatccccaagattgttgctgggaggcttgctgggccccgcagggaaaccaggcagatggtggattgttcacsagcgcccactgaatggcagtgtctttgggaatcaataccatgtccaaacgctttccatcttaccaaggtgcccacaaaccttttctcatcttggcccgggggaccaccccatttactgagaacactgagtcccgagaggcaaaatgatttccccaaggcgggggactccagagcttctgactgtgaccaccccacatgggccccaccttcgcggaggacaggccagccaagcgtcgctggggccgacacttccacagtccccgggggaggcggtcccaggggccgacacttccacagtccccgggggaggccgycccgggggatgctgccccaggcagcacctcatgatccacggaggctgcaaatcagcgctgytctcagaggaggaaggggtggagctttccagggcacagcaggcctgactgggtctcggtgctgtgcctgtcccatggcagagtcggatcagtgcgtcatggaggtctcagaccgaagaaactgtggctacccgggcatcagccccgaggaatgcgcctctcggaagtgctgcttctccaacttcatctttgaagtgccctggtgcttcttcccgaagtctgtggaaggtaacgtcgctgtgggactctctgtctggttcccggacaccatgattcctcctccgtccgtagaggtggggtgcagggaggggagctgcctcgcwgcctcagtgccatcgaggccagggcccctgcctcctatgggattctgaaggcaattccagaatgttcttggcaaagacagcgtctwttcaataagtttatagcctccagcattgccactgcgtcatctgtgatggytctagaaacagcggctcatccctgttgcctccccaggtgttgcaacgttcagaggcgttgcctgttttattgcaagcccatctgcatttggaggctactgagtgtcttgcactgtgctgggtaccagagagggcccaactcaagcagacctggccccttctcccgtggcttccccgttctcccccacatgaccccgaatgacaaacctcatccacaacgtcctgctccgggcagtcccgggagggtcccgccggcagaggtgaacgggtccacttctcccacccgcttagtgatagtgtgttcctgactcggagtgtg

SEQ ID NO: 10060 - DNA, 40000 bp, Homo sapiens
  misc_feature (16588)..(17893): n is a, c, g, or t
  misc_feature (21052)..(28736): n is a, c, g, or t
  misc_feature (36321)..(36509): n is a, c, g, or t
  misc_feature (38129)..(38330): n is a, c, g, or t
aacaaacaaacaaacaaaactaagactttccacctcaagccacttataatttaaatcacaatcttatttgataagaaatatttagcttagcaaatcttcgaaagaaccttagtgagaagtggttaatttgaaagatagaattcatcctcactaatagtccatttgttcatttctacatccaaattcttaccactgggcaagctgctcattgggctccttatagattttaaatttcattagagtagcaaaaattaagttgtatttctagtaaagagtacataactccacagcatacggtcacttactacagcaattcaagtcagacttaaaagcctattgtaagaaatggagtatttctactaaagtaagtttggagaactgtgttattaagtcagaaagaagccaaacaataacaactggaatatcttcaggaattgacttccaaatagagaaagagctaggtatacatagcttgtaagccaatgaggaaggagaataagaaaaccacctaacatcatctgaagtgtatgatatgtaaatatcacaggagagaagttaaaaggtattattcatgaatactgaacacacacatattatgaaaacatttcttgcaaaaaaagaatcactgagcacagagattaatctcttctggaaaacattggaaacccagttgcctgaaccaattaaaattgaattgaccacagtaacattttacatcagctaacaaacagggctcaggtaggaagaagtatccaatggattatttccctactcaaatatcaatgtttttgtgaaatgaatctgcagagaataaaacattacaatctcaaatataatctactcatttattttaagtaaaagattgtttccttcaccctctccatatgggaaaatatcatgtgaacataaacagagaagggtagtaattacagaaagaagtgtttgtaacaaaacagagcaggagaaaattcagtgtctgaatagactttcaagtaatgggtagaaggagaacatagttgggttagatgactggtgaaaaatgaaatttagaagctaaatatatgtccctgaattcactccattcatccaggaaatctcatattataaagtcaagataaaaaacaaattaaagaaataaacatctcccatttaattttatcaatacaagcatcaaatctggcaatagttattgggaagctaggaacactcgattagaatatctgcattgatcattataatcaatgatggcttcactacccagccctatgttactaaaggtagaaaaatgcccaaggaaaatctcrgttctttaaacagcaagagtcagaagtatttatggtatcattcttcttgtctaatatatgtggtgagctacccagaagtcggagtgaaaaatatttcaggaaatttgattccctaagtactctgaccaatctcacagctcacatctatctatgtttgtttaaagccagccctgatcttcactttgctaaaaatcagttgaatgttaatctactgaagaaagaaatcatgagagaacttgagcagaaagttctaaattccataaacatgatggctaataccttcagattctacttttgaagaaacttctgtaaatgtttgggctccacctttttctctgttgccaccataatgcaggttaaataaaaagcaagtaaaagcaaaagggtaaataaatttaaataataaaaatacaagtataggccgggcatggtggctcacgcctgtaatcccagcactttgggagaccgaggcaggcagatcacgaggtcaagagatggagaccatcctggccaacatggtgaaaacctgtctctactaaaattacaaagattaggtgggcatggtggtaccagctgtagtcccagctacttgggaggctgaggcaggagaatggcttggacccggggggcagaggttgcagtgagccgagattgtgccactgcatgccagactggtgacagactgagactccatctcaaaaaaatgaaataaaataaaaataaaaataaaataggataaaaaagtatagtaggttgccgcttcrtgcaacctaaaattacaagtggaatggcatcacctttactactttggatatatgttatttttctacattttgaaggcaatcatgcattgcagcgcactatcctgagaaaaagtatattgataatctattggtttcaggcatagtgtttcaatgcaaagtataaatagtgtataaagcagatctaggatgaaagaggagataagtggatgtagtctgtagtctatggtgttagataaggataaaaagtgcttatcctagttcctgtgagagaaaagcaacgggaaaaaagggctgtcattagtcatcaactgaaactcaatcttaaaagtttggcctttccaaaaatctgatttgctatttcccatagtgatatgaggtttgaaaatgagatgattttgcctggagaggaagtgggtgtgggttttgtggcttccagacagcggaagcaaaaatcattgtgtctcaagccagggtcatgttttcccaggcttggggatgttgatgggacttaggcaaaggcaagaagacaacctggtcgctggccttttatttttcctccctcatgtcagccgcaagcaatttggtatgaagaaagacagaaagaaaagtaaacgagacccatcttttaacctctcaaagccgggttcaagatgtcataaatgcagctgccagaaataaagagaaaggaagtgtatcagagtctaagaaaagcagaagaggaagagaggctttgaaaagccaccatagtaatcagtaatctgtttgacatctggcaaagagatacatctgcagggggcaactgggatgagtaattgaactttgatttttacattttcactgaatgtctatgtttagcacctaaattttaaacacagaacgatttttggaaatacgctcttctctgagaggttgtttcatgggatacaggaaacatctggagttagatcaagtaagtttcatggctgcccagacaactggtgtgtttgtactgttttgttatggtcctataatgggtagttacaattcatttgagggtcctcctaaatgtatatggctatgccagcatttctcagaatccagccagaaacaagacaaaagctacctcaaaacacatgtcagacaagggaatagaacctaaattgagcacctgcaatagaggactaaattatttaaagttaaaggacaccttccatgtattagaattactwaagaacaagaaataatttgtttcaatatatcttatgatactatgagtaatacttctgtagattgaacttagtctattttcttattccctagcttcagataacctacaacaaattgaatcagaagtcaagataatttgcctaaattgccttaaaatgatccttttaaggtccttattttaatcctgtatgaggcaaatttgctggtttgtaattaggtcccccaattttgtttgacaataaacccagaagtgtatgcaagggtagaaatgaggtaacaatggaaataacaaatatttattaagtacatattttaataatggttacattggcattatagattaggagccttaaaataactcatatccctttgcttagtttgtccaaaatgaattatacacaaagttatttgtcacaacattactaataacaaagaaaaactatagtcatcttaaatatcccaatagaaattgttcaaatcatttttaggattgatatgatgaaatgttacatagctaatataaattatatcttcagaaactaggtaaaataaacagaatacttataatgttaacaataatttcccttcagggggatataaaactgtgtataaaataattttgatattgtatgtgtgaatacatatgtggaggggagctatgtttacaaaagcaggaagattcttctcatagaatgttaccagtatagggtctttttaatatagcctggtggatgtaatgagtaatgagaggggctatggcaaagaaaggagacatttatggatggacaaagaagaaggaaataaatcttttcaggagaatataactcaggaataaatagacagattcgtttatgcagcataaaatttgcaaaaacctacagataaaaaaatgttgtgtgtttaagtgcaacaaattccaaccagacattcagattcatactagttagctagggtatttgaataagaagagattcattaagagaactcaaaatttgcattaattaggaagcattttttattatttggtttattgtaaataacaatatagaaataacaggagcaaaaatgctaatagctaaacttccaacaggtgaggccaagtctcagtgtaagtgctttgaatgaattaacttatttaaaccttaaagcaaccatatgattgtacagaaaagtaaatggataactctcagttaaaaatgcattgatccagtaccatgctgttttggttactgtagccttgtagtatagtttgaagtcaggtagcatgatacctccagctttgttcttttggcttagaattgacttggcattgtgggctcttttttggttccatatgaactttaaagtagttttttccaattctgtaaagaaagtcattggtagcttgatgggtatggcattgaatctataaattaccttaggcagtatggccattttcacgatattgattcttcctacccatgagcatggaatgttcttccatttgtttgtatcctcttttatttcattgagcagtggtctgtagttctccttgaagaggtccktcacgtcccttgtaagttggattcctaggtattttattctctttgaagcaattgtgaatgggagttcagtcatgatttggctctctgtttgtctgctattggtgtataagaatgcttgtgatttttgtacattgattttgtatcctgagactttgctgaaattgcctatcagcttaaggagattttgggctgagatgatggggtttcttagatatacaatcatgtcatctgcaaacagggacaatttgacttcctcttttcctaattgaataccctttatttccttctcctgcctgattgccctggccagaacttccaacactgtgttgaataggagtggtgagagagggcatccctgtcttgtgccagttttcaaagggaatgcttccagtttttgcccattcagtatgatattggctgtgggtttgtcatatatagctcttattatttaacagagatatagaccaatggaacagaacacagctgtcagaaataataccacacatctacaaccatctgatctttgacaaacctgacaaaaacaagaaatggggaaacaattccctatttaatagatggtgctgggaaaactggctagccatatgtagaaacctgaaactggatcccttccttacaccttatacaaaaattaattcaagatggattaaagacttaaatgttagacctaaaaccataaaaaccctagaagaaaacctaggcaataccattcaggacataggcatgggcaaggacttcatgtctaaaacaacagaagcaatggcaacaaaagccaaaattgattgacaaatgggatctaattaaactaaagagcttctgcacagcaaaagaaactaccatcagagtgaacaggcaacctacagaatgggagaagatttttgcaatctactcatctgacaaagagctaatatccagaaaatgatctccaacaaatttagaagaaaaaaacaaccccatcaaaaagtggggaaaggatatgaacagacacttctcaaaagagacgtttatgcagccaaaagacacatgaaaaaatgtttatcatcactggccatcagagaaatgcaaatcaaaaccacaatgagataccatctcacaccagttasaatggcgatcattaaaaagtcaggaaacaacaggtgctggagaggatgtggagaaataggaacacttctacactgttggtgggactgtaaactagttcaaccattgtggaagtcagtgtggcgattcctcagggatctagaactagaaataccatttgacccagccatcccattactgggtatatacccaaaggattataaatcatgctgctataaagacacatgtgcacgtatgtttattgcggcactattcacaatagcaaagacttggaaccaacccaaatgtccaacaatgatagactggattaagaaaatgtggcacatatacaccatggaatactatgcagccacaaaaaggatgagttcctgtcctttgtagggacatggatgaagctggaaaccatcattctcagcaaactatcacaaggacaaaaaaccaaacactgcatgttctcactcataggtgggaattgaacaatgagaacacatggacacaggaaggggaacatcacacaccggggcttgttgtggggtggggggaagggggagggatagcatttggagatatacctaatgttaaatgacaagttactgggttcagcacaccaacatggcacatgtatacatatgtaactcacctgcacaatgtgcacatgtaccctaaaacttaaagtataataaaaaaggaaaaaaatgtattgctccatagatagatagatagatgcatgtgtgcatgcatatgcatgtggtagcattcagctagtaggaaagagagttgagatctagtcaatctgacttcagttgcctactcgtcatcattgacagttatactatatgtattagtccgttctcatgctgctaatgaagacatccccatgatggggtgatttataaaggaaggaggtttaattgactcacagttcagcatagctgggaaggccccagaaatttacagtcatggtggaaggtaaaggggaagcaaggcaccttcttcacaaggtgacaggaaggagaagagcaagcaggagaaatgccagacgcttatgaaaccatccgatctcttgacactcactttttatcaccagaaaagcatgggggaaaccaatcccatgattcaattacttccacctggtcctkcccttgacaagtagggtatatagggattacaattcaaggtgagatttgggtggggacacagagccagaccatatcactacactaacccttcatagttggaagtatttttttctaattaaagatataaatagcatttttaaatctgaatgactaatataaaatatgccyatacttgctaaatgaaggaggttttcttattgattgaaatatcaaaataagattttaaaaataaaatgaaataaaaaagggagaatataagagactcaccattgactttgagtctcttccttcatgtaactcacaggctcccaaagctcttatccaagataggggtgagttacccatcgggactggagaggaaaaggagaaagtgaaaggagatatrtaataagatagaaggggattcaggaactttgcataatattttagataactaactatatgtttttgcatgctgtaaatatcagtgacctggggcaaactcatgttcactttagctttgttgttaaattggtttgtgacattttgatagctgcctggcttattagtgcttctgttattcttgttatccagtcacacagagtctgatgcaattgaccctgttgtaattctcagacttaaaccagagtacacagttttgttttactcttattcttattagggagaaaaataagtcaaggaaaataaagaactgacatggtataaataaaagacactattccttatttcataaattgttaatgattaaaaaataacaaatagagaagtgtcaagtgtcattatatcaccataggatttcaataaattcaagattttatcttcctctctgatctttattagatccacttcaaaatttattcaattattttcctccattctacctatcaagtacctaatctgataaaataattcaaagagcttgaggtgtggcatgctcgttaattcactaagtatttacagagaatctgctatgtgccagacactggaaaaatcctagggcatacagttgtgaaacaaacaaatctgtttttattttcattggatgatarcctaagtttttggatatgagaaggaagcagaaaaattgagtgtttaagaactcaagctctgaaatcagcctgcctagttcaaatccaatctccaacttttaccaacattatactttaggtaacctacttagcctctctataaatattctatgtattcattaagtaggaataatattagctaactcactgggttgtctaagaatacaatttgaggccaggcacagtggctcatgcctgtaatcccagcactttgggaggccgaggcaggaggatcacttgaggctagaagtttgagaccagcctggcaacatggtgaaactccaagaacctgtctactaaaagtacaaaaattagccaggtgtggtgatgcatgcctgtaatctcagctacttgggacgctgaggcatgagaatcacttgaacctgggaggcagaggttgcagtgagccaagtttgcaccactgcactccagcctaggtgacacagcacagtgagactgtctccaaaaaattaaaaaaacaaaaagaaaaaaacaggcctggaatggtggctcacacctgtaattctagcactttgggaggctgaggtgagcagaccccttgagcccaacagttctagattagcctgggcaacacgatgaaaacctgtgatatgatttggctgtgtccctacccaaatcttgaattgtagctcccataattcctacgtgttctgggaaggacccggtgagaggtaattgattcatgggggcggatctttcctgtactgtcctagtgataatgaatacatctcactagatctgatggttttataaaggggagttctcctacacaagctctctcacctgctgccatgtaagacgtgacttggctcctcaatttgccttcagccatgrwtgtgaggccccccaagccrtgtagaactgtgagtaaattgaacttcttttctttataaattaccaagtctcaggtaggtctttattagaagtgtaagaacgaactaatacaccctgtctctactaaaaaataaaagatttagctaggtgtggtggtgcatgtctgtagtcctagctactcaggaggctaaggagggaggatcacttaagcctgggaggtagaggctacagtgagccttgatggcaccactgcactccagcctgagtgacagaatgagaccttatctcaaaaaaaaaagttagattaagaaagtttgcacatgtaaaatacttagaatcatgctttagtattgtgcaaatagtaaatgatccgtaaatgttagttttataacttattacagtgaacatttttaccagggcctccaacttagtcattagaggagataatttggaataaagaccctttgctagtcctccgcaaagctgtctttataaaaaaaacaaaacaaaaccaaaaaaccctggatcctgtgattggaggcaagaagtcctgttgatgtgtggatctgaatagagattttcagaaaaagattgttatcttgtgatgcctgctagtaatactcatctggacattgcagaattgtggagagaaatacaaattatggatcacagacagagattttagccaagctctaaagaacagcttaccattatcaactgcttagtttgaaatagttactcttaaaagcacttcatggcaattaaattgtttcatactcacaatatggccctggtagttttagtattttaaacattttgtggaagttgtcagagtcaaaataaattcacttgtgttaacagcaatacaaaacaaaaacccaaaaaacagagccagagaaggccatgaaggattawcatgcatgaatgcctagtaacaaaaacaatcacaaaagactacaaaaaccacaaccttgcacaaaggccatcactaccttacacaccaaaaaactgctcagcaactgctagtccaactttggactgatgccacctttttttttgttccttgccaccaaggataattatctcaaaacaattaggtaatactctatttttcctgaaaaaacctttgttttcctttacctccctgaatacacacatagtttactatgacaccagtgttcccattgtaacacctattcccaaataaacaacattttctttgagaaattctcgctcttcattatttagatcaatgatttcataaattagagaatgcaggcataaagaagtaaaaggaattacttaagttctcacagatagaggcagaaccaggcttctaacttagagagatggaaccaggctttaacacctagattctgctgcttctctttgcttgccagtccaattaaaatcaataaaaatccagaaaaatgtatgtaccatcatgctctcatagagatgttagatgctgaaaaatatgaatcacattccttatgtagaaaacataaaactgctattctgaaaagaaagctaagacattataatacatttatgcaatatccagaagaaaaatttgagaacaggagaaagacatttcacattctgaagagataaattccaaattgttaacagataataggtaatcacaaatgaaaaggtatgagaataagtgctcactaaatgaaatactgatattgcattgctacagtgtggatcactttggttgtttcactgatagaaaactggattttagaactctcttggatttttaggctaatcatttatctaaagtacagacatagtctggattgataattaaaaaacagagacattcgaactttaatataagcaagaactatataatgaccatatttatccaaatcctggttagtgtctgggagttaatgagccaaagtttctaagagtatgcaagctaggctagatgaccctttgataagagtattacagacctagagstggatagactgtttagccaactaacctgtagattgccttataaaccagaaagtcagggaaataattaatttcctcattcatcaaacctctattgagtatctatgtattcagttctatattttccttagtagaaaaataagacgtggccctttttggaagatcatgccatcattataaatacaatatctagtgacactaaaatttttctccctgatttgtgcatacccttaaacatctaacaaaaacaaataaattattgtgttaacttttgtttttagcagagttaggtgggaggagataagtttcacagaaattaaatgagtctagttcaaaatagaaaaaaaaaactatgaatccttaaagatatgaactcaatgccagcggaaaaagagaagaaaatgtattaagaatgtgacatccacaattctgctgccaaacacgtgtgtgcatgaaggagggcacagacactctcacctgggcctgaggactgaggctgctatctaaaacagggatccatctgcctgtgaacaatgtcatcccactgtgtttctctgacacttcattgactgtgtaatggcatttgatatcgctaaaacctggttgttgtggaagcactggtgcattacagcagagagatgcattgtgtatgatgagtcatgccccacaaatttgtgctcagtctctgtacggtaagaaaaaamataacaagatcaagtaacagagaactggggagggagaaagttctcattgcaggcacaagtacaccgccactttgtgcaaggtaaagagggcttacacacactcagttttccacagagttctagtaactttcaatagtacaaatcctggatccgatgttagtcgartaataattccaatggaggaaaaaatacttttcatctgtgagtcgcttttcagaagggataatgtctaaaccttgttagcctcttcctggttaccctgaggtttggatgtttgccaagaaggaagtagaagaataaacatgaccaaggcaaagagttcgatgagaaaccctcagaatttttggagagagaagaggaaaaacaatctgaaacatgagtatatccagaaaatcagttcatttatgtaacccaagatgattggcagatattttctggctttcatgagtcaatcctcaaacaagaaaatggacacacctcaagggaaaaaaaaatccttgaaagaaaatgtatatgtgaccttctttaccctcccattatttttaaagggaaaaaccattacctgagaccactgtcatggtttgacaaagcaaatctgcttaacactcttcaaattctgttttctatagagtgagataccagcatctttccaggacatctgtgaatcctctaagatctggccccagcctcttttccgtacttctttccttccaaaatttccttccatctcccctacacttcagccatatccctctatgcagggtgctcaaaggagccttttcacattttctcctttggcacatgctcacctctgaatggcatgccttccacacctcacscacttggcaaaatcttctcttctctcaaagcacaactcgaatagtccctctttatggaaagacatccatgggcagcacctactccatttcactttatcgcgcactccacttttttcaccatttaataaaagcaaagctttttttgcatttactttggaccagtcaaaattacaagacccttttaatatattaactcacttaatcctagcaacaaccctatggaggaggtactaacagtatctccattttacaggtaaggagactgaggcacagagagtataaataattttccaaaaattgcatcacatgtacaaaatagagctggaatttgaactcagtatatgctgactaactagttctttggtttatatcccagtcatatattccatcatacttgatttcaaatatttgttgactattgtctgtagttaagtgtgagtgtcttgagggcagggtctgagctacattatgtgtatgttgaacatcttttgcagagactgcagatagcaggtactggataataaataatcagtaaaccagcaaagcaagcaagagtagaaggagtattatataggttttgaagtaaataattaaagatgacaaatcaccctagaaatarcattttctgatttgaaaactgttccaattttgggtttgtgcatgcatttttcccaagtaaggcagagggcatggtaaatgacataacagaattaaggagggagcaaagagaaatggaaaatagtgatgatctaagaagagtagggagagactcccagattcagagaaagactgaattcagaacacactgctagcctggagaagacagagagtatcccagcgctggctacaagctcatctctgtctgatgttaggctctgataaccacaggtttcaggcaaagggaagtactgggagggttttgtttgaatgagctgatttgcaggtagtccatagtcgtttggattgaaggagaagaccaatgattctctcccttgggggaggcaaggaaaccttgatgactacgtcaggcctctgcctggccatgaggactagatccaagccataaggagaggaggctccaatagtccttttacagaggacactttaagatacttaatacaaatatatgctgcttcagggcaggggtgataaccactcaaatggacagaagactattctccccatttagttgaaaattagagttttacatctgccatttaagacctgcaggacattggcaatgtgtgcattggaggcactggcaaygtcctcgtgtttccctgaagaagaacytttcagcagcaattgtaccctctgtaggaagggatatttcaagagtgtctctgtttcttcatcaccccctttcttgcaagtcttccttattaaaaggctgttatctgctggataggaatggtgagagcctggcatcacttggtttgtgtttaccactatgtacaatttctataccacaaacgcagtgggccacaccttcctgtgtattctttgtttttccgtgtgtgtgtgtgtgtgtgtgtgtktgtgtgtgtgtgtgtgtcttgaactgcacattcttagtgaaaaatgtggtcattttgaagtcattttccatgtgttaagcagactgaccatggcttcctgctggtctgctctctctgttcaaacttctccacttaaagttcaatgcataataacatcagtctttcattgggggatccagtattttaaataacagaatgatggatgggaccaccgcttcagccttgcrtgaaaactgcatgtttcaatcaaagtattaacaagttcatgatgtgtttcctgtttggcccctcatgggtattctccctgtagaatagaacctggaaggagggagggtggtcccgtggcatatgggaagccacaaggaacatcagcygagagcacgtctgtaacagtgtgctgggccttcacatccacactgcagtgagtgttcacaagggagctgcagcaaggaagggaactaagtacagaaactctgggaggtgcgcctgatgacagacacgttcacaagctcatgaactggactctcaaacacaagtgagaagactttgctgggaactatgtgagcaagcaagggccaaagtcagcaatatatgggttcagtactgaaattaatatctcataaatagccaaagactggtcaggcctggagaaatgcagagtacgtgaaagtcagaagcgagctgagaacagagttcatggctagtactctaagctgttctattccttcagtgtgattaacttgctatgygaaaagggggccctgtgtaaagtgaccttgaggtctcttggaaagagtgtggattttggagacagagctctgactttaaatagcatgtctcctattaaaagtgatgtgatcagacgtaaatcccttaaattctctgagcctctctttcctagagagtatttgagctgcgtcatcactctctgccttcaatgaccatgctagtaaacatgataaaggtaaacactttttgataagaaattataataaatagaaaatctactaaacttgaatctttattttgattctcttagaaatcatttcaatatcacataatactactagctcagatcacagacttcagggaaaacattaacaaaaaatcctgaatgaaggaaaaatgatttggggagaattaccgctgggctacttttaagttrtgaaactggggtgaagttagacaaactctctgaaactcagttctctcatctgtaacatcagacaaataatgcatatattaaaatcttgaatttcatgacctagcctcatctcagcaaaaaattagcaataactttgtgtagctcaagccttaatttctgcttctgaatgaaggggatagaaatatccaaaggcaacatctagttatagcatttgataggatcaagaataaagatttttcttttctgcaagtgatttaatctggtttacccagtgggaaagctctaaaggctatcattttgttttccttagttgaagctattaactgtaattgcttttgttaataatactttacttattataatcaaagttcaatttttgcacttataccctggggccagtttgcagaggcacaatttataaatggatgaaaaacaattaataacaacragaaaaaccattaatgatcctatcaacaaagtgctacgtaatctccaattgcaaaatcttgcacaacatataaaatagaacacacaacctcagctagtgctgtgggctttcccagtaatgaccagagtatttcaatagcagaaaaataatgcctctgagggcacgctcctcctgggcttaacaggggatgtttctattaatctactgaaggtcagatgcagcctattatagttcctgtggggtgtgagccttcaaagagctaaactacaataatttaaaaagaaaaatattccatcatctctcctccaaagcaatcccctgctataaccaccaagacattatatgatcaggctactacctccctctcacaccagcccagccccttgccccttaaatgcccccttaactctaaactccagctttattcctgaaaaaagctgaatgttttttgcctagagcattttattgactttcccctttgctgggaataacttccatggatgccttcttcttatatttaaatctcagccctaagataggtctcaggtctcccactaaccccacttcgaatgttgctgtcaaaagccccagtctttttttgttgttgttgttgttgtttgttgttgctgttgtttgtttgatttttaattatactttaaggtttagggtttgtttatcatatcactatttgaaattaatggattcagtgtctggtttgtcttgctcactactgtattcccagtcccttgaacagggtcagaatcatagtaagttctcaataaatatgtgttgaatgagtggtctagttgatgaattaatgaattcccactggctgctggacaaaacaaataattagttactcatgccatttttctctctgaacagcagttaccaatgactnnnnnnnnnnnnnnnnnnnnnnnnnnnnnnnnnnnnnnnnnnnnnnnnnnnnnnnnnnnnnnnnnnnnnnnnnnnnnnnnnnnnnnnnnnnnnnnnnnnnnnnnnnnnnnnnnnnnnnnnnnnnnnnnnnnnnnnnnnnnnnnnnnnnnnnnnnnnnnnnnnnnnnnnnnnnnnnnnnnnnnnnnnnnnnnnnnnnnnnnnnnnnnnnnnnnnnnnnnnnnnnnnnnnnnnnnnnnnnnnnnnnnnnnnnnnnnnnnnnnnnnnnnnnnnnnnnnnnnnnnnnnnnnnnnnnnnnnnnnnnnnnnnnnnnnnnnnnnnnnnnnnnnnnnnnnnnnnnnnnnnnnnnnnnnnnnnnnnnnnnnnnnnnnnnnnnnnnnnnnnnnnnnnnnnnnnnnnnnnnnnnnnnnnnnnnnnnnnnnnnnnnnnnnnnnnnnnnnnnnnnnnnnnnnnnnnnnnnnnnnnnnnnnnnnnnnnnnnnnnnnnnnnnnnnnnnnnnnnnnnnnnnnnnnnnnnnnnnnnnnnnnnnnnnnnnnnnnnnnnnnnnnnnnnnnnnnnnnnnnnnnnnnnnnnnnnnnnnnnnnnnnnnnnnnnnnnnnnnnnnnnnnnnnnnnnnnnnnnnnnnnnnnnnnnnnnnnnnnnnnnnnnnnnnnnnnnnnnnnnnnnnnnnnnnnnnnnnnnnnnnnnnnnnnnnnnnnnnnnnnnnnnnnnnnnnnnnnnnnnnnnnnnnnnnnnnnnnnnnnnnnnnnnnnnnnnnnnnnnnnnnnnnnnnnnnnnnnnnnnnnnnnnnnnnnnnnnnnnnnnnnnnnnnnnnnnnnnnnnnnnnnnnnnnnnnnnnnnnnnnnnnnnnnnnnnnnnnnnnnnnnnnnnnnnnnnnnnnnnnnnnnnnnnnnnnnnnnnnnnnnnnnnnnnnnnnnnnnnnnnnnnnnnnnnnnnnnnnnnnnnnnnnnnnnnnnnnnnnnnnnnnnnnnnnnnnnnnnnnnnnnnnnnnnnnnnnnnnnnnnnnnnnnnnnnnnnnnnnnnnnnnnnnnnnnnnnnnnnnnnnnnnnnnnnnnnnnnnnnnnnnnnnnnnnnnnnnnnnnnnnnnnnnnnnnnnnnnnnnnnnnnnnnnnnnnnnnnnnnnnnnnnnnnnnnnnnnnnnnnnnnnnnnnnnnnnnnnnnnnnnnnnnnnnnnnnnnnnnnnnnnnnnnnnnnnnnnnnnnnnnnnnnnnnnnnnnnnnnnnnnnnnnnnnnnnnnnnnnnnnnnnnnnnnnnnnnnnnnnnnnnnnnnnnnnnnnnnnnnnnnnnnnnnnnnnnnnnnnnnnnnnnntatacttcaagccttagcttaggcattaatccctttgtgaaatttttaaggtctcacatattataagccaagtagaaccctaatctacatatccagaacttcttatacattatttcattcaacaaactttttttttcagaacctacatgtactggggtgctctggtgtttgtttgtttgtttgtttgttttgagacagagtcttactctgtcaccaggatggaatgcagtggtgcgttctcggcttactgcaatctccacctcctgggttcaagcaattgcctgccacagcctcctgartagctgggattaygggtgcgcaccaccacatccagctaatttttttgtattttagtagagatggggtttcaccatgttggccaggatggtcttgatcttctgaccttgtgatctgcctgccttggcctcccaaagtgctgggattacaggcatgagccactgtgcctggcctctggggtggtcttttagacatcagttacatggtaatgaagcacaacaacagggatcaaaacaggcaaaaatttttatcttcagaaatctacattatgataggagaaaaagacaataaagtagaaagataaataagataaaaaatgttttgcatagtttctgagcagaaaggtaaaacaaggtacagagatagatgtcccagggagatataattttatttagagtgtcctggaaggtctcagtgattaaggtggcattacagtaaagaccagaaggcagtgaagggtgggcgctgcatatccctgtcttatcaccaactacgtcacagtaatgtcacaaaaggaataatgcctaagctaaggcttgaagtgtaagtaagtgggtctatgatgggatggcatgtacagtcacaagcagcccagcaccagtgacccatggtgatattgtaacatgaagtcatacttggtcctatttttggatacttgttccacatctgggtttatgacaaaagcaagtagataaattaatgacttctttccagtcagatactcaataaaatattgaaagaagaagaagaagaaaggccttcctggttctttttccacaatcatttaagttcaacttaagttctccaaaggagagggtcgtatctactcataatgttatccctggagcttagcttagggtagagaatgtactttgtgttcaacacatatttgcgaactcctctgctgttctgctggtcacagccatattacccttcaggggccaggccctgtctcatatttgtgtactgtggaagttgcatacaccagagtaaagtcacattttttcagacccagccaaaatagggcaaggaaagctggaaggagaggaggtccttatttacatgtaggagatatgaactgtttccaaggactttctaaaaacccttcatgcatctcctgctttgataaattttatcattagacattcttaggacagcactgattcagatcagaagttttcagaacacttgcccagtaagggcgtctccaccaataaacaggtcacaactctggctttgaacctctgatgaactctgtttctaagccacttatgtaaattgctattttaaaattaaactcccctttacccttttctcgctgaatacactagtggtttgcaatcccatgcattccagattataatccttatttcttttccagaataaacccaacatatttagagataattttctctagtgtcttttttttcaaggctgacagtaatttccagctatgcccactgccagcgtttctcatctcttgccgaacacatctggattcctcatcactgagttccactcactttcttgagacaactatccagaacagcattaaggaattgaatagccaggttgccaatctataatggggtacaaaaaatgtctgaaaatgtaacttgatagagaaaatctccaattcattttcatttgtatggtraggcagatgaattttataagctgtaaagaggtgagggttatatcctcaacggtcatacttcctaatgcttgatcatcatcataccacgtattagtccatttgggcttttataacaaaagatcataaactgggtggcttaagcaataggcttytatttctcacagtctggaaggtggaaagtccaagatcatggctctggcaggtctctgtatctggtgaaggctttctttctctcttggagactactagcttctccctgtatcctgaaatggctgaagggagagagagasagactctattttctcttcttctttttataagaacactaatctcattatgagagcccaactctcrtkactttatttaaacataattatcttccaaaggccctatctccaaataccattaccttgggggctagggcttgaactacatrtagattctgagcaggtgcaaacattcaattcctaataaacttccttgtgcacagaagtgtaaatgagaataattataagatgcatcacttctaaactttcctgaatgtaaaatgagcaaaaattaaatatgtaaaactcgtagcatggctcaactgggcaatatttattacccaattctgaggctttgaactcaaggctttatttattatttactttagacagtaaaagaagtctcacacaggtggactcacacggaaaataatgttcatcagtcattattgtcataataatgctgctttaccaactactatcaaatattaaaggcattcacaataagcagtgatttctcattcacacatcagtggtcagttggagttcagttaatctaaactggtcttcactgcacttgactctgactgtgggtcataacagtggttatcctaggtatgttcacaggaaaaagcaggagcacatgagggtaagggcatttcaagttctgccaacacgtctgccattatccaatcctttgtgaaattgtgaattgtccaaatcagttgattccaaagaaaggggcagggaggtaaactctactcattgaaaaaccattgcaagggtatgcatatgtaataatactccaggaaaatgaagaactgggatttataatccaacytaccacacattccattgcatttgaaagcgttattcgaagagctgcaatgcttatgttcaatagttaaggactattaaaaactaaatataattcataannnnnnnnnnnnnnnnnnnnnnnnnnnnnnnnnnnnnnnnnnnnnnnnnnnnnnnnnnnnnnnnnnnnnnnnnnnnnnnnnnnnnnnnnnnnnnnnnnnnnnnnnnnnnnnnnnnnnnnnnnnnnnnnnnnnnnnnnnnnnnnnnnnnnnnnnnnnnnnnnnnnnnnnnnnnnnnnnnnnnnnnnnnnnnnnnnnnnnnnnnnnnnnnnnnnnnnnnnnnnnnnnnnnnnnnnnnnnnnnnnnnnnnnnnnnnnnnnnnnnnnnnnnnnnnnnnnnnnnnnnnnnnnnnnnnnnnnnnnnnnnnnnnnnnnnnnnnnnnnnnnnnnnnnnnnnnnnnnnnnnnnnnnnnnnnnnnnnnnnnnnnnnnnnnnnnnnnnnnnnnnnnnnnnnnnnnnnnnnnnnnnnnnnnnnnnnnnnnnnnnnnnnnnnnnnnnnnnnnnnnnnnnnnnnnnnnnnnnnnnnnnnnnnnnnnnnnnnnnnnnnnnnnnnnnnnnnnnnnnnnnnnnnnnnnnnnnnnnnnnnnnnnnnnnnnnnnnnnnnnnnnnnnnnnnnnnnnnnnnnnnnnnnnnnnnnnnnnnnnnnnnnnnnnnnnnnnnnnnnnnnnnnnnnnnnnnnnnnnnnnnnnnnnnnnnnnnnnnnnnnnnnnnnnnnnnnnnnnnnnnnnnnnnnnnnnnnnnnnnnnnnnnnnnnnnnnnnnnnnnnnnnnnnnnnnnnnnnnnnnnnnnnnnnnnnnnnnnnnnnnnnnnnnnnnnnnnnnnnnnnnnnnnnnnnnnnnnnnnnnnnnnnnnnnnnnnnnnnnnnnnnnnnnnnnnnnnnnnnnnnnnnnnnnnnnnnnnnnnnnnnnnnnnnnnnnnnnnnnnnnnnnnnnnnnnnnnnnnnnnnnnnnnnnnnnnnnnnnnnnnnnnnnnnnnnnnnnnnnnnnnnnnnnnnnnnnnnnnnnnnnnnnnnnnnnnnnnnnnnnnnnnnnnnnnnnnnnnnnnnnnnnnnnnnnnnnnnnnnnnnnnnnnnnnnnnnnnnnnnnnnnnnnnnnnnnnnnnnnnnnnnnnnnnnnnnnnnnnnnnnnnnnnnnnnnnnnnnnnnnnnnnnnnnnnnnnnnnnnnnnnnnnnnnnnnnnnnnnnnnnnnnnnnnnnnnnnnnnnnnnnnnnnnnnnnnnnnnnnnnnnnnnnnnnnnnnnnnnnnnnnnnnnnnnnnnnnnnnnnnnnnnnnnnnnnnnnnnnnnnnnnnnnnnnnnnnnnnnnnnnnnnnnnnnnnnnnnnnnnnnnnnnnnnnnnnnnnnnnnnnnnnnnnnnnnnnnnnnnnnnnnnnnnnnnnnnnnnnnnnnnnnnnnnnnnnnnnnnnnnnnnnnnnnnnnnnnnnnnnnnnnnnnnnnnnnnnnnnnnnnnnnnnnnnnnnnnnnnnnnnnnnnnnnnnnnnnnnnnnnnnnnnnnnnnnnnnnnnnnnnnnnnnnnnnnnnnnnnnnnnnnnnnnnnnnnnnnnnnnnnnnnnnnnnnnnnnnnnnnnnnnnnnnnnnnnnnnnnnnnnnnnnnnnnnnnnnnnnnnnnnnnnnnnnnnnnnnnnnnnnnnnnnnnnnnnnnnnnnnnnnnnnnnnnnnnnnnnnnnnnnnnnnnnnnnnnnnnnnnnnnnnnnnnnnnnnnnnnnnnnnnnnnnnnnnnnnnnnnnnnnnnnnnnnnnnnnnnnnnnnnnnnnnnnnnnnnnnnnnnnnnnnnnnnnnnnnnnnnnnnnnnnnnnnnnnnnnnnnnnnnnnnnnnnnnnnnnnnnnnnnnnnnnnnnnnnnnnnnnnnnnnnnnnnnnnnnnnnnnnnnnnnnnnnnnnnnnnnnnnnnnnnnnnnnnnnnnnnnnnnnnnnnnnnnnnnnnnnnnnnnnnnnnnnnnnnnnnnnnnnnnnnnnnnnnnnnnnnnnnnnnnnnnnnnnnnnnnnnnnnnnnnnnnnnnnnnnnnnnnnnnnnnnnnnnnnnnnnnnnnnnnnnnnnnnnnnnnnnnnnnnnnnnnnnnnnnnnnnnnnnnnnnnnnnnnnnnnnnnnnnnnnnnnnnnnnnnnnnnnnnnnnnnnnnnnnnnnnnnnnnnnnnnnnnnnnnnnnnnnnnnnnnnnnnnnnnnnnnnnnnnnnnnnnnnnnnnnnnnnnnnnnnnnnnnnnnnnnnnnnnnnnnnnnnnnnnnnnnnnnnnnnnnnnnnnnnnnnnnnnnnnnnnnnnnnnnnnnnnnnnnnnnnnnnnnnnnnnnnnnnnnnnnnnnnnnnnnnnnnnnnnnnnnnnnnnnnnnnnnnnnnnnnnnnnnnnnnnnnnnnnnnnnnnnnnnnnnnnnnnnnnnnnnnnnnnnnnnnnnnnnnnnnnnnnnnnnnnnnnnnnnnnnnnnnnnnnnnnnnnnnnnnnnnnnnnnnnnnnnnnnnnnnnnnnnnnnnnnnnnnnnnnnnnnnnnnnnnnnnnnnnnnnnnnnnnnnnnnnnnnnnnnnnnnnnnnnnnnnnnnnnnnnnnnnnnnnnnnnnnnnnnnnnnnnnnnnnnnnnnnnnnnnnnnnnnnnnnnnnnnnnnnnnnnnnnnnnnnnnnnnnnnnnnnnnnnnnnnnnnnnnnnnnnnnnnnnnnnnnnnnnnnnnnnnnnnnnnnnnnnnnnnnnnnnnnnnnnnnnnnnnnnnnnnnnnnnnnnnnnnnnnnnnnnnnnnnnnnnnnnnnnnnnnnnnnnnnnnnnnnnnnnnnnnnnnnnnnnnnnnnnnnnnnnnnnnnnnnnnnnnnnnnnnnnnnnnnnnnnnnnnnnnnnnnnnnnnnnnnnnnnnnnnnnnnnnnnnnnnnnnnnnnnnnnnnnnnnnnnnnnnnnnnnnnnnnnnnnnnnnnnnnnnnnnnnnnnnnnnnnnnnnnnnnnnnnnnnnnnnnnnnnnnnnnnnnnnnnnnnnnnnnnnnnnnnnnnnnnnnnnnnnnnnnnnnnnnnnnnnnnnnnnnnnnnnnnnnnnnnnnnnnnnnnnnnnnnnnnnnnnnnnnnnnnnnnnnnnnnnnnnnnnnnnnnnnnnnnnnnnnnnnnnnnnnnnnnnnnnnnnnnnnnnnnnnnnnnnnnnnnnnnnnnnnnnnnnnnnnnnnnnnnnnnnnnnnnnnnnnnnnnnnnnnnnnnnnnnnnnnnnnnnnnnnnnnnnnnnnnnnnnnnnnnnnnnnnnnnnnnnnnnnnnnnnnnnnnnnnnnnnnnnnnnnnnnnnnnnnnnnnnnnnnnnnnnnnnnnnnnnnnnnnnnnnnnnnnnnnnnnnnnnnnnnnnnnnnnnnnnnnnnnnnnnnnnnnnnnnnnnnnnnnnnnnnnnnnnnnnnnnnnnnnnnnnnnnnnnnnnnnnnnnnnnnnnnnnnnnnnnnnnnnnnnnnnnnnnnnnnnnnnnnnnnnnnnnnnnnnnnnnnnnnnnnnnnnnnnnnnnnnnnnnnnnnnnnnnnnnnnnnnnnnnnnnnnnnnnnnnnnnnnnnnnnnnnnnnnnnnnnnnnnnnnnnnnnnnnnnnnnnnnnnnnnnnnnnnnnnnnnnnnnnnnnnnnnnnnnnnnnnnnnnnnnnnnnnnnnnnnnnnnnnnnnnnnnnnnnnnnnnnnnnnnnnnnnnnnnnnnnnnnnnnnnnnnnnnnnnnnnnnnnnnnnnnnnnnnnnnnnnnnnnnnnnnnnnnnnnnnnnnnnnnnnnnnnnnnnnnnnnnnnnnnnnnnnnnnnnnnnnnnnnnnnnnnnnnnnnnnnnnnnnnnnnnnnnnnnnnnnnnnnnnnnnnnnnnnnnnnnnnnnnnnnnnnnnnnnnnnnnnnnnnnnnnnnnnnnnnnnnnnnnnnnnnnnnnnnnnnnnnnnnnnnnnnnnnnnnnnnnnnnnnnnnnnnnnnnnnnnnnnnnnnnnnnnnnnnnnnnnnnnnnnnnnnnnnnnnnnnnnnnnnnnnnnnnnnnnnnnnnnnnnnnnnnnnnnnnnnnnnnnnnnnnnnnnnnnnnnnnnnnnnnnnnnnnnnnnnnnnnnnnnnnnnnnnnnnnnnnnnnnnnnnnnnnnnnnnnnnnnnnnnnnnnnnnnnnnnnnnnnnnnnnnnnnnnnnnnnnnnnnnnnnnnnnnnnnnnnnnnnnnnnnnnnnnnnnnnnnnnnnnnnnnnnnnnnnnnnnnnnnnnnnnnnnnnnnnnnnnnnnnnnnnnnnnnnnnnnnnnnnnnnnnnnnnnnnnnnnnnnnnnnnnnnnnnnnnnnnnnnnnnnnnnnnnnnnnnnnnnnnnnnnnnnnnnnnnnnnnnnnnnnnnnnnnnnnnnnnnnnnnnnnnnnnnnnnnnnnnnnnnnnnnnnnnnnnnnnnnnnnnnnnnnnnnnnnnnnnnnnnnnnnnnnnnnnnnnnnnnnnnnnnnnnnnnnnnnnnnnnnnnnnnnnnnnnnnnnnnnnnnnnnnnnnnnnnnnnnnnnnnnnnnnnnnnnnnnnnnnnnnnnnnnnnnnnnnnnnnnnnnnnnnnnnnnnnnnnnnnnnnnnnnnnnnnnnnnnnnnnnnnnnnnnnnnnnnnnnnnnnnnnnnnnnnnnnnnnnnnnnnnnnnnnnnnnnnnnnnnnnnnnnnnnnnnnnnnnnnnnnnnnnnnnnnnnnnnnnnnnnnnnnnnnnnnnnnnnnnnnnnnnnnnnnnnnnnnnnnnnnnnnnnnnnnnnnnnnnnnnnnnnnnnnnnnnnnnnnnnnnnnnnnnnnnnnnnnnnnnnnnnnnnnnnnnnnnnnnnnnnnnnnnnnnnnnnnnnnnnnnnnnnnnnnnnnnnnnnnnnnnnnnnnnnnnnnnnnnnnnnnnnnnnnnnnnnnnnnnnnnnnnnnnnnnnnnnnnnnnnnnnnnnnnnnnnnnnnnnnnnnnnnnnnnnnnnnnnnnnnnnnnnnnnnnnnnnnnnnnnnnnnnnnnnnnnnnnnnnnnnnnnnnnnnnnnnnnnnnnnnnnnnnnnnnnnnnnnnnnnnnnnnnnnnnnnnnnnnnnnnnnnnnnnnnnnnnnnnnnnnnnnnnnnnnnnnnnnnnnnnnnnnnnnnnnnnnnnnnnnnnnnnnnnnnnnnnnnnnnnnnnnnnnnnnnnnnnnnnnnnnnnnnnnnnnnnnnnnnnnnnnnnnnnnnnnnnnnnnnnnnnnnnnnnnnnnnnnnnnnnnnnnnnnnnnnnnnnnnnnnnnnnnnnnnnnnnnnnnnnnnnnnnnnnnnnnnnnnnnnnnnnnnnnnnnnnnnnnnnnnnnnnnnnnnnnnnnnnnnnnnnnnnnnnnnnnnnnnnnnnnnnnnnnnnnnnnnnnnnnnnnnnnnnnnnnnnnnnnnnnnnnnnnnnnnnnnnnnnnnnnnnnnnnnnnnnnnnnnnnnnnnnnnnnnnnnnnnnnnnnnnnnnnnnnnnnnnnnnnnnnnnnnnnnnnnnnnnnnnnnnnnnnnnnnnnnnnnnnnnnnnnnnnnnnnnnnnnnnnnnnnnnnnnnnnnnnnnnnnnnnnnnnnnnnnnnnnnnnnnnnnnnnnnnnnnnnnnnnnnnnnnnnnnnnnnnnnnnnnnnnnnnnnnnnnnnnnnnnnnnnnnnnnnnnnnnnnnnnnnnnnnnnnnnnnnnnnnnnnnnnnnnnnnnnnnnnnnnnnnnnnnnnnnnnnnnnnnnnnnnnnnnnnnnnnnnnnnnnnnnnnnnnnnnnnnnnnnnnnnnnnnnnnnnnnnnnnnnnnnnnnnnnnnnnnnnnnnnnnnnnnnnnnnnnnnnnnnnnnnnnnnnnnnnnnnnnnnnnnnnnnnnnnnnnnnnnnnnnnnnnnnnnnnnnnnnnnnnnnnnnnnnnnnnnnnnnnnnnnnnnnnnnnnnnnnnnnnnnnnnnnnnnnnnnnnnnnnnnnnnnnnnnnnnnnnnnnnnnnnnnnnnnnnnnnnnnnnnnnnnnnnnnnnnnnnnnnnnnnnnnnnnnnnnnnnnnnnnnnnnnnnnnnnnnnnnnnnnnnnnnnnnnnnnnnnnnnnnnnnnnnnnnnnnnnnnnnnnnnnnnnnnnnnnnnnnnnnnnnnnnnnnnnnnnnnnnnnnnnnnnnnnnnnnnnnnnnnnnnnnnnnnnnnnnnnnnnnnnnnnnnnnnnnnnnnnnnnnnnnnnnnnnnnnnnnnnnnnnnnnnnnnnnnnnnnnnnnnnnnnnnnnnnnnnnnnnnnnnnnnnnnnnnnnnnnnnnnnnnnnnnnnnnnnnnnnnnnnnnnnnnnnnnnnnnnnnnnnnnnnnnnnnnnnnnnnnnnnnnnnnnnnnnnnnnnnnnnnnnnnnnnnnnnnnnnnnnnnnnnnnnnnnnnnnnnnnnnnnnnnnnnnnnnnnnnnnnnnnnnnnnnnnnnnnnnnnnnnnnnnnnnnnnnnnnnnnnnnnnnnnnnnnnnnnnnnnnnnnnnnnnnnnnnnnnnnnnnnnnnnnnnnnnnnnnnnnnnnnnnnnnnnnnnnnnnnnnnnnnnnnnnnnnnnnnnnnnnnnnnnnnnnnnnnnnnnnnnnnnnnnnnnnnnnnnnnnnnnnnnnnnnnnnnnnnnnnnnnnnnnnnnnnnnnnnnnnnnnnnnnnnnnnnnnnnnnnnnnnnnnnnnnnnnnnnnnnnnnnnnnnnnnnnnnnnnnnnnnnnnnnnnnnnnnnnnnnnnnnnnnnnnnnnnnnnnnnnnnnnnnnnnnnnnnnnnnnnnnnnnnnnnnnnnnnnnnnnnnnnnnnnnnnnnnnnnnnnnnnnnnnnnnnnnnnnnnnnnnnnnnnnnnnnnnnnnnnnnnnnnnnnnnnnnnnnnnnnnnnnnnnnnnnnnnnnnnnnnnnnnnnnnnnnnnnnnnnnnnnnnnnnnnnnnnnnnnnnnnnnnnnnnnnnnnnnnnnnnnnnnnnnnnnnnnnnnnnnnnnnnnnnnnnnnnnnnnnnnnnnnnnnnnnnnnnnnnnnnnnnnnnnnnnnnnnnnnnnnnnnnnnnnnnnnnnnnnnnnnnnnnnnnnnnnnnnnnnnnnnnnnnnnnnnnnnnnnnnnnnnnnnnnnnnnnnnnnnnnnnnnnnnnnnnnnnnnnnnnnnnnnnnnnnnnnnnnnnnnnnnnnnnnnnnnnnnnnnnnnnnnnnnnnnnnnnnnnnnnnnnnnnnnnnnnnnnnnnnnnnnnnnnnnnnnnnnnnnnnnnnnnnnnnnnnnnnnnnnnnnnnnnnnnnnnnnnnnnnnnnnnnnnnnnnnnnnnnnnnnnnnnnnnnnnnnnnnnnnnnnnnnnnnnnnnnnnnnnnnnnnnnnnnnnnnnnnnnnnnnnnnnnnnnnnnnnnnnnnnnnnnnnnnnnnnnnnnnnnnnnnnnnnnnnnnnnnnnnnnnnnnnnnnnnnnnnnnnnnnnnnnnnnnnnnnnnnnnnnnnnnnnnnnnnnnnnnnnnnnnnnnnnnnnnnnnnnnnnnnnnnnnnnnnnnnnnnnnnnnnnnnnnnnnnnnnnnnnnnnnnnnnnnnnnnnnnnnnnnnnnnnnnnnnnnnnnnnnnnnnnnnnnnnnnnnnnnnnnnnnnnnnnnnnnnnnnnnnnnnnnnnnnnnnnnnnnnnnnnnnnnnnnnnnnnnnnnnnnnnnnnnnnnnnnnnnnnnnnnnnnnnnnnnnnnnnnnnnnnnnnnnnnnnnnnnnnnnnnnnnnnnnnnnnnnnnnnnnnnnnnnnnnnnnnnnnnnnnnnnnnnnnnnnnnnnnnnnnnnnnnnnnnnnnnnnnnnnnnnnnnnnnnnnnnnnnnnnnnnnnnnnnnnnnnnnnnnnnnnnnnnnnnnnnnnnnnnnnnnnnnnnnnnnnnnnnnnnnnnnnnnnnnnnnnnnnnnnnnnnnaccaagaaagagtatgcttaaaaactgtttataattgaatttgaaaaacagtattgtgtacgaaaactgcaataataaaatatagggccaaagagtgggttgcagagagataacaagaattctgatttctaaaactgggtttcagcactagaaatctcaatgaaatttgtaagtagcaacaataaatcattctttattcacataaatttgaatggattaaacaaagttaagcaggtcttttcagtgtaggattttttaggcttcactaggctaatgaaccttaagctttttaagtaaaggataacatgtctatctcagttacctattgctcaataacgacctatttcaaaacaatggctttaaataacactgtactacttctcataactctgtgtgctggctgctgttctgggcttaactcatgcacctgcttttggatggtggatgggctggaggctgagctcacctagatgcctgggtttctttccgcaagtagggttttttgtttgtttttgttttcttttccacatgtagggtttctttgtttgtttttgttttcttcttgttgttgctgttcttgtgttttccttttgtttgtttgatttattagatttcttcacatgatggcagaagtattccaaaacaaatgagagtagaaggcccatggtttcttgagatccaggccctgatgtcacatggcatcacttctgccacactgtattggtcaaaataagtcacaaggtcagccccaattggagtggcaactttaattgtagacaagcaagtatacaaggatgagaggaacttgcagccacattttgtaatctgttaatttagttagattagttagttccaaaactaatgtaatcattaaacttttctcttttatatataccaccttgtaatgtgcaatttattaatgctgatgtaaggctttgaattatacattaagtagttttataactagggactactggagtctttaattaagcattcgactttaaaagggacacattttataacatatagctttctattttgcaaaaggcacatatgagagtatttacgtgaggaatagagcaaagtaatttaataacagattatcggtgtagctcagatgagtgcaaaagagatctttattcaggttaagtgataatgagatgagaaaggagaaagtaaaggtatattatattccacagatagaatctgtataatttgatcggccacttatgctacagttgggcacagagcagggcagggtttagtgaaaagacaaaaaaatcaaggtcctccccacagatttgaacttttggtaattagcccaacagtgaaatcataaagaaaaataaaggacttaagaaaagaaatatcagataaacaatagtaaatttatgatgtgtattttaggtttggaatkttagttaagctaccatgcagacatatttagtaggtttttttagttgcaggactgagattctggaaatgtatcagttttgaggaattatatataacaaattgatttattattgattcaacaaatatctctacatatattccctacatgatacaatgtaaaatgtaacaaatatagatcttgccatctcagagcttataaataactacctaagcaattaaaatgcctgtcataaatattaagacttggctgagcatggtggctcatgcctgtagtcccagcactttgagaggccgaggcaggtggatcacctgaggtcaggagttcgaggacagtctgaccaacatggagaaacactgtctctactaaaaagcagacgcacaaaaattagccaagcatggtggcacatgcctgtaatmccagctactcgggaggctgaggctggagaatcgcttgaacccgtgaggcggagcttgcggtgagccaagatcacaccactgcactccagcctgggcaacaagagcaaaactctgtctcaaaaaaaaaaaaaaaaaaaagaacttaatatacaaaatgctattggtagaagcccccttcaaactatgcatttgagtgtgttggtggggggagggaggcatgagatatataagacagaaagtgttctttgtaggaactaacctgtaaaagcaaatgtatggaaaaattaggcacctctttttgcctgccctttctcaatagacttacttaataggcaaatttcactctttgaatcacaatcctgcaacgaatggttccttattttgcctaaaacaacaccttcacgtgtcctaaaagattatacatgattttttccccgtggtactctgacctcatctctcaccactttccctttgttttctgtcccttccagccacagtggcctttttgctgttcctcagactctccaggcacactagccttagattatccatagcaaccctccccactgcctggaatatctttcttcacctgtctgtttggctacctctctcactttcattaggtttttgctcaaatattacatttttaaggcagttcatgcgaccattctattaaactttacaactggaacccccactggctctccctatcctgcccagtgtgctctatttttttccctatggcacttatcctttctaaaatatatttttctttgttgtgcatgcacattgttctttaactttttgtctcttttcgctagaatataagatccatgaggacagatacttttgggatttgcacattgatgcatcctgagcaacaagaatatgcctggctcataaataatattcaattttcaattaatatgtgttgaccaaatacattttatagcgctttttggcatgggaaaaagccacattgcatccggacatcagaatcctcagtgaagcactgtacttacagaattcaagaccagttcttcaatttgacatttaagattctaatgccaggcacagtggctcatgcttgtaatcccaacacttaggtgggaggatcacttgagtctaagagtttgagaccagcctggacaacatagtgagacctcatctctacaaaaagaatcaaaaaacttatccaggtgtgttgattcatgcctgtgatcctagctactcagaaggctgaggtgggaggattattcgcaggagattgagtatgcggtgagccatgatcatgccactgcactccagcctagatgaaaaagcaagaccctgtagaaaaaaaaaaaaaaaagaccttctaccacttggcacgatttggagaaatttctgtatctataccttggtttcctcatctagaacaagtagctacttactggcctgcaagtgttatgggtcatgttcagtaataaaatataaagcactaaaaatcatggaaccaacccaaatgtccatcaatgatagggtggataaagaaaatgtggtgtatatacaccatggaatactatgtagccataaaaaggaattagatcatgtcatttgcagggacatggatgaagctggaaaccatcattctcagcagactaacacaggaacagaaaaccaaacaccacatgttctcacgcataagtgggagttaaacaatgagaacacatggacacagggaggggaacaacatacaccagagcctgttgggggttgggggtgaggggagggaacttagaaaaataaataaataaataaaaagttggtttaagacttttacactgccggtattccagatttggtgaaattaatacttttttaaagggtccacataaaataattttctaatgtataaatacataatatatatgatatatatatcatatatagatatatatatcatacatatcgtatatataatatatctatatatgatatatatatatatatataatatatatggcccgaatcaaaaggccttgaacacagtgagtgcttaagacatgatcggttttattatttccattgaatttattaccattcattattattattgttgttagtgtagtgggagtagtactattatgttagatttcactgtgtctcctcacatagctgatctaactccctgataaaccagagtaactgcttctttctcaaagcagtctattttctgacctctaagcttcattcatcctgttcttacaatagtcaatagagagtatcaaactctctccttttatcatctacttaggtacaaaatttctccataattaaattttcctgacatgcctcatgatatttctgctgaatacccactcaccccctaaatctagaagtgacttctccttctcctgtgttcccatgcatgttgtctatgtctaacttgctggggtacatgccttttctcccctagaagactttaaacctcttgaaggtagattcaagtcacttaaactctgcatccagtggatgcttggtgaatacacacctttatccacccacccaagtataacaatcactgactctactagtcaaaggcatagttaatatgaagatcatgtcctctaaatctactcaaatcaaaatctgataggaaaaataacttcagaaggtatataaaataatgcattattagttcagtggaattaagaatagaataaagagagttagggttaaaggcacaaagccttggtgttatgagtaaagagtgcattattattaaataattcacatttagataatttaatgagaaaccaaaaagatttgcatatggttagcttagacaccacttacatgctgtaacaaaaagagaattaactgtttttatcaaaacacctcacttcacaggcaatttactcaatgcaatttgcataatttctagaaatatgcaaaatgaatttaatatgcattattcatcatgatctcaaaaagagtttttggcaatttgctacactgatattctttctcatttgtaatcctcatctgcaaaaaaattaatattcagcagccataagattctaagatttggtgatagcaaattttcaaggaatatggattttagagtcatcaaatattttcctaaaggagatgcacataatgcacctcatcctttaaatccatctggttaattaaaataaaatcattgaggtgactttgrtagaaataaaacaggctcaggagaggaaaaagagaaataaagatatcaagaactcaagcagcatgagatatggaaagtgaagactggaagccagaggcttgggtgccccttctgtctctattgataaccttcagcttagcaaaccgaagatgttgagacagttttattcataaaaatgttttgttcagttcaatgatacttaattcagtaaaaatatggaaccacttatatgaaatgaattagatacctttttaaatatatctacttaacagaagacctttcaaagatgttttagttggattatttttttcttttaccacctcaccccttaattggattacttttgcttttgagttctgtgaattccttgtatattctggattctaagccattgtcaaataaatcatttgcaaatttttttgcatcctgtaggttgtctcttcactctattgaatttttgctttgctgtgcagaagcttttagtttgctttaatccaatgtgtctatttttgcttttgttgcttgtgcttttgacatcttatccataaaacctttcccaaaccaatgtcctgaaacatttctccagtgtgttctccaatgtttctcctgaaacatttctccaacgtgtctcacattaggtatttaatccattttgacttgactgttttatatggtgagagatacatgtctagtttccttcttctgtttatgtatatacagtttttcccagcatcattaattaaaaagtttgttctttccccaatgtatgtttttggtacctctgtcaaaaattagttgcctgtaaatatttggatatatttctgtgttctctattctattccactagtttatgtgactgtttttatgccaacactatgctgttttggttactatagctttctagtatatttgatgccagrtagtgtgatgactccaggttttctccttttgctcatcattgctttggctattctggggtcttttgtggttccatacaaattttaagattttttttctgtttctgaaaagcatgtctttggtattttgataggggatacattgaatctacagattgctttgagtactatggtcattttaacaatattagttcttgaaataaatgaacataatgtgtctttcattttttgtgcactctaatgtttttcatcagattttttttttttttttttgagacagagtttcactgtttttgctcgggctggagtgcactggcacgatctcggctcactgcaacctccgactcccgggttcaagagattctcctgtctcagcctctggagtagctgggattgattataggcacacaccaccatgcccaagtaattttgtattttaagtagagatggggtttcagcatgttggacaggctggtctcaaacacctgacctcaggtcatctgcttgcctcagcctcacaaaatgctgggattacaggggtgagccgccaacgcccagctgtgatcagatttttataattttcatttagagatattttaccttattagttaaatttattcccaggtattttgtatttttgtggctattgtaaatgagattactttcttgatttcttttccaacaagttcatcaatggtatatagaaatgctagagattttcatatgtttatttctatcttgttacttcactgctttcatttatcagttctaaatatttttagttggagtctttcgatttgactacatataaaattatgtcatctgcaagcaggggcaatttgactttctcttttccaatatgaatgccttaaatttctttctcttgtctaattgctctggctagcacatccagtaataagttgaatgagtgtggaaaagtgatcatctttttcttgttccatttcttagacaaaaaaatatttctgccttttcctgctcagtatgatgttagttatgggtttgcctttattgtgtttaggcacatttccttctatacctattttgttgtgagtttttatcattaaaacatgttgaattttatcaaatgcgtttttttttccatctatacaaatgaatacatgttttttttttccttcgttctgtcgatgtgatttatcactttcattgatttaggtatgttgaaccatccttatatctatggaatgaatctcacttgataatgaaatatagtctttttgatgtgctatgggatcaggtttgctagcattttgttgaggatttttgtgtctatattcagcaaggatattggcctaaagttttcttttttcattgtgttcttgtctgtttttagcatcagtgtaacgctagtttagtagaatgagtgtggaagaattcactcctatttaatttttttgaatagtttgagaagaattggtgttagttattcttaaaatgcttggtagaattcagcagtgaagctattcagtcctgggcttttcttggctgggccacattttattattgtttcaatctcactactcatcactggtctgttcaggttttctattgattccaggtttaatcttggaagcttgtgtgtgtctaggaattnnnnnnnnnnnnnnnnnnnnnnnnnnnnnnnnnnnnnnnnnnnnnnnnnnnnnnnnnnnnnnnnnnnnnnnnnnnnnnnnnnnnnnnnnnnnnnnnnnnnnnnnnnnnnnnnnnnnnnnnnnnnnnnnnnnnnnnnnnnnnnnnnnnnnnnnnnnnnnnnnnnnnnnnnnnnnnnnnnnnnnnnnnnnntacgttttcatcttgattaattttttcccttctactaattgtgtttggtttgttcttctttttctagttctgtgaggtacactgattacttgtttatttgaaaactttctccttttttgatgtgggcatgtgtttacataaagtcccctctttgtattatttttactgtggcccataagttttgatatgttgtgtttctatttatatttcaaaaatgttttaaattttcttcttaatttcctcattccaattccagatttccatgtgtttgcacagttccaatatgtttgtacagttaatttccatgtgtttgtacagttccagtgttcctcttattattgatttctaggtttattccattgtagttagaaaagatactttatattttgatttttaaaaatttgttgagacttgttttgtggcataacatgtggtctatcttggagaatgtttcatgtgctaatgagaagaatgtgtattctaaagctgttggatgagatgttctataaatgtctgttaggtccatttagtctacagtgcagtttctttgttgatcttctgtccagatgatctgtccaatgttgagagtgggctgctaaagtcttcaactattattgtattggaatctgtctcctactttagacgtaatatttcctttatatattgggttgctccagtgttaagtgcatatatcttagctattgtatctttttgctgtattgatccgtttatagttacataattatattctttgtgtatttttatagtttttaacttaaagtctatttcattttatataaatataaatatagctactcctgcctgtatttggtttccatttgcgtagaatatcttttttccttttttcactttcagtctatgtgtgactttacaggtgaagtgagtttcttaaaggcagtatatagctaggcctttggtttttgtttgttttaatccatgtatccagcctatagcttttatttgagtaaattattttctttacattcaaggttattaataggtgaggatttacttatgtcattttgttattgttttctgtttgttttgcaaatcctttttttcctttcttttttattgtttatcttttgtggtttagtggttttctgaagcaataagtcttgatccctttctcattttatttctgtatgtttcctaccagtgagtattatgctttcatgtgttttcatgagggcagttattgtcttttcacttccagatgtggcaatttcttaagcacttcttgtaaggttagtctactgctgatgaattttctatttttgcttgtctggaaaatactttttcttccttcagtaatgaaggatagctttgctgggtatagtaatcttgattagcaggtgtttttatttcagcactttaaatttatcatccatttctctactggctggtaaggtctctgctgagaaagctgctattagtgtaatggggattccattatttgtaacttgcctcttttttcatgttgtttttaggattctctttgtcttcaaattttgacagtttcactttaatgttctttaaagaggatcattttaggtgaatctatttgaaaactttttttaatttttttttttttttttnnnnnnnnnnnnnnnnnnnnnnnnnnnnnnnnnnnnnnnnnnnnnnnnnnnnnnnnnnnnnnnnnnnnnnnnnnnnnnnnnnnnnnnnnnnnnnnnnnnnnnnnnnnnnnnnnnnnnnnnnnnnnnnnnnnnnnnnnnnnnnnnnnnnnnnnnnnnnnnnnnnnnnnnnnnnnnnnnnnnnnnnnnnnnnnnnnnnnnnnnntcctgtctcttctctggaattttcataatgtgaatttttatttacttaatagtcttccataattcctgtaggttttcttcattcttttggtttttcttttattttttggtctgattgagttattatttaaaaatttgcctttacattcagaaatcctatcttctgcttgatgtagtctgttgttatatattatgttttatttaattcattcaatttttcagctccaagatttctgggatttgttttgtttttgtttttgtttttgtttttgtttttgtttgttgagacagagtctcactctgttgcccaggctggagtgcagtggcatcatctcagctcactgcagcctcaacctcctgggctcagttgatcctcccacctcagcctcccaagtagctgggattataggcgcactccactaagagcagctaactttttgtagagacaggattacaccatgttgcccagactggtcttgaactcctgggctcaactaagcctcctgcatcagcctgccaaagtgctaagattacagtgacgtgtttccttgttgtttcatgtggcttatgttcctacattaatgtctgcacatttgatgaaacaatcatctcttcttattttatagagtagctttcacgtggaaagatttttttgcagaagtgttctatggtgtccattgagtagggtgctttggcttaggttctgagtaggcataatagcgtagtctgggccgggcatggtggctcaagcctataatcccagcactatgggaggccgaggygggtggattgcaaggtcaggagattgagaccatcctggctaacatggtgaaaccccgtctctactaaaaaatacaaaaaactggccgggcgtggtggcaggtgcctgtagtcccagctacttgggaggctgaggcaggacaatgctgtgaacctgggaggcggagcttgcagtgagccgagattgcaccactgcactccagcctgggcgacagagcgagactcctgttcctccaaaaaaaaaaaaaatatgtatatatatatatatatatatatrtgtgtgtgtgtgtgtgtgtgtagtgtaatctgtatgtaattaccatcagcactgtctgtgagtcccttagtggcctacactgtaggtgtttgtggaagtagtggcatatctttctgatgggtggatgctaccgggggcggggggatcagtttttagtccctgaagggcttcacctagcacagtggctctgccagtagtgaggatagtgctttaggttacagcaggctggtcttaagtattcactgggcaaagggagtgtacacgacaaacggcacctttgcaactaaaggggacaaggtcgccaaaggaggcaggtgcacgcaggtggctcttggtccaggagggtacatgtgatgcacatcagctctgctgctggaggaggtgggatcaccagtgtcactgggtgctaggcagccatttctaggacygtagagtatacatgttgctccccacattcctgaaagcagctttcccactgcactggacaacctgtttagggtactatgtgggctcaagtgctgatgtggacttgaatgctggtgtcacagctgtaccactggtctgtctgaaatcacgacactgcagctttctgggtgcgcatggtgagatgacag

SEQ ID NO: 10061 - DNA, 40000 bp, Homo sapiens
agtgagccaagaacaaggctggctgagccctccccaggagtgcaagcctccaggcaggctcagaccagaaagacccaatgggggcgacccagtaagcacgatgtcattctactccaaacagtcctttgatgccagccccagagactctggctgcagcccctgcttcctagccactggctcctgtgttgggccccagctactcccatgatcgccattgccactgtggccctattcaacccaaggcagctctgtccctgaagatcacccttgcccagagatccctgctggagccccatgggtgaacagcagctctttgctgggtggggcacaggagggaagaaaatctggagacaggctggtttggggctctctctcatattgtttaggggaagagcctggactccagtccctcccaatcctctgmattccttcctctactcttgcccctgccattttgtcttctttgctcttactgaaactacccgaattttcctatccctgccttctctctttctcaccttctctctccatccctcctcatccctcccatccatcttccctccatccttccctctcagcctttcgccatctcttgttctgtcacttccccatcctgctctcctccaggaggtcttcctgcacccacacaggccaggtctgagctctccttacctccctccgctctgaacacatccttagcatgtgctggwggggctgcaactctgtgacagctcccatggggatcctctgaagccatgtcacatgtcatcttagtttttctttgtaaggctagcagagtcttctccagattagagaccacctagtgcactctgagatggagcagggacgccctcgtaggggccttcaggtcccctcaagcatggaaataaaggacaatcttgagttccttcaagggaaattctgggcaccttgctagcctggagaaataaataagcaacctgacaagcaagaagataacagtagcccaaaacaacagccacgaaagctggaatygtgggatgtttggttccgccatagaaactaaagatagcaccttaacatatgtcccagagttgtttgtcagaaacccaaaccccaccaaaagggatgcctgggcacatagacctcagatraagggacactgggcactgagctctgaccaccactctttgttctaaatttcttcctgaggggcctgaagaatgtcacacctacaagccagagctaacactcttttctgctgaccccaaatttttaaacaaagtttctcttccttaaccaattgcaaatcataaaatctttgaatctgtttatgacctgtgagctcccacttaaaaacatcctgaccaaacaccgcatgttctcactcataagtgggagttgaacattgagaacacatggacacagagagggaaacaacacacaccagggcctgttggggggtgaggggtgaggggagggaacttagaggatgggtcaataggtgcagcaaaccaccatggcacatgtgtacctatgaaacaaacctgcacgttctgtacaggtatcctactttttttaagaagaaataaagaaaaaaaagaaagacatcctgcccttttaggccaaagccaatgtgtagccttcatgtattgaatttcgcctgtaacttctgctctgctgaaatttaccccgcctttaaagcctctaatcttcacaccatcagggaggttgggacttcagcattagctgcctggtccctcttgcttggtgccctgcaaataaacgccttcctttccactgctgcaaacctcggtgtagatatctggtcttcctgggccgrgcaagtggactccagtttggttctagaacycttgcctccctcccacccttcctttcttcctttggtggacttctactgagtgcctgctgtatgctggcaccatgctcagtgctggggacacaggagttggtggtgtacactgaagatttgaaggttttctagagctcttgcttgtggtcctccatctctggctctgaaagctgcatttcttgacatgcatggcagagccctagcccagcctttagtgtccctgccgctgctgcagccaccccaacccatcccacaacctccttcctcgatgccccagccaaggacatctcacccactggccccatcttcgactacctccaaaattttgccaagctattcttattcagcctggaaccccttatctcccgatctcctctgaccccaatcccactgctcttctgaactcctgcttaaaaccctggattttgcagtctcccctccccagcgtcccgactcctcygtcccttgacacccatgtgcaggttgctgtttcctagggcctgggtcctgggtcctgggtcctggggagggtcccatgtcccagtcaattcctccttctgtgccttccctgagagcccaggaccagcctctgaacatcccctcccaggtatgggagaatcagtgaatagccccttgttggagaagcaacaaaacagagcggagtcagggcatctttagggggcttctaggcctgttgtccacctggagtggcaccaggttggagcctaggctgctgcagggatctgaattccatgccaccactcagccgcacagtttgctcggtctctctaagcctcaacttccccagctgtaaatgggaaataaactcctggtgagatagttgtgatgataacmtgttaatccatagaaagtgcctgctttataaaatacataataaatgttatcaacaactaaaagcagagagctcagtagaattggggaattggcctgtcctcccctctctcctttctctcctctggaccagcacgttcccacgcagtgtcatctgatgttgtargaaagggagggagtggggttccctcaggccccaggctcaaagaatctgccaactcagaccctccttgatattggaaaatttgccattaaaaataaaaattgtaggccgggtgtggtggctcatgcctgtaatctcagcactttgggaggccaaggcaggaggatcacttgagatcaggagttcaagaccagcctggccaacatggtgaaaccccatcyctactaaaaatacaaaaaaagaaatagccgggtatggtggctcgtgtctgtagtcccarctactcgggagactgaggcaggagagtggcgttaacccaggaggtggagcttgcagtgagccgagatcgcaccgctgcastccagcctggacgacagagtgagaccccatctcaaaaataaataaataaataaataaaaataacagccaccatctaataagtgctagccaagtacaaaactcagtaggaggcactttacraacattatctcagattttttggtattgatcttttatcaaatatttattgggtacctaccaagtgctgaggggggccataaaaagtttcctgccctcaaaggatttagtctctgggtccctccaaatgcaagcacccctgggagaagaagctcatcaagctattaacaagtggttaacaccttagcatgaattagttagtcagacactggccattaggcatgagacacccagtgttgttgatgaggccagtgatagaggaggaaggagagttggggacctcccacaggaagggagggcctaggtggggctcctgaggtgyctgtgtttttcgggagggaaaaaaggasagactgaaggaaaccaggacagggccacagctcactagggggactaaacccccaatccccccagtcccgctttaactgagatctgggaagatttaggggtgggaggagccagcacccctgcttggggagccctctggcctggtggggaggcaggatctgagctgcccgtctggctctgtttttctttcatgccctccatgggaggggtctagctttccacatgagaattgaattctgagcaatgtttgggcaggcgtggacatctctgggccagttatacccatctgtgaaacagtcgggggaatgcgtcatatcagaggatcaaacccctaagataccaggaacatctggcttggacattcaagaaaaaaattaaatggcatgttacattacatttgtgtggctcttggttttatagccacatgttttatttggcttacatgtataatttgtaagtgtctttgtattgttgtttctgtgtctgtgatcatgaccagtttgacacatttgtgtgtgaacccatggctctaatttgtatcttgctctttcctctcagcactcttgggtcggataagtctggagagagaagacctccaagagcagggcaagacaaccgagtacaatataagagggtagttgctgggtgagaggaaaggggaatgcatagatgtggggacactaaacctacaagggctgcctggaggatggagtttggatcccagtctcttaagggaagaaggcttggatggacaggcatggaggaatgaggaaaactgccctgggtggcagaaggcaggtcatttgtgaggaaaagacccaccaggctggagcaatcatgaataaagkacgactttgcgggggrgggactctggatgccaggctgtgcacatratggggagccattgagggctactgagccagggagggcmtgagcaatccatgtttgaggcagcagaatccaggtgctatgtggacagggttggtgggggtggagagaggctggaggcaccgagagaggggcaggtggttctctgagcaaataattgtctccagaattagagagaatgagctgagctatttggatgacatcagcccaggtcctgccagccctcctcagcagatgaacccaggaaatgagcatgtcatctatggatcccccagaagcccccctcctggcaccccctcatctttcagtggtttcagataggcagggttttcagccccagccagccggatggagcgcagtgccgggggcctggccacaacccaccattcattggggggcaggacagctggtcagcatttttgcagctgccaaggctgagggtgtgcccaccccagaggagctgggatataaaggataggaaggctgtccttccaggcatggctcccctcccattttgccatatttctgacagagagggtcatctggggctgcccctctcctcatttcctcctcactcagctccgtggctgggagcacctcctttgagccatgctgcagccccacgccaagcctctagcgaagtgcatggacttgagactctgaggacccaggtcccagtcttgccttggccactcatgagccgtgtgactgtgggcaggtctcttaccttcctaagcctctgttttcacatctctaaaagagggggtgccaacacctgctccacctactccccaaggtggttgggaggcaccttgtaaataagaataatggtgacaatgataataatagcagtggttaacacatatacaatgtgagtgctgtgaggcatccttctaagcgcttcacatatattaattcatttaattctcacaacagccctatgaggtaggtgccattattgtccccactttacagatgaagatgctgagacacaggaagttaggcagcttactcaagagagtactcaaccaggattttttttttttgagatggagtctcactctgtcacccaggctggagtgcagtggcacgatctcagttcactgcaacctctgcctccaaggttcaagcaattctcctgcctcagcctcccgagtagctgggattacaggtgtgggccaccacaccgggctaatttttgtacttttagaagagacagggtttcaccacgttggccaggctggtctcaaactcctgacctcaagtgatccacccaccttggcctcccaaagtgctgggattacaagtgtgaaccaccaagctcagcactcaaccaggatttgagccaaggttcaaatacaggcatgctggctatagtctgtgcccttagcctccacaccaccctggctttcttgagtacaaatgtctagtgcccctgcgtgtcctattcccakgtgagcatgcccacctctaaccctcaccagctctggtctctgctctctcctgtccctccaacacttgaaccacagtgtgaaaagctgagctcatcactttctstccctaatataccctcccaccccatcagtgcccacgccctcactcacccaggtgctccgcactctcaagaagtcacctgccatctcttaaggcagttgctctgcatctatcaccacggcatggcccaggctgcccctcatcctctcccctctggaattctggcagcagcctcttgggtggtcctcctgccagcccaccctataagcctctggtttccaggattgacatttcatacactcctgtcttcctgtcacaaccctccagccagccacatctgacccctcagtccccttttcagccttctttgctcttttggagaaaatagatgtgatttcaggacctgggtgaggatggggttggggatgcttgtgaggccctgacatgtttcttacgggcagcttcctttttcctgatgtcatgctctgggctattctcccagcctcctgcctaccaggcaggacatagctactccaagaagcctcccctaagcccttccgaattcccctggtttccaccccttccctgtcagggtcaggctgcagctttctcctgctgctcaggttctgggcgcatccctccaccccaaaatgaccaaaggctccagggcttaatgcatgaactgtgagmactgcatgtcttaccagctgacagacatgttccaaggcatatcagaagatgtgtgtgcacatctgtatgtgaatggctgggagcagaacaggtgtccagccattatgaacatggctgtcctggttgtccatggctgacatctctgattggttagtgcctgcttgtaccagctgttaaatgttttgcatcttccatagacatcagctttgtgagcctgcarcctcatgtctatgcatgcgtacatgggtttctgatgacattgcacctgataattgctcccatcttctattagctgttgctttcagacccctgagtctccattattctccattagtggtttctaacagggagctgattgtccctttttcatatattttcaatatattctttttcaataatagccatgacrggagggagcaatgcagtgactcccarctggygaccaagtgagggaatcaaattcattcattcattcattcaacagctctgagaccatgaaagcaggagaagtcatgacagtttagacctgaaagaacatcccttccccagggcaggaggatggccaaggtgacttttcaaggtcacagaggatggatttcaatgagactttctctaccaatgaacacagattactcagttaaagcctcctgctacactgagtttggaacctagagagaatggttagaaaaatcagaaaatgggaaggtcagaggcagagggagaggcataggaagaagctgcaggaaagggtggatgaggtcccaggacacagtgcacagacactgattgccttgttcttttgcattcagtgatcccatttgacacttactaagcagcctctctgtgccaagcgtttaccacatacagggatagaggaagacaccagcctgcctttgaggacttctcagtccagcagataggtctgccattrcagagccttgtaggtttcattaaatcccaggtggagagaagattccagtagcaattgggttttgtgctcacttcaactaatgaaccaagatacagtgagtttgggaacttaagcaagattttgggtgtccacttaaaatcttaatccaagtcactgtgcagaggccatgaccctgacagagaaaaagaaatattgcagttttttggcctcagatgcttcaactcaacaggcatcagcaagagctatgagagccacttgagggcactgagttgctcttcataaccaaagtctgagactcaggtggttagttaagcaagcacttaattagcygagagagagccagtggttgccctcagctgggtgtagcggccaagtgtcagagacatggtcagctcttggctatcagaagtccagctcccccaggcttgccttggccagtcaaatgagggtaagtagtgtctgtccccctgctggtcatggacaactctgtctttatgccaggttgctatttgccacacggtagggaaggcagagagcaaagtccagggatacagtttctctgaccttttccctgctgcactcccaaattttattttattttttattggggtaagattcacataacataaaattaactatttaaagtgaacaattcagtggcatttagtatgttcacaatgttgtgcaaccataacctcaatctagttctaaaacattgtcattaccccgaaagaaagccctgtgcctactagcagtcacccccatttccccttccccaaytcctgcaaccaccaatttgctttccatctgtatgaatttacctattctagacctttcatataaatgaaattatataatgtgtggctttttttgtttggcttctttctcttagcataatgtttttgagattcatccacattgtagcacatatcactgagtcattcctttttatggctgaatgatattccactgaaagtatataccacagttttttttgttttttttttttcattcattgatggacatttgagctgtttccacctttggctatggtgaatagtgctgctgtgaatatgcatgtacatgtgtttgtttgagaaacctggttttaatttttttttttttttaatgagacagggtcttgttctgccacccaggctgaagtgcagtggcacaatcactgctcactgcagccttgaactcccgggcccaagtggtcctcccagctcagcctcccaagtagctggcaccacaggcatgcatcaccatacctagctttttttttctttaagagacagggtctccctatctcccttgccctgggttgcccaaggacaacctcccttgcccaggttggtctcaaactcctgggttcaagccgccccccagcctttgcctccaaaagtgctgggattacagggatgagccactgggctcagccatgttttcaattattttggctttctatctaggagtggaattgctgggtcatatggcaaatctgtttaactccttgaggaattgccaaacttttccacagtggctgaaccagtttacatttccaacagtaatgtatgaatgttcaaatttctccataatctcaccacattcattattttctgttatttttattataaatcatcctagtgagtataaactggtgcctagttatgattttggtttacatttccctgatgaataattatgttgagcatcttttcctgtgcttcttggccattgtgtatcttctaaagaaagtttattaaaattacttgctcattttttaactgagttgtttgttttttttattgktgagttgcaagagtactttatrtattctggatactagacccttatcagctctatgattttccaatattttctttcatttggcaggktgtcttttcactttcttgataatgtcccttactgtaaagaagttttttaactttgaggaagtccaatttatctagtttctcttgtgttgcttatgcttttgatgtcatatctaagaattcattgccaaatcaaggtcacaaagatttccctctacattttttctaagagttttatggttttagctcttatatttaggttgwtgattcattttgattaatttttgtatatgatgtaaaatagagattcaacctcattctctggcatgtggatacctcgctgtctcagcaccatttgttgaagaagctattctttcccttattgaatggtcttggtacccgtgtcaaaatggccataactgtaaataattgaaattaacaatcacctctggtcctgccttcatgatttctcctcttgggcttcargggactctgagtccaaaagcaagagcacagtcactcctgtgcacctctcagcatcttcataatcccagatggcagagaatctctccatttctcaggtrgataagctgcagccagagaggctgctccttctgcccacctcagcactctagtagaggacacactgtatcacatctgcttagcccttcatccctgcatccagagccacgtttgcgtgcagccatcacagcccaacagcaccagctcaggtgtgcccagttgtcaggggcatgctgcacagcagccttgaaagaagtgatttcacggaggctcatgtattaatacttctccaaatgctatttcaggttgtgggtctcattccctctctcacctcaggccctcttactgggtccctcactgggaatgtggtcttttgggaaagacagagcatcaatgctaggaagggccttaagggtatctggtgcaaaggctcttaaccggtggttcatgacccagggaatccatggatgggctgtggggatctgtgaacctctggacatgcagtagaccctgtccacatttcaggggaaagatccatggctttcatcagctctcaaaatgttcatgacttacaaggttaagaaccactgtgtgtaacaggtgactggttagtggtagagctagaatggagcctcccactcccagggcactagttcagtatccacagtggcagcagtggtgacatcagagggagacatttgggcagaaagcccaacacactcttgggctcttgtgtttcccacggtttactgcaccctggcacacacagaagaggacctccttaatacatgaaagccacagggaggtgaatggaggccactacttaggccagagtccccatcctcccaaggcctgtccccattatcttgaggcctgtagaggtgaacatctttgggcacacccatgacacaagacaaatttgaaagctgcttagacagctagactctgccggccacagctgagggacttagaaatccacccagccccactgcagattaagcatctctaatccaaaagtctgaaatccaaagtgctccaaaacttttggagcattttatttaaaatttgtacaaaattatctttagcctacgcagaaggtatatatgaaacataaatgaagttcatgttttratttgggttccatccccgaagtatctcattatgcacatgcaaacatttcaaaatccaaagtcaggaatgtttctggtcccaagaattttggataaggtatacccaatctgtattgactttggaaaatctgagatctcccaccccctactaaataagcacatgaaagcctgtgtccaaactactatgttgctgtgatttaaattccctctccaggagcccatgtgtccatctttctggttatttaattaaactctcctcctcytccaggaagccttccttgcttagcctctctattccagtcccttactagcattgctgccttaggctgcccttccctgatttacatgagtgtgtatctgtctcttccagcagcctgagattgcctccagagcagcctcatctgagttggcctgcagcttcccagcaagagtcytgcacgcttgctggggagaaatggagggtggcacatcatcactagagggtggaacatttggaaagattaacagactgacagaagcatacctctgacamcactcaaggacaacttaatgaatatacagcagaaattcagagtctttaattcaaacaaaagaggaaatagatgctgccattcttaggaatatttacaccctgagccacgacatctggactaggcagtascactcagcgacagaaaagccagctccactcactgagctcagctcatggcaccaaaaattgagagtcagaagctatgtaggacacagccccagagagactgtggaagacaaatcacatacccacagtcctgacaaaaggcaatgtaattacgctgccctcatcaaaaagaatggtgactttgacagcccttttgttaaaaaggcagtgacacaccacagaaaaagcatagatccttgtgtcggccaggcctgactctggcacataggtgggtgactggggccagttcagcagcctcttgggatcaggctcccagtctgttccaaggatgctcattgcatcttctttgcaggaatggatgagaayaggaggcaatrtgtgtagggtgtctggcatctagtaggtgcttgacaaatgatggtagctattgctgataatgaaggaggtgggtgggtgacacaggctggcagagaatccccaatacaccttcacttggctttgtggagatgggtgcagctggtggtctacagatgtacacgtggtgtcctaaatattggcgtcatcctgcaaagttgtttctgatggagcaagtaaaggctgtctaacttctcaccacctgcttacaggtctcgtgtcaccccaccatgctggcaggggatgtaaaacctctcagacagtagctaacttggcctaagcacagaacaaaccagcccctcccctgtcgtctcctgctccttccctctttctagggatgatcacagcttccttagggccaagaaggttataatggcttgtgcctccaaagcctcctgccagccaaaggcagcgaggaaaatgagaagtcgttagtccacatgggacctaaggaaacagggaaggtgactgtgtcaatcagagcttgaaagtaaaagctaaaccacgatgcagacagttgagtgtactacagacagttttaaaactcagggcctgggaacttgggtgtggcagacacctttgggggtggcaaagtcacctcttcttccaagtgctgaggtgggtgaggccatgggtctagcgggtggctttccttgctgggatgctggctggggtgctcttgccctgggtgtccttgaggtctccccctcgcgcctctgtggtcttggtctgcccgctctgggtgctgccagagctgcctgccacagcgctggccccaaggtcaacacccgcagagctggggtggtggtagctgtagctgctactgctgatgacagctgaggaggaggggccaagagcaggggagaggagcagtgtcaatcagcagataacagctatggtaacggctgtccccaagggcttctccacaacaacacctcatttaatccgcagaaccaccctcagtagtcaagaagcactacagagatgaactgagagcctattacgggccggacttcgtgtgaggtgaagaccccatmrgatagatacagtccctgccctcctggaaatgctaggaaaatccatgtccaccaaccctttctscaaatgacaacgtcccaggggagaaacaggaagggaaaagggtgggcatgacctcagtcaccatttcacaggatgaaaagggagaacatttcctttgaagcccagaaaccttcccaagacagtaacagaagcttcttgggaggtgagacagtaaatggaggtgacatcactttgtcccagggtccctggctttcccaacccaaggcatctctcaagaatactcacagatgctcacagaggatggattctcaccagacatcctgtgagacagaaagttagagaaagataaaaactcagtgtcgagattccactaaacatcaatgggctcctgcttttatacgtgcatcatttaaactcatccttataacaacttacgaaactgacactatcgccttcwtcttacagatgagaaaacaagagtcctggagataytagatgatttaccgagaccacaccactagcataggataaagccaataattagcccctgctgaagagccagtcattagccccaggtctgtctgagcccccggttctcatcacagcagcacacggccatctacgcttcatggctcatgtccaacaaccccttgcaggaagctgcctctgagttcacgaaatcaccacatctcttgcttgtattggcactaaccatgttgttctccaggtggcccctcagccagacaggagccacaccccagtcccttctcacactttcccctccaccccacctacctgcactcctcgccctccagcagcttgcggtaggtggcaatctccatgtccagggccagtttcaggctcatgagctcctggtactcgcgcagcatccgcgccagctcctccttggcctggtgcagggcgccctccagctcatccagcttggcctgggcatccttcagggcattgtctccccgctgctcagcgtcagcgatggccgtctccaggctggcacgctgaagggcaaagaacagagagaccatcagaacagaaaattacatttagctcataccagttaagtagaacaatgccctcattytgcagatggggccctaggtgacaaggagtaaaagctgcaaagccaacaccagaactttgtctcttctattttctattgcagaggagtattcaaagctgttatcacatgaagctgtggaagcagttgcatttcaggaggtcaggaagaaatgtcgatgtttgcaaagttagatagtgcctgagaccggaggccaccagtatctacagattcaaaatactacaggttcaggaaaatcatgcccgatcccctagcaaggccagccmtgaggatgagacagtatgccacggtcccactgtgatcagattcctgctgcaggacctctccccattggggatccttctgatctgttagcatccagatgagtgtttctggactccagcactctggggagagtctgtgtgaaggctcccacatctggccttcccttagagcaggaggataaggccctaaattataggcacaacctcagaagctggactctgatgaacatctggggggcattgcgatgyctgttgctaacagagagggaggaactatgctcatggaatttgtgaatcggccaaatgtagagtcgtagagttgtccctgtgtttgccygcagagcatggagggttgtgggggcaccagaaggagaacaggctcagatctttccgctggkcaattctatcactagcagagcagacctggttctcagagaggtcacaggaaggatcctccagcctccaatatcatctccccactgacgcagtgtttaaaatttgctgctgtcaggtaagacaggccccccacccccaccccccsgcccactaacatggaagtagtaccatggcacagggcaagggaacccaggagggcttcatcgacagctgtgtccctcagtcaacagaccatgccccactccgagagcaggaacctggtgtggccaacagaggcgcctgatgcataccctctgcaccccacacatgttccatgtccagtgggaggaggagacagagggtctgccctcagagggggcacccaaaggggacatggggcaggttcattggacacagaaaaaatctgcagaaggggaacctgggttctaatcctagctccattcattaccagctgggggctctgggaaagtcccttccccttcccagcccagttgctttatctgcaaaatgaggagtcagagaaataggtttgaggctcctcccagttctgggcggggtaccagctctgatggtagggtaccgaggcagggtgggaaagggagactgtgggtggccgagggacccctaagcccagcaggggatatttgcttgttcccaaagggcaggccccatttcctcatcccagagcctgctgtggagaccgggagttctttgtggggctgctgcccacctgcttcttcacattcccgatctcacaccggatcctctggatgagccggttcagctccaccatctcgctcctggtgtgtttcaggtcgtcaccatgccgactggctgccagctgcagctcctggatctggtttcccagagataggaagttggtgatgagacaagggcactggggaagggtcctgtaaataagccacccctgccaccctggctgtcggtgggatttaacggaactgaagaggagtgctgggacagggtcctgggggcccaggtaaggggttttctccctgacagccccaaagcatagttccattactcagtttacccaaagcatagttccattactcagagcactcctcgccttccatttccttttgaaagtcttcccgtggggatcaggaaagagctacaggcttctccttctctcactcgccccccaccaaattcacccatggctacactcccgcaagtctgtgattctccctctgccctgtggcaacatgcccccattcctataagtgtgtttgttttaccacctcacttctttcacmtgcaacagagaggaacaggcagttcgtggatggaggaaagaagtgagggatcctctctgttgcatatattcaatccataccagtttcatgatttatctttgataacaagctctgctaagaattccttttttccttgaagccttggttggaacctttctttcattcagcatgcccacaaaagtattcctcacattcactgtgcaggtgaccmctcccaggaagcgargggctgctgtgggaggagacccattcggtgaccaccttggtctggtacagggcctcggcctcggccttgctcttcagggcgatctcctcataatgcatgcggacctcagcgatgatgctgtcaaggtccaggtcccggttgttgtccatggacaggatgacagaggtctcactggcgtgagtctggatctgagcgatctcctgcattgagagaggaagacagattcagcaaccccctggcttccctcttctgccccatcagtcttctgggcccatggtccctggcccaataggctgctagratccacggggacaaagtagggggaagaagtgccctctgggatgtgtctgcagagctgagggagagcagctaacagcagcaggaacccctgcatatggcagatgcccgctggcacatgcagacgggtgaataatgcattttccacaatttcacagaatccaaggctctgtgctttgtaagacctcactgggttatcttttcctgccygtgggcaagkccactattgtatcaagatcaatttcctcctgtatgtatggcctccaaggaccagcatcctgcacttccatggtctcctggtgcagggttttgtacctttctaccaaaacatctttcattttgttgatcctaaatctctccytttggtatctccctggaagagtygggaaggaggcagggtgagggtggggggacaggagtgtccttactgcatcatacagacacttgaggaacttgatktctttgtccagtgagtccactttggcctgaagctccaccttgactgcgtaggctgcatctgcatcctgccaagaggccccagagtcattgggggatgcaaccctcatcccacagctgccctgcccaactcctgcctcaaagccacctgattttctattttctacccacaaaggaaagctcactcaatatcaatttcttctcaggctgcctgaagctttgggaatagggaaaggaggatggggcagctstgttatgcctggagaaaacaaagcccagagaggtagtaggtttcctcaggtcacacagcaaggttgagctggacccgagtttcacagttcccagaccagaattctgtctgtctctgtccatttcctgagtgtgtgtctttcctctccaactcactggaggccaggactatgactccaccctcaccaggcaccagccccctcaccaggcaccagccccctccccagcctcctgggctgaagtcctgagcagagttgttaagatgggggtgcgagagaccctaataaggaggctcctccctcycttaccttcttaagcaccacaaactcattctctgctgtygtgcgccggttaatctccacytcatatctgccagcagggagagtagatggccttagcccccttagccaaggaactttctcttcctgctggccaggcaaatgtttgggatacagggkccctgcagggtctctggggtgagcagtaagaggctagtgacaggagtaagatatccctgagttgcttcacttgtctcctagttttygcatgttaggaaaacacccaggtgcctattgggctcccgacaccagcaactgaacatttcagtgggtcaaggagcacaggaacygcttcctatcaactaggcaggaagttatcatcaaagaggataggcccttccccctagccagagaaagggatgtgagctcctgaccctggwgcatactcccccatctcctaaaaaataatggcacagagatcaggtgagcccagaggcacgggaaacatggtctgtgaccctcgggtggagcctgctcacctcttcttatagtcctccaccagatccctcatgcttctcagctccgagtccagcctcaccctgtccccagacagtgtctccagctgcttccgcaggttgctgatgtagccctcaaggatgggctccaggttcttcttgcagttgttcaggtccwgctgctgcagcagctcccacttggtttctagaacctgsttctgctgctctaggaagcgtacctggaacccaaatcaacagacacctggaaccacaatgggtgcagtcatgccccctggacamacaccattgactccccaggtttgccatagattgttgtagtcatttttgctcatgtcttgactctccacccttgccattccacacaaactagatcctttacaagtgctcatttcctagccttctggacaaggcatcactgagaactcactcaaggagtttccacagctttcttctattgctcggccctggtcccaggagatgtccttccttatgtctcaactaagtgtctcttcctgtaccatgagcccttccctctgaacactgctggattctattagcctttcatgttcttggaagatccagctgtcctcaagaaactcatcacttttttgtcaaggaagggctgctctttacccagcttcccatccttccctgcaaaatcgccaaagaagccgatatattcatgtattcctttgtcctccgtggctcacagacctactctccttccctaatggtgaggaagcccttcctgaggcccagctgcacctttccagccacagtgtgcagtccattcccaggcagcaggaaaactgctcaggcctcagggtgcggcctcatcctcctcctrtgagacccaccttgtcaatgaaggaggcgaacttgtcgttcagcaccttgatctgttcccgctcctgggcgcgcaccttctggatctcagggtccagctccacgttgaggggggccaagaggctcttgttgacagtgacctggtggatgcccccaggtgggcacacagacaaacatgcaggccccagggccacactgccaaacatactgccagcaaagccactggcccggccccctccatacccagagccaggcctgaagccgtaacctccagcccgaacgccgccaccagccacattgaaagaaatacgccgattccctccaaggctatagaggctccgactgccaaagccagcrccagcccctctgccagctgcacagtaagaagccaggctacccacagccttccttggcaccactgccgaatgcacactgaagttgcccttgtcaccactggacttgatgttcagttgccgactcatggtgggaaaggttgagttgacagagctggagaaaagcagtctccaaggggtagagaacacactgatggggcacccagagtgctgcctccttttatccctgttgagcccaggacaccggaaaagggcrtctctccactatctcctttcccctgctgatgggccaggggccatgggcaatttgtagaacagagatctccaagccctttgcagcaacaaagctcttctgatagcaagtggaatatgctgcccttgcagagtggagtggtctaatttggagtttatctgtgctccctaattarggacctgaagagttatcccctgaagagatctcctagctttatttttccagtgctacctccttcttgcttaaccatcagcaaggagcaggggaaatgcctggctttccccagagtagactcacctgaaaaaccccaggtttcttcccaaaagaaaccatctctctattatagggtcttgtgtggaagctggaatttttacctcagggaaaagaagacatggaaagatgattcttcttggaaagatgtcctcaaagatctggatctgggtaagaagctccagggtccgtccttgggccatgctaaggaccacagctgtctagcagtgaagtggaccccaggaaggaagaggaatgactctgcagcatctgcatgcccccctagcagggatattgtctagggccttctgtgttgggcagggcctgggtggtggtgaccttgacattgccttacaaccatgagaacctttccagtcagctgcatttcctccagttggattttctctcctggataagattatytgtcctactctaggaagtcaggcaggagctgggatattagcccctgcactccctggggaaacaccctatggctgaagtcaccaaggaamaggaccccctgagtttcactcccaggttcagggtgggctgttctgccagtttcctggcaacttcagggagcactcaattttcaaacaggaagtatcactgctttatagctcaggtagtgtgggtacagtgcaatgttaaaaaattatttcagggctgggcatggtggctcacacctgtaatcccagcactttgggaggccaargagggcagattgcctgaggtcaggagtttgagtccagcctggctaacatggtgaaaccccgcctctactaaaaatayaaaaatcagccgagcgcagtggtgcatgcctgtagtcgcagctactcaaaagactgaagtagaagaatcacttgaacctgggaggcagaggttgcagtgagcctagattgtgccactgcactccagcctgggcaacagagcaagactctgtctccaaaaaacaaaaaaaattatttcaaagctaggtatctggcagctgccctcatgcaagactctgaccacttcctataactaaactgagaacacttggcttgtttggatccagccgagggcagaagacaactgctcccactgctggggagggaaaaggagaagctgacctgggcagggagcgtggagcttaggcctggaagctgccccggaagaatttccccttcacagggtgttttcctctcagcccctgaggtaacggtggaaggtccttccccagggaccctgtctcggggggctttcccggcagggcctagccctacagcacaggagcatgtaatcgaaggggttgcttgtggttttctaagtcaggttgcaagggcagcagcaggggtgccgccagatgctgggtttgccgccctcctgtgctggagtgtgcaagacaaaaaatggcgtgagttccttaacctgggggtgactgtcctagggccccagccaccaagaagcctgcagaccaatgagaggaatctacacaaagaacttaaagyagagccaaagctctggaatgacagaaaagcattatgaaccacgaatcagaggtgcactgaggaatggctcatcttgattagggtttttggggatctccagaagccaggcttatattcccaacaacgcccactacaggtgctggctcagagtagtggctcagaggtagtggggctggaagtattccttatggyagtagtagcaatagtggtagtaacatcattgtataatagtgatggtagtaacagaaagtgttaacacttattcttcacttcacatgtgccaggcatgggatgtctacatgggatgtctcacttaaccctctttaactaacttcatttacagttgaagaaacagaggaacttacccatctcactcaactagtaagtcagagctgggccggaattcaagtgcgtcyggtttcaaagtgcatgttcctgaccatcgtgttatgtgatagagatggaagttagtggcaaagatgcaaagacattgtggtacatgtggcaggcatggcagctgtgggctggggaccttgtgcttgtgtttctgttgtttttgattcaagtgtgacatgaggagaaggggaggttgttgctgaactaggggcttgcaaagggtagctgctcaagataagacatcactctaggttcagagagaaaatcagccacagcaaggatgggcagggggaaggaagagacttgctttcatgagcggctgttttattctagaatcaccagcagctggcccttcattgcccggctccgaggggaaataatcatagttctggctagctgagtctttgcgccaccactgcctggctgactatgagccccaatctgataggaacttcaacgaaaaggcatttacaaagcagaaaaggcatgaggctagatctttgaggctggagaagacttagggtaaacaaaaggcagatatccaggtgcccagggaaatgcagcagaatgaatggggtccatccacactcagaagtgatgggctggggagggccaggactaaggctaggggtcctggcaccctttgtattcattacaaagggtgcccctgtgggctgggccctgtgctggaggctggccagtaagggttgctgacagcggtggtaatgatggtggcagagtggctgtgayggagaaggaaaaggtagaggcagagtagaatttcctgacaacagtgttgtgattgtggccacacagaagcaatcctcctaattggttcctagggagcttaattgcaggggaattgcctttggcctatgcagtcagatccctagagttccagccttcactgtttcggataccctttaattagtaatcacacaccacgccctggtctttgagttcattggactaatgagtgtcccaagtcctgaagagattatttcattaaatgcatataaaactgggcatctactgtgtgttcagctctatgctagacagggggagatgtctgagacactctctttctcttttaggaagttaattgaactggaggacaaacaatataaacatacaaaagttgttttgctgttgttattgctgtagttttaattctacatgcctatattggattatgtgcttgaacaagtaactcagacaagctgttcattgaaattctgatctaaaaaaaaaagaatttaaaaagtacatgaaaatctactttttgcttaccctaaatcttctccatccttgaattaaaaagaaatggaaaaatagaataaaagagaggttgggctctctgaggtaggggttgctaactggaaggtcggccagattgggcaggtgcatggggcatccctgagacaccgagaggcccaggcggattataaaggaaggctygacttgggaagcagagatggaggcagagatggcggcgcaggcctagacagttcccttctccctgtagacagtgtggcatcatgcgagggtcctgaggggaagcagtttcacagggccartgctttccgttaaggaataggctctgtgttgcaagaggagggctgtggaagacacaggtaccccagggaacccaagggagctgagtcaattgggccataatctstcatcatcttcctggaggataagaatccccttctgcagagcrcctcaccagagggaaataaaaagcagccccgtgaaaaatcccartggccgtaaccatcatgtctgtagtttgaagatgaatagtgaatgtcatttttctctagccctttggcctttgactgctcctgggcacagaacaacagttgaaggacccaaattctgtagatcaaggtcattaaagaaaagagaaagaaggccaggcatggtggctcacacctgtaatcccagcactttgggtggccgaggtgggcagatcacttgaggccaggaattccagaccagcctggccaacatggtgaaaccccrtctctaataaaaatacaaaaattagctgggagtggtggcactgcctgtaatcccagctacttgggaggctgaggcaggagaatcgtgtgaacccaggaggcagcggttgcagtgagctgaggttgtgccattgcactccagcctggggcacaagagcgaagctccatctcaaaaaaaaaaaaaaaaaaaaaaagagagagaaagaaaaaaagaagcttgaaggattcttgagctaactttgtggggacaagacctggggacaaaccacagcaccttagcactggaaaggacctgaaactgagttctctgatttccctttgaaaataagctaagtgcagaaacctaataccctctgcctgtctgaaccggtttgaaaggagcctgtttttccatgctagtccaaagttagctagcccagacaatagagttcatctgctttttccccatgtgtctcccaaaacccttcactttcctgacattaaattttctgtgccaggagtccgatgacagatgggatatgcaccagagacatgggcagaacccactgctgcaatcccaggctgtagacatggcttggggcctagttggagtgggtgtggagagtgaagcagaaagctctgtgttggtgagtgggggaagaggaaactctaggcacagaggaataggaaaagcgccccaggcaagatgatagggattatctagatactattttgtagagtactcaactatcccagttttcctagggctgagaggttttccagaatgtccgactttcagtgctacagargttctggaaagttctgcactgttctggaaaaaactggacccttgaaaaccagaacgtcattcaccatattggagagctctgagtacccgactctccagtggaccctaaggatcactgaagtcacgtctaccaagcttgtaaaacttaaacactcaagcaatccctggtctgtctccatccctactagacccccttttcccctcacacacactcttgttaaatgaattcctcagattatgagaagaaagcaggtggctggatggcatcaatttttttttaattccaatccctctcactcaatgcctattctgctacaggcactgtgctgagtgaaawcccagacaggcagtcagcatggtcaaaattcccatttcttggtgtcatattagtgtagagcatattgtgcagtaagcctctatttattaaacacttagcagaggatgtttagtgacctgaaacctggcagtttccttatcactgctagtcttatggaactttctacctgcacctctcggggtaaacgtgggggagctgcatctctgcagacacccttctctgagtctaggaccttccccacgtcttcccagcatgggtgtctccctcctctctgctgcagcccagctcaggaggggcatgctccacccttcccacctggagagagaaacatcagagcagtttaaccaagtggttgcaggrccatatggtgcctttatgccaatcagaaaaaggcaccccttcctctgggcagacgcagccctttcccagggtgcatggctggatttcagcctctacttcccccgcactgagacttagtgctcagcacaacctgcacgcccctccagggctgccctggtagcttgcctaagtcttggggatrggctcacgttccacagatgagttggagcctcyggtcagagctgtcctcctgcacaaagggtcatgggagcctcctggcttccccgagtacttgcctccttctccagggctgcctgagatctgtctgccagttcccagggtctttcctctctgatccctggggaaaagtggtggtctcccagctccctcatcactggaacccccaagggcttgtccaccaggaactctgccccgcctagcttttctctggcttggggatccgcggactactgttcattgttccagcctgagtatccttttgtcttcagcacctcctggattgtctctccaagctcctccattcttggttctctccctgctcgggctcctaaggtttttatgatggaacaggcccctagccacttactgtagatcaaacactctttagttctctttctctcctcttttttttttttttttwaaagaaaagctctttgaactctttacgactctacccaccacctacctagtcatcacagggaacttttctcagctccagtgcacataggtatgtgaagacaagcactgtcttgccctgggaaggacacatttcttccatttgttcattttaaaattccactaggcccccatctgggcactatttaatccatctccttacctcagaccccctccacctcccctccagccacttcaggaagaaatttatattgtctgacaccccaaccccctttattacaggattcatttttgaaagacaacagrgaggctgrgggaaatgccttaatcttttgatcttcactgtgaagtttgatgcttgatccacctcttcctctgcccatttgcaaagcaaacaagcaggctgtgcattgggctgtaattaagccacatcatcactaatgacatgctctctatctcccatcatcagarcatcatacaatccatccaaacaggaaggagaagcccagccctgcaccgtccctggggagtgctggagtggtgggtcaggcctggggtggcaactgcctccagtgtggaaggaatgaccagcttccctccctgggcccacatcatatctgagcctgctgggccctggggaaaggtgttaagaagggacaggagaagggaagagataccaggcagggcagaagcactaggggcctggaccaccataggcaatgtggaaattgggaggaagaaacataaaagtagcacatcaagaagaaatagaagaagtggagactttagagaaaggagctagggaaggctgggtcaatgaggaggggaagttgctgctgagggaagggctaaaaacagagagaatggaggatgaaccccgaggctggggcagggggctgaaatgagcctttcagagctccatgggagacacatccatgcagccccaccctgcgggtggaagggatggttggcctgctggatacagggaacctctcactgctgtggggtgagggaccctcagcaccaccccaccgatgcagacctgccatggaattagaggcttgggtccgtggggcctagggcaggcttgacgctggcacctgagcctcggggtcagagagtgagctcctccatctggagccaagaccacagccagcccctttggaaagttctatccccctctcctacagaaaaggaggcaggagatgttgacaccaggagaccaagtctccatcttcccattgtcatgggcccccgctgaggcaagtggtgtcttatgcagggctatcaggttggacacacagctgtgggttcaggaggcaggttatgaaataagccaggagtctgcagatccaagagttggggagaatgactcacatcatggggaaacccgtctggaagtgagaaccggtgaaagcaggtcctgggtcctggtggctcctatttcagggaaraggaacaggggcagcgtggagcaagggtgggggctgcatgttttaacagggggccaaggagaaggctcagaggaaccagcagcccttccaggaagagagaaccttctggaaatggatgtgggctgggaggctggaggagaatgtaatgggactggaacggagccagaagctagcctggcaggtgtgcctcaggttcgacgaggcttgctttgcactagtcactgtgctaagctttttgcacattttaactcatttcatcctcacaccaacctgtcaggtaaatactcttgtttttcccacattacaagtgaggaaagagaaattgagcagagaaactgagttgcccacattgcagttataactgggaaaagaaacaaatcaacaaaaggattcagatccacacctggccgactgcaaaatgtgtgtacctccacactggacttmtaaggtccctttcagtcctatatccaccacgctatggttcagttcctgagctcggagcagctttaatctagaacttgagctgcatctggagttccaggaagaagaatctggaatctctcctggagatggacgaattggaagcaagaaggagrgatttcgaggataagccctctaagaggggcctgcatccaaacggggatgcagcgtggacgacttaccggggaggagggatggacaagccaatggcagctggtttgcaggagaggagggaccctcaacawctctggtgctcctggaagctttgctaaatgtgaatgtaagaactgaggggcagtgcagaacaattgtcctttgtgtagttgccactctataggtggcagaagtggcagarcccctgagatggagattggaaacagctggcaaagggcggctcaaaccccagagcagctgccaaatgggacctaagcagtctttaacaagctccctgtctccaacaattcacatccctgttaccrcctcctccaggaagcctttccagattgtgttcctctctcaggcctttcttcctatggagccccctggctgtgccttgccagtgcctccatgcctggctcatctactgcctgagaaagaaagagttctcagaggagggaggggtttgcacactgtgcaggcagggcttaggagagggggtctcagctgagtcatgggggccctcactccaaggacctctggatcagcaccaagattttcaggaaaagctgtctgaaggcctcaggttctctaataagaggtgtggaggttcaggcagcaggcagcatcagcccctgccccctcctccttcctgtaagaggagaggccagagaggagaggaagaggagacaggagtcagacccaggcaacacagaggctggggccagcctgggcatgccagggagtgaaacagcatcccctcccactggcagctccgcgaggggcgcagagcctgtctagggtcatcccacgccctctctgctgtagggaagtctttcctccagagtcacaggggtagaaagtgcagtatccaggaccaatggcagagggcagtgtgtgcacaaaatagaggcaccgagggtttttcccctgcttggaaatgaacagccagtgaacagataggaatgtattttagtgaatggacccagtgccctccacctytcacttagcccatctcggccaggtctctgggcaaagtcctgctgttggtccacacctctcagacatgaaccagcccacagccagcaaacacagacgtatgctttaaaaatactagtaataacagtgagcatctacaggtgtcagactgtgttccaggcactgttttactccccttatctcttttcctattctctgatctcctctaaggtgagttctttgaaaggtaaggaggtgtcgaagccaggagcatagactccagaatcagactggaattcagatcctcccatttactaaccaggtgacatttggttagttacttaactcctctgagcttcaatatcctcacaagttaaatggacattataataatcgcatcttataaaaataatacatgtcagattgttgggagaattaattgagttaccagccataaagtgcttaccagaatgagtgctgagaacagtttctggcaacagaaagcacttcataatggccagcttgtatttatcttcttttacaagggcaggatcttgcactaggccactactggcaattagaagagctaggattcaaagctaggtatatgactcttctgccactatgctaggcccaaggggaccatttatctgacagtcctggctttgccagttgtccaaggatccaccttagtatttatttagatcaaaagtgtcccagtttgagtgactgcctgcacacaaatgcatataagacacaaatttattaacacaaatatgtcatatcacttgcataccagacaattgagacatgggtatgttgtgtgtatatccagctctttttyccagggaaggtgggctaaactaaggcatgcattcccatggtaaaagtgctgactgcragccggaccctggaacaaggggatgtagggcatggagtgagggacagacatgtgagcagctgayatgacaccagaaaaatagagtgccggctttaacacakgctcaggacagggctgtgagtgtacargccactggtccagccccggctgctcaccagtggtgtgaacatggacaggtcactcagccatctgggactcggtttgcctgcctgtagaatgggggtgtggggtagggaggtgttgggccacagctgtattgatccttctcatgtaatgcttgaagatggatgggtccacctggagggaccaggcaccacagaaatgtgggtggtggagtctcagccaggccacacaggtgcgcaggctgtccatcacgggtaatggacatctgaggttgagaaaawgatatgtgcaaaggccctcaggtgtgaaaagtctggcctgcatrgggaaaggctggagaataaggtgggaaacgacacgggggagacaggatctcgggcactctgaatgccatcctcaaacgaggtttgcacttgaaagatggtctcgcattaagggtttttttcaaatcaactgtgctaactgactctgagaaacaaacattcttgcagaaacacacacatacacacacaaacatacacacacatacacatacacacacacgcagagctaaaagagcatccttgaatctctcagcttcttactccactgaatttttcttcatagtagttaacactgcttgacttcatattatatattgctttggtaggtgcatattttcactctccctctatggggccagtgtctgtgcctattttgtttattctggtattcccagtgcctgagcaatgcctagctcactaaatatttgttaattgagcactatttcatatacaccttagatagagaggctacaagcatatatacacacaggccttacatrttagggtgaaaaggaagttggttaaaaraagaggaagacagggccattgtgtgggagcaggactggggagtgagtggtgggtggtggagagtgagacagtggggagaatgaagggaagaccactcgctacacagacagtgagtgtgcwcaaccatgggtgctttgagaaccagagcaggaagccatgaggaagctctaacrtctgtatctatcatggggtaatgatgtcttgcagggctattgtgcagaataggtggcacagggcacgtgaagcaatgggcctgcccggccctggcctcagtaatacatttcaactgtttacaaggatcagccctcacccagtgcctacctggctaaaaccagtgaagagccacatgagcccagagtgaagcaagaatcagatgaagaaaagttaaggcactgcagatggtgacatcctgggcaacagattcaactgagaaccaaacagatttaatcatttattgcagaagaagcagaggactggacacaatcccaatcagaagatgaagagagtcccttggtagtgaaggcccaagaaaggcatgggggcagaggggcttgtagctggccttggggaaacatcctgggtaagtgttgtctttgcatttcaggcaatgacccaacgaaacgggaccaagaaggaggccactgagagagctcctgactggactccttgcatcgaagcatcacaccttgaggacaacagggagaggaaatggggttgggactgtagtgacagacaaagcatttcttgacttggaaagggagcccagggaaggagagggaggagacsggtgagttgggaagccttctkctcacagagccaaccacttgtccatcatctggaggcctttttggtggcacagctgctccccgaggttttggcaaggggatccttgagctcactgccacagctgcctttggtcttgacgtctgcagctgcagttttgtagctataactgcttgaggygccaaagcccatgctgaagccagcccctcctgccccagcattggtgctgctgatgacggctggaatggatgagagaagacctcagcccccgtcagctctagccccacgtcagagycccttcttgggcatctcgggccacctcctttactctcgcccgcagtggcttcctgctgagatggaytctctctgttgtgtgtttcagtctactaagagatttttatcagcactgatcatacagcttcagttttcatgcacttagcctcacacattttaccttttcctattagtgtgtgaatttcccccatgggcargaccaaatgaagagaggcacttcccagggcccatctggtgctgctggtctgctgatgaggaaaggggccactgagggccctgtctstcagcaccacagcatctccacacaggctctccagcttttacagctgaggacatgctctcattcactcattcaactattccatctcattcattcattccatcactcaacccttcaggcccctcaattccccttaactgcaatctgaggcctttgctttggtcaacagaaaaataatgtcacaattaagcatcaatcgttggatgatacactcatgagtatcatttgatctttctataggttgtacttttgtctctcatgatagtcttctccatccactgcttccccttagttactacagccagctccttcctttttcccttaagtctcccctgagccccctctgtcattctgatttctcttttgtgtcatgaattaaagggactcggacttctggtaaggtgaccaagggcagaactgagatctgcagatacttacagatgctcacagaatttggatattcgccagacatcctgaagaaggagaagaaaaacaggtaaatcccccataaataatcaccccaaccacctggaagtcacctctgtgaatragcctctccacgcagaatgtgccttcccaaacccatcctagcctcctttcttcccacacatcccagtgcgacccccaccaagaaatagaaaactgagatgaaaatctgctgcaaggagtcagccctccatcaagaccctttagaactgcttgctgtgtgggatcattaggcctccacttccctctagtcatgccactgttcttagacgattaagaagaatgagcttacctccccattggagccccaggctttgctggagcgaccttgaacttggacagcccttagaggccatcttgctcctcccsccacccacaaaaatgcaccatgaacggtcggggatgctgtttctcaaacattgccggcattaatacctcctctcccacagcctttgggattttttacaacttggtctttcttgctgtctaactttggccttcctaatcatgtgacaagcccatttgctgtatggttttacttcagtaggacctaaacaggaccaaactgtttgccttggagcttcctaccaaagcagagagaaaactggtcccgacacaagggtatccggcccctcacctgcactcctcgctctccagcagcttgmggtaggtggcgatctccatatccagggccagcttcaggctcacgagctcctggtactcacgcagcatccrtgccagctcctccttggcctggtgcagggcgccctccagctcrtccagcttggcccgggcatctttcagggcgcagtccccccgctgttcagcgtcggcgatggccgtctccagwtcggcacactgaggggcaaacagatccagcacttaagagtcagagcccmgttctgagatcttgcttggacaacctccccttgttttgtcctgactgatggcaactgcttggagatcctcctggtttatccaactttggccatccctagaggtgagtctgtccttcccctaactccaggcatggttcaccctggctcatgcctctgcatctgaaagtagaaaaccttcacctgggagggaggaggggaaggcacggagaaagagggcggcctgggcacatggcccctgccctctccctcctggcctgaaatatcagctgtaagattcttatgtcaactctgaaaaaaagtctctgarcagctagatttcattcagctctgcagtgtacaggttgttttaggagatcccataaatcatggggaaaacatgagggctaataaagttcctattaataaattgtcctataaacttgccacacttagagtttggtccccaaatcccaaagagaactatgctaaatggcaacaggcttagaagatacctttacttaactgggaacggaaaaccaaacacygcatgttctcacttataagtgggagctgaacaatgagaacacatggacacagggaggggaacaatgcacactggagcctgttggcaggtggagggagatagaactttaggaaaaatagctaaaaaaaatagctaatgcatgctgtgctcaagatgcatggttgataggtgatgggttgataggtgcagcaaaccaccatggcacacgtttacctatgtaacaaacctgcacatcccgtacatgtaccctagaacttaaaaccaaaactaaaattaaaaataaataaataaataaaatagactgggcacagtggctcatgcctgtaatcccagcactttgggaggccaaggcaggtggatcacctgaggtcaggagttcaagaccagcctggccaacatgatgaaacctcgtctctactaaaaacacaaaaattagccgggagtgatggcrcgcagctgcctgtggtcccagctactcgagaggctgaggcaggagagtcacttgaacccaggagacagaggttgcagtgagcccagattgtgccacagaactccagcctgggtgacagagggagaatccatctcaaatatatatatatattaattaattaattaattaaagaagatagctttgcataactgcagctggggctgtgtgcttgcacttatgtgaaagcccccagggggcttcctgagcccttcagtctggtatatgttccctcagctaaggttttggtgggagctgaggttttctttctggggtatgcccatctgtggagccacatttgcttcacaccaaggaaagcagctgatccaaggccaaatgggctctagaatattgtccagctgccaccatcctcctctgctgggcaggcccacagcagtgccaatgccctcgtattttggatgagtggctcacagcctcaaggagatgcctaggacccagccttctarccacagaaaaccctgccccacccttgggactgtagaagttttaatcattcatggagtggccacacacactgtcacctgaactcatcaaactgtcttctgttcttttttactgaccaagatcccacasagtgaacctggggcagagggacaccaaaagcttgggtcttgtgaacatggcccgagttgagaggacttgaaattttagcatcctttgaaacaaatgtcacatgaatgctgaggacaccaaatgccaaggaactctgcatgtgacatggtggscttctttgatggaggaggccagaagggcaggaagcaccttagctgagggccctcaaaaggagccgcaatggggactcagcattgcgagggatccccatttgttccccgcagagggtatcttccctgaccaccaaagcaagtcagtttctggtaataacttcgtccaaccataaacacatagcatttcattagttaaacactgtagtagaatactgagggtagcttcaaacatctgcgttttttctgcacttatatagctcttgattaaacaaaaacaacttaagttatttaatgctggtctttcttcttcccactaccatgagcacagaggagtagtgygtgtgtgtgtgtctgtgtgtgtgtgtgtacatgtgtaagcatgcaccatgcrtggtgagagatggggtgcaggggagggtaaggagatgggacaacttgacttgcctgggagctgagagccttaaacccttgcactgctttcacaaacttgaggactcatgggtttgcttgctttagagccacagatgtggttgcacgggtactacctcccaaagagggggacctcggtgcagtgtcctccccacagcacagcactagtgcaggaaggccccacgctagtgcagggccctgagcccgatctgggttgtgggggctgtgcctcctccattttgttctaaaatctcctgctggattctctctcctcccacaaggtatcatcatgggaaaccttcaaatggctcccttttacctcctgcgttaggtctaaaccccaagrcttacctattcctacccagtggtgtaccctgctccctgccacccctgctgagcagcgagctgcctgccccagataggcaagcccacctgcacacgtgctgtgcacatcactacctaggcccattgctcctgcgggctccttcacctgctccttcccctctcctggtgtaatcctacctcctgcaaagcttccctggggtcctcattcacctctcacccctctgggctcctgtaacacttacctacagtgtgtaggctgctttatccctccatatctgttcagatcatcctctcctggtaaattagaggaggccctaaggagggcactgtgttttaccctttcttcatattctgtctggcccagattgtgactcaataaatactgttagtggattaatttcatagaacccacytgcttcttcacattccctatctctgagcggatcctctggatcaggcggttgagctcagagatttcagccttggtgagcttgaggtcatccccatgctggcctgctgtgacctscagctcctggatctgaggttgggtgacaagagaagaggaacacaaggatcctactgaactagggcaggtcccttttcttctggacagaaaggatcctgccctagttcaacaagatcctcaggttctcaaacatgagagccttggcagagtgtgaatttcctatcctcattttgccaaagtggaaacatgaagataagacaatatatgtgaattacccatagaaactgtgtcagaatcctatcagggttgtagctggtgtggcctcagccaagggccgtgataggagaagggctaagccccatatatgtccgcaaaacaagccaagactgtagttaatctcccttacccctggggtggcatttccgcaaggcccmacttcaagacaaaggaggtcttgactgagcccaaatmcacacacacacacaaacacacrcacacacacgtacacatgcacacatactgagagggtgctagctgtggccagtgggactcagcacacctggcaccagctcaccttggtctggtacagggtctcagcctcggccttgctctttagggcratctcctcgtactgggcacggacctcggcaatgatgctgtccaggtccagatcccggttgttgtccattgacaggacgatggacgtgtcgctgatgtgggactggatctgagtgatctcctggggacggttgggggaggggagctagttaaggggtactcatgaggaaccagttctcttggtcctccctgggcaaattcctcactgtccctctgcctttcctcagcgtttgaactctgcctcagcaccagtgcctggcaggcacgtgaagaagtgccttaggctttcagccccaaacgctgagactcctctctccattgcacactcaggagcactcctgcacccttctacattctcatcctcagaaaccagccaccgccaccctccacccataggaccaagtctgaactctttacctagcatgtgaagtcccctagggagtcactagcaccagtcccttccccaggcctctgcgcccttcttcattcctcatgctttagcacaggacaggctcctggaccttctatttttctgcycccctcagcacccactgaaatcgtcctctttctcctctctctccaagaaccttcactgatggcccaggcagaacccaccattccttcctctgctctctgaaagctcagctacgtggtgttttcctgccaagctgtgaactcctggagggcaagaatcacttcttctctttcacggactcctcaaaacctagctcattgttcagcacccagtagggccttggtgaatgtcaggggsaccaggttgaaagctttctccctcccaattcttggtccacaccaccttccagccaggggccagaaaccwcttgttaaaggagcagatctcacaagagaggtcagccaagtccttaccccttcayaaaggcacttgaagaatttaatctcatctgtcaaggagtccaccttggcctggagctcaaccttattcatgtaagcagcatccacrtcctgggagcacatgatagtcaagccgccctgagagrgcctcccctgcccatccctccctccctgccacaggaagccttgctctttcctctcccttcaccctgtgcttcatggggggctccctgagagtccccttcagtccctgagagtaaaccaactaacgtgcagtgcaatggctacaccagtagtgcagtaaaatgcccagattttagactggcaaattctagaaacagcatgcatcccaggcaagggacttggagggaggggctgggaagttagagtgccagtcacccctgcccaagggactgagtgacctacagggcccctttcctcaccctacaagcatcattgtgccaggtggtcaggtctaggcttcttccagcccacctggcacccctcttaccttcttgagcaccacaaactcattctcagcagctgtgcgtctgttaatctccacctcatacctgcatggggcaagacaatgaggtaattcagttctgcaaacactcactgaacagttagtgaccacctctgtgctgagagctgcagggtgggggtcttcaaactgggattcccatacccctggggcacacataaccttgcttaagaggatgcaggcaaggacatagttaaaggaatcaatttccagctcctytgtgcctgtgcattctgtcttaaaactacctgcctcagagagcacctgtggttgagatgtcatgcagaytctactgtccctctccctgtcacaattagcccctcccacattatagcagaggtgaaaagacactcccttctggcacatggcatcttaatactgtgcaatggctcagggtgcaaaaacctcctaggcaccaaacaaaagcaccattctcactttcaaactgtatgttatacctatttcttatacatatttctgttccaggtgaagcagaaacagaagcaaggtctaagacacagaaatgtggttagsactgggatgttcttaatacagacatattgttgattggggaggtaagagtactaaccattttatttaaagagcttacctcttccatcccttattattctcaaagaatgcattacaggacatttgtgagagtatggtaaygaaatagagcattggtaagaaataattaatgctaaatggataagcaaaatgtggtgtatacatacartgggatatcattcagacttagaaagaaaaaaaaattctacaatatgctacgacatggatgaaccttgaggaccttttgctaagtgaaagaagccaatcacaaaaaagacaaatattccaaaagacaaatgatctcattcatgtgagatacttagagtagtctaagtcagagacagaaagtagaatggtgggagccaggggctrggaagaggggagggaagaaatgaggaattagtgttaagtgggtatacagttcccatttcactagatggaaagcgtgttctggaggtggacagtggtgatggttgcacaacattatgaatgtatttgataccactgaaccgtccactgaaaaatggttaagatggtaaattttgttatatgtattttaccatagtaaaactttgaaaaaaagaatt

SEQ ID NO: 10062 - DNA, 201 bp, Homo sapiens
tcatgaggaccccataagttgcattattgtccccattttaaggaagagaaaaagtgcttccaaccttttcatatcaagtgcctgtagagaacatgagcatytgtatgaaaccctggatcaaacagaaagagccgctgcttctggccaggggctctgctcaccaggggcccaggaaatcaatttctctaactctatttccca

SEQ ID NO: 10063 - DNA, 201 bp, Homo sapiens
gggaaaccccactagacttcataattgagagtcttttcaatgcatgccaccaatctaattctctctcactaaacgaaagatgaaactagagtgagtcatgyattcacagctgtctctcttgttaactctgtgcagattgatcttttgttggagacttatctagcttaaatacagaattagcagattttagcgttctcctta

SEQ ID NO: 10064 - DNA, 201 bp, Homo sapiens
tgtcctactggctctggttgggagcctttcctagcagtcctaccatgactggcctcttggatccactctgaattcttctacttctctttgcagtagaaagrcattaactgatatttctctttccaaatttctttgcaatgttttctgtagaagaactgaacattaaataaatattatttctagaactcagttttcgcaaaa

SEQ ID NO: 10065 - DNA, 201 bp, Homo sapiens
gcctacctacccaggaaattgcggcagcccccagccgtggagccgcgaacccagcttccctgatggaccgtcacctcccatttgtggatcgcgtcttcctycagggcatcgggagtgaggttgcagatctccactttatcaaagtgggccttgaagtcctgaaatgccatcctgcagcaaagcggagagacacgatgcaca

SEQ ID NO: 10066 - DNA, 201 bp, Homo sapiens
catggctgtgttgcaataaaacttgtttacacaaacagatggtggtccagcccagatttggcccatgggctgtagtttgccaatccttggaacagataaaygttcatgctattatttgtttagtaagagtattctttagttgccaggttgaccatgaactaccataaatagagagctcctggaatgtacattggaaaagtt

SEQ ID NO: 10067 - DNA, 201 bp, Homo sapiens
acattggaaaagtttttctttttgtccagtttttcaggatcacagctgttatacaaagctctgtgtaccaacaatgcatatatcaccaggctcatatacarttttcttagaggagctcaataccctgtggacttaaattaagaaccataaaactgcttgagagtggacaaagagaagataaccatttttcctatcttactg

SEQ ID NO: 10068 - DNA, 201 bp, Homo sapiens
ataaacatcaccatgggaggtaacacatttatgtattgacataaatacaattcgtgaaagttagagtgctgttgtaaaagtctttcttgagaatcaacctkgatgcaaggtgggcctgagggctgaaaggggaggaagaaggggcacctcagaatcgggacaggatcctgagtcagagcccgggaggatagtagacaggcc

SEQ ID NO: 10069 - DNA, 201 bp, Homo sapiens
catgtcctacatccagggaacactggtacaaagggtgggatcccaaggccttgggaagctctgtccctgtgactttggctgctgtcatgggttgttgagtrcctgtggcttttccaggctcaaggtgcaagctgccagtggatccaccattcttgggtctggaggatgatggccgccttcccacagttccactaggcagta

SEQ ID NO: 10070 - DNA, 201 bp, Homo sapiens
gggtttagacaaatctgcagacaggaggaagaatgagatgaatggcacttaagtgttattcctctccagatcatgattctcccagtttgaattaagactcktctctgagttttggaggagagatgcttggaaaggatgattgaagagattcattcacccattagactccctactattgattaaggatgtaatgaagtgata

SEQ ID NO: 10071 - DNA, 201 bp, Homo sapiens
tgtggtcccccgcaatccagcacgtcaagggctcctgatggatcaagataatctgatcgagcaaagtgagagtcggtggcgtccctggcaagatcagggtkagtggggtggtggggcacactcatagctgagtggagtcgagagagtaagggagaagaggaactggcgggcttgctgtagaggacaggagagagctgggtt

SEQ ID NO: 10072 - DNA, 201 bp, Homo sapiens
ggggcagggcaatggatcactcacatggacgctcttctttgtggagcttcctgctgtgaatttccgagtttcctctgcccggcttctcccaccgtctgcaycagaccttctttccactagcctgacctcaggtagcctctcaaactctggtttctacctcctgctcatatgcagcaattactgtgatggtactaattccag

SEQ ID NO: 10073 - DNA, 201 bp, Homo sapiens
gcacagctgtgtttgacaagaaggtggtgctgaggaggagggccgtccagccccacggtcccacgggctgctgagacgtgcaccgtgtaatgctgagtccyactgcaaatgatgcccaagccacagaggtctgcagggaacctggcaatgcttgtgatttccctatggcccgctaccccccggctccctgcgactctatgc

SEQ ID NO: 10074 - DNA, 201 bp, Homo sapiens
ccgggaggctgaggtgggcagatcacttgagctcaggagtttgagaccagcctgggcaccatggtgaaaccctgtctctacaaaaaagtacaaaaaagttrgccaggtgtcatggcatgcatctgtagtcccaactaccagggaggcagaggtgggtggatcacttaagccagggaggtcaagactgcagtgagccatgat

SEQ ID NO: 10075 - DNA, 201 bp, Homo sapiens
cccttggcccaatcaagttgacacataaaactaaccataacaccatctatacagtttttttttggtgagctgttctgccaaccatttttggcctttttaartgaccccaataaatcttttttatgtttagaaactagatggcacacagtttctgttgccttgcttgcatcctgatgtggggggcactcaccaaggggcaga

SEQ ID NO: 10076 - DNA, 201 bp, Homo sapiens
gggagagtcaaaagttattcttgcattttcaactgcgaaggaagtcagtgcctctaaccccagtgctgttcaaggatcaactgtagttcaccaagaaagcyggggttgatcccattccagccctaccctgctcttggtgggcacagagagttgtgagacctacctctggccagacactgttctatgtgtggaaatattgca

SEQ ID NO: 10077 - DNA, 201 bp, Homo sapiens
aaccgaaggaaaaggttctaaagggtggagagcagaagccttgagaaggagcgtgcctgaaaggcatcgctgatggcagtaaatgggtgacagccagcccsggggagctaccctctaggggccgcagaggccacagttggactgggccttccaaaagaagtcggtctcccttttgtcttccttttcgtcttgggtggaagc

SEQ ID NO: 10078 - DNA, 201 bp, Homo sapiens
ctgggatcctctggggagagggtgattgaaaccccctggaatccttctcccatacctctgacactcagacccatggtctcccacccccgtcattgctacartggccccggtaactggccagttttgtacttattggagtctgggggagtgtcatgggaaccacgggacaacatgagcaagggagagtgagcaaactggcag

SEQ ID NO: 10079 - DNA, 201 bp, Homo sapiens
aagctttccacggtagactgggatgatgcacctcagttgcactgagcgtagccggcccctccccagcacccctgtttccacttcctgcgggggctgctgarcctcggcctcatctatgctccttcccctgctcgccccactcacccctggtcgtttccacacaaaggggatctgcggcctctcactgtagaacagggagga

SEQ ID NO: 10080 - DNA, 201 bp, Homo sapiens
cctttgctaggaagcaggtccaggccctcagcctggtggggagatggaagtggggcatgtcctacctcaccagcgacttgttcaaacagagcccgaaaccrctgctcctcctctgtctcctggtcaggtggagttggctttggaggctaaaaaacagccaaagaaacttgcacaaaatgatccacaaaaaagaaacatgac

SEQ ID NO: 10081 - DNA, 201 bp, Homo sapiens
gactgggatgatgcacctcagttgcactgagcgtagccggcccctccccagcacccctgtttccacttcctgcgggggctgctgaacctcggcctcatctrtgctccttcccctgctcgccccactcacccctggtcgtttccacacaaaggggatctgcggcctctcactgtagaacagggaggaattgctggctgggaa

SEQ ID NO: 10082 - DNA, 201 bp, Homo sapiens
actagagcatagcactcacgtacagtttcttttgcctttaatcttacagactccactgatttccaaagttacttaggtcagcacctttctctccaaccccwtcaatgaggttatttcatacgtttgaaattggctctcatagttacggacgccaagaaatctcacaatctgccatttgcaaactggagaaccaggaaagct

SEQ ID NO: 10083 - DNA, 201 bp, Homo sapiens
cagttgcactgagcgtagccggcccctccccagcacccctgtttccacttcctgcgggggctgctgaacctcggcctcatctatgctccttcccctgctcrccccactcacccctggtcgtttccacacaaaggggatctgcggcctctcactgtagaacagggaggaattgctggctgggaagtctgcatcctcaaacag

SEQ ID NO: 10084 - DNA, 201 bp, Homo sapiens
agacatggtgccggacttgtcagcatcaaaccgaaggaaaaggttctaaagggtggagagcagaagccttgagaaggagcgtgcctgaaaggcatcgctgrtggcagtaaatgggtgacagccagcccgggggagctaccctctaggggccgcagaggccacagttggactgggccttccaaaagaagtcggtctcccttt

SEQ ID NO: 10085 - DNA, 201 bp, Homo sapiens
atgccagaggagataatactaaggaagacagccccttggagcagagatctgggactctagagtcgctgggcaggccttggtggccctggtcccaggagggragacttctgaagggggagacaaagatgccctccatgctggtttgtgcgtccagcttttatcttggagaattctaactttgacaaaaagtaagtgagttgt

SEQ ID NO: 10086 - DNA, 201 bp, Homo sapiens
ccagcctgtggtctggccaagtgatgtaaccctcctctccagcctgtgcacaggcagcctgggaacagctccatccccacccctcagctataaatagggcmtcgtgacccggccaggggaagaagctgccgttgttctgggtactacagcagaaggtaagccgggggccccctcagctccttctcggccttgtctctctca

SEQ ID NO: 10087 - DNA, 201 bp, Homo sapiens
gaccacttaggagaaaaggagaagggagaacttccagtattttatccaaattctttattcgtcactcagctagcccagacgtcttcttaggaagcattggragatatgagagagtggtgtggggtgggaagcaaatggttggggagacatagcatctggcttttttgggaagccctgctgggtttagacaaatctgcagac

SEQ ID NO: 10088 - DNA, 201 bp, Homo sapiens
gctgagaagattgacaggttcatgcaggctgtgacaggatggaagactggctgctccctgatgggagccagtgtggacagcaccctggctttcaacacctrcgtccacttccaaggtaaggcaaacctctctgctggctctggccctaggacttagtatccaatgtgtagctgagatcagccagtcaggccttggagatgg

SEQ ID NO: 10089 - DNA, 201 bp, Homo sapiens
ggatgaaggcctcacccagcgtttggggcaatgccagaggagataatactaaggaagacagccccttggagcagagatctgggactctagagtcgctgggsaggccttggtggccctggtcccaggaggggagacttctgaagggggagacaaagatgccctccatgctggtttgtgcgtccagcttttatcttggagaat

SEQ ID NO: 10090 - DNA, 201 bp, Homo sapiens
catgctcatcctcagcccttttgttcctgattttacagaaatctgtaagatatgatgtaaagctcctaactcccctaaataagaaacagataggggtacgrgaatgaggaccagaccaaagggacaatcttcagttgcagacaaaggaaaaggcagaacagattctgaaaatgagtctgtgggaacgacagcaacacagta

SEQ ID NO: 10091 - DNA, 201 bp, Homo sapiens
cactctcatgtcaaatcccagcgtcttttgggaggcagcttcccttttttagtttagtttgttggaagaaaagaattgtccctttcccccctctaaactawaagccttgccagcccaggtgggcagcaccgaggtccctgcagggaacgtgcaaggggaaccctgcagtttcccgctcacatgcccttccgagactgagtg

SEQ ID NO: 10092 - DNA, 201 bp, Homo sapiens
ggaggtgttcacaggattgttcagaaatccacccagggtctttctgcttcttcctaattccagcagaggagcaggcaggtcagacacagagcacagagtcyctggagcctgcacggcagtgctggctgccagccttggccagaatcctgatgtttggggctagaggagggggatgaggggcgattctccccacaccacgtc

SEQ ID NO: 10093 - DNA, 201 bp, Homo sapiens
gtcccactagagaggacctgaggatctggggcctgatgggctccagggtaccgtctgcccagtgcttgctgtgctcctgagcatggggcgctggccctggyggtttccatgacaccaggtcctgacttgacctcgacagatttacctagcctccggatgagaatggtgagctgtgcgtgtcagacgagcagagggaagacg

SEQ ID NO: 10094 - DNA, 201 bp, Homo sapiens
agcagctcggcaaatccatgggtggggtggggctgaggggtgtgtctaagagacactgaggaggctctgtcaagatgttaacctcgtgagggacagagagycaggcgggaggtgaaagacaagactgtggagaaagaggttcagtggcgcatagtgatttttcttaccacgacaacctccttgaggtctttcccttcgggt

SEQ ID NO: 10095 - DNA, 201 bp, Homo sapiens
cccaaaagccctcaacagatttctgtttgtctcattggtcagaactatcttacttgaccactaatggttacagaggagagcagtgatgcaggatttttctyggtccctttgccagtcagggacctcttgctggtgatgctggaggccttgcttggggcacactacctgtccctggaggtgcctcacccaatcggcccccct

SEQ ID NO: 10096 - DNA, 201 bp, Homo sapiens
tggacacatcaccactcccaacctgcctcacccactgcgtcacttgtgatcactggcttctggcgactctcaccaaggtctctgtcatgccctgttataaygactacaaaagcaagtcttacctataggaaaataagaattataacccttttactggtcatgtgaaacttaccatttgcaatttgtacagcataaacacag

SEQ ID NO: 10097 - DNA, 201 bp, Homo sapiens
attttaaaaaatatcattagacttctatctgctatttttttcatagtacatgaaatgaaaaaaaaaaaacaaatttcagaaaactagataggaagatcccrtttcagtaaaatcaaaccaactgaccttgatgtttgtgtgtggaagtgtgtgcctgtttgtacgagcagatagagagctgggaaggatacaggccaggtg

SEQ ID NO: 10098 - DNA, 201 bp, Homo sapiens
atagagaaaattttaaaaaatatcattagacttctatctgctatttttttcatagtacatgaaatgaaaaaaaaaaaacaaatttcagaaaactagatagraagatcccgtttcagtaaaatcaaaccaactgaccttgatgtttgtgtgtggaagtgtgtgcctgtttgtacgagcagatagagagctgggaaggataca

SEQ ID NO: 10099 - DNA, 201 bp, Homo sapiens
tataagtgtgtgtgtttgtatgcatagagaaaattttaaaaaatatcattagacttctatctgctatttttttcatagtacatgaaatgaaaaaaaaaaaacaaatttcagaaaactagataggaagatcccgtttcagtaaaatcaaaccaactgaccttgatgtttgtgtgtggaagtgtgtgcctgtttgtacgagca

SEQ ID NO: 10100 - DNA, 201 bp, Homo sapiens
gggccgggctcggtcagtctccagctgggatccccagagtggtcaccctacccctccctcgagacagactgcctgactgtgtgtcatcaggctggtcaccrtctccctgaacctcgatttgctcacctataaaatggaactaataacgatgcctgggctccctgtctcaggggctctggtatagctgaagagaactaatat

SEQ ID NO: 10101 - DNA, 201 bp, Homo sapiens
gacctcgacagatttacctagcctccggatgagaatggtgagctgtgcgtgtcagacgagcagagggaagacggcagccactctcatgtcaaatcccagcrtcttttgggaggcagcttcccttttttagtttagtttgttggaagaaaagaattgtccctttcccccctctaaactaaaagccttgccagcccaggtggg

SEQ ID NO: 10102 - DNA, 201 bp, Homo sapiens
acacacaaatttgtgtccttctcccacaacgggctctcccgagttctctgtcatctgcacggccctgtgagcaggaggggaaacagagggctcacccctgyccccaaggcccagtgtgcaaatccattcatcacaacgaggttgtgtgagtctccccagtagcaagggctgctgaggaatggagccctcgtttccggggcc

SEQ ID NO: 10103 - DNA, 201 bp, Homo sapiens
aagaaatgttatcaagaaaatcatagggaagaggaaatacatttactatttattaagtggaactgggtcattgtaaaggtcttcatccttattatcttcaygttgagtaggctgagaaggaggaggaggagttggtcttgctgtctcaggggtggtagagatggaagaaaatccccatataagttcaagcctgtgttgctc

SEQ ID NO: 10104 - DNA, 201 bp, Homo sapiens
ctgagatcacatcatggcactccagtcttggtgacaaaagtgaaactccatctcaaaataataataataataataaacaatttctaagtattattcttagyagtcacctacgcatggcactttgtgcagatgactcctgcatgtgtcagggtttttcttgcgggcaatgcagtctgatcagtataaactaggcagagaggt

SEQ ID NO: 10105 - DNA, 201 bp, Homo sapiens
ggccaagtgatgtaaccctcctctccagcctgtgcacaggcagcctgggaacagctccatccccacccctcagctataaatagggcatcgtgacccggccrggggaagaagctgccgttgttctgggtactacagcagaaggtaagccgggggccccctcagctccttctcggccttgtctctctcagatgtaactgagct

SEQ ID NO: 10106 - DNA, 201 bp, Homo sapiens
ttgtgctctgcccaccctccccaagcacagctgtgtttgacaagaaggtggtgctgaggaggagggccgtccagccccacggtcccacgggctgctgagaygtgcaccgtgtaatgctgagtcccactgcaaatgatgcccaagccacagaggtctgcagggaacctggcaatgcttgtgatttccctatggcccgctacc

SEQ ID NO: 10107 - DNA, 201 bp, Homo sapiens
cgggagaagtagggagacatagaaggggcaggtgctggccaagaggcaggggcaggagaggagaaggcggaggggcactcagggcgagggtgtcaggcccrccaccccagagcaccattactcccaggacgcggctgcgtgcagacctggaaccagcctagggagcagccgcagatcacaactgagaacaaacgacagtct

SEQ ID NO: 10108 - DNA, 201 bp, Homo sapiens
tactgtattcttacaataaataagccagagaaaagaaatgttatcaagaaaatcatagggaagaggaaatacatttactatttattaagtggaactgggtmattgtaaaggtcttcatccttattatcttcatgttgagtaggctgagaaggaggaggaggagttggtcttgctgtctcaggggtggtagagatggaagaa

SEQ ID NO: 10109 - DNA, 201 bp, Homo sapiens
cccttcaatcaagaagagtcagatgaaatgaattagcagggccagcccaagaacctcttctgggggtctcagggtagctttcatttgtagcagctgaggckgaagcccagctgcaaggcctttgagagaacgtggtgctggacccgtgtctagggcaggggttctaaaccctgcttacatatcagagtcacctgagaattt

SEQ ID NO: 10110 - DNA, 201 bp, Homo sapiens
agtaactgtgagatgatggatatgttaattttcttgactaccataatcattttactatcttcatatcaaaatatcatgctgtacaccttatataaatacartaaaaattattattaaaaaagaaagaacaggctgagaatggtggcttatgcctgtaatcccaacactttgggaagttgaggtaggaggatcacttgagac

SEQ ID NO: 10111 - DNA, 201 bp, Homo sapiens
aatacgtacaaatattatgtatcaataaaaataagtcaataaaagtattagtcaccacgtgaaaactctgatgttctaagcactttataatgatttctgtrtgattctctaactagtcaaagttgaggtttggagacaaggggtcttgagttaatgggtacagttaaaaggccatgatgtgaatttttatataagctcaca

SEQ ID NO: 10112 - DNA, 201 bp, Homo sapiens
caccatcctctgcctcctggcctgggctggcctggctgcaggtgaccgggtgtacatacaccccttccacctcgtcatccacaatgagagtacctgtgagyagctggcaaaggccaatgccgggaagcccaaagaccccaccttcatacctgctccaattcaggccaagacatcccctgtggatgaaaaggccctacagga

SEQ ID NO: 10113 - DNA, 201 bp, Homo sapiens; identical to SEQ ID NO: 1177

SEQ ID NO: 10114 - DNA, 201 bp, Homo sapiens
gcgcctgcctgctgctgatccagcctcactatgcctctgacctggacaaggtggagggtctcactttccagcaaaactccctcaactggatgaagaaactrtctccccggtaggagcctcccggtctcccctggaatgtgggagccacactgtcctgcccaggctgggggcggggtggggagtagacacacctgagctgag

SEQ ID NO: 10115 - DNA, 201 bp, Homo sapiens
tctcccatccagtttcagggtctagctccaattttccttaaccttgctccctcctcgcccataagtggagcccctaagactgatttgttggccattcacayaggaggcaggtggactcagtaatccctgcgtgccagtgaggagacatgagtggagtgtgggtgtgtgtgaatgcatgtgcgcacacatgtgtatacatgt

SEQ ID NO: 10116 - DNA, 201 bp, Homo sapiens
gcctactcaacctgaagatgataagaatgaaggccttgatgatgatccacttccatttaatggagagtaaatatgttttctctttgttacgattttcttartaacattttattttctgtagcttactttgtgcacagtatataatatacacagtatttaatacctacgacataaaaatatgtgttaatcaacattagatta

SEQ ID NO: 10117 - DNA, 201 bp, Homo sapiens
accaatgcacccactctgatccagctgtttcccttctagaaatttatctttatcctgatgatagagccgcaccccgaaaagtgaaaggtataccagcttgytcatttcatggtggcattgtttacattaaaaaaggttggaaagcacttagtgccctctgttgggggaatggtaaagaaaattatggtccagctaatcatg

SEQ ID NO: 10118 - DNA, 201 bp, Homo sapiens
tcaagacggacagtaactgttaccaactgagtcagcttttcccctaaagatggtatcgtgaagccaatacatgaaacccaaagcgagcctcaagcagtgcrgactttattcaatggccaaagaatggagaagcaggagcatggccgcaagtcaacttcttgtctagtgagaggtgagggggttaaaatatagggtatcctg

SEQ ID NO: 10119 - DNA, 201 bp, Homo sapiens
ttctctgggggtcatcagacgggtgaaatttgagctgagatatgagtgatgaggagccgctgcacaaagatgctggatagagggaacagcaagatttgtgycttaggaagctttgagtttctgtgggttttgttgttgttgttgttgttattattttttttgagatggagtctcactctgtcacccagtttagagtgcagt

SEQ ID NO: 10120 - DNA, 201 bp, Homo sapiens
acaaataaacaaacaaacaacaaaaaataatgctttctgtacataaaccagcacataagtaatataatttcatgggatgatagtcactatagagaagatargggtggtgcagtggaataaggtgagatagggttggtgggcagggctcttctctgggggtcatcagacgggtgaaatttgagctgagatatgagtgatgag

SEQ ID NO: 10121 - DNA, 201 bp, Homo sapiens
cagccctaccctgctcttggtgggcacagagagttgtgagacctacctctggccagacactgttctatgtgtggaaatattgcaatgaagaagatcaaccmtccaaatgctcactgtggccaggctcggtggctcatgcgtatcattccaactctttgggaggccatggtggaatgattgcttgaggcccagaatttgaga

SEQ ID NO: 10122 - DNA, 201 bp, Homo sapiens
cgggtttgtggaagcaaagccacttgcaaagtctggcacatggaggggatcaggagctgctgattcctccctttcccctatcctctctgcaccccctgccmctcccacagatgctgctgaatttcatggtctccttctgagcctgacttgcctcaacttgcaaggcatctcttttgtctctttgtttgcacaatgaaggac

SEQ ID NO: 10123 - DNA, 201 bp, Homo sapiens
gaaacactgagtttcagagctgatagtaatgctgtatcatttcaatcagaaaggaattttgcaaaaaggaactgacttttttgtttgtttgtttttgagayggagtttagatcttgttgcccacgctggagtgcaatggcgcaatctcggctcactgcaacctctgcctcccaggtttaagtgattctcctgcctcagcct

SEQ ID NO: 10124 - DNA, 201 bp, Homo sapiens
tcttcacaaaaatgttatatacatttgaaagagaggagaaagtgcttataattacaagttttctaaggtaaatgctctgagaataagagagggagggaaayctcttcccccattttcaaccgggagaattaagcctcttgtttttaagttgcatttgtccttacagtggctactaggtgttgggaacactgcccgggagct

SEQ ID NO: 10125 - DNA, 201 bp, Homo sapiens
actattctaagaacctcgtaaaagtggaatcatatagcatttgtcttgttgtgactggtttatgttacttagcataatgtcttcaaggtccatccatgatrtagcatatgtcagaatgtcctttctattttgcttgaataatattccatcgtatggatatgtcatattttgtctttctatttatctgttggtggacacttg

SEQ ID NO: 10126 - DNA, 201 bp, Homo sapiens
accctgtctccaaaaaaaagtaaataataataaaaaaaagagtggggctattggttagtggaaggaagaccggagaggtaaagctcccctctcatctcatsatatcaagagtacctgccgtccacatgccttaccacagctgatgctggccttgatcacctggctaaggtagtgttagtcaggtgtctccactggaaagtt

SEQ ID NO: 10127 - DNA, 201 bp, Homo sapiens
aaaaaaaccagccagttatatttaccagctattaattaaatttttcactggaagcagtcttgccttgtacatagggatgaaacacacacacacacacacamatacacacaccatatatatatttataaatgcatatataaaaattatggtaaaatacatgtaacataaaatttacaaccttaaccatttctaagtgctcag

SEQ ID NO: 10128 - DNA, 201 bp, Homo sapiens
tgggactatagtcatacccagctaattaaaaaaaaaaaaaaacctgtagaggagggagtctcagtatgttgcccacactggtcttgaactcctagcttcawatgattctcctgccttggcctcccaaagtgctggggttacagatgtgagccactgcacctggccttattatgtttaattggagggaacattgataaagtc

SEQ ID NO: 10129 - DNA, 201 bp, Homo sapiens
agttgagcagcccatactgctgctctacctacggagtggccattctttctttacgtctttataaacttgctttcgatctatagactcgtcctgaattcttycttgcgtgaggtccaagaaccctctcctggggtctggatcaggacccctttccagtaacaggtccacttttccccaaataagtgatcttcctcctccttc

SEQ ID NO: 10130 - DNA, 201 bp, Homo sapiens
aatgataaatatacctgtctgccttctgctaactctctgggatttctttccctggagtttgacctcagcccaagacgatttcctttctccttctcatctasgagctggaggttgatgctatgcacagatcttaggatgacttgaatcacaggtgcagcaggataggaatttactctccgcagtttagggcccaaaaaaatc

SEQ ID NO: 10131 - DNA, 201 bp, Homo sapiens
gaccaccctggctaacacggtgaaaccccgtctctactaaaaatacaaaaaattagctgggcatggtggcgggcacctgtagtcccagctcctagggaggstgagacaggagaatggcgtgaacccaggaggcggagcttgcagtgagccgagatcccgccactgcactccagcctgggcgacagagcgagactccgtctc

SEQ ID NO: 10132 - DNA, 201 bp, Homo sapiens
gaagtatagtggcatgatcatggctcactgcagctttgacctcctgggctcaggtgatcttcccaccccagcctcctgaggaagctgggactacaggcacrtgccaccaaacctagataattctttgtattttttgtatagatggggttttgccatgttgctgaagctggtctcaaactcctgggctcaagtgtttcaccc

SEQ ID NO: 10133 - DNA, 201 bp, Homo sapiens
tgtccctcacatagtattgcaaatgacatgaaggatttttattgtaggttttgctgaaattttccccaagggggaggatgacttagttgggtgatgggggkagcaaacatccctgtcgtcagggttgggtgcaaggagcataagcctgcctggcctctgggagagccctcactgtgtggcctggagccttcctaactgtgc

SEQ ID NO: 10134 - DNA, 201 bp, Homo sapiens
caggtataaatattgaaacctccttagcgaaaattataacggtgagcaaattatgacagcggaggagatctgacctaaccatctccttcttgccttttaayctctaaactgtcctgggtcattttggggcatgggtcaagctaactttaggagaaatttagtttatagtttaaatgatgatagaccttcccaaaactaagt

SEQ ID NO: 10135 - DNA, 201 bp, Homo sapiens
gtcaggcgtggtgggggtgcctgtaatcccagctacttgggaggctgaggcaggagaattgcttgaacccgggagtcagaggctgcagtgagccgagatcsagccacggcactccagcctgggcgaggagcgagactccatctcaaaaagaaaaagtaaaacacccccctacttgctgaagggagtgtaaattggtgtctc

SEQ ID NO: 10136 - DNA, 201 bp, Homo sapiens
caaactcctggcctcaagtgatcctcccgccttggattcccaaggtattgaggttacagacacatgccaccctgctcagtgtttctttttacagagatgcrcttaggtaaaatttcatgtatctataccatataaagagagatatgcacacatctctcatattgtttcaccgaagtgcattatatatatatattattctat

SEQ ID NO: 10137 - DNA, 201 bp, Homo sapiens
tttctcttcttcttgttcatcttgaagggcagcaggaggtgaacatagtgcctgggtggctctgggatgccatggggcaaaaccccaaggacaaatgctcrgaagcttcacatgggtgcagggagatgacctctaggaccccacccggtccaggccttacagcagggcctgggttttgagggatatgccaaacagcctgga

SEQ ID NO: 10138 - DNA, 201 bp, Homo sapiens
tgcctcaagaaagcagatggcattcttgggtgtcttcatttagttttccaaaccttcacttctcaggatgaacaatagttacagaaactgcagccatgcartctaaggtctaccaggccttgcacacttcctcacccacactgggaaatgccctgagtggctcagagggaaagggctctgagcttgggcagagaatcatgt

SEQ ID NO: 10139 - DNA, 201 bp, Homo sapiens
ctgctgattcctccctttcccctatcctctctgcaccccctgcccctcccacagatgctgctgaatttcatggtctccttctgagcctgacttgcctcaamttgcaaggcatctcttttgtctctttgtttgcacaatgaaggactttggaactggggtcctctggctgggaccagagtgcagttctggccagtccaaatg

SEQ ID NO: 10140 - DNA, 201 bp, Homo sapiens
ggtgatcttgggcgagttatccatgctgtctgtccctgcttccaagctgtgaatcaggataatcggtgctgcctgctagaggcatggcgggtttgtggaarcaaagccacttgcaaagtctggcacatggaggggatcaggagctgctgattcctccctttcccctatcctctctgcaccccctgcccctcccacagatgc

SEQ ID NO: 10141 - DNA, 201 bp, Homo sapiens
gaaatgataaatactggaggggatagatagcctaaataccccaactcgatatcacacattctgcacatgtaacaaaatagcacatgtaccccatcaatacrtacaaatattatgtatcaataaaaataagtcaataaaagtattagtcaccacgtgaaaactctgatgttctaagcactttataatgatttctgtgtgatt

SEQ ID NO: 10142 - DNA, 201 bp, Homo sapiens
tgaacctgggaggtggaggttgcagtgaactgaggtcgtgccactgccctctagcctgggtgacagagagagactctgtcaaaaaaaaaaaaaaaaaaaargaaaaaagagagagagagagaaagaaaagagagagagagaaggaaagaagaaaagaaatgataaatactggaggggatagatagcctaaataccccaact

SEQ ID NO: 10143 - DNA, 201 bp, Homo sapiens
ccatagagtctcgctgactttacaggaagctttgtttgggggaacttaacactgggtggtgtctgagccccaagttcattcctacaccagcctcccctcgygttctatgtctcaggtcacttccagctgtggccctagaaagtttcttggaggggatgctgctgcccacggagaatgatactctgccagggcccattccta

SEQ ID NO: 10144 - DNA, 201 bp, Homo sapiens
gataaatgtgtttgcccatagaaatgattatacaggctgggtgtggtggctcacacctgtaatcccagcactttgggaggccgaggagggttgatcacccraggtcaggagatcaagaccagtctggccaacatcatgaaaccctgtctctactaaaaatacaaaaaattagcccggtgtggtggcggatgcttgtaatcc

SEQ ID NO: 10145 - DNA, 201 bp, Homo sapiens
cctccacctcccaggttcaaggggttctcctgcctcagcctcccgagtagctgggattacaggtgcataccaccacatttgactaattttttgtatttttmgtagagacaaagtttcgctatgagctggtctcgagctcctgacctcacgatccaactgcctcaacctcccaaagtgctgggattacaggcgtgagccact

SEQ ID NO: 10146 - DNA, 201 bp, Homo sapiens
caaaggcaggtgggggttagatttcatccaacctgacccctgatagaggagaactcacagaggacatcggctcttcctctagggcacatgtgcctctttcrttctctagacatcatattaataaagttccttgttgttatagtcctacaaataggatctcacgtctgagaaaaaacaaatgttagaggatggaggtggttt

SEQ ID NO: 10147 - DNA, 201 bp, Homo sapiens
tgtgggcacttctcttcatgatgatgttcagtcatttaggtctctgtggaatggctggcaggaggccctaatggtgacagaaatcccagtgactactgtcytactggctctggttgggagcctttcctagcagtcctaccatgactggcctcttggatccactctgaattcttctacttctctttgcagtagaaaggcatt

SEQ ID NO: 10148 - DNA, 201 bp, Homo sapiens
ttcagcactggggtcagcaaaccttttctgtaaaggcccagaccatgaatattttcagctttgtgggccacgcaaagtctgtgctgcaactactcaacttwgctgttgtagtgacaaagcagccgtagatgtgacacagatgaatgggtgtggctgtgttccaataaaactttatttacaaaggcaggtgggggttagatt

SEQ ID NO: 10149 - DNA, 201 bp, Homo sapiens
cactatgggaggagcaggctggagtgaagtggcaccatctcggctcactgcagggggaacgctgtgcctcttgggttctcagggaccccatactgcagtcrctcttgatccagcaatccaacctccctctcgccatgctccatcccctcacactcacccagctccacccctacccccaccccctgcagataacagcatgcc

SEQ ID NO: 10150 - DNA, 201 bp, Homo sapiens
agcaaacatccctgtcgtcagggttgggtgcaaggagcataagcctgcctggcctctgggagagccctcactgtgtggcctggagccttcctaactgtgcrtcatctccccaggaccatccacctgaccatgccccaactggtgctgcaaggatcttatgacctgcaggacctgctcgcccaggctgagctgcccgccatt

SEQ ID NO: 10151 - DNA, 201 bp, Homo sapiens; identical to SEQ ID NO: 1174

SEQ ID NO: 10152 - DNA, 201 bp, Homo sapiens
aggattttctaggcctcccctttcctttcactaatcacctacaatcccaatatccaccccctaaaccttttctaataaaattatgccctgccttaaagccrtctcagggagacaggtttgagcttgacccctgttgcaatagaaagcttttcttttgtcaaaaacccagagtcatagcactggcttctagtgcatcaggca

SEQ ID NO: 10153 - DNA, 201 bp, Homo sapiens; identical to SEQ ID NO: 1176

SEQ ID NO: 10154 - DNA, 201 bp, Homo sapiens; identical to SEQ ID NO: 1178

SEQ ID NO: 10155 - DNA, 201 bp, Homo sapiens; identical to SEQ ID NO: 1181

SEQ ID NO: 10156 - DNA, 201 bp, Homo sapiens; identical to SEQ ID NO: 1183

SEQ ID NO: 10157 - DNA, 201 bp, Homo sapiens
gcctatcacctgctgacaagacccactctgactccaggtcctcagcctcggtgggagtcagacagcttggagccggggagcgggtacaaccagatgccccsggtccccaccgcagagcatcccaggcctgtacattattttctgcctccaaactgcaaagctttccacggtagactgggatgatgcacctcagttgcactg

SEQ ID NO: 10158 - DNA, 201 bp, Homo sapiens
ccacacacagggtgggggcctgtccttgtggataaggttttgattcgtgcctatcacctgctgacaagacccactctgactccaggtcctcagcctcggtrggagtcagacagcttggagccggggagcgggtacaaccagatgccccgggtccccaccgcagagcatcccaggcctgtacattattttctgcctccaaac

SEQ ID NO: 10159 - DNA, 201 bp, Homo sapiens
acccagtgaccagctggtgcctcttgggacgacacctccagactgtcagaggtggggcactgttcaccctgatctctgggaatggggggtgcatggttctygggagaagattcctgcttcccttgtattccatctgtcacccggttgctgagaccttgctgagccaaacatccatccacactgagcaccctcagctctggg

SEQ ID NO: 10160 - DNA, 201 bp, Homo sapiens
ggacccctgaggcaacatgaagagataactgtgcaaacctgaggattttctaggcctcccctttcctttcactaatcacctacaatcccaatatccacccsctaaaccttttctaataaaattatgccctgccttaaagccatctcagggagacaggtttgagcttgacccctgttgcaatagaaagcttttcttttgtca

SEQ ID NO: 10161 - DNA, 201 bp, Homo sapiens
cgggcactcaggatctcacttgtaggaccagcatcccttgtactgcccctccttgcccaaaagcaaccggaccccacaggagccactcccaggcccgtacmcacctggagggaatggaagccagcccagctggcgccgggtcagaggtagagccctgactaatccagcaccgcaaatattgacatggcgtcccaggcacaa

SEQ ID NO: 10162 - DNA, 201 bp, Homo sapiens
cattagccattattgttcccattttacaggtgaggagactgaggctcagggaaatgaagtgatatgactatatgcatgagacaaattgtcaggataagacrggcactcaggatctcacttgtaggaccagcatcccttgtactgcccctccttgcccaaaagcaaccggaccccacaggagccactcccaggcccgtaccc

SEQ ID NO: 10163 - DNA, 201 bp, Homo sapiens
taatcattgtaatgatgataataatagtatcagtaatagtaataatgtgacaatagctgtaatgtactggaaaccttctgtgtgctagacattggcctgcrttagccattattgttcccattttacaggtgaggagactgaggctcagggaaatgaagtgatatgactatatgcatgagacaaattgtcaggataagacgg

SEQ ID NO: 10164 - DNA, 201 bp, Homo sapiens; identical to SEQ ID NO: 1166

SEQ ID NO: 10165 - DNA, 201 bp, Homo sapiens
cggctccctgcgactctatgctgcaaaaagagtctccatgctcatcctcagcccttttgttcctgattttacagaaatctgtaagatatgatgtaaagctyctaactcccctaaataagaaacagataggggtacgagaatgaggaccagaccaaagggacaatcttcagttgcagacaaaggaaaaggcagaacagattc

SEQ ID NO: 10166 - DNA, 201 bp, Homo sapiens
aggagggagattaaatttccctctaatctgggtgtatatgaggagtctgagacagatgaatttgatttgccaaaaatggagagagaaggctgggcgtggtrgctcatacctgtaattccagcactttgggaggccaaggtgggtggtttctctgaggtcaggggttcgagactagcctggccaacacggtgaaaccccatc

SEQ ID NO: 10167 - DNA, 201 bp, Homo sapiens
tggggcaaggctagctacagcagtcagcaggggaggcgtctctgggggaagcagaggagcacagacctaaacaaagggagggagggagggagggagggagraagccgggccggtctcgggagaggtaacagccaatcctgtggcagcgaggcacgttctggctcaccctgcaggggtggtgagttaactgggccggggcct

SEQ ID NO: 10168 - DNA, 201 bp, Homo sapiens
ataggtttagagacagaatcttgctgtgtcacccaggctggagtgcagtgacatgatcatagctcactacagccttgaccttctgggctcaagcaatcctyccacctcagcctcccaagtaactgggactacagacgtgagtcaccacgcccagccactttttaatttttttttttttttttgtggagatgggggtctcgc

SEQ ID NO: 10169 - DNA, 201 bp, Homo sapiens
acctttcagaaggaaaattggctaaatgtgaaaaaagcaataaaagtgggaatacgccttcatccatttattctagttctaagaaccccgagcaaagaatwacatatgaagatttttgtcatcatattatttatagtggcaaaaatttggaagtgaaataatgaccaatagagaggcatggtcaataccttaggctatgtc

SEQ ID NO: 10170 - DNA, 201 bp, Homo sapiens
aattactcaccaactaaaatcactgtcaatctgagatttcggctgggcatgagaccatggtcaggggatgctttgaacagcctctgaggaaattagtgagyttgaaaaatggaaagatttttattactcacttggcagtaaaacctgatggggacagacgtcaggctgtttaagatcctcagaagaaaaagttgatagtgt

SEQ ID NO: 10171 - DNA, 201 bp, Homo sapiens
gactttattttaaaaggcagcaggcagtcgacaaaccaatttcttctacttagaggcggcttcggcttctggaagtcgctaggagtataaagttgccaacyagcgctgttctcccgctgttttctgtgcacttataaatgggaagttaggtcaggatagatctctcagctattacaaggatacaaaatacgaacattctac

SEQ ID NO: 10172 - DNA, 201 bp, Homo sapiens; identical to SEQ ID NO: 1212

SEQ ID NO: 10173 - DNA, 201 bp, Homo sapiens
gggagggaaccactttaaaaggttcaggaggcccctatctgtgaggtgtgcttggtgagaagcgcaggcagcccggcaggcgggaggtctgcagagcgctygtggaaactacggttgtgtgtgcaggacatgggaccacagagatgccgacagccatccagcaccggacaagagtgggaaatgccacctggagcccagcct

SEQ ID NO: 10174 - DNA, 201 bp, Homo sapiens
ggggtttcaccatgttgaccaggctggtcttgaactcctgacctaggtgatccgcctgtctcggcctcccaaagtgctgggattacaggcgtgagccaccrcacccggcctatgattccttttatataaaatattcagaatatgtaaatagaatctatagagaaagtagatgagtggttgcctggggctgggggaaatggg

SEQ ID NO: 10175 - DNA, 201 bp, Homo sapiens
tgcatactcaagtcccacagtaagccctgtggaatctgcctataccaagtcagccctctgtatatgcgggtttcaaatcctggaatagtatattttctccyttccttccttccttccttccttccttccttccttccttccttccttccttccttccatcctccctccctcccttcctccctctctcccttccttctttcc

SEQ ID NO: 10176 - DNA, 201 bp, Homo sapiens
agcacgggctgggcgagcagacatttcatagctgccacccaagtggttcggcagtacttgggagggtggttagaaatctccctgcagccccaacccagacwcagcttaattacagataatggtatctccgtggtggctccatttgctttaaattatcttgcattttcaagatttattgactgacctactgaacttcccagc

SEQ ID NO: 10177 - DNA, 201 bp, Homo sapiens
ttgccaaaacatcacttatagttttaaatgtatgctccataaggattcaccgtgcaatgccgttaatgttcttctgaggcatttagctgttattccatgataaaatgtggctttagcatggtttaggaccatatgtcacacagatctgatgacatttttttctagggttaccaggcagtgtggaaatgcacctgccctcat

SEQ ID NO: 10178 - DNA, 201 bp, Homo sapiens
catgacaggtatgtgcactgtttgtggtttatttatacattgcatgtgtgaaagcatgtgtttgctcacatgtgtgcatgtgtgtgcatgtatgtgtgcaygcatgtgtttgcaagtgcttctacacacgtgtgtgtttgagcacatgtatgcatgtgtatgagcttgtgtgtggtctgctgggaacaggaagggaggttg

SEQ ID NO: 10179 - DNA, 201 bp, Homo sapiens
tggttaaaacttgtgttttatttatttatttttattttattttattttattttttatttatttatttatttatttatttatttatttatttatttattatwctttaagttttagggtacatgtgcacaacgtgcaggtttgttacatatgtatacctgtgccatgttggtgtgctgcacccattaactagtcatttagcac

SEQ ID NO: 10180 - DNA, 201 bp, Homo sapiens
cccgcccagggctgcgctcagccaccttcctgctgtgctttaagcagtcacatgagcccccattttctccatccgatcctgtggtcccctaatctccctgycttgcctgtttattgcagtgcctaatatactaccatcagacagcccctaggtttagatatcacccctccaggtgacccctttcataattcaggaacccca

SEQ ID NO: 10181 - DNA, 201 bp, Homo sapiens
ttggttaaaacttgtgttttatttatttatttttattttattttattttattttttatttatttatttatttatttatttatttatttatttatttattatactttaagttttagggtacatgtgcacaacgtgcaggtttgttacatatgtatacctgtgccatgttggtgtgctgcacccattaactagtcatttagca

SEQ ID NO: 10182 - DNA, 201 bp, Homo sapiens
aagcatgatggcatgtgcctatagtcccggctactcaggaagctgaggtgataggatctcttgagcccatgagtttgaggctgcagtgagctaggcttatrccactgcactccagccagggtaaaagagtgagactctgtctaaagcaaaacagaactaaaaaacaaagcgtctgggcctattccaagcttctttgggctc

SEQ ID NO: 10183 - DNA, 201 bp, Homo sapiens
gcttggttaaaacttgtgttttatttatttatttttattttattttattttattttttatttatttatttatttatttatttatttatttatttatttattatactttaagttttagggtacatgtgcacaacgtgcaggtttgttacatatgtatacctgtgccatgttggtgtgctgcacccattaactagtcatttag

SEQ ID NO: 10184 - DNA, 201 bp, Homo sapiens
agtatctcagggcctcttgcgagtcctccagcccttggacgagggtaaagccacccccatgtcaccccttccacaccacataacataggggagatgtaatrtgttcccctgagtccacagtaaaaaacatctccctgcctctctggttttcttttcattgattagatttcttaaaatacaattaaaagtctacccacttca

SEQ ID NO: 10185 - DNA, 201 bp, Homo sapiens
catgcttggttaaaacttgtgttttatttatttatttttattttattttattttattttttatttatttatttatttatttatttatttatttatttatttattatactttaagttttagggtacatgtgcacaacgtgcaggtttgttacatatgtatacctgtgccatgttggtgtgctgcacccattaactagtcatt

SEQ ID NO: 10186 - DNA, 201 bp, Homo sapiens
tcccattgcagtgctttatccctaaataaatagcttttcttttagagagtgtctctgtgtttgttatttcagttgacagtagcacagaggaagatgacatsgaacagaactttataccaagcacccacctcactcccatgccaggtccttgtggactagaagagcacagactagaacacacacatcttggtctccaggagg

SEQ ID NO: 10187 - DNA, 201 bp, Homo sapiens
ccatgcttggttaaaacttgtgttttatttatttatttttattttattttattttattttttatttatttatttatttatttatttatttatttatttatttattatactttaagttttagggtacatgtgcacaacgtgcaggtttgttacatatgtatacctgtgccatgttggtgtgctgcacccattaactagtcat

SEQ ID NO: 10188 - DNA, 201 bp, Homo sapiens
actttggctgctgtcatgggttgttgagtacctgtggcttttccaggctcaaggtgcaagctgccagtggatccaccattcttgggtctggaggatgatgrccgccttcccacagttccactaggcagtaccccagtggggactctgtgcgagaccttgaacctcacatttccccatctgcatagccctagtagaagttct

SEQ ID NO: 10189 - DNA, 201 bp, Homo sapiens
tggtaatttgttacggcagccctagaaatgaatgcaggaggttcctccagggtgaacttggaagccataggatggagatggctgacttccagtcagcctgrgtccccgaatgacctactcatggcctccccagcagcattatagtagaacaaaaaaaacttctcctgtggctgacacccacttttgagtctgtatattaga

SEQ ID NO: 10190 - DNA, 201 bp, Homo sapiens
gcgtctctgggggaagcagaggagcacagacctaaacaaagggagggagggagggagggagggaggaagccgggccggtctcgggagaggtaacagccaawcctgtggcagcgaggcacgttctggctcaccctgcaggggtggtgagttaactgggccggggcctgcagaggagtgaaggatttttcccacctcttccca

SEQ ID NO: 10191 - DNA, 201 bp, Homo sapiens
tttatggccagatccaaagtttccttttgttttatttttcccctgctgtagtcaagtccaatgtctcaggctcaaattctgcacatctaaattttgccagsaatattctgtttgtttgtttgtttgtgacaatgtcttactctgttacccggactgaagtatagtggcatgatcatggctcactgcagctttgacctcctg

SEQ ID NO: 10192 - DNA, 201 bp, Homo sapiens
cccagctgtgagctctgtgacctctgtgggcttcaaggagctgagtaatgcatgtaccacaggctggggccttggactaaacatactccctacccacccakcttctccatttctttctttatataatccttcccccacaaagtggattccaaatatatataggtttagagacagaatcttgctgtgtcacccaggctggag

SEQ ID NO: 10193 - DNA, 201 bp, Homo sapiens
ccaccatgcttggttaaaacttgtgttttatttatttatttttattttattttattttattttttatttatttatttatttatttatttatttatttatttatttattatactttaagttttagggtacatgtgcacaacgtgcaggtttgttacatatgtatacctgtgccatgttggtgtgctgcacccattaactagt

SEQ ID NO: 10194 - DNA, 201 bp, Homo sapiens
ctgtatccgagccccgaggtgagtctgcacctttgagggagctcccaggcagctgaggagagggctcagaagaggaagccactgtttcactcctcaaagckggggtccccagacccagtgggactgctgcccttggtgtgaatgcagcgtgagagtgtgaatctgtggtgcaggggcgagtgtgcgggggactctcaggcg

SEQ ID NO: 10195 - DNA, 201 bp, Homo sapiens
gttgctcaagggtcaactgtgtgatgtagatagatagatagatagatagatagatagatagatagatagatagatagatagatagataggtgtgtgtgtgtttaattgtatgtatatatatttggttccctagtgattctatttctctgaagaatcctgactaacacaggactgaaggagaattgggaaagaaaggaaatt

SEQ ID NO: 10196 - DNA, 201 bp, Homo sapiens
tgttgctcaagggtcaactgtgtgatgtagatagatagatagatagatagatagatagatagatagatagatagatagatagatagataggtgtgtgtgtgtttaattgtatgtatatatatttggttccctagtgattctatttctctgaagaatcctgactaacacaggactgaaggagaattgggaaagaaaggaaat

SEQ ID NO: 10197 - DNA, 201 bp, Homo sapiens
ttaggtcaggatagatctctcagctattacaaggatacaaaatacgaacattctacaagttacttaacacacacacacacacacacacacacacacacacacaaaattaattccacaggtcagtttctctgaaacattttttcactaaattctaagtcttcctggagttgcaagtgcctatctcctagacaaggcaattac

SEQ ID NO: 10198 - DNA, 201 bp, Homo sapiens
gttcaagcctgtgttgctcaagggtcaactgtgtgatgtagatagatagatagatagatagatagatagatagatagatagatagatagatagatagataggtgtgtgtgtgtttaattgtatgtatatatatttggttccctagtgattctatttctctgaagaatcctgactaacacaggactgaaggagaattgggaa

SEQ ID NO: 10199 - DNA, 201 bp, Homo sapiens
gttaggtcaggatagatctctcagctattacaaggatacaaaatacgaacattctacaagttacttaacacacacacacacacacacacacacacacacacacaaaattaattccacaggtcagtttctctgaaacattttttcactaaattctaagtcttcctggagttgcaagtgcctatctcctagacaaggcaatta

SEQ ID NO: 10200 - DNA, 201 bp, Homo sapiens
agttcaagcctgtgttgctcaagggtcaactgtgtgatgtagatagatagatagatagatagatagatagatagatagatagatagatagatagatagataggtgtgtgtgtgtttaattgtatgtatatatatttggttccctagtgattctatttctctgaagaatcctgactaacacaggactgaaggagaattggga

SEQ ID NO: 10201 - DNA, 201 bp, Homo sapiens
agttaggtcaggatagatctctcagctattacaaggatacaaaatacgaacattctacaagttacttaacacacacacacacacacacacacacacacacacacaaaattaattccacaggtcagtttctctgaaacattttttcactaaattctaagtcttcctggagttgcaagtgcctatctcctagacaaggcaatt

SEQ ID NO: 10202 - DNA, 201 bp, Homo sapiens; identical to SEQ ID NO: 1169

SEQ ID NO: 10203 - DNA, 201 bp, Homo sapiens
taagttcaagcctgtgttgctcaagggtcaactgtgtgatgtagatagatagatagatagatagatagatagatagatagatagatagatagatagatagataggtgtgtgtgtgtttaattgtatgtatatatatttggttccctagtgattctatttctctgaagaatcctgactaacacaggactgaaggagaattgg

SEQ ID NO: 10204 - DNA, 201 bp, Homo sapiens
aagttaggtcaggatagatctctcagctattacaaggatacaaaatacgaacattctacaagttacttaacacacacacacacacacacacacacacacacacacaaaattaattccacaggtcagtttctctgaaacattttttcactaaattctaagtcttcctggagttgcaagtgcctatctcctagacaaggcaat

SEQ ID NO: 10205 - DNA, 201 bp, Homo sapiens; identical to SEQ ID NO: 1170

SEQ ID NO: 10206 - DNA, 201 bp, Homo sapiens
tataagttcaagcctgtgttgctcaagggtcaactgtgtgatgtagatagatagatagatagatagatagatagatagatagatagatagatagatagatagataggtgtgtgtgtgtttaattgtatgtatatatatttggttccctagtgattctatttctctgaagaatcctgactaacacaggactgaaggagaatt

SEQ ID NO: 10207 - DNA, 201 bp, Homo sapiens
gaaatgatagtgttggagtgctaaggggaatgattcagaagaaggggggaattcatacgtaaggggagagaagagagttgcaggaggtacatcctagagcyggtgaagaatggaaagaggctacacagggcttcagagtcaggattccaggaggaagggctccacgcacagagtgcatgatttaacaccacccatcacctt

SEQ ID NO: 10208 - DNA, 201 bp, Homo sapiens
ggaagttaggtcaggatagatctctcagctattacaaggatacaaaatacgaacattctacaagttacttaacacacacacacacacacacacacacacacacacacaaaattaattccacaggtcagtttctctgaaacattttttcactaaattctaagtcttcctggagttgcaagtgcctatctcctagacaaggca

SEQ ID NO: 10209 - DNA, 201 bp, Homo sapiens
acagggaatattgagacaatgaaagatctggttagatggcacttaaaggtcagttaataaccacctttcaccctttgcaaaatgatatttcagggtatgcrgaagcgagcaccccagtctgagatggctcctgccggtgtgagcctgagggccaccatcctctgcctcctggcctgggctggcctggctgcaggtgaccgg

SEQ ID NO: 10210 - DNA, 201 bp, Homo sapiens
atataagttcaagcctgtgttgctcaagggtcaactgtgtgatgtagatagatagatagatagatagatagatagatagatagatagatagatagatagatagataggtgtgtgtgtgtttaattgtatgtatatatatttggttccctagtgattctatttctctgaagaatcctgactaacacaggactgaaggagaat

SEQ ID NO: 10211 - DNA, 201 bp, Homo sapiens
gaggctacacagggcttcagagtcaggattccaggaggaagggctccacgcacagagtgcatgatttaacaccacccatcaccttgggcaggctcagcccwggtgttggggctgctccttcaagaggggcagggcaatggatcactcacatggacgctcttctttgtggagcttcctgctgtgaatttccgagtttcctct

SEQ ID NO: 10212 - DNA, 201 bp, Homo sapiens; identical to SEQ ID NO: 1172

SEQ ID NO: 10213 - DNA, 201 bp, Homo sapiens
catataagttcaagcctgtgttgctcaagggtcaactgtgtgatgtagatagatagatagatagatagatagatagatagatagatagatagatagatagatagataggtgtgtgtgtgtttaattgtatgtatatatatttggttccctagtgattctatttctctgaagaatcctgactaacacaggactgaaggagaa

SEQ ID NO: 10214 - DNA, 201 bp, Homo sapiens
gtgtcagcacgggctgggcgagcagacatttcatagctgccacccaagtggttcggcagtacttgggagggtggttagaaatctccctgcagccccaaccyagactcagcttaattacagataatggtatctccgtggtggctccatttgctttaaattatcttgcattttcaagatttattgactgacctactgaacttc

SEQ ID NO: 10215 - DNA, 201 bp, Homo sapiens
caagggtgcttctgggtgacatgaaatttaagttgattgagtaaaacagattgccctccccagtgtaggtgggcctcatctcatctgtgaagacctgaccwgaacaaaaaggcagaggaagggggaattcactctctcttcctgggtgcctgagctgggacatccgtctctcctgccctcagactgggacttttaccattg

SEQ ID NO: 10216 - DNA, 201 bp, Homo sapiens
gtgccggtcaagaaggaacagctcagagggccactgggctgagtggccctcacctccacctattttctgggcacctccctgttagactgagatgggacacrccctgatggaaaacagcagagagagccctctgcccactctgcactcctgcagactcagaggcagctctggggcctggcacattccactcagaggcggcac

SEQ ID NO: 10217 - DNA, 201 bp, Homo sapiens
gcagaaataagcaattggcttgcttaaatccctttcatgttaggaggggcattactgaaaaccctctactacaaagattgttgatttttttttttttttttattgagacagggtcttgttctgtcacccaggctgcagtgtagtggtgccatcattgctcactgtagccttgaactcctggcctcaagcgatcctcccacc

SEQ ID NO: 10218 - DNA, 201 bp, Homo sapiens
ctgactaatacatcatgctctgctgactccatatgtggctggtttcctggatccgattctgactgatggtatctgttctcacactgctaataaagacataycagagactgggtaatttataaagaaaaagaggtttaatggacttatgtgttccacgtggctggggaggcctcacaatcatggtggaaggtgaaggaggag

SEQ ID NO: 10219 - DNA, 201 bp, Homo sapiens
catggtagtttctctgtgtatcctgcagtgacccacctcctacccgttccttctggttcagttggcctgagagcgatcctaaggtaacctctaagagtaaraagaaaagggttgaaagaggagggtaggcacagtggttttgggagccatttatttacagctttgctgtgtcatcctgagcatcttgctgcatcagtgatt

SEQ ID NO: 10220 - DNA, 201 bp, Homo sapiens
ccatttgcaatttgtacagcataaacacagaacagcacatctttcaatgcctgcatcctgaaggcattttgtttgtgtctttcaatctggctgtgctattsttggtgtttaacagtctccccagctacactggaaacttccagaaggcacttttcacttgcttgtgtgttttccccagtgtctattagaggcctttgcaca

SEQ ID NO: 10221 - DNA, 201 bp, Homo sapiens
ttgtgtctttcaatctggctgtgctattgttggtgtttaacagtctccccagctacactggaaacttccagaaggcacttttcacttgcttgtgtgttttycccagtgtctattagaggcctttgcacagggtaggctctttggagcagctgaaggtcacacatcccatgagcgggcagcagggtcagaagtggcccccgt

SEQ ID NO: 10222 - DNA, 201 bp, Homo sapiens
gacctgggtgggacagagggcaagcgtgggcatctttggttcttatttgatggctttaattctgtcctgctgatttcaggattaatttaaccacagtatgmctcccctctattttgccacttttatgtcccacttggaggtagaagcaagaccatccttgcttctgtctctggggatagtattctcatggcttgaagatcc

SEQ ID NO: 10223 - DNA, 201 bp, Homo sapiens
tggtacaggaacagagtcatcatggccaagagtccaccgggtcctcttgccatcaggaggaatagcagggcttgtgcaggaattggggctggagggaaggrccgggctcggtcagtctccagctgggatccccagagtggtcaccctacccctccctcgagacagactgcctgactgtgtgtcatcaggctggtcaccatc

SEQ ID NO: 10224 - DNA, 201 bp, Homo sapiens
tttacttctgagtcaagatttttagaaagtgagagtgtctttttcaatgttttattttattcttctcttctgctggctatgtgcagatgatgacgtgaccytagaagatggcagagccacacaatagaaggcgtttgggttcctgaatcactgtatgaacagagccacccacagaatatgaacatcctccctggactgtca

SEQ ID NO: 10225 - DNA, 201 bp, Homo sapiens
gcctgcctggcctctgggagagccctcactgtgtggcctggagccttcctaactgtgcatcatctccccaggaccatccacctgaccatgccccaactggygctgcaaggatcttatgacctgcaggacctgctcgcccaggctgagctgcccgccattctgcacaccgagctgaacctgcaaaaattgagcaatgaccgc

SEQ ID NO: 10226 - DNA, 201 bp, Homo sapiens
ctagcctggccaacacggtgaaaccccatctctactaaagatacaaaatgagtcgggcgtggtggcgcatgcctgtactctcagctgcttgggaggctgargcaggagtatcacttgaacctgggaggcagaggttgcagtgagacgagatcgcaccactgcactccagcctgggcaataagaacaaaactccgtctcaaa

SEQ ID NO: 10227 - DNA, 201 bp, Homo sapiens
gccaggctggtctcaaactcctgacttcaggtgatcctcctgcctcggcctcccaaagtgctgggattacaggcatgagccaccgtgcctggcctaaagaycaccttttgaagctgcatccctaactcctgcctctcatcacagatgtaaattcctgattccactggtggggttggggagggatgggtgtctctgtgctta

SEQ ID NO: 10228 - DNA, 201 bp, Homo sapiens
caaggaaaacttggaacttcaaggatccatcatgggatgcaggacagtaggctccacccctcttcctgctttccagtaaatgatgttcagggctcacatgyctcttccaaggcatgatgtggggttgcagttctgatcccagcagagaacaaggctcctgtgaaacaattagttttggctcagaggcaaaaaatggaaacc

SEQ ID NO: 10229 - DNA, 201 bp, Homo sapiens
catatctgttggagaccattcagcctattgagtggtaggcactggggagggggtgcattttaaaagattacaaagttgaatcagaaccaaaaaaaccaccwttttttttagacggagtctcactctgtggcacaggctggagtgcaatggcatgatctcggctcactgcaacctctgcctcctgggttttaagtgattctc

SEQ ID NO: 10230 - DNA, 201 bp, Homo sapiens
ggaatctcccctagagccttcagggggagcacggcccggctgacgccatgagtttagacttttcaaaactgtgagagaatgcacttctgttgtttccagcyaccacacttgtggtaatttgttacggcagccctagaaatgaatgcaggaggttcctccagggtgaacttggaagccataggatggagatggctgacttcc

SEQ ID NO: 10231 - DNA, 201 bp, Homo sapiens
aaaaaagaaagaacaggctgagaatggtggcttatgcctgtaatcccaacactttgggaagttgaggtaggaggatcacttgagaccagtagttcaagatmagcctgggcaacatagcaagaccctatctctacaaaaaataaaaataaaaaaattagccagatatggtagcatgcacctgtagtcctagttactctggag

SEQ ID NO: 10232 - DNA, 201 bp, Homo sapiens
tcacttccacattttcagttatctttataacaatgccccactcttctgtaccaattttctgtattaggctgttcttgtactgctataaagaaatacctaasactaatttacaaagaaaagaggttcaattggctttacaaagaagcatggtgtattccctagaagttaacttaactccttgacttctagggagacctagga

SEQ ID NO: 10233 - DNA, 201 bp, Homo sapiens
atatacgatgaacaagtctagagatccagcgtacaacatgaggactatacttaaaaatgtcacattgcacttgggatttttgctaaaagagtagactttaygtgtccttgccacctaaatgagtaactgtgagatgatggatatgttaattttcttgactaccataatcattttactatcttcatatcaaaatatcatgct

SEQ ID NO: 10234 - DNA, 201 bp, Homo sapiens
ctcgaaaaagctttttctttctctgctatatagccaggctgcaaattttccaaatttttatgccctgcttcccttttaaatgtatatattccagctttaastcatatctttgctcccatatctgagtataggttgttagaagcagccaggtcacatcctgaatgctttgctgcttagacatttcttcttccagatacccta

SEQ ID NO: 10235 - DNA, 201 bp, Homo sapiens
gggcgagtgtgcgggggactctcaggcgtgctttctgtgtttaatggcttctgagtttagcgagtttgtgatcttaattttgatgctaacatcacccatasagtctcgctgactttacaggaagctttgtttgggggaacttaacactgggtggtgtctgagccccaagttcattcctacaccagcctcccctcgcgttct

SEQ ID NO: 10236 - DNA, 201 bp, Homo sapiens
aacatggatgactggaagacattatgctaaatgaaacaaggcagatacagaaaggaaaatactgcatgacctcatttatatgtggaatcttttttttttttaaagtgaatatacagagatagagaatacaacagtggttaccaggagttgaggaggagagcagggaggagatgtaggtcaaatgatacaaagcagcagata

SEQ ID NO: 10237 - DNA, 201 bp, Homo sapiens
agtaccccagtggggactctgtgcgagaccttgaacctcacatttccccatctgcatagccctagtagaagttctctgtgagggctctgtccctgcagcargcttttgcctaggcatgcaggcttttccatacatcctctgaaatctaggtggaggctgccaagcctcattcagtcttgcactctgtgtgcctgcaggctt

SEQ ID NO: 10238 - DNA, 201 bp, Homo sapiens
caacatggatgactggaagacattatgctaaatgaaacaaggcagatacagaaaggaaaatactgcatgacctcatttatatgtggaatcttttttttttttaaagtgaatatacagagatagagaatacaacagtggttaccaggagttgaggaggagagcagggaggagatgtaggtcaaatgatacaaagcagcagat

SEQ ID NO: 10239 - DNA, 201 bp, Homo sapiens
tgtcctacatccagggaacactggtacaaagggtgggatcccaaggccttgggaagctctgtccctgtgactttggctgctgtcatgggttgttgagtacctgtggcttttccaggctcaaggtgcaagctgccagtggatccaccattcttgggtctggaggatgatggccgccttcccacagttccactaggcagtacc

SEQ ID NO: 10240 - DNA, 201 bp, Homo sapiens
aaaagccctcaacagatttctgtttgtctcattggtcagaactatcttacttgaccactaatggttacagaggagagcagtgatgcaggatttttctcggyccctttgccagtcagggacctcttgctggtgatgctggaggccttgcttggggcacactacctgtccctggaggtgcctcacccaatcggcccccctggg

SEQ ID NO: 10241 - DNA, 201 bp, Homo sapiens
gtccttctcacactgcaaaatataattatgccttcccaataacccccaaagtcttaagtcattccagcattaactcaaaattccaaagtccaaagtctcayctgagataaggcaagtcccatcacctatgagcctgtcaaatcaaaatcaagttccaagatatacaaattccattttatacttccaaaatacaatgggagt

SEQ ID NO: 10242 - DNA, 201 bp, Homo sapiens
attctttgcttgctggcttttggtccttacacttgttgcctcatggttgcaaaatggctgttttgtctccagacattacatcaacatttgaaggaggaagmagggttagtgtctgagccactgactctgctgataaaaggacagagaaagctctcccaaaagccctcaacagatttctgtttgtctcattggtcagaacta

SEQ ID NO: 10243 - DNA, 201 bp, Homo sapiens
ctcccaaagtgctgggattacaggcgtgagccaccgcacccggcctatgattccttttatataaaatattcagaatatgtaaatagaatctatagagaaartagatgagtggttgcctggggctgggggaaatgggtacagggttaacactgttaatgggtaaagggtttcttgttggagtgatgaaacattctaacatta

SEQ ID NO: 10244 - DNA, 201 bp, Homo sapiens
ttctatcattctttgcttgctggcttttggtccttacacttgttgcctcatggttgcaaaatggctgttttgtctccagacattacatcaacatttgaagraggaagaagggttagtgtctgagccactgactctgctgataaaaggacagagaaagctctcccaaaagccctcaacagatttctgtttgtctcattggtc

SEQ ID NO: 10245 - DNA, 201 bp, Homo sapiens
ccgaaaagtgaaaggtataccagcttgctcatttcatggtggcattgtttacattaaaaaaggttggaaagcacttagtgccctctgttgggggaatggtraagaaaattatggtccagctaatcatgaagtggaacagtgtacagccataaaacggaacaaggaaactctgcatacactgatgtgggaaggtccctggga

SEQ ID NO: 10246 - DNA, 201 bp, Homo sapiens
atgctttgcttcctttttaaacataagttcctatttcagatcatttctctcaagttcaaagttccccagatcctaaaggcaggggtaaaatgctgccagtytctttgctaaagcatagcaagagtgacatttgctccagttcccaataagttccttatttccatctgagaccacttcagactgaacttcattgtcaacatc

SEQ ID NO: 10247 - DNA, 201 bp, Homo sapiens
catttcctagaagatgagaactagatcttcacccagaccttgcttccctatccatcccctcccaaggtcattggtaagcctgacatcaggtgagggtctcmctttcttcatccagggacttgtccatccctggaacactcctagtttcacccctgtcctagtgggcactcattcatgaaccataacaaatcttttcttcag

SEQ ID NO: 10248 - DNA, 201 bp, Homo sapiens
cattacttatgcaaatttgtgcagctggcttgaatttctcccaagaaaatggttcttttattttctaccccatcatcaggatgcaaatattcaaaactttyatgctttgcttcctttttaaacataagttcctatttcagatcatttctctcaagttcaaagttccccagatcctaaaggcaggggtaaaatgctgccagt

SEQ ID NO: 10249 - DNA, 201 bp, Homo sapiens
aaatcttctaaaattgactgtggtggtggttgcacaactctaaatatgctaaaaatcattgaattgtacactttaaataggtgaattgtatgtacagtatmtgaattacatctcaaagctatcttaaaaagataaataagctctgtgcctcattttgcctcctacagtgtttcgtaaagttgtagtactaaaagggagatt

SEQ ID NO: 10250 - DNA, 201 bp, Homo sapiens
gaatgcatgtgcgcacacatgtgtatacatgtgcatacaggcaggcatgacaggtatgtgcactgtttgtggtttatttatacattgcatgtgtgaaagcrtgtgtttgctcacatgtgtgcatgtgtgtgcatgtatgtgtgcatgcatgtgtttgcaagtgcttctacacacgtgtgtgtttgagcacatgtatgcatg

SEQ ID NO: 10251 - DNA, 201 bp, Homo sapiens
ttgagccctgagagggttgggtcctgccgagcctcacctgcaaacccagagccctgattttttcccagcccttagatgctcactacaaagactagtgtagagactcctgtcgggaggctgcctgagctggggaagctgtcactcacttggcgtaggctttttccagcaaggcgctccagaactcgttgtggtcggcagagt

SEQ ID NO: 10252 - DNA, 201 bp, Homo sapiens
cccaccccagcctcctgaggaagctgggactacaggcacgtgccaccaaacctagataattctttgtattttttgtatagatggggttttgccatgttgcygaagctggtctcaaactcctgggctcaagtgtttcacccacctcagcctcccaaagtgctggtattacaggtgtgagccactgtgcctagccagcaatat

SEQ ID NO: 10253 - DNA, 201 bp, Homo sapiens
aagtgctgtcggcacagccagaattcccctccgcttgccttcccagctcttccaaaggccagattcatggcccagggagaaaaagggtcatgaatgtagcsactgctcccaaagatgggcacatctaggctacgacaggaaaaccacctccaaccccgcttgagccctgagagggttgggtcctgccgagcctcacctgca

SEQ ID NO: 10254 - DNA, 201 bp, Homo sapiens
tacctggaaatggaatatcccggcataaccagggccaaagctttggtcctgggggatgactctggccagtgctttttgattaagcgtaagggaggcgatgrcggctaatagccagcagtctcctgcaaaatggaagccataaatcacaattttcattgctatttcacagcaaataggaaaactctgtgtcagaaggggatg

SEQ ID NO: 10255 - DNA, 201 bp, Homo sapiens
ctgcttgagtgagcaatctgcaagtcatctatggatggtgaaggaggacaaaggagccaacacaaatagctaacattctaaagaatcccaaagagtccaayggcgtctcacaccttggctccagtgaggaggaagggcagggtctcccttcagtgttctttactccccacgcattcagaggatgtcactcaaaaggtgggt

SEQ ID NO: 10256 - DNA, 201 bp, Homo sapiens
acattttatcatatacgattatttatcgatatgtcatatacgactttttaaaaataaaaaagaagcatcccgtaggacggacaattgatgtctctatatcmacgtgcgtaatagcccagatgtttgagccatgccagtgtccgagggaagtgtgaagcactaagtgctgtcggcacagccagaattcccctccgcttgcct

SEQ ID NO: 10257 - DNA, 201 bp, Homo sapiens
tctgcccgtctatcataaacagctgttgccttcttggcactgttataggacatgcttacttgggtttcagacatatggctgcctgatgcatcagctctgtraattccagcaactccctttccagaggaccaagactgcatacatcagtgtcagcacgggctgggcgagcagacatttcatagctgccacccaagtggttcg

SEQ ID NO: 10258 - DNA, 201 bp, Homo sapiens
acagcgaagtcagggagtcgggatggcgcctgcccctcccatcacccatggaggctgcatgagtggaagacaaattttattccagccttggctctcagtcmctttcttgatttctacctctgtgagtcccagaaaatgggagacaatggcccattttccctttataggctacgatctcaaagttgaggggcactgcacatc

SEQ ID NO: 10259 - DNA, 201 bp, Homo sapiens
ttacttgggtttcagacatatggctgcctgatgcatcagctctgtgaattccagcaactccctttccagaggaccaagactgcatacatcagtgtcagcaygggctgggcgagcagacatttcatagctgccacccaagtggttcggcagtacttgggagggtggttagaaatctccctgcagccccaacccagactcagc

SEQ ID NO: 10260 - DNA, 201 bp, Homo sapiens
ctctcctaagtgatgcctatgctgctgctggcccatggacctccctgtgagcagatgggtccactgggatcctctggggagagggtgattgaaaccccctrgaatccttctcccatacctctgacactcagacccatggtctcccacccccgtcattgctacagtggccccggtaactggccagttttgtacttattggag

SEQ ID NO: 10261 - DNA, 201 bp, Homo sapiens
agctgaaggtcacacatcccatgagcgggcagcagggtcagaagtggcccccgtgttgcctaagcaagactctcccctgccctctgccctctgcacctccrgcctgcatgtccctgtggcctcttgggggtacatctcccggggctgggtcagaaggcctgggtggttggcctcaggctgtcacacacctagggagatgct

SEQ ID NO: 10262 - DNA, 201 bp, Homo sapiens
ggatgtacttaatgctactcaactgcacacttaaaaatggtaaaatttatgtcatatacattttatcatatacgattatttatcgatatgtcatatacgaytttttaaaaataaaaaagaagcatcccgtaggacggacaattgatgtctctatatcaacgtgcgtaatagcccagatgtttgagccatgccagtgtccga

SEQ ID NO: 10263 - DNA, 201 bp, Homo sapiens
tgccgcctgtgtaagcagatatctgggaggatccatttatccgaatcacctttatccagattcacttgttttcagtagacaacatcaacgtcatcagaacmtaaaagcccatcacactcagcttggcagtttctgagttcacatttctggaaagcaccgtatgtcactgggcttgggacattgtaatatggccctttctgg

SEQ ID NO: 10264 - DNA, 201 bp, Homo sapiens
gggggtacatctcccggggctgggtcagaaggcctgggtggttggcctcaggctgtcacacacctagggagatgctcccgtttctgggaaccttggccccractcctgcaaacttcggtaaatgtgtaactcgaccctgcaccggctcactctgttcagcagtgaaactctgcatcgatcactaagacttcctggaagagg

SEQ ID NO: 10265 - DNA, 201 bp, Homo sapiens
gcctgtgtaagcagatatctgggaggatccatttatccgaatcacctttatccagattcacttgttttcagtagacaacatcaacgtcatcagaacctaaragcccatcacactcagcttggcagtttctgagttcacatttctggaaagcaccgtatgtcactgggcttgggacattgtaatatggccctttctggctgt

SEQ ID NO: 10266 - DNA, 201 bp, Homo sapiens
ggcctcaggctgtcacacacctagggagatgctcccgtttctgggaaccttggccccgactcctgcaaacttcggtaaatgtgtaactcgaccctgcaccrgctcactctgttcagcagtgaaactctgcatcgatcactaagacttcctggaagaggtcccagcgtgagtgtcgcttctggcatctgtccttctggccag

SEQ ID NO: 10267 - DNA, 201 bp, Homo sapiens
tcagaacctaaaagcccatcacactcagcttggcagtttctgagttcacatttctggaaagcaccgtatgtcactgggcttgggacattgtaatatggccytttctggctgtttgacacaggcaagagagactcgccagggctgaacatcgggaaagctaattccgaatcgccctggttctggctttctgagaggtgtcac

SEQ ID NO: 10268 - DNA, 201 bp, Homo sapiens
agttcacatttctggaaagcaccgtatgtcactgggcttgggacattgtaatatggccctttctggctgtttgacacaggcaagagagactcgccagggcygaacatcgggaaagctaattccgaatcgccctggttctggctttctgagaggtgtcaccagcagagtacaagccacccccagccttagctggagcacaga

SEQ ID NO: 10269 - DNA, 201 bp, Homo sapiens
tttttttttttgatagagatgtggtcttgctatgttgcccaggctagtctaaaactcctgggctcaagagatcttcccacctccccctcccaaagcgctgygattacaggtgtgagcactctacatgaccagatgttctagttcttattgtgggtggcaacagatcacggctgttcattttcttgttattctttataacat

SEQ ID NO: 10270 - DNA, 201 bp, Homo sapiens
agcctgtggtctggccaagtgatgtaaccctcctctccagcctgtgcacaggcagcctgggaacagctccatccccacccctcagctataaatagggcatygtgacccggccaggggaagaagctgccgttgttctgggtactacagcagaaggtaagccgggggccccctcagctccttctcggccttgtctctctcaga

SEQ ID NO: 10271 - DNA, 201 bp, Homo sapiens
ccctcctctccagcctgtgcacaggcagcctgggaacagctccatccccacccctcagctataaatagggcatcgtgacccggccaggggaagaagctgcygttgttctgggtactacagcagaaggtaagccgggggccccctcagctccttctcggccttgtctctctcagatgtaactgagctgtgggctaggaggaa

SEQ ID NO: 10272 - DNA, 201 bp, Homo sapiens
aatgcacctgccctcatgccgggccccagagaggtaaacccactggcccagggctccctcttacctggaaatggaatatcccggcataaccagggccaaakctttggtcctgggggatgactctggccagtgctttttgattaagcgtaagggaggcgatggcggctaatagccagcagtctcctgcaaaatggaagccat

SEQ ID NO: 10273 - DNA, 201 bp, Homo sapiens
ctaaaccctgcttacatatcagagtcacctgagaattttctatttttttttttttttttttatacgtggtcccagcacagactaaggaatccaactatcaytgggcaagccatgctaggtatgcatgcctttggggctctgcaggggatagcgctatgcagggatggttgagagctggttttggggttgagacacgtggga

SEQ ID NO: 10274 - DNA, 201 bp, Homo sapiens
gcctgggtgcacaggtttggggccctggggaagtggttttaatgattaaaccacaaatctctgaagaggggaaacggcagaagtggaatgggggtggtccyggaaagttcacaaaaacagaactctgttcccttggatgggatcccaaagtggcaagaagacccccaagtcccttcaaaagctccccacccccaccactag

SEQ ID NO: 10275 - DNA, 201 bp, Homo sapiens
cgtggtgctggacccgtgtctagggcaggggttctaaaccctgcttacatatcagagtcacctgagaattttctatttttttttttttttttttatacgtkgtcccagcacagactaaggaatccaactatcattgggcaagccatgctaggtatgcatgcctttggggctctgcaggggatagcgctatgcagggatggt

SEQ ID NO: 10276 - DNA, 201 bp, Homo sapiens
tctctcttgtttttcctttctttctttctttctttctttctttctttctttctttctttctttctttctttctttctttctttctttcttctttctttctyatttttctttcttttctttcttttccttctttccttctttcttttgatggagtctcactctgtcgcccaggctggagtgcagtggcacaatcttggctca

SEQ ID NO: 10277 - DNA, 201 bp, Homo sapiens
gctgggcatggtggcgggcacctgtagtcccagctcctagggaggctgagacaggagaatggcgtgaacccaggaggcggagcttgcagtgagccgagatsccgccactgcactccagcctgggcgacagagcgagactccgtctcaaaaaaaaaaaaaaaaaaacataatgataataataataataaaaaatagaaagaa

SEQ ID NO: 10278 - DNA, 201 bp, Homo sapiens
ggccaagaagtgacgatattgcagtacacccccctccacaagaaatgagtgagatgtggtacaaaatgttagaattgaatgaatcaatagaataaacgttyatcccttcaatcaagaagagtcagatgaaatgaattagcagggccagcccaagaacctcttctgggggtctcagggtagctttcatttgtagcagctgag

SEQ ID NO: 10279 - DNA, 201 bp, Homo sapiens
gtggacctaggggtctctcttgtttttcctttctttctttctttctttctttctttctttctttctttctttctttctttctttctttctttctttctttyttctttctttcttatttttctttcttttctttcttttccttctttccttctttcttttgatggagtctcactctgtcgcccaggctggagtgcagtggca

SEQ ID NO: 10280 - DNA, 201 bp, Homo sapiens
ctgtgctgttgtagcacaaaagcatcctggactattcataaactaatgagcatggctgtgttgcaataaaacttgtttacacaaacagatggtggtccagyccagatttggcccatgggctgtagtttgccaatccttggaacagataaatgttcatgctattatttgtttagtaagagtattctttagttgccaggttga

SEQ ID NO: 10281 - DNA, 201 bp, Homo sapiens
aatgactgaagcagaacaaaacacaccaggtacttcagcagctgcaccgtgttgagggcaggtgctggttacgggtctgggtgagggaagccagctgccartgtaagaagaatgactgggtatgcttagatgaagcagaaaaatctaggcatcaaggtggccttgagtcagtgatgacacgctacagctccaaggaagcct

SEQ ID NO: 10282 - DNA, 201 bp, Homo sapiens
cttcctcatgttttttagtgacattacttatcatttaccttaaagtaaatgataaataaaggtggacctaggggtctctcttgtttttcctttctttcttwctttctttctttctttctttctttctttctttctttctttctttctttctttctttctttcttctttctttcttatttttctttcttttctttcttttcc

SEQ ID NO: 10283 - DNA, 201 bp, Homo sapiens
aatacagtagatgtttctaaagctaatttttaaatgaaaggacaatatataagtctatagctaactcctctgtcatgcacaatctgagttaacagaatagwttaggggttagcaagctttttctataaagggccatgtaataaatatttcaggctttgcagttcatatgttctctgttgcaacaactcaactgtgctgttg

SEQ ID NO: 10284 - DNA, 201 bp, Homo sapiens
cagaaaggcctgcaagcagcagagagagttttctgttccatttttccatgtcatgtggctcttcctgagaacagcggatggagtcaaatgcatggggagtkgggtgagatggtagctgaggtcagaatttggcatttgaatgactgaagcagaacaaaacacaccaggtacttcagcagctgcaccgtgttgagggcaggt

SEQ ID NO: 10285 - DNA, 201 bp, Homo sapiens
gcagccatcacacttcctcatgttttttagtgacattacttatcatttaccttaaagtaaatgataaataaaggtggacctaggggtctctcttgtttttyctttctttctttctttctttctttctttctttctttctttctttctttctttctttctttctttctttctttcttctttctttcttatttttctttcttt

SEQ ID NO: 10286 - DNA, 201 bp, Homo sapiens
acaggaatggaataataaaattatacattaaataagtgttgtaaatacagtagatgtttctaaagctaatttttaaatgaaaggacaatatataagtctakagctaactcctctgtcatgcacaatctgagttaacagaatagattaggggttagcaagctttttctataaagggccatgtaataaatatttcaggctttg

SEQ ID NO: 10287 - DNA, 201 bp, Homo sapiens
gaactggtggcttaggcttctctgcacagaaaggcctgcaagcagcagagagagttttctgttccatttttccatgtcatgtggctcttcctgagaacagyggatggagtcaaatgcatggggagtggggtgagatggtagctgaggtcagaatttggcatttgaatgactgaagcagaacaaaacacaccaggtacttca

SEQ ID NO: 10288 - DNA, 201 bp, Homo sapiens
cgtgccaccaaacctagataattctttgtattttttgtatagatggggttttgccatgttgctgaagctggtctcaaactcctgggctcaagtgtttcacscacctcagcctcccaaagtgctggtattacaggtgtgagccactgtgcctagccagcaatattctttttaatcagttttcgattggtgaaaaagtgacta

SEQ ID NO: 10289 - DNA, 201 bp, Homo sapiens
atgagccgtcatcttcacctttagcattcagcccgggagaagtagggagacatagaaggggcaggtgctggccaagaggcaggggcaggagaggagaaggyggaggggcactcagggcgagggtgtcaggcccgccaccccagagcaccattactcccaggacgcggctgcgtgcagacctggaaccagcctagggagcag

SEQ ID NO: 10290 - DNA, 201 bp, Homo sapiens
atatagggtaggtatcaataattactcataaaagatgagaattattggttccctagaagtcattttcccattctaggcatggtgccttttaggggacatarctctgactgaactttatatgtcctccttagttagttacttagggtcttgatttcttctggaggctgtatttgtcatttaaattttgctagatattatgca

SEQ ID NO: 10291 - DNA, 201 bp, Homo sapiens
ctcggtcagtctccagctgggatccccagagtggtcaccctacccctccctcgagacagactgcctgactgtgtgtcatcaggctggtcaccatctccctraacctcgatttgctcacctataaaatggaactaataacgatgcctgggctccctgtctcaggggctctggtatagctgaagagaactaatataacatgaa

SEQ ID NO: 10292 - DNA, 201 bp, Homo sapiens
ttatatagggtaggtatcaataattactcataaaagatgagaattattggttccctagaagtcattttcccattctaggcatggtgccttttaggggacakaactctgactgaactttatatgtcctccttagttagttacttagggtcttgatttcttctggaggctgtatttgtcatttaaattttgctagatattatg

SEQ ID NO: 10293 - DNA, 201 bp, Homo sapiens
gtcatccggacgcgggctttcccccactcggtgcccacctggggtcttacaggaggagctgctcctcctcagcaataggacaagatggtcaggtcttcctkcttccgctgagaaaagttagggtcctcaggaacggagcagactggtacaggaacagagtcatcatggccaagagtccaccgggtcctcttgccatcagga

SEQ ID NO: 10294 - DNA, 201 bp, Homo sapiens
attctgctgagatgtagacatagttaagcaatcaccagccgttattctggaggtcatgaaatttgcaactttctcaattactcctataattaacatcactmctctagaccctaaaattggccttttcagattccttttcagacttttgtatttctgaaaccaggtgactttacctggacccacgacccctacctgtggtcc

SEQ ID NO: 10295 - DNA, 201 bp, Homo sapiens
caaacttcggtaaatgtgtaactcgaccctgcaccggctcactctgttcagcagtgaaactctgcatcgatcactaagacttcctggaagaggtcccagcrtgagtgtcgcttctggcatctgtccttctggccagcctgtggtctggccaagtgatgtaaccctcctctccagcctgtgcacaggcagcctgggaacagc

SEQ ID NO: 10296 - DNA, 201 bp, Homo sapiens
ttagctaatgggctttatctagagaaaaacaagcttcttacatctttgtgacaggaggcagttttgcagcttggaggcatgtgcccactgaaggcaggctstcaccctcccacagacactgggagctggggccactgtctctcccttgatgtttgcctttcaaggagatggctcccgggtccttgagaaacacatgcctgg

SEQ ID NO: 10297 - DNA, 201 bp, Homo sapiens
tcttgtctagtgagaggtgagggggttaaaatatagggtatcctggctgggtaccctgcctcacgcctgaaatcccagcagtttgggaggccgaggtggayggatcacttgagatcaggagtttgaggctagcctggccaacatggcaaaaacccatctctactaaaaatataaaaaacaaaacaaaacaaaaaaatagcc

SEQ ID NO: 10298 - DNA, 201 bp, Homo sapiens
gcggactttattcaatggccaaagaatggagaagcaggagcatggccgcaagtcaacttcttgtctagtgagaggtgagggggttaaaatatagggtatcytggctgggtaccctgcctcacgcctgaaatcccagcagtttgggaggccgaggtggacggatcacttgagatcaggagtttgaggctagcctggccaaca

SEQ ID NO: 10299 - DNA, 201 bp, Homo sapiens
ggcacattccactcagaggcggcacctctgcttagtgcgctcagggggcctcatgggagagagaggattgcttcagaaggaaaaggagcaagaaacccaastggtccaggaggtggctttacggagaagtgcacggtgtggtcttgagtcccatctcctgcatcagagaatggcagagttttgtagtcggaagggaggttg

SEQ ID NO: 10300 - DNA, 201 bp, Homo sapiens
gggtgagagagcaagaccctgtctccaaaaaaaagtaaataataataaaaaaaagagtggggctattggttagtggaaggaagaccggagaggtaaagctsccctctcatctcatgatatcaagagtacctgccgtccacatgccttaccacagctgatgctggccttgatcacctggctaaggtagtgttagtcaggtgt

SEQ ID NO: 10301 - DNA, 201 bp, Homo sapiens
ctcttcatgatgatgttcagtcatttaggtctctgtggaatggctggcaggaggccctaatggtgacagaaatcccagtgactactgtcctactggctctrgttgggagcctttcctagcagtcctaccatgactggcctcttggatccactctgaattcttctacttctctttgcagtagaaaggcattaactgatattt

SEQ ID NO: 10302 - DNA, 201 bp, Homo sapiens
caaaactttgaaaaacaaaggagccagtagaatgatttcctattggatagcaatggaggactacggggtcgaggggaagggaggcagaggaagagggggasaggtgggcagcggcagggaggatctcctggagaaggaccacctgaatgtaaaccttttgaaaagtctacattgtatctagaatatggcatacatggggga

SEQ ID NO: 10303 - DNA, 201 bp, Homo sapiens
tgtggcagcgaggcacgttctggctcaccctgcaggggtggtgagttaactgggccggggcctgcagaggagtgaaggatttttcccacctcttcccactyttccaggcaccaggactgaggaggggcctgggctggaggtggaaggttccagcagtgtctgggcggacgccacgtggggagctcaagctgcgccgccttc

SEQ ID NO: 10304 - DNA, 201 bp, Homo sapiens
cagctagaaataagtcagggtccacacaagcttgcagtggtttgttctctaggctgatttcactggtattttttaaaagaaagtctctcgctctctcactytctctgtctttcatagatagaacaaaggtaaacccagcccagttggattaagtcctaaaatgcaggacccaatttgagtgacttgaggtgcactcaggtt

SEQ ID NO: 10305 - DNA, 201 bp, Homo sapiens
acctggtcaattcccgttacactgtaggcatgacccttaataagaccaaacggcgtccgggcctcagattctgcagcacttctggtctaaaacatggaaaragcagagtcacacccaccgtctaagtcaagcctcccctgctggatcagacccagctacatgcctggcccggtcacaacctccagccccttctgctgcccc

SEQ ID NO: 10306 - DNA, 201 bp, Homo sapiens
tttattatttatttatttatttatttatttatttatttatttatttatatttttgagatggagtctcccactgttgcccaggctggagtgcagtggcaaayctcagctcactgcaacctccacctcccaggttcaaggggttctcctgcctcagcctcccgagtagctgggattacaggtgcataccaccacatttgacta

SEQ ID NO: 10307 - DNA, 201 bp, Homo sapiens
ggtgtaggagagcccgaccaacgctgctgggtgtcactttcctctgtaaactccggggctgtgagccccacatcacaggcatgtctgactctagaggaacrgaggtgcaggggcttgaggccactggactccattcagagggagtgaggaagcagaggccgaagcagtgttgttcccccagccccgtgcctcttgggtcct

SEQ ID NO: 10308 - DNA, 201 bp, Homo sapiens
acaacctggaggagtgacagacaccaggggcgcctgcccagggagagctatgtgtggcattagtgtctaaaatactcaagaaagcttggccaggagaattkctgaagaacacggggtgtttttagatgcgccaaaaccccaggcccggcagaagtaaggacctcccaaatgctggcctgtcctctgccaggtctcacacgt

SEQ ID NO: 10309 - DNA, 201 bp, Homo sapiens
gcgcaggagtttgcaggtggctctgagctgagcccagaaggacaatgcaaaccaggaccatgtcagtgggcctcaatagagtcccaggaatagcctgcccsgctcagcagtagggttcagggtgggccatttaacttctcacggctgcatcctcatctgtcaccagcttagacattctgggcttgttgcagaatgtgcctg

SEQ ID NO: 10310 - DNA, 201 bp, Homo sapiens
aggaatagcctgccccgctcagcagtagggttcagggtgggccatttaacttctcacggctgcatcctcatctgtcaccagcttagacattctgggcttgytgcagaatgtgcctgcccgaagggaaacccaggagtcccccaagccctccctgtcttgattgcccagcccctgccaggggatagccctggcaagcaatgc

SEQ ID NO: 10311 - DNA, 201 bp, Homo sapiens
agcgtgttgctcggctatctgggtggtgcagagcagagggcactatgggaggagcaggctggagtgaagtggcaccatctcggctcactgcagggggaacrctgtgcctcttgggttctcagggaccccatactgcagtcgctcttgatccagcaatccaacctccctctcgccatgctccatcccctcacactcacccag

SEQ ID NO: 10312 - DNA, 201 bp, Homo sapiens
aagcaggatcttccttcctgtcccttcagtgccctaataccatgtatttaaggctggacacatcaccactcccaacctgcctcacccactgcgtcacttgwgatcactggcttctggcgactctcaccaaggtctctgtcatgccctgttataatgactacaaaagcaagtcttacctataggaaaataagaattataacc

SEQ ID NO: 10313 - DNA, 201 bp, Homo sapiens
tacctggcccgaatgttctgttcagacaaagccacctctaagtcgctgtggggccccagacaagtgatttttgaggagtccctatctataggaacaaagtrattaaaaaaatgtatttcagaatttacaggcccatgtgagatatgatttttttaaatgaagatttagagtaatgggtaaaaaagaggtatttgtgtgttt

SEQ ID NO: 10314 - DNA, 201 bp, Homo sapiens
caccctgcctcctccttcccaacagcttgtttattacagcatggtgacttggggcaacgtgattatatgagatggtttttttctcccttctctgtcctccytcctgggcacagtgtatatagtatgagagctactgtaatgaaaggtgcacaggcctttttaggaaagtgattgcaggtgaggccaactcagccaggaaaa

SEQ ID NO: 10315 - DNA, 201 bp, Homo sapiens
ttttaaaaaaattaaattaaaattgtctatttatttagagacagagtcttactctgtagcccaggctcgagtgcagtggtgcaatcatagctcactgtaasctccatctcctggcctcaaaaagtgtttgaattacagatgcgaggcactgtacctggcccgaatgttctgttcagacaaagccacctctaagtcgctgtg

SEQ ID NO: 10316 - DNA, 201 bp, Homo sapiens
ctttgaatggtctcttattttaaaaaaattaaattaaaattgtctatttatttagagacagagtcttactctgtagcccaggctcgagtgcagtggtgcartcatagctcactgtaacctccatctcctggcctcaaaaagtgtttgaattacagatgcgaggcactgtacctggcccgaatgttctgttcagacaaagcc

SEQ ID NO: 10317 - DNA, 201 bp, Homo sapiens
gcccagcttcctcttattttcataaaagaataatttgtgtgtgcacatctttctttggaatcttggattgatcaaaggaggtatagttattacatgtgtcytacatgctgaagttgaaagacaaaactagagaagaaaaatgcctagtttctgtgggagtgattataacaaaatagctaatatttttgagatactatttat

SEQ ID NO: 10318 - DNA, 201 bp, Homo sapiens
acaaattgtgaggctttaaagagccgaaatatttaaacactgggcacaaggttgttgcttaatcagtgctagatccttacctcccccttgtgtccaggtckacttgttactgcagttaaaccacttgctgatcctcaaacaactagttagtggcacagccaggcctaggaccccagtctctactgttccaactaacccatt

SEQ ID NO: 10319 - DNA, 201 bp, Homo sapiens
tacatgtgtcctacatgctgaagttgaaagacaaaactagagaagaaaaatgcctagtttctgtgggagtgattataacaaaatagctaatatttttgagmtactatttatgaagtaatcaattaagccattacaataattctgtgagctaagtaccaatagtatccccatttggctcaccgtaataatacgtaattggct

SEQ ID NO: 10320 - DNA, 201 bp, Homo sapiens
ctgggcatggtggcgggcacctgtagtcccagctcctagggaggctgagacaggagaatggcgtgaacccaggaggcggagcttgcagtgagccgagatcscgccactgcactccagcctgggcgacagagcgagactccgtctcaaaaaaaaaaaaaaaaaaacataatgataataataataataaaaaatagaaagaaa

SEQ ID NO: 10321 - DNA, 201 bp, Homo sapiens
aggcccaggcacagtggaaactctcccaaagaccaggatctttgttttgttccctgacatatgctgagcaccaggaatagtgaatgaatgaaacaaattgwgaggctttaaagagccgaaatatttaaacactgggcacaaggttgttgcttaatcagtgctagatccttacctcccccttgtgtccaggtcgacttgtta

SEQ ID NO: 10322 - DNA, 201 bp, Homo sapiens
gtccctgagcagagggtctggattggccatacctcatttatattgagatgaatgaactccttgttctttgtactgagagcctggaacacccctgataggaragaagggggaaaggcatccttttaaagacaattcctttaccaagtttgtttcccagcgaccaaagggccttccagtggagcctgtggggaagctgctcca

SEQ ID NO: 10323 - DNA, 201 bp, Homo sapiens
agatcccccagctgatagtcagccttgggcatggattaagggcttttaaccaatcttgcaacaagtttaagcagatattctttattgggtccaatctaacyaaaattattttcttatgttctccccagtaacgtgtcattattaagagaagtttggcttgcttagaggccaaatttagagggtcctgaaattttattttct

SEQ ID NO: 10324 - DNA, 201 bp, Homo sapiens
gctatcatgctgataaccaagggtcacagccctcacctttttattttaatttaatttaattttattatttatttatttatttatttatttatttatttatwtatttatatttttgagatggagtctcccactgttgcccaggctggagtgcagtggcaaatctcagctcactgcaacctccacctcccaggttcaaggggt

SEQ ID NO: 10325 - DNA, 201 bp, Homo sapiens
aaaaaaatgtatttcagaatttacaggcccatgtgagatatgatttttttaaatgaagatttagagtaatgggtaaaaaagaggtatttgtgtgtttgttkattgttcagtcagtgaatgtacagcttctgcctcatatccaggcaccatctcttcctgctctttgttgttaaatgttccattcctgggtaatttcatgtc

SEQ ID NO: 10326 - DNA, 201 bp, Homo sapiens
tataaaaccatcagatctcatgagacttatgcactatcacaagaacagcaccagaaagatccaccctcatgattcaattacctcccactgggtccctcccrtgacacatgggaattatgggagctacaattggagatttgggtggggacacagccaaaccatatcagatggcttatttggtttctatgtagaacctctgct

SEQ ID NO: 10327 - DNA, 201 bp, Homo sapiens
catcttacatggtggctggcaaaagagagaaagcatgttcaggggaactcccctttataaaaccatcagatctcatgagacttatgcactatcacaagaasagcaccagaaagatccaccctcatgattcaattacctcccactgggtccctcccatgacacatgggaattatgggagctacaattggagatttgggtggg

SEQ ID NO: 10328 - DNA, 201 bp, Homo sapiens
agaggtgggtggatcacttaagccagggaggtcaagactgcagtgagccatgattgtgccactgcactccagcctgggtgacaaagtgagaccctgtctcmcaaaaaaaaaaaaaaaaaaagcggtgtggaactgtgccgcttgctacaacatggatgactggaagacattatgctaaatgaaacaaggcagatacagaaa

SEQ ID NO: 10329 - DNA, 201 bp, Homo sapiens
tgtgtttttttgttttgttttgtttttgtttttgagatggagtcttgctctgttgcccaggctggagtgcagtggcatgatctcggcttactgcaacctcyacctcctgggttcaagtggttctgctgccttagcctcccgagtagttgggattacaagcatgcaccaccatgcctggctaatttgtgtatttttagtaga

SEQ ID NO: 10330 - DNA, 201 bp, Homo sapiens
agcctccatggggaccatgacagcctggaaagcacaggcctgtgtgccctgccctcacgctggggtctggctaatacagcagcggctgcaccatgtctggygacctggtagctgtgtctggactgaagacaaacactggctcagttttaaccaagttctagactagcttcagatttccccagaagctcaggggccatggat

SEQ ID NO: 10331 - DNA, 201 bp, Homo sapiens
cctctgcccactctgcactcctgcagactcagaggcagctctggggcctggcacattccactcagaggcggcacctctgcttagtgcgctcagggggcctmatgggagagagaggattgcttcagaaggaaaaggagcaagaaacccaactggtccaggaggtggctttacggagaagtgcacggtgtggtcttgagtccc

SEQ ID NO: 10332 - DNA, 201 bp, Homo sapiens
gaggagaaggcggaggggcactcagggcgagggtgtcaggcccgccaccccagagcaccattactcccaggacgcggctgcgtgcagacctggaaccagcytagggagcagccgcagatcacaactgagaacaaacgacagtctctgcctcaaaaatggcccatggaattgcgtctctggagacgctgcctgagcaggagc

SEQ ID NO: 10333 - DNA, 201 bp, Homo sapiens
cagggggcctcatgggagagagaggattgcttcagaaggaaaaggagcaagaaacccaactggtccaggaggtggctttacggagaagtgcacggtgtggycttgagtcccatctcctgcatcagagaatggcagagttttgtagtcggaagggaggttggtgaatgaaagcaggatgcattatgtgaacacagctggcac

SEQ ID NO: 10334 - DNA, 201 bp, Homo sapiens
cttctcacagttccactaggcagtgccccaatggcaactctgtgtgagggctgcaaccccacatttcccttccacattgccctagcagaagttcttcatgrgatctccacccctgcagtagacttctgcctggacatccaggcatttccatacatactctgaaatctaggttcccaaacctcaattcttgtctcctgtgca

SEQ ID NO: 10335 - DNA, 201 bp, Homo sapiens
caactggtccaggaggtggctttacggagaagtgcacggtgtggtcttgagtcccatctcctgcatcagagaatggcagagttttgtagtcggaagggagsttggtgaatgaaagcaggatgcattatgtgaacacagctggcacagctcctgcacaggcaatcccatagtgattcagcactggggtcagcaaaccttttc

SEQ ID NO: 10336 - DNA, 201 bp, Homo sapiens
ccctgagtcaccctcagtgcactccttgccctgggctcccttgagggcaagcctggctgtccactgccctccaatgtccccttggctttgtgctctgcccmccctccccaagcacagctgtgtttgacaagaaggtggtgctgaggaggagggccgtccagccccacggtcccacgggctgctgagacgtgcaccgtgtaa

SEQ ID NO: 10337 - DNA, 201 bp, Homo sapiens
atcaaccagtttcctggaggtataattggtttagtcaatttgtgcttaaagcacaagaaattccaaataataaaacccttaacagatggacctccagattkgccaaaacatcacttatagttttaaatgtatgctccataaggattcaccgtgcaatgccgttaatgttcttctgaggcatttagctgttattccatgata

SEQ ID NO: 10338 - DNA, 201 bp, Homo sapiens
catcagtgattcaatcccaatcagaagagttggccacgatgtggctgagggtgtctgtgtgtgtgtgtgtgttttaaggaagattcttgtcacctgctccwgctggacctcccctccagggcttcccgcttttggggctatccacagcttcaggtgggactgaggcacagttgggttaggtgtttaaagttcgggcctggg

SEQ ID NO: 10339 - DNA, 201 bp, Homo sapiens
tgcatcagtgattcaatcccaatcagaagagttggccacgatgtggctgagggtgtctgtgtgtgtgtgtgtgttttaaggaagattcttgtcacctgctscagctggacctcccctccagggcttcccgcttttggggctatccacagcttcaggtgggactgaggcacagttgggttaggtgtttaaagttcgggcctg

SEQ ID NO: 10340 - DNA, 201 bp, Homo sapiens
aggagtttgagaccagcctgggcaccatggtgaaaccctgtctctacaaaaaagtacaaaaaagttggccaggtgtcatggcatgcatctgtagtcccaaytaccagggaggcagaggtgggtggatcacttaagccagggaggtcaagactgcagtgagccatgattgtgccactgcactccagcctgggtgacaaagtg

SEQ ID NO: 10341 - DNA, 201 bp, Homo sapiens
gggatactattcagccttcaaaaaagcataaaggccaggcatggtggctcatgtcttaatcccagcactccgggaggctgaggtgggcagatcacttgagytcaggagtttgagaccagcctgggcaccatggtgaaaccctgtctctacaaaaaagtacaaaaaagttggccaggtgtcatggcatgcatctgtagtccc

SEQ ID NO: 10342 - DNA, 201 bp, Homo sapiens
gaaaagccattggcttggttataacttttgaaatgtgctgcaattagccaggtgtggtggctcatgcctgtaattccggcactttgggaggccgaggcagscggatcacgaggtcaggagatcgagaccaccctggctaacacggtgaaaccccgtctctactaaaaatacaaaaaattagctgggcatggtggcgggcac

SEQ ID NO: 10343 - DNA, 201 bp, Homo sapiens
tgactctagaggaacggaggtgcaggggcttgaggccactggactccattcagagggagtgaggaagcagaggccgaagcagtgttgttcccccagccccrtgcctcttgggtcctcagggaccccatgctgcagttgcttgcctgtcccagtgactcaacctccctctcgccatgctccatccacttacactcacccagc

SEQ ID NO: 10344 - DNA, 201 bp, Homo sapiens
tgaaactccctctgcttgtgagataaaactagcagaaatcagttggaaccaccatggccaactggagtttgcacacagtgagcttggtgaagtcacggccygaatttctaccacgtgtttcatattaaccccttgaaattttctcatgggacccctgaggcaacatgaagagataactgtgcaaacctgaggattttctag

SEQ ID NO: 10345 - DNA, 201 bp, Homo sapiens
atgctgaaactccctctgcttgtgagataaaactagcagaaatcagttggaaccaccatggccaactggagtttgcacacagtgagcttggtgaagtcacrgcccgaatttctaccacgtgtttcatattaaccccttgaaattttctcatgggacccctgaggcaacatgaagagataactgtgcaaacctgaggatttt

SEQ ID NO: 10346 - DNA, 201 bp, Homo sapiens
ttaccactgaaattgtgccctaaaggattaaagaagtcagtaactaacagaaattcttgagtttgcaaggtaagaaacaacttgctcaaatgctgaaactmcctctgcttgtgagataaaactagcagaaatcagttggaaccaccatggccaactggagtttgcacacagtgagcttggtgaagtcacggcccgaatttc

SEQ ID NO: 10347 - DNA, 201 bp, Homo sapiens
ggagggagtgcattctcaggatttacagcctcatcattcttcctgcccaatgtctgcccacagagccctgggtccatctttcctgcagagctcatggcacyggacttctccatgactttgtcttagcgtctaatcctgctcccagctcagcccagtgcagggcaggagcacgatgcacatttgctgagtaaacattgaacc

SEQ ID NO: 10348 - DNA, 201 bp, Homo sapiens
gacccgccccatctgcctaggcatttggctgcctcctcctgcccttagtaggaaagtgagtgtttcattttctcaatttatctgtggatgtggacaaaggrgaaaggggtagggaatagggggttgtagtcagcctccaacagattattaccactgaaattgtgccctaaaggattaaagaagtcagtaactaacagaaat

SEQ ID NO: 10349 - DNA, 201 bp, Homo sapiens
taccatgtatttaaggctggacacatcaccactcccaacctgcctcacccactgcgtcacttgtgatcactggcttctggcgactctcaccaaggtctctrtcatgccctgttataatgactacaaaagcaagtcttacctataggaaaataagaattataacccttttactggtcatgtgaaacttaccatttgcaattt

SEQ ID NO: 10350 - DNA, 201 bp, Homo sapiens
ccaggtgcatggtgcaagccaggtggatctaccattctggggtctggaggatggtggccgtcttctcacagttccactaggcagtgccccaatggcaactytgtgtgagggctgcaaccccacatttcccttccacattgccctagcagaagttcttcatgggatctccacccctgcagtagacttctgcctggacatcca

SEQ ID NO: 10351 - DNA, 201 bp, Homo sapiens
gacttggtaatttataagggaaagaggtttaattggctcacagttctgcatggctggggaggcctcaggaaacttacaatgatggtggaaggggaaggagrcaccatctttgtaaggctggagaagagagaaaagtgtgtgtgaaggaggaactgtcaagcacttataaagccatcagatctcatgcaaactcactctcat

SEQ ID NO: 10352 - DNA, 201 bp, Homo sapiens
ttaaaaaaaattgtttttaatcatcaacattattttaatgttgggagatagtgaggaggtagttatgatgagtcctttgctactcatatgtaagatgagaytcagagctaataatcattgtaatgatgataataatagtatcagtaatagtaataatgtgacaatagctgtaatgtactggaaaccttctgtgtgctagac

SEQ ID NO: 10353 - DNA, 201 bp, Homo sapiens
ggaatggaataataaaattatacattaaataagtgttgtaaatacagtagatgtttctaaagctaatttttaaatgaaaggacaatatataagtctatagytaactcctctgtcatgcacaatctgagttaacagaatagattaggggttagcaagctttttctataaagggccatgtaataaatatttcaggctttgcag

SEQ ID NO: 10354 - DNA, 201 bp, Homo sapiens
aacttctgcttttttagtttggaaatgtcctttttcttacttagcagagcatgacctactaatcctgtctgtaaagtgcaaccccacgtgatctgccagtrccgtgacctcacactgcaattggccatatgcagagaaccaaaaacaatcacagcgtggcttcggtgaggaaggtgcctgggagctttcaccccaactccg

SEQ ID NO: 10355 - DNA, 201 bp, Homo sapiens
gctgttcacctcaatcacccttgagcctgtgtgccctcaggctctgcctgggagcagggacaagggccaatgcatttgagaagggttttagaggagagagrgtgaaagtaaaagacttctagttatcgactaaccagaaactgtagcagtcagaatgttttatcctcatgcatttggcataaattatattttggatgtgta

SEQ ID NO: 10356 - DNA, 201 bp, Homo sapiens
acttgtcagcatcaaaccgaaggaaaaggttctaaagggtggagagcagaagccttgagaaggagcgtgcctgaaaggcatcgctgatggcagtaaatggrtgacagccagcccgggggagctaccctctaggggccgcagaggccacagttggactgggccttccaaaagaagtcggtctcccttttgtcttccttttcg

SEQ ID NO: 10357 - DNA, 201 bp, Homo sapiens
cacgtgaagacggaggcagagactggggtgatgctgccgtagccaaggaacacctccagccacaggacgctggaggaggcgaggaatctcccctagagccytcagggggagcacggcccggctgacgccatgagtttagacttttcaaaactgtgagagaatgcacttctgttgtttccagccaccacacttgtggtaatt

SEQ ID NO: 10358 - DNA, 201 bp, Homo sapiens
ggagaagtagcatggaattcctcctcattttctctcccgagtccaccctgcctcctccttcccaacagcttgtttattacagcatggtgacttggggcaaygtgattatatgagatggtttttttctcccttctctgtcctccctcctgggcacagtgtatatagtatgagagctactgtaatgaaaggtgcacaggcctt

SEQ ID NO: 10359 - DNA, 201 bp, Homo sapiens
cgctgggcaggccttggtggccctggtcccaggaggggagacttctgaagggggagacaaagatgccctccatgctggtttgtgcgtccagcttttatctyggagaattctaactttgacaaaaagtaagtgagttgtagagtacagattacactttaaactagatgatgtcaatatagactgcaaggatgggggccctcc

SEQ ID NO: 10360 - DNA, 201 bp, Homo sapiens
cacccatcaccttgggcaggctcagccctggtgttggggctgctccttcaagaggggcagggcaatggatcactcacatggacgctcttctttgtggagcytcctgctgtgaatttccgagtttcctctgcccggcttctcccaccgtctgcaccagaccttctttccactagcctgacctcaggtagcctctcaaactct

SEQ ID NO: 10361 - DNA, 201 bp, Homo sapiens
ggttcattttatgtatgtatgtatatatgtatgtgtatatatatgtatgtatgtgtgtatgccccagtcctagaatcagccttatctccaagaagccccasttcctttgattgaagaatgatcttagaaaccaagacttgagacataggtgtgcttgttgctacaggattgtcattgcttctagttcctctcactgacaaa

SEQ ID NO: 10362 - DNA, 201 bp, Homo sapiens
aaccaactgaccttgatgtttgtgtgtggaagtgtgtgcctgtttgtacgagcagatagagagctgggaaggatacaggccaggtgatcccagtcccaggrtggagctggagaacagaggcagctgagaaacgggtgggagggaggtaaaaatgcgcctgtatgggcctcaagattgttccatctgatacagcaagtacat

SEQ ID NO: 10363 - DNA, 201 bp, Homo sapiens
atagtgtcatagcagtccataaaaaacaacaaaaagttttaaaaagatgagataaaattataagtgtgtgtgtttgtatgcatagagaaaattttaaaaartatcattagacttctatctgctatttttttcatagtacatgaaatgaaaaaaaaaaaacaaatttcagaaaactagataggaagatcccgtttcagtaaa

SEQ ID NO: 10364 - DNA, 201 bp, Homo sapiens
tgatggaccgtcacctcccatttgtggatcgcgtcttcctccagggcatcgggagtgaggttgcagatctccactttatcaaagtgggccttgaagtcctkaaatgccatcctgcagcaaagcggagagacacgatgcacaggagggcaagagtgagggcatcatccattcactcattcattaaatcattcacttattcat

SEQ ID NO: 10365 - DNA, 201 bp, Homo sapiens
agaaggaggaggaggagttggtcttgctgtctcaggggtggtagagatggaagaaaatccccatataagttcaagcctgtgttgctcaagggtcaactgtrtgatgtagatagatagatagatagatagatagatagatagatagatagatagatagatagatagataggtgtgtgtgtgtttaattgtatgtatatatat

SEQ ID NO: 10366 - DNA, 201 bp, Homo sapiens
aaatgatgcccaagccacagaggtctgcagggaacctggcaatgcttgtgatttccctatggcccgctaccccccggctccctgcgactctatgctgcaaraagagtctccatgctcatcctcagcccttttgttcctgattttacagaaatctgtaagatatgatgtaaagctcctaactcccctaaataagaaacagat

SEQ ID NO: 10367 - DNA, 201 bp, Homo sapiens
ctttgtcattaggcttttctgcatttttaagaattttctactataaacctgcatcgtttttggaatcaggaaaacaaacaatgaaagctatttttaaagtytacctacaaatcagccctgggaagcagatctgcggctcggaggagcagggaggggacccaggcagtgtggtcgcttgtccctccataggtgccccaggac

SEQ ID NO: 10368 - DNA, 201 bp, Homo sapiens
catagagtctcgctgactttacaggaagctttgtttgggggaacttaacactgggtggtgtctgagccccaagttcattcctacaccagcctcccctcgcrttctatgtctcaggtcacttccagctgtggccctagaaagtttcttggaggggatgctgctgcccacggagaatgatactctgccagggcccattcctac

SEQ ID NO: 10369 - DNA, 201 bp, Homo sapiens
aggcgtgctttctgtgtttaatggcttctgagtttagcgagtttgtgatcttaattttgatgctaacatcacccatagagtctcgctgactttacaggaarctttgtttgggggaacttaacactgggtggtgtctgagccccaagttcattcctacaccagcctcccctcgcgttctatgtctcaggtcacttccagctg

SEQ ID NO: 10370 - DNA, 201 bp, Homo sapiens
taagggcaaataagtctgaatggagataacagacttggaaacggtactttgtgtctctactttcatggtccttccctctactgacatggaaatagcaccckaggcctgcccggggccatccctgaactagggatgcatcccccgtcaaaacaaactgaggacattggataattcacattttacataacagtattttactca

SEQ ID NO: 10371 - DNA, 201 bp, Homo sapiens
cacctttgaggggcaggatggctatgacaataaactgcaaacactgaagcgcacgggcacataatccctctctatttgtggtgtaacaaatcttatttgarataactgggtcaatgtctagggcttacagggcggggaaggggggaggaagggggactgagactctcctgtttctatatgctatgatgggatttgacctgc

SEQ ID NO: 10372 - DNA, 201 bp, Homo sapiens
aatcttggctccctaactaactgagatctgtcttctctgttctttgtcatcttcatcaataaaatgggggaaaataacactgtctatgtcttagggagaawaagatggaacattgcatataaagtgtctaacacaagtcctggcacatagtcatcaataacttgtttattattgtgcttgttaaattccattcacctggaa

SEQ ID NO: 10373 - DNA, 201 bp, Homo sapiens
acaaaatggaaatgcggggccccctgctcctaagttgtgaagactttcaagatggaaacgccagaacattaaaccaagcacgaggcacccttgagggcacrggtcctttggcacctgcacacagggcatgtcctcatagccactccagtactgagttacaggccctggacatgcttcactcagcctcaccttcaaaaccac

SEQ ID NO: 10374 - DNA, 201 bp, Homo sapiens
gtttgctggtttaaaaactgtatctgaggacaaaatgcttggattcaaatcttggctccctaactaactgagatctgtcttctctgttctttgtcatcttyatcaataaaatgggggaaaataacactgtctatgtcttagggagaataagatggaacattgcatataaagtgtctaacacaagtcctggcacatagtcat

SEQ ID NO: 10375 - DNA, 201 bp, Homo sapiens
ccaaagtgctgggattacaggcgtgagccactgtgcccagccccctgccttttttttttttttaatcaagtattcatacctcgaagtggcctatggaacayagattagaaaataccaagcaggacaaaatggaaatgcggggccccctgctcctaagttgtgaagactttcaagatggaaacgccagaacattaaaccaag

SEQ ID NO: 10376 - DNA, 201 bp, Homo sapiens
accattcatatcctcagtgtagaaaacagagatggtaactttgactccagaaggtcaccattcacatgaccacttaggagaaaaggagaagggagaacttycagtattttatccaaattctttattcgtcactcagctagcccagacgtcttcttaggaagcattggaagatatgagagagtggtgtggggtgggaagcaa

SEQ ID NO: 10377 - DNA, 201 bp, Homo sapiens
gcaatggagagaagagaaactagcaaatctcattatttctagggtcagctctgaccaccctgtaagtctaataacagattctgtttcaggaggggtctttmtagaatgcacctctcactagctaccagtaaccccttagggaaagccggcttcctggcttgatatactagaccctttggggcctgctggtctgtctctgat

SEQ ID NO: 10378 - DNA, 201 bp, Homo sapiens
ggttgtgttggatgtgtttcctggcattagtaaaagaggatgtgaggcaagagcaaaactaatgcatgtgctgaaagagctatggtgcaaagagtacacamaaaccttttctccccttctctgtatgctgctgtggacactgttacaaagcatgaaaatgaggccgtagatgcaaaagcttaaaagggtgacccatacctc

SEQ ID NO: 10379 - DNA, 201 bp, Homo sapiens
aggcacccctggagattgtaatgtacagcgaagtttgagaagtgctgatgtggagtgcatgggaacctattatgattctttatatctaactggagggttgrcattcttacaataaaaagttaaaataatactgcagcaaagctccatccttggtaattctaaaagttctccaggcaaatctaatgtgaggatgccagagtg

SEQ ID NO: 10380 - DNA, 201 bp, Homo sapiens
gaatgtggcttctcacgcccctcctggacctacagagtcagaatctgcagttttacaggaggtccaggcttggaagttgctcgtagagacctgagacagcrcagccacgtgctggaaacaaagcatttaagtttgtgactttattttaaaaggcagcaggcagtcgacaaaccaatttcttctacttagaggcggcttcgg

SEQ ID NO: 10381 - DNA, 201 bp, Homo sapiens
gatccacctgcctcggcctcccaaagtgctgggattacaggcgtgagccaccgtgcccaggccgccttcctgtttcttaaagataagatagagaagacagrttagagaagagtagaaattcagctatgtcatgtaggcattacactgggtgacataagtagtaagagaacttgacaacactacttgtcacacacagctcat

SEQ ID NO: 10382 - DNA, 201 bp, Homo sapiens
tcaaccaagcaactgtaaaaaggtggcctggaagacttgggcatgaaccgggcactagagaatgttgagggtttgctgagaatttcgttaggtgtgcaaayggtatgaagatgatgctaaaaacaagtctatcagctggagatactcagatgaatggacagagtttctgagatctgctattaaattatttagggggaaaat

SEQ ID NO: 10383 - DNA, 201 bp, Homo sapiens
aacggctgcaagatgccaagtttctcggaagaactggaagcacagagaccagaagtgccttaaggtctcgctattcagtgtggcgcttagaccggcagtgkcggcagctgccctgggagcttgttagaatgtggcttctcacgcccctcctggacctacagagtcagaatctgcagttttacaggaggtccaggcttggaa

SEQ ID NO: 10384 - DNA, 201 bp, Homo sapiens
aacaaaacaaaaaaatagccgggcatggtagctcacacctgtaatcccagcactgtgggaggctgaggcaggtggatcacctgaggtcaggagtttgagamcagcctggccaacaaggtgaaaccctgtctctactaaaaatacaaaaattagccgggcggatcacaaggtcaggagcctcctgagtagctgggactatag

SEQ ID NO: 10385 - DNA, 201 bp, Homo sapiens
gagtgcacctgagcaagtcactgccctcttggggcctcagcctcctcaccttcagaagacgaggtcgagccaatcagccctggcttcacttgagaatctcwcgggtagctttaataatacaacccaaagcggggtgggggaccatcactggacacaagaaatggaagagacccaacaaccaaacatggtgactgggtcttg

SEQ ID NO: 10386 - DNA, 201 bp, Homo sapiens
agtgcccttagttgcttcgtcgtaactccccgtcaccggttttattcagttaccttccagtcccactctcagagcttcctggcttgttctgctctcaaagygggtagagctggcacacatggactctccgaaacggctgcaagatgccaagtttctcggaagaactggaagcacagagaccagaagtgccttaaggtctcg

SEQ ID NO: 10387 - DNA, 201 bp, Homo sapiens
ataaaaaacaaaacaaaacaaaaaaatagccgggcatggtagctcacacctgtaatcccagcactgtgggaggctgaggcaggtggatcacctgaggtcakgagtttgagaacagcctggccaacaaggtgaaaccctgtctctactaaaaatacaaaaattagccgggcggatcacaaggtcaggagcctcctgagtagc

SEQ ID NO: 10388 - DNA, 201 bp, Homo sapiens
agcaatggtgatgctgtcctacctacttgtgtaaggcattcgatcttcctcccttccatacatattgaaataaataagccgcgcaatgtgttagctattgmtcagaactaaagtgaagtcagccacggggattacaaatctcggcttctcccctcatgttcctgagagtcttcccctggttttgaacacatctccctagct

SEQ ID NO: 10389 - DNA, 201 bp, Homo sapiens
aaaaacccatctctactaaaaatataaaaaacaaaacaaaacaaaaaaatagccgggcatggtagctcacacctgtaatcccagcactgtgggaggctgakgcaggtggatcacctgaggtcaggagtttgagaacagcctggccaacaaggtgaaaccctgtctctactaaaaatacaaaaattagccgggcggatcaca

SEQ ID NO: 10390 - DNA, 201 bp, Homo sapiens
aaatatttgcaattttcccccatctgttgagtgcctctgcctgctcctcctcgatgggattaggcccacagttcggaatcttggggagagccaaggaagcrgtaggcacccagtaggcccacggccgtcggctgatagcaatggtgatgctgtcctacctacttgtgtaaggcattcgatcttcctcccttccatacatat

SEQ ID NO: 10391 - DNA, 201 bp, Homo sapiens
cgcaagtcaacttcttgtctagtgagaggtgagggggttaaaatatagggtatcctggctgggtaccctgcctcacgcctgaaatcccagcagtttgggargccgaggtggacggatcacttgagatcaggagtttgaggctagcctggccaacatggcaaaaacccatctctactaaaaatataaaaaacaaaacaaaac

SEQ ID NO: 10392 - DNA, 201 bp, Homo sapiens; identical to SEQ ID NO: 1223

SEQ ID NO: 10393 - DNA, 201 bp, Homo sapiens
gggaaatgctgagcagcagacagaatgtccccctgccatgtggcaccatgcacatctgcagctaccaaggatgtgccttgatgttctgggccctgtgctcmgtgctggggagaaagtgggagttcttacgggggccagcgggaagagccctctgtgctaagttagctaagccctggcactggtgggccatggccaagggag

SEQ ID NO: 10394 - DNA, 201 bp, Homo sapiens
ctcagtgcactccttgccctgggctcccttgagggcaagcctggctgtccactgccctccaatgtccccttggctttgtgctctgcccaccctccccaagyacagctgtgtttgacaagaaggtggtgctgaggaggagggccgtccagccccacggtcccacgggctgctgagacgtgcaccgtgtaatgctgagtccca

SEQ ID NO: 10395 - DNA, 201 bp, Homo sapiens
gtctgaaaaatgaaggtctccacccaagaatgtcttgtgagcatgactctgggaccagtagaaaacagcaacttttcaatggtttgcttgagggagcgaggagcagagctagaagggatatgtgccttgccttgcagataagctaagaaagtgtcctgcagcctggcgtggtggctcactcctgtaatcccagcactttgg

SEQ ID NO: 10396 - DNA, 201 bp, Homo sapiens
cattctgggcttgttgcagaatgtgcctgcccgaagggaaacccaggagtcccccaagccctccctgtcttgattgcccagcccctgccaggggatagccmtggcaagcaatgcccccactgccaatgctactcactcctcaagtggacataaaatgtactccaaaagccacagatccctgcccagcaggctgtgctagct

SEQ ID NO: 10397 - DNA, 201 bp, Homo sapiens
tcacaatctggatgtttggtatcatgagacaatctccctgccctggcttggggggccacccatgggttaaggcataagtaacaattcctgacaagagtggrgtcattaatgtctggagcaggaagctgaggggagttgtgtttttctcttgcctcaacattgtaggaggagagagaatcctttctaggcatcagggtcatc

SEQ ID NO: 10398 - DNA, 201 bp, Homo sapiens
acaaagacgctggacagaataagtgcataactacatggtacagagggttataaggagggaaaaggggagctggatgagagagttgagagtgcccggtgtgrtggggaaagctgcagggtgaaatactgcatcagggaaacctcagggaaggtgaggactatggtgaggtcagaggggttgatatgagaacagtgccctgca

SEQ ID NO: 10399 - DNA, 201 bp, Homo sapiens
aagacggcagccactctcatgtcaaatcccagcgtcttttgggaggcagcttcccttttttagtttagtttgttggaagaaaagaattgtccctttccccsctctaaactaaaagccttgccagcccaggtgggcagcaccgaggtccctgcagggaacgtgcaaggggaaccctgcagtttcccgctcacatgcccttcc

SEQ ID NO: 10400 - DNA, 201 bp, Homo sapiens
gcagaaggcaaaggcaagaaagccagtggcatctgaaatgggtctcccttcgaaagagagcacatccacctgacccagaccgcagagccaggccaggaggmagaggaggaagaataaaaaagccaaccacatcgggactcaaaggaagcccaggatcctcgccggcctccaccgcatgctgccctgaccctgccccacttc

SEQ ID NO: 10401 - DNA, 201 bp, Homo sapiens
ggggcagccatcacacttcctcatgttttttagtgacattacttatcatttaccttaaagtaaatgataaataaaggtggacctaggggtctctcttgttyttcctttctttctttctttctttctttctttctttctttctttctttctttctttctttctttctttctttctttcttctttctttcttatttttctttc

SEQ ID NO: 10402 - DNA, 201 bp, Homo sapiens
ttcctctgggaggaaatctcatggatttatactgaagaaataactggctatgtgctgtgtgataacagatggaagggggctggaggggaagcagagaatcrggttgggaggcctgtgggaccgctagaagccacccctgcactaggtaaacagtgtggacctgaaagggacaggctgaagcacgaagtgtgatttacaaat

SEQ ID NO: 10403 - DNA, 201 bp, Homo sapiens
aaaaaaaaaaaaaaaaaaacataatgataataataataataaaaaatagaaagaaatgtgctgcaatcacaaaatttcccagaactttatcttatatgacygttttcctccagctcatggacagctatgtctgaatcaacagcagtccatagggcactgcccgaggtatcaggtgatgtctaaaaggattcaataggagga

SEQ ID NO: 10404 - DNA, 201 bp, Homo sapiens
attcaggagtttcctctcattgcaatgggcagccttggggagttttcctctgggaggaaatctcatggatttatactgaagaaataactggctatgtgctstgtgataacagatggaagggggctggaggggaagcagagaatcgggttgggaggcctgtgggaccgctagaagccacccctgcactaggtaaacagtgtg

SEQ ID NO: 10405 - DNA, 201 bp, Homo sapiens
ggtgtgtcaggctagagaccagaggctcttcctctattggattgcaggaaccccctgaagactcttcaacaaaccgagagctggggtgagcccccaccaasacaggagggagattaaatttccctctaatctgggtgtatatgaggagtctgagacagatgaatttgatttgccaaaaatggagagagaaggctgggcgtg

SEQ ID NO: 10406 - DNA, 201 bp, Homo sapiens
tgagtaactgggattacaggtgtgtgccaccatgcctggctaattttttgtatttttagtagagacggggtttcaccatgttggccagactggtcttgagytcctaacctcaagtgatccacccaccttggcctcccaaagtgttgggattacagacgtgagccatcgtgtctggccaagtttctgtgttaatggacacag

SEQ ID NO: 10407 - DNA, 201 bp, Homo sapiens
tctgtgcctgacctgggttccaagtgtgcacagggtgggaggcatggatgtaagggacacagaggaggctatgggtggggccagcagggcaagagggagcrgagagtagggccaaaggtgggagagaagtagccagagcattctggggccttccaggtgcagagcagcaaatccctccccatccctgctgtgcctcctcct

SEQ ID NO: 10408 - DNA, 201 bp, Homo sapiens
cttagtaacattttattttctgtagcttactttgtgcacagtatataatatacacagtatttaatacctacgacataaaaatatgtgttaatcaacattasattatcagtaaagtttctgatcaacagtgggctattaggagttgagtttggggagagtcaaaagttattcttgcattttcaactgcgaaggaagtcagtg

SEQ ID NO: 10409 - DNA, 201 bp, Homo sapiens
caatgcagccaacctaaaaacagaatgcaccaaaggacaaccattcctaggtcctcatcggtaaatcttctatgtccctcacatagtattgcaaatgacaygaaggatttttattgtaggttttgctgaaattttccccaagggggaggatgacttagttgggtgatggggggagcaaacatccctgtcgtcagggttggg

SEQ ID NO: 10410 - DNA, 201 bp, Homo sapiens
agaatgtggaaaagtgtatttggaaacactgagtttcagagctgatagtaatgctgtatcatttcaatcagaaaggaattttgcaaaaaggaactgacttktttgtttgtttgtttttgagacggagtttagatcttgttgcccacgctggagtgcaatggcgcaatctcggctcactgcaacctctgcctcccaggttta

SEQ ID NO: 10411 - DNA, 201 bp, Homo sapiens
tgtgggagccacactgtcctgcccaggctgggggcggggtggggagtagacacacctgagctgagccttgggtgcagagcagggcagggccgcggtggcayggggctgggcaggcggcctgtgtgtctgtctaccagtcctccatccagccagcacccagctctccagttagtgtctgtctttcaagtgcaggcaaggtaa

SEQ ID NO: 10412 - DNA, 201 bp, Homo sapiens
gcgatggctcacatctgtaatcccagcactttgggaggccaaggtgggcagatcacgaggtcaggagatcgagaccatcctggccaacatggtgaaacccygtctctactaaacatacaaaaaaaaaagttagccaggcgtggtggcaggcgcctgtagtcccagctacttgggaggctgaggcaggagagtggcatgaac

SEQ ID NO: 10413 - DNA, 201 bp, Homo sapiens
tcccctggaatgtgggagccacactgtcctgcccaggctgggggcggggtggggagtagacacacctgagctgagccttgggtgcagagcagggcagggcygcggtggcacggggctgggcaggcggcctgtgtgtctgtctaccagtcctccatccagccagcacccagctctccagttagtgtctgtctttcaagtgca

SEQ ID NO: 10414 - DNA, 201 bp, Homo sapiens
caccatgtcactgactacttagggggaaaagaaagctgaggtagtgaaaacatttaatgaaatcctgaacacccagagtaacctatttcttccttgctccrttcccatttatatctgagaactgtgttcatgccccagatgttgcaagaatactgcggaaacaaaagtgttcgaaataattcttttttttcgagatggagt

SEQ ID NO: 10415 - DNA, 201 bp, Homo sapiens; identical to SEQ ID NO: 1185

SEQ ID NO: 10416 - DNA, 201 bp, Homo sapiens
tgtgcagatgactcctgcatgtgtcagggtttttcttgcgggcaatgcagtctgatcagtataaactaggcagagaggtatttgatgaagggtttggggarctcagaaaatggactgggaagctaagaaccaggcatggaaatgagcaagaactaggggagattggggagcaggagcagaaatggtcttgcaccagggtca

SEQ ID NO: 10417 - DNA, 201 bp, Homo sapiens
ggcctggggggggccaaggaaggaggctgaggcagggcgaggggcaggatctgggcctttggtgtctgccagccctcattcctgcccctgtcttgggtgaytcttccctccctgtctcctgtctggatttcagggaagatgaagggcttctccctgctggccgagccccaggagttctgggtggacaacagcacctcagtg

SEQ ID NO: 10418 - DNA, 201 bp, Homo sapiens
tcatgaatgcttacaacagccttattcataacagccagaaggtgcaagcaactaattgtccatcagctgatgaatggataaataatgtgtggtatatccaygtagtggaacattattcagccataaaaaggaatgaagtactaatgctacaccttggatgaaccttgaaaacattacgctaactgaaagaagcaagtcaca

SEQ ID NO: 10419 - DNA, 201 bp, Homo sapiens
tggtgcctggcatgttgtgtgtcttgcaggtggcggttagggctgcctcagtgaactcaaatggctgcattttacaggagaaatatttgagccacacttgmggtcctgtggccaggagaatgcagagtggcctggggggggccaaggaaggaggctgaggcagggcgaggggcaggatctgggcctttggtgtctgccagc

SEQ ID NO: 10420 - DNA, 201 bp, Homo sapiens
actcatgaataatccaccctttgtttagcatatgaccaagaaataaccctaagtatactcagttgagcagcccatactgctgctctacctacggagtggcyattctttctttacgtctttataaacttgctttcgatctatagactcgtcctgaattctttcttgcgtgaggtccaagaaccctctcctggggtctggatc

SEQ ID NO: 10421 - DNA, 201 bp, Homo sapiens
gccacgctggtgtgagatgttgatcacgggggaggctgtgtagtgggggacaagagttatatgggaactttctgtactttctgctcgattttgctgtgaayctaaagtcactctaaaaaataacatctcttaaattttttaaaaagtgagtgtgtcaaaccacagcctttgggtcaggacagttctaggtttgagttgacc

SEQ ID NO: 10422 - DNA, 201 bp, Homo sapiens
ggtggtggccacatgtcattctacgtgcgtccaaacctacagaatgtaaaacaccaggagggagactcaaagaaaactatcaactttgagtgctgaggacrtgtcagtgtaggttcgtcagttgcaacaaatgggccacgctggtgtgagatgttgatcacgggggaggctgtgtagtgggggacaagagttatatgggaa

SEQ ID NO: 10423 - DNA, 201 bp, Homo sapiens
atggaaagaccccaggtaactgcgtcacacacaaatttgtgtccttctcccacaacgggctctcccgagttctctgtcatctgcacggccctgtgagcagraggggaaacagagggctcacccctgcccccaaggcccagtgtgcaaatccattcatcacaacgaggttgtgtgagtctccccagtagcaagggctgctga

SEQ ID NO: 10424 - DNA, 201 bp, Homo sapiens
agacaattttcaggagtttcactgacctgaaaatcctctgtgtccctcctattcacccctccttccctcctaaccactggtaaccaccgatcctattcccrtcttctccatagttttgcctttcccacccaggatgtcatatagtggaatcattcagtatgtggcctttccagattagcctctttcacttagtaatgtgca

SEQ ID NO: 10425 - DNA, 201 bp, Homo sapiens
cttagtaggaaagtgagtgtttcattttctcaatttatctgtggatgtggacaaaggggaaaggggtagggaatagggggttgtagtcagcctccaacagrttattaccactgaaattgtgccctaaaggattaaagaagtcagtaactaacagaaattcttgagtttgcaaggtaagaaacaacttgctcaaatgctgaa

SEQ ID NO: 10426 - DNA, 201 bp, Homo sapiens
tatcccaatagcacctgcctgactaatacatcatgctctgctgactccatatgtggctggtttcctggatccgattctgactgatggtatctgttctcacrctgctaataaagacataccagagactgggtaatttataaagaaaaagaggtttaatggacttatgtgttccacgtggctggggaggcctcacaatcatgg

SEQ ID NO: 10427 - DNA, 201 bp, Homo sapiens
aactcactctcatgagaatagcataggggaaatcgtccccatgatccagtcacctccctctcttgacacatggggattacaggtgcctcccttgacaggtkgggattacaattcgagatgaaatttgggtggggacacagagctaaaccgtatcattctccaccggcccttcccaaatctcatgccttttcagatttcaaa

SEQ ID NO: 10428 - DNA, 201 bp, Homo sapiens
ccaaaccatatcagatggcttatttggtttctatgtagaacctctgcttttcattcaacagtcttcatttagccacagataagctctgtccctaacttccrctgatggaatgtacacataagaaacttccactgatggaatgaacacagaaggtgcctactgggaagaaaactggcctgaatctgagctgggtcaaatgtc

SEQ ID NO: 10429 - DNA, 201 bp, Homo sapiens
atgactggcagaacaagaacatgaaatggtctccacgcagaagacagccacgtggaagtggctgactggtagaccagctgagatgaagactactccagtcytcacagcggtgctcaaatggccccatcaaatcaaatgtaatgaccaggcagagactagggtgaaaacagttgtggaaatccatttgtatgtctcctgtaa

SEQ ID NO: 10430 - DNA, 201 bp, Homo sapiens
gagtccaaaggtttgagaacgaggagctccaatgtccaagagcaggggaatatggatgtcccagttcaagtagggaaagggaattcacccttcctttgtcrttttcttttatttggatctttagcaaactgaataatgctcgtccacattggtggcagcaatcctctttactcagtctactgattcaaaagctattttctc

SEQ ID NO: 10431 - DNA, 201 bp, Homo sapiens
tgcagtcagtttgaatggctgctccttatgggaataatttacattctcaataaaattctctagcaattttctgattgattttaatgagctttaaagccttmcgtagaagatcccccagctgatagtcagccttgggcatggattaagggcttttaaccaatcttgcaacaagtttaagcagatattctttattgggtccaa

SEQ ID NO: 10432 - DNA, 201 bp, Homo sapiens
ggtcctgaaattttattttcttttacaccactttccagcatgttacctgatcagttgtttattatctttgctgttgaatggagtgatcattccaagggccygaggcaggaggcccaggcacagtggaaactctcccaaagaccaggatctttgttttgttccctgacatatgctgagcaccaggaatagtgaatgaatgaa

SEQ ID NO: 10433 - DNA, 201 bp, Homo sapiens
caagggcccgaggcaggaggcccaggcacagtggaaactctcccaaagaccaggatctttgttttgttccctgacatatgctgagcaccaggaatagtgartgaatgaaacaaattgtgaggctttaaagagccgaaatatttaaacactgggcacaaggttgttgcttaatcagtgctagatccttacctcccccttgtg

SEQ ID NO: 10434 - DNA, 201 bp, Homo sapiens
aacaaattgtgaggctttaaagagccgaaatatttaaacactgggcacaaggttgttgcttaatcagtgctagatccttacctcccccttgtgtccaggtsgacttgttactgcagttaaaccacttgctgatcctcaaacaactagttagtggcacagccaggcctaggaccccagtctctactgttccaactaacccat

SEQ ID NO: 10435 - DNA, 201 bp, Homo sapiens
tctctctcagatgtaactgagctgtgggctaggaggaaaaggccgggaggaggcacggtgatgactgaaaaacctctcccctctcataagaccagtcatcyggacgcgggctttcccccactcggtgcccacctggggtcttacaggaggagctgctcctcctcagcaataggacaagatggtcaggtcttcctgcttccg

SEQ ID NO: 10436 - DNA, 201 bp, Homo sapiens
atcagggaaacctcagggaaggtgaggactatggtgaggtcagaggggttgatatgagaacagtgccctgcaaatggcaggcaccacaggagcatgagccrtcatcttcacctttagcattcagcccgggagaagtagggagacatagaaggggcaggtgctggccaagaggcaggggcaggagaggagaaggcggagggg

SEQ ID NO: 10437 - DNA, 201 bp, Homo sapiens
aaggaagaccggagaggtaaagctcccctctcatctcatgatatcaagagtacctgccgtccacatgccttaccacagctgatgctggccttgatcacctrgctaaggtagtgttagtcaggtgtctccactggaaagttgctccttctctcccctttccatgctgaactctttggaaggaatcattatgtgaaggccgca

SEQ ID NO: 10438 - DNA, 201 bp, Homo sapiens
ggctgggactacaggtgtacaccacaacactagccttaactgttgtcgacttttaaaagcctagtttgaaacttaaagcccacaatgatgttttggcctargtgggctctgccttccctcccccgtgtatctctcctcgcaagatgtctgtacatttgcaaaggagcttatctgtcctgagggccacccccatttcctaga

SEQ ID NO: 10439 - DNA, 201 bp, Homo sapiens
tgtagagtatgccagcatttgtggagaaagaaggcaaaaaatatttatttatatctgcataaaaatttctcggaaactacacaaagatctactcataatartggttctgttttctgggggtaggtggagtagatgggggtagaggaatgtggggagacttttctatatgccttttatatttttttagctttaaccctatag

SEQ ID NO: 10440 - DNA, 201 bp, Homo sapiens
agggatgtgctagtgtaaggtcgaggcagagggtgggctgctgtcatggaaagaccccaggtaactgcgtcacacacaaatttgtgtccttctcccacaamgggctctcccgagttctctgtcatctgcacggccctgtgagcaggaggggaaacagagggctcacccctgcccccaaggcccagtgtgcaaatccattca

SEQ ID NO: 10441 - DNA, 201 bp, Homo sapiens
cccagcttcagggatttacgttctcattctcctcccgatacaaacacctctccaggctggggtcttgtccttccacctgggacttatctatgtattggaaraacctgcctttttctttagagtcttagtatagttgctaggtaattggagaattgcatcatcattgtgagtaaaacaaacatgcctcagagtaggaaacac

SEQ ID NO: 10442 - DNA, 201 bp, Homo sapiens
aaacttatacacaacttcaccctattctcctaagaacaaccgcagaataggcctttcaggatgagtgggaggacagccgagggcagggatgtgctagtgtwaggtcgaggcagagggtgggctgctgtcatggaaagaccccaggtaactgcgtcacacacaaatttgtgtccttctcccacaacgggctctcccgagttc

SEQ ID NO: 10443 - DNA, 201 bp, Homo sapiens
gctgggtgtggtggctcacacctgtaatcccagcactttgggaggccgaggagggttgatcacccgaggtcaggagatcaagaccagtctggccaacatcrtgaaaccctgtctctactaaaaatacaaaaaattagcccggtgtggtggcggatgcttgtaatcccagctacttgggaggctgaggcaggagaatccctt

SEQ ID NO: 10444 - DNA, 201 bp, Homo sapiens
gaagtgatatgactatatgcatgagacaaattgtcaggataagacgggcactcaggatctcacttgtaggaccagcatcccttgtactgcccctccttgcscaaaagcaaccggaccccacaggagccactcccaggcccgtacccacctggagggaatggaagccagcccagctggcgccgggtcagaggtagagccctg

SEQ ID NO: 10445 - DNA, 201 bp, Homo sapiens
ccgagactgagtgctccgaggactgaggacgagaaatatgccaggtctgccactgccttcttacgagacccggacccaggggaggcacagccatgcccagmtcctgcctgccagttctgtcctcccagctgccctactttcatgctgggacctccaattcagtacaaagggagacctcactgtttctgaaccatctctact

SEQ ID NO: 10446 - DNA, 201 bp, Homo sapiens
cagctgaccctcatgaggaccccataagttgcattattgtccccattttaaggaagagaaaaagtgcttccaaccttttcatatcaagtgcctgtagagamcatgagcatctgtatgaaaccctggatcaaacagaaagagccgctgcttctggccaggggctctgctcaccaggggcccaggaaatcaatttctctaact

SEQ ID NO: 10447 - DNA, 201 bp, Homo sapiens
gaggatggggcggttggcttggcatgagtgttgaaccagaaaatgggcctggggagggcagagctggagacactttgaacgccatgcttggtaggtgtggraatggggacgcgttctgttcagaggtcatcccggaagcctgccgtgtgcagactggaggcagggaggattgtttgaaggttacgcaagagtccaggcaca

SEQ ID NO: 10448 - DNA, 201 bp, Homo sapiens
cgtgtgagtgtcctgcatgtgcgtgtcgatcctggatgtacatttgttcctgtgaaatgttgcttgggaggccatgaggaaggggttacctgaagctacastcctgtgataggacgatcagaggtgtctcaattgcaggggtcttgacaaacctgaagtgaacctagactgctgcctgaagccccgagggaggcacgcaga

SEQ ID NO: 10449 - DNA, 201 bp, Homo sapiens
cttgcctggcagtgagggcaacagggctggtgaagctaggagcaagcatgatgagcccagcctgcagagtttggggcaaggaacgaggatggggcggttgrcttggcatgagtgttgaaccagaaaatgggcctggggagggcagagctggagacactttgaacgccatgcttggtaggtgtgggaatggggacgcgttct

SEQ ID NO: 10450 - DNA, 201 bp, Homo sapiens
gcccagcccctgccaggggatagccctggcaagcaatgcccccactgccaatgctactcactcctcaagtggacataaaatgtactccaaaagccacagawccctgcccagcaggctgtgctagctcctggggcagggctgttcccggatgcccgcctccttcccatcctccctgcccctcccctcccccagccttctgca

SEQ ID NO: 10451 - DNA, 201 bp, Homo sapiens
tcggagaaacaaagtgccttgctcaagatggcacagccaccagtgggggtcctgggattgaaacccacatctcctggccccacagcccagttctacactcrgaagggtcaggttcatatctcttgagaaggtcaggaactggggtccctggcccatgcagaaataagcaattggcttgcttaaatccctttcatgttagga

SEQ ID NO: 10452 - DNA, 201 bp, Homo sapiens
ctctgagctgagcccagaaggacaatgcaaaccaggaccatgtcagtgggcctcaatagagtcccaggaatagcctgccccgctcagcagtagggttcagsgtgggccatttaacttctcacggctgcatcctcatctgtcaccagcttagacattctgggcttgttgcagaatgtgcctgcccgaagggaaacccaggag

SEQ ID NO: 10453 - DNA, 201 bp, Homo sapiens
ggcagggggcagccctgcggacatacctggtgaccacccttgagaagtggggaagtggctgctccgctgggtccctggatgggccgtccacctcctggacytgctgccctactatgtgcacgactatacaacatcctttttcttacatcatttaatccccttatgatgtggtgaagaggtatttgtgcctttgtttaccag

SEQ ID NO: 10454 - DNA, 201 bp, Homo sapiens
ttccaaggtaaggcaaacctctctgctggctctggccctaggacttagtatccaatgtgtagctgagatcagccagtcaggccttggagatgggcaggggrcagccctgcggacatacctggtgaccacccttgagaagtggggaagtggctgctccgctgggtccctggatgggccgtccacctcctggacctgctgccc

SEQ ID NO: 10455 - DNA, 201 bp, Homo sapiens
aactcagaaactctccaagtaaacacaaattagccatcgggtataaattggggaggtgtctggatgtgtgaccgactcctctgtgggtcagtgtttctggkaattggtgtgcacacgtgccagtcacagggggttctgcggacgcatgtgtggaaggggcagctaggcggtgggcctgggttagatgcctgggagtggtgt

SEQ ID NO: 10456 - DNA, 201 bp, Homo sapiens
tcccacgctctctggacttcacagaactggatgttgctgctgagaagattgacaggttcatgcaggctgtgacaggatggaagactggctgctccctgatrggagccagtgtggacagcaccctggctttcaacacctacgtccacttccaaggtaaggcaaacctctctgctggctctggccctaggacttagtatccaa

SEQ ID NO: 10457 - DNA, 201 bp, Homo sapiens; identical to SEQ ID NO: 1161

SEQ ID NO: 10458 - DNA, 201 bp, Homo sapiens; identical to SEQ ID NO: 1162

SEQ ID NO: 10459 - DNA, 201 bp, Homo sapiens
gtaaataataataaaaaaaagagtggggctattggttagtggaaggaagaccggagaggtaaagctcccctctcatctcatgatatcaagagtacctgccrtccacatgccttaccacagctgatgctggccttgatcacctggctaaggtagtgttagtcaggtgtctccactggaaagttgctccttctctcccctttc

SEQ ID NO: 10460 - DNA, 201 bp, Homo sapiens
ctcccacgctctctggacttcacagaactggatgttgctgctgagaagattgacaggttcatgcaggctgtgacaggatggaagactggctgctccctgaygggagccagtgtggacagcaccctggctttcaacacctacgtccacttccaaggtaaggcaaacctctctgctggctctggccctaggacttagtatcca

SEQ ID NO: 10461 - DNA, 201 bp, Homo sapiens
taaaagaggccccagagagctgccttgccctctttctaccatgtgaggacagagtgagaaggatccatctataaatcagaaacagggccctccacagatayaggtactgcctgtgtcatcttcttggacttcctggtatctagaactgtgagaaataaattcctgttctttgtaagccactcagtctatggtattttttta

SEQ ID NO: 10462 - DNA, 201 bp, Homo sapiens
ggcagggcaatggatcactcacatggacgctcttctttgtggagcttcctgctgtgaatttccgagtttcctctgcccggcttctcccaccgtctgcaccmgaccttctttccactagcctgacctcaggtagcctctcaaactctggtttctacctcctgctcatatgcagcaattactgtgatggtactaattccagaa

SEQ ID NO: 10463 - DNA, 201 bp, Homo sapiens
tcctcccacctctgccttccaaagtgttgggattaaaggtgtgagccactgcacccagccacagattgcttaaagcattcatttaacaaatacttgttgargatttgctacttgtaagactttaagcctggcatctcagaggaggccagaggagggctgtataggccctgcctccaggcttttaaaggtcaatgggcaaat

SEQ ID NO: 10464 - DNA, 201 bp, Homo sapiens
atagggacagaatttcagttttgcaagatgaaaaagtgctggagatagatcgtggtgatagctgcacaacaacatggatgtacttaatgctactcaactgmacacttaaaaatggtaaaatttatgtcatatacattttatcatatacgattatttatcgatatgtcatatacgactttttaaaaataaaaaagaagcatc

SEQ ID NO: 10465 - DNA, 201 bp, Homo sapiens
agggaaacgtgctccacaaggtaactcagggaagcctcggggctctcagaggacagaggtcactggggagcggagagcaggccttgcctggcagtgagggmaacagggctggtgaagctaggagcaagcatgatgagcccagcctgcagagtttggggcaaggaacgaggatggggcggttggcttggcatgagtgttgaa

SEQ ID NO: 10466 - DNA, 201 bp, Homo sapiens
caagatgttaacctcgtgagggacagagagccaggcgggaggtgaaagacaagactgtggagaaagaggttcagtggcgcatagtgatttttcttaccacracaacctccttgaggtctttcccttcgggttcagggggaggtgatagatggggggattgctcagccctggcactgactggtcacaggggcagaggccagc

SEQ ID NO: 10467 - DNA, 201 bp, Homo sapiens
ggaggtgaaagacaagactgtggagaaagaggttcagtggcgcatagtgatttttcttaccacgacaacctccttgaggtctttcccttcgggttcagggrgaggtgatagatggggggattgctcagccctggcactgactggtcacaggggcagaggccagcccgagggttgcccggttgagggtggcagcacactgtg

SEQ ID NO: 10468 - DNA, 201 bp, Homo sapiens
ggtctttcccttcgggttcagggggaggtgatagatggggggattgctcagccctggcactgactggtcacaggggcagaggccagcccgagggttgcccsgttgagggtggcagcacactgtgcagggcagagcagggacacatggacttagcctgctgtccctaggagaagtgctgggaggagcgctcactgagaagga

SEQ ID NO: 10469 - DNA, 201 bp, Homo sapiens
gcagaggccagcccgagggttgcccggttgagggtggcagcacactgtgcagggcagagcagggacacatggacttagcctgctgtccctaggagaagtgytgggaggagcgctcactgagaaggagggtcctgcagaaggcaaaggcaagaaagccagtggcatctgaaatgggtctcccttcgaaagagagcacatcca

SEQ ID NO: 10470 - DNA, 201 bp, Homo sapiens
cctgccccacttcctaactttgctggcctcagtttccgtcaaaggaggcagccacttcctgcccacatggtctgtccagtgaggagatcgggggctgtctmgggacctctaggtttccctttagcaatgatgttctatttacatgacctcagcaggcagctagatgtgtcccactagagaggacctgaggatctggggcct

SEQ ID NO: 10471 - DNA, 201 bp, Homo sapiens
tgaagcagcccagcagggagcctctcttcaaagccttctctagaatctcatagaagttctcgggggcctctttagtttggaaggtctctgccacacccccrgtgaagtcttccatggcctcgatggcgctgcctcccttcagagcttcatagctcccatttagcctgcaagggtggcaagagagagaggagagagtcaggg

SEQ ID NO: 10472 - DNA, 201 bp, Homo sapiens; identical to SEQ ID NO: 1175

SEQ ID NO: 10473 - DNA, 201 bp, Homo sapiens
atctttggtaaatctcctccgccggggagaggtcctgcctcctgagctgcactcagcaccaatctctggccagaaacacaggccacacccggccacaaagytggacatcagccacacactgaggattcctgtgctcactcaggcactgggctaggagtccagggctatcccagctgtgagctctgtgacctctgtgggctt

SEQ ID NO: 10474 - DNA, 201 bp, Homo sapiens
caagaagcttgagttgggcttctgtgcatcacaaaggtggagcctggactgtcatctgggcccggcctcttgggtagtggtccctgaatgactggcagaayaagaacatgaaatggtctccacgcagaagacagccacgtggaagtggctgactggtagaccagctgagatgaagactactccagtcttcacagcggtgct

SEQ ID NO: 10475 - DNA, 201 bp, Homo sapiens
aggaaaaaactcagaaactctccaagtaaacacaaattagccatcgggtataaattggggaggtgtctggatgtgtgaccgactcctctgtgggtcagtgyttctgggaattggtgtgcacacgtgccagtcacagggggttctgcggacgcatgtgtggaaggggcagctaggcggtgggcctgggttagatgcctggga

SEQ ID NO: 10476 - DNA, 201 bp, Homo sapiens
cgtaccaactgtgcctgcagctgccaccgcctcccagctcctatcttgcaattggttgttttgttcaggagaggtctgtttttgtttttgttttaaaccaratcgcacccaatgaggagaaaaatacaaaaggaaaaaactcagaaactctccaagtaaacacaaattagccatcgggtataaattggggaggtgtctgga

SEQ ID NO: 10477 - DNA, 201 bp, Homo sapiens
gagtgaagtggcaccatctcggctcactgcagggggaacgctgtgcctcttgggttctcagggaccccatactgcagtcgctcttgatccagcaatccaayctccctctcgccatgctccatcccctcacactcacccagctccacccctacccccaccccctgcagataacagcatgccttgatgctgttccaagtgtgt

SEQ ID NO: 10478 - DNA, 201 bp, Homo sapiens
gggtggtgcagagcagagggcactatgggaggagcaggctggagtgaagtggcaccatctcggctcactgcagggggaacgctgtgcctcttgggttctcwgggaccccatactgcagtcgctcttgatccagcaatccaacctccctctcgccatgctccatcccctcacactcacccagctccacccctacccccaccc

SEQ ID NO: 10479 - DNA, 201 bp, Homo sapiens; identical to SEQ ID NO: 1184

SEQ ID NO: 10480 - DNA, 201 bp, Homo sapiens
ttaataaccacctttcaccctttgcaaaatgatatttcagggtatgcggaagcgagcaccccagtctgagatggctcctgccggtgtgagcctgagggccmccatcctctgcctcctggcctgggctggcctggctgcaggtgaccgggtgtacatacaccccttccacctcgtcatccacaatgagagtacctgtgagca

SEQ ID NO: 10481 - DNA, 201 bp, Homo sapiens
ccctgagctacatgtgacctgctcactctctttgcctttgaaacacttctgtgctattggtgacagggcttgagagtacctctgcttatcagattgcaggyttcagggacagaagaaacgggctggccctgagtggtggcctgtgagtcaggagaaggtgacactgtctggggtggaaggtcaaggaatgcctactcggtg

SEQ ID NO: 10482 - DNA, 201 bp, Homo sapiens
gatcatgtagatattttccatggagctttgaatccatttcttcttttttttgtagacatgaatggatttattctgggctaaatggtgacagggaatattgrgacaatgaaagatctggttagatggcacttaaaggtcagttaataaccacctttcaccctttgcaaaatgatatttcagggtatgcggaagcgagcaccc

SEQ ID NO: 10483 - DNA, 201 bp, Homo sapiens
tccctgagctacatgtgacctgctcactctctttgcctttgaaacacttctgtgctattggtgacagggcttgagagtacctctgcttatcagattgcagrcttcagggacagaagaaacgggctggccctgagtggtggcctgtgagtcaggagaaggtgacactgtctggggtggaaggtcaaggaatgcctactcggt

SEQ ID NO: 10484 - DNA, 201 bp, Homo sapiens
aattcagctgatattggtgcattttgcacttggatcatgtagatattttccatggagctttgaatccatttcttcttttttttgtagacatgaatggattwattctgggctaaatggtgacagggaatattgagacaatgaaagatctggttagatggcacttaaaggtcagttaataaccacctttcaccctttgcaaaa

SEQ ID NO: 10485 - DNA, 201 bp, Homo sapiens
acagtttttttttggtgagctgttctgccaaccatttttggcctttttaagtgaccccaataaatcttttttatgtttagaaactagatggcacacagttkctgttgccttgcttgcatcctgatgtggggggcactcaccaaggggcagaggtgggcttgggtcccacccactggacttggaaacagtgccctttgtccc

SEQ ID NO: 10486 - DNA, 201 bp, Homo sapiens
ctacgacaggaaaaccacctccaaccccgcttgagccctgagagggttgggtcctgccgagcctcacctgcaaacccagagccctgattttttcccagccyttagatgctcactacaaagactagtgtagagactcctgtcgggaggctgcctgagctggggaagctgtcactcacttggcgtaggctttttccagcaagg

SEQ ID NO: 10487 - DNA, 201 bp, Homo sapiens
ctcaccctcatggcctcattttaacttaatcatctctttaaagatcctgtctccaaataatggtcacattctgaggtcctggggttgaggacttcaacacrggcattatggccgttgggggaggtaggacataattcagctgatattggtgcattttgcacttggatcatgtagatattttccatggagctttgaatccat

SEQ ID NO: 10488 - DNA, 201 bp, Homo sapiens
catggagtgggcaaggcaggctgctgggctttgctgagcttgagtctggcagagtgatacctttggcttcttgtcctcctctttcattcaattctttcttwctcttccccttgtgcccctcaaggatctctcctcctaaccaacagctcccttgaagtcagggtggtgctgtgtggagtctgggtgtcccccaggatcagt

SEQ ID NO: 10489 - DNA, 201 bp, Homo sapiens
cttcaatgaggttatttcatacgtttgaaattggctctcatagttacggacgccaagaaatctcacaatctgccatttgcaaactggagaaccaggaaagytggtggtatcattcagtttgagtccaaaggcctgagaattggggggttgatgatgtaagtccaagtttgagtccaaaggtttgagaacgaggagctccaa

SEQ ID NO: 10490 - DNA, 201 bp, Homo sapiens
ggtcttccctctgtgtgtgtccatgtcctcatctcctcttctcataaggacacaggtcatattagatcagggctcaccctcatggcctcattttaacttawtcatctctttaaagatcctgtctccaaataatggtcacattctgaggtcctggggttgaggacttcaacacgggcattatggccgttgggggaggtagga

SEQ ID NO: 10491 - DNA, 201 bp, Homo sapiens
aaggaggacaaaggagccaacacaaatagctaacattctaaagaatcccaaagagtccaacggcgtctcacaccttggctccagtgaggaggaagggcagrgtctcccttcagtgttctttactccccacgcattcagaggatgtcactcaaaaggtgggtggctacagaagaccaggtgcatctgcaccttctaagtact

SEQ ID NO: 10492 - DNA, 201 bp, Homo sapiens
caacagtgagaaactcggctcccgccatccaccatccgttcactcgattgttcagctcaatatacatgtataattagatcaatttttcatttgtactcctwcaagaaacaattttagcaactagagcatagcactcacgtacagtttcttttgcctttaatcttacagactccactgatttccaaagttacttaggtcagc

SEQ ID NO: 10493 - DNA, 201 bp, Homo sapiens
gggctgccataagtaccacagactgggagggtttaacaacagaaatgtgttatctcacagttctggaagctagaagcctgggagccagccatcagcagagytggtttcctctgggtcctctatccttggcttgtagatggccgtcttctctctgtgtccccacatggtcttccctctgtgtccccacatggtcttccctct

SEQ ID NO: 10494 - DNA, 201 bp, Homo sapiens
ccccagccctcaccctagggccctcgaatgagcatctcaggggtctaggaggcctccacaaagacctactgattggcacacacttgtttctctaggaagaraacttacagctgcaggcaggagcatgtcttaatctgcttgggctgccataagtaccacagactgggagggtttaacaacagaaatgtgttatctcacagt

SEQ ID NO: 10495 - DNA, 201 bp, Homo sapiens
cctgtaattccagcactttgggaggccaaggtgggtggtttctctgaggtcaggggttcgagactagcctggccaacacggtgaaaccccatctctactamagatacaaaatgagtcgggcgtggtggcgcatgcctgtactctcagctgcttgggaggctgaggcaggagtatcacttgaacctgggaggcagaggttgc

SEQ ID NO: 10496 - DNA, 201 bp, Homo sapiens
ttgggaccacagggagatgacaaaaccatccccagccctcaccctagggccctcgaatgagcatctcaggggtctaggaggcctccacaaagacctactgrttggcacacacttgtttctctaggaagagaacttacagctgcaggcaggagcatgtcttaatctgcttgggctgccataagtaccacagactgggagggt

SEQ ID NO: 10497 - DNA, 201 bp, Homo sapiens
ccaccgtctgcaccagaccttctttccactagcctgacctcaggtagcctctcaaactctggtttctacctcctgctcatatgcagcaattactgtgatgktactaattccagaactcagctttcttcctgcagtttttgctcctctcttgtaaccccctaactcaaagtcccctgtacttcaaaattcaaagtttatctg

SEQ ID NO: 10498 - DNA, 201 bp, Homo sapiens
cagactaaggaatccaactatcattgggcaagccatgctaggtatgcatgcctttggggctctgcaggggatagcgctatgcagggatggttgagagctgrttttggggttgagacacgtgggaaatacttggactttgggctgagcctgtggtgctcaatcccggctgcatgttgggaccacagggagatgacaaaacca

SEQ ID NO: 10499 - DNA, 201 bp, Homo sapiens
ctgagcatggggcgctggccctggtggtttccatgacaccaggtcctgacttgacctcgacagatttacctagcctccggatgagaatggtgagctgtgcrtgtcagacgagcagagggaagacggcagccactctcatgtcaaatcccagcgtcttttgggaggcagcttcccttttttagtttagtttgttggaagaaa

SEQ ID NO: 10500 - DNA, 201 bp, Homo sapiens
ccctggaatgtgggagccacactgtcctgcccaggctgggggcggggtggggagtagacacacctgagctgagccttgggtgcagagcagggcagggccgyggtggcacggggctgggcaggcggcctgtgtgtctgtctaccagtcctccatccagccagcacccagctctccagttagtgtctgtctttcaagtgcagg

SEQ ID NO: 10501 - DNA, 201 bp, Homo sapiens
ggagtagacacacctgagctgagccttgggtgcagagcagggcagggccgcggtggcacggggctgggcaggcggcctgtgtgtctgtctaccagtcctcyatccagccagcacccagctctccagttagtgtctgtctttcaagtgcaggcaaggtaaaggaggagaggaagaatgctttttctacacttacacttgcct

SEQ ID NO: 10502 - DNA, 201 bp, Homo sapiens
ctggaaatctgctcccagaggcaggcattgagtgacacgatggcttgacatcaactctgggtgttttttatgttttaaaaattgtgatggtaaaatatacrtaacaaaatttgccatcgtaaccattttcgagtgcacagttcagtggtactaggcccattcacactgttgtgcagccatcacccccgtccatctccattt

SEQ ID NO: 10503 - DNA, 201 bp, Homo sapiens
tgttttttatgttttaaaaattgtgatggtaaaatatacgtaacaaaatttgccatcgtaaccattttcgagtgcacagttcagtggtactaggcccattyacactgttgtgcagccatcacccccgtccatctccatttatcttctcaacttcccaaactgaagctctgtcctgctgaaacactaactctccatttcccc

SEQ ID NO: 10504 - DNA, 201 bp, Homo sapiens
gcctcgatggcgctgcctcccttcagagcttcatagctcccatttagcctgcaagggtggcaagagagagaggagagagtcagggacctagggaggccacyggggcaccctgctttcagagcttttctaactaagcctgaagcatctcccagggcttgccctggctgggtggtgtggaaggaagacgggaagcaagttatc

SEQ ID NO: 10505 - DNA, 201 bp, Homo sapiens
ctgcagcacttctggtctaaaacatggaaagagcagagtcacacccaccgtctaagtcaagcctcccctgctggatcagacccagctacatgcctggcccrgtcacaacctccagccccttctgctgccccaggtgcaggccatgtgcgtgggctatgcacggggctcccctaggatgtttagcagtgacatgaagcaagt

SEQ ID NO: 10506 - DNA, 201 bp, Homo sapiens
gcaggaataaacactgcccccaagagttatgcccctccttgggtgtggctggggtacctggtacagccccagcatagtgcctggaatgcactatgcagccycagcatagtgcctggaatgggagcccatgagcaacttacatcaatgaagcagcccagcagggagcctctcttcaaagccttctctagaatctcatagaag

SEQ ID NO: 10507 - DNA, 201 bp, Homo sapiens
gtggctggggtacctggtacagccccagcatagtgcctggaatgcactatgcagccccagcatagtgcctggaatgggagcccatgagcaacttacatcartgaagcagcccagcagggagcctctcttcaaagccttctctagaatctcatagaagttctcgggggcctctttagtttggaaggtctctgccacaccccc

SEQ ID NO: 10508 - DNA, 201 bp, Homo sapiens
aatgttgatcctgttgcttttttcccctctgaccaagctacccatagacagctttgaaaatcacacacgggttccaaggtagggcacctgggctttgtccwccaagttacaagctgagtattccacccagcactaaccattgacatcagctgaaagactcagggtcaacccatcaaagccgcaggcgatgcagggggcagg

SEQ ID NO: 10509 - DNA, 201 bp, Homo sapiens
cggtctcccttttgtcttccttttcgtcttgggtggaagcacggtggtactcccgtaagcatcggaatagcatgatgctgttttcccttctcccctgtccraatacaattcctctagcctatagcctgcagcctgctgcaccattttaaatcccctctgctctaggttcactgggtcccccagaggccaagccctgctcca

SEQ ID NO: 10510 - DNA, 201 bp, Homo sapiens
ccccagtcctagaatcagccttatctccaagaagccccagttcctttgattgaagaatgatcttagaaaccaagacttgagacataggtgtgcttgttgcyacaggattgtcattgcttctagttcctctcactgacaaagcaaggaaatacatatgtgtatgataacccaagtatagatcaatatatatgtgtatgataa

SEQ ID NO: 10511 - DNA, 201 bp, Homo sapiens
agcttctacttgggttcataatccagtactgctttgtctatttcgttggttgaattcttctagctttggctgtttggagctccttcagtatgctcttgtgyccttttggcataacctcatttgtgtgtgtgtgtgtgtgtgtgtgtgtgtgtgtgtgtgtgtgtgtgtcttgcatgtgttctcattttctggcactataag

SEQ ID NO: 10512 - DNA, 201 bp, Homo sapiens
tcctgacctcaggtgatccacctacttcggcctcccaaagtgctgggattacaggtgtgagtcactgcacccagcttctacttgggttcataatccagtastgctttgtctatttcgttggttgaattcttctagctttggctgtttggagctccttcagtatgctcttgtgcccttttggcataacctcatttgtgtgtg

SEQ ID NO: 10513 - DNA, 201 bp, Homo sapiens
tacaagcatgcaccaccatgcctggctaatttgtgtatttttagtagagactgagtttcatcatgttggccaggctggtctcgaactcctgacctcaggtratccacctacttcggcctcccaaagtgctgggattacaggtgtgagtcactgcacccagcttctacttgggttcataatccagtactgctttgtctattt

SEQ ID NO: 10514 - DNA, 201 bp, Homo sapiens
gagtcttgctctgttgcccaggctggagtgcagtggcatgatctcggcttactgcaacctctacctcctgggttcaagtggttctgctgccttagcctccygagtagttgggattacaagcatgcaccaccatgcctggctaatttgtgtatttttagtagagactgagtttcatcatgttggccaggctggtctcgaact

SEQ ID NO: 10515 - DNA, 201 bp, Homo sapiens
tcttttgtaaattgcccagtctagggtatgtttttatcagcagtgtgaaaacagacttaatacaatagcttatttgggcttctttagtttttacctaatgycctttttctgttccagaatcccacccaggaccccacactgcactgagtcctcacatatccttaggctttttgtggctgtgacagtttataagactgtcct

SEQ ID NO: 10516 - DNA, 201 bp, Homo sapiens
caaagatcctgaccttcctgcaagggaggcagtgtggtgtggtggtatagagcagcagctctggtgcctgagtggccgcaggttcaaatcctggttctacracttaccatctgaatgaccaagtcgctagtgccttcattttcttatatgcaaaatgggggagagagttgtgctctcccttctaggactgctgtgaggttc

SEQ ID NO: 10517 - DNA, 201 bp, Homo sapiens
ttattagagacagggtcttgatctgtcacccagcctggagagcagtgacacgatcatagttcactgcggcctcaaactcctgggctcaagggatcctcctrcctcagactccagacacacaccaccatgcttggttaaaacttgtgttttatttatttatttttattttattttattttattttttatttatttatttatt

SEQ ID NO: 10518 - DNA, 201 bp, Homo sapiens
tcacatacatcccagagacgaaaagaagaatataacaacaggacacacagctctgcgtcacaaacctgaaagtgcagaggaactggctaattcattagcaraaaacagaccccaaggctaatctaagaggaaacagaaaactagaattgattaaaaaaaatacatagtgtcatagcagtccataaaaaacaacaaaaagtt

SEQ ID NO: 10519 - DNA, 201 bp, Homo sapiens
gaaggatttttcccacctcttcccacttttccaggcaccaggactgaggaggggcctgggctggaggtggaaggttccagcagtgtctgggcggacgccaygtggggagctcaagctgcgccgccttccccgagagacctctgctttgaattgtcttcctcaggcttctcagcaccctgcttctcctctcatcttgtgtcc

SEQ ID NO: 10520 - DNA, 201 bp, Homo sapiens
ctgtgtgccctcaggctctgcctgggagcagggacaagggccaatgcatttgagaagggttttagaggagagagagtgaaagtaaaagacttctagttatygactaaccagaaactgtagcagtcagaatgttttatcctcatgcatttggcataaattatattttggatgtgtaaaaattcaagtaacatcaactcttcg

SEQ ID NO: 10521 - DNA, 201 bp, Homo sapiens
ttcaggagagttttgcaaattgcatttgaggaagagacaaaccataaaccaggagagaaaagagcgaggatggagagggaaggggtgggatggggcaaggstagctacagcagtcagcaggggaggcgtctctgggggaagcagaggagcacagacctaaacaaagggagggagggagggagggagggaggaagccgggcc

SEQ ID NO: 10522 - DNA, 201 bp, Homo sapiens
gtggatcgcgtcttcctccagggcatcgggagtgaggttgcagatctccactttatcaaagtgggccttgaagtcctgaaatgccatcctgcagcaaagckgagagacacgatgcacaggagggcaagagtgagggcatcatccattcactcattcattaaatcattcacttattcattaaatcatcttgttcctgtccgc

SEQ ID NO: 10523 - DNA, 201 bp, Homo sapiens
ctgtcttgctgggtctgacccagcatgctccagatagcacctggagcagggaggtcaccactgccttcccccctcaccatgctctgtcccgcccagggctrcgctcagccaccttcctgctgtgctttaagcagtcacatgagcccccattttctccatccgatcctgtggtcccctaatctccctgccttgcctgtttat

SEQ ID NO: 10524 - DNA, 201 bp, Homo sapiens
ccggaaagttcacaaaaacagaactctgttcccttggatgggatcccaaagtggcaagaagacccccaagtcccttcaaaagctccccacccccaccactrggcagtcttgtgcatcttgattctgatccaatttcagcatgggggtcccccagctttgggttattttctgtgaagaagactattctgctggctaaggatg

SEQ ID NO: 10525 - DNA, 201 bp, Homo sapiens
cctcgatggcgctgcctcccttcagagcttcatagctcccatttagcctgcaagggtggcaagagagagaggagagagtcagggacctagggaggccactrgggcaccctgctttcagagcttttctaactaagcctgaagcatctcccagggcttgccctggctgggtggtgtggaaggaagacgggaagcaagttatca

SEQ ID NO: 10526 - DNA, 201 bp, Homo sapiens
ccaagcggtccctgaaggtgggcaggcggtcatcgatcaccacgtccagccactcactgtgctgccagaactgttgcccaggaaaaagacagaaatgatgygagtcagctacatgggagctccaggccctgtttgtaaatgttgatcctgttgcttttttcccctctgaccaagctacccatagacagctttgaaaatcac

SEQ ID NO: 10527 - DNA, 201 bp, Homo sapiens
ccgcttgagccctgagagggttgggtcctgccgagcctcacctgcaaacccagagccctgattttttcccagcccttagatgctcactacaaagactagtrtagagactcctgtcgggaggctgcctgagctggggaagctgtcactcacttggcgtaggctttttccagcaaggcgctccagaactcgttgtggtcggca

SEQ ID NO: 10528 - DNA, 201 bp, Homo sapiens
gaaacttgcacaaaatgatccacaaaaaagaaacatgacaaaaatagcaggaaagaagccaggagcctgtgtgcccagccccatgtcaccctcctgaggcrgtgtgcacaagctgcgtcctgtagcgtgaggaacattttctcatgaaggctcttttagaaggtgagactagaaggactttattagctggacctgtggagc

SEQ ID NO: 10529 - DNA, 201 bp, Homo sapiens
tgaggattcctgctgttcacctcaatcacccttgagcctgtgtgccctcaggctctgcctgggagcagggacaagggccaatgcatttgagaagggttttrgaggagagagagtgaaagtaaaagacttctagttatcgactaaccagaaactgtagcagtcagaatgttttatcctcatgcatttggcataaattatatt

SEQ ID NO: 10530 - DNA, 201 bp, Homo sapiens
aacctgggaggcagaggttgcagtgagacgagatcgcaccactgcactccagcctgggcaataagaacaaaactccgtctcaaaaaaaaaaaaaaaaaaaraaagaaagaaagaaaaaggaaagcgagagagaagcacagtgctccttacgccccagggccatgggacttgctcgtatctgcagttaacacaggaacaagc

SEQ ID NO: 10531 - DNA, 201 bp, Homo sapiens
tctgaggtcaggggttcgagactagcctggccaacacggtgaaaccccatctctactaaagatacaaaatgagtcgggcgtggtggcgcatgcctgtactytcagctgcttgggaggctgaggcaggagtatcacttgaacctgggaggcagaggttgcagtgagacgagatcgcaccactgcactccagcctgggcaata

SEQ ID NO: 10532 - DNA, 201 bp, Homo sapiens
cacccctggctaattttttgtatttttagcaggggtggggtttcactgtgttagccaggatggtttcaatctcctgacctcgtgatccacccgccttggcytcccaaagtgctgggattacaggcgtgagccaccgtgccctgctgttgtattttaaaagctgttacaagaaagagatgagctcaggcaagacttgattgg

SEQ ID NO: 10533 - DNA, 201 bp, Homo sapiens
accctgcatgtgttccacaaatctggggaacctaaaccctcatggttcccgaggcagagatggctggcagtcatcagcacaggaccaagactgcaccccaytccttccatttgggagtagaatgtgagccgtgacgcatttacttctgagtcaagatttttagaaagtgagagtgtctttttcaatgttttattttattct

SEQ ID NO: 10534 - DNA, 201 bp, Homo sapiens
ctggtttctacctcctgctcatatgcagcaattactgtgatggtactaattccagaactcagctttcttcctgcagtttttgctcctctcttgtaaccccytaactcaaagtcccctgtacttcaaaattcaaagtttatctgtaatttctaatttgacagcttgggaatctctcaagcaccctgcatgtgttccacaaat

SEQ ID NO: 10535 - DNA, 201 bp, Homo sapiens
aagtgagagtcggtggcgtccctggcaagatcagggtgagtggggtggtggggcacactcatagctgagtggagtcgagagagtaagggagaagaggaacyggcgggcttgctgtagaggacaggagagagctgggttggtcacttgagtgggtcaagagaggctttttttttctttgcaggtaggagaaatgatagtgtt

SEQ ID NO: 10536 - DNA, 201 bp, Homo sapiens
ggtatagggattttggctttgactctgagaagatggagagcttttagaaggcagtaaacagaggagtcacatgctccatggctgctgtgttgagaacagaytttggggacacaagtggaagcagagaggcagctaggaagttagtgccggtgtccaagtgagagacaagggtggcttggtccaggctgatggtatgggagg

SEQ ID NO: 10537 - DNA, 201 bp, Homo sapiens
ggacagcaaggccccgaggcagagaggtgcttgaggtgctcacagaacaccaggaaggcacgaggtgtctgtaaggaataagatcaagagatcatagtacrtcaaataggtatagggattttggctttgactctgagaagatggagagcttttagaaggcagtaaacagaggagtcacatgctccatggctgctgtgttga

SEQ ID NO: 10538 - DNA, 201 bp, Homo sapiens
tacagcagtcagcaggggaggcgtctctgggggaagcagaggagcacagacctaaacaaagggagggagggagggagggagggaggaagccgggccggtcycgggagaggtaacagccaatcctgtggcagcgaggcacgttctggctcaccctgcaggggtggtgagttaactgggccggggcctgcagaggagtgaagg

SEQ ID NO: 10539 - DNA, 201 bp, Homo sapiens
ggcgctgaggctgaggtcttacacagagaggaggattgccaactggcaaagccctgcttttcaccaactgctcgaacggactggactgcctggctgctgayagggagggagagatccaccagatctattcagatgccatgaacagagaaaataacactgccttcaaacggggacccctaacagatcttgcttaagaatcta

SEQ ID NO: 10540 - DNA, 201 bp, Homo sapiens
atcgggggctgtctcgggacctctaggtttccctttagcaatgatgttctatttacatgacctcagcaggcagctagatgtgtcccactagagaggacctraggatctggggcctgatgggctccagggtaccgtctgcccagtgcttgctgtgctcctgagcatggggcgctggccctggtggtttccatgacaccaggt

SEQ ID NO: 10541 - DNA, 201 bp, Homo sapiens
tagggtcctcaggaacggagcagactggtacaggaacagagtcatcatggccaagagtccaccgggtcctcttgccatcaggaggaatagcagggcttgtrcaggaattggggctggagggaagggccgggctcggtcagtctccagctgggatccccagagtggtcaccctacccctccctcgagacagactgcctgact

SEQ ID NO: 10542 - DNA, 201 bp, Homo sapiens
aatgtggctttagcatggtttaggaccatatgtcacacagatctgatgacatttttttctagggttaccaggcagtgtggaaatgcacctgccctcatgcygggccccagagaggtaaacccactggcccagggctccctcttacctggaaatggaatatcccggcataaccagggccaaagctttggtcctgggggatga

SEQ ID NO: 10543 - DNA, 201 bp, Homo sapiens
tatgtcacacagatctgatgacatttttttctagggttaccaggcagtgtggaaatgcacctgccctcatgccgggccccagagaggtaaacccactggcycagggctccctcttacctggaaatggaatatcccggcataaccagggccaaagctttggtcctgggggatgactctggccagtgctttttgattaagcgt

SEQ ID NO: 10544 - DNA, 201 bp, Homo sapiens
gtgagccccacatcacaggcatgtctgactctagaggaacggaggtgcaggggcttgaggccactggactccattcagagggagtgaggaagcagaggccraagcagtgttgttcccccagccccgtgcctcttgggtcctcagggaccccatgctgcagttgcttgcctgtcccagtgactcaacctccctctcgccatg

SEQ ID NO: 10545 - DNA, 201 bp, Homo sapiens
aggaggcggagcttgcagtgagccgagatcccgccactgcactccagcctgggcgacagagcgagactccgtctcaaaaaaaaaaaaaaaaaaacataatrataataataataataaaaaatagaaagaaatgtgctgcaatcacaaaatttcccagaactttatcttatatgaccgttttcctccagctcatggacagct

SEQ ID NO: 10546 - DNA, 201 bp, Homo sapiens
atgtcctacatccagggaacactggtacaaagggtgggatcccaaggccttgggaagctctgtccctgtgactttggctgctgtcatgggttgttgagtamctgtggcttttccaggctcaaggtgcaagctgccagtggatccaccattcttgggtctggaggatgatggccgccttcccacagttccactaggcagtac

SEQ ID NO: 10547 - DNA, 201 bp, Homo sapiens
cagaggccgaagcagtgttgttcccccagccccgtgcctcttgggtcctcagggaccccatgctgcagttgcttgcctgtcccagtgactcaacctccctytcgccatgctccatccacttacactcacccagctctccctggcagatatcagtcctggtggcccctccaagaatgaattctgggtttttcacgatttcct

SEQ ID NO: 10548 - DNA, 201 bp, Homo sapiens
gaggccgaagcagtgttgttcccccagccccgtgcctcttgggtcctcagggaccccatgctgcagttgcttgcctgtcccagtgactcaacctccctctygccatgctccatccacttacactcacccagctctccctggcagatatcagtcctggtggcccctccaagaatgaattctgggtttttcacgatttcctgg

SEQ ID NO: 10549 - DNA, 201 bp, Homo sapiens
aaccagatgccccgggtccccaccgcagagcatcccaggcctgtacattattttctgcctccaaactgcaaagctttccacggtagactgggatgatgcamctcagttgcactgagcgtagccggcccctccccagcacccctgtttccacttcctgcgggggctgctgaacctcggcctcatctatgctccttcccctgc

SEQ ID NO: 10550 - DNA, 201 bp, Homo sapiens
caaagcggagagacacgatgcacaggagggcaagagtgagggcatcatccattcactcattcattaaatcattcacttattcattaaatcatcttgttccygtccgcaaggagtggggggactgcaaagtgtggggagatggaaaattttttaaaagtaaaataaaggttaaaaaggtaaaaaccaggctaaaaatataga

SEQ ID NO: 10551 - DNA, 201 bp, Homo sapiens
gaggctgaggcgggtggatcacctaaggtcaggagttcgagaccagcctggctaacatggtgaaaccccgtctctactaaaaatacaaaaaaaattagccrggtgtggtggtgggtgcctgtaatccttgctactcgggaggatgagccaggagaattgcttgaacctgggaggtggaggttgcagtgagctgagatggca

SEQ ID NO: 10552 - DNA, 201 bp, Homo sapiens
tctggatttatgaaactaaaagaagttaagccagcagtcactccttatttctttaatgtactttaacaagggcaactgataaagtgttttgtagaatagcrgcacctccaaagacgcataaacagtgcagttgcattacacattcactctccatgaactttgcatcttcaaaggagatacatatctgttggagaccattca

SEQ ID NO: 10553 - DNA, 201 bp, Homo sapiens
ttacaattcaacttcagatttgatggggacacatattcaaactaaatcagccatcaccaagaacttgtgaattctggatttatgaaactaaaagaagttargccagcagtcactccttatttctttaatgtactttaacaagggcaactgataaagtgttttgtagaatagcagcacctccaaagacgcataaacagtgca

SEQ ID NO: 10554 - DNA, 201 bp, Homo sapiens
aatgtatatattccagctttaactcatatctttgctcccatatctgagtataggttgttagaagcagccaggtcacatcctgaatgctttgctgcttagamatttcttcttccagataccctaaatcatcactatgacgttcaaacttccacagatccctagggcatggacacaattcagccaagttctttgctagggcat

SEQ ID NO: 10555 - DNA, 201 bp, Homo sapiens
gcctctcggcctgtgatgggaggaggtgctgctgcaaaggtctctaaaatgcctttgaggccttttccccattgtcttggttatagcacttggctcttttyagttatgtaaatatctctagcaagtggttgctccatagcctgcttgaattcctctctcgaaaaagctttttctttctctgctatatagccaggctgcaaa

SEQ ID NO: 10556 - DNA, 201 bp, Homo sapiens
cccttctgccttacagacgaggaggccaaaggaccttgacccgtgcctaagttaggtcctggccattggattttcatgcttcctgcccttcctctggcttrcttcttaccaccctggactggaatgacttacttcatcatctgttttgatagctggtaaaatcgttgaaggcaagagtctgtttctaccactaagctctgg

SEQ ID NO: 10557 - DNA, 201 bp, Homo sapiens
tctgtgttttttttcccaggatgcccaggtgactttatgcacatgtgtgtttgagtagcactgacatagacctcattttagtcagggttttgcgctagccrtgtgttatgctgtggagtgcttctaacacatgtccgtcctgaagcctctgggcctggggaatgggggtttgggatgtttggtgttggtaagaaagcactg

SEQ ID NO: 10558 - DNA, 201 bp, Homo sapiens
tgaggaatctgtgttttttttcccaggatgcccaggtgactttatgcacatgtgtgtttgagtagcactgacatagacctcattttagtcagggttttgcrctagccgtgtgttatgctgtggagtgcttctaacacatgtccgtcctgaagcctctgggcctggggaatgggggtttgggatgtttggtgttggtaagaa

SEQ ID NO: 10559 - DNA, 201 bp, Homo sapiens
agctggttagaaatggagagtctcagaccttgccctgagactcaggctttttttttttttttttttttttttttgatacagggtcttgctctgtcatccarattggagtattagtggtgtgaccacagctgactgcagcctcaatttcccatgctcaagcaatcctcctacctcagcctcccaagtagctgggactatagg

SEQ ID NO: 10560 - DNA, 201 bp, Homo sapiens
tgggctcaagcaatcctcccacctcagcctcccaagtaactgggactacagacgtgagtcaccacgcccagccactttttaatttttttttttttttttgkggagatgggggtctcgctatgttgcccaggctggtctcaaactcctggcctcaagtgatcctcccgccttggattcccaaggtattgaggttacagacac

SEQ ID NO: 10561 - DNA, 201 bp, Homo sapiens
tgtgaagatggaatgaggcaatgtgtgctggggagagtacctcgcaggtgactgagttcatgtgtgcaggtgttagctactgtggtggtgtaggagagccygaccaacgctgctgggtgtcactttcctctgtaaactccggggctgtgagccccacatcacaggcatgtctgactctagaggaacggaggtgcaggggct

SEQ ID NO: 10562 - DNA, 201 bp, Homo sapiens
ctccctcacataggacccgagatggtcctggctgtgtatacttcatccttttatcaggcctgagcctggacatgtttccagattttgctttccctgggagrgaaccactttaaaaggttcaggaggcccctatctgtgaggtgtgcttggtgagaagcgcaggcagcccggcaggcgggaggtctgcagagcgctcgtgga

SEQ ID NO: 10563 - DNA, 201 bp, Homo sapiens
aattgaacctttcctcaaacacaaggcacaaacctgccccagcccatcatcctcccacagaggcactgtgaatgtataaagaaaggcgatgctaagaaacrtgctgcaggggaggctggcacattctgctccttagctaaccgcacaggcccatgggtccacacacatcagaccatggctctctgtggtctatctttgcca

SEQ ID NO: 10564 - DNA, 201 bp, Homo sapiens
agaggagcacagacctaaacaaagggagggagggagggagggagggaggaagccgggccggtctcgggagaggtaacagccaatcctgtggcagcgaggcmcgttctggctcaccctgcaggggtggtgagttaactgggccggggcctgcagaggagtgaaggatttttcccacctcttcccacttttccaggcaccagg

SEQ ID NO: 10565 - DNA, 201 bp, Homo sapiens
taaaaagtttctaccaatgttcacagtggtttaaaatgagggccctggtgtcaggaagtgagtcctgggtctgaaccctggtgccaccactccaagggccrtgaccttaagaatcaccaactgggctcagaggcccacctcctgggcagcagagagaagacctgccatctgctcaggttgcccacaggcagtacctggcat

SEQ ID NO: 10566 - DNA, 201 bp, Homo sapiens
caggttgcccacaggcagtacctggcatgcagtcagccacctgtactccagtcttttctttacctgcagctttcagtgcagtccgtagttcataggtagayatggtgccggacttgtcagcatcaaaccgaaggaaaaggttctaaagggtggagagcagaagccttgagaaggagcgtgcctgaaaggcatcgctgatgg

SEQ ID NO: 10567 - DNA, 201 bp, Homo sapiens
ttggagccattatcctaagtggctcacacccagataattggcctgacaggctggccatgcggtgccttcaaccctactcacatgtcaccagcagcacagcraagtcagggagtcgggatggcgcctgcccctcccatcacccatggaggctgcatgagtggaagacaaattttattccagccttggctctcagtcactttc

SEQ ID NO: 10568 - DNA, 201 bp, Homo sapiens
gccgcagaggccacagttggactgggccttccaaaagaagtcggtctcccttttgtcttccttttcgtcttgggtggaagcacggtggtactcccgtaagyatcggaatagcatgatgctgttttcccttctcccctgtccgaatacaattcctctagcctatagcctgcagcctgctgcaccattttaaatcccctctgc

SEQ ID NO: 10569 - DNA, 201 bp, Homo sapiens
cctacaaatcagccctgggaagcagatctgcggctcggaggagcagggaggggacccaggcagtgtggtcgcttgtccctccataggtgccccaggacccygatggggttggcacttactcttttgcagcacagcatttaaaacatactcaagttcctctgctgtcacctccatgtcctgttgaagtggagacaattgttt

SEQ ID NO: 10570 - DNA, 201 bp, Homo sapiens
ctacaaaaaagtacaaaaaagttggccaggtgtcatggcatgcatctgtagtcccaactaccagggaggcagaggtgggtggatcacttaagccagggagktcaagactgcagtgagccatgattgtgccactgcactccagcctgggtgacaaagtgagaccctgtctcacaaaaaaaaaaaaaaaaaaagcggtgtgga

SEQ ID NO: 10571 - DNA, 201 bp, Homo sapiens
tctcatgtcaaatcccagcgtcttttgggaggcagcttcccttttttagtttagtttgttggaagaaaagaattgtccctttcccccctctaaactaaaarccttgccagcccaggtgggcagcaccgaggtccctgcagggaacgtgcaaggggaaccctgcagtttcccgctcacatgcccttccgagactgagtgctc

SEQ ID NO: 10572 - DNA, 201 bp, Homo sapiens
gcagagggaagacggcagccactctcatgtcaaatcccagcgtcttttgggaggcagcttcccttttttagtttagtttgttggaagaaaagaattgtccytttcccccctctaaactaaaagccttgccagcccaggtgggcagcaccgaggtccctgcagggaacgtgcaaggggaaccctgcagtttcccgctcacat

SEQ ID NO: 10573 - DNA, 201 bp, Homo sapiens
gtgaagaggtatttgtgcctttgtttaccagtgaagaaatagagactcggagaaacaaagtgccttgctcaagatggcacagccaccagtgggggtcctgkgattgaaacccacatctcctggccccacagcccagttctacactcagaagggtcaggttcatatctcttgagaaggtcaggaactggggtccctggccca

SEQ ID NO: 10574 - DNA, 201 bp, Homo sapiens
gatggggttggcacttactcttttgcagcacagcatttaaaacatactcaagttcctctgctgtcacctccatgtcctgttgaagtggagacaattgtttkttatagcccttggcaccttcttttatagtttatttttgttttaaatcagttctgagcttcatttggctccagtgacagaccagccttcaggaccctgctg

SEQ ID NO: 10575 - DNA, 201 bp, Homo sapiens
gctccagtgacagaccagccttcaggaccctgctgtgggcagatgtacctatctcctgtgtagctgcagctatgtgtctcatatgtcacatgttttagggrcatgccagcccaactaggagagagcctaacttgagagacatcccaacccaggaaagcgcatgaaaagctgggcagggcaaggcagtggtttcccagcttc

SEQ ID NO: 10576 - DNA, 201 bp, Homo sapiens
aatttcccagaactttatcttatatgaccgttttcctccagctcatggacagctatgtctgaatcaacagcagtccatagggcactgcccgaggtatcagrtgatgtctaaaaggattcaataggaggagcaggcatctgggaatataccaaaggaaataaagtcaacacctagtaacaatatctgcactcccaagttcaa

SEQ ID NO: 10577 - DNA, 201 bp, Homo sapiens
cttccacctctgccacccttgagacagcaagaccaattccttctcttcctcctaagcctactcaacctgaagatgataagaatgaaggccttgatgatgawccacttccatttaatggagagtaaatatgttttctctttgttacgattttcttagtaacattttattttctgtagcttactttgtgcacagtatataata

SEQ ID NO: 10578 - DNA, 201 bp, Homo sapiens
gagattctccttcctcagcctcctgagtaactgggattacaggtgtgtgccaccatgcctggctaattttttgtatttttagtagagacggggtttcaccwtgttggccagactggtcttgagctcctaacctcaagtgatccacccaccttggcctcccaaagtgttgggattacagacgtgagccatcgtgtctggcca

SEQ ID NO: 10579 - DNA, 201 bp, Homo sapiens
agtcctccctttcctcctcatcccctgggcatccataacataaccctttcagaacttctgtttgtttaatcaggagtctgtctgagagctaaaccaatgcraacacagctcagtgtgaatttttgttaccaagctacagagctgattcttatactcaatatcatagcagattaaagaatcttgttcagagcaagattgagt

SEQ ID NO: 10580 - DNA, 201 bp, Homo sapiens
cgcgaacccagcttccctgatggaccgtcacctcccatttgtggatcgcgtcttcctccagggcatcgggagtgaggttgcagatctccactttatcaaaktgggccttgaagtcctgaaatgccatcctgcagcaaagcggagagacacgatgcacaggagggcaagagtgagggcatcatccattcactcattcattaa

SEQ ID NO: 10581 - DNA, 201 bp, Homo sapiens
gcagctaggcggtgggcctgggttagatgcctgggagtggtgtgtatgctgacggcccacatgcccacatgtgcaaggtgcctgtgacttgccttgttgtrtgtgcccaggtgtggtacacgtgtgtgcttgtgcatgctccacatgtatgctggttgcatgtgcacttgggagcattgtctacgtgtgagtgtcctgcat

SEQ ID NO: 10582 - DNA, 201 bp, Homo sapiens
cctcccttgacaggtggggattacaattcgagatgaaatttgggtggggacacagagctaaaccgtatcattctccaccggcccttcccaaatctcatgcyttttcagatttcaaaaccaatcatgccttcccaacagtcccccagaggcttaattcattccagcattaacccaaaagtccaagtccaaagtctcatctga

SEQ ID NO: 10583 - DNA, 201 bp, Homo sapiens
gtcaggagaaggtgacactgtctggggtggaaggtcaaggaatgcctactcggtgcctggctctgtgccggctcctgtgtgtgatgccatttagctctacrggaagcctgcagggaactgtcagtctctccttttttcagacgagtgtagaaaggtttaatgtcactaagaaaattgtctgaggtcacccacctaagtaag

SEQ ID NO: 10584 - DNA, 201 bp, Homo sapiens
tccgtggtggctggaaagggagtgaaggtggggggcagctgctcagttctggggtcctggcttggcttgcctgtgcggacccctctcatctgtaggaagcrcactgctcttcttcctcctccaccttggctagcgcaggagtttgcaggtggctctgagctgagcccagaaggacaatgcaaaccaggaccatgtcagtgg

SEQ ID NO: 10585 - DNA, 201 bp, Homo sapiens
aaacgggctggccctgagtggtggcctgtgagtcaggagaaggtgacactgtctggggtggaaggtcaaggaatgcctactcggtgcctggctctgtgccrgctcctgtgtgtgatgccatttagctctacgggaagcctgcagggaactgtcagtctctccttttttcagacgagtgtagaaaggtttaatgtcactaag

SEQ ID NO: 10586 - DNA, 201 bp, Homo sapiens
cctgagctacatgtgacctgctcactctctttgcctttgaaacacttctgtgctattggtgacagggcttgagagtacctctgcttatcagattgcaggcytcagggacagaagaaacgggctggccctgagtggtggcctgtgagtcaggagaaggtgacactgtctggggtggaaggtcaaggaatgcctactcggtgc

SEQ ID NO: 10587 - DNA, 201 bp, Homo sapiens
acaaagactagtgtagagactcctgtcgggaggctgcctgagctggggaagctgtcactcacttggcgtaggctttttccagcaaggcgctccagaactcrttgtggtcggcagagtggaggaaaaccaagcggtccctgaaggtgggcaggcggtcatcgatcaccacgtccagccactcactgtgctgccagaactgtt

SEQ ID NO: 10588 - DNA, 201 bp, Homo sapiens
tcctgccgagcctcacctgcaaacccagagccctgattttttcccagcccttagatgctcactacaaagactagtgtagagactcctgtcgggaggctgcytgagctggggaagctgtcactcacttggcgtaggctttttccagcaaggcgctccagaactcgttgtggtcggcagagtggaggaaaaccaagcggtccc

SEQ ID NO: 10589 - DNA, 201 bp, Homo sapiens
ggggctctggtatagctgaagagaactaatataacatgaaagtgctttctaagctttgggataagctaaaaggcagattccaattttattcgagggcagcrtagattggtgcttcagctcgtggatgacagagtcagggggcctggttctgagtcctagttctgtctcttcccagctgtgtgacgttgaacaagtcactgg

SEQ ID NO: 10590 - DNA, 201 bp, Homo sapiens
agtgcctgggtggctctgggatgccatggggcaaaaccccaaggacaaatgctcagaagcttcacatgggtgcagggagatgacctctaggaccccacccrgtccaggccttacagcagggcctgggttttgagggatatgccaaacagcctggatcctgcagagggatctcagccctatgatgggctgagagtgagccca

SEQ ID NO: 10591 - DNA, 201 bp, Homo sapiens
gggtttcaccatgttggccagactggtcttgagctcctaacctcaagtgatccacccaccttggcctcccaaagtgttgggattacagacgtgagccatcrtgtctggccaagtttctgtgttaatggacacagaagaagtcagcacagctggaaggcagaggacaaggaggtgcatggtccaaggctgtagagagaaggg

SEQ ID NO: 10592 - DNA, 201 bp, Homo sapiens; identical to SEQ ID NO: 1218

SEQ ID NO: 10593 - DNA, 201 bp, Homo sapiens
tgcacacggcaaggattcaggagtttcctctcattgcaatgggcagccttggggagttttcctctgggaggaaatctcatggatttatactgaagaaatarctggctatgtgctgtgtgataacagatggaagggggctggaggggaagcagagaatcgggttgggaggcctgtgggaccgctagaagccacccctgcact

SEQ ID NO: 10594 - DNA, 201 bp, Homo sapiens
agcacagctggaaggcagaggacaaggaggtgcatggtccaaggctgtagagagaagggcagcagccaggtcgtgtaagtgactgcacacggcaaggattyaggagtttcctctcattgcaatgggcagccttggggagttttcctctgggaggaaatctcatggatttatactgaagaaataactggctatgtgctgtgt

SEQ ID NO: 10595 - DNA, 201 bp, Homo sapiens
ctgtcccttcagtgccctaataccatgtatttaaggctggacacatcaccactcccaacctgcctcacccactgcgtcacttgtgatcactggcttctggmgactctcaccaaggtctctgtcatgccctgttataatgactacaaaagcaagtcttacctataggaaaataagaattataacccttttactggtcatgtg

SEQ ID NO: 10596 - DNA, 201 bp, Homo sapiens
ctgcagttggagttcaagtcgcctacctggtcaattcccgttacactgtaggcatgacccttaataagaccaaacggcgtccgggcctcagattctgcagyacttctggtctaaaacatggaaagagcagagtcacacccaccgtctaagtcaagcctcccctgctggatcagacccagctacatgcctggcccggtcaca

SEQ ID NO: 10597 - DNA, 201 bp, Homo sapiens
cctacctggtcaattcccgttacactgtaggcatgacccttaataagaccaaacggcgtccgggcctcagattctgcagcacttctggtctaaaacatggraagagcagagtcacacccaccgtctaagtcaagcctcccctgctggatcagacccagctacatgcctggcccggtcacaacctccagccccttctgctgc

SEQ ID NO: 10598 - DNA, 201 bp, Homo sapiens
tcaattcccgttacactgtaggcatgacccttaataagaccaaacggcgtccgggcctcagattctgcagcacttctggtctaaaacatggaaagagcagmgtcacacccaccgtctaagtcaagcctcccctgctggatcagacccagctacatgcctggcccggtcacaacctccagccccttctgctgccccaggtgc

SEQ ID NO: 10599 - DNA, 201 bp, Homo sapiens
ggcagcgtagattggtgcttcagctcgtggatgacagagtcagggggcctggttctgagtcctagttctgtctcttcccagctgtgtgacgttgaacaagycactggacctctctgttcctctgcaaaacagcatgaaccaattcattaactacttctccaggatgcagtaggtcccagggactatcctaggaatgtgggc

SEQ ID NO: 10600 - DNA, 201 bp, Homo sapiens; identical to SEQ ID NO: 1168

SEQ ID NO: 10601 - DNA, 201 bp, Homo sapiens
atcctaagtggctcacacccagataattggcctgacaggctggccatgcggtgccttcaaccctactcacatgtcaccagcagcacagcgaagtcagggartcgggatggcgcctgcccctcccatcacccatggaggctgcatgagtggaagacaaattttattccagccttggctctcagtcactttcttgatttctac

SEQ ID NO: 10602 - DNA, 201 bp, Homo sapiens
gtggctcacacccagataattggcctgacaggctggccatgcggtgccttcaaccctactcacatgtcaccagcagcacagcgaagtcagggagtcgggayggcgcctgcccctcccatcacccatggaggctgcatgagtggaagacaaattttattccagccttggctctcagtcactttcttgatttctacctctgtg

SEQ ID NO: 10603 - DNA, 201 bp, Homo sapiens
caacccatctcagctcatctctgccaatgcttcttggttctcagaaggcggcagccaaggccagagcagaggatggtgggacgagagcctccatggggacmatgacagcctggaaagcacaggcctgtgtgccctgccctcacgctggggtctggctaatacagcagcggctgcaccatgtctggtgacctggtagctgtg

SEQ ID NO: 10604 - DNA, 201 bp, Homo sapiens; identical to SEQ ID NO: 1207

SEQ ID NO: 10605 - DNA, 201 bp, Homo sapiens
caagttctagactagcttcagatttccccagaagctcaggggccatggatgtggcaggaaagggcttcaggagcccaacaagcagcggacgagcaacagcytcaggcaggccctgccacgcacccacacaaacatccctggttcttagtcacctggtccacttcccaagggaccagagctggaggagctgtggggacacac

SEQ ID NO: 10606 - DNA, 201 bp, Homo sapiens
tggtcagtgaccatcagagagaatcctatagttacatgctaggtaatatttcagggattccgacactccaaatacacacacacacacaaacacacacgcayttatgcatatgcacactgcttactggagttactcacaactacagataaagcttttcaccatatcactgggttataaacatcaccatgggaggtaacacat

SEQ ID NO: 10607 - DNA, 201 bp, Homo sapiens
aagaaattagtccatatgaatctaaaaatgggtttctctctagacttggatctccctagaggcaggagccaagtcttaggcatcttcagcatctagcagartgaatggtaaagagtagtcctcaaaggtgctcatggaactattactgaactttcttcatcctagcatcccatgcacagatgaatgataagaaaataagca

SEQ ID NO: 10608 - DNA, 201 bp, Homo sapiens
ctgaactttcttcatcctagcatcccatgcacagatgaatgataagaaaataagcacatgttggggatttaaacacaacaataaacaaaaacagcttttaygtcttctagacccaatattctccttatttcaggtgtctgtgaggattcctgctgttcacctcaatcacccttgagcctgtgtgccctcaggctctgcctg

SEQ ID NO: 10609 - DNA, 201 bp, Homo sapiens
tgtgtgccctcaggctctgcctgggagcagggacaagggccaatgcatttgagaagggttttagaggagagagagtgaaagtaaaagacttctagttatcractaaccagaaactgtagcagtcagaatgttttatcctcatgcatttggcataaattatattttggatgtgtaaaaattcaagtaacatcaactcttcgg

SEQ ID NO: 10610 - DNA, 201 bp, Homo sapiens
cgactaaccagaaactgtagcagtcagaatgttttatcctcatgcatttggcataaattatattttggatgtgtaaaaattcaagtaacatcaactcttcrgagtccaagatgtggcttgtggctcaccattaaaggggctcatttaatttgaaaggttcagggcaggtgagttccttgtaggggggagaggaagcaaaat

SEQ ID NO: 10611 - DNA, 201 bp, Homo sapiens
taggggggagaggaagcaaaatcaagcaaaccaagatgatgagaggtttctgttgttacgtggaatacgtagaagatctaacctagaaacatcacatgccygcttgagtgagcaatctgcaagtcatctatggatggtgaaggaggacaaaggagccaacacaaatagctaacattctaaagaatcccaaagagtccaacg

SEQ ID NO: 10612 - DNA, 201 bp, Homo sapiens
ggggttggggtgccaaccctcctgcattgtcaaaaaatcttgtattccctaaagctgaactccgaatagcctaccattgaccagaagtcttatcgataacrtaaagaaccaattaacatgttttataattatttatattatatactgtattcttacaataaataagccagagaaaagaaatgttatcaagaaaatcatagg

SEQ ID NO: 10613 - DNA, 201 bp, Homo sapiens
ctttctctgtctcctccacactcaggcctgtggcgaactccctttgtttctcttcttcttgttcatcttgaagggcagcaggaggtgaacatagtgcctgsgtggctctgggatgccatggggcaaaaccccaaggacaaatgctcagaagcttcacatgggtgcagggagatgacctctaggaccccacccggtccaggc

SEQ ID NO: 10614 - DNA, 201 bp, Homo sapiens
gtccttgcagatgcaattaagcaaggaatctcaagatgcgatcatcctggattaaccaggtgagtcctgaatctgatgacagtatctctatcagtcagaargggagaaggccacgtgaagacggaggcagagactggggtgatgctgccgtagccaaggaacacctccagccacaggacgctggaggaggcgaggaatctc

SEQ ID NO: 10615 - DNA, 201 bp, Homo sapiens; identical to SEQ ID NO: 1163

SEQ ID NO: 10616 - DNA, 201 bp, Homo sapiens
aagtgatttctacatgaaatgaacctgacctggcatctggggccttcctggcctctcttttctgtgctgttctttctctgtctcctccacactcaggcctstggcgaactccctttgtttctcttcttcttgttcatcttgaagggcagcaggaggtgaacatagtgcctgggtggctctgggatgccatggggcaaaacc

SEQ ID NO: 10617 - DNA, 201 bp, Homo sapiens
atcccatcccctggagcctgtgaatgtgaacacatttggaaaagggtccttgcagatgcaattaagcaaggaatctcaagatgcgatcatcctggattaamcaggtgagtcctgaatctgatgacagtatctctatcagtcagaaggggagaaggccacgtgaagacggaggcagagactggggtgatgctgccgtagcca

SEQ ID NO: 10618 - DNA, 201 bp, Homo sapiens
actaatacatcatgctctgctgactccatatgtggctggtttcctggatccgattctgactgatggtatctgttctcacactgctaataaagacataccagagactgggtaatttataaagaaaaagaggtttaatggacttatgtgttccacgtggctggggaggcctcacaatcatggtggaaggtgaaggaggagcaa

SEQ ID NO: 10619 - DNA, 201 bp, Homo sapiens
ccatattggccaggctggtctcaaaactcctgacctgaggtgatccgctcaccttggcctcccaaagtgctgggattacaggtgtgagccacaccgcaccyggccaataatacattttagttcaagattagtgagagctaaggagaaatgagaatgctgattgttctgaaattcagtctccacatgaaaaccagctgaggg

SEQ ID NO: 10620 - DNA, 201 bp, Homo sapiens
ctataaatagggcatcgtgacccggccaggggaagaagctgccgttgttctgggtactacagcagaaggtaagccgggggccccctcagctccttctcggycttgtctctctcagatgtaactgagctgtgggctaggaggaaaaggccgggaggaggcacggtgatgactgaaaaacctctcccctctcataagaccagt

SEQ ID NO: 10621 - DNA, 201 bp, Homo sapiens
ggtggagttggctttggaggctaaaaaacagccaaagaaacttgcacaaaatgatccacaaaaaagaaacatgacaaaaatagcaggaaagaagccaggascctgtgtgcccagccccatgtcaccctcctgaggcggtgtgcacaagctgcgtcctgtagcgtgaggaacattttctcatgaaggctcttttagaaggtg

SEQ ID NO: 10622 - DNA, 201 bp, Homo sapiens
atttgagaccagcctgagcaatatagcaaaactctgtctctacaaacaaacaaataaacaaacaaacaacaaaaaataatgctttctgtacataaaccagsacataagtaatataatttcatgggatgatagtcactatagagaagataggggtggtgcagtggaataaggtgagatagggttggtgggcagggctcttct

SEQ ID NO: 10623 - DNA, 201 bp, Homo sapiens
attgcttgaggcccagaatttgagaccagcctgagcaatatagcaaaactctgtctctacaaacaaacaaataaacaaacaaacaacaaaaaataatgctytctgtacataaaccagcacataagtaatataatttcatgggatgatagtcactatagagaagataggggtggtgcagtggaataaggtgagatagggttg

SEQ ID NO: 10624 - DNA, 201 bp, Homo sapiens
gttgttcaggatgggagggtcaatcaggtcccaacatgccatcaagctggattacacaagagatttaaacagtcagaatgccactctgaatttcgctctgytgtccaggctagagcgcaatggtgcgatctctgctcaccgcaatctccacctaccgcattcaagcaatcctcctgcctcagcctcccaagtagctgggaa

SEQ ID NO: 10625 - DNA, 201 bp, Homo sapiens
aatattgagacaatgaaagatctggttagatggcacttaaaggtcagttaataaccacctttcaccctttgcaaaatgatatttcagggtatgcggaagcsagcaccccagtctgagatggctcctgccggtgtgagcctgagggccaccatcctctgcctcctggcctgggctggcctggctgcaggtgaccgggtgtac

SEQ ID NO: 10626 - DNA, 201 bp, Homo sapiens
tatacatgtgcatacaggcaggcatgacaggtatgtgcactgtttgtggtttatttatacattgcatgtgtgaaagcatgtgtttgctcacatgtgtgcaygtgtgtgcatgtatgtgtgcatgcatgtgtttgcaagtgcttctacacacgtgtgtgtttgagcacatgtatgcatgtgtatgagcttgtgtgtggtctg

SEQ ID NO: 10627 - DNA, 201 bp, Homo sapiens
ttgagtatggagttttttgccatgtacaagtcaccttatgcatgtcagtgactctgagctcaccccactaataagatagagaacaagaggcatggcattgscataacttgggtctctcttgttcttgccacccataagagatgtcaatctgcatggatctcatacagggtacttttgtgtgaacagatactaggatattca

SEQ ID NO: 10628 - DNA, 201 bp, Homo sapiens
accagcagggactgacttttaacagatcagttatttaagcttgtcctctgtgcctgggatggttttaggtacctgtctgcattcactgtgttaatacagtrtagtcctcaaataccgttggtccttgaacaacacagatctgaactatgtggggccacttcttggattttcttccacctctgccacccttgagacagcaag

SEQ ID NO: 10629 - DNA, 201 bp, Homo sapiens
tacatggtggctggcaaaagagagaaagcatgttcaggggaactcccctttataaaaccatcagatctcatgagacttatgcactatcacaagaacagcaycagaaagatccaccctcatgattcaattacctcccactgggtccctcccatgacacatgggaattatgggagctacaattggagatttgggtggggacac

SEQ ID NO: 10630 - DNA, 201 bp, Homo sapiens
aatttatgtctcccatgtcagtaccttatatagggtaggtatcaataattactcataaaagatgagaattattggttccctagaagtcattttcccattcyaggcatggtgccttttaggggacataactctgactgaactttatatgtcctccttagttagttacttagggtcttgatttcttctggaggctgtatttgt

SEQ ID NO: 10631 - DNA, 201 bp, Homo sapiens
tacaaagcatgaaaatgaggccgtagatgcaaaagcttaaaagggtgacccatacctcaaaagttctcagtaagtggcagcattttattatcgtggctatyattttgccagttatatcttaacaggtataaatattgaaacctccttagcgaaaattataacggtgagcaaattatgacagcggaggagatctgacctaac

SEQ ID NO: 10632 - DNA, 201 bp, Homo sapiens
gaattttctatttttttttttttttttttatacgtggtcccagcacagactaaggaatccaactatcattgggcaagccatgctaggtatgcatgcctttrgggctctgcaggggatagcgctatgcagggatggttgagagctggttttggggttgagacacgtgggaaatacttggactttgggctgagcctgtggtgc

SEQ ID NO: 10633 - DNA, 201 bp, Homo sapiens
agccctcactgtgtggcctggagccttcctaactgtgcatcatctccccaggaccatccacctgaccatgccccaactggtgctgcaaggatcttatgacmtgcaggacctgctcgcccaggctgagctgcccgccattctgcacaccgagctgaacctgcaaaaattgagcaatgaccgcatcagggtgggggaggtatg

SEQ ID NO: 10634 - DNA, 201 bp, Homo sapiens; identical to SEQ ID NO: 1187

SEQ ID NO: 10635 - DNA, 201 bp, Homo sapiens; identical to SEQ ID NO: 1226

SEQ ID NO: 10636 - DNA, 201 bp, Homo sapiens
gaactaatataacatgaaagtgctttctaagctttgggataagctaaaaggcagattccaattttattcgagggcagcgtagattggtgcttcagctcgtrgatgacagagtcagggggcctggttctgagtcctagttctgtctcttcccagctgtgtgacgttgaacaagtcactggacctctctgttcctctgcaaaa

SEQ ID NO: 10637 - DNA, 201 bp, Homo sapiens; identical to SEQ ID NO: 1227

SEQ ID NO: 10638 - DNA, 201 bp, Homo sapiens
ttacgccccagggccatgggacttgctcgtatctgcagttaacacaggaacaagcacggtaccagaattccccatcatccagagcagtgtgacacagacgyttctgctcagctggaccaacagaacgccactccggagaactaggagtaaacaaaattggtgttcaggcagaggtcatgatgaagagcaacaatggccttg

SEQ ID NO: 10639 - DNA, 201 bp, Homo sapiens
cctgggctcaagtgtttcacccacctcagcctcccaaagtgctggtattacaggtgtgagccactgtgcctagccagcaatattctttttaatcagttttygattggtgaaaaagtgactatttctacctataatattcattatggattggataaaacatattgtctaattattttggtgtcattatattcagaattccca

SEQ ID NO: 10640 - DNA, 201 bp, Homo sapiens
agcagttttaagcccacaccaaaactgagaggaagatacagcaatttctcatataccccctactaccttccagtctcccccattattgacatcccccaccsagagtggtccatttcttacaacccacgaacctacattgacacatcattattactcaacgtccatagtttacattagggttggctcttggtgttgtacatt

SEQ ID NO: 10641 - DNA, 201 bp, Homo sapiens
gctggggccactgtctctcccttgatgtttgcctttcaaggagatggctcccgggtccttgagaaacacatgcctgggtaatcaagctgacaaaagtcctmtctgatcttcacaaaaatgttatatacatttgaaagagaggagaaagtgcttataattacaagttttctaaggtaaatgctctgagaataagagagggag

SEQ ID NO: 10642 - DNA, 201 bp, Homo sapiens
ggtcaaagggcatggtggtgccctgcatggcagatggtggagaaactgcaccaggcaggtgcctcaggctttctgggtcaggggagagggtcaggtggccyttgaagttctgtttgctgttagcctgactgagttaactgcatgggtacctgactgtctttgctcagtctcctagtggacaaccacatttccggaaggctt

SEQ ID NO: 10643 - DNA, 201 bp, Homo sapiens
ttggcactgttataggacatgcttacttgggtttcagacatatggctgcctgatgcatcagctctgtgaattccagcaactccctttccagaggaccaagwctgcatacatcagtgtcagcacgggctgggcgagcagacatttcatagctgccacccaagtggttcggcagtacttgggagggtggttagaaatctccct

SEQ ID NO: 10644 - DNA, 201 bp, Homo sapiens
gccttcttggcactgttataggacatgcttacttgggtttcagacatatggctgcctgatgcatcagctctgtgaattccagcaactccctttccagaggwccaagactgcatacatcagtgtcagcacgggctgggcgagcagacatttcatagctgccacccaagtggttcggcagtacttgggagggtggttagaaat

SEQ ID NO: 10645 - DNA, 201 bp, Homo sapiens
cctgggtggtttagaaagggaaagagcaatggagagaagagaaactagcaaatctcattatttctagggtcagctctgaccaccctgtaagtctaataacrgattctgtttcaggaggggtctttctagaatgcacctctcactagctaccagtaaccccttagggaaagccggcttcctggcttgatatactagaccctt

SEQ ID NO: 10646 - DNA, 201 bp, Homo sapiens
gtgagccgagatcccgccactgcactccagcctgggcgacagagcgagactccgtctcaaaaaaaaaaaaaaaaaaacataatgataataataataataawaaatagaaagaaatgtgctgcaatcacaaaatttcccagaactttatcttatatgaccgttttcctccagctcatggacagctatgtctgaatcaacagc

SEQ ID NO: 10647 - DNA, 201 bp, Homo sapiens
gtggcatgatcttggttcgttgcaacctccgcctcccaggctcaagagattctccttcctcagcctcctgagtaactgggattacaggtgtgtgccaccaygcctggctaattttttgtatttttagtagagacggggtttcaccatgttggccagactggtcttgagctcctaacctcaagtgatccacccaccttggcc

SEQ ID NO: 10648 - DNA, 201 bp, Homo sapiens
tttcaaatcctggaatagtatattttctcctttccttccttccttccttccttccttccttccttccttccttccttccttccttccatcctccctccctyccttcctccctctctcccttccttctttccttcctttttttcctttttgtttgtttgagacagtgtcttactctgttgtccaggctggagtgcagtggca

SEQ ID NO: 10649 - DNA, 201 bp, Homo sapiens
cggcagtggcggcagctgccctgggagcttgttagaatgtggcttctcacgcccctcctggacctacagagtcagaatctgcagttttacaggaggtccargcttggaagttgctcgtagagacctgagacagcgcagccacgtgctggaaacaaagcatttaagtttgtgactttattttaaaaggcagcaggcagtcga

SEQ ID NO: 10650 - DNA, 201 bp, Homo sapiens
ctaggcatggtgccttttaggggacataactctgactgaactttatatgtcctccttagttagttacttagggtcttgatttcttctggaggctgtatttstcatttaaattttgctagatattatgcatattacttaagttttcacacttaatggcataaatctgtccctagtattccctctcaattttctaatctcctc

SEQ ID NO: 10651 - DNA, 201 bp, Homo sapiens
tgtccctagtattccctctcaattttctaatctcctctgtaactgcagtctatttatatgtcctcagtaaatatttgttgagtctgatagtttttggttaygatcatggactagtgcagtgagggcagttggatattttcctcctgggaggacatctgggattcacaatctggatgtttggtatcatgagacaatctccct

SEQ ID NO: 10652 - DNA, 201 bp, Homo sapiens
atttaggtagaggtcattctctggaagattgaaaggagagaaccagtgattttgaagaaggggaacaacgtggaggatcttttttatccatagctcagttwgcaagtatgaaatgcacattgactatagaccctgccttgcctgacatcatttattcatgcattctccactcaatcatttgttccacacatctgatgtgcc

SEQ ID NO: 10653 - DNA, 201 bp, Homo sapiens
tggataaactagaatgtgcacatgaaggaaaagaacagggtgctctgagggaaaccaatttagtgaggattgaaaatttgggaacagcttttctgtggatwtgacacttgagcttgggggtaagaaaatgttagtctgggggtgactgaagggaaaagcatttggggtaatgggaacagcatgtgggaaggatccaaggca

SEQ ID NO: 10654 - DNA, 201 bp, Homo sapiens; identical to SEQ ID NO: 1232

SEQ ID NO: 10655 - DNA, 201 bp, Homo sapiens
aggtgtctggtgaagcaagacagtttggaatccacaaagccatcctcagaaacaaagatacaagtgtttccccaactgttagcttgcagttccctctaaayagttttcacgcctccatttaaaaatagttggcataatgatgttttctttctctaggctttgtgaccacgtttccatgggggaaaatgtgaatagacgtag

SEQ ID NO: 10656 - DNA, 201 bp, Homo sapiens
ccctttcctggtaacccagtcccatcaccccagactcaccttttacaacaactgggccctctaatcccacattcagccaatggccaagtttccctggtttygccaaggactttttccttcagttcaactaaagcgagggatctgattggtcttttaccaagctgtcgtgaagtaagctatagtaatcagattatctgctac

SEQ ID NO: 10657 - DNA, 201 bp, Homo sapiens
tccctcccagcatccaagaagagctcccttttatgttctttgtacatgggaggtctaggtagagttttgttcaagaaaaaaaaaaagtacttcaaaaaaarcaaataaatttgaaagctacacacctaattcagtccattctttgaattacagtttgtgaagctgagccccagaaaggtcaaattgagtgagttaagagtt

SEQ ID NO: 10658 - DNA, 201 bp, Homo sapiens
aatcctggagtttggtttcaggcttaccaagcagatagaacaggggtagcaccttgagtaaatgtcttattgtctaggagggtagagaatcttttgaattyttggctcaatctgtgggttataagatctattccccacctcactacatgggctttggattttagcactggaactgacctttagaatcacccctctcattct

SEQ ID NO: 10659 - DNA, 201 bp, Homo sapiens
cttgtgagataggaagaaatgataagatgttgctctttgccatgcatttgatgttctctattaatgttttaccattttagacagataactttcagtggttstgatttctataagttggacagcacagtgaatagagagacctgtattatcaccctcccaaattatcatgaaaaagaaaaagatagacagtgataatactgg

SEQ ID NO: 10660 - DNA, 201 bp, Homo sapiens
ttcgaggtcaggagaggtaatcgcatcaaacttacattttaccgattaaatgaggcttcatttttagaatctagattgaggggagagatgttcaaaaggcyccatttccagacccaatttccagttctctcctaagtgaattcattggaggtgttttaagagagggaatttgcttcattctttattcatttccaaactcat

SEQ ID NO: 10661 - DNA, 201 bp, Homo sapiens
tttggccagaaatgaggaagacttctaacatgattgaaaccatggcctccaggaaaagactgaatttcaaatgtgacagtgatggatcaatgctcagttcrgatcatggtcaagtagatcttccccgagatgtagtgctgatgaaggaagctttcgggatggtctaaagttctttttctccctcttgtctgatacttcagc

SEQ ID NO: 10662 - DNA, 201 bp, Homo sapiens
ctgattcacatattcttatccagtgttctgcctcttttactggtgaagatgttaagacatatgagcagcccatcaaaccaattaattgttggaaatgtgayggttttcttccatgttttttttttttttcatatggaaaaaaaccctgtgggttgactttcacaagctcgatttgatccctgtgacaaacaccaccttcct

SEQ ID NO: 10663 - DNA, 201 bp, Homo sapiens
ccctttccagccagtgatctatggtatcctaagacttcttccctgagggtgtgagatggagcaagatggcattctagcctccaagaattcatcacatcctkggcagaaacaagatccctaaaagcaagcataggatttggcccagaagtcactggcaggagccccgtggttctcatcctaggctgattcacatattcttat

SEQ ID NO: 10664 - DNA, 201 bp, Homo sapiens
accctctgccttgggctcctagctcatcattctcccctctgcctcccagaggccggtagctttacccgttggttctcctggtagcatcttacctgccacascttgcctattctttgctagaactacagggacctgatgagagaaccacattccttcctgctggcctcctaaggaaacaggctgcagtttacctaccaggct

SEQ ID NO: 10665 - DNA, 201 bp, Homo sapiens
ggcctagaaggaaacagggtcatgggagcacaaaggttgaaagcggaactcgtgtgggtggtaagatcccttcctgacctgcattcttctagaggtttggmccattccactctccctagcccatctcacactcaccaacacacccacccactaaaacagagtcctggaacttcctcttcaagttttccccattgaaaacaa

SEQ ID NO: 10666 - DNA, 201 bp, Homo sapiens
ggtttggggcagacttctcactttcctggccatattgtgaagctcctttacaatgcgggaagtaaacagtgtcgaggccaatatactcatacaatatgctstgtgtagacacagagcgaaggctgagaattttctgtaagaaactgcagaaaagcaaactaatgaaggaatgctaatcccaaataatcttaacttagaaga

SEQ ID NO: 10667 - DNA, 201 bp, Homo sapiens
ccaggtctcttagtaattacggtccttggccaccagcaagctattgggggaaatcatctcttgaatgggcagagagaggtacatttttggtagctgtaaartgatatcacagagtcattcattctcattcattcttgtgttcagaagaagagcccatcttttaagtacagtgaattctgttagtgacatacaggtgtacag

SEQ ID NO: 10668 - DNA, 201 bp, Homo sapiens
gctcagcatctctctgactgatgtctactgctaattccttaaatttacatatcatctttcttccctggagctcatagcacttaacagacaagtggggcacraatgatttaacgaagtgaaatccagaggcctgctcgtctggagattctgcagactagtggattagctcagatgtcagcactgaattatgatccttcagct

SEQ ID NO: 10669 - DNA, 201 bp, Homo sapiens
gatattgaacagagctttgactgcctggtcaaagcctatgggattgagggaacagaacctttactctaggctcaaaaacaagctcaaatgggagtaagtcragaatcttaatgttataaaatacccaaattttacaaacagtggctggctattccttcaaatgtaagaagtaagattgttaacacctcactggggctattt

SEQ ID NO: 10670 - DNA, 201 bp, Homo sapiens
ttttctgtttgagagaggagaggactgtgtgttccatctaacctagtgactcatatactattcctcttatggtcaggacagcaggagtcctctcttgatcmgggcataaaatcagccttttcactcaaaaaatggaaacagagaaatcagggggcaggcaaggtatggaaagttgatgttgaaacactgccaaccataggc

SEQ ID NO: 10671 - DNA, 201 bp, Homo sapiens; identical to SEQ ID NO: 1294

SEQ ID NO: 10672 - DNA, 201 bp, Homo sapiens
tattaaatgttcattaaacaaaatgagggaagattggcaaagagactagagaagtgatggagacataaagatataggtagatggcaaaatctgtggaaccygcaagcacagccgtttgacagttagaggaactacactgatggagtggatgactccagaaaatggctacaaagaagaatgggaggaaagccaagaataaat

SEQ ID NO: 10673 - DNA, 201 bp, Homo sapiens
tgtgccgcatttaatcaggatgcctccatgcgtcccaagaaagcagacgcaagagctcaggagagaaacaaggccatccacaccacaaaggagccagaagmcttccaaatgtcaatgcactgctgcatttttccaaacttgttgccggagcggcctttaacatccccaacggcctgctgtgatccaccagctaaaaacatc

SEQ ID NO: 10674 - DNA, 201 bp, Homo sapiens
cctgggtttaacattctttacaccaatcagctgacccattttgctacctaacatttccagaaactgttctccataggtcacgtggctatgtttgcttttcraatttccatctgtttctcacactcatcttcggttcacttcttcatccctatcccaaaggataacaggaaaaataatgggctgggctgagctgctgcagct

SEQ ID NO: 10675 - DNA, 201 bp, Homo sapiens
agagatttcttaagtgttgctttaacaggttgatgcaaaataaataaacagaaagggagggagagggagatggatggttttcagtaaataatggtgcagcrgccagcagttggaagggagctggtgggaggaagtttcccacctaagcagttgtgacaggagtattaactgggagcccaaaagcagcacaaacgcagcaca

SEQ ID NO: 10676 - DNA, 201 bp, Homo sapiens
agtggtcagtcacactgttgctggggcattgcaagcctcctcctggcaaacgcagcctggttacacaggccacatgcacagcacatcccaaatctttatcyaattccacatgccataaatatggaacctatgattctcatacagggtgggcccgccttatgtatatttatggcataaccacaaggcagagagctcatctgc

SEQ ID NO: 10677 - DNA, 201 bp, Homo sapiens
aatttttcgtttaggagagattatggataatgaaatgcaaacactctagttaatatgtctgttagctggtttatgttgccttctggaaaacgagtgatacrttctaagaggagcagcttttcaagttatcctacttgactatcgttggggtgagctctgagtctgtaccccggattcctttaccaaacactggatattaga

SEQ ID NO: 10678 - DNA, 201 bp, Homo sapiens
cgttcccagcaggctcccgttttttggacagacggggaagttatgatttgccctcacaattggatcccctgggagccagaattagtgtgaacacctattcsggagggaactgttcaccctgccgagtaaaggggcactgccagcacaccaggggccccagacgctgtgctctgattgcccttcagtgaccacccatgcagg

SEQ ID NO: 10679 - DNA, 201 bp, Homo sapiens
taaatcccccatttctgaaaatgctactcctatccagtagaacaataacaatgtggcatttaggatagagaagagtaggattgagaagaaaggagagaaakaggagttggcaaaaaacaaaaaaacaaaacaaaacaaaaaaaacaaaaaaacccttcgatgttgtgatacatggtttcagacctgaacttcctatccatc

SEQ ID NO: 10680 - DNA, 201 bp, Homo sapiens
tgccttcatatcatttcccaccgcccccccccaccccgcatcgcaacagttccctccccctacttgactgttttgtgcaacaaattaattaaacaggatgscattcattgattagcaatttatttttacgtgtagacccaatggctggtttcagagcagatgcaagggaagggggtgggagagggaggacacacagatctg

SEQ ID NO: 10681 - DNA, 201 bp, Homo sapiens
gcctggtgagtggtggggagaggtgatattaaatggccctctctattcagggactgtcactacagatagcgttctttgtccttagattagcatcttggcartgacataaaccgggatctctgcttaaggttaataatccaaactactcttttactttgttaaatatttaaggcttggagtcattctttacaattgagcttt

SEQ ID NO: 10682 - DNA, 201 bp, Homo sapiens
tctgttttcagtattcttacctcctattttctttttaatctctcatttcctttccttttcctccccttccatccttcaacactgagagtgtgctcagcagrgaacaccgtgtttaaggcgctctcccgaatgtgtaataacttctactctggcactaaggcccttcagcagctgaactcaaaaaagtcatcataaagacaa

SEQ ID NO: 10683 - DNA, 201 bp, Homo sapiens
tctagagggaaacaagactggcaggtctgagccagtcccagtgtgaagaatttccctaaagatttgttttccatgtggcacatgtgagatttgtgtttagytcccaagagtccttggaagtcttaggttaaaacaattctaagccctctctgggccggtggggtcttgttcagagtaggctggggagagatcggcctcact

SEQ ID NO: 10684 - DNA, 201 bp, Homo sapiens
aatgccgcatggctacttcctccaataattgcatttttacaggggaccacacctgaagccaggtctcttagtaattacggtccttggccaccagcaagctrttgggggaaatcatctcttgaatgggcagagagaggtacatttttggtagctgtaaaatgatatcacagagtcattcattctcattcattcttgtgttca

SEQ ID NO: 10685 - DNA, 201 bp, Homo sapiens
tttctcttagcatcatttaccaacctgtttcatgttcccccacatcccttcccgtcaaaggaatggaatgtggagtggattatctagtattattttacaaytaaggataatgacatgaaacatcctaggtgagtcagtgatgtggccaggaatctcagcttcgctaattagctgttatctagtcagctcagtgtttttgat

SEQ ID NO: 10686 - DNA, 201 bp, Homo sapiens
gaaaggagccccagagatgcctcattcgccttggccaactgtggcctaagaggatgagccccatattagtgtttacaggggtcctgggcccacaaacccaycactgctttctggctctgcacctcctgatgtggctagggtctccacctctttctctgtggaggagctggtcaccactcatctgcctttgtgccaggtgca

SEQ ID NO: 10687 - DNA, 201 bp, Homo sapiens
gctttgcatcagaatcacctaagatgtgtgttaaaaatacagattcccaaagaccactccagacccaaggaatttcacctgcaggaaaatggttcccaggratcagaatttttaacacttcctccaggtgatgctgatataccctaaggtttgggactgtctagctgggaacacttaactttccacaggggtgtggcttgg

SEQ ID NO: 10688 - DNA, 201 bp, Homo sapiens
ctctaagtgtcagctccccagagctgtggtggctgtgtcactggagttaattctgtccctgggttcatcaggcagagtcctgttctccatgattaatgagwtccacttgctttcttcaaagaatgcctgtgctgtgccatgctgttatttatttatgttttctactaaaaaatttatgtaaaaaacatcccttaaggtcag

SEQ ID NO: 10689 - DNA, 201 bp, Homo sapiens
actgcagcattttcgagaacttgttcttggtggtttttccaagaaacctgaaacatctgccccatattgaaaagtacccagagaggaaatgtgaaggaatrcttgtccaggtttccttcaacggaagagcatttatggaaggctgtgtgtaaatagaacacatcagatcagaagttcccaactactggtctgtggaggctt

SEQ ID NO: 10690 - DNA, 201 bp, Homo sapiens
ccaaagtcagtgtttcccttaactggttgctaatttgaggaccttagcagagataggcagaccttggaaggccagctgagggctgactcatgttttaagcrtggactatgcaaagagactacatctcctacagcactaaatattctttcagatggtcgttctagtaggagggcaagatgctagccaggagatgtgcgtgtt

SEQ ID NO: 10691 - DNA, 201 bp, Homo sapiens
tcatttgacatcttgagggtaattcagtacatactaatgcatctaccccatcctttatatctgcagcatagcattccatattgtgttgatatgccagagtrtattaactgctcccctgttgatgagtgttcagactgtgtctagttttttttttttttactattataaacaatactgcaatgaacatccttgaaattgctt

SEQ ID NO: 10692 - DNA, 201 bp, Homo sapiens
cgcctccatttaaaaatagttggcataatgatgttttctttctctaggctttgtgaccacgtttccatgggggaaaatgtgaatagacgtagttacagtascatttggatgagacgccttcaagcacctatactttttcgggggaacttgatggaatccaatttaattacctgaagaaattatttgctgaagaaagtcttt

SEQ ID NO: 10693 - DNA, 201 bp, Homo sapiens
ctgcagttgctgctaaaggtcacaggtaaatctgggaattccaccactgcagcattttcgagaacttgttcttggtggtttttccaagaaacctgaaacawctgccccatattgaaaagtacccagagaggaaatgtgaaggaatacttgtccaggtttccttcaacggaagagcatttatggaaggctgtgtgtaaatag

SEQ ID NO: 10694 - DNA, 201 bp, Homo sapiens
ctataaaactttgaggagaggcacttggggaaacttactcagaaggccaggtctttcttgatgagtatttttctttggtcctcctctttagatggtgaccyagttatataaaatatttctatcagaagggaactgggttgggccaggtgggggaaaatctaggaaaggcagcctcccagcagttcatggtttctagatagt

SEQ ID NO: 10695 - DNA, 201 bp, Homo sapiens
aagggtttgaagtgtttcttttagcctgtctccccaaaatgtgagatggccattggcgagcataataatttgcaagtaaactgtaaactcctagattttaygcagacggcctgctctgggctctagggattggtctcatgcccacattaaatgggtacccagtaaacatttcccccgtgatcagctcctggaggtagggaa

SEQ ID NO: 10696 - DNA, 201 bp, Homo sapiens
ctggtgatgaaaggtctggctccagctcataaacccatcagccgctactttgaacatgtccctgcaaagctcctgcctgcatgaggcgaggcttttggtgwtttcaaattggctctctgcagttgctgctaaaggtcacaggtaaatctgggaattccaccactgcagcattttcgagaacttgttcttggtggtttttcc

SEQ ID NO: 10697 - DNA, 201 bp, Homo sapiens; identical to SEQ ID NO: 1283

SEQ ID NO: 10698 - DNA, 201 bp, Homo sapiens; identical to SEQ ID NO: 1265

SEQ ID NO: 10699 - DNA, 201 bp, Homo sapiens; identical to SEQ ID NO: 1268

SEQ ID NO: 10700 - DNA, 201 bp, Homo sapiens; identical to SEQ ID NO: 1271

SEQ ID NO: 10701 - DNA, 201 bp, Homo sapiens
tacaggaagttctgttagtacagatggttcagtatagatgtcactatctgtcccttgcaggagaataaagtagaatgtcagtgatcagagcattttttgtktccccagtgacaagctcaattaccccttttgtctaaataacatttggctttccttaaagccatttgttcccattagtaaagaatgaaataaaaatatctc

SEQ ID NO: 10702 - DNA, 201 bp, Homo sapiens
tcttggaagctgtccattgccggcatcatagccatcagctacaagaacaggcagggctggttcttagctggtcagttgtcacgttcaggcgacctcttgasaatccaaagggctttacctcaaggttcaagtaaataaaaaagtagccccccgcccccaccataccagctcttttgacggtccaagtaatcagtagccact

SEQ ID NO: 10703 - DNA, 201 bp, Homo sapiens
ctgatactggggttcctttcttggcaaacaagtatggtaaccacagagattgataagggtgtgaatttctatgggtttctatgggaattattcagctctgrtcttttgattctgaggctgagttgtccaacatggtagctggtaagcacatgcggcaatttacatttaaatgaataaaattaaatacaacctacagttcag

SEQ ID NO: 10704 - DNA, 201 bp, Homo sapiens; identical to SEQ ID NO: 1282

SEQ ID NO: 10705 - DNA, 201 bp, Homo sapiens
aataagatagtagctgtatccccaagtggagacttccctcgcatccagccacgcaggatcagcctgttaccttatatagcggtaactggttttcttatagaaaaaaaaaagggtaaaaaaaaaaaaaatctaagtagttctaagattcacattggttcttgatagctgtgctacacaagtagagtctcaaagtcagtgtca

SEQ ID NO: 10706 - DNA, 201 bp, Homo sapiens
ccaccatggccacaaatatgagagagagagaggcctttctcagctatggtaatgaaactagtaaaagacagaattagtttggggacaaagacaaagagggyaggcaataaggtgggagaagaggaagatgtataaagggacattcaggggatcctgggattctggggtcatttctaccccaggggttgtggatgtggctgt

SEQ ID NO: 10707 - DNA, 201 bp, Homo sapiens
gggaaggtgctttgggtatggatttaacccctattgatttatcgtcttccttttctctagttggcaaaccacagcctcattagcatacagctctccaaggytggaacagggccagattctaaaccagcacactccacctgcctttggagttgagtctttttagctagtgaatgttctgagaaacttctagcccccagctgc

SEQ ID NO: 10708 - DNA, 201 bp, Homo sapiens
gatttggcccataggccacagtgagctgacccctgggttagagcacaggctgggattttgtccacctggttctagccgtgactctgacacttgctagcagkgtacagttcctcaggggaccctgggccatctcttgggtttcactgaatgcttctctgcccttctccacaattatcctccaagtgaaaccaggagaaaatc

SEQ ID NO: 10709 - DNA, 201 bp, Homo sapiens
tctgagcagagcacgggcagagagacgatctggtgccctacctgttagagactcacggaaatcccagctgggtgcacctgtggaaggtggttgtcagaggraaggattcagaatgactgtcctacgctagtggatgctaaaaggaacatcaatgtctcccgtttcagctgggaatgtggggtttatgactcagaccattcc

SEQ ID NO: 10710 - DNA, 201 bp, Homo sapiens
gcaagaggaggcaggacaccattttccaatgcagtcgttacccagtgggtggggcagccacagtctctgcaaggtaaggtgtgggtgtagttgtgtcttargctgggttcagggtgggaaggggtgtgaggtaaggggacggcttatatccctgttcccaatcagaaatagacatgcactaagtacatagaggttcagggt

SEQ ID NO: 10711 - DNA, 201 bp, Homo sapiens
ttgggtaggagtagacacactgtggaagaggtgactgagaaccagccaaagcattaaccttctcctccccagacgaggagcagcaacagatggctggtgcrgcagccaactgctcacccagcttgccagaggacatgtgctagtttgcagagaggaacctggggagggcgagcatgagaaatgactgaagaccacagagcc

SEQ ID NO: 10712 - DNA, 201 bp, Homo sapiens
ggcatagaaaaagctaggaatccaaatgccaattcatatgcagtgaggcacgaatacaaatgacagtgagggaggggtctggggtcagtgaggagagacaycagggaccagatgattctggggaccctggtgtttttcatttcactcaagtcttccctaaagcaatcaggaaaatgaactgactcagggtgacctgagtgt

SEQ ID NO: 10713 - DNA, 201 bp, Homo sapiens
tagagggagaagaagggcacgcacacaaccagccaagacataaggcagctgtgccgggtgctccatgtgaaagagatggaaaggaaatgataccgagaaayaggcaggagggaccgatttgacttagagactcttaagaaaacacagcatttgaatcaaggctctgaaggagccttaagaaagggtcacagagcctggaga

SEQ ID NO: 10714 - DNA, 201 bp, Homo sapiens
gtcgcccatgacccctggagccccagagggcctgtgttacagtgcgctcttctagctttgccatccacggatggcttaagtgttaaacagctcagtgtagrgtcatgatgacagcctcttgcacccacactcaggttcttgtctagcatccaggaggaatgaggtttcacaaatttgaggttggtgaatgtggaggatttt

SEQ ID NO: 10715 - DNA, 201 bp, Homo sapiens
atttaaaaaaaatcttaatctgtaaatatttttctgaattttcttatttttcatatacctcttttgtggcagaaaaggtgtacatgtgcagggtgtaattyaggctgtttctgttgcagtctttatgataatgtagtaataggtgtctggtgaagcaagacagtttggaatccacaaagccatcctcagaaacaaagatac

SEQ ID NO: 10716 - DNA, 201 bp, Homo sapiens
ctaagaggagcagcttttcaagttatcctacttgactatcgttggggtgagctctgagtctgtaccccggattcctttaccaaacactggatattagacastagatgcaaagccgtatttattccaaagccagaaacttcctaagcctctgcctaactcttcacaaatgaacctgacaacactgaaatttctaaggagatt

SEQ ID NO: 10717 - DNA, 201 bp, Homo sapiens
gcacagagtgcacgaggctgccggccagctgagtgcacgtggccgtggtaccctgctcccgcctccacaaatcctgcgataaccagtaaccagttctggcragtctttcagcagagaagataatgggaattgcaaattactagaccgaatgctaataataattgtttggatacaggagaaaaaataaaacagatgttcccc

SEQ ID NO: 10718 - DNA, 201 bp, Homo sapiens
tttttaatctctcatttcctttccttttcctccccttccatccttcaacactgagagtgtgctcagcagggaacaccgtgtttaaggcgctctcccgaatrtgtaataacttctactctggcactaaggcccttcagcagctgaactcaaaaaagtcatcataaagacaaaatagcttttacccagcaagggtcttaataa

SEQ ID NO: 10719 - DNA, 201 bp, Homo sapiens
caagtccaggatattcacagtccctgtggagtaagaaagctctgtgcatctgtcccaggttaacatgacctcacactaacatgatcctaaggcatctgacrtgcccacattccatgctgcatatgtggtagaaaagtggccctgccatcttgcagaagtattcagcctaagacgcccctatgtttcagggccaaaaagagg

SEQ ID NO: 10720 - DNA, 201 bp, Homo sapiens
agtattcttacctcctattttctttttaatctctcatttcctttccttttcctccccttccatccttcaacactgagagtgtgctcagcagggaacaccgygtttaaggcgctctcccgaatgtgtaataacttctactctggcactaaggcccttcagcagctgaactcaaaaaagtcatcataaagacaaaatagcttt

SEQ ID NO: 10721 - DNA, 201 bp, Homo sapiens
ctgcatcaatggggaagaagtgaactggaaaactaagggacaggtgtgaagtttgtacaggatactttttcgtgtaatttgaatttttaaaagatgtgtamtacttattttcttttttatttaattttgaaataaataaatagtatctgagtctggagactgaaaaggagactgcctctataaatgatttcttggttgcag

SEQ ID NO: 10722 - DNA, 201 bp, Homo sapiens
cccattttccttctccctacagagcttgatattgggctttaagcaggagaggagagaaagccctttctgttcagggtggtccttacttcttctccataggraaaaaaaaaaaaggagggggaggccctgaggggattggggagaagggaagcagctggcttggttgggggcagagcaactgctaatgggttcagagcggct

SEQ ID NO: 10723 - DNA, 201 bp, Homo sapiens
cactgagtgactttgaattctcctgtacttctggcctggacctgagacctccataagcactggagaggagaggggtgaattccggaaatttagtagatcastttgccagggtacaataggaaaaggctagaaaataaaagagggaaagggaccttcccttctgcaggcttccttagaactgcttctcaccccaagcactgg

SEQ ID NO: 10724 - DNA, 201 bp, Homo sapiens
agtgaagatacggcagtcatctgggtgatggagcgcgatagttgggttaatccagcagttacctgtgacttaattgtgtttccctgtgtctttcaccgccrccaatttgagaaagtataacagtgatgattctataagatagtgcactgtatcctctataactggagtgcagatcagagacaaaggcggaaatgtaaaaag

SEQ ID NO: 10725 - DNA, 201 bp, Homo sapiens
cctcactatcttgcttgtctgctaaaggagaaccattcttatccttagaattcacagctctgatagtttttcctgttaagctgtgtgtgtatgctacagcsaagtgaagatacggcagtcatctgggtgatggagcgcgatagttgggttaatccagcagttacctgtgacttaattgtgtttccctgtgtctttcaccgc

SEQ ID NO: 10726 - DNA, 201 bp, Homo sapiens
gaactgcagctttgaggatggtaagcacaaattgcctccagatggcatgggtgcggactagtcagagtgggagctggcctgtggctggacagggacctagkggtcccccagatcagagatccaggggatctcaaagaagtggtaagagaggtgggggcacttaggggtttggggcagtggctgtttacaaccaatgtagaa

SEQ ID NO: 10727 - DNA, 201 bp, Homo sapiens
cacttgaacttgccacaccctgacctaaagacatagccccaaatcactttcaccatgtagggtctgagcctctttaaatccatattcccgtccatccagtkttgtgcaaacatgagccagagtgtgctttggtccttccttggagtcagcgtcgcctgtagccccctccattattgtctcgtggccttttgtgctaaactc

SEQ ID NO: 10728 - DNA, 201 bp, Homo sapiens
cacttacagtaggtgtttggatccaggaaacacttgaacttgccacaccctgacctaaagacatagccccaaatcactttcaccatgtagggtctgagcckctttaaatccatattcccgtccatccagttttgtgcaaacatgagccagagtgtgctttggtccttccttggagtcagcgtcgcctgtagccccctccat

SEQ ID NO: 10729 - DNA, 201 bp, Homo sapiens
atctggtttcaatttcaggggtagcgttgctgtttgatgggcagttaccttggagcacccagtacaaacatagtacaaacagtataaacaccgaggcctcsgtgcccgccgttcctccactttcatttacacgccctgccctccggtgcctcattggcccctgggtttaacattctttacaccaatcagctgacccatttt

SEQ ID NO: 10730 - DNA, 201 bp, Homo sapiens
tcagtgccatgccctcccagtctggccagtgggacagttgctaatgacctctttccttcattgctccccaatcccaacatgccccaaattacactggtgayggtcagtgacaggtttcttatttcaaagccctgcctggccattccttggaagatcagagttgaggagcgttcccctctgcccagcctcctttcctttgaa

SEQ ID NO: 10731 - DNA, 201 bp, Homo sapiens
aggccctaccttcctttccttgggtcgccagccctcctccctcagcagagctggcaccagatcttacccagagctcactcactgcctgccaaaaggagttygtgggagccactggggctcagggactgagcctgatgccagcaggagcagccaccagcctgagctatcctgccctcctccgccagagccccaggtatcccc

SEQ ID NO: 10732 - DNA, 201 bp, Homo sapiens
ggcatgcctggtgagtggtggggagaggtgatattaaatggccctctctattcagggactgtcactacagatagcgttctttgtccttagattagcatctyggcaatgacataaaccgggatctctgcttaaggttaataatccaaactactcttttactttgttaaatatttaaggcttggagtcattctttacaattga

SEQ ID NO: 10733 - DNA, 201 bp, Homo sapiens; identical to SEQ ID NO: 1285

SEQ ID NO: 10734 - DNA, 201 bp, Homo sapiens; identical to SEQ ID NO: 1286

SEQ ID NO: 10735 - DNA, 201 bp, Homo sapiens; identical to SEQ ID NO: 1288

SEQ ID NO: 10736 - DNA, 201 bp, Homo sapiens; identical to SEQ ID NO: 1290

SEQ ID NO: 10737 - DNA, 201 bp, Homo sapiens
taagcaggagaagtcgctgatggttgcagagttggctgtaagtagatttacagagtcccttggttgttacagctatgacagaaatgatttagaagtgatgsttggttagttggtttttccctctacccttattcaggaaaaccaagggaaactcacatatactttgctctagttacttttttttttttttttttttgagca

SEQ ID NO: 10738 - DNA, 201 bp, Homo sapiens
acatttgttcctgacactagttttaaaaacatgcttctggcttcccccagcctctgtcctgcattcctgccacttttctcttctgcctgctttgttttccyccttcttgagtgtctgtgccaagtacattgaaagggagaactttggaggcaatgaaacatttattagtggagagaaatatttattttaaaaaagaagagg

SEQ ID NO: 10739 - DNA, 201 bp, Homo sapiens
cttttcccattcttaatacttcttaaaaattaaatattcgcaaggaaagtgattgggttctgtaggaaggtgagttcctaagtgaaggggtacaacatccytttgccttttcagggctatgttacccctaggcagaggcagatggtacttagactaccagcaaaacaacaatacttaagaaggagaaaaagagcaagacag

SEQ ID NO: 10740 - DNA, 201 bp, Homo sapiens
ttccccttattccttttgtggtagtaattttgtttgttgaatatgagatgaggacaatacctcacactgtaatgggcaccagccttcagaagtcatgttgygtgtgctctgaagggggctgataccccttccaagttcaagtccctcagtttatctgaccctctcaattataatggagaaggatccagtgccctaggtaat

SEQ ID NO: 10741 - DNA, 201 bp, Homo sapiens
acgataaggaaagtgaggtacttagcaattgaaagatgtgccaggccaggtctggtttcccactgacttggtttcagaaagacttaccaagcatccgttgkgaatgcccagcctgaattggcactgggtgccaggagcttgggggctgagacctggttccaccccacccttttcaattataaaccggtagatctcggaagc

SEQ ID NO: 10742 - DNA, 201 bp, Homo sapiens
attcagggactgtcactacagatagcgttctttgtccttagattagcatcttggcaatgacataaaccgggatctctgcttaaggttaataatccaaactrctcttttactttgttaaatatttaaggcttggagtcattctttacaattgagctttaaagaggagaaatgtaaatctggagtttttaataatgtggatgt

SEQ ID NO: 10743 - DNA, 201 bp, Homo sapiens
gtagaacaataacaatgtggcatttaggatagagaagagtaggattgagaagaaaggagagaaataggagttggcaaaaaacaaaaaaacaaaacaaaacaaaaaaaacaaaaaaacccttcgatgttgtgatacatggtttcagacctgaacttcctatccatcacccgccctccccggccccatgcctagggtttccag

SEQ ID NO: 10744 - DNA, 201 bp, Homo sapiens
tggtacagataaccaatatttaaagttgcctttggaagtgtgggggttggagtgaaggggacaaaacccctgagataaattaattttactagtattaaaawtaaaatggccaagcatggtggctcatgcctgtaatcccagcactttgggagaaggaggtgggcagatcacctgaggtcaggagttcgagaccagcctggc

SEQ ID NO: 10745 - DNA, 201 bp, Homo sapiens
gccttgatgagaaatggtcagaggcttaatggtttcattgcctaacaggattcagtggagtaggattccaggacacagtggccttgtatcatggctggccytccaggagaaagcatcttctaaaggtttaggaagctgtcaagtttagataaggctgagctccgatcctctgggaccttggttgtattaataaggagaaat

SEQ ID NO: 10746 - DNA, 201 bp, Homo sapiens
taaaagtttaaacctggggtgtggggaattgagggagaaaagttcccctttcaagagtaattggagagaagtagaggaagggatggggaaaggagggagasagtgtgggtagggagagtggagagtatgtggaaaccataacagttactaaacaggagctcagctcaggtttcctctgacgaattccaaggcaaaaaagtg

SEQ ID NO: 10747 - DNA, 201 bp, Homo sapiens
atcctgtgtgatcagatacttagtctatgtgcctcggtttccttgtctgtaaatgtgtttggtaacaatacctacttcatagggttgttgggctatgtcarattatgtagaatactgtttggcacatatgaagcccattctgaagtcactgaatctttaaaactgtttcagtggggttagtggaatctcgtgatcgtagaa

SEQ ID NO: 10748 - DNA, 201 bp, Homo sapiens
aaaggcagggaggcatgttgagtttgcagtcctcttgtttttttaatcacagaccatgtaattgagaatatttatggccatgttctggaatactttcatctgtgtgtgtgtgtgtgtgtgtgtgtgtgtgtagttgggtgggtagggggagggatgagccggaataatctcttccaccgaatgagtaagtaggttagtctt

SEQ ID NO: 10749 - DNA, 201 bp, Homo sapiens
actggggctgtcttgagctgacagcttggaaaggcataattagcttgtgagataggaagaaatgataagatgttgctctttgccatgcatttgatgttctytattaatgttttaccattttagacagataactttcagtggttctgatttctataagttggacagcacagtgaatagagagacctgtattatcaccctccc

SEQ ID NO: 10750 - DNA, 201 bp, Homo sapiens
ggaggtctgatggctgggaaaaatctgctgcttatatggccaggaataccaaattaggaaactcatcatgtgcaaatagtcccagactgtcctttcattakcttgaggaggttggaaaggagggatgtagaggttgccttgaacacaaggccatcctaggtgctgtaaagccaccccaaaggtgctgttaaaatcagagct

SEQ ID NO: 10751 - DNA, 201 bp, Homo sapiens
tgcttctctccttctctgccactctgccactctgctgctctgctgctctgctggtggggcctggggttttctttgggtacaggatgggggacagggcaggmcagggtggttttagaaaaggtaacattcaggcaggaaaacaagaatgtatgttctcactttgggccgcagtaccaaagaagagggtggtacccttaccag

SEQ ID NO: 10752 - DNA, 201 bp, Homo sapiens
tgatgttcctttggtcacttcttaattggttaattcaccaaatcttgatgagtctgacttttgggaaaggttctggtttgatcctgtaagacttgccaaaratggatcagcaaggagtcatgacctcaagttgctggtggctcagtagactggatgaggccctccagaactctcacacatctcagaagatgctaaagagct

SEQ ID NO: 10753 - DNA, 201 bp, Homo sapiens
aagaatgtatgttctcactttgggccgcagtaccaaagaagagggtggtacccttaccagataccaccctcttctacccagtatttccttgcctcctgtcmctatcactgtgtcctggaaaaccctttgtctgagtgagcttggtataacagactaccacagacttggtggcttaaacgacagacatacatttctgacagt

SEQ ID NO: 10754 - DNA, 201 bp, Homo sapiens
tctctgtgtgctcacctggcctttccatagagagagatctttctgtcttcttcttctaataagagcactaatcccatcatgagggtgggacataatgaccmacctcatgacctaatctaaacataattacctcccaaaggccccaaatcctaataccatcaaaatggtagttgaggctttgatgtatgaattttagaagga

SEQ ID NO: 10755 - DNA, 201 bp, Homo sapiens
ataagacctttttttttttttttctaatctacatccttctggaaatgtttacatgaaactcaggggaggcaggctggccagtgaaacgaggttggaacagraccatggttgaagaaaacaggacccatctggatgcagaggccgcctttgcccctgtgacgttggtggtgttgatgggggtgtgggagggaacctgaagag

SEQ ID NO: 10756 - DNA, 201 bp, Homo sapiens
gggggctgagagctacctcaccatccaccctaggggctcacagtaacttaacagtcattcccatcaacacaatgggaagagtcctggaagcttacaggtcrccccaggctgaggcaaaggcagggcttgcccctgaattcctatctctcagaactcttgagccaccttcgcctgctgcccaccccatcttccaaggctggt

SEQ ID NO: 10757 - DNA, 201 bp, Homo sapiens
gtgctcctttccccttgaatgtggacatgacgaggaggcggagagcactgtctcagggcttgggagaccagggttcaagattcggttctgcctctgcctgygtgaccttgggaaggccacaacacatcttggctttcccatctgtaaagtggatgtttgggctacatggattttgagccctcagctatgctatgacatcct

SEQ ID NO: 10758 - DNA, 201 bp, Homo sapiens
ccattttccttctccctacagagcttgatattgggctttaagcaggagaggagagaaagccctttctgttcagggtggtccttacttcttctccatagggaaaaaaaaaaaaggagggggaggccctgaggggattggggagaagggaagcagctggcttggttgggggcagagcaactgctaatgggttcagagcggctg

SEQ ID NO: 10759 - DNA, 201 bp, Homo sapiens
ctttccccttgaatgtggacatgacgaggaggcggagagcactgtctcagggcttgggagaccagggttcaagattcggttctgcctctgcctgtgtgacmttgggaaggccacaacacatcttggctttcccatctgtaaagtggatgtttgggctacatggattttgagccctcagctatgctatgacatcctagtcca

SEQ ID NO: 10760 - DNA, 201 bp, Homo sapiens; identical to SEQ ID NO: 1303

SEQ ID NO: 10761 - DNA, 201 bp, Homo sapiens
tccaacaattccacttctaggtatatacaccaaaaataattgaaagcagggactgaaacagatatctgtgcactgatattcatagacacattattcacaayagccaaaaggttgaaacagcacaaatacctatcaacagatgaatgaacaaaatatggtgtgcacatacaatgaaatattattcatcctgaaaatgaatga

SEQ ID NO: 10762 - DNA, 201 bp, Homo sapiens; identical to SEQ ID NO: 1269

SEQ ID NO: 10763 - DNA, 201 bp, Homo sapiens
ttttcgtgtaatttgaatttttaaaagatgtgtaatacttattttcttttttatttaattttgaaataaataaatagtatctgagtctggagactgaaaargagactgcctctataaatgatttcttggttgcagcaggaaagcaagcgccatgccagccccctccccatcagtgtgctcatccagatactaagggttgat

SEQ ID NO: 10764 - DNA, 201 bp, Homo sapiens
gatccgcacgtttgcagctctttctttgccataagtggtcttcagggcagctgcaaatcctgccaaagggatgggtgggggtcccacttggggagattttytgggcctcccccgttcccccttgccttatttctaaattcccagcttgaagcggaattaaattaccactcacagacctggatgctgcgtaaattatgtatg

SEQ ID NO: 10765 - DNA, 201 bp, Homo sapiens
aagtggtcttcagggcagctgcaaatcctgccaaagggatgggtgggggtcccacttggggagattttctgggcctcccccgttcccccttgccttatttytaaattcccagcttgaagcggaattaaattaccactcacagacctggatgctgcgtaaattatgtatgtttgtgtgattcgctgtgtgtgtgtgcacacg

SEQ ID NO: 10766 - DNA, 201 bp, Homo sapiens; identical to SEQ ID NO: 1274

SEQ ID NO: 10767 - DNA, 201 bp, Homo sapiens
accaatatttaaagttgcctttggaagtgtgggggttggagtgaaggggacaaaacccctgagataaattaattttactagtattaaaattaaaatggccragcatggtggctcatgcctgtaatcccagcactttgggagaaggaggtgggcagatcacctgaggtcaggagttcgagaccagcctggccaacatagcaa

SEQ ID NO: 10768 - DNA, 201 bp, Homo sapiens; identical to SEQ ID NO: 1346

SEQ ID NO: 10769 - DNA, 201 bp, Homo sapiens
atttattgaactcttgccagacatcaggtcctaccctaagttttctatgtttaaccgccacagctggtactggtactactattatcccatttaacagatgkagatactgaggccctgagagatcacacagatagtaatcgtggggctgggtttgaagccaggcagcccaaagctgcctttgtatacctgtgtcaatctgct

SEQ ID NO: 10770 - DNA, 201 bp, Homo sapiens
gggaaatggtattcacccaaaggaccagtgcagaagttggggaggctttgttgcgtgcccttaattctctgaaagttcaccttcagagagacttatcagaygcgttgtctggagtggcctccttcctcacgtcaggaggcattcttggcagcctgctccatgaggaacaatgagattggcggggccctcaccatcatcgca

SEQ ID NO: 10771 - DNA, 201 bp, Homo sapiens
aaggcagggaggcatgttgagtttgcagtcctcttgtttttttaatcacagaccatgtaattgagaatatttatggccatgttctggaatactttcatctgtgtgtgtgtgtgtgtgtgtgtgtgtgtgtagttgggtgggtagggggagggatgagccggaataatctcttccaccgaatgagtaagtaggttagtcttc

SEQ ID NO: 10772 - DNA, 201 bp, Homo sapiens
tgtatccccaagtggagacttccctcgcatccagccacgcaggatcagcctgttaccttatatagcggtaactggttttcttatagaaaaaaaaaagggtaaaaaaaaaaaaaatctaagtagttctaagattcacattggttcttgatagctgtgctacacaagtagagtctcaaagtcagtgtcatggatttatttaac

SEQ ID NO: 10773 - DNA, 201 bp, Homo sapiens
atctctcccgtggactcttaaaattaacttcactgtcaaaatttcccatggcccaaatgtaggtttggggagagaaatgtaagactttgaagttgagaaasaaagtagagaaagcattctctagacaaatgctcaccatgcagacttcagaatctgtgaggagacaaataaaaaggcactcggggaaccgttttagagaga

SEQ ID NO: 10774 - DNA, 201 bp, Homo sapiens
tatggtggcatctgagtttagaggtgcccacatcctcttgccaggaagaggttgatgagaaaagaacacatttcaatctgggtgcttctttctttaaaaaatatatatatgtgtgtaacaagaattagttattttcagggaaagtcatggtaccatctcatacctcagtttcctcatctatgaatgaaagagaggctagtt

SEQ ID NO: 10775 - DNA, 201 bp, Homo sapiens
agctcaaaatatcagcgatttgtggtgggaagaaatgaaggaagaaaatacaactgcaaacagccactattaaaaaggcgcttggtactgatgcagatacmcaaacaaatacagagtttggtaactgtttgagcccttggcgttaaatagcaaacaagaataacagcagcagtaacaacaaatggctattcatggagcatg

SEQ ID NO: 10776 - DNA, 201 bp, Homo sapiens
tggaatcaaatgaaggggtggggcaaggggactgtgtcatgcaagagtggcagcccaggctgctgcagggcacaggtcccaagaaggtttctctgccttgrgttttcatgctcctgactatgatgaggtcacaggggctgacaatctgtgtgtccagtggctcaagctgttgtgaggcccctgaatagcttgatccatatt

SEQ ID NO: 10777 - DNA, 201 bp, Homo sapiens
atggtggcatctgagtttagaggtgcccacatcctcttgccaggaagaggttgatgagaaaagaacacatttcaatctgggtgcttctttctttaaaaaatatatatatgtgtgtaacaagaattagttattttcagggaaagtcatggtaccatctcatacctcagtttcctcatctatgaatgaaagagaggctagtta

SEQ ID NO: 10778 - DNA, 201 bp, Homo sapiens
atggcctggcccatagtaaatgctcaataaaatgtgaacagtttgcagatataccagctttttagtaaatgggtggtacagatgcaaggcagaaattcaargaaatgaaatttactttaaaaagtctgacctgacagtgagctgacttctccataaaggctaggtgactgtactgagcctaaggagcaggtggcctggctt

SEQ ID NO: 10779 - DNA, 201 bp, Homo sapiens
agctggaactacaggcatgcgccaccatgcccagctaatttttgtatttttagcagaggtggggtttcaccatgttggctagactggtctcgaactcctgscctcaagtgatctgcctgccttggcctccccaaatgctgggattataggtgtgagccaccatgtccagccccacataactttaaagactgaagaagcact

SEQ ID NO: 10780 - DNA, 201 bp, Homo sapiens
caacaggagttagcagaaaagcaaagcagagatgaaggcaaccgcctgctctgctctgctctgctcagagcagagggaaggtttgcaaatgccttcccggygtgcagggaaggaagagggaatagtgacatttgggacagaaatgtgggaactcgatttcaactccctggtcactgtcaacagcaatgcagcataccaaag

SEQ ID NO: 10781 - DNA, 201 bp, Homo sapiens
atgccattctaagcacctaagatgtaacatattttattatcctcataaggactccatgggtattattctcctcactttacagatgaggaaaccaagacttaaagagctaggtcactcaccagtaagtggtagagccatggtttgaatctaggcagttccagtccaaagcccttgctttcaaataacactctctgctgcctc

SEQ ID NO: 10782 - DNA, 201 bp, Homo sapiens
gctttcaaataacactctctgctgcctcaaccgggggccaagagctgtgcatggtgctgtggacacaaaggtgggcacaacagactgttctgtgtgggcayatggacaagttgggcagacatactgataaactcataaataaatataaaatcaaaactatgatcaatgtctggacatagaggcttatggtccttggaagta

SEQ ID NO: 10783 - DNA, 201 bp, Homo sapiens; identical to SEQ ID NO: 1300

SEQ ID NO: 10784 - DNA, 201 bp, Homo sapiens
atggtgtgcacatacaatgaaatattattcatcctgaaaatgaatgacattctgatacatgttaccacagagatggacttcgaaaatatcatgctaagtgkaataaaccgacacaaaaggacaaatatgatatgattacacttatagaaagtacctagaataggaaaatttctagagacaaagagtagattagaagttacc

SEQ ID NO: 10785 - DNA, 201 bp, Homo sapiens
cataatgaatgatctagaagtagaggtgattctctagctgcctgccagaatggggagtcattctcgtaaagattgcctccctgccttttagccatggtgayagaacttgttattaacttgtttttattttctttatattatagtggacatcccagaaatacatgagagagaaggatatgaagatgaaattgatggtgagta

SEQ ID NO: 10786 - DNA, 201 bp, Homo sapiens
aatgaatgatctagaagtagaggtgattctctagctgcctgccagaatggggagtcattctcgtaaagattgcctccctgccttttagccatggtgatagwacttgttattaacttgtttttattttctttatattatagtggacatcccagaaatacatgagagagaaggatatgaagatgaaattgatggtgagtactg

SEQ ID NO: 10787 - DNA, 201 bp, Homo sapiens; identical to SEQ ID NO: 1229

SEQ ID NO: 10788 - DNA, 201 bp, Homo sapiens
tgaaggggacaaaacccctgagataaattaattttactagtattaaaattaaaatggccaagcatggtggctcatgcctgtaatcccagcactttgggagraggaggtgggcagatcacctgaggtcaggagttcgagaccagcctggccaacatagcaagaccccatccctgctaaaaatacacacacacacacacacac

SEQ ID NO: 10789 - DNA, 201 bp, Homo sapiens
ctttggagaatgactggttatgcttcagaatcataaggctcaggctggtggagcaagttggcttgtggctgagataggggcttggggttgggtgctgctgrcaaccaagacggttggtctcttctctcttcatccatgtgttgtctgggaaagtaaatcgtacgttcttttagaaattattattagctaaaacaaattgca

SEQ ID NO: 10790 - DNA, 201 bp, Homo sapiens
cacaaacggaagcggttccagctgactggcccctgagtgctagattcagaatctccgccctggcgtggcagcagccctttcctgcttggacattagtgcakgcccatcatttccacaccatggtgttttttgcacagtagtgacaagtttgcccctggagccaggagaagctccaagctctgtaatctgaagctccaagta

SEQ ID NO: 10791 - DNA, 201 bp, Homo sapiens; identical to SEQ ID NO: 1233

SEQ ID NO: 10792 - DNA, 201 bp, Homo sapiens
actttaaaaagtctgacctgacagtgagctgacttctccataaaggctaggtgactgtactgagcctaaggagcaggtggcctggcttcaggcctgaaccraccagagacctcagcattgtgcagatctgccttgcggcctttttagacatcgtgcagcttctttgttgggaagttgtatgtgacagtgctgttttttttc

SEQ ID NO: 10793 - DNA, 201 bp, Homo sapiens
ataatcatagctatgaaagaagtaagatgatggtgagatagagaataagggcatgccatctgaaatagggtggtgacagcaggcttctctgtggaggtaamatttgtccttaagcctgaaggatgagcaacaaccagccctggaaagcaccaatgaggagtactgcaggcagaggaaagagcgcttgcaaaggccctgggg

SEQ ID NO: 10794 - DNA, 201 bp, Homo sapiens
gccccagaaaggtcaaattgagtgagttaagagttgggtgccatctcccatctttctgctaatgtcgatccctccctttcctggtaacccagtcccatcamcccagactcaccttttacaacaactgggccctctaatcccacattcagccaatggccaagtttccctggtttcgccaaggactttttccttcagttcaac

SEQ ID NO: 10795 - DNA, 201 bp, Homo sapiens
taaacgtgtgtcacccgtcctctcacaggtgcagaaaacctccccccgatacaagctggcttcatttatgtgccctggaatcaggggctcagcgctgtagkggatccaggagcttgtaagccagtggctttcacacacttctgcccatgatacacaatttaaaataattttccttcacaacccgcttcacttataagcact

SEQ ID NO: 10796 - DNA, 201 bp, Homo sapiens
gtccacagggcagaaccagaagactggaagttggggggatttcagctgccgaactgtaactctgtgtcacttcccctcaagcaaaccttatagaaaaatcyagtttttctaagaagttcaagtaaggtttgttgattatttgcttcacaaaaggattcagcagaggggtcctttaactaacaagctcagagaaaaaattta

SEQ ID NO: 10797 - DNA, 201 bp, Homo sapiens
gccaaagcacagcacaaggtggaaagtaggaagtgatggatggataggtaggagatactggaattttctgtctggtgctgaagaaagttgcaactcctccrtccgcatttatttgcatggcacttcttccaaatcagacatttgcctctttccagaatgctgtcatcaataaagagactcaatgagaggccccctacagga

SEQ ID NO: 10798 - DNA, 201 bp, Homo sapiens
actggaaaagaaaaggatagaggcccttctttaaggaaggtagaaaaacatcccgggctttgcagaaaaaaataacagcaggaagaagctttctttacccttttttttttttcctgcaaatcatgattggttgagtcccccagcagtgtgtggattgataacgaaggggcagaatgacaagacagcctcaatggcaaaacc

SEQ ID NO: 10799 - DNA, 201 bp, Homo sapiens
catttttccataaaaacaaaaaattctagacctgcagactattgattgtagcaggagagtattccattttataaatatcccagatggattcaccctccctmtacggttgggctttgaaaccatttataagcaaaatatcctcccactttttatattttttcaaaatatatgcacaaagatgcatatgcatctttgcacaat

SEQ ID NO: 10800 - DNA, 201 bp, Homo sapiens
gctcccggaatggagttctgttatctctgccccacagagcaggagactgaggcacagatgggtatgttcagccgtggttgcaacttgggtaggagtagacacactgtggaagaggtgactgagaaccagccaaagcattaaccttctcctccccagacgaggagcagcaacagatggctggtgcggcagccaactgctcac

SEQ ID NO: 10801 - DNA, 201 bp, Homo sapiens
ttatccccttaaatatgcgtttgatttgaacaaactcattttgaattaagatttcaagagctgtagccatgtggtcaacagatgtgtaccaggtgcaataacacacacacacacacacacatacacacacacgctttaagctgcagctaacagaaacttggaaatccttgcaccgtttggactaggagactcagttaacca

SEQ ID NO: 10802 - DNA, 201 bp, Homo sapiens
tatccccttaaatatgcgtttgatttgaacaaactcattttgaattaagatttcaagagctgtagccatgtggtcaacagatgtgtaccaggtgcaataacacacacacacacacacacatacacacacacgctttaagctgcagctaacagaaacttggaaatccttgcaccgtttggactaggagactcagttaaccat

SEQ ID NO: 10803 - DNA, 201 bp, Homo sapiens
taagataatgtgagtttaatcgtccaatggaattgcaaactgatactaattacaagtatgtctcagtgaatcacagatacaggttggaagcaaagtctaaygattgtgtcctttggaaaaaaacaagacactgccctgtgttgggaatggtggtctcttactccagccctctattccccaggtggacctgcgctttttaac

SEQ ID NO: 10804 - DNA, 201 bp, Homo sapiens
gcttttgcaggtgagaattttaaaggtaaaaaaaaattttttttttgcatgctttttccttcccccatgtgatgtgaatttgatggggggaatcaacctcmaaatttgtcaaatctcgcaagagaaaagagacgccacaccttcctgccgctagatggcactagcaacacctgtagatgcgggaaggggattgagagcctc

SEQ ID NO: 10805 - DNA, 201 bp, Homo sapiens; identical to SEQ ID NO: 1275

SEQ ID NO: 10806 - DNA, 201 bp, Homo sapiens; identical to SEQ ID NO: 1246

SEQ ID NO: 10807 - DNA, 201 bp, Homo sapiens
gttacagataaacctttcagccttgcattgtccaacggggagcaatgaggctgaaaatgcaggggtggtgagaaaggagagactgtgggaagactgaaccaaaaaaaaaaaaaaatcagtataaattaaaagtgaaatgaggtggcaatgatttattttagcctgaagatggtttctttccagttccagggtaccaaggca

SEQ ID NO: 10808 - DNA, 201 bp, Homo sapiens
gtaagtaggttagtcttctggactgccataaaaggtctgtaaaatagttttaatcagacactggtacagaagagaaggagggagtgtggggggaagaaagytgtaacatatttgaagttctttgggttgttgatttctctttcagacccaccgtgcggaggtcgtttgaattccaaagatgctggctatatcacctctccc

SEQ ID NO: 10809 - DNA, 201 bp, Homo sapiens
gtgaatccgcagacctcctgggcaaacactgtgggaacatcgccccgcccaccatcatctcctcgggctccatgctctacatcaagttcacctccgactaygcccggcagggggcaggcttctctctgcgctacgagatcttcaagacaggtcagtgtggtcacacgtaggggccgggagatgggcgtcttagagaagaag

SEQ ID NO: 10810 - DNA, 201 bp, Homo sapiens
gaatatccattgaagccccatccatgcattaacagtttaaggataaaagagcattaatttcaacttgcttaggttggcctacagaattcagactaaagccwgttttaaatccatgagtgagaatgcgatcaggaaagagtcatagccaaaactcaaaaccagataaggttaaaaatcattcaagtcaacccatcattctgt

SEQ ID NO: 10811 - DNA, 201 bp, Homo sapiens
agccccatccatgcattaacagtttaaggataaaagagcattaatttcaacttgcttaggttggcctacagaattcagactaaagccagttttaaatccaygagtgagaatgcgatcaggaaagagtcatagccaaaactcaaaaccagataaggttaaaaatcattcaagtcaacccatcattctgtaggtgagaaaagt

SEQ ID NO: 10812 - DNA, 201 bp, Homo sapiens
ctggggtactatagatataattgtttatactcaaagatattttgttgcatctggctgaaaagtcttcaaatataccagtttccccagttctcttgtcccasccctgttggtgcccccaaacacttggcatggtctgaatatcaggagccgaaacatctagttctcctaagcaggagaagtcgctgatggttgcagagttgg

SEQ ID NO: 10813 - DNA, 201 bp, Homo sapiens
ttcatcacattaatgtaaggatgacctccaagggactcagaaaatcctcaggcaccagcttattcactagagtatttcacagagtttcacaactgtggaaytgaagctcttagagattaagtgccttgctgcagggactaggaaactggagcctgcatggacggcgcctggtcaccagacttggatgtccagactggcgct

SEQ ID NO: 10814 - DNA, 201 bp, Homo sapiens
atcaatcttttaagtggggtcttggcaagttgttttgtgcatcccttactagcgaccgagggggatgagaatgtgctttagcactttggccagaaatgagraagacttctaacatgattgaaaccatggcctccaggaaaagactgaatttcaaatgtgacagtgatggatcaatgctcagttcagatcatggtcaagtag

SEQ ID NO: 10815 - DNA, 201 bp, Homo sapiens
ctttttacttttgttttggaaatgaggaagcatgttttcaaagtcagcaccatctcccacactgaaaccacagacctaaacagattccccaacctcacggycttctcaatctgtgaccatctctccatttctccctgggggttgaaactgccattttgacttctccagactctaaggagcttcagcggttctttttggact

SEQ ID NO: 10816 - DNA, 201 bp, Homo sapiens
ctggccagtttgactctgcttcaaatgagcacaggcctccacttcaggagggcagcctgccctgcctctcactgaggctaatagttgtgtgcacgtagacrgtgggcccctggagactcacccctgcttttggagaaaggtttttatcgccttatctaacatgaggctgattccttttaagaacacatgttgactagacac

SEQ ID NO: 10817 - DNA, 201 bp, Homo sapiens
attcattcatagaaacaaaattttcttgaggagtggcatatatatagcactatctaggggtagagagaagaagcaatgttaaaccttattatttgtaagaycagcatttacaatataactggggtgataaaaaagacatgaaaaaaccagttaaattataatgccaggcagtgagtgattacctgctgaaatccatggaaa

SEQ ID NO: 10818 - DNA, 201 bp, Homo sapiens
ggcgggctgtgggcgggggggtgggggtggggtcaaaacagccattgtttgtggtattagacaaacagaaaaacacttcttgaaagaattggatttttgtrtgttttttaaaatcaaaataatcttcatgggaaaaagcaaaactctgatgactttctcacgattacttcatggtctaatgatgtctttatttggaactac

SEQ ID NO: 10819 - DNA, 201 bp, Homo sapiens
acctggagtgggggttctagctaaatgacaatcaaaggaaaaattaagggttctgctgcaaaatttcagaagtttatttttaatatgattttcccgtttcyagtggtttgtttcatttgaggtttctttgatggttcctcccttttctttttgcaaaagttttttttgtagaatttggttcctgagatacagtatacatgt

SEQ ID NO: 10820 - DNA, 201 bp, Homo sapiens
cttcactaaggatagcttgagagaaattacaggaaggctgtctactttcttggaaatatttctttagaaaaggataggagactaaatagatacttggaaargatgagaaaacttaaagtgttcatttctactccaaattgtcaggatagaaggtggctcagtggctaacccctgtgacaaaacagaaggactccagagcca

SEQ ID NO: 10821 - DNA, 201 bp, Homo sapiens
tttgggagtttcccctgagaacaaatgaagcgtctttttacttttgttttggaaatgaggaagcatgttttcaaagtcagcaccatctcccacactgaaaycacagacctaaacagattccccaacctcacggccttctcaatctgtgaccatctctccatttctccctgggggttgaaactgccattttgacttctccag

SEQ ID NO: 10822 - DNA, 201 bp, Homo sapiens
ctgcagaaaagcaaactaatgaaggaatgctaatcccaaataatcttaacttagaagaaggaagaaaatgagggagagaggaaagataaaaaaaagtgtctgtgtgtgtgtgtgtgtgtgtgtgtgtgtgtgtgtcagagaaagagagagtgagaaagaatggaaagggccataagagagggccttcttatttgaggacta

SEQ ID NO: 10823 - DNA, 201 bp, Homo sapiens
cggagagtgaacgaggggggaaatggtggaacaaataattgttttattggaaaggaaaggaataaataatatttcagcccaggaactggcagtttgaaagrgatggttgagagcttggagcagaaggattcgtgatgcaggttttaatggaagagattttctttgtctcaaagtaggaggtttcgtccccacccgaccccc

SEQ ID NO: 10824 - DNA, 201 bp, Homo sapiens
gaggaacaaatctttcacttttgtagtcattgtaagttttttctaatataaaggagacttgatgactaagcaaaaagagcaatttcatttcctgggtaaakcacaagacttagtcagaaaacttgggttgtaggcccagctctgctatttcctagcagtaagaataaagaaatcacatgcgctctccaaacttcagtttct

SEQ ID NO: 10825 - DNA, 201 bp, Homo sapiens
tgcagaaaagcaaactaatgaaggaatgctaatcccaaataatcttaacttagaagaaggaagaaaatgagggagagaggaaagataaaaaaaagtgtctgtgtgtgtgtgtgtgtgtgtgtgtgtgtgtgtgtcagagaaagagagagtgagaaagaatggaaagggccataagagagggccttcttatttgaggactaa

SEQ ID NO: 10826 - DNA, 201 bp, Homo sapiens
agtctgtggccatttttttccctctcaaaatctcaggggcaattgtcacaaaagtgaaccattttaaacctctctttctctggattttttgacattaaccrtctctgggcctgggtaatgttttcctgactagattggtacaactgcttagacttggacttcacccttccaccaaagatagtttgtggagcttctagtatg

SEQ ID NO: 10827 - DNA, 201 bp, Homo sapiens
gcagaaaagcaaactaatgaaggaatgctaatcccaaataatcttaacttagaagaaggaagaaaatgagggagagaggaaagataaaaaaaagtgtctgtgtgtgtgtgtgtgtgtgtgtgtgtgtgtgtgtcagagaaagagagagtgagaaagaatggaaagggccataagagagggccttcttatttgaggactaaa

SEQ ID NO: 10828 - DNA, 201 bp, Homo sapiens
cagaaaagcaaactaatgaaggaatgctaatcccaaataatcttaacttagaagaaggaagaaaatgagggagagaggaaagataaaaaaaagtgtctgtgtgtgtgtgtgtgtgtgtgtgtgtgtgtgtgtcagagaaagagagagtgagaaagaatggaaagggccataagagagggccttcttatttgaggactaaat

SEQ ID NO: 10829 - DNA, 201 bp, Homo sapiens
ctgtgccgggtgctccatgtgaaagagatggaaaggaaatgataccgagaaataggcaggagggaccgatttgacttagagactcttaagaaaacacagcrtttgaatcaaggctctgaaggagccttaagaaagggtcacagagcctggagaacaaggacatgaataaaccaaagacaccgaaactcagtcccaactttc

SEQ ID NO: 10830 - DNA, 201 bp, Homo sapiens
ctacctaggtagtacaataagttccctggcaagggggagggagacacttcattatgaacctccctccccatggaagctctgaacctgagccaaatttgccrccatcctggggctctgtttaccctgaaaaggaaatttgtttcggtctcttatttaagaaatgtttttgagcagttcctgattttgtaagctcttagagct

SEQ ID NO: 10831 - DNA, 201 bp, Homo sapiens
aacacatcagagggcgtgaccacattcttctactatcttctgtaaacttctctagaggagccaacctttttcgtttgtttaatctcacaaattaaataaamctttatgtgaaatgttccttcaccagcacttcatttttaacctgtacagaaaggactgtgcagacaggccagtcctaaaacaattctgacatgcaatgag

SEQ ID NO: 10832 - DNA, 201 bp, Homo sapiens
aaggataatgacatgaaacatcctaggtgagtcagtgatgtggccaggaatctcagcttcgctaattagctgttatctagtcagctcagtgtttttgatcwcaaacccgatttttgacactggcctttaggtaggcaggcttccctatgggccagggatgtggactcacaaaatactgaaaagcacggtgcctacctagct

SEQ ID NO: 10833 - DNA, 201 bp, Homo sapiens
tcgggctgtccggcggcggctgcctccgcccgtgtgtccgtcaagggtgccgcgggatgtgtgtcagtttacgcctctgagatcacacagctgcctggggsccgtgtgatgcccaaggcaagtcttggttttaattattattattatcattattgttacgcttggctttcgggaaatactcgtgatatttgtaggataaag

SEQ ID NO: 10834 - DNA, 201 bp, Homo sapiens
acataagtgcccttcgcttatccatctgaaacaccttaacttctgcaaatgaatagagagacataagtgggagcgacacagtggtccttctcatgtccttsgagtgatcttttcttgtctgtgccatccccacccaggtatgactttatcgagattcgggatggggacagtgaatccgcagacctcctgggcaaacactgt

SEQ ID NO: 10835 - DNA, 201 bp, Homo sapiens
ttaagaaaacccaaacatctgtgttaggaggtttccaggggtggagggcccaccccacccagctagaatgtcctagaatgtccgagtttctccttccctcytcctaggacattgactgttccccccaagcccgctcattgctctgatcctgtgctcctcccccgcctgctcttctccagccccacccctgagctgccctcc

SEQ ID NO: 10836 - DNA, 201 bp, Homo sapiens
tgaatttcttctaaaagataggagatccacgctcaggtttattggcgtgtgctccctgctcggctcccctccctccacttcctgttctttcggtttcagasagagaggagagccccctggcgctagccattcccgatcagcgcccactacgaacgtcccctttgctagagttaatcatgatctgcggggggactgggtttt

SEQ ID NO: 10837 - DNA, 201 bp, Homo sapiens
gtgacagaggccacaaagaaaggcatcttcttcttagtgctacagttctcttttacatacaggctctgaagattgctcaaaaaacttcacaagccccaacsggaccatcgaatctcctgggtttcctgagaagtatccacacaacttggactgcacctttaccatcctggccaaacccaagatggagatcatcctgcagtt

SEQ ID NO: 10838 - DNA, 201 bp, Homo sapiens
ttgacctggagcatgaccctttgcaggtgggagagggggactgcaagtacgattggctggacatctgggatggcattccacatggtgagtgatgtcatgargcattcctcagtagcttggcctttgcctgttaattgctttagtgatgataaagaggaagaacaaagacttcaaagctcctatgagttcttatatgaccca

SEQ ID NO: 10839 - DNA, 201 bp, Homo sapiens
aaccaatatttaaagttgcctttggaagtgtgggggttggagtgaaggggacaaaacccctgagataaattaattttactagtattaaaattaaaatggcyaagcatggtggctcatgcctgtaatcccagcactttgggagaaggaggtgggcagatcacctgaggtcaggagttcgagaccagcctggccaacatagca

SEQ ID NO: 10840 - DNA, 201 bp, Homo sapiens
gggctggtgtgggcctccccatggcttctctagggcagccccacagctggcattgagagtgagatggtagttattacaacctagatggggccaacatgggygtgtgaaaggagccccagagatgcctcattcgccttggccaactgtggcctaagaggatgagccccatattagtgtttacaggggtcctgggcccacaaa

SEQ ID NO: 10841 - DNA, 201 bp, Homo sapiens; identical to SEQ ID NO: 1342

SEQ ID NO: 10842 - DNA, 201 bp, Homo sapiens
tttaattatagttgatttgtttgccgctaatagtgaaaatgctgtcagcatgatttgagatgtttcttccactcaaaatgttatatttcatgtttttgagwcacaaggcaacattttggttttcagatacaaccagaatagctcagtaaatgtgttggggcacaaagacagagagtataaaatggatcaaactccacggaa

SEQ ID NO: 10843 - DNA, 201 bp, Homo sapiens
atcacctagttatatttcagtgtgagccccagaggacacttcctgacagtaaacacccagtttatcgagtatttctggttggttgtgttttttatgcttasagtgtctattatcctcctcaaaaatcctgcttccttttcttcttttaaaatctgaacataacgagtgaaatcaattctaattgtccagcactttcattca

SEQ ID NO: 10844 - DNA, 201 bp, Homo sapiens
actgtgtcatgcaagagtggcagcccaggctgctgcagggcacaggtcccaagaaggtttctctgccttgggttttcatgctcctgactatgatgaggtcrcaggggctgacaatctgtgtgtccagtggctcaagctgttgtgaggcccctgaatagcttgatccatattcccctgagtcttgtgcaaaattcagatcaa

SEQ ID NO: 10845 - DNA, 201 bp, Homo sapiens
ctgactatgatgaggtcacaggggctgacaatctgtgtgtccagtggctcaagctgttgtgaggcccctgaatagcttgatccatattcccctgagtcttrtgcaaaattcagatcaatgccaccagcaccagtggagcatcctctgctgccgagcagtggggagaataaaagagaaagaaataaaaggggatgcttgctc

SEQ ID NO: 10846 - DNA, 201 bp, Homo sapiens; identical to SEQ ID NO: 1276

SEQ ID NO: 10847 - DNA, 201 bp, Homo sapiens
aggctgcccctctcctcactgcgccgcctcgccagaccgcagtgcagccgctagcctgcctccctccctgccccgggcgcccccgccagtcccctgcgctycgctctgcgcggcaggctcgccgcgacccctagagagacggctttgagtggcgggaggccgaggccggctggcttgggaatccaagcgctggcccaacta

SEQ ID NO: 10848 - DNA, 201 bp, Homo sapiens
tttgatttccactgacttctctttgtcttgaatgtccagttggccccctgattggcaagtactgtgggaccaaaacaccctctgaacttcgttcatcgacrgggatcctctccctgacctttcacacggacatggcggtggccaaggatggcttctctgcgcgttactacctggtccaccaagagccactagagagtgagt

SEQ ID NO: 10849 - DNA, 201 bp, Homo sapiens
ccgtcatacccacctgctgctggaagagcaactgtccgcatgacagtcagtcttatatatgccgggcgcagtggctcacacctgtaatcccagcactttgrgaggttgtggcaggcggatcacctgaggtcaggagtttgacaccagcctggccaacatggcgaaacctggtctctactgaaaatacaaaacttagccggg

SEQ ID NO: 10850 - DNA, 201 bp, Homo sapiens
gaggtatgaggttggaaggcctaactgcatttgaccgtctgctttccccagactttcagtgcaatgttcctctgggcatggagtctggccggattgctaaygaacagatcagtgcctcatctacctactctgatgggaggtggacccctcaacaaagccggctccatggtgatgacaatggctggacccccaacttggatt

SEQ ID NO: 10851 - DNA, 201 bp, Homo sapiens; identical to SEQ ID NO: 1297

SEQ ID NO: 10852 - DNA, 201 bp, Homo sapiens; identical to SEQ ID NO: 1298

SEQ ID NO: 10853 - DNA, 201 bp, Homo sapiens; identical to SEQ ID NO: 1299

SEQ ID NO: 10854 - DNA, 201 bp, Homo sapiens
gccttgtgacccactgacaagcctgtcctagctctgaggcgacacagtgacctctgctctaagaaggatattgcaaagcagacaacaggaaagggagaaasaccacttagaaactccagggagtccacagaggttctaacagtaagccctggggccatttgtcattgtctcttctctctgcctctccaaaaatccatctcc

SEQ ID NO: 10855 - DNA, 201 bp, Homo sapiens
tgatactatagttcaggagttaccgagctctggaaatgaaagggcacaaatcctgagagggaatcacaatgtcctggagaagaaaaaggacaataaataaygaggagaaattcagtttgttggggatgggctctgaactggcaatcatgcttagcggcgaggcattgaattctctctgctggtgcctcccgcatctgcggc

SEQ ID NO: 10856 - DNA, 201 bp, Homo sapiens; identical to SEQ ID NO: 1258

SEQ ID NO: 10857 - DNA, 201 bp, Homo sapiens
tgtgtgggtaggattggggtatctgtgatgggaacacagggcacgatgccccctgcagagcaggagctggtgcagaggtctggaaggagagtgtgatgtcygggggattcctaggggctgcctgtccttccctaaaaaggaggtagggagggaggaagagggtctctcctgtagcattacagttccaccaagccctggtct

SEQ ID NO: 10858 - DNA, 201 bp, Homo sapiens
cagaagtgtgaccctgggtggtgttaccattatttattgagtgctgccccctagaggattgaaaaatggtctggccgcttgagtccccagggatggaaacstgagactcactctctgtccaactgcaggaaatgaggccttcactcaaggggagtgggaagtcttgcagccctggtacagaggactcccaggaagtaagtg

SEQ ID NO: 10859 - DNA, 201 bp, Homo sapiens
tcattataccctgtggtttgggagggcttttcagagcaagctcacaaagtgggcagaattccaacctttggctgaatggatggggacagagagaaaattasggccataaggaactgctaaatctaatgttgttcctcccttaagatattgaaagggaaagtaattattttcctattccagaggaatcccgaagtttgggaa

SEQ ID NO: 10860 - DNA, 201 bp, Homo sapiens
ggagcagcttggctaaaagaaagccaatagtcaaggaataatttcaactggaaaagaaaaggatagaggcccttctttaaggaaggtagaaaaacatcccrggctttgcagaaaaaaataacagcaggaagaagctttctttacccttttttttttttcctgcaaatcatgattggttgagtcccccagcagtgtgtggat

SEQ ID NO: 10861 - DNA, 201 bp, Homo sapiens
gtgggtattctagtgttaatgtgtgtgtgcatgagtgtgtttgtggtttctgtgcatgggtgtgtgtgtgtgtctgtgtggtatgtacctcagcagaggckcttggaataaaaggatatagccggggtcctctgcaggctggggaggttggctggctcttattcagtgtctgtcctcaggttcattctaatgattctggcc

SEQ ID NO: 10862 - DNA, 201 bp, Homo sapiens
tggaagaactcagaggcctctgtgctgtgcctttcccaaccaggcatctgagattaacagtgtgatactcagcctgtggatttccactctaaaatcccgcsccaccccccaacacagcttggctcaactatttgcaaatcacttctgattcaattttgttttggttatctcagtgtaaataacagttaagtgggagttaca

SEQ ID NO: 10863 - DNA, 201 bp, Homo sapiens
acccatgggtatctagcagagctgcctggcacttggcctctagaagagtattgctgtaagtcctggatacattgttaagcccaccattttagtttcagaargccagatttcagaagcttctcctggcactgctgacaagaaggggttgcctctatcccttctaaacaggtagcaagagttgtctgctatctctgctgttac

SEQ ID NO: 10864 - DNA, 201 bp, Homo sapiens
ctattccggagggaactgttcaccctgccgagtaaaggggcactgccagcacaccaggggccccagacgctgtgctctgattgcccttcagtgaccacccrtgcaggcagccccaccgggcacaaaggcatgattcctgttcccttttgtcaaatgaggccaactgaggcacacaagcatgattgatccaggccagcgtag

SEQ ID NO: 10865 - DNA, 201 bp, Homo sapiens
gtagccgttgggggaggctcccgccgggggaacccggcgaggacaagagcagggcggccgccttccactcgggctgtccggcggcggctgcctccgcccgygtgtccgtcaagggtgccgcgggatgtgtgtcagtttacgcctctgagatcacacagctgcctgggggccgtgtgatgcccaaggcaagtcttggtttta

SEQ ID NO: 10866 - DNA, 201 bp, Homo sapiens
agaaacctctgcataagacgttgtaaggaggaaaataaaagagagaaaaacacaaagatttaaacaagaaacctacgaacccagctctggaaagagccacyttctccaaaatggatatgtttcctctcacctgggttttcttagccctctacttttcaagacaccaagtgagaggccaaccaggtaagccactgaaagttt

SEQ ID NO: 10867 - DNA, 201 bp, Homo sapiens
atgagaggccccctacaggagctgcggataaaggcatcgctgcaggctcagatcagtgtattgacatcacctagttatatttcagtgtgagccccagaggrcacttcctgacagtaaacacccagtttatcgagtatttctggttggttgtgttttttatgcttagagtgtctattatcctcctcaaaaatcctgcttcct

SEQ ID NO: 10868 - DNA, 201 bp, Homo sapiens
tgaaaaagtgaaagtgctttttgatgtgcaggaaaaatattagccattgttcttgaaacatatctttggtttttatggcaagatgtacaaagtgtgctccrctgaatgaaatgcaatgaggggaagggaaaacggagtgaaaaccaagtttgacattttgatttccactgacttctctttgtcttgaatgtccagttggcc

SEQ ID NO: 10869 - DNA, 201 bp, Homo sapiens
agggctttacctcaaggttcaagtaaataaaaaagtagccccccgcccccaccataccagctcttttgacggtccaagtaatcagtagccactgtataccyagaacatcttctgtgtctgacagtggtgggccataaatcgggagattccagaagaacaaacttcagttgcagcacgtgtttgatctcaatatctatgtgt

SEQ ID NO: 10870 - DNA, 201 bp, Homo sapiens
cttggattccaacaaggagtatctccaggtacttgtgcagataccagaggatgtgagagtgtgtatgtattgctggggtaggagggtagctcctcaaatayagtaggcagaggacacaaagaaaataaacacagcatacctgagaactccattcattcattcatccaaacagatgtgtatgccaggcactgggttacatgc

SEQ ID NO: 10871 - DNA, 201 bp, Homo sapiens
gcttctctgcgcgttactacctggtccaccaagagccactagagagtgagttggccgattgggaacctctgtcctgtccttccgtcagggctgtgagggtrtacaggtgaaggggggctgagctcttatgagggaggagatgggaactctacggaatttatggtggcatctgagtttagaggtgcccacatcctcttgcca

SEQ ID NO: 10872 - DNA, 201 bp, Homo sapiens
atttttaagcttgagggaaagaaaatttgacagaactttcccatccccttcaaagactgctcaagtggctgaactacaaacaggggtttcaataacatggytttgcatcttacgctacaggtatttcaagccaacaacgatgcaactgaggtggttctgaacaagctccacgctccactgctgacaaggtttgttagaatc

SEQ ID NO: 10873 - DNA, 201 bp, Homo sapiens
gtgtgatgtctgggggattcctaggggctgcctgtccttccctaaaaaggaggtagggagggaggaagagggtctctcctgtagcattacagttccaccargccctggtctgtcagagtgtgaattatcaaaatggggcacatgtggccaagcctagggaggccaaagatcttttccaaagggaatctcctcagcccctgt

SEQ ID NO: 10874 - DNA, 201 bp, Homo sapiens
tctgtaaaaccccttcccatcattcattcagagctgacctctttctctcactgtgctgatctgcaacagctggggaagggatgggtgttggagatcgggarggcagaggtctgactctcacatagatatatgcaaggtggaagatttgtggcaaagctaggtgatcgctttgaattccttgatgagcctgatacgaatgaa

SEQ ID NO: 10875 - DNA, 201 bp, Homo sapiens
aagtagttgagtgaaccgtgccaaatagatttgtcaagtctgccgcagtttgatttgatgccatggggggaggtgggggttggggagggacttgggggcastggaggaagaggcttcgtccatgccgagtgccaccactgagtttctctttgtagctgctggatggtgggcactgtgccaagctaactggtgctaagtggt

SEQ ID NO: 10876 - DNA, 201 bp, Homo sapiens
tcaaatcctgaaaccctaatcctgttagtatgctgtgttccaggcctcagcgtctcgatgggggtaacataatcccgcagtaaatctagcgggccccgcargcccacacagatggggatgcgcacatccccgccccccagaacgcagccgcccctgtgcctctgtctcctccttcatgtaggaaagctgcctgatgacaaa

SEQ ID NO: 10877 - DNA, 201 bp, Homo sapiens
cataggtaatgaagagatgggagtgtgcaagctgagtgctgaagcgctactcacatgagaggtggtgcacgtgaagagagactgtttttgtaccccaaagrgcccgcctcatttgggaagggtgaaacagccagccgtgtctctcctccaaggagctcaaagacttggacagaatcttcatcttaggccccagaggcaggc

SEQ ID NO: 10878 - DNA, 201 bp, Homo sapiens
taggaaggctgcaaagctcactgtcctcagctatgtcagtcactgcatattcttcaaagacaacttaaggaggggtcagcaaagaagaggtgactgtgacyagaaatggggtgggaagcagagaaaatgttctgagatggcctcagaaaccatcagtaatgcgttctggctggatgcttcttattagattttatatatata

SEQ ID NO: 10879 - DNA, 201 bp, Homo sapiens
tgagaggtcaaggcaggtgtatcacttgaggtcaggagttcaagaccagcctggccaacgtggtgaaaccctgtctctactaaaaatataaaaattagccrggcttggtggcgcatacctgtaatcccagctactagggaggctgaggcaggagaattgcttgaaaccgggaggcagaggttgcagtgagccaagattgtg

SEQ ID NO: 10880 - DNA, 201 bp, Homo sapiens
cctttcttaaaagatagagcaaaagaagaatatctttttaatttcttgaactgacaagaaaggacttgaaaagtgtcatctgggcaatggcttgtagtgtyattaacatatttgaggtattttattatctgaccatcacttgcaactggataatctttgagataccttccttgagtggcagataagtatattgatcaccag

SEQ ID NO: 10881 - DNA, 201 bp, Homo sapiens
ctctttaaatccatattcccgtccatccagttttgtgcaaacatgagccagagtgtgctttggtccttccttggagtcagcgtcgcctgtagccccctccrttattgtctcgtggccttttgtgctaaactcggggcctctgctgtggagtaaagaatgtgggtttgtgtccctacctctgtcactgctggttctgcaacc

SEQ ID NO: 10882 - DNA, 201 bp, Homo sapiens
ctggtgatctatgtcctcacacctctgccttctcagaggaccactccaccctatttcatgtgcataagccaggaccaacgggcctcaatttggctggctaratgacattaggttcccagcatgggtgagtggtgtgggcacctggaaagcctatgggtattggctgcagaggagctgggcctcatggctggcctcatgtgg

SEQ ID NO: 10883 - DNA, 201 bp, Homo sapiens
atcttccaagacatgtttcagatagtttgagagccaaaagtggaatgcatagggagttaacatacgatattggatttacagagttagcttgttgggggacmtggagtgggggttctagctaaatgacaatcaaaggaaaaattaagggttctgctgcaaaatttcagaagtttatttttaatatgattttcccgtttctag

SEQ ID NO: 10884 - DNA, 201 bp, Homo sapiens
ctgctcgtctggagattctgcagactagtggattagctcagatgtcagcactgaattatgatccttcagctgcttgtgctaagcatgtcactagcattaastccctggtcttgcaatgttcccctaaatcatgcatagagattgtcattttatcgtgagagggagatgggagagaaggagaaaggagagaagaggggaagg

SEQ ID NO: 10885 - DNA, 201 bp, Homo sapiens
cctatgattctcatacagggtgggcccgccttatgtatatttatggcataaccacaaggcagagagctcatctgcctgatggaatccatatccaacccacrtgctcctttagattatacaaattgctttgcatacatttcttcagaaaccacaagcagaaattactgcttttggtttccccagctatattaataacaccct

SEQ ID NO: 10886 - DNA, 201 bp, Homo sapiens
tcaagtccctcagtttatctgaccctctcaattataatggagaaggatccagtgccctaggtaattaagtttgtcccttatccatttgccatgggatgagstcagacctttagcctctccacttaggaagctcaggggaaaatttcattatacagaagcttgaaccttttctctatcaggctcccgcggccagcgtcaccc

SEQ ID NO: 10887 - DNA, 201 bp, Homo sapiens
tttgcagctctttctttgccataagtggtcttcagggcagctgcaaatcctgccaaagggatgggtgggggtcccacttggggagattttctgggcctccsccgttcccccttgccttatttctaaattcccagcttgaagcggaattaaattaccactcacagacctggatgctgcgtaaattatgtatgtttgtgtgat

SEQ ID NO: 10888 - DNA, 201 bp, Homo sapiens
cacagaagcattgagaaagtcataaagatgtataatatatgatagcatttactagctataaataggggagatgcagggagaaaaatagagaccttgtaaamccattgggtcaggataaatagaaactgcttaatatttcattaaaaatggattttcataaattgcactttgatatctttgggcaaaagacaatatgtaagg

SEQ ID NO: 10889 - DNA, 201 bp, Homo sapiens
gggcctggttcagccgccgccgccggcgacgagaaccaattctgggaaggagcaagatggggcagaaggtgcgcgcgggggagcaactgagcaaataacamggcggtcgcggcgcgcggcaccttgggctggcgcgtggctgggaggccgcatgggcgacgcgcaccaggctgcccctctcctcactgcgccgcctcgcca

SEQ ID NO: 10890 - DNA, 201 bp, Homo sapiens
aattcacccttccgtctggactggatgatcagataagaggtgtaaattggctgtgggagacaggtctgggttcagacaaatcctgaaagagaagcaatgayggtctaggcgccggataagggtttgaagtgtttcttttagcctgtctccccaaaatgtgagatggccattggcgagcataataatttgcaagtaaactgt

SEQ ID NO: 10891 - DNA, 201 bp, Homo sapiens
tgaggagagacaccagggaccagatgattctggggaccctggtgtttttcatttcactcaagtcttccctaaagcaatcaggaaaatgaactgactcaggrtgacctgagtgtaagacaattctgagttgacagaattcaagagccaggtaaagaggtttccaaatatattctccaaaggtccagtttggaaagactttag

SEQ ID NO: 10892 - DNA, 201 bp, Homo sapiens
gaccttggttgtattaataaggagaaattaatttttaaccactgggaacattgccaaattatgtgacctttggcagaccagctgtgctataaaaataaatyccccatttctgaaaatgctactcctatccagtagaacaataacaatgtggcatttaggatagagaagagtaggattgagaagaaaggagagaaataggag

SEQ ID NO: 10893 - DNA, 201 bp, Homo sapiens
ttcagtgtgaggggaactattcatatatattttctttttcactaaacagctcttgaaaggaagtggtagctgctgaaagcactttttatatccactctgtstaaatatttgtcggatttgtctgcccgagaacaagaacgtggaatcaaatgaaggggtggggcaaggggactgtgtcatgcaagagtggcagcccaggct

SEQ ID NO: 10894 - DNA, 201 bp, Homo sapiens
cttgaatcatgcctcaccgtgtacctactctgtctctcgatgatgcagagagaagggacactgaccaaaataaggtgactttttggcctgagactgatctycatatgaaaatgaccagagttttgtgaagttgggttgtatttgtttttaagcagtagctactgtgcccacttgattactcaagctctgtaaaaccccttc

SEQ ID NO: 10895 - DNA, 201 bp, Homo sapiens
tcacagggtaggaccactaatgcatgaaggagcccgcagcacttcccacccatggctcccctgctggggcaccccatgagtagagaggatgcatctttccrgcttaatgcaaacagctagggaggcatttttcataggagaagcatatatcatttttcagaagtaaagatcatgtctggttttggcaagctcaaaagctcc

SEQ ID NO: 10896 - DNA, 201 bp, Homo sapiens
atatatgtcctctgtgacatccagcttctaaagcagatgttaacattcctatctgagtataacatacaaggcaacccaccgatttttctcagatacctcaytgcaaagttgtcatctgaaaattgttggcctgaaggtgggacttgggagtagtcgtggcttttggaacttaaactctcccacctgtgcaaagacccactt

SEQ ID NO: 10897 - DNA, 201 bp, Homo sapiens
ctaggcagttccagtccaaagcccttgctttcaaataacactctctgctgcctcaaccgggggccaagagctgtgcatggtgctgtggacacaaaggtggrcacaacagactgttctgtgtgggcatatggacaagttgggcagacatactgataaactcataaataaatataaaatcaaaactatgatcaatgtctggac

SEQ ID NO: 10898 - DNA, 201 bp, Homo sapiens; identical to SEQ ID NO: 1291

SEQ ID NO: 10899 - DNA, 201 bp, Homo sapiens
ccctgcctggccattccttggaagatcagagttgaggagcgttcccctctgcccagcctcctttcctttgaagtctctgacatctggtttcaatttcaggrgtagcgttgctgtttgatgggcagttaccttggagcacccagtacaaacatagtacaaacagtataaacaccgaggcctccgtgcccgccgttcctccac

SEQ ID NO: 10900 - DNA, 201 bp, Homo sapiens
gggtctgagcctctttaaatccatattcccgtccatccagttttgtgcaaacatgagccagagtgtgctttggtccttccttggagtcagcgtcgcctgtrgccccctccattattgtctcgtggccttttgtgctaaactcggggcctctgctgtggagtaaagaatgtgggtttgtgtccctacctctgtcactgctgg

SEQ ID NO: 10901 - DNA, 201 bp, Homo sapiens
tacttctggcctggacctgagacctccataagcactggagaggagaggggtgaattccggaaatttagtagatcagtttgccagggtacaataggaaaagkctagaaaataaaagagggaaagggaccttcccttctgcaggcttccttagaactgcttctcaccccaagcactggcgtgtcccttcttcccggtgggggc

SEQ ID NO: 10902 - DNA, 201 bp, Homo sapiens; identical to SEQ ID NO: 1343

SEQ ID NO: 10903 - DNA, 201 bp, Homo sapiens
ccctgatgagataggcaaacagaagtaatgaaatttaagaaaggaggtgtctctgtcaagtgtgaggggcgtcagggtgaagagaaaggtggatgggagasgagctagccgtgttgaagtacccaacacgggccctatgtggaaactgcttacattcctcggatattttctgatttcattattttctcatattttctttct

SEQ ID NO: 10904 - DNA, 201 bp, Homo sapiens
ttagatggtgtaggaactattgcgattaatcaaaaagagcattgtaagtaaatattaatactaagtaaggtcaataatcatcatcattgtgattgttgtgycatttttattgtcaggaatgagacaaagaagatgaggtaaagggtactaggccaggtcagcttcagaatcctccagtgtgtgttccccctaaatctgtgc

SEQ ID NO: 10905 - DNA, 201 bp, Homo sapiens
tatctcctcaaaaagccctgccaagatgcctgacatactcattagcactcgctgtttgggaaaagtacccaatgcaaatactatgatgatggaatatccaytgaagccccatccatgcattaacagtttaaggataaaagagcattaatttcaacttgcttaggttggcctacagaattcagactaaagccagttttaaat

SEQ ID NO: 10906 - DNA, 201 bp, Homo sapiens
tcaaggttcaagtaaataaaaaagtagccccccgcccccaccataccagctcttttgacggtccaagtaatcagtagccactgtatacctagaacatcttstgtgtctgacagtggtgggccataaatcgggagattccagaagaacaaacttcagttgcagcacgtgtttgatctcaatatctatgtgtgggtgccatga

SEQ ID NO: 10907 - DNA, 201 bp, Homo sapiens
agcctccttggcatccccagaacatcagctagtggatcctagccttgcatctggtactgtcacccttccttctcctcacgccccccaccagcacacacacsactttaagcttgggcatttatttgaggggggaagaaaattcaggaatgcctttgccacccagatccgcacgtttgcagctctttctttgccataagtggt

SEQ ID NO: 10908 - DNA, 201 bp, Homo sapiens
ccaccataccagctcttttgacggtccaagtaatcagtagccactgtatacctagaacatcttctgtgtctgacagtggtgggccataaatcgggagattmcagaagaacaaacttcagttgcagcacgtgtttgatctcaatatctatgtgtgggtgccatgacttaaaagagctgaagcatttataatagcttggaaga

SEQ ID NO: 10909 - DNA, 201 bp, Homo sapiens
taaatgggtacccagtaaacatttcccccgtgatcagctcctggaggtagggaagctgtggccagttgccagcagagcacacagtgcaagacagtggcaaraggagcactccccaaagggccccgggcaggcccctactcgtccaagcggtgcctggtggaattgtgaatgcgccagtgcacatcaggtttggagttttat

SEQ ID NO: 10910 - DNA, 201 bp, Homo sapiens
ggtttcaggcttaccaagcagatagaacaggggtagcaccttgagtaaatgtcttattgtctaggagggtagagaatcttttgaattcttggctcaatctrtgggttataagatctattccccacctcactacatgggctttggattttagcactggaactgacctttagaatcacccctctcattctatagatgagaaaa

SEQ ID NO: 10911 - DNA, 201 bp, Homo sapiens; identical to SEQ ID NO: 1340

SEQ ID NO: 10912 - DNA, 201 bp, Homo sapiens
aacagggggctggagggagatgggaaaataaacaaatgtctctgaaacatcccccgtgtgcctggcacagtgcctagccccttacatatatattttttttyattctatcttctccccagccttgtggagtggatatttttatcctcatcttacagatgaagaaattgatgctcaaaggggttcagcagcttgcaatgtcac

SEQ ID NO: 10913 - DNA, 201 bp, Homo sapiens
aaccttttcaaaattcctcttggccccctgaagacccgccagctggcttggctttgctgaattgcctcatcccgggccattgaggaggccctcaggagtcygaagcccaatcataaacaaagctgggggaggcagccccagctcatccctccaggactagctgcccattgaaaactcggcctgacctgctgctgccatgca

SEQ ID NO: 10914 - DNA, 201 bp, Homo sapiens
ctgatactaattacaagtatgtctcagtgaatcacagatacaggttggaagcaaagtctaatgattgtgtcctttggaaaaaaacaagacactgccctgtrttgggaatggtggtctcttactccagccctctattccccaggtggacctgcgctttttaaccatgctcacggccatcgcaacacagggagcgatttccag

SEQ ID NO: 10915 - DNA, 201 bp, Homo sapiens
aggaaattggggcccgagggaggtagagatatttgcccacacttatgagctaattagccgcagagcacagctcctggcttctgattcagtagtgttttgtrtgtgtgtgttgtttttcccactataccacactcagagtgagaggtgtgttaaaaaatctaataagatggtgttccttcaccatccaaagaacagaaggca

SEQ ID NO: 10916 - DNA, 201 bp, Homo sapiens
tgcaatgttcccctaaatcatgcatagagattgtcattttatcgtgagagggagatgggagagaaggagaaaggagagaagaggggaaggggctacctggyggggtgggtcactggaaggggcagactgtgaaacctttggcctggctgtgcctggagtttcagtaacaggaagggtaagtagaacagacccagatacaat

SEQ ID NO: 10917 - DNA, 201 bp, Homo sapiens
tgtatccatgggaagactgaccccctccctcagctcatacatgcgagtgcgtgcagcccatgcccatgtgagccacactcatgcacacaccgccatcccamagacagtccaaatacacaatcatttactcattgaggaaagaaaaggtctcttagcgttgcctgccaaggctgagaaatgcaggggtcggataagataaaa

SEQ ID NO: 10918 - DNA, 201 bp, Homo sapiens
ccacattccatgctgcatatgtggtagaaaagtggccctgccatcttgcagaagtattcagcctaagacgcccctatgtttcagggccaaaaagaggtacygagatttcctcaccaaatgccaccttgttctctgtacaagtggccagaatggtcctgcacaagttggatttgaaggtgcaggtcacacctgtgttctgca

SEQ ID NO: 10919 - DNA, 201 bp, Homo sapiens
gcccatgcccatgtgagccacactcatgcacacaccgccatcccaaagacagtccaaatacacaatcatttactcattgaggaaagaaaaggtctcttagygttgcctgccaaggctgagaaatgcaggggtcggataagataaaattggatattaacaacacataagacatgctgtgtttctaaacggtaccagcgtggt

SEQ ID NO: 10920 - DNA, 201 bp, Homo sapiens
cagcctaagacgcccctatgtttcagggccaaaaagaggtaccgagatttcctcaccaaatgccaccttgttctctgtacaagtggccagaatggtcctgyacaagttggatttgaaggtgcaggtcacacctgtgttctgcaaggcacgtagtctgccaacagcaacaagaactcggtcttccacatgagtgtctgatga

SEQ ID NO: 10921 - DNA, 201 bp, Homo sapiens
ggggagggaagcgcagtagctgtggccgcagaataatttctgatagaactctcagagtctgtcctatctagtgatacctttgatgttcctttggtcacttmttaattggttaattcaccaaatcttgatgagtctgacttttgggaaaggttctggtttgatcctgtaagacttgccaaagatggatcagcaaggagtcat

SEQ ID NO: 10922 - DNA, 201 bp, Homo sapiens
gggaaggtgtgagtagagaaatggatgctgggttggtttggggaacactcagaagctgcagtttagaatgtatggtgggaaataattgcaaacaagattakaaataatagcttgggctcaattcaaggcccaaattgctaggcaaagaggtttgggtttcacttgctaaccaatggggagccattaatgtttcaacataag

SEQ ID NO: 10923 - DNA, 201 bp, Homo sapiens; identical to SEQ ID NO: 1279

SEQ ID NO: 10924 - DNA, 201 bp, Homo sapiens
accaacgggcctcaatttggctggctagatgacattaggttcccagcatgggtgagtggtgtgggcacctggaaagcctatgggtattggctgcagaggarctgggcctcatggctggcctcatgtggtctgggtgggagggatgagctcattgtcttcatgggctggggtgggtgcagggtcattaggtaagaagatgat

SEQ ID NO: 10925 - DNA, 201 bp, Homo sapiens
aggcatctgagattaacagtgtgatactcagcctgtggatttccactctaaaatcccgccccaccccccaacacagcttggctcaactatttgcaaatcayttctgattcaattttgttttggttatctcagtgtaaataacagttaagtgggagttacagatttttcaaacactaaaagtgataaagctaatgggcaagt

SEQ ID NO: 10926 - DNA, 201 bp, Homo sapiens
ttttcaaacactaaaagtgataaagctaatgggcaagtccagataaggagggaaaccacccagaagaatccacaagtacaagccaagaagaaaatgggtartcaggtgtgtgtttctcgtcaccgaaactgtatttttcttaatctacagaaaattttactttcttaatttaaaaaaaatcttaatctgtaaatatttttc

SEQ ID NO: 10927 - DNA, 201 bp, Homo sapiens
gccactgtatacctagaacatcttctgtgtctgacagtggtgggccataaatcgggagattccagaagaacaaacttcagttgcagcacgtgtttgatctsaatatctatgtgtgggtgccatgacttaaaagagctgaagcatttataatagcttggaagaagggtcagtggaaaaccaacactgccctagaaagtagac

SEQ ID NO: 10928 - DNA, 201 bp, Homo sapiens
cactgtatacctagaacatcttctgtgtctgacagtggtgggccataaatcgggagattccagaagaacaaacttcagttgcagcacgtgtttgatctcawtatctatgtgtgggtgccatgacttaaaagagctgaagcatttataatagcttggaagaagggtcagtggaaaaccaacactgccctagaaagtagacat

SEQ ID NO: 10929 - DNA, 201 bp, Homo sapiens
tgtgtctgacagtggtgggccataaatcgggagattccagaagaacaaacttcagttgcagcacgtgtttgatctcaatatctatgtgtgggtgccatgasttaaaagagctgaagcatttataatagcttggaagaagggtcagtggaaaaccaacactgccctagaaagtagacatttgaaccatgccctaggaagtag

SEQ ID NO: 10930 - DNA, 201 bp, Homo sapiens
cagctcagcatctctctgactgatgtctactgctaattccttaaatttacatatcatctttcttccctggagctcatagcacttaacagacaagtggggcwcaaatgatttaacgaagtgaaatccagaggcctgctcgtctggagattctgcagactagtggattagctcagatgtcagcactgaattatgatccttcag

SEQ ID NO: 10931 - DNA, 201 bp, Homo sapiens
acagggggctggagggagatgggaaaataaacaaatgtctctgaaacatcccccgtgtgcctggcacagtgcctagccccttacatatatattttttttcmttctatcttctccccagccttgtggagtggatatttttatcctcatcttacagatgaagaaattgatgctcaaaggggttcagcagcttgcaatgtcaca

SEQ ID NO: 10932 - DNA, 201 bp, Homo sapiens
agtaagtcctatctcacaaggatatagaaaggatgacatgaaatattgcatgtaaatgtgcttgtaacctgtaaagcattatgcaagaatgagctttaatyattatcattaacagcagtaatagtaagatctgataggggaagcataggtttagaagatctttgagggtctgatttggcatcagtgtatcctccctcagca

SEQ ID NO: 10933 - DNA, 201 bp, Homo sapiens
ccctgtcactgccccgaggcagcttgctctgactggtgcagctggaaacctcagacccagaaaattctgaactgtgatgttggcagtctcacttgggaaaygggaaaaggagtagatttttaaaaaatcaaaatcaccatagtaacggggtaccactcatctgaaaaccatggcttctggatattaccaggtatctcacac

SEQ ID NO: 10934 - DNA, 201 bp, Homo sapiens
cacattcttctactatcttctgtaaacttctctagaggagccaacctttttcgtttgtttaatctcacaaattaaataaacctttatgtgaaatgttcctycaccagcacttcatttttaacctgtacagaaaggactgtgcagacaggccagtcctaaaacaattctgacatgcaatgagccttttttgaaagagaaaga

SEQ ID NO: 10935 - DNA, 201 bp, Homo sapiens
actggaagaagcaatagggcttctttaggttctttttccaaggattccagggaggtctgaatgaattttgcacattttgctgctgctttttaaattttgtytcataagggcccctcctaccagatccagtgtttgtgtctgaggaagaaatgagatatacacccagtatggagtgaaggagatttcaatactttatggaaa

SEQ ID NO: 10936 - DNA, 201 bp, Homo sapiens
gggtaccactcatctgaaaaccatggcttctggatattaccaggtatctcacacacatgcacacaattgcccgatttccacgataaggaaagtgaggtacktagcaattgaaagatgtgccaggccaggtctggtttcccactgacttggtttcagaaagacttaccaagcatccgttgggaatgcccagcctgaattggc

SEQ ID NO: 10937 - DNA, 201 bp, Homo sapiens
aagtctagccagcttaattaatacattgttgctgagaatgctggccagccagaccaaatatggtgtttccaccactcaggaaatctgcctcactgaatccyggaagtcatgtcagcatcatttacttgtatgtatttgtgtatgtgtatgtgtgtgtgtgagagagagagggagatggagggagaaagaattagaacactt

SEQ ID NO: 10938 - DNA, 201 bp, Homo sapiens
aatgcccagcctgaattggcactgggtgccaggagcttgggggctgagacctggttccaccccacccttttcaattataaaccggtagatctcggaagctyagctagcagacgagggccagaagccaggcaggggtggtccccggggagaggagtggggctcacctgattgtctccctgtccaggcgcaatgactaagcag

SEQ ID NO: 10939 - DNA, 201 bp, Homo sapiens
tgtatgtgtatgtgtgtgtgtgagagagagagggagatggagggagaaagaattagaacacttccatatattataaagtgattgtggttgaacagaaagaraagagatgtgtaattctaccattcttggttgaatcccatacttactatttaactagctgtataaccacttaacttaacctctctccacctctgtttcctc

SEQ ID NO: 10940 - DNA, 201 bp, Homo sapiens
ttccaccccacccttttcaattataaaccggtagatctcggaagctcagctagcagacgagggccagaagccaggcaggggtggtccccggggagaggagyggggctcacctgattgtctccctgtccaggcgcaatgactaagcagcacaggcccagagggatactgtagcataagctgttttaaaagcatgcagatgga

SEQ ID NO: 10941 - DNA, 201 bp, Homo sapiens
ctatctctctttctctacagtgggtgtgttgcttgcaagagaagaccttgggcacttttagctgaagataattttaaactcagggagtgtttcttcagaaygttcttttttttaactgccaacttacggggaatatggacctggctctaagtgtcagctccccagagctgtggtggctgtgtcactggagttaattctgtc

SEQ ID NO: 10942 - DNA, 201 bp, Homo sapiens
tctgtgtgtgtgtgtgtgtgtgtgtgtgtgtgtgtgtcagagaaagagagagtgagaaagaatggaaagggccataagagagggccttcttatttgaggamtaaatcattctcagtaggaatttccaggcagcaggttggagtgtcttgggggtgtttcccctgagcagcatgtgtggtcttacactaccaggcagtgttc

SEQ ID NO: 10943 - DNA, 201 bp, Homo sapiens
cctagatgcagacatggcattgttaatacaacagtagaaggttcatgtatgtttacataattataggcacaattatgtacatacataccaagaagggcgcrtggagagcaatgggaagagctcagaggcacaaggtcttggtctagttcctgccctcctgagatgctgattccatgattctgcactggggataggctgtgc

SEQ ID NO: 10944 - DNA, 201 bp, Homo sapiens
actggagcctgcatggacggcgcctggtcaccagacttggatgtccagactggcgctctccacaatccgccctaggccttactcttcatcttgagggaaaktggcttcctacatgttcagtccaaggactgagaggtacacattttcctggaaagcctcctcttcagtgaagttctgcatgcaggatgagcctgtacatgg

SEQ ID NO: 10945 - DNA, 201 bp, Homo sapiens
ccagctcccgtgggtgctgaactgtctccagtagctgaggcgcgcctccctggcgctgatagccttgatgttaaactccaaggccccggctgtgcacagargccagtgacaaggagcacacagaggggatgtggaagggcgctgtgattctgcttgggctgtggaatcatgttccttgccccaaccccaactaatgtagat

SEQ ID NO: 10946 - DNA, 201 bp, Homo sapiens
tgatggttttcaggttctgggctactgaaaacaaatcagaggtctcaagaatcaattgaaaaatgctggattatattcagaattcagagaggcacccaatrgattatccagaccactttgtgccctgaatcgctttttaaacttggtttgcagagatgcacttgaagaaatctttatgttcaacttagctctttttaaata

SEQ ID NO: 10947 - DNA, 201 bp, Homo sapiens
gaagctaagttgaaaagatccttcatttgattcaagggtgggagaagagtgggcaaaatgaaagggcagactgaagttcaattgaagcagtcaggtagatrgcctaggggacacaaactgtgtgcttgcctcccttcctgagtggtgctactgtaagcagagattagggggttcacccagagcctgtggccacatgtatcc

SEQ ID NO: 10948 - DNA, 201 bp, Homo sapiens
cagaaagcctctgcctcatgctgaattctcagagaactgatgaatctcttttctttggatccagttccccatccctttcctgagagctgtggagccctttwtcagtacgaaggaagtagggtcagtcaccactccccttgggccttctccagggtgtctggccctaaccttctttccttccctttgcttggcttttctcct

SEQ ID NO: 10949 - DNA, 201 bp, Homo sapiens
tggtctgggtgggagggatgagctcattgtcttcatgggctggggtgggtgcagggtcattaggtaagaagatgatgtgctgtgtaccagcctgaggaaayggctgcttttgttttccacccagtaggaaatggacctgaattcattccattctgggcagttcaatacggcacagtttgagctcgtggaggcttgatgccg

SEQ ID NO: 10950 - DNA, 201 bp, Homo sapiens
catccctttcctgagagctgtggagccctttatcagtacgaaggaagtagggtcagtcaccactccccttgggccttctccagggtgtctggccctaaccytctttccttccctttgcttggcttttctccttccctcgctaacttggtcttctcactccttctcatccacaatcgctatacaggaagcagcaaaatcaaa

SEQ ID NO: 10951 - DNA, 201 bp, Homo sapiens
gcgtgcctatgaagaggtgcagcatgatacactaaatggacatcccagtaaaggcagctgctgttgggcataagatgccattgaaggtgccttaaatgaawcctgtgttcctaatgaatgccagtcattaaaaaggcacagtggcaggggttgcttggcactgaagacccagagtttcttcttagttctgtgttactggtt

SEQ ID NO: 10952 - DNA, 201 bp, Homo sapiens
tggagcctttgaaggtggctcccttccctcccaggccacatgaagctgtctgcctccagccaggcactgcaggtacagggagccagcccttcctgcaaacrgccagttatggctggacaaagcagcagcacactctggtggtggtgaccaggcaggagggacagtgggcagacagcgcagaagaaacagatgttcattcaa

SEQ ID NO: 10953 - DNA, 201 bp, Homo sapiens
tcccacattttccttcctgatagtggcccaggctcatttgcccaatccctgccctggactccagcagcacttgggagtcctctccgcaatgcctcactttstttcatgctaatttggcatgggtgagtcttcacttcccaaccaccctgaagggccttgatggtagacacctggtcccttacatctttattttccaaagtc

SEQ ID NO: 10954 - DNA, 201 bp, Homo sapiens
ataaaaggtctgtaaaatagttttaatcagacactggtacagaagagaaggagggagtgtggggggaagaaagttgtaacatatttgaagttctttgggtygttgatttctctttcagacccaccgtgcggaggtcgtttgaattccaaagatgctggctatatcacctctcccggttacccccaggactacccctcccac

SEQ ID NO: 10955 - DNA, 201 bp, Homo sapiens
gcatgactaacaagttctttcccggtgctccctgctgtcaaccttaggacccgggtgggaggacttcccaggggaggagagggagcagcaggctgggtgckcagggggcacccccagatttggtggacttcgcaccagatcaatggtttaaactgaatatggtggaccagcgaaaatctgcttccctgtttgtcttcagcc

SEQ ID NO: 10956 - DNA, 201 bp, Homo sapiens
aacatgcaaggaatgggctggagttatggaggattagtgccatgtggcatcaatcttttaagtggggtcttggcaagttgttttgtgcatcccttactagsgaccgagggggatgagaatgtgctttagcactttggccagaaatgaggaagacttctaacatgattgaaaccatggcctccaggaaaagactgaatttca

SEQ ID NO: 10957 - DNA, 201 bp, Homo sapiens; identical to SEQ ID NO: 1347

SEQ ID NO: 10958 - DNA, 201 bp, Homo sapiens
tggttggttagttggtttttccctctacccttattcaggaaaaccaagggaaactcacatatactttgctctagttacttttttttttttttttttttgarcagagagcacaaaaaagcataaggtccatatggcagttattgatctgggccatctggaaagccaggacttgctcccaccatgtaggatcagaagctgttc

SEQ ID NO: 10959 - DNA, 201 bp, Homo sapiens
ccctctgcctcccagaggccggtagctttacccgttggttctcctggtagcatcttacctgccacaccttgcctattctttgctagaactacagggacctratgagagaaccacattccttcctgctggcctcctaaggaaacaggctgcagtttacctaccaggctcaacagaaaaggaaagtggctggtaaagggcaaa

SEQ ID NO: 10960 - DNA, 201 bp, Homo sapiens; identical to SEQ ID NO: 1339

SEQ ID NO: 10961 - DNA, 201 bp, Homo sapiens; identical to SEQ ID NO: 1341

SEQ ID NO: 10962 - DNA, 201 bp, Homo sapiens; identical to SEQ ID NO: 1344

SEQ ID NO: 10963 - DNA, 201 bp, Homo sapiens
aaagatccttcatttgattcaagggtgggagaagagtgggcaaaatgaaagggcagactgaagttcaattgaagcagtcaggtagatggcctaggggacamaaactgtgtgcttgcctcccttcctgagtggtgctactgtaagcagagattagggggttcacccagagcctgtggccacatgtatccatgggaagactga

SEQ ID NO: 10964 - DNA, 201 bp, Homo sapiens
atatgacacttgagcttgggggtaagaaaatgttagtctgggggtgactgaagggaaaagcatttggggtaatgggaacagcatgtgggaaggatccaagrcagtaaagagcagttatttgggaagtaaagacctgatactgatgccaggaaggtttccttctacttggcaaaacaattactaggaaataattcaatgttt

SEQ ID NO: 10965 - DNA, 201 bp, Homo sapiens; identical to SEQ ID NO: 1295

SEQ ID NO: 10966 - DNA, 201 bp, Homo sapiens
acttagactactgcctgcacccagcaaacctgttatgataaataactgtaactgaaacaaaaggttcccaaagcaatggtcatcttaaccatggaagtgcwctccaaaatattatagtcggtatgttttaaaagctggtcatgacctattcgacggattccacaacccaatgatgagagtgatgcgtggtttgggaaatat

SEQ ID NO: 10967 - DNA, 201 bp, Homo sapiens
cactgtattggtcagtgcatagacagggcacgtcactgtatacacggcatcatcacagaatgtattggacaacactgctccagtgctttggacactcacaygagagcaaccaccaggggcccttgatgattctttagttccctggttttggtatgaaccaagaagcaagtaatggagggatgtgtcttctgtgggatccct

SEQ ID NO: 10968 - DNA, 201 bp, Homo sapiens
acaaactggaatcccatatacgcatactaaactggtctcatttgacttcagggaagcatagcttctgaagcactaatcccagagagcctaaacaggaaggrgcttaggggagcagggaggtaggtgaggcagctggggagtcaagaaggaaagagctgtttctgggccactgatgggaggtccagcacaggctcagctctc

SEQ ID NO: 10969 - DNA, 201 bp, Homo sapiens
gtggcataaaagcatccataagcaatatgtaaacaaatgagggtgtctgtgttccaacaaaaattgatttacacaaacaggcagtgggctggatttggccmataggccacagtgagctgacccctgggttagagcacaggctgggattttgtccacctggttctagccgtgactctgacacttgctagcagtgtacagttc

SEQ ID NO: 10970 - DNA, 201 bp, Homo sapiens; identical to SEQ ID NO: 1239

SEQ ID NO: 10971 - DNA, 201 bp, Homo sapiens; identical to SEQ ID NO: 1240

SEQ ID NO: 10972 - DNA, 201 bp, Homo sapiens
tgctcccaccatgtaggatcagaagctgttccaaaaagccttccctcccataagagatgtattggtcagatggggacagggatggatttcattacagggcrggactacagtgagaggaagctggagcaggactctgaaggactgtctgcaaccctgaccctgccacaaagatcagagagaaccaagaaagtgttgattgac

SEQ ID NO: 10973 - DNA, 201 bp, Homo sapiens
gtcctgttctccatgattaatgagttccacttgctttcttcaaagaatgcctgtgctgtgccatgctgttatttatttatgttttctactaaaaaatttaygtaaaaaacatcccttaaggtcagtatgcagtattgtgctgcagactaaactatcccagcagccagaggtaaacctacacaccaagaaaaagtctcaaat

SEQ ID NO: 10974 - DNA, 201 bp, Homo sapiens
ggagattagattctactttcaaagggctccgggagagtggtaccagctaagctgaatcctgtacccagctctgcagagacagatcacttcctttgaagaarcagcagtgacatcttacccctcacctacccaattattacttccacagggatgtgaatctcccatttacgagcgctttcccagacaaaacgggaacttgta

SEQ ID NO: 10975 - DNA, 201 bp, Homo sapiens
tgggattttgcaaaagttgctaagtgctaaattgctaaatgagattccacgaaatttctcttgatgacaaatccctggagattagattctactttcaaagsgctccgggagagtggtaccagctaagctgaatcctgtacccagctctgcagagacagatcacttcctttgaagaagcagcagtgacatcttacccctcac

SEQ ID NO: 10976 - DNA, 201 bp, Homo sapiens
cccctgggtttaacattctttacaccaatcagctgacccattttgctacctaacatttccagaaactgttctccataggtcacgtggctatgtttgctttycgaatttccatctgtttctcacactcatcttcggttcacttcttcatccctatcccaaaggataacaggaaaaataatgggctgggctgagctgctgcag

SEQ ID NO: 10977 - DNA, 201 bp, Homo sapiens
acagtgtttctttaaaaagcccaaaacaacatacccactgattatttttaagcttgagggaaagaaaatttgacagaactttcccatccccttcaaagackgctcaagtggctgaactacaaacaggggtttcaataacatggttttgcatcttacgctacaggtatttcaagccaacaacgatgcaactgaggtggttct

SEQ ID NO: 10978 - DNA, 201 bp, Homo sapiens
ctatattaataacaccctagatgcagacatggcattgttaatacaacagtagaaggttcatgtatgtttacataattataggcacaattatgtacatacayaccaagaagggcgcatggagagcaatgggaagagctcagaggcacaaggtcttggtctagttcctgccctcctgagatgctgattccatgattctgcact

SEQ ID NO: 10979 - DNA, 201 bp, Homo sapiens
tcctcataaggactccatgggtattattctcctcactttacagatgaggaaaccaagacttaaagagctaggtcactcaccagtaagtggtagagccatgrtttgaatctaggcagttccagtccaaagcccttgctttcaaataacactctctgctgcctcaaccgggggccaagagctgtgcatggtgctgtggacaca

SEQ ID NO: 10980 - DNA, 201 bp, Homo sapiens
ggagatttactccagctgtagcaaatccctcataataaaaaatttccccaaatgagtcagtcacacaggaggtaaatgagacattctgtatgaagtcagcrtgtcatttggagtgtgccctttatataaaaggcccagccagaagaccatgtggttaagtggggcttgtccacagggcagaaccagaagactggaagttgg

SEQ ID NO: 10981 - DNA, 201 bp, Homo sapiens
agctaggtcactcaccagtaagtggtagagccatggtttgaatctaggcagttccagtccaaagcccttgctttcaaataacactctctgctgcctcaacygggggccaagagctgtgcatggtgctgtggacacaaaggtgggcacaacagactgttctgtgtgggcatatggacaagttgggcagacatactgataaac

SEQ ID NO: 10982 - DNA, 201 bp, Homo sapiens
accgttgcttattaactttgttccattgaagcttgctgtctgcttggaaaatttcactcacaagccgcagctttgcctgactcagtgcaatccaaggccaycatctctggtgaacttcccttgactcctccctccagccacttgcagaaatgcaaatcctgggcacccacaggctgtttgggggcctgtatagaagctgtg

SEQ ID NO: 10983 - DNA, 201 bp, Homo sapiens
tcctctttagatggtgacccagttatataaaatatttctatcagaagggaactgggttgggccaggtgggggaaaatctaggaaaggcagcctcccagcasttcatggtttctagatagtggtcaagaagaggtcacattaatcctatttgcagataggatttcccaccaaccccattcatgggatttatcagaggccttc

SEQ ID NO: 10984 - DNA, 201 bp, Homo sapiens
atatgtcacatatggactgaatcaaaggtttaaaaatactacaaagcctttgcattacagtttttgggaattttttttccctgtcttgaagcagaacacayctcccttgagtttctccaactagccagtgaaatataaatcatttgcattccctccacttagctacattgagcaatgttaactgaagggcttgggaaagac

SEQ ID NO: 10985 - DNA, 201 bp, Homo sapiens; identical to SEQ ID NO: 1236

SEQ ID NO: 10986 - DNA, 201 bp, Homo sapiens
gaggaggcggagagcactgtctcagggcttgggagaccagggttcaagattcggttctgcctctgcctgtgtgaccttgggaaggccacaacacatcttgrctttcccatctgtaaagtggatgtttgggctacatggattttgagccctcagctatgctatgacatcctagtccatggggtggttctggctggttgtctg

SEQ ID NO: 10987 - DNA, 201 bp, Homo sapiens
ctagtccatggggtggttctggctggttgtctgtatgtgtgttgcacagcccagcaaggcaaagctctccggatgctcccttcccaacattgtctcaggckcccttctgcacagacggtggggatggcatctttgggcttgacttgatgttatcgtggagctggaccccaatcccagctccccagaggcagaactgctctt

SEQ ID NO: 10988 - DNA, 201 bp, Homo sapiens
tccagccctctattccccaggtggacctgcgctttttaaccatgctcacggccatcgcaacacagggagcgatttccagggaaacacagaatggctactaygtcaaatcctacaagctggaagtcagcactaatggagaggactggatggtgtaccggcatggcaaaaaccacaaggtaaatccatgatcctaccttaaag

SEQ ID NO: 10989 - DNA, 201 bp, Homo sapiens
cctgttcttcactgtagtagaaaatgtgcaagtaaccttccaggagtctgtatggagagattatgccataagtttcagcatggaaatgggcactattagtytctgcttaaatatgataatttaggctaaatataatattcagattaaaattctgttgaaacagttggaaagttgccagatttagcacataaaaatgtccca

SEQ ID NO: 10990 - DNA, 201 bp, Homo sapiens
gatttagtgtaagataatgtgagtttaatcgtccaatggaattgcaaactgatactaattacaagtatgtctcagtgaatcacagatacaggttggaagcraagtctaatgattgtgtcctttggaaaaaaacaagacactgccctgtgttgggaatggtggtctcttactccagccctctattccccaggtggacctgcg

SEQ ID NO: 10991 - DNA, 201 bp, Homo sapiens
gataatttaggctaaatataatattcagattaaaattctgttgaaacagttggaaagttgccagatttagcacataaaaatgtcccacgcagccacagtayagcagttcctcaaaatgttaaacatagaattaccatatgatccaacaattccacttctaggtatatacaccaaaaataattgaaagcagggactgaaaca

SEQ ID NO: 10992 - DNA, 201 bp, Homo sapiens
atcatcattattactataattttaaaattgtcattaatatagtcataaatattgaaaaggtacatcacccaaggctaacagccaccagtacttcgcaggtraagaccaacatggatcttgggtctaattagtattggagaggaacaaatctttcacttttgtagtcattgtaagttttttctaatataaaggagacttgat

SEQ ID NO: 10993 - DNA, 201 bp, Homo sapiens
ccagctgtgcaaccttagacaaatcccttaccctatctgtgccttatctgtgttaagttagctgctatcatcatcattattactataattttaaaattgtyattaatatagtcataaatattgaaaaggtacatcacccaaggctaacagccaccagtacttcgcaggtgaagaccaacatggatcttgggtctaattagt

SEQ ID NO: 10994 - DNA, 201 bp, Homo sapiens
tttttctttaaaacgaatacctctaatgcccaagatcccaaagttgttgtaggattaaacattgcaggccaggtgactggcacgagaaggatatcataacyatcatcttggtcaaaagcacctgaacagccagtccacctgagaggcacgcattttcttcagggtctcctgctgcagatgaggtcaccctggctgtgtccc

SEQ ID NO: 10995 - DNA, 201 bp, Homo sapiens
catgcccacattccatgctgcatatgtggtagaaaagtggccctgccatcttgcagaagtattcagcctaagacgcccctatgtttcagggccaaaaagargtaccgagatttcctcaccaaatgccaccttgttctctgtacaagtggccagaatggtcctgcacaagttggatttgaaggtgcaggtcacacctgtgtt

SEQ ID NO: 10996 - DNA, 201 bp, Homo sapiens
cagaatgctgtcatcaataaagagactcaatgagaggccccctacaggagctgcggataaaggcatcgctgcaggctcagatcagtgtattgacatcaccyagttatatttcagtgtgagccccagaggacacttcctgacagtaaacacccagtttatcgagtatttctggttggttgtgttttttatgcttagagtgtc

SEQ ID NO: 10997 - DNA, 201 bp, Homo sapiens
agagacctttccagagacagcagcaggttaaaatgctgaatggccctgtcctctgtacttcctcttcacccttttgaactcctgttgttcattcccaggcrattgttttccctgtatcattggcaacaacagatgttttgggtcaaggacccagcgaaatgcctcccaagtatgtcaggtccaggaggagaggaattgtat

SEQ ID NO: 10998 - DNA, 201 bp, Homo sapiens
tgggtggacatgctgaagaaatccaaacaaacacagctatgtttgctagtcggattcatagagaggaagaagcgggggaaactgtaaacacagatacgcaratagccatacagagggctctagaagccttcgatggtacattaccctggtgaggctctgctgtaggacccacagtgtgagtgcagaccagggcatgtggct

SEQ ID NO: 10999 - DNA, 201 bp, Homo sapiens
caagagacctttccagagacagcagcaggttaaaatgctgaatggccctgtcctctgtacttcctcttcacccttttgaactcctgttgttcattcccagrcgattgttttccctgtatcattggcaacaacagatgttttgggtcaaggacccagcgaaatgcctcccaagtatgtcaggtccaggaggagaggaattgt

SEQ ID NO: 11000 - DNA, 201 bp, Homo sapiens
attcgggatggggacagtgaatccgcagacctcctgggcaaacactgtgggaacatcgccccgcccaccatcatctcctcgggctccatgctctacatcargttcacctccgactacgcccggcagggggcaggcttctctctgcgctacgagatcttcaagacaggtcagtgtggtcacacgtaggggccgggagatggg

SEQ ID NO: 11001 - DNA, 201 bp, Homo sapiens
catttaggctagccaagagacatgctccctggaagaactcagaggcctctgtgctgtgcctttcccaaccaggcatctgagattaacagtgtgatactcarcctgtggatttccactctaaaatcccgccccaccccccaacacagcttggctcaactatttgcaaatcacttctgattcaattttgttttggttatctca

SEQ ID NO: 11002 - DNA, 201 bp, Homo sapiens
atcaaaactatgatcaatgtctggacatagaggcttatggtccttggaagtacatcgtaggggatttgacccagcctaggagctcaaggaagacttctttraggaggtgatgattgaggtgaggttagaaggcaaataacagacattacctggtgaagaagggagggaaggtgcaccaggcaatggtcacagctttctcaa

SEQ ID NO: 11003 - DNA, 201 bp, Homo sapiens
ccctgttgctgttccaggataatcagcaaagatttaggtagaggtcattctctggaagattgaaaggagagaaccagtgattttgaagaaggggaacaacstggaggatcttttttatccatagctcagtttgcaagtatgaaatgcacattgactatagaccctgccttgcctgacatcatttattcatgcattctccac

SEQ ID NO: 11004 - DNA, 201 bp, Homo sapiens
ttccaggataatcagcaaagatttaggtagaggtcattctctggaagattgaaaggagagaaccagtgattttgaagaaggggaacaacgtggaggatctyttttatccatagctcagtttgcaagtatgaaatgcacattgactatagaccctgccttgcctgacatcatttattcatgcattctccactcaatcatttg

SEQ ID NO: 11005 - DNA, 201 bp, Homo sapiens
ttttggttatctcagtgtaaataacagttaagtgggagttacagatttttcaaacactaaaagtgataaagctaatgggcaagtccagataaggagggaarccacccagaagaatccacaagtacaagccaagaagaaaatgggtagtcaggtgtgtgtttctcgtcaccgaaactgtatttttcttaatctacagaaaat

SEQ ID NO: 11006 - DNA, 201 bp, Homo sapiens
atgagctcctgttcctgctcctgctgccatccaagctcgcaccaggatgcgaatgtgtgccgcatttaatcaggatgcctccatgcgtcccaagaaagcaracgcaagagctcaggagagaaacaaggccatccacaccacaaaggagccagaagccttccaaatgtcaatgcactgctgcatttttccaaacttgttgcc

SEQ ID NO: 11007 - DNA, 201 bp, Homo sapiens
gctattgaaggaagaaaaaaatgtgttttgtgatatttgatagaacgatgctcctgctcttacgtgggcaagagataaggccttccagccatgtgtttatkcactctgtggctttcacaaagcacaacgacctgcagtatctctgtttgccagtctgtacaagcagacataagtgcccttcgcttatccatctgaaacacc

SEQ ID NO: 11008 - DNA, 201 bp, Homo sapiens
tcctttaaccataagttcaagattaggttttctttcctgtttgcctgtgacacttcagaaactgacatttttggggtcattcacagaggtagagaaaactyggagtgcctactgcctccacttcctgaattcaggaactgaattcaccttctgcggggaaggcaaactcagctttgggtaaatccactgtgttttaaatgt

SEQ ID NO: 11009 - DNA, 201 bp, Homo sapiens
ccctttatataaaaggcccagccagaagaccatgtggttaagtggggcttgtccacagggcagaaccagaagactggaagttggggggatttcagctgccsaactgtaactctgtgtcacttcccctcaagcaaaccttatagaaaaatctagtttttctaagaagttcaagtaaggtttgttgattatttgcttcacaaa

SEQ ID NO: 11010 - DNA, 201 bp, Homo sapiens
ccaaaagaaggggcagagtattcttcctccgaagacctaagtactctatcttcgatacagaaatccccttccaagtggttctgtgtggcatccctaaagckggattctgacaagggccagacatttcggtgccctgagagaaggacctaagcttggtgaatcttccagcacaggctccgttgactaacccagcctttggtg

SEQ ID NO: 11011 - DNA, 201 bp, Homo sapiens
cctgtctactgacatagaaactgacatgcatattcatcccccatgacctcttgagggaagaactgatgtatccattcatttatataataagcctattttakattaaatgcctaaactgtgcctcgctaggtgctaggagacatgatcagcaaaacaacctggttctgtcttcggggacttacagtctggaaacacacaagt

SEQ ID NO: 11012 - DNA, 201 bp, Homo sapiens
tccataaaggctaggtgactgtactgagcctaaggagcaggtggcctggcttcaggcctgaaccaaccagagacctcagcattgtgcagatctgccttgcrgcctttttagacatcgtgcagcttctttgttgggaagttgtatgtgacagtgctgttttttttcctcctaatttcctcacaggttttaatgtaaggatta

SEQ ID NO: 11013 - DNA, 201 bp, Homo sapiens
ggggctgagagctacctcaccatccaccctaggggctcacagtaacttaacagtcattcccatcaacacaatgggaagagtcctggaagcttacaggtcgycccaggctgaggcaaaggcagggcttgcccctgaattcctatctctcagaactcttgagccaccttcgcctgctgcccaccccatcttccaaggctggtc

SEQ ID NO: 11014 - DNA, 201 bp, Homo sapiens
ttttatgcctcttttcgagctttgtagccaagcatcttggcagtctctaatatttttctactttttcccactggggactcaactgtatgtttgtgggtcaygtggaggaactctcaaaattagacaacaatagcaaacatttattgaactcttgccagacatcaggtcctaccctaagttttctatgtttaaccgccacag

SEQ ID NO: 11015 - DNA, 201 bp, Homo sapiens
cagcaagtgtttacataagacctttttttttttttttctaatctacatccttctggaaatgtttacatgaaactcaggggaggcaggctggccagtgaaaygaggttggaacaggaccatggttgaagaaaacaggacccatctggatgcagaggccgcctttgcccctgtgacgttggtggtgttgatgggggtgtggga

SEQ ID NO: 11016 - DNA, 201 bp, Homo sapiens
acagagaggttaggtcagtcacccaaggtgactcagctggtcttacaacattggttctgccaccctggaaatgtgtggcttaggaactcccaagtggacayttagacacttgggagtactttagaaatgccatgttactaccgaggtccctaaaagttaaggttgggaagcaggcagcatgtctagaatgcagatgtgctt

SEQ ID NO: 11017 - DNA, 201 bp, Homo sapiens
aaaggccccaaatcctaataccatcaaaatggtagttgaggctttgatgtatgaattttagaaggacacaaacattcagtccataatacccctcgatcctrggcaaactgagatggtaagtcatcctcttgggataatgtttcttctcagcatttgaagcagtaggctaatgggcaggttggcttcttataaaatgaagat

SEQ ID NO: 11018 - DNA, 201 bp, Homo sapiens
ttcttatagaaaaaaaaaagggtaaaaaaaaaaaaaatctaagtagttctaagattcacattggttcttgatagctgtgctacacaagtagagtctcaaartcagtgtcatggatttatttaacaaacactcttctaattgcattacaaatattaatccatttactttgcacagtgggccctgggaagttagtgccattat

SEQ ID NO: 11019 - DNA, 201 bp, Homo sapiens
taacagactaccacagacttggtggcttaaacgacagacatacatttctgacagttctgatggctgggaagtccaagatcaaggcaccaacagattcagtrtctgacgagggctctcttcctagcttttagatggctgccttctctctgtgtgctcacctggcctttccatagagagagatctttctgtcttcttcttcta

SEQ ID NO: 11020 - DNA, 201 bp, Homo sapiens; identical to SEQ ID NO: 1242

SEQ ID NO: 11021 - DNA, 201 bp, Homo sapiens; identical to SEQ ID NO: 1243

SEQ ID NO: 11022 - DNA, 201 bp, Homo sapiens
agcctttgaaggtggctcccttccctcccaggccacatgaagctgtctgcctccagccaggcactgcaggtacagggagccagcccttcctgcaaacggcyagttatggctggacaaagcagcagcacactctggtggtggtgaccaggcaggagggacagtgggcagacagcgcagaagaaacagatgttcattcaacac

SEQ ID NO: 11023 - DNA, 201 bp, Homo sapiens; identical to SEQ ID NO: 1245

SEQ ID NO: 11024 - DNA, 201 bp, Homo sapiens
tgctaactactgtgctctgaagagcctctgggctggggaggctcagtcacttcaccctgacataggcagtgcctgcaatctctcatgaattttatgtatcrcagatgaatacgaggtggactggagcaattcttcttctgcaacctcagggtctggcgccccctcgaccgacaaagaaaagagctggctgtacaccctgga

SEQ ID NO: 11025 - DNA, 201 bp, Homo sapiens
atctgccagcagatccttgcgacagggctgggatctgatgcatgtgtgcttgtgtgagtgtgtgctgggagtcagattctgtgtgtgacttttaacagcckgctcccttgcctttttcagggcagaagtcctcccttagagtgtgtctgggtacacattcaagtgcatggttgcaaacttttttttttaaagcactgaata

SEQ ID NO: 11026 - DNA, 201 bp, Homo sapiens
ctctctgcccaattccgtttcttttatatccagacaagtgttgattgtgaatgcactccccaataaacttccttcaagcaaaactctatgtcagaatgtgwtttctgggaaacctacctaagatacccactaaaatatagataattactaaattccaagggatgcctttcctggggatgtttgtacagcaattatcatcat

SEQ ID NO: 11027 - DNA, 201 bp, Homo sapiens
cttttaacagcctgctcccttgcctttttcagggcagaagtcctcccttagagtgtgtctgggtacacattcaagtgcatggttgcaaacttttttttttwaagcactgaatagtactagacacttagtaggtacttaagaaatattgaatgtcgtggtggtggtgagctagaagttataaaaaaaattctttcccaaaaa

SEQ ID NO: 11028 - DNA, 201 bp, Homo sapiens
aacagcctgctcccttgcctttttcagggcagaagtcctcccttagagtgtgtctgggtacacattcaagtgcatggttgcaaacttttttttttaaagcmctgaatagtactagacacttagtaggtacttaagaaatattgaatgtcgtggtggtggtgagctagaagttataaaaaaaattctttcccaaaaacaaca

SEQ ID NO: 11029 - DNA, 201 bp, Homo sapiens
gtgtctgggtacacattcaagtgcatggttgcaaacttttttttttaaagcactgaatagtactagacacttagtaggtacttaagaaatattgaatgtcrtggtggtggtgagctagaagttataaaaaaaattctttcccaaaaacaacaacaaaaagaattatttcattgtgaagctcagtaccacaaaaatttaaat

SEQ ID NO: 11030 - DNA, 201 bp, Homo sapiens
ggactgaaaaatcattctggcctcaagatgctttgttggggtgtctaggtgctccaggtgcttctgggagaggtgacctagtgagggatcagtgggaatasaggtgatattgtggggcttttctggaaattgcagagaggtgcatcgtttttataatttatgaatttttatgtattaatgtcatcctcctgatcttttcag

SEQ ID NO: 11031 - DNA, 201 bp, Homo sapiens
agtgcctcacccagggccactgctgccgtgacaattctaagaggaggcttgcagggacccacctctttctgtgcacctcctcagtctttgatgtaacttargttttctcaatcttatgtaaaatgctacccaaatgcagctttgaagcaagctccctgaccctggttttctgtgggattgcccacctgcctaagctccttg

SEQ ID NO: 11032 - DNA, 201 bp, Homo sapiens
cacgcgaggttccgggaccggctggcctgctggaactcggccaggctcagctggctcggcgctgggcagccaggagcctgggccccggggagggcggtccygggcggcgcggtgggccgagcgcgggtcccgcctccttgaggcgggcccgggcggggcggttgtatatcagggccgcgctgagctgcgccagctgaggtg

SEQ ID NO: 11033 - DNA, 201 bp, Homo sapiens
ctgaccctggttttctgtgggattgcccacctgcctaagctccttgagctattttggagtcagtagctggaggcagggaggctcaggtcctagcttgcacrtcagctcacactgcagggccctagaatggagagtttgttgcttcaggatttaacaagctgtgaagagctttcaagcatctgtaaggaattaaaaattagt

SEQ ID NO: 11034 - DNA, 201 bp, Homo sapiens
agctattttggagtcagtagctggaggcagggaggctcaggtcctagcttgcacatcagctcacactgcagggccctagaatggagagtttgttgcttcargatttaacaagctgtgaagagctttcaagcatctgtaaggaattaaaaattagtgagtgtgaaaactttcctaattgtaaaacagtttcactgcccttga

SEQ ID NO: 11035 - DNA, 201 bp, Homo sapiens
tgggcatggtggtgcatgcctgtaatcccagctactcgggaggctgaggcagaattgcttgaacctgggaggcggagactgcagtgagctgagattgtgcyactgctgactttgtctcaaaaaacaaaacaaaacaaaaaaacaaaatgaaaacaaaaagccagggctgcctctgctcaataatgttctatctttgttccg

SEQ ID NO: 11036 - DNA, 201 bp, Homo sapiens
tccgcctcccgagttcaagtgattctcctgcctcagcctcccaagtagctgggattacaggcatgcaccaccatgtccagctaattttgtatttttagttrtagatttctttgctccttctccactcccactgcttcatttaactagccttaaaaaaattattaaaaataaaaataaataggcctggccaggcgtggtggt

SEQ ID NO: 11037 - DNA, 201 bp, Homo sapiens
acacttgcttgaatcttcaatttggattaagttggtctcgggaggcagggcctcagcaatctatattttgaaaaaactccctaggtgcttttctttctttytttctttctttctttctttctttctttctttctttctttctttctttctttctttttctttctttctttctttttctttcttttctttctttctttcttt

SEQ ID NO: 11038 - DNA, 201 bp, Homo sapiens; identical to SEQ ID NO: 1360

SEQ ID NO: 11039 - DNA, 201 bp, Homo sapiens
ataatttaaggtcaggagttcaagaccagcttggctaacatgatgaaacatgacgaaacccccgtctctgctaaaaattcaaaaattagccagtcatggtkgtacatgcctgtaatcccagctactcgggaggctgaggcaggaaaatcgcttgaacctagaaagtggaggttgcagtgagctgagatcacgccactgcac

SEQ ID NO: 11040 - DNA, 201 bp, Homo sapiens
actcttgtcccccaggctgagcctccctccatccctatgctgcctgcttcccaggaacatgcttgggcagcaggctgtggctctgattggctttctggccrtcaggaacatgtcccaacatgttgagctctggcatagaagaggctggtggctattttgtccttgggctgcctgttttcaggtgaggaaggggatggtagg

SEQ ID NO: 11041 - DNA, 201 bp, Homo sapiens
gagctaggaccacaacccgggtgctttttgccccaaagtcccgggtacttttacttggcagagcagggttaccctacttggggatctgggtcgggggactyaggaggctggaggaactgtcagactgtttcttcttttgggaattgaccttctggccagggctgcgattaggaaactgctggactctggcaattcacacat

SEQ ID NO: 11042 - DNA, 201 bp, Homo sapiens
gggtcctgaggctgtgccgtggcctttctggggtttagccacaatcctggcctgactccagggcgaggcaggccaagggggtctgctactgtgtcctcccwcccctacctgggctcccatccccacagcagaggagaaagaagcctgtcctccccgaggtcagctgcgttagaggaagaagactgggcatgtctgggcaga

SEQ ID NO: 11043 - DNA, 201 bp, Homo sapiens
gtgggccgagcgcgggtcccgcctccttgaggcgggcccgggcggggcggttgtatatcagggccgcgctgagctgcgccagctgaggtgtgagcagctgycgaagtcagttccttgtggagccggagctgggcgcggattcgccgaggcaccgaggcactcagaggaggtgagagagcggcggcagacaacaggggaccc

SEQ ID NO: 11044 - DNA, 201 bp, Homo sapiens
catggagtgatttctatgtgccaagctaagcactttgcttttaagatcatatttaatgaagaacagagcctcacagtaagaatacatgtcttttcttttawttatttatttatttattttgagacagagttttgctcttgttgcccaggctggagtgcaatggcgcaatctcagcttactgcaacctccgcctcccgagtt

SEQ ID NO: 11045 - DNA, 201 bp, Homo sapiens
tctgcggcaggtgaatgacgggcgtgggtcggtgcgcgctcggcttgcgcacacggtgtctctaagtgcgcgggtgacgagagtcgggatgtgccggagaycccggggcggagagcgggattacaagtacaggaatccctggtcacgctccccgcccctggaaacccagctggggcgagggagggcgtggacgggaccgtt

SEQ ID NO: 11046 - DNA, 201 bp, Homo sapiens
tgctgcgttcacaggtgtttctgcggcaggtgaatgacgggcgtgggtcggtgcgcgctcggcttgcgcacacggtgtctctaagtgcgcgggtgacgagrgtcgggatgtgccggagaccccggggcggagagcgggattacaagtacaggaatccctggtcacgctccccgcccctggaaacccagctggggcgaggga

SEQ ID NO: 11047 - DNA, 201 bp, Homo sapiens
gcttgcgcacacggtgtctctaagtgcgcgggtgacgagagtcgggatgtgccggagaccccggggcggagagcgggattacaagtacaggaatccctggycacgctccccgcccctggaaacccagctggggcgagggagggcgtggacgggaccgttctgggagctcgcctttggctgcggttggctccaggccccagg

SEQ ID NO: 11048 - DNA, 201 bp, Homo sapiens
cacgctccccgcccctggaaacccagctggggcgagggagggcgtggacgggaccgttctgggagctcgcctttggctgcggttggctccaggccccaggmgcagtttgctcgcggcgtggggatgaagtccgtgtccctggaggggcccaggaagggcgaggaaagcggagtggagtaagttcgtctaggatcggtcccg

SEQ ID NO: 11049 - DNA, 201 bp, Homo sapiens
acccagctggggcgagggagggcgtggacgggaccgttctgggagctcgcctttggctgcggttggctccaggccccaggcgcagtttgctcgcggcgtgkggatgaagtccgtgtccctggaggggcccaggaagggcgaggaaagcggagtggagtaagttcgtctaggatcggtcccgggtggctctgggatccaatc

SEQ ID NO: 11050 - DNA, 201 bp, Homo sapiens
tttccccagcagtgtatacgggctatgtggggagtattcaggagacagacaactcactcgtcaaatcctccccttcctggccaacaaagctgctgcaaccrcagggatttcttctgttcaggtgagtgtagggtgtagggagattggttcaatgtccaattcttctgtttccctggagatcaggttgcccttttttggtag

SEQ ID NO: 11051 - DNA, 201 bp, Homo sapiens
ggttggctccaggccccaggcgcagtttgctcgcggcgtggggatgaagtccgtgtccctggaggggcccaggaagggcgaggaaagcggagtggagtaakttcgtctaggatcggtcccgggtggctctgggatccaatctgcgccgccctggcccaggtcccaggttcaggtcctttacgccactgtgtccaccacctg

SEQ ID NO: 11052 - DNA, 201 bp, Homo sapiens
ggatccaatctgcgccgccctggcccaggtcccaggttcaggtcctttacgccactgtgtccaccacctggctgagcgctgaggtcagcgcgggctgtttyctggcccttgggaatgtgccaggacccgtcccctaaggactagcgaggaggtgactcactgtgacaaggagaccccagggaacggactgtatgaggtcag

SEQ ID NO: 11053 - DNA, 201 bp, Homo sapiens
aggagaccccagggaacggactgtatgaggtcagaaccccgcccgggatggggtacagcgggactccagaagccctctcccctgccccttcgcggtctccrtcctcccatcggcacagtgacctatttggctggaacagtttgttcccaaggaagccgggcactggaggtccgggacaccgcgtcgggtccccgctccgcg

SEQ ID NO: 11054 - DNA, 201 bp, Homo sapiens
agccctctcccctgccccttcgcggtctccgtcctcccatcggcacagtgacctatttggctggaacagtttgttcccaaggaagccgggcactggaggtycgggacaccgcgtcgggtccccgctccgcggcgcgctgtaggggtcggggagtcacggccctgcgctgggcgggctctaaccagcctgtcagtcggggaa

SEQ ID NO: 11055 - DNA, 201 bp, Homo sapiens
gctggaacagtttgttcccaaggaagccgggcactggaggtccgggacaccgcgtcgggtccccgctccgcggcgcgctgtaggggtcggggagtcacggmcctgcgctgggcgggctctaaccagcctgtcagtcggggaagggcaagggtctcctctacctctttcccaccgcggccgggagaatcgcggcccagcctg

SEQ ID NO: 11056 - DNA, 201 bp, Homo sapiens
ggaggcaatttatatttaaaaatgtagaacacaatgaaatttttatgccttgatttttttttcattttacacaaagatttatatattttttttttgagacrgagtctcactctgtcacccaggctggagtgcaggtggcatgatctcagctcactgcaacctccgcctcctaggttcaagcgattctcccacctcagccac

SEQ ID NO: 11057 - DNA, 201 bp, Homo sapiens
ctcaaaagcgctagtagtaaaccgagtttcatatcagacccaggtcttggattgaggaacaggcaatgggatcattcctcagtgtggccaaaggatctgaygagccctcagtcttcttggaaattcactacataggcagccccaatgcagacaaaccaccccttgtttgttgggaaaggaattacctttgacagtggtggt

SEQ ID NO: 11058 - DNA, 201 bp, Homo sapiens
gacatttgacaaccagccctttggatggtttggatgtataggagcgaaggtgcagacagcagtggggcttagagtggggtcctgaggctgtgccgtggccyttctggggtttagccacaatcctggcctgactccagggcgaggcaggccaagggggtctgctactgtgtcctcccacccctacctgggctcccatcccca

SEQ ID NO: 11059 - DNA, 201 bp, Homo sapiens
ggggcttagagtggggtcctgaggctgtgccgtggcctttctggggtttagccacaatcctggcctgactccagggcgaggcaggccaagggggtctgctrctgtgtcctcccacccctacctgggctcccatccccacagcagaggagaaagaagcctgtcctccccgaggtcagctgcgttagaggaagaagactgggc

SEQ ID NO: 11060 - DNA, 201 bp, Homo sapiens
gagtaatcaaacttcttacatggtggcttaaggtctctaagaatacaaaagcagtagaagttactatacctttttaaggcttaggtctggaatgggcacarggttacttctgtcccattctattggctaaaagagtcacaagccagaaatgttcacggggaggcaactacaaaacagtgtgaatacccagaggtatacctc

SEQ ID NO: 11061 - DNA, 201 bp, Homo sapiens
ggcaggaaggcaaagaaaacatcagagctgctgttgcagcaggatgcaggcagattcaagacctggagctctcttccgtggaggtggatccctgtagagaygctcaggctgctgaggagggcgcggtgcttggtctctatgaatacgatgacctaaagcaaaaaaagaagatggctatgtcggtgaagctctatggaactg

SEQ ID NO: 11062 - DNA, 201 bp, Homo sapiens
agaagttactatacctttttaaggcttaggtctggaatgggcacaaggttacttctgtcccattctattggctaaaagagtcacaagccagaaatgttcamggggaggcaactacaaaacagtgtgaatacccagaggtatacctcactgggagacattgacttccacaaaccacaactacccacaactacatggataaat

SEQ ID NO: 11063 - DNA, 201 bp, Homo sapiens
gctctatggaactggggatcaggaggcctggcagaaaggagtcctgtttgcttctgggcagaacttggcatgatggagacgccagccagcgagatgatgcmaaccagatttgccgaaattattgagaagaatctcaaaagcgctagtagtaaaccgagtttcatatcagacccaggtcttggattgaggaacaggcaatgg

SEQ ID NO: 11064 - DNA, 201 bp, Homo sapiens
ctggaggtccgggacaccgcgtcgggtccccgctccgcggcgcgctgtaggggtcggggagtcacggccctgcgctgggcgggctctaaccagcctgtcartcggggaagggcaagggtctcctctacctctttcccaccgcggccgggagaatcgcggcccagcctgtcctcgggtcggggcgctggactccggggcggg

SEQ ID NO: 11065 - DNA, 201 bp, Homo sapiens
aaacacttgcttgaatcttcaatttggattaagttggtctcgggaggcagggcctcagcaatctatattttgaaaaaactccctaggtgcttttctttctytctttctttctttctttctttctttctttctttctttctttctttctttctttctttttctttctttctttctttttctttcttttctttctttctttct

SEQ ID NO: 11066 - DNA, 201 bp, Homo sapiens
ccagaagcttctgcaagagccaggcacttgtcctccacaatggctgccatgagtgttggttgccgatggttacagccaagtcgttccttggccttagaggmggaagctctcttgcccgagggcatgcactcccctactgcaggggcagccacgtttagatgactgtttggaaacccagggtgtaagggcctagctctcatg

SEQ ID NO: 11067 - DNA, 201 bp, Homo sapiens
gtcctgtttgcttctgggcagaacttggcatgatggagacgccagccagcgagatgatgccaaccagatttgccgaaattattgagaagaatctcaaaagygctagtagtaaaccgagtttcatatcagacccaggtcttggattgaggaacaggcaatgggatcattcctcagtgtggccaaaggatctgacgagccctc

SEQ ID NO: 11068 - DNA, 201 bp, Homo sapiens
cgcggcgcgctgtaggggtcggggagtcacggccctgcgctgggcgggctctaaccagcctgtcagtcggggaagggcaagggtctcctctacctctttcycaccgcggccgggagaatcgcggcccagcctgtcctcgggtcggggcgctggactccggggcgggagcggagcccacgcctggatgggaggcggggaggg

SEQ ID NO: 11069 - DNA, 201 bp, Homo sapiens
actctgtcacccaggctggagtgcaatggcaccatcctggactcaagtagtcctcctgtttcagcctcccaagtaaccgggaccacaggcgtgatcccccsgcccccatgcccagatttttttttttttttttttttttttgagatgcggtctcgctctgtcacccaggctggagtgcagtggcgtgatctcggctcactg

SEQ ID NO: 11070 - DNA, 201 bp, Homo sapiens
ccaccgcggccgggagaatcgcggcccagcctgtcctcgggtcggggcgctggactccggggcgggagcggagcccacgcctggatgggaggcggggaggkttcatgtctttgaggggtggggggtctggggggcacgacgctgctcagggcctctatcagctgcctcgggggctcagggcttcccgacctagcccagatt

SEQ ID NO: 11071 - DNA, 201 bp, Homo sapiens
tccggggcgggagcggagcccacgcctggatgggaggcggggagggttcatgtctttgaggggtggggggtctggggggcacgacgctgctcagggcctcyatcagctgcctcgggggctcagggcttcccgacctagcccagattccctctccgaaagctacagggctgagcggagcaggggggcgagtcgccccctggg

SEQ ID NO: 11072 - DNA, 201 bp, Homo sapiens
gtggacgttccccgagttcttcctgttctcagcagtcggccccattggccccagggaagggtgtcctggccccccactgtcttcctcagttgggcagctcygccgcgtcctcttcttcttggcctggctgacttctgctgtctctcctcagatttctaccactccaaacgccggctgatcttctccaagaggaagccctaa

SEQ ID NO: 11073 - DNA, 201 bp, Homo sapiens
cggagtggaagcagttttggcgggcgagcagcgccttgcaggaaactgactcatcactactccctccagcggtccgaggctctgcccacgcacctcccacyccgcgcgtgatttcctggaggccggcgccccctcccggccctggcgggaatagcacacaggctttcccgcggagtggggctggccggcgcgaaccgccgc

SEQ ID NO: 11074 - DNA, 201 bp, Homo sapiens
tccgcgcgtgatttcctggaggccggcgccccctcccggccctggcgggaatagcacacaggctttcccgcggagtggggctggccggcgcgaaccgccgyggctactcctgggctcatccgagatcaacccctatgccattaccaccccttcaaaggagcactccttaggttcaacagtattcactgagctcttactgga

SEQ ID NO: 11075 - DNA, 201 bp, Homo sapiens
gagaaggaggggtggtagaagaggagagggtgcctgcctagatcctagtcctgtcttgaactcccgagagccagggaatatccagcaccttgatgaagccmtaggcgggcgcctcctccttgtgcctatgatgtattgagacccagaatgtccatttcaaacataccagtgtgtctccgcttggctggcaacccaagagtg

SEQ ID NO: 11076 - DNA, 201 bp, Homo sapiens
ttcagatcctggctgtgccacttatgaactgtgtgatgttaggcaagttacttaacttatctgagccttggttgcctcttctgtaaaaagggagctaatakatatccactttttaggaggattgatatttttaaactgcttagaacagcccccaaacataaaaatatataaataaatcccaactcatgcctagcagagggt

SEQ ID NO: 11077 - DNA, 201 bp, Homo sapiens
gacccctttatggggcagtggcctttggcctttttagctgtatgactcaggggcaagtctcatatctcttccatctcctgccctttaaacttggtgtgaarttaccaagagcctcctctcccaaccagctgggacgtgaaactgtgggctccactgatcacaagcagtggggtgaggtggggtggagcagatgtggcatgt

SEQ ID NO: 11078 - DNA, 201 bp, Homo sapiens
aaactgaaggcagagaggaataatcatacttctgttttcaatgcacttctctatacgaagtgctgctggcacgttacctacattaactcagttaattctcwtgtctatcctctgagacagtcactattactatccccattttatagatgaggaaactagagctcagacaagttaagttgcttgcccagggtcacctagtaa

SEQ ID NO: 11079 - DNA, 201 bp, Homo sapiens
ctagctctcatgcttcaattcagcgaactctgcaggaccatcccagctccagggctcctggtgggatcagccaagtcctctgtgggcctccagcctccatyagttcccggttcttctctctgcccaattccgtttcttttatatccagacaagtgttgattgtgaatgcactccccaataaacttccttcaagcaaaactc

SEQ ID NO: 11080 - DNA, 201 bp, Homo sapiens
gcaggaccatcccagctccagggctcctggtgggatcagccaagtcctctgtgggcctccagcctccatcagttcccggttcttctctctgcccaattccrtttcttttatatccagacaagtgttgattgtgaatgcactccccaataaacttccttcaagcaaaactctatgtcagaatgtgatttctgggaaacctac

SEQ ID NO: 11081 - DNA, 201 bp, Homo sapiens
aatccagttgctgccaaggtcgtgcagtcactcagccctggagtcaagccagagcaggcaggtaggtgccagggctccctcatgggcaaactcactctccrttttccctctcctgaagggggaggagaggagccaggtagaccagccacctttaattttctttttgcctgcaaaacggtttccttggacacaggcaacacg

SEQ ID NO: 11082 - DNA, 201 bp, Homo sapiens
cttggtgtgaagttaccaagagcctcctctcccaaccagctgggacgtgaaactgtgggctccactgatcacaagcagtggggtgaggtggggtggagcaratgtggcatgtgtcccgggcttcctgcctcatgaggactcagcagagctttcacccccagaaactgcaagttgggacttgtccctaggaaaatccagttg

SEQ ID NO: 11083 - DNA, 201 bp, Homo sapiens
gtttggaaacccagggtgtaagggcctagctctcatgcttcaattcagcgaactctgcaggaccatcccagctccagggctcctggtgggatcagccaagkcctctgtgggcctccagcctccatcagttcccggttcttctctctgcccaattccgtttcttttatatccagacaagtgttgattgtgaatgcactcccc

SEQ ID NO: 11084 - DNA, 201 bp, Homo sapiens
tgatcaatttcttgagtatgtgtctgtagccatgctctttaaacttgtacatggccccatttatggatgaggaaactgagacctagagacattaagtggcyttttaaagcttacgtagtaactggcagagctaggaccacaacccgggtgctttttgccccaaagtcccgggtacttttacttggcagagcagggttaccc

SEQ ID NO: 11085 - DNA, 201 bp, Homo sapiens
aagtggctttttaaagcttacgtagtaactggcagagctaggaccacaacccgggtgctttttgccccaaagtcccgggtacttttacttggcagagcagkgttaccctacttggggatctgggtcgggggacttaggaggctggaggaactgtcagactgtttcttcttttgggaattgaccttctggccagggctgcga

SEQ ID NO: 11086 - DNA, 201 bp, Homo sapiens
gccaggctggctgagctctgctggtgggggtcaggcctcctgtgggaaggaagcaggaagaccagctggaaggagtgagagagaccctctggtaggaagaygtcacctgaggtgacacagcaaagcccggccaggtaacatagtgtctaatctccgccgtgaccagggccttccttgtatctctgctgcaggcgccatgtc

SEQ ID NO: 11087 - DNA, 201 bp, Homo sapiens
gtcgtgcagtcactcagccctggagtcaagccagagcaggcaggtaggtgccagggctccctcatgggcaaactcactctccgttttccctctcctgaagsgggaggagaggagccaggtagaccagccacctttaattttctttttgcctgcaaaacggtttccttggacacaggcaacacgaggcaggggctgccaggt

SEQ ID NO: 11088 - DNA, 201 bp, Homo sapiens
atttattgggaatgttcattatgccaggccctttgccaagcttctaaggtagatttatttagtccttatagcaatgttataacataagacattcttgtcaycctgcccgcctttctttttgagacaggtgtcttaactctgttggccagactggagtgcagtgatacgatcatggctcactgcagcttcaaactcctgggc

SEQ ID NO: 11089 - DNA, 201 bp, Homo sapiens
tggctcactgcagcttcaaactcctgggctcaagcgatcttcctacctcagcctcctgggtagctgggaagctgggactatagttgtacaccactacgccyggttaattttttgagtttttgtagagacaaggtctcaccatgttgcccgggctggtcttgaactcctgagctcaagcagtcctcctgcctcagcctccca

SEQ ID NO: 11090 - DNA, 201 bp, Homo sapiens
acttggcatgatggagacgccagccagcgagatgatgccaaccagatttgccgaaattattgagaagaatctcaaaagcgctagtagtaaaccgagtttcrtatcagacccaggtcttggattgaggaacaggcaatgggatcattcctcagtgtggccaaaggatctgacgagccctcagtcttcttggaaattcactac

SEQ ID NO: 11091 - DNA, 201 bp, Homo sapiens
ggctcactgcagcttcaaactcctgggctcaagcgatcttcctacctcagcctcctgggtagctgggaagctgggactatagttgtacaccactacgcccrgttaattttttgagtttttgtagagacaaggtctcaccatgttgcccgggctggtcttgaactcctgagctcaagcagtcctcctgcctcagcctcccaa

SEQ ID NO: 11092 - DNA, 201 bp, Homo sapiens
agaatgtccatttcaaacataccagtgtgtctccgcttggctggcaacccaagagtgcccatctgaggaattgtgccaaacacttgcttgaatcttcaatytggattaagttggtctcgggaggcagggcctcagcaatctatattttgaaaaaactccctaggtgcttttctttctttctttctttctttctttctttct

SEQ ID NO: 11093 - DNA, 201 bp, Homo sapiens
tgtctctcctcagatttctaccactccaaacgccggctgatcttctccaagaggaagccctaatccgcccacaggaagcctgcagtcctggaagcgcgagsgcctcaaaggcccgctctacatcttctgccttagtctcagtttgtgtgtcttaattattatttgtgttttaatttaaacacctcctcatgtacataccct

SEQ ID NO: 11094 - DNA, 201 bp, Homo sapiens
gtggatccctgtagagatgctcaggctgctgaggagggcgcggtgcttggtctctatgaatacgatgacctaaagcaaaaaaagaagatggctatgtcggygaagctctatggaactggggatcaggaggcctggcagaaaggagtcctgtttgcttctgggcagaacttggcatgatggagacgccagccagcgagatga

SEQ ID NO: 11095 - DNA, 201 bp, Homo sapiens
tgaagtccgtgtccctggaggggcccaggaagggcgaggaaagcggagtggagtaagttcgtctaggatcggtcccgggtggctctgggatccaatctgckccgccctggcccaggtcccaggttcaggtcctttacgccactgtgtccaccacctggctgagcgctgaggtcagcgcgggctgtttcctggcccttggga

SEQ ID NO: 11096 - DNA, 201 bp, Homo sapiens
cgcaggcgagggactgggggaggagggaagtgccctcctgcagcacgcgaggttccgggaccggctggcctgctggaactcggccaggctcagctggctcsgcgctgggcagccaggagcctgggccccggggagggcggtcccgggcggcgcggtgggccgagcgcgggtcccgcctccttgaggcgggcccgggcgggg

SEQ ID NO: 11097 - DNA, 201 bp, Homo sapiens
agtctatttgaaatgcctgaaagcagaggggcttcaaggcagtgggagaaggtgcctgtcctctgctggacatttgacaaccagccctttggatggtttgkatgtataggagcgaaggtgcagacagcagtggggcttagagtggggtcctgaggctgtgccgtggcctttctggggtttagccacaatcctggcctgact

SEQ ID NO: 11098 - DNA, 201 bp, Homo sapiens
taactggcagagctaggaccacaacccgggtgctttttgccccaaagtcccgggtacttttacttggcagagcagggttaccctacttggggatctgggtygggggacttaggaggctggaggaactgtcagactgtttcttcttttgggaattgaccttctggccagggctgcgattaggaaactgctggactctggcaa

SEQ ID NO: 11099 - DNA, 201 bp, Homo sapiens
tgaggtgacacagcaaagcccggccaggtaacatagtgtctaatctccgccgtgaccagggccttccttgtatctctgctgcaggcgccatgtcagaaccrgctggggatgtccgtcagaacccatgcggcagcaaggcctgccgccgcctcttcggcccagtggacagcgagcagctgagccgcgactgtgatgcgctaa

SEQ ID NO: 11100 - DNA, 201 bp, Homo sapiens; identical to SEQ ID NO: 1351

SEQ ID NO: 11101 - DNA, 201 bp, Homo sapiens
agccaggcatagtggcaggagcctgtaatcccagctacttgggaggctggggcaggagaattgcttgaacctgggaggtggaggttgcagtgaactgatawcgcaccattgcattccggcctgggcgacagagtgaaactccatctcgaaataaataaataaataaataaataaataaataggcctggcatggtggctcac

SEQ ID NO: 11102 - DNA, 201 bp, Homo sapiens; identical to SEQ ID NO: 1353

SEQ ID NO: 11103 - DNA, 201 bp, Homo sapiens
ctggggcaggagaattgcttgaacctgggaggtggaggttgcagtgaactgatatcgcaccattgcattccggcctgggcgacagagtgaaactccatctygaaataaataaataaataaataaataaataaataggcctggcatggtggctcacacctgtaatctcagcactttgggaggctgaggcagccagataattt

SEQ ID NO: 11104 - DNA, 201 bp, Homo sapiens
gggcaggagaattgcttgaacctgggaggtggaggttgcagtgaactgatatcgcaccattgcattccggcctgggcgacagagtgaaactccatctcgaaataaataaataaataaataaataaataaataggcctggcatggtggctcacacctgtaatctcagcactttgggaggctgaggcagccagataatttaag

SEQ ID NO: 11105 - DNA, 201 bp, Homo sapiens
ggcaggagaattgcttgaacctgggaggtggaggttgcagtgaactgatatcgcaccattgcattccggcctgggcgacagagtgaaactccatctcgaaataaataaataaataaataaataaataaataggcctggcatggtggctcacacctgtaatctcagcactttgggaggctgaggcagccagataatttaagg

SEQ ID NO: 11106 - DNA, 201 bp, Homo sapiens; identical to SEQ ID NO: 1357

SEQ ID NO: 11107 - DNA, 201 bp, Homo sapiens
gaggctaaggcaggaggacggcttgagcccaagagtgtgagaccagtttgggcaacatagcgagactcttatctctacaaaaaaaaaaaaaaaaaaaatarccaggcgtggtggagcgtgcctgtagtcccagctacctgggaggctgaggtgggaggatcacttgaggagcttgggaagtcgaggctgcagtgagccctg

SEQ ID NO: 11108 - DNA, 201 bp, Homo sapiens
gcaggagaattgcttgaacctgggaggtggaggttgcagtgaactgatatcgcaccattgcattccggcctgggcgacagagtgaaactccatctcgaaataaataaataaataaataaataaataaataggcctggcatggtggctcacacctgtaatctcagcactttgggaggctgaggcagccagataatttaaggt

SEQ ID NO: 11109 - DNA, 201 bp, Homo sapiens
caggagaattgcttgaacctgggaggtggaggttgcagtgaactgatatcgcaccattgcattccggcctgggcgacagagtgaaactccatctcgaaatwaataaataaataaataaataaataaataggcctggcatggtggctcacacctgtaatctcagcactttgggaggctgaggcagccagataatttaaggtc

SEQ ID NO: 11110 - DNA, 201 bp, Homo sapiens
gaaataaataaataaataaataaataaataaataggcctggcatggtggctcacacctgtaatctcagcactttgggaggctgaggcagccagataatttraggtcaggagttcaagaccagcttggctaacatgatgaaacatgacgaaacccccgtctctgctaaaaattcaaaaattagccagtcatggtggtacatg

SEQ ID NO: 11111 - DNA, 201 bp, Homo sapiens
tctgctggacatttgacaaccagccctttggatggtttggatgtataggagcgaaggtgcagacagcagtggggcttagagtggggtcctgaggctgtgcygtggcctttctggggtttagccacaatcctggcctgactccagggcgaggcaggccaagggggtctgctactgtgtcctcccacccctacctgggctccc

SEQ ID NO: 11112 - DNA, 201 bp, Homo sapiens
aaatccagttgctgccaaggtcgtgcagtcactcagccctggagtcaagccagagcaggcaggtaggtgccagggctccctcatgggcaaactcactctcygttttccctctcctgaagggggaggagaggagccaggtagaccagccacctttaattttctttttgcctgcaaaacggtttccttggacacaggcaacac

SEQ ID NO: 11113 - DNA, 201 bp, Homo sapiens
acacaggcaacacgaggcaggggctgccaggtgtctagacttcagatcacctgatgtgcctggcaggatgtggctcagcctgggagaaatcatcccttgcrctgccccgcccggcccctccttacccctaggccacccgcctgacgacatccttgggaaaggccctcagcctacagcacctgtcagctgctgtctgaagga

SEQ ID NO: 11114 - DNA, 201 bp, Homo sapiens
ttcacaagtgcaggagagaatcttgataaattgatagctggaaagctgagagagactttgaacatatctggaccacctctgaaggcaggcaagactcgaamcttttatggtctgcatcaggacttccccagcgtggtgctagttggcctcggcaaaaaggcagccagaatcgacgaacaggaaaactggcaggaaggcaaa

SEQ ID NO: 11115 - DNA, 201 bp, Homo sapiens
tctgctgtctctcctcagatttctaccactccaaacgccggctgatcttctccaagaggaagccctaatccgcccacaggaagcctgcagtcctggaagcrcgagggcctcaaaggcccgctctacatcttctgccttagtctcagtttgtgtgtcttaattattatttgtgttttaatttaaacacctcctcatgtacat

SEQ ID NO: 11116 - DNA, 201 bp, Homo sapiens
ccaccatgcccggctgatttttgtatttttaatggagacggggtttcaccatattggccaggctggtctcaaaactcctgaccctgtgatctgcccgcctyggcctcccaaagtgctgggattacaggcgtaagccaccacgcccggccagtatatatttttaattgagaagcaaaattgtacttcagatttgtgatgcta

SEQ ID NO: 11117 - DNA, 201 bp, Homo sapiens; identical to SEQ ID NO: 1354

SEQ ID NO: 11118 - DNA, 201 bp, Homo sapiens
gctggagtgcaggtggcatgatctcagctcactgcaacctccgcctcctaggttcaagcgattctcccacctcagccacctgaatacctgggactacaggygcccaccaccatgcccggctgatttttgtatttttaatggagacggggtttcaccatattggccaggctggtctcaaaactcctgaccctgtgatctgcc

SEQ ID NO: 11119 - DNA, 201 bp, Homo sapiens; identical to SEQ ID NO: 1355

SEQ ID NO: 11120 - DNA, 201 bp, Homo sapiens
gtcccctaaggactagcgaggaggtgactcactgtgacaaggagaccccagggaacggactgtatgaggtcagaaccccgcccgggatggggtacagcggractccagaagccctctcccctgccccttcgcggtctccgtcctcccatcggcacagtgacctatttggctggaacagtttgttcccaaggaagccgggca

SEQ ID NO: 11121 - DNA, 201 bp, Homo sapiens
tcagccctggagtcaagccagagcaggcaggtaggtgccagggctccctcatgggcaaactcactctccgttttccctctcctgaagggggaggagaggakccaggtagaccagccacctttaattttctttttgcctgcaaaacggtttccttggacacaggcaacacgaggcaggggctgccaggtgtctagacttcag

SEQ ID NO: 11122 - DNA, 201 bp, Homo sapiens
acctataatcccagcactttgggaggctaaggcaggaggacggcttgagcccaagagtgtgagaccagtttgggcaacatagcgagactcttatctctacaaaaaaaaaaaaaaaaaaaatagccaggcgtggtggagcgtgcctgtagtcccagctacctgggaggctgaggtgggaggatcacttgaggagcttgggaa

SEQ ID NO: 11123 - DNA, 201 bp, Homo sapiens
tgagaagcaaaattgtacttcagatttgtgatgctaggaacatgagcaaactgaaaattactaaccacttgtcagaaacaataaatccaactttttgtgcaaaaaaaaaaatacaaatattagctgggcatggtggtgcatgcctgtaatcccagctactcgggaggctgaggcagaattgcttgaacctgggaggcggag

SEQ ID NO: 11124 - DNA, 201 bp, Homo sapiens; identical to SEQ ID NO: 1361

SEQ ID NO: 11125 - DNA, 201 bp, Homo sapiens
tgatagctggaaagctgagagagactttgaacatatctggaccacctctgaaggcaggcaagactcgaaccttttatggtctgcatcaggacttccccagygtggtgctagttggcctcggcaaaaaggcagccagaatcgacgaacaggaaaactggcaggaaggcaaagaaaacatcagagctgctgttgcagcaggat

SEQ ID NO: 11126 - DNA, 201 bp, Homo sapiens
ctggaaagctgagagagactttgaacatatctggaccacctctgaaggcaggcaagactcgaaccttttatggtctgcatcaggacttccccagcgtggtsctagttggcctcggcaaaaaggcagccagaatcgacgaacaggaaaactggcaggaaggcaaagaaaacatcagagctgctgttgcagcaggatgcaggc

SEQ ID NO: 11127 - DNA, 201 bp, Homo sapiens
cagggaagggtgtcctggccccccactgtcttcctcagttgggcagctccgccgcgtcctcttcttcttggcctggctgacttctgctgtctctcctcagrtttctaccactccaaacgccggctgatcttctccaagaggaagccctaatccgcccacaggaagcctgcagtcctggaagcgcgagggcctcaaaggccc

SEQ ID NO: 11128 - DNA, 201 bp, Homo sapiens
tgtgatttctgggaaacctacctaagatacccactaaaatatagataattactaaattccaagggatgcctttcctggggatgtttgtacagcaattatcmtcataactaatattcatggagtgatttctatgtgccaagctaagcactttgcttttaagatcatatttaatgaagaacagagcctcacagtaagaataca

SEQ ID NO: 11129 - DNA, 201 bp, Homo sapiens
ggggactatatactttcctgcttgggcaatggtaagacctgaccctaattactggtctagagcaggggtaggcaaaccatagttccatgcaccagctgccygtttttgtatagaaagttttattggaatgcacgcacacttatttgtttacctgttgcccatggttgtttttgcactgtcgttttaagtgcaaaagtagaa

SEQ ID NO: 11130 - DNA, 201 bp, Homo sapiens
cagcagtgtatacgggctatgtggggagtattcaggagacagacaactcactcgtcaaatcctccccttcctggccaacaaagctgctgcaaccacagggrtttcttctgttcaggtgagtgtagggtgtagggagattggttcaatgtccaattcttctgtttccctggagatcaggttgcccttttttggtagtctctc

SEQ ID NO: 11131 - DNA, 201 bp, Homo sapiens
ggctgcctgttttcaggtgaggaaggggatggtaggagacaggagacctctaaagaccccaggtaaaccttagcctgttactctgaacagggtatgtgatmtgccagcagatccttgcgacagggctgggatctgatgcatgtgtgcttgtgtgagtgtgtgctgggagtcagattctgtgtgtgacttttaacagcctgc

SEQ ID NO: 11132 - DNA, 201 bp, Homo sapiens
ctgaggtgacacagcaaagcccggccaggtaacatagtgtctaatctccgccgtgaccagggccttccttgtatctctgctgcaggcgccatgtcagaacyggctggggatgtccgtcagaacccatgcggcagcaaggcctgccgccgcctcttcggcccagtggacagcgagcagctgagccgcgactgtgatgcgcta

SEQ ID NO: 11133 - DNA, 201 bp, Homo sapiens
ccttgcgacagggctgggatctgatgcatgtgtgcttgtgtgagtgtgtgctgggagtcagattctgtgtgtgacttttaacagcctgctcccttgccttyttcagggcagaagtcctcccttagagtgtgtctgggtacacattcaagtgcatggttgcaaacttttttttttaaagcactgaatagtactagacactta

SEQ ID NO: 11134 - DNA, 201 bp, Homo sapiens
ggcctccagcctccatcagttcccggttcttctctctgcccaattccgtttcttttatatccagacaagtgttgattgtgaatgcactccccaataaactyccttcaagcaaaactctatgtcagaatgtgatttctgggaaacctacctaagatacccactaaaatatagataattactaaattccaagggatgcctttc

SEQ ID NO: 11135 - DNA, 201 bp, Homo sapiens
gctgggatctgatgcatgtgtgcttgtgtgagtgtgtgctgggagtcagattctgtgtgtgacttttaacagcctgctcccttgcctttttcagggcagargtcctcccttagagtgtgtctgggtacacattcaagtgcatggttgcaaacttttttttttaaagcactgaatagtactagacacttagtaggtacttaa

SEQ ID NO: 11136 - DNA, 201 bp, Homo sapiens
agcagagagccccgggcaggaggcaaaagtcctgtgttccaactatagtcatttctttgctgcatgatctgagttaggtcaccagacttctctgagccccmgtttccccagcagtgtatacgggctatgtggggagtattcaggagacagacaactcactcgtcaaatcctccccttcctggccaacaaagctgctgcaac

SEQ ID NO: 11137 - DNA, 201 bp, Homo sapiens
tatgagagccataagagaaggaggggtggtagaagaggagagggtgcctgcctagatcctagtcctgtcttgaactcccgagagccagggaatatccagcwccttgatgaagccctaggcgggcgcctcctccttgtgcctatgatgtattgagacccagaatgtccatttcaaacataccagtgtgtctccgcttggctg

SEQ ID NO: 11138 - DNA, 201 bp, Homo sapiens
acagtttgttcccaaggaagccgggcactggaggtccgggacaccgcgtcgggtccccgctccgcggcgcgctgtaggggtcggggagtcacggccctgckctgggcgggctctaaccagcctgtcagtcggggaagggcaagggtctcctctacctctttcccaccgcggccgggagaatcgcggcccagcctgtcctcg

SEQ ID NO: 11139 - DNA, 201 bp, Homo sapiens
cagatcaactgaggtcgaggtttgagaccagcctgaccaacatagagaaaccctctctctactaaaatacaaacattgggtggggcgagtcatcgtctgamgtctggccgtgagatgtttcgggagccggggtctctccgctgcagacatgacgaagggccttgttttaggaatctattccaaagaaaaagaagatgatgt

SEQ ID NO: 11140 - DNA, 201 bp, Homo sapiens
agggagcctcaaggaaaccgtgtggaacacaccctacaattttctctctggagtactcacctggctatctaggctacttatctaaggacactgtccatcaytgatagggctgcctctagggcctagtccagattgctcctcatggggtggaagaaattcctgtaatggtgaagaaaaccagagggatgaagacatttgagg

SEQ ID NO: 11141 - DNA, 201 bp, Homo sapiens
ggcctggctgacttctgctgtctctcctcagatttctaccactccaaacgccggctgatcttctccaagaggaagccctaatccgcccacaggaagcctgyagtcctggaagcgcgagggcctcaaaggcccgctctacatcttctgccttagtctcagtttgtgtgtcttaattattatttgtgttttaatttaaacacc

SEQ ID NO: 11142 - DNA, 201 bp, Homo sapiens; identical to SEQ ID NO: 1363

SEQ ID NO: 11143 - DNA, 201 bp, Homo sapiens
aacaggaaaactggcaggaaggcaaagaaaacatcagagctgctgttgcagcaggatgcaggcagattcaagacctggagctctcttccgtggaggtggawccctgtagagatgctcaggctgctgaggagggcgcggtgcttggtctctatgaatacgatgacctaaagcaaaaaaagaagatggctatgtcggtgaagc

SEQ ID NO: 11144 - DNA, 201 bp, Homo sapiens
gagggtgcctgcctagatcctagtcctgtcttgaactcccgagagccagggaatatccagcaccttgatgaagccctaggcgggcgcctcctccttgtgcstatgatgtattgagacccagaatgtccatttcaaacataccagtgtgtctccgcttggctggcaacccaagagtgcccatctgaggaattgtgccaaaca

SEQ ID NO: 11145 - DNA, 201 bp, Homo sapiens
caatgcagacaaaccaccccttgtttgttgggaaaggaattacctttgacagtggtggtatctccatcaaggcttctgcaaatatggacctcatgagggcygacatgggaggagctacaactatatgctcagccattgtgtctgctgcaaatctcagtttgcccattaatattataggtctggcccctctgtgaaaacatg

SEQ ID NO: 11146 - DNA, 201 bp, Homo sapiens; identical to SEQ ID NO: 1365

SEQ ID NO: 11147 - DNA, 201 bp, Homo sapiens; identical to SEQ ID NO: 1366

SEQ ID NO: 11148 - DNA, 201 bp, Homo sapiens; identical to SEQ ID NO: 1729

SEQ ID NO: 11149 - DNA, 201 bp, Homo sapiens; identical to SEQ ID NO: 1368

SEQ ID NO: 11150 - DNA, 201 bp, Homo sapiens
tccccatgtgtcctggttcccgtttctccacctagactgtaaacctctcgagggcagggaccacaccctgtactgttctgtgtctttcacagctcctcccmcaatgctgaatatacagcaggtgctcaataaatgattcttagtgactttacttgtaatattactattgtggttattataccttataagaacaaataaatg

SEQ ID NO: 11151 - DNA, 201 bp, Homo sapiens
ttactatacctttttaaggcttaggtctggaatgggcacaaggttacttctgtcccattctattggctaaaagagtcacaagccagaaatgttcacggggmggcaactacaaaacagtgtgaatacccagaggtatacctcactgggagacattgacttccacaaaccacaactacccacaactacatggataaatattag

SEQ ID NO: 11152 - DNA, 201 bp, Homo sapiens; identical to SEQ ID NO: 1356

SEQ ID NO: 11153 - DNA, 201 bp, Homo sapiens
tgatgaagccctaggcgggcgcctcctccttgtgcctatgatgtattgagacccagaatgtccatttcaaacataccagtgtgtctccgcttggctggcamcccaagagtgcccatctgaggaattgtgccaaacacttgcttgaatcttcaatttggattaagttggtctcgggaggcagggcctcagcaatctatattt

SEQ ID NO: 11154 - DNA, 201 bp, Homo sapiens
tagaggaagaagactgggcatgtctgggcagagatttccagactctgagcagcctgagatgtcagtaattgtagctgctccaagcctgggttctgtttttyagtgggatttctgttcagatgaacaatccatcctctgcaattttttaaaagcaaaactgcaaatgtttcaggcacagaaaggaggcaaaggtgaagtcca

SEQ ID NO: 11155 - DNA, 201 bp, Homo sapiens
tcagaagaaccagtagacacttccagaattgtcctttatttatgtcatctccataaaccatctgcaaatgagggttatttggcatttttgtcattttggarccacagaaataaaggatgacaagcagagagccccgggcaggaggcaaaagtcctgtgttccaactatagtcatttctttgctgcatgatctgagttaggt

SEQ ID NO: 11156 - DNA, 201 bp, Homo sapiens
cctcgctcaggggagcaggctgaagggtccccaggtggacctggagactctcagggtcgaaaacggcggcagaccagcatgacaggtgcggacatgtgcasggaaggactttgtaagggaccaggattctcagaatccatggtccaagggctgacctgtctggtcctggtccagcatgctccaggtagaaggaaacaggcc

SEQ ID NO: 11157 - DNA, 201 bp, Homo sapiens
ctgtgtgtgacttttaacagcctgctcccttgcctttttcagggcagaagtcctcccttagagtgtgtctgggtacacattcaagtgcatggttgcaaacttttttttttaaagcactgaatagtactagacacttagtaggtacttaagaaatattgaatgtcgtggtggtggtgagctagaagttataaaaaaaattct

SEQ ID NO: 11158 - DNA, 201 bp, Homo sapiens
cctcatctgtgaaataaacgggactgaaaaatcattctggcctcaagatgctttgttggggtgtctaggtgctccaggtgcttctgggagaggtgacctastgagggatcagtgggaatagaggtgatattgtggggcttttctggaaattgcagagaggtgcatcgtttttataatttatgaatttttatgtattaatgt

SEQ ID NO: 11159 - DNA, 201 bp, Homo sapiens
cgaggctgcagtgagccctgactgcaccactgcactccagcctgggcaacagagtgagaccttgtctgtctccctcaaaaagaaaaaaaccaaaagaatgyttccagcagcattattattaacagacccaagctagaaataactgaaatgtccataacagaatagatatgcaaattgtggtatatttatatagtggaaagt

SEQ ID NO: 11160 - DNA, 201 bp, Homo sapiens
cccaagctagaaataactgaaatgtccataacagaatagatatgcaaattgtggtatatttatatagtggaaagttatccaacattacaaaaaacaaggtrctgttgcatgcatcttctggttgtctattcataattaaccaccccaagactgagtggcttaaaacaataatcatttatttgctcccaacactgcaatttg

SEQ ID NO: 11161 - DNA, 201 bp, Homo sapiens
tctatgtccccctctctgaaaggaggctataatggtgttttgggtcatctagaagcagtgaaagctcaaaccctttatctaacagacctcaaatgatctgrttattcccagttccacactgtacagctattccggtaaatagccagagggtgctttcgggaagaatcaaggaaacgtttattttatatgtttatagtggca

SEQ ID NO: 11162 - DNA, 201 bp, Homo sapiens
tcaaatgatctggttattcccagttccacactgtacagctattccggtaaatagccagagggtgctttcgggaagaatcaaggaaacgtttattttatatrtttatagtggcattacggatctttctcttccatcagtgcgtcctgggtcagaactggctcaaagctggaaactaggtaagagattgcgattttctgtctc

SEQ ID NO: 11163 - DNA, 201 bp, Homo sapiens
gcaagactctcattaaatgctcacctctcttgccctaaggacaccactgctgcagagccctgcagaccaaagacccctggttaacattcaggccttgctgyctgtcattataattgtgtccaccttgcctctgatgattaagtggccctatgtggtctctgctcttccagaaccttaatgtctccatcgacagtggccatg

SEQ ID NO: 11164 - DNA, 201 bp, Homo sapiens
cgtctatccaaatatctccattcaggtcctaatgccccattctttccctatcagaattctgaccctagggtagtaggtctgctgaggctgtgcctttagtstctcttgaagcttcaccccttttacaatcagatcctgggcctgattttcagcacagcctactcttgggccatgagagataagtgtcatttagaatgctgt

SEQ ID NO: 11165 - DNA, 201 bp, Homo sapiens
ccagagggatgaagacatttgaggtgggaaatcattagcctgccaggaactatctaccaaaggtttaggtgaacacagatatgggccagatagtgcctgakctcacgcccctaggaagtggtgaggggccaggatgtccacgctgatgactccagatcacactgcctgctcaatacaccagaaaggggaagtgcctcaccc

SEQ ID NO: 11166 - DNA, 201 bp, Homo sapiens; identical to SEQ ID NO: 1725

SEQ ID NO: 11167 - DNA, 201 bp, Homo sapiens; identical to SEQ ID NO: 1726

SEQ ID NO: 11168 - DNA, 201 bp, Homo sapiens; identical to SEQ ID NO: 1727

SEQ ID NO: 11169 - DNA, 201 bp, Homo sapiens
agaatatattatagcttaacatcattattcatcagataaatgcaaattaagataccacaataagataccaccatacacttaccagaatgattaaaaaagaytgacagtgccaagcattggcaaggttatggagcaactggatctcttatttaaaaaaactgtttgggccgggcgcagtggctcacacctagaatcccagtg

SEQ ID NO: 11170 - DNA, 201 bp, Homo sapiens; identical to SEQ ID NO: 1728

SEQ ID NO: 11171 - DNA, 201 bp, Homo sapiens
cagaacttggcatgatggagacgccagccagcgagatgatgccaaccagatttgccgaaattattgagaagaatctcaaaagcgctagtagtaaaccgagkttcatatcagacccaggtcttggattgaggaacaggcaatgggatcattcctcagtgtggccaaaggatctgacgagccctcagtcttcttggaaattca

SEQ ID NO: 11172 - DNA, 201 bp, Homo sapiens
ggccaatcacgcaagttcaggagttccagaccagcctagccaacatggtgaaaccccatctctactaaaaatacaaaaaagtagccgggcgtagtggtggscacctgtaatcccagctactcaggaggctgaggcaggagaatcactcgaacctgggaggtggaggttgcagtgagctcagatcgcgccattgcactccag

SEQ ID NO: 11173 - DNA, 201 bp, Homo sapiens
tcaagaaactcttgtgcctcagcctcccaagtagctgggattacaagcgcgtaccaccacacccagctaatattttttgtattttttagtagagacagggkttcgtcatgttggccaggctggtctcgaactcccaacctcaggtgatctgcctgcctcagcctcccaaagtgctgggattacaggcatgagccaccgcgc

SEQ ID NO: 11174 - DNA, 201 bp, Homo sapiens
caagggttgggtagagcacctggccccataaatgtctgccctcaccatctgcccttgtcccttcagctgcccggggcagcatgggtggctggccttgctcycacttcttgggtgagggtctgatgctgaagatcgcacagccgacacgtggaggagggagagcctggccttccacctcctggccagtgccctctccatctg

SEQ ID NO: 11175 - DNA, 201 bp, Homo sapiens
cctcttccctgagtgctcctaggaccctacgtgctagcaggtcactcaggaccgctatggccgtggaagggctgtgtctttgcaagaggtggaaaggtgcytgacagcattgcctacaggcagtaaacccaaggtgtccaggccatccctcccttaccacccagccagcaaggaaaacaagcccggccaggaggaacttgg

SEQ ID NO: 11176 - DNA, 201 bp, Homo sapiens
ttccaggtcccctgaggccctgcttctctcttgatcccccacagcccagtgtcgagttaccagcgagtgcctgttctgcttgggtgggtgtccagtgtggkactggtcagaggtaatttttggatctcagagctgctcacagctgttggcggtctgggatggaagaagcaggcgtggcttcggttggcccacattatcctc

SEQ ID NO: 11177 - DNA, 201 bp, Homo sapiens
tgctcactacaacctttacctcccaggttctagtgattctcctgcctctcagcctcctgagtagctgggattgcaagctcaccccaccaaacccggctaaytgtagctgggattacaggcgtgagccactgcgcccggcccattttaaccatttctaagtgtatggtccaatggtattaaatacagtcacattattgtaca

SEQ ID NO: 11178 - DNA, 201 bp, Homo sapiens
tcacctgcgggggattccgcacaccagcacccggctgtgtctcccccatttcttatgagcagcgataagtcaatccccttcgacggtttaatcctccagcsactgtttacagaaaactttctgtgtgcttggaactttataaagtgcatccctcttctcagcaaccctgggaagacagtgcaagccccgttttcccactgg

SEQ ID NO: 11179 - DNA, 201 bp, Homo sapiens
ataacaccaacctcctgggctgatgggaaggtcacatgaactgcatgtcagcccagggcctggcacatactaggtgcttggcagatgtcgtgtcttgtatmcggattaggttctgagctgagcagacactgagagctttggatggccctccacaatcgtccacattgccgatgacaccctgtttggtgccgtgcactggct

SEQ ID NO: 11180 - DNA, 201 bp, Homo sapiens
attagccgggcatggtggtgcacacctgtaatcccccagctactcaggaggctgaggcaggagaactgcttgaattcatgtccacatttagtggacaatakcctcccggaggtggagattgcagtgagctgagattgagctacttgtactccagcctgggcgacagacaaagactttgtctcaaaaaaaaaaagagtgaat

SEQ ID NO: 11181 - DNA, 201 bp, Homo sapiens
aagaaaagaaagaaagagggtcttaccatgttgcccagactggtctcgaattcctgggctcaactggtcttcccacctcatcctctcaatgtgctggcatkactggtgtgaaccactgtgcccggccaagcctttctaactaaatgctaattgagctccttctgtatgccactggggcactgtgtatttctctctctgtgt

SEQ ID NO: 11182 - DNA, 201 bp, Homo sapiens
gtgacagatgaggaaacaaggtaccaagaagtcaaatgctcaatgccacagagccagagagtagcgagcttggattggaacccaggtggtctggcctcagrccctgtcccaggctgtcaggacctctagcttgtcctgggggataggggtccatggtggtgcctacttccctgacacccagtgcctgactttccaagtcac

SEQ ID NO: 11183 - DNA, 201 bp, Homo sapiens
ccatgttggccaggctggtttcgaactcctgacctcaggcaatccgcccacttcatcctcccaaagtgctgggattacaggtgtgagccaccgccaccggmctgttcttgccttttatgtaaatggaatcatgcagcgagtgttcctttgtggctgactctattactctgacttacgtctgtgagatttacccgttatgtg

SEQ ID NO: 11184 - DNA, 201 bp, Homo sapiens
cccttggtaaagacacagcctgttaggctcgtgtgggcctccagtatgttcaccaggggaatggctgggatttctcggcactctgcatcatccatcttttyttataggtgggaaaataaacaactttgtgatcctcctgatggcctgtgcatgagagtctttcaagaagagggctctctgccagctcaggagtcttccgcc

SEQ ID NO: 11185 - DNA, 201 bp, Homo sapiens
cccatagaaagtgttaggggctgaattgtgtccccccccaaattcatatgttgaattcctaatccctaatacctctaaagtccccatctccaaatgcagtyacattcaacgaggtaattaaggtaaaagtgagatcatatgaatgggccctaatccaatacagcaggagttcttataagaagggattagggaccaggtgtg

SEQ ID NO: 11186 - DNA, 201 bp, Homo sapiens
aatgcaaaccatgacacccatagaaagtgttaggggctgaattgtgtccccccccaaattcatatgttgaattcctaatccctaatacctctaaagtcccyatctccaaatgcagtcacattcaacgaggtaattaaggtaaaagtgagatcatatgaatgggccctaatccaatacagcaggagttcttataagaaggga

SEQ ID NO: 11187 - DNA, 201 bp, Homo sapiens
gcgccaaagctgcctcccctgcagcctcggtgacttcccgggtctctccctccggccctggtgtcccgggtgagcccagcacacgttgggattttggttgkttgttggcctggcccgactgtccctgtctctgagggcagagtcgggtcccatcccgggacacgcctggggttagccaccgacctgcagcctcccggccga

SEQ ID NO: 11188 - DNA, 201 bp, Homo sapiens
gatccaccggctctccctcggcctctgcttggcagacgcccctgggtcctgcctttgaggtcagagagactttttaggagaagaggtgaggaatccgagcyacagatcacactagtcagaacctccccacctggggtggccccatcacctctcccctgccatgagcaagggggtatacatttccatcttgcttcgatttca

SEQ ID NO: 11189 - DNA, 201 bp, Homo sapiens
ggagtagtagactgatttcatcttgatagtctgggtcagccaccccagccaacactgtaactcccttcttagcctgttgacttaaaggtaggaggagcttyaagtgtccaggtggcaatcttaatttccagtttaatggaatccttgttctgtctcctggtggcggcgttcctccctctggaactaagacctctaggccag

SEQ ID NO: 11190 - DNA, 201 bp, Homo sapiens
ggcaacttggtgattctctctttgcccccactttatagaatacctaggatcatgtgagatcatttgtgcgttcattcattcacggacatttattgaatgamtgcttagggcaggcatgggggcaggaggcagaatgagacagtgtctggctcagactcatggcactaagtacagagttaattatttgtgctaagtgctggg

SEQ ID NO: 11191 - DNA, 201 bp, Homo sapiens
tagccaggagtgtgccaacgtctacggctcctaccagtgttactgccggcgaggctaccagctcagcgatgtggatggagtcacctgtgaaggtgcggacrcccctgcctgctgagggggaaagcaccccctggtcttgccatgacacagcagcacggcctctgactttcaaaatccacagggaagagcctgctgggattt

SEQ ID NO: 11192 - DNA, 201 bp, Homo sapiens
ttcatgatgtctggaaccctgggaactgtcccagcacctgtttagcacatgtgtgcatgcgaaggggatctgctgagtgctctgctctggtgggaaggccrctctgcacagctggagctgatgccttggcagatgctgggcatctgaatcgtgcagtgcaggagcacaggggcatggcaccgtttgttgctggggaaccta

SEQ ID NO: 11193 - DNA, 201 bp, Homo sapiens
ccaacgtctacggctcctaccagtgttactgccggcgaggctaccagctcagcgatgtggatggagtcacctgtgaaggtgcggacgcccctgcctgctgmgggggaaagcaccccctggtcttgccatgacacagcagcacggcctctgactttcaaaatccacagggaagagcctgctgggatttcttcacctggcaaa

SEQ ID NO: 11194 - DNA, 201 bp, Homo sapiens
cgaggccggggggtgaagtgagctggccttgccctgagaaccgcctgtctccaggcattgggcagatgcagaagtcaaagcagggctcctcctgggcttcyagaatcttcttctcaattcagggtcggcaccctcaccctacccaggaggctctcaggcttctctacccacagactcgtcagggtccagaggtaaaaatgg

SEQ ID NO: 11195 - DNA, 201 bp, Homo sapiens
agctggagggtgttgctggcatttaggtcccggtccagtttgcaggaagggccatgaagcctccccacagagcagccaggctgcagagaccactgtcgttytctgatggagctgtctctgggacagatgcccctgccctggccacctgctcctcctccctagacctcggcccctgtgggagctgctgtcccagcttccccg

SEQ ID NO: 11196 - DNA, 201 bp, Homo sapiens
ctccaaaatggcctctctgcagtcctgtcagggacccagacgggatcctgccctgaaggtaagctgtgaataaatggcatagtcctcttccctgagtgctsctaggaccctacgtgctagcaggtcactcaggaccgctatggccgtggaagggctgtgtctttgcaagaggtggaaaggtgcctgacagcattgcctaca

SEQ ID NO: 11197 - DNA, 201 bp, Homo sapiens
ggaagctgggcttctgttggaggtgccagatgacgaaaatgcattccctggaagaagcttcccgttcctagttaggaaggtgatggaataattttaagaarcaagaatctgaatgaagtctggattccaggagagggtgtgggagctcctttgtggggattctccacatagattgggctgtggagggactccgtgtggagg

SEQ ID NO: 11198 - DNA, 201 bp, Homo sapiens
tggtgaaaccccgtctctactaaaaatacaaaaaaaattagctgggcgtggtggcatgcgcctgtaatcccagctacttgggaggctgaggccagagaatygcttgaacctgggaggcggaggctgcagtgagctgagatcgcgccactgcatttcagtctgggcaacaacagcgaaactctaactcaaaaaaaaaaaaaa

SEQ ID NO: 11199 - DNA, 201 bp, Homo sapiens
ttgcagatgccgtcggtccggcacacagctgtgcccatgtccccagacttgagaggtgtggaaaaagcacagaacattctagcaggagtgggaacagatckctctggcagatgagcgacttgtgtttccaggaaggattactcacaccccaaaagatggatgaggtgactgatgctccctacactttctggcagcggaggg

SEQ ID NO: 11200 - DNA, 201 bp, Homo sapiens
gcacagaacattctagcaggagtgggaacagatcgctctggcagatgagcgacttgtgtttccaggaaggattactcacaccccaaaagatggatgaggtractgatgctccctacactttctggcagcggagggcgtagaataagcagcctggaagacccatcagtgccacataactgaggcaaagctacacctcctggc

SEQ ID NO: 11201 - DNA, 201 bp, Homo sapiens
gccacataactgaggcaaagctacacctcctggctcctgctggggactgtttagaaagttctgtgctcctcttaggataaccacttaataaagactgaagsagggcttttcgtgtgtcagggcaaatgttgcttctgggactcaggtgtgaggccacagggacttggaagtaactattgggacctgggcccaggtggcaga

SEQ ID NO: 11202 - DNA, 201 bp, Homo sapiens
aggtgctgccattgctgtctgctggggagggcggcccaggcccagggccagagctgcgagtacagcctcatggttggctaccagtgtggacaggtcttccrggcatgctgtgtcaagagccaggagaccggagatttggatgtcgggggcctccaagaaacgggtaactttcccccttccttccctaatgagcagtgtatt

SEQ ID NO: 11203 - DNA, 201 bp, Homo sapiens
tgatcgtgggggctggcaagtccaaaatctgcagggcaggccttcaggctggagccccagggaaggaggggcattgcagctggagttcaaaggcagtgtgytggcagaacgccgccttccccggggaggccagtcttttttctctgaaggccttctgctgattgagtgaggcccacccacggtatgaagatgatctgcttt

SEQ ID NO: 11204 - DNA, 201 bp, Homo sapiens
tgcaatctattttttactgaacattttaagtctcatttgaagtttcatagcttgccgtgtaaaccattgcatacactgtcaaactgctgtacagaacattytgaaatacaatctactaaattaattcgcttgacactgttcagattactgcatgaaaacaacattgattgaagaaggcaagtaagtcaacgggcaaagcat

SEQ ID NO: 11205 - DNA, 201 bp, Homo sapiens
tgccttgccccttccaggtccaccccagcctacaaagggcaccctgcacaccacctgattttccagacggggaggttgggacctgaagccgcaggccctgsggggtgtccagagccagagcctgggggtctcccagtagggcagcaggtgggctccagccaggtcagcctgccttcctgggttcatctgcccagagggcgt

SEQ ID NO: 11206 - DNA, 201 bp, Homo sapiens
gcaccccttgcagggccaatgggaaggggaagcgcctgcagcatgagagagagagagaatgagagagagagacagagagagacctgtgggaccaaagcctytactggggtccagggtgttatccaggcaggtttcccgtgaggaattctaactggggggcttggagcaggcaggagttccctgaggtcatgcggtggcgga

SEQ ID NO: 11207 - DNA, 201 bp, Homo sapiens
ccacctcctccctgcctccctcccgggacagagggcccaaggcagtggttctgccgggctcggtgctcagcggggactggggactggtcacttccaccaayggcaagggggatggagttttccaagagcagatctgatcgatggcccagaccttaggccccaactctgggactgacagctccgggacagtgcccacccagc

SEQ ID NO: 11208 - DNA, 201 bp, Homo sapiens; identical to SEQ ID NO: 1480

SEQ ID NO: 11209 - DNA, 201 bp, Homo sapiens
acaccaccatgcctggctaatttttgtattttttgtagagacagggttttgccacgttgcccacgctggtctcgaactcatgggcttgtgatctgcccgcytaagcctcccaaagtgctgggattacaagcgtgagccactgcacccagctgaaacaaagacatatctgactgttgcttgtggaggtgcctgccattcctc

SEQ ID NO: 11210 - DNA, 201 bp, Homo sapiens; identical to SEQ ID NO: 1490

SEQ ID NO: 11211 - DNA, 201 bp, Homo sapiens
acagaaatagatctctttttttttgggacaggatcttgctctgtcacccaggctagaatgcagtggcacaatcttggctcattgcaaccttgaccttcccrggctcaaacaattctgccacctcagcctcctgagtagctgggactataagcacacaccaccatgcctggctaatttttgtattttttgtagagacagggt

SEQ ID NO: 11212 - DNA, 201 bp, Homo sapiens
ctgcattctggcactgggaaaatgaccacaggatgagtccggggacccactggacccactgtaagtcagacctgagctaaaactccattaattacctgacytccttaagcccctatttaactggagggccacaatgacgttttgggtcccctggaatcaacctcagctcagaatcagtgtccaatagtccccaaaatgtct

SEQ ID NO: 11213 - DNA, 201 bp, Homo sapiens
gagttttgctacctaggtatgaagcccggcttcttgttttggcctagaactcctctatggacctgcacagtgccatttctgagagtcactgatgcgtgtgrtaggttgaggatggaaatccaacacctgtgcacccagcatggtctccccacagcacggggactcgagcaccttcctgccccacccctgccccagttcacc

SEQ ID NO: 11214 - DNA, 201 bp, Homo sapiens
taacttttccttttgtttaattttgaagcttctgttttttcctgtggtcagtgtgctaatgtaagcacttttcctggattatctcatcaatcttcccccattttttttttttttgagacagagtttcgctcttgttgcccaggctagagtgcaatggcatgatctcagctcactgcaacctctgcctcctgggttcaagtg

SEQ ID NO: 11215 - DNA, 201 bp, Homo sapiens
tggtctcaaactcccaacctcaggtgatccacctgcctcggcctctcaaagtgctgggattacaggcatgagccaccatgcctggcttttttttttttttwagacagtctcactctgtcacccaggatggagtacagtggcacgatcttggctcactgcaacctctgcctcccgggttcaagtgattctctcacctcagcc

SEQ ID NO: 11216 - DNA, 201 bp, Homo sapiens
ataagatgaccaacaaacactaaattattttgcttaaaagatgtactttttattgtggtaaaatacgcatcacatgggatttgccattttaaccatttcctttttttttttttttgagatgtagtctcactctgtcacccaggctggaatgcagtggcataatccctgctcactacaacctttacctcccaggttctagtg

SEQ ID NO: 11217 - DNA, 201 bp, Homo sapiens
aggctgaggcaggagaatcactcgaacctgggaggtggaggttgcagtgagctcagatcgcgccattgcactccagcctgggcgacagagactctgtctcaaaaaaaaaaaaaaaagaaaaaaaaagaaaatttttttttccttcttacttgactcagctcgttgcattttgaaccccctccctgtttgcagtctctcctc

SEQ ID NO: 11218 - DNA, 201 bp, Homo sapiens
caccgtcagctcctttgtggccaagcttttcatctttgtgtctgcagagctctgagcactcgcttcgcgtcgcggggtctccctcctgttgctttcctaamcctgccctccggggcgttaataaagtcttagcaagcgtcccacacagtgagcctcgcgtgccttggttttatttggcatggttgggagtctgtgccgctt

SEQ ID NO: 11219 - DNA, 201 bp, Homo sapiens
agtccaaaatctgcagggcaggccttcaggctggagccccagggaaggaggggcattgcagctggagttcaaaggcagtgtgttggcagaacgccgccttycccggggaggccagtcttttttctctgaaggccttctgctgattgagtgaggcccacccacggtatgaagatgatctgcttttctcagcatcaacagact

SEQ ID NO: 11220 - DNA, 201 bp, Homo sapiens
ctggagttcaaaggcagtgtgttggcagaacgccgccttccccggggaggccagtcttttttctctgaaggccttctgctgattgagtgaggcccacccayggtatgaagatgatctgcttttctcagcatcaacagacttacatgttaatctctttttttttttgagacagaatctctctctgtcacccaggctggagtg

SEQ ID NO: 11221 - DNA, 201 bp, Homo sapiens
acagaattaacctggaagaaggcaggactccgcctgggccaagcttgctgtgtagttttcggcctgttccctcctctctctgagctttgcccccactctcytaaaaaataaaagaggtgtgagctgggcacggtggctcacgcctgtaatcccagcactttgggaggccgaggcaggcggatcacctgaggtcaggagttc

SEQ ID NO: 11222 - DNA, 201 bp, Homo sapiens
aggccgaggcaggcggatcacctgaggtcaggagttcgagactagcctggccaacatggggaaaccctgtctctactaaaaatacaaaaattagctgggcrtggtggcgggcgcctgtaatcccagctacttgggaggctgaggcagggagaatcgcttgaacctgggaggcggaggttgcagtgagccgagatggcgcca

SEQ ID NO: 11223 - DNA, 201 bp, Homo sapiens
tcatggaacattctggcatgtctagacctgcagatctgcctcacaagctctttcagtggttccccctgtggttagggtgttaattaggggccagtttaatycttaaatgatgcagtcagtgtacagtgacagttggtccaggggcgctgtccaggggcctggtggagggaggaagggagtgacctagagccccagcaagcc

SEQ ID NO: 11224 - DNA, 201 bp, Homo sapiens
acagttggtccaggggcgctgtccaggggcctggtggagggaggaagggagtgacctagagccccagcaagcctcagggctatgggaggagctttctgggraggggagagctggtctgcaaggaggaggtgggattagctgggaaaataaccctgaaacggtcctcagggagacctgaagccttgtaaagggcacggaccc

SEQ ID NO: 11225 - DNA, 201 bp, Homo sapiens
aagccttgtaaagggcacggacccactgtagcagggtactgggaggcagtgggctggggaaggaggtggggttacagggccagagagaggggccctagaarcaggcaggctggcagcagttagaagtgtatctcgtagaatctttccctggttgaggcttatcctgatgagatttgcactctgagcatcactctggccacc

SEQ ID NO: 11226 - DNA, 201 bp, Homo sapiens
agttcagtgaggagcaggtacatgaggcctagttggggcctggccttccacgtggagcccacacccccatgtctgtgaccggcagtgagctcttctctgcyttgccccttccaggtccaccccagcctacaaagggcaccctgcacaccacctgattttccagacggggaggttgggacctgaagccgcaggccctggggg

SEQ ID NO: 11227 - DNA, 201 bp, Homo sapiens
caccccccaccatgcccagctaatttttgtatttttagtagagatgggttttcaccgtgttggccaggctggtctcgaactcctgacctcaggtgatccasccgcctcggcctcccaaagtgctgggtctacaggcgtgagccaccgcgcccggccggaaatgtgcttctttagaggaaagcaccgttgatcccacctcct

SEQ ID NO: 11228 - DNA, 201 bp, Homo sapiens
ttcagtgaggagcaggtacatgaggcctagttggggcctggccttccacgtggagcccacacccccatgtctgtgaccggcagtgagctcttctctgcctygccccttccaggtccaccccagcctacaaagggcaccctgcacaccacctgattttccagacggggaggttgggacctgaagccgcaggccctggggggt

SEQ ID NO: 11229 - DNA, 201 bp, Homo sapiens
cttctctgccttgccccttccaggtccaccccagcctacaaagggcaccctgcacaccacctgattttccagacggggaggttgggacctgaagccgcagsccctggggggtgtccagagccagagcctgggggtctcccagtagggcagcaggtgggctccagccaggtcagcctgccttcctgggttcatctgcccaga

SEQ ID NO: 11230 - DNA, 201 bp, Homo sapiens
gaaatgagagtttagatgaagacagccttgagggtccttcaggcccctgtgcaggagggcaggcagggagggggttgggtcagggctttgtcctgtcccamtgggtgggtggggtatgcaccctgacactggcccacagccgccccccgccccaaaggggccagccctgtgcttgatgctgggcctgcagttgtggctggg

SEQ ID NO: 11231 - DNA, 201 bp, Homo sapiens
gcccaacgatgagtgattgccctgtcctggctttcacggcaaatcccagggatgacgcgctttctcttttctgggagacacagccctgtcaccccgggggycacaccctggctggcagccaagttctttcccagggtgctgggcccggcctcctctgggctgggatcagctgcggcctgactccatcttgagctgggggtg

SEQ ID NO: 11232 - DNA, 201 bp, Homo sapiens
ggcccgactgtccctgtctctgagggcagagtcgggtcccatcccgggacacgcctggggttagccaccgacctgcagcctcccggccgagggtgcggggwtggcggtaaggcctgccccagtgccccccagcagccgggcctccgactgcaggcccgggtccccgctcctccgcgcggagtcgggcggggataacctttg

SEQ ID NO: 11233 - DNA, 201 bp, Homo sapiens
taagtccagtgtgtttgctacttctcacttactggatccaatcagcataatgtcaccaatttaatggaccagcgtgatatcttgcagaagcgaaatgcgaycaaggtctctccgaataagattatgacatgaataagattatgacacaaagccggagagttgatacacccctgaggtatgacagtgaaggtatattgctgg

SEQ ID NO: 11234 - DNA, 201 bp, Homo sapiens
gacaggccttgatggcctgtggaggctctcttaggggaagtctcctggcaggttttacgtctttagttcccacctacatccttcctggggtgacccaagcyaagaggttgggcagctgctgggcctagaaccagcacccaccagcgcctttctctggctgcatctgctccagacagaaccaacctgggagtgtctgtttct

SEQ ID NO: 11235 - DNA, 201 bp, Homo sapiens
tgaggtagaaggtccctgaattttattatcagatttattttccatcctctggcatgcaaatgtctcactaataagtccagtgtgtttgctacttctcactyactggatccaatcagcataatgtcaccaatttaatggaccagcgtgatatcttgcagaagcgaaatgcgatcaaggtctctccgaataagattatgacat

SEQ ID NO: 11236 - DNA, 201 bp, Homo sapiens
gttctgagctgagcagacactgagagctttggatggccctccacaatcgtccacattgccgatgacaccctgtttggtgccgtgcactggctcacaggacrgcttctgcagcctgactcaaacatggcaggtcctaacattttgccgtgagaattttccttcctgatgagatggtcgcaggggttggatatgccacagtga

SEQ ID NO: 11237 - DNA, 201 bp, Homo sapiens
tccatgctgggaccgatctcaggactgtggacttgtgacctctcccagcactctgagtgcacgatgcaggcagccagctgtttccgaggccttggcccctwgaccttcagcctgccttgggctcttggccagctgcccccgcgacctgagggtcagtggtagtgtccacctcttgaccctaggggcagctgccctggcttg

SEQ ID NO: 11238 - DNA, 201 bp, Homo sapiens
tgcactccagcctgggcgacagagcaagactccatctcaaaaacaaaacaaaacaaaacaaaaaacaacaacaaactgctgtgaacatgggtgtgcaagtrtctgtttgaaaccatgcttcagttctttggatatttacccagaagtggaattgctgggtcctatgattattctatttttaattttgggaggaactgtgct

SEQ ID NO: 11239 - DNA, 201 bp, Homo sapiens
ccctgtctctactaaaaatacaaaaattagctgggcgtggtggcgggcgcctgtaatcccagctacttgggaggctgaggcagggagaatcgcttgaaccygggaggcggaggttgcagtgagccgagatggcgccattgcattccagcctgggtgacagaacgagactcagtctcaaaaaaaataataaaataaataaag

SEQ ID NO: 11240 - DNA, 201 bp, Homo sapiens
gggaggtggttatacccaccagggtgtctggacaggtgggatggaaggtgaaagtgcttgccaataatgttcagaacattgaaaaagttgacagtagtgcmccggtgccagctagttcagctgttaggaaagatttacgttcttatggtgcagagtaaacgatggcagatttgggtttctaaaaaggctcagtgcatgact

SEQ ID NO: 11241 - DNA, 201 bp, Homo sapiens
ccacagggaagagcctgctgggatttcttcacctggcaaaccttccatgtccacccttggaggcaagcgggtggtttgctgttttccctccaactgaggtttttttttttttttttttttttttttgagacacggtcttgctctgttgcccaggctggagtgatatggtgcaatcactgctcactgcagcctcagcttccc

SEQ ID NO: 11242 - DNA, 201 bp, Homo sapiens
catgagcatgagcccactgccacacctctttagccgtaaagtgagtgctttggtcagaggcaatgctgtgtggaataccatgagggtggataaggcattcygtgaacccacggatggtagtcttggcagaagcatcgtgtgcaggataggcaaacccatatccagagtaagtgtctattccggtgaggacaaacctctgcc

SEQ ID NO: 11243 - DNA, 201 bp, Homo sapiens
tcaggtcagaggggagggatagagaagcggatttggaaggtcaggaaggggtgcacattccttgagcgcctgctgtgtgcagccgtacagtctgttgttcraccctcgcagcatccctacttgttctaccttaataacttttcttgttaaatgcaaagaacctgagaaaatccaggccccgaatctgaccatcagtgattc

SEQ ID NO: 11244 - DNA, 201 bp, Homo sapiens
cagaagcatcgtgtgcaggataggcaaacccatatccagagtaagtgtctattccggtgaggacaaacctctgccatttccatgatggaagaggtccagtrtaatcaacctgccaccaggtagctggctgatcaccccgaggcatggtgccacatcgagggctcagtgttggtctctgctactggcgaattgggtactcag

SEQ ID NO: 11245 - DNA, 201 bp, Homo sapiens
ccgctgaccgcgtcctgcagcccatgtggagagtttggcccgggatcagtacacattacaaatgagattcagaaattccacctaaaaacaacagcgcggcygtccctgcccaacgatgagtgattgccctgtcctggctttcacggcaaatcccagggatgacgcgctttctcttttctgggagacacagccctgtcaccc

SEQ ID NO: 11246 - DNA, 201 bp, Homo sapiens
aagtgtctattccggtgaggacaaacctctgccatttccatgatggaagaggtccagtataatcaacctgccaccaggtagctggctgatcaccccgaggmatggtgccacatcgagggctcagtgttggtctctgctactggcgaattgggtactcagcagtggccatatccaggtcagccttggtgagtggaagtccat

SEQ ID NO: 11247 - DNA, 201 bp, Homo sapiens; identical to SEQ ID NO: 1467

SEQ ID NO: 11248 - DNA, 201 bp, Homo sapiens
ttcaccctggagtcagcccgagggcccaggcagggtggggtcctagtgatgcctgtcggtgggtgacatcaggccatccacagcaccgggagccagcagaragggctgggccaggccatgtggacagggtctacggacagtacagggccagaggtccctattctgggaccttgacatgctgccgttctcgtgagcttctgg

SEQ ID NO: 11249 - DNA, 201 bp, Homo sapiens
tagtcttctcttcctctgtcagatgatcgtagggaactctgcatgaggccatcggtgcaggctggagaagagaaggcaagttggcaggagtggagaccacrggcatttgagccacttcctcatgtaacttaacttgtgccttcaggacctgctcaagcccgatcacgtatataccacttccatttgatgatggaatgctgc

SEQ ID NO: 11250 - DNA, 201 bp, Homo sapiens
caccctggcaggtaagacagacaagccaggtgtgatggaaatgcacctctttgtcctgccttttactgctggggtggtccttccaaatgaaactgctctcrcccggagccttcagtggctcccctttccttcaggacaaagtgttgtcttcgttcctagattgtgaggcttcagggactgattttccttcttccttctctc

SEQ ID NO: 11251 - DNA, 201 bp, Homo sapiens
ggcccaagtggcagagcaacttgcacaacagcctggacctgtcatagagctttctcctgttctggaccccactcaaaactggcagcctttcaggtcactcrataaatgtgctggagtaacactcaaacgaggaatgtgttgcctccaaaatccaataggcccactaggcgttgtgtctctttcttggttgtaggtggggcc

SEQ ID NO: 11252 - DNA, 201 bp, Homo sapiens
cctggcaggtaagacagacaagccaggtgtgatggaaatgcacctctttgtcctgccttttactgctggggtggtccttccaaatgaaactgctctcaccyggagccttcagtggctcccctttccttcaggacaaagtgttgtcttcgttcctagattgtgaggcttcagggactgattttccttcttccttctctcctt

SEQ ID NO: 11253 - DNA, 201 bp, Homo sapiens
cttgcacaacagcctggacctgtcatagagctttctcctgttctggaccccactcaaaactggcagcctttcaggtcactcgataaatgtgctggagtaamactcaaacgaggaatgtgttgcctccaaaatccaataggcccactaggcgttgtgtctctttcttggttgtaggtggggccaaatgcaggcaacttatcc

SEQ ID NO: 11254 - DNA, 201 bp, Homo sapiens
actggggttgggaaagaggatggagttggggtctaaccaggttccggatccaggatctgctgagtggccttgggcacatccttcagcctctcctggccccygcgtctgtgagatgggggagatggagaagatgctgcccctccatggggttcttgaggaccacataactacagtctcagaaaaagcagtagatatgaacgt

SEQ ID NO: 11255 - DNA, 201 bp, Homo sapiens
ccggatccaggatctgctgagtggccttgggcacatccttcagcctctcctggcccctgcgtctgtgagatgggggagatggagaagatgctgcccctccrtggggttcttgaggaccacataactacagtctcagaaaaagcagtagatatgaacgttagcaggggagagaaatcactgctttcgactccgtgcagtcca

SEQ ID NO: 11256 - DNA, 201 bp, Homo sapiens
actccgtgcagtccacagcccggatgtgcacatggtggacctgagctcagtttgcgagggtgcagggaagcacttccaccgtggctttggcacattccttyctaggatgtattaggatgggtcgttcttgctggtcacccccgcactgcctcggtctctcctagatgtcaatgaatgcatcacgggcagccacagctgccg

SEQ ID NO: 11257 - DNA, 201 bp, Homo sapiens
taaaaatgtcactcactgtatcatgagagtgacttcaaagcatggcacaccccttctgacatctgagggccacagagcaaattctgtcctccccacccccrcacaccagctgggtggtttggacccctagagcccagtggctgagccagctgagtatacacatttgaccatttgacagccatgaacttcaagggaagggca

SEQ ID NO: 11258 - DNA, 201 bp, Homo sapiens
tggcacaccccttctgacatctgagggccacagagcaaattctgtcctccccacccccgcacaccagctgggtggtttggacccctagagcccagtggctragccagctgagtatacacatttgaccatttgacagccatgaacttcaagggaagggcagcccatcacatcccatcatgactgtaacccttgttaatatct

SEQ ID NO: 11259 - DNA, 201 bp, Homo sapiens
tcgggttttctttgctcttttcttcaaattccctcctcctgctgctgtattcctttctccttctcctcctcctcttccccctcccatcctccccctccctyctcctcttcccctccccctcccctcccacttccctcctccccctccttcccttccccttctctccctccccgcctccccctttccctccttcttttcttc

SEQ ID NO: 11260 - DNA, 201 bp, Homo sapiens
cttttcttcaaattccctcctcctgctgctgtattcctttctccttctcctcctcctcttccccctcccatcctccccctcccttctcctcttcccctccmcctcccctcccacttccctcctccccctccttcccttccccttctctccctccccgcctccccctttccctccttcttttcttctttttttttttttttt

SEQ ID NO: 11261 - DNA, 201 bp, Homo sapiens
taattttgtatccgtgttttattttatgatcaagaggttgtaaaaatctgtctagcacagtacctggaacccagacctctgagagactgtagcctcttctcctgcctccccgtcacctggtgatgtggaattgactgccctgtgctgggcaccgagcttggcgctttctatctgctccttcgtttattaccctgctgccca

SEQ ID NO: 11262 - DNA, 201 bp, Homo sapiens
ggggggaggaggggatcgggtttcacggagtgttgggggataggactgggggcatccggcccgaaggcgccccctctgtgccccctccggggaagtctggsatccaggccctcgcccccagccgtgggcgcgcgcccctcgcagccggggtccggggagggagggtcccggcagggggcgccggggagggaggaccaggag

SEQ ID NO: 11263 - DNA, 201 bp, Homo sapiens
aaatccacctaaaactttggattagattaaacccacatgtccttcagcgtcttttggaggaatctggacacatccagtgaaacctaaagcaagtcccaagytgacattttccagcccagcatttctctaaccccttctttattttgcaaatctcactgagagcctgctaggtgccaggctccgttctggtgagtggggatc

SEQ ID NO: 11264 - DNA, 201 bp, Homo sapiens
gcatggtctccccacagcacggggactcgagcaccttcctgccccacccctgccccagttcacctgtgttacctagctataccctcaccctagccctgcawaggaggtgctgtcattgtccccctcatcaatgaggggacatggaggcccagagagtccaggtagcaagactgtgggtgcatagctgctaagtgacagcag

SEQ ID NO: 11265 - DNA, 201 bp, Homo sapiens
ggaggggtgcctcttccaagaaacctgtcctgactccccagccctccccacctccattctcgcccccgctggacaatgcacaccctccatcagagcgtggygcatacctttcatcctagatctcccaccagctttgaaaccagcatcctgttcatgatgtctggaaccctgggaactgtcccagcacctgtttagcacatg

SEQ ID NO: 11266 - DNA, 201 bp, Homo sapiens
gtttgagaccagcctgaccaatatagtgaaaccccatctctactaaaaatacaaaaattagctgggcgtagtgatgggcgcctgtaatcccagctgcttakgaggctgaggcagcagaatcgcttgagcctgggaggcagaggttgcagtgagctgagatcacgccactgtactccagcctgggtgacagagtgagactcc

SEQ ID NO: 11267 - DNA, 201 bp, Homo sapiens
tttttctttattttttgaaactgagtcttgctctgttgcccaggctggggtgcagtatgttgatcttggctcactgcaacctccgcctcctagattcaggygattctcctgcctcagcctctcgagtacctgagattacaggcacacactaccacaccaggctaatttttgtatttttagtagagacagagtttcaccgtg

SEQ ID NO: 11268 - DNA, 201 bp, Homo sapiens
agcctctgggatgatggcctggaaaagggacattgaggacgtggccttgctccagcctgggggggctctgtgccatggccctgcagcagggggcccctttytgccctgaattggctcattcatggcgcctctcaggagtaaaggagaagaaagtgatggttctccaccaacttcacctgtcccctcctgctgaactccagc

SEQ ID NO: 11269 - DNA, 201 bp, Homo sapiens
ggctggagtgcaatggtgtgatcttgactcactgcaacctccgactcctgagttcaagcgattatcctgcctcaacttcctgagtacctgagattacaggygcatgccgctacacctggctaatttttgtatttttagtagagacagcatttcaccgtgttggccaggatggtcttgaactcctgacctcaggtgatccgc

SEQ ID NO: 11270 - DNA, 201 bp, Homo sapiens
aagacagacaagccaggtgtgatggaaatgcacctctttgtcctgccttttactgctggggtggtccttccaaatgaaactgctctcacccggagccttcrgtggctcccctttccttcaggacaaagtgttgtcttcgttcctagattgtgaggcttcagggactgattttccttcttccttctctccttccttcactct

SEQ ID NO: 11271 - DNA, 201 bp, Homo sapiens
gcacagttgtttctgggcaagccctctgatatgatttagtgcacgtgtggctgggtgtggagtgtgtgcgtgtgtgtgggtgcgtgtgagtggtgagtgcrtatgcacagggtttgatctctgagatgttttatactctctggcttggagaagggacagtcctgtagtatcaagaccagaccttgtgtccccagcccaagg

SEQ ID NO: 11272 - DNA, 201 bp, Homo sapiens
ctttgggaggccgaggagggtggatcacctgaggtcaggagtttgagaccagcctgaccaatatagtgaaaccccatctctactaaaaatacaaaaattakctgggcgtagtgatgggcgcctgtaatcccagctgcttaggaggctgaggcagcagaatcgcttgagcctgggaggcagaggttgcagtgagctgagatc

SEQ ID NO: 11273 - DNA, 201 bp, Homo sapiens
atccatctgtcttctgcacaggccaaatgggagagttgaaccgggatgtggtgggaatcaccaccccgcgtctcaagtttttgatggtgacactaatctcygcaatccctccgggaatacgatattgtttttgatttactgtttttctaggtagaggcagctctcatggcttccatttggcctttccaaccataaaagccc

SEQ ID NO: 11274 - DNA, 201 bp, Homo sapiens
cattccactatcctatcaatctacctgcttcacgacgatggggaacatggtaaaaccagtgaattccatgagcatgagcccactgccacacctctttagcmgtaaagtgagtgctttggtcagaggcaatgctgtgtggaataccatgagggtggataaggcattctgtgaacccacggatggtagtcttggcagaagcat

SEQ ID NO: 11275 - DNA, 201 bp, Homo sapiens
aatgggctttaatgacaacctacgcatcttagaagacattcagacccactccactctgcacagttgtttctgggcaagccctctgatatgatttagtgcaygtgtggctgggtgtggagtgtgtgcgtgtgtgtgggtgcgtgtgagtggtgagtgcgtatgcacagggtttgatctctgagatgttttatactctctggc

SEQ ID NO: 11276 - DNA, 201 bp, Homo sapiens
cttctaggaacactgtgattaattagccaatgccagagctctacacgagacagactattctgattgctgctttgcctctgctgtccattacagaagctacmcccaccttgcctttgatggttgagtgctgtcacttggccactgccacctcaggatccaattatttccattgtatttaaattttgtagttgagtgactgtg

SEQ ID NO: 11277 - DNA, 201 bp, Homo sapiens
atgtgactctcttttggcaacaccctcacagacacacccaggatcaatactttgtatccttcaatccaatcaagttgacactattaaccatcacaggaccygtccccgtctccactgcaggaagttaggacccatccctgtctccacccaggaagttaggacctgtctctgtttctatcacaggaagttgggatctggccc

SEQ ID NO: 11278 - DNA, 201 bp, Homo sapiens
tggtggcaggcacctgtaatcccagctactcaggaggctgaggcaggagagtcgcttgagcccaggaggcagagattgcagtgagctgagatcggagtatkgcacaccagcctgggcaagaagagtgagactctgtctcaaaaaaataagtaaaaattgtctcctctgtttagccagcaagccacagcaggggttcttgtc

SEQ ID NO: 11279 - DNA, 201 bp, Homo sapiens
gagactgtgtctcaaaaaaaaaaaaaaaaaaaaaaaaaaaaagggcagctaacatgggaagagtgaatacagagccaagccccctgctgctgattggcttytgaatgagcacatgatccaagctgtccaatcagagtcctgcctcagagagcctgccgtctggagcagaagagggcaggaggggcccgcaagtaagcggtg

SEQ ID NO: 11280 - DNA, 201 bp, Homo sapiens
tgtctcagaaaaaagatatgcaaaacgtgtagcgtagagactggaaaggcagatgcattatttctgaagctctctagatcccaaccaaaaaacacccagasaactagataggaaaaaaaatgtttccatggaaaacatttacaaacgaaacaaggtatggttgtctgcagttcaggcccacctgcatgactttggcatctg

SEQ ID NO: 11281 - DNA, 201 bp, Homo sapiens
aaggtgtcagcagggctgcacttcctctgaaacctctaggggaatgcctcttctgtaggggagtgctctttctgtaggggagtgctccttctgtaggggartgctccttctgtaggggagtgctccttctgtaggggaatgcctcttctgtaggggagtgctccttctgtaggggaatgcctcttctgtaggggaatgctc

SEQ ID NO: 11282 - DNA, 201 bp, Homo sapiens
agtgctccttctgtaggggagtgctccttctgtaggggagtgctccttctgtaggggaatgcctcttctgtaggggagtgctccttctgtaggggaatgcytcttctgtaggggaatgctccttctgtagggcatgctccttctgtaggagaatgctcctgtaggggaatgctccttctgtaagggaatgctcctcctgta

SEQ ID NO: 11283 - DNA, 201 bp, Homo sapiens
tcatcaagtctcttgactcttacataaagactgaggggagctgggcgaggtggctcacgcctgtaattccagcactttaggaggccgaagcaggtggatcrcctgagatcaggagttcaagaccagcctggccaacatggtgaaaccccctttctactaaaaatacaaaaatttgccgggcgtggtggcgcacacctgtaa

SEQ ID NO: 11284 - DNA, 201 bp, Homo sapiens
cagcctggccaacatggtgaaaccccctttctactaaaaatacaaaaatttgccgggcgtggtggcgcacacctgtaatcccagctactcaggaggctgargcaggagaatcgcttgaacctaggaggtggaggttgcggtgagctgagattgcaccgttgcactccagcctggtaggcaagagcgaaactccatctcaaa

SEQ ID NO: 11285 - DNA, 201 bp, Homo sapiens
tcaggaaacaagaacagtataatcataatttgatcataatttgaattttgctttggttgccaagaaactcggggtcaggttgaagtgcagtgactatataygtctctaggtttttggcacaaatattcctccctgactcaactgtttcctgaaacaaaaaacaacaacaaaaatttttcactcgtcaaacacaccatccac

SEQ ID NO: 11286 - DNA, 201 bp, Homo sapiens
acacaatgggctgcattacacaggagaacactgagtttggggaatttaccgattttccggtaaacttgtccagagggagatggtacctcctcctttgaggwtgctttttgcaaacacgaccctgagacacgggtacagagtgaccagggctttgcatttgtggcatactcagcaagaatgtgcaggaatgcccgtgcccat

SEQ ID NO: 11287 - DNA, 201 bp, Homo sapiens
cctcttccccaaatttcattgtcatcaattttccaatcatgcttcttccaagtccctgaccatccagccaaaccattggccacagcccatgaatcagtatrtaatcgcacatctggtcatttctccttccatgcaaagtgcacaaccaggtgcattgcttgaagttctgcccactgggaagatttccctttgccactgtcc

SEQ ID NO: 11288 - DNA, 201 bp, Homo sapiens
tttgtctcagaaaaaagatatgcaaaacgtgtagcgtagagactggaaaggcagatgcattatttctgaagctctctagatcccaaccaaaaaacacccaracaactagataggaaaaaaaatgtttccatggaaaacatttacaaacgaaacaaggtatggttgtctgcagttcaggcccacctgcatgactttggcatc

SEQ ID NO: 11289 - DNA, 201 bp, Homo sapiens
tcagatgggggaggattcaggtctttcttctaggaaggagtggggtgtggactcgcagctggggtctggtggggttttcagtactggtttgcagagtgactaagggatgtgcccccagcctgatgctgtcgtcaagacagaaggacgtgcgtgtcctggtggtgcatctgggagggccctccacccgctgagtggtgagcc

SEQ ID NO: 11290 - DNA, 201 bp, Homo sapiens
tcctggattcaagtgattctcctgcctcagcctcctgagtagctgggactgcaggcgtgtcccaccacgctcggctaattttttgtatttttagtagagayggggtttcaccgtgttagccaggatggtcttgatctcctgaccttgtgatccgcccgcctcggcctcccaaagtgccgggatcacaggcgtgagccacta

SEQ ID NO: 11291 - DNA, 201 bp, Homo sapiens
tgacgaggtggtctgctcctgcttcgtgggctaccagctgctgtctgatggtgtctcctgtgaaggtaatgtccctatcccaggtgccagcaggactggcyggtcactgtgcttgggagctctgtgctggaggactgaccagggcctgccttctacaacccagaccccattcaggggtggagagcagcccaggacgcgctt

SEQ ID NO: 11292 - DNA, 201 bp, Homo sapiens
ccatgggtgggtgtgtgggtggatggacagatgggttgattggtgggtgaatggatggatggttggatccatgggtaggtgagtggatggattggtggatrgatggatggatggatggatggatggatggatggatagatggatgggtgagtggatagatggatggatggatgagcagatggttgggttgatgggtgggtg

SEQ ID NO: 11293 - DNA, 201 bp, Homo sapiens
ctgaaaagtcggcattcatatccacattagtggacaatattgtggatatagaaccagagcctggccagccttgctatgtgaccttactaaccatttgttarggtcctgccccgggtgtgtagcaagaactcggtcctgcactggggagtgtctctagcgggggatgagagaccacactggacaggtggaggccaggcctgg

SEQ ID NO: 11294 - DNA, 201 bp, Homo sapiens
cttcctgtttaaagctcctctgtgcagagtagcctctaatggatgggtgggtggattcatgggtgggtagcatctaatggatgggtgggtggatccatggktgggtgtgtgggtggatggacagatgggttgattggtgggtgaatggatggatggttggatccatgggtaggtgagtggatggattggtggatagatgga

SEQ ID NO: 11295 - DNA, 201 bp, Homo sapiens
tatgactcagctaagggcagtacagtcgggaagtgtcctgcgcgccattttgcagacaggagggaggaagtgtcctgcgcgccattttgcagacaggaggraggaagtgtcctgcacgccattttgcagacaggagggaggaagtgtcctgcgcgccattttgcagacaggagggaggaagtgtcctgcgcgccattttgc

SEQ ID NO: 11296 - DNA, 201 bp, Homo sapiens
tctgctgtttttgccgtgtgtttatgactcagctaagggcagtacagtcgggaagtgtcctgcgcgccattttgcagacaggagggaggaagtgtcctgcrcgccattttgcagacaggaggaaggaagtgtcctgcacgccattttgcagacaggagggaggaagtgtcctgcgcgccattttgcagacaggagggagga

SEQ ID NO: 11297 - DNA, 201 bp, Homo sapiens
tctctctaattgctttctgctgtttttgccgtgtgtttatgactcagctaagggcagtacagtcgggaagtgtcctgcgcgccattttgcagacaggaggraggaagtgtcctgcgcgccattttgcagacaggaggaaggaagtgtcctgcacgccattttgcagacaggagggaggaagtgtcctgcgcgccattttgc

SEQ ID NO: 11298 - DNA, 201 bp, Homo sapiens
ggacataggccaatctggctggacccctggtggcttcccagacaacatagtaaaactccgtctctactaaaaatacaaaaaattagccaggcgtggtggtrggcgcctgtaatcccagctactcaggaggggcagggtgcaggtgggggttgggtggagtcgcccagtcctgtttggttggaactttccatcagggtctct

SEQ ID NO: 11299 - DNA, 201 bp, Homo sapiens
ttgatctctgagatgttttatactctctggcttggagaagggacagtcctgtagtatcaagaccagaccttgtgtccccagcccaaggctgccctgggccyagggacagtatttggagacttcgctggcagttttgcgttggaatcacctggtgcctccctgtacgtccacccaccctgtgcccagatccccttcgcaagc

SEQ ID NO: 11300 - DNA, 201 bp, Homo sapiens
ggcccttgtggtgtgccaggcactcttctgggcatatatatgtattttttatatataaaaatattttttatatatataaaaaatatataaaaatatttttwtatatataaaaaatatgtaaaaatatattttttatatataacttgctcctcatagcaaccctgtagatcattattcccattttccagatgaggaaactga

SEQ ID NO: 11301 - DNA, 201 bp, Homo sapiens
aggtgaatcacttgaggtcaggagtttgagaccagcctggccaacatgacgaaacctcatctctacaaaaaatacaaaaattagccgggcgtggtggcacwtgcctgtaatccctgttacttgggaggctgaggcaggagaatcacttgaactgggaggcggaggttgcagtgagctgagatcatgccactgcaatccagc

SEQ ID NO: 11302 - DNA, 201 bp, Homo sapiens
tgaagttcagatgtcaccatgctgcggaatggcgaggtcctggagggtctctctccggctctttacctgccgagggcccactcatccttggtcacacaggygacccatcatgctgctccctgggacccccagacctgcctcctttccaggacccctcccagcctcaatgattccccagtgacagccacagccgcacctggt

SEQ ID NO: 11303 - DNA, 201 bp, Homo sapiens
atcctgtcacaggaggttagaatctgtaacaggaagttggaatctgtgctcatcctatacaggaagttaggacccgtccccgtctccaccacaggaagttrggacccgtccccgtctccaccgcaggaggttaggacccgtccccgtctccaccgcaggaggttaggacccgtccccgtctccaccgcaggaggttgggac

SEQ ID NO: 11304 - DNA, 201 bp, Homo sapiens
caccgcaggaggttaggacccgtccccgtctccaccgcaggaggttgggacccgtccccgtctccaccccaggaggttgggacccgtccgtgtctccaccrcaggaggttgggacccgtctctgtctccaccacaagaagtttggacctgtattagggttctctagagggacagaactaatggaatatacatatatatata

SEQ ID NO: 11305 - DNA, 201 bp, Homo sapiens
tgcaatggtgtgatcttgactcactgcaacctccgactcctgagttcaagcgattatcctgcctcaacttcctgagtacctgagattacaggtgcatgccrctacacctggctaatttttgtatttttagtagagacagcatttcaccgtgttggccaggatggtcttgaactcctgacctcaggtgatccgcctgcctcg

SEQ ID NO: 11306 - DNA, 201 bp, Homo sapiens
tccccgtctccaccgcaggaggttaggacccgtccccgtctccaccgcaggaggttaggacccgtccccgtctccaccgcaggaggttgggacccgtcccygtctccaccccaggaggttgggacccgtccgtgtctccaccgcaggaggttgggacccgtctctgtctccaccacaagaagtttggacctgtattagggt

SEQ ID NO: 11307 - DNA, 201 bp, Homo sapiens
gggtgtggagtgtgtgcgtgtgtgtgggtgcgtgtgagtggtgagtgcgtatgcacagggtttgatctctgagatgttttatactctctggcttggagaarggacagtcctgtagtatcaagaccagaccttgtgtccccagcccaaggctgccctgggcctagggacagtatttggagacttcgctggcagttttgcgtt

SEQ ID NO: 11308 - DNA, 201 bp, Homo sapiens
tcaaatgctcaatgccacagagccagagagtagcgagcttggattggaacccaggtggtctggcctcagaccctgtcccaggctgtcaggacctctagctkgtcctgggggataggggtccatggtggtgcctacttccctgacacccagtgcctgactttccaagtcaccagccacagggacaagaggatgtggagaggc

SEQ ID NO: 11309 - DNA, 201 bp, Homo sapiens
cctcctcccagcagtccctctgcctgcctagggcagtgtcagtgcctagctgaatgtaggagtcacctcctcctactgtccctgtttcctcatccccaccyccttctcagccacccacaacacagccactccctccccatccccagaaagggccccggtcacatcgccagcggccacctgctccatccccattgggacttc

SEQ ID NO: 11310 - DNA, 201 bp, Homo sapiens
tgtatgcgtttctgctgagtgtaaggctgggcggggcgtcggtggctcaaggggtccatggtgaactcacaggaacaccgctttgagctgcccagtggcgytcctatgcgtctcatccagttcctccgcatcttcacctgcaccattttattcttcttctttggaaaataaatctacttgtggttccaaagcctaactcat

SEQ ID NO: 11311 - DNA, 201 bp, Homo sapiens
ccgctttgagctgcccagtggcgctcctatgcgtctcatccagttcctccgcatcttcacctgcaccattttattcttcttctttggaaaataaatctacytgtggttccaaagcctaactcatcctcagtaaccccggtagccatgaattcctattcaagaggctcccgcaggcccagcgccaaagctgcctcccctgca

SEQ ID NO: 11312 - DNA, 201 bp, Homo sapiens
gatccacctgcctcggcctctcaaagtgctgggattacaggcatgagccaccatgcctggctttttttttttttttagacagtctcactctgtcacccagsatggagtacagtggcacgatcttggctcactgcaacctctgcctcccgggttcaagtgattctctcacctcagcctcctgagtagctgggatttcaggtg

SEQ ID NO: 11313 - DNA, 201 bp, Homo sapiens
aactctgtatttttccctagattttcactgttttaaataattctattacaaaaataaacacttaaaggttatgaagggagccatccaaagagaaatagaamcagctaataagcatatgagaagggttcaacctctctgatgattaaaaacatactttgaaagaagataagagtttcttttccctgtggaaatagctcagat

SEQ ID NO: 11314 - DNA, 201 bp, Homo sapiens
aagaggaccaaggccactctgtgtgcacagcccatctgaatggggagctcactgctctttctccctggagatccggtgtttggggagcgtgaagggaggckggggcatgaggggactgtggaagtcctgttggtgggtgcaggctggggaagatgtttacaggcgggggcagggccctccctggctaggaacgggctttaa

SEQ ID NO: 11315 - DNA, 201 bp, Homo sapiens
tcaggaggctgaggcaggagaatcgcttaaacttgggaggcggaggttgcagggagccgagatcatgccactgcattccagcctgggaaacaagagtctcwaaaaaaaaaaaaaaaaaaagaaagaaagaaaaggagggaaaaacaaactatgaacatttaaacaaaaacagtaagtgatttataaaggaaaaaaaatgtt

SEQ ID NO: 11316 - DNA, 201 bp, Homo sapiens
gtggctcatacctgtaatcacagcactttaggggccaaggtggcagatcacaaggtcaggatttcaagaccagcttgaccaacatggtgaaaccccgtatytactaaaaatataaaaaattagcatggtggtgcacgtctgtaatctcagctgctcaggaggctgaggcaggagaatcgcttaaacttgggaggcggaggt

SEQ ID NO: 11317 - DNA, 201 bp, Homo sapiens
acacatagcgtacctgagaatatcaacaagaacaaccaacaccaagacacataacacattcttgtgaaattattgtactttaaagaaaaggaggaaggccrggtgtggtggctcatacctgtaatcacagcactttaggggccaaggtggcagatcacaaggtcaggatttcaagaccagcttgaccaacatggtgaaacc

SEQ ID NO: 11318 - DNA, 201 bp, Homo sapiens
gtcatctcgctgcctaccttccgcgagttcacccgccctgaaggtgagtgggatgggtgtgggggtcccagggccccctagggcctccctcggcttcagckgagggcttggcctacaggagttgttccttgtaagatgtggcccaggctttgaaatgcagaactttcttttttttttttttttttttttgagacggagtct

SEQ ID NO: 11319 - DNA, 201 bp, Homo sapiens
ccccaattccccagataccaaaactctcagaagtcacccccgtcacaaagctggtgaccctccctgcagcagctcctgggctcaggccagacccctcagarggcttggtagcattaatggggtacagtctctgcttttgagcctacttcagtgagacacacagggggccccagggaccagtcccggaaacctccctgctca

SEQ ID NO: 11320 - DNA, 201 bp, Homo sapiens
taaacaaaacatagaagaaaaatggggccgggtgccctgtaatcccagcattttgggaggctgaggcaggtggatcacctgaggtcaggagttcgagaccmccctggccaacatggtgaaaccccatctctactaaaaatacaaaaattagccaggcatggtggcaggtgcctgtaatcccagctactcaggaggctgagg

SEQ ID NO: 11321 - DNA, 201 bp, Homo sapiens
aatagctgcaaaggtacagcatgcgctccgagtctgcaaacctggtcttccaggcgtagatacggcgcggtgggaagggcagctctggggtctgggctccygcagtcctgcgccctctgtggctgcctgggcgactgcctgctcatctgcaggagggaggtggttatacccaccagggtgtctggacaggtgggatggaag

SEQ ID NO: 11322 - DNA, 201 bp, Homo sapiens
gaggcaggagaactgcttgaacctggaatacagagattccagtgagccaagattgtgccaccacactccagcctgggcgatagagtgagactttgtctcaraaaaaagatatgcaaaacgtgtagcgtagagactggaaaggcagatgcattatttctgaagctctctagatcccaaccaaaaaacacccagacaactaga

SEQ ID NO: 11323 - DNA, 201 bp, Homo sapiens
tctgggtaatgaaagcacaccagaaagacgtgcccagactaaatgaaaattctaatattctatcttgaaagaaaccaaaagtgttaagaaaataaacaaamcatagaagaaaaatggggccgggtgccctgtaatcccagcattttgggaggctgaggcaggtggatcacctgaggtcaggagttcgagaccaccctggcc

SEQ ID NO: 11324 - DNA, 201 bp, Homo sapiens
aggaaaaaacagtggcagaaccccaaaataatcaacaggtatccccagaaagtgtactaggtgctttgggggaacagcagctgaaactgggaggcgttttsctcactccaggggccagagtgtgcacagagccagtgggagggaggaaggggctggcgcaggcttgctcttgggagcttttgaaacttagccaccacagct

SEQ ID NO: 11325 - DNA, 201 bp, Homo sapiens
ttcagaaccatgagacaatccatttctcttggttaggccacccagtctgttgtatagcaaacaaatgcacagctattataagcaaaaaagagaataagagmcagaatgatatccctctgggtaatgaaagcacaccagaaagacgtgcccagactaaatgaaaattctaatattctatcttgaaagaaaccaaaagtgtta

SEQ ID NO: 11326 - DNA, 201 bp, Homo sapiens
cagagcaatgcccttacacagggtgggattggggaagcctgctcttaactgcaggccaaatcctccattcagtttataaatgaaaaaactgaggcccggasttgctccgggtgggaaaactctcaaccatgagatcagaagcagactccaggcctcccggttcccagcccccagtctcccctctgtgacagtctgcttgct

SEQ ID NO: 11327 - DNA, 201 bp, Homo sapiens
aatacagagattccagtgagccaagattgtgccaccacactccagcctgggcgatagagtgagactttgtctcagaaaaaagatatgcaaaacgtgtagcrtagagactggaaaggcagatgcattatttctgaagctctctagatcccaaccaaaaaacacccagacaactagataggaaaaaaaatgtttccatggaaa

SEQ ID NO: 11328 - DNA, 201 bp, Homo sapiens
acagacatgcacagagggaagaccatgtgaggaggacacagggagaagtcagacttctacaagccaaagagagaggcctcagaaagaaccaaacctgccarcaccttgatcttggactttcagccttcagaaccatgagacaatccatttctcttggttaggccacccagtctgttgtatagcaaacaaatgcacagctat

SEQ ID NO: 11329 - DNA, 201 bp, Homo sapiens
ttcagattactgcatgaaaacaacattgattgaagaaggcaagtaagtcaacgggcaaagcatcgattgctttcctactgtaggatgttataagatgaccracaaacactaaattattttgcttaaaagatgtactttttattgtggtaaaatacgcatcacatgggatttgccattttaaccatttcctttttttttttt

SEQ ID NO: 11330 - DNA, 201 bp, Homo sapiens
gatctcactggaagttggaatccaggttttgctttggtttaccctgcaaagtaccctttggctgggagccagccatgagccacttccaccctgaggagtcstggactcccagctcctccttccctttccccttccagatctagggctggctggggaggggaagggtgggcttaccaaggaggggccctggtgaggccctgc

SEQ ID NO: 11331 - DNA, 201 bp, Homo sapiens
agaacaccacgcacacctcccattgctttcctccgcttccctctggcaaaacaaattccatccctggttagtacccgccatgctgagagaagcgggaagcygaaatcccaccagggcgactctagcgccacctgctgaccagccccatccaggctggtcctgaagttgctggtgtgtgtgcgtgtgcgcgtgcttgtgtgt

SEQ ID NO: 11332 - DNA, 201 bp, Homo sapiens
ctctttcagtggttccccctgtggttagggtgttaattaggggccagtttaatccttaaatgatgcagtcagtgtacagtgacagttggtccaggggcgckgtccaggggcctggtggagggaggaagggagtgacctagagccccagcaagcctcagggctatgggaggagctttctgggaaggggagagctggtctgca

SEQ ID NO: 11333 - DNA, 201 bp, Homo sapiens
gtccccgtctccaccgcaggaggttaggacccgtccccgtctccaccgcaggaggttaggacccgtccccgtctccaccgcaggaggttgggacccgtccscgtctccaccccaggaggttgggacccgtccgtgtctccaccgcaggaggttgggacccgtctctgtctccaccacaagaagtttggacctgtattaggg

SEQ ID NO: 11334 - DNA, 201 bp, Homo sapiens
gagcgtggtgcatacctttcatcctagatctcccaccagctttgaaaccagcatcctgttcatgatgtctggaaccctgggaactgtcccagcacctgttkagcacatgtgtgcatgcgaaggggatctgctgagtgctctgctctggtgggaaggccgctctgcacagctggagctgatgccttggcagatgctgggcat

SEQ ID NO: 11335 - DNA, 201 bp, Homo sapiens
ggaagaggctagtgcctgaatcagcagcctggaggtccacggcgcctcccgcaggtgagtgaggtgtgcccttcgtgttggctgaatcggccagaggggcrgcgggaggccccgcctgccagccccgcatccccgcgctctgccgtttctccgcttgctggaccggccctaaccctcttcttgtctctctgcccacttttc

SEQ ID NO: 11336 - DNA, 201 bp, Homo sapiens
tccttctgtagggcatgctccttctgtaggagaatgctcctgtaggggaatgctccttctgtaagggaatgctcctcctgtaagggaatgcctcttctgtrggagaatgctccttctgtaggggaatgcctcttctgtaggggaatgctccttctgtaggggagtgctccttctgtaggagaatgctcctgtaggggactt

SEQ ID NO: 11337 - DNA, 201 bp, Homo sapiens
tctagcctgggcaacagagctggaccccgtctcaaaaacaaaaaaacaaacaaacaaaaagcaaaaccaaggaatctcggtgctgatctcactggaagttrgaatccaggttttgctttggtttaccctgcaaagtaccctttggctgggagccagccatgagccacttccaccctgaggagtcgtggactcccagctcct

SEQ ID NO: 11338 - DNA, 201 bp, Homo sapiens
gcactctagcctgggcaacagagctggaccccgtctcaaaaacaaaaaaacaaacaaacaaaaagcaaaaccaaggaatctcggtgctgatctcactggamgttggaatccaggttttgctttggtttaccctgcaaagtaccctttggctgggagccagccatgagccacttccaccctgaggagtcgtggactcccagc

SEQ ID NO: 11339 - DNA, 201 bp, Homo sapiens
gcagcctggaggtttttggggcgtagctgggaggatggaggggatgcggacctggccacctcctccctgcctccctcccgggacagagggcccaaggcagkggttctgccgggctcggtgctcagcggggactggggactggtcacttccaccaatggcaagggggatggagttttccaagagcagatctgatcgatggcc

SEQ ID NO: 11340 - DNA, 201 bp, Homo sapiens
tatgactgcacctttgcactctagcctgggcaacagagctggaccccgtctcaaaaacaaaaaaacaaacaaacaaaaagcaaaaccaaggaatctcggtrctgatctcactggaagttggaatccaggttttgctttggtttaccctgcaaagtaccctttggctgggagccagccatgagccacttccaccctgaggag

SEQ ID NO: 11341 - DNA, 201 bp, Homo sapiens
ctgacttggtctttttcccccttagataagatcattgaggttgaggaggaacaagaggacccatatctgaatgaccgctgccgaggtgagactcgggcgtstcccatcagttggtatttaaacaaaccccaaggggccagcaaggtggctcaggcctgtaatcctagtactttgggaagccaaggcaggaggattccttga

SEQ ID NO: 11342 - DNA, 201 bp, Homo sapiens
agctcctctgcaacattcccaccaagggactcttctttgcttgtggaactccctgcctcctgaggggtcccgttgcattttgggatcccatcgacgtttgygtgtgtgcctgagtgcactgtgggagtgacagctgagtgacctgagtgctcacccctgtcccgcagctccttggggctccttagccatgttctcggctca

SEQ ID NO: 11343 - DNA, 201 bp, Homo sapiens
aatctcagctgctcaggaggctgaggcaggagaactgcttgaacctggaatacagagattccagtgagccaagattgtgccaccacactccagcctgggcratagagtgagactttgtctcagaaaaaagatatgcaaaacgtgtagcgtagagactggaaaggcagatgcattatttctgaagctctctagatcccaacc

SEQ ID NO: 11344 - DNA, 201 bp, Homo sapiens
agaccttaggccccaactctgggactgacagctccgggacagtgcccacccagcccgcgcttttctcccctctaaccctcaaggcctggtccctggggggmctgccacgaggtcctctgatcagagcagctgctgggcggcagagctatgacctgtgacctctctgctgacccgtggcttctcagagccactagccaggcc

SEQ ID NO: 11345 - DNA, 201 bp, Homo sapiens
cctccgccttcagggttcaagcaactctcctgcctcagtctcccaagtagctgggactacaggcatgcaccacgatgcccagctaatttttgtatttttartggagatggggtttcatcatattggccaggttggtctcgaacccctgacctcaagtgatccacccacctcggcctcccatagtgttgggattacaggcat

SEQ ID NO: 11346 - DNA, 201 bp, Homo sapiens
ctctgcctgtttctacgtcttctttctgaatcccccaggtcccctggttcccccttcgccctccaccaccttcccttagtcatctagactccttccagggmaccccattctccgatggcttaaacgaattaagttaataccaaagtagtaatgagttcccaacctgttccaactcagaaatgcctccctcgggccatctgc

SEQ ID NO: 11347 - DNA, 201 bp, Homo sapiens
ttctcacttactggatccaatcagcataatgtcaccaatttaatggaccagcgtgatatcttgcagaagcgaaatgcgatcaaggtctctccgaataagawtatgacatgaataagattatgacacaaagccggagagttgatacacccctgaggtatgacagtgaaggtatattgctggccttgccagctgaagacaaat

SEQ ID NO: 11348 - DNA, 201 bp, Homo sapiens
taacaggctgcggttcctgttgactcgcgtttcacatttgtcttccgcaccttccagaaggctctgtgaaggcagggaccaggtctatctcattcagtgcrgtgttcccagctccttgcaagacatctcgcgtgcagaaggtgctctgtcaatgtctgttcagggaacagatgactctgccagccctggcttatgtcacta

SEQ ID NO: 11349 - DNA, 201 bp, Homo sapiens
gccatcgtcgtctgtctgtgttggccttcctggtgacccagttcccgggtgggtgggttatcaggctgtgacctcggtgtcctcccatgagggactcaggscactcaaagatcacctgatccctggccctcaagcccctaaatgctagtgacactggtctcggaaagtcaagggggtaactgcaaatgagtctggggtcta

SEQ ID NO: 11350 - DNA, 201 bp, Homo sapiens
ctagtcccatcgcctctctgagcacgatggtctctgaggcttcctgtgttcagcttgtcctgtgctgctgccctcccgggccccagtgcagcccccagggmgatgtagcatggccagcagccatggccaggtgccaggacactgaggctgaggtgggctttgccgttgcagacatcgacgagtgcgccctgcccaccgggg

SEQ ID NO: 11351 - DNA, 201 bp, Homo sapiens
gaatcagttcccctctgtcctccccactctgtccagtcctcccctaggctgccaggttacatttccaaaactccgatctgatcaggccctcttggtctcaratcctccaagggcttccttcaagggctcctgcaccaacctcgtggtgtggctgtgtgacataataagaaacattcacttctatttggtctctttccgggt

SEQ ID NO: 11352 - DNA, 201 bp, Homo sapiens
tgtgggtcacagaagctggtctagaaatggtggtttttaggctgggtgcggtggcttatgcctgtaatcccagcactttgggaggccatggctggccaatyacgcaagttcaggagttccagaccagcctagccaacatggtgaaaccccatctctactaaaaatacaaaaaagtagccgggcgtagtggtgggcacctgt

SEQ ID NO: 11353 - DNA, 201 bp, Homo sapiens
ggaagagtgaatacagagccaagccccctgctgctgattggcttttgaatgagcacatgatccaagctgtccaatcagagtcctgcctcagagagcctgcsgtctggagcagaagagggcaggaggggcccgcaagtaagcggtgagggcgccaggttgaggagcccaggggaatagagggagtcctgaccctatctgatt

SEQ ID NO: 11354 - DNA, 201 bp, Homo sapiens
gtgatacctgcctcacctcacttgcaggctggctgtggtgctcgagagcggtcatggatgtaaaagcttttgtaaactgtaaattgctgcacggtcagcgygaagggctgactcatttgactgaggagggtggacttggctggcagggagaggggtacagctgtcctcctttctgacttacgctcaagggtcttccaccat

SEQ ID NO: 11355 - DNA, 201 bp, Homo sapiens
gcatggggacgagggtgtctcagagactgggagatggaaggagaacacacaccttttctgctccctatgtcgtgaccccatggggcagagatgggctctgrggcatcagagcctgtgccctgtgtgacggcgcgtagccccccgaaacagctgctgttatccctccttgaggttatcagcccccaattccccagataccaa

SEQ ID NO: 11356 - DNA, 201 bp, Homo sapiens
tctgtttccttcactataagatgtgagtgtcctctgggtaattattataggtgaaatgctttacatttagtaaccaatgtcgtcatctcagcagccctackaaataggtgatccagtgttgttttgaacctatttttattttttattattatttttgagacggggtctcactctgccggccaggctggagggcagtagtgt

SEQ ID NO: 11357 - DNA, 201 bp, Homo sapiens
agagtaaacgatggcagatttgggtttctaaaaaggctcagtgcatgactatttaaaatcaagaccagggatgaatttcaggttctcacatgtactttctmcaaaaaaaaaaaaaaaaaaaaaaaaaagcaaaaacaaaaatcccacaactgtttttgcacaacagctgccttccatccaaatccaggcttccttgaagtt

SEQ ID NO: 11358 - DNA, 201 bp, Homo sapiens
ggcgcagagtttcagtttgagaagatgaaaaagttctggagatggatgggggtgatggtggcacgacagtgtgaatgcagtaatgcccctgaaccgtctayttaaaatggttacgatggcagattttgtgttacataaaatttgtagttcacatgtagttcaccacaatgagaaaagaaactctggccaggcacggtggct

SEQ ID NO: 11359 - DNA, 201 bp, Homo sapiens
aaagaggtggggaggtgccggaaggggcgaaagggaagaaccctcagacctgtagtctctaagtcaaggtaatggctgtagggtcctgggtgacacggaasctttcacttcttgttcttaggttttcaagtccaggctgtagggcccctggtcacagaggacccgggtcacccgggactcatctttcacttattgttctta

SEQ ID NO: 11360 - DNA, 201 bp, Homo sapiens
ttgctcttggtttatatctaatattatgctttggatctaactcacatggtcagatgcaggggtcagattgagactggttgattgaaactcctccgaaacamcaggaaatgatctgggagagaagattccaggtcccctgaggccctgcttctctcttgatcccccacagcccagtgtcgagttaccagcgagtgcctgttc

SEQ ID NO: 11361 - DNA, 201 bp, Homo sapiens
ttctgtagggcatgctccttctgtaggagaatgctcctgtaggggaatgctccttctgtaagggaatgctcctcctgtaagggaatgcctcttctgtgggrgaatgctccttctgtaggggaatgcctcttctgtaggggaatgctccttctgtaggggagtgctccttctgtaggagaatgctcctgtaggggacttctg

SEQ ID NO: 11362 - DNA, 201 bp, Homo sapiens
tggcagggtccatgagcccttctgggctctgctcccttgagactttttgtttttttatgaaaatgggatcagactgttctgccacttgcttttcccccccmcttgacagggtatttagaaatcatttcatggcagcacctttatgttatctttttaaaaatgactgcatcagcagaaatacgtctttctaaggagaaaata

SEQ ID NO: 11363 - DNA, 201 bp, Homo sapiens
cagatggttgggttgatgggtgggtgaatggatggatggttggatccatgggtaggtgagttgatggattgctgagtgggtgggtggatggatggatggayggatggatggatggatagatggattggtgagtggatggttgggttgatggatggttatgaagctatgaagaaaagtggtatcagaatcttgattctgcag

SEQ ID NO: 11364 - DNA, 201 bp, Homo sapiens
ttggcagggtccatgagcccttctgggctctgctcccttgagactttttgtttttttatgaaaatgggatcagactgttctgccacttgcttttccccccsacttgacagggtatttagaaatcatttcatggcagcacctttatgttatctttttaaaaatgactgcatcagcagaaatacgtctttctaaggagaaaat

SEQ ID NO: 11365 - DNA, 201 bp, Homo sapiens
tcttagagtggggcttacccctgggggcccagcgctcagggatgcgtgggctccaggctggagagaagcacccagatctaccaactggccttccggctctscagagccgcttgcatcttactccttcctcttccctccgctctgcttcagccactccagcccatgcctcagaccccaaatattccatggcctctctcctct

SEQ ID NO: 11366 - DNA, 201 bp, Homo sapiens
ctttgtgcccctggagccccagccacggttctgtcaccattggtgatattcatttgcctcacagggagatgtctgcacatttaactaagggcctcgcaggyttgtttttcatatgataaaactgcttttctttcatggaacattctggcatgtctagacctgcagatctgcctcacaagctctttcagtggttccccctgt

SEQ ID NO: 11367 - DNA, 201 bp, Homo sapiens
gggacaaatttggcccatagactatgatttgctgacctctgctttaggtaaaggggacagttgagcagtagttcagagttgctgagtggcccagtgagttytgtgcattggagtatgaggagtactggcgtatgggctgggtggccgaggacttccttgtgtgccgtcatctgtttaggatgccatcttggaggtgaagtg

SEQ ID NO: 11368 - DNA, 201 bp, Homo sapiens
ccctcaccatctgcccttgtcccttcagctgcccggggcagcatgggtggctggccttgctcccacttcttgggtgagggtctgatgctgaagatcgcacrgccgacacgtggaggagggagagcctggccttccacctcctggccagtgccctctccatctggagctgacgatgtatgggcgagcagctgggggccatcg

SEQ ID NO: 11369 - DNA, 201 bp, Homo sapiens
gcctgcaggaactgtggagcctcttggggtgaatttactgaggcctggtgatggtttgcttcttcccagttgcctgcggtgcttgtgatgggcaagcctgyttgggtctcctctgagctcctggcctctctgtttcagcaccttgtccacacagccctacacttcccttcctttctgctcatggctggccccacatggtgg

SEQ ID NO: 11370 - DNA, 201 bp, Homo sapiens
tgattggtgggtgaatggatggatggttggatccatgggtaggtgagtggatggattggtggatagatggatggatggatggatggatggatggatggatrgatggatgggtgagtggatagatggatggatggatgagcagatggttgggttgatgggtgggtgaatggatggatggttggatccatgggtaggtgagtt

SEQ ID NO: 11371 - DNA, 201 bp, Homo sapiens
gtgagtggatagatggatggatggatgagcagatggttgggttgatgggtgggtgaatggatggatggttggatccatgggtaggtgagttgatggattgbtgagtgggtgggtggatggatggatggacggatggatggatggatagatggattggtgagtggatggttgggttgatggatggttatgaagctatgaaga

SEQ ID NO: 11372 - DNA, 201 bp, Homo sapiens
ttggatccatgggtaggtgagttgatggattgctgagtgggtgggtggatggatggatggacggatggatggatggatagatggattggtgagtggatggwtgggttgatggatggttatgaagctatgaagaaaagtggtatcagaatcttgattctgcaggcatttatttggcatctattatgtgccaggaactgagga

SEQ ID NO: 11373 - DNA, 201 bp, Homo sapiens
ctgtcaccgtgcacgtttcctaagcctgcagaggaactgttcacagaatccagcctggaatcagccgtttgtggcaaacagtcagtagctatttctcaacktgtggttgtgaagctgcaggctccatattcgctcttcacagagcatccaagcaggtgtctcagtgccagctcacaccgttcacactgctcacaccagctc

SEQ ID NO: 11374 - DNA, 201 bp, Homo sapiens; identical to SEQ ID NO: 1472

SEQ ID NO: 11375 - DNA, 201 bp, Homo sapiens
tccaggtgaagtttattagaacagttctaagagggcatgtagttattttgccagcatattttatacaacaagattttccttttgcagaatagcaaatcatracaatttgatgaatgaatcctttcgtaggccccatatggttccagtttccttgtgatgatctcacatgtggccctataagtaaacagggtgggagggggg

SEQ ID NO: 11376 - DNA, 201 bp, Homo sapiens
tcccttccgtgagctgaggggctgggagggtgcccactggggctgtagcctgggctggggcatggggcacaagggcctgtgtgcccagctcatttgggccrtggcctggctctgagggtgtgggccggctgcttggagcgtgatcctttcatctgccctttttgcgagtgggagataagatggccaggctgcggttactcc

SEQ ID NO: 11377 - DNA, 201 bp, Homo sapiens
caggctctcaggggagaggagggggctcagcgttccctgcctttgtgcccctggagccccagccacggttctgtcaccattggtgatattcatttgcctcmcagggagatgtctgcacatttaactaagggcctcgcaggtttgtttttcatatgataaaactgcttttctttcatggaacattctggcatgtctagacct

SEQ ID NO: 11378 - DNA, 201 bp, Homo sapiens
gaagttggaatctgtgctcatcctatacaggaagttaggacccgtccccgtctccaccacaggaagttaggacccgtccccgtctccaccgcaggaggttrggacccgtccccgtctccaccgcaggaggttaggacccgtccccgtctccaccgcaggaggttgggacccgtccccgtctccaccccaggaggttgggac

SEQ ID NO: 11379 - DNA, 201 bp, Homo sapiens
cttagctgtttatataagatgttcaaatgggcattactgcctgatagtgacaagaagagagaatgttgggagtttcttttaagataagatgggtgtttggrtaaatgtctgacttggtctttttcccccttagataagatcattgaggttgaggaggaacaagaggacccatatctgaatgaccgctgccgaggtgagact

SEQ ID NO: 11380 - DNA, 201 bp, Homo sapiens
catgagactcaggcagagagaccccccccaccccccgccactgactttcatcatttgaaacaatggagagacaatcaagtgcaacatcaaatagcaggagytgaaagatggcttcgagatggggccgagaatgtggaccacagagcccaagaggcagcgaaggtctccccactgcacccgagcacttcgtgttcaggatcc

SEQ ID NO: 11381 - DNA, 201 bp, Homo sapiens
ctggagccccagggaaggaggggcattgcagctggagttcaaaggcagtgtgttggcagaacgccgccttccccggggaggccagtcttttttctctgaargccttctgctgattgagtgaggcccacccacggtatgaagatgatctgcttttctcagcatcaacagacttacatgttaatctctttttttttttgagac

SEQ ID NO: 11382 - DNA, 201 bp, Homo sapiens
aatgaagcctccgtaaaaatccctgaactacaggatccagagagcttctgggctggtggacacatccgcatgctgggagggtggcgccccccaactccacrgggacagaagctcctgtgcccgggccccaccagagctcgccctgtgtgcctcttcgtcttcctgttcatctgtatcatcaataatgtcctttacaaggac

SEQ ID NO: 11383 - DNA, 201 bp, Homo sapiens
cctcccgggttcaagtgattcttgtgcctcagcctcccgagtagctgggattacaggtgtacactaccacacctggctaatttttgtatttttagtagggrtggggtttcaccatgttggccaggctgatctggaactcctgacctcaggtaatccacctgcctcagcttcccaaagtgctaggattacaggtgtgagcca

SEQ ID NO: 11384 - DNA, 201 bp, Homo sapiens
cgtgttggccaggctggtctcgaactcctgacctcaggtgatccacccgcctcggcctcccaaagtgctgggtctacaggcgtgagccaccgcgcccggcyggaaatgtgcttctttagaggaaagcaccgttgatcccacctccttgatctggtttctaagacctcatacaaactgggcccgttagtctttgctccctga

SEQ ID NO: 11385 - DNA, 201 bp, Homo sapiens
ctcgctcttgttgcccaggctggagtgcaatggtgtgatcttgactcactgcaacctccgactcctgagttcaagcgattatcctgcctcaacttcctgartacctgagattacaggtgcatgccgctacacctggctaatttttgtatttttagtagagacagcatttcaccgtgttggccaggatggtcttgaactcct

SEQ ID NO: 11386 - DNA, 201 bp, Homo sapiens
cctggcccctgcgtctgtgagatgggggagatggagaagatgctgcccctccatggggttcttgaggaccacataactacagtctcagaaaaagcagtagrtatgaacgttagcaggggagagaaatcactgctttcgactccgtgcagtccacagcccggatgtgcacatggtggacctgagctcagtttgcgagggtgc

SEQ ID NO: 11387 - DNA, 201 bp, Homo sapiens
gctgggattacaggtgcccacaaccatgcctggctaatttttgtattttcagtagagatggggttttgccgtgttggccaggttggtctcgagctcttgayctcaggtgatccacccctcggcttcccaaagtgctgggattgcaggcgtgagccaccacgcccagcctcttcctttcttcttgagtggggaggaaggaat

SEQ ID NO: 11388 - DNA, 201 bp, Homo sapiens
tgttggccaggttggtctcgagctcttgatctcaggtgatccacccctcggcttcccaaagtgctgggattgcaggcgtgagccaccacgcccagcctctkcctttcttcttgagtggggaggaaggaatgggccagggcttcccacgtgccctggctgaccttgcctggggatgtcggcaggtcctggggcaggaagggg

SEQ ID NO: 11389 - DNA, 201 bp, Homo sapiens
tttgaaccaagggccatcatttgctggccactgatttaagggagctggaaagcaggagaccctgattctagacctaggccctggttggcccctgacttcarccatgagcccagagtcattcagtctctggaccttggtttcctgtttataaagtgcaggcagtaatgatagtgatacctgcctcacctcacttgcaggctg

SEQ ID NO: 11390 - DNA, 201 bp, Homo sapiens
caagggccatcatttgctggccactgatttaagggagctggaaagcaggagaccctgattctagacctaggccctggttggcccctgacttcagccatgarcccagagtcattcagtctctggaccttggtttcctgtttataaagtgcaggcagtaatgatagtgatacctgcctcacctcacttgcaggctggctgtgg

SEQ ID NO: 11391 - DNA, 201 bp, Homo sapiens
ttcctccgcatcttcacctgcaccattttattcttcttctttggaaaataaatctacttgtggttccaaagcctaactcatcctcagtaaccccggtagcyatgaattcctattcaagaggctcccgcaggcccagcgccaaagctgcctcccctgcagcctcggtgacttcccgggtctctccctccggccctggtgtcc

SEQ ID NO: 11392 - DNA, 201 bp, Homo sapiens
tatttttagtagagacgggctttctccatgttggtcaggctggtctcaaactcccaacctcaggtgatccacctgcctcggcctctcaaagtgctgggatwacaggcatgagccaccatgcctggctttttttttttttttagacagtctcactctgtcacccaggatggagtacagtggcacgatcttggctcactgcaa

SEQ ID NO: 11393 - DNA, 201 bp, Homo sapiens
gctactcaggaggctgaggcaggagaactgcttgaattcatgtccacatttagtggacaatagcctcccggaggtggagattgcagtgagctgagattgakctacttgtactccagcctgggcgacagacaaagactttgtctcaaaaaaaaaaagagtgaatgtggctgtattctttattttattgttattattattttg

SEQ ID NO: 11394 - DNA, 201 bp, Homo sapiens
tgcgccaccacacctggctaatttttgtatttttagtagagatgtagtttcaccatgttggccagactggtcttgaactcctgacctcaagtgatccaccygtctcggcctcccaaagtgttgggattacaggcgtgagccactgcgcctggccctgtttttcattttggatcctgttacccactggagtgaaaaggtcct

SEQ ID NO: 11395 - DNA, 201 bp, Homo sapiens
ttagacaatgctgtggggcaggtggggtgggggcatgatccttttgtgtggtgagtccgggaggcacacaggatgaagcctcaagctcccattcacttttmaaaactcctgacgccctcagctgcctctgagtttttgagcttgagcagaggaaatcaaggaaattgaggctggcttctgatcacatgcctttacttcatc

SEQ ID NO: 11396 - DNA, 201 bp, Homo sapiens
tagacaatgctgtggggcaggtggggtgggggcatgatccttttgtgtggtgagtccgggaggcacacaggatgaagcctcaagctcccattcacttttamaaactcctgacgccctcagctgcctctgagtttttgagcttgagcagaggaaatcaaggaaattgaggctggcttctgatcacatgcctttacttcatcc

SEQ ID NO: 11397 - DNA, 201 bp, Homo sapiens
ctcctgacgccctcagctgcctctgagtttttgagcttgagcagaggaaatcaaggaaattgaggctggcttctgatcacatgcctttacttcatccccasctattcacggagctttgccaacttaaaatatcctcatttgcccgatgaggatattaaaataaaaaacagacacccattcaaccaccatctcatatcgtca

SEQ ID NO: 11398 - DNA, 201 bp, Homo sapiens
cccggccagagagacatcctcagcccagagcttcctatctccctcgcctgctcctaccctccagaataaaatgtgtacgaggtagggaatctgtgcttgtytgccagttgtggtcactgctgtatctcttagagtggggcttacccctgggggcccagcgctcagggatgcgtgggctccaggctggagagaagcacccag

SEQ ID NO: 11399 - DNA, 201 bp, Homo sapiens
tttgtatttttagtagagacggggtttcaccatgttggtcaggctggtctcgaactcctgacctcatgatccgcccacctcgacctgctgggattacaggygtgagccaccgtacctggccaagcttgtttatttaaaaggggacagagacaactttttttcgtttctaatcggaatgtgtcttggaaaggatatgtctga

SEQ ID NO: 11400 - DNA, 201 bp, Homo sapiens
ataaatgtctgccctcaccatctgcccttgtcccttcagctgcccggggcagcatgggtggctggccttgctcccacttcttgggtgagggtctgatgctsaagatcgcacagccgacacgtggaggagggagagcctggccttccacctcctggccagtgccctctccatctggagctgacgatgtatgggcgagcagct

SEQ ID NO: 11401 - DNA, 201 bp, Homo sapiens
gtggagttggttttgtgcttcagggaacctgttcctgccctgtcccaaggtaagcttgtaaagaggtcggtgcccttgttttggaacccaagttaatgacrcaccttttcttgtgtgggctacacacatctttaacctgctgcagatagtacttttgttggcatctggagccatgatgccaggcccctcttctccctgaag

SEQ ID NO: 11402 - DNA, 201 bp, Homo sapiens
aaccagtgctgagtccactaggaagatcgaggcacatctccaaggctaagaaaccggcagttctgtagcctcagccactcccccacccctagctcatcccyggcttttgccgaaattctaaccagccccgtattttgtgtgggtgggctccagcccctcgggattttcctgggggtcactgcctccaccccctgggacgat

SEQ ID NO: 11403 - DNA, 201 bp, Homo sapiens
acgttcaccgaagagcatcgctggagaggggacacctgaggtgggaggggggctgagtggtcaggctgctggaaactgttgggctttgctgtggcacgaamcttcacccttacccacgccactgcaggactcctcctgccagcctcggggagccgggtgagagtcagaagggtgggtctaccttgcactgcagaaagcagc

SEQ ID NO: 11404 - DNA, 201 bp, Homo sapiens
tgagagtcagaagggtgggtctaccttgcactgcagaaagcagctctgagtttcctggaagccctggggaaaagggaaagcccagaagttgtcactggggsacatggttctaggtgagacccccctcctcctggccttgtggaatggcctggctgagccctagctcattcgtgcactgaccttatccattctggaatgttt

SEQ ID NO: 11405 - DNA, 201 bp, Homo sapiens
ctgcaaagtttaaatgacgaaaatgtcccctaataagagagtgagtggttaagtaaatgtgtatgcgacttctaaacatatccactcactggatatgtaayggagatttctaataagacagggaaatgttacaatgctataatttttattgaaaaacagaacccaagatacaaagggagtcagatgacctccattcaaata

SEQ ID NO: 11406 - DNA, 201 bp, Homo sapiens
tcctaagggacatctattctactgtacagaggaagtctgtggcatgtgtcagaagtgcctgggctgcccagggtcctagcaggacccgttttaacatgcargtgggcattgagtggagggtgccagggcccacccagccaacccagccaagccagccaactagaattcgaggaggtaagccagcttttccaaagttctcaa

SEQ ID NO: 11407 - DNA, 201 bp, Homo sapiens
gcgttccagaccagcctggccaacatggtgaaacctcgtctctattaaaaatacaaaaattagctgggcatggtagcgggtgcctgtattcccagctattygagatgctgaggcaggagaatcacatgaacccaggaggtggaggttgcattgagctgagatccactccagccggggcagaggaatgagactgtgtctcaa

SEQ ID NO: 11408 - DNA, 201 bp, Homo sapiens
aagctggcaccaccaaggaaacccttcccacctctgctcacctttcactggccagtcgcatgtcacctcttcctgaggggcctccttaacctcagaggcgygagcatgctggtccccttggtaagctttcctgggctctctgcaaacttcaaacttataagacaccctgtggggagatgagttcttgtccttttgtttttc

SEQ ID NO: 11409 - DNA, 201 bp, Homo sapiens
tattcctaacgggagttagggcaggccaggtgcagtgcctcacacctgtaatcccagaactttggcaggccaaggcaggtagatcacttgaggtcaggcgwtccagaccagcctggccaacatggtgaaacctcgtctctattaaaaatacaaaaattagctgggcatggtagcgggtgcctgtattcccagctattcgag

SEQ ID NO: 11410 - DNA, 201 bp, Homo sapiens
cacttgcagcctgggggcaaatctgccagagccaggccgttctgggctcagcaaagctggtttctgggagccttcttcagtagggtggggtgggaagaccraggtgcaggctgctttgggaaaagagtttcccatattcctaacgggagttagggcaggccaggtgcagtgcctcacacctgtaatcccagaactttggca

SEQ ID NO: 11411 - DNA, 201 bp, Homo sapiens
ggacatgtagggggagtgctgccgcccacttgcagcctgggggcaaatctgccagagccaggccgttctgggctcagcaaagctggtttctgggagccttyttcagtagggtggggtgggaagaccgaggtgcaggctgctttgggaaaagagtttcccatattcctaacgggagttagggcaggccaggtgcagtgcctc

SEQ ID NO: 11412 - DNA, 201 bp, Homo sapiens
ggggcaggaaatagaaagggacatgtagggggagtgctgccgcccacttgcagcctgggggcaaatctgccagagccaggccgttctgggctcagcaaagytggtttctgggagccttcttcagtagggtggggtgggaagaccgaggtgcaggctgctttgggaaaagagtttcccatattcctaacgggagttagggca

SEQ ID NO: 11413 - DNA, 201 bp, Homo sapiens
gcaaggttctccaaggtgatgtttagatgcttaggtccttttccactccctctatcaggaagtgcaatctgtgtattcttcctccgaatttgagcagaagragggtatccctgtgtagcatggccctcctggaccattcatgggttcacacttgctcattgtatgtcatcaaaggtaaatgccccacggtccccatgtcag

SEQ ID NO: 11414 - DNA, 201 bp, Homo sapiens
gaagactcagggggaggggcaggaaatagaaagggacatgtagggggagtgctgccgcccacttgcagcctgggggcaaatctgccagagccaggccgttytgggctcagcaaagctggtttctgggagccttcttcagtagggtggggtgggaagaccgaggtgcaggctgctttgggaaaagagtttcccatattccta

SEQ ID NO: 11415 - DNA, 201 bp, Homo sapiens
tcacctgcaccattttattcttcttctttggaaaataaatctacttgtggttccaaagcctaactcatcctcagtaaccccggtagccatgaattcctatwcaagaggctcccgcaggcccagcgccaaagctgcctcccctgcagcctcggtgacttcccgggtctctccctccggccctggtgtcccgggtgagcccag

SEQ ID NO: 11416 - DNA, 201 bp, Homo sapiens
gggacatccatgcaggtcttgatgccagggagttagggaattggggtcctggcagggaagcagggctgggagctggctgcaagaatgaaaggaagactcasggggaggggcaggaaatagaaagggacatgtagggggagtgctgccgcccacttgcagcctgggggcaaatctgccagagccaggccgttctgggctcag

SEQ ID NO: 11417 - DNA, 201 bp, Homo sapiens
tcaagcgattcccctgcctcagcctcccgaatagctgggattacaggtgcacaccaccatgcccagctaatttttgtatttttagtagagatgaggtttcmccatgttggccaggctggtcttgaactcctgacctcagatgatccgcccacctcggcctcccaaagtgctggcattacaggcgtgagccaccgcgcccgg

SEQ ID NO: 11418 - DNA, 201 bp, Homo sapiens
ttcccaggctcaagtgatcctcccacctcagcctcccaagtagttgggaccataggtgtataccaccatgcctggctaattttttatttttaaaaaattaragacggggccttgctgtgttgcccaggctggtctcgaactccgtggctcaagtgatcctcttgcttcagcctcccaaattgctgggattacaggcatgag

SEQ ID NO: 11419 - DNA, 201 bp, Homo sapiens
tgggcttgtgatctgcccgcctaagcctcccaaagtgctgggattacaagcgtgagccactgcacccagctgaaacaaagacatatctgactgttgcttgwggaggtgcctgccattcctccctacagtgattcacaggctcacccagcctctccttctccttcaagccccaaacctctgaatgccaggaagggtggtaag

SEQ ID NO: 11420 - DNA, 201 bp, Homo sapiens
tgggattacaggcatgagccaccgtgcctggcccccaactgaaattctaatatacttttcccatccttaagcgtgagggtgggaaggcagcaaaccactcytgacttgttctttaataaatgtgcacggcggtaattacaacatgcactgggaccttgggccgcatatctcaggtcttggtggtggtgcatggctgagagg

SEQ ID NO: 11421 - DNA, 201 bp, Homo sapiens
gcctggcctttttgttgttgttgttcttttgttgttgttaagtcatctttattttggttgcaaagttgcaatctattttttactgaacattttaagtctcrtttgaagtttcatagcttgccgtgtaaaccattgcatacactgtcaaactgctgtacagaacattctgaaatacaatctactaaattaattcgcttgaca

SEQ ID NO: 11422 - DNA, 201 bp, Homo sapiens
gcggcgggagtatggacacatgtgcggtgaaatggggagttcagcctgaaacctgggccctgtgtgctgtgcagtaagggattgagctgctgggcgcctgrcttgttccagcccttggactcccgggactgatagtgaggaggggccaccccctctcagcactgctaacccctcagactggagttttgtattttacagccc

SEQ ID NO: 11423 - DNA, 201 bp, Homo sapiens
gcaaagcatcgattgctttcctactgtaggatgttataagatgaccaacaaacactaaattattttgcttaaaagatgtactttttattgtggtaaaataygcatcacatgggatttgccattttaaccatttcctttttttttttttttgagatgtagtctcactctgtcacccaggctggaatgcagtggcataatccc

SEQ ID NO: 11424 - DNA, 201 bp, Homo sapiens
atggcccaggatgggtggcctgctgaggggacatgtctggaaaccagggcctgcgtggcagggggggacggggcgggctcgcctgtgccctgctctgtaayacattcagtgatgacaacccgtccctgacctagacacactggctaaaagggatttttgggccgttcccagtctgacaggcagtttgccagacagttatgt

SEQ ID NO: 11425 - DNA, 201 bp, Homo sapiens
tgcctctgttttgggcccctcccaggcaggactcccccgttcagtgcccctgactcccaggccagtcctttctaagagcttggaatgatcactagccaagyaaatgcaaggcctcctgtcagtcctgacaaacctggaaagaggaggtaaaaggagaccccagtctcgataaatgcctcaagcaagtccaagtaacccagc

SEQ ID NO: 11426 - DNA, 201 bp, Homo sapiens
taaaagaaggaggaaatactcacgacaattacagtcctcgtttctgcaactggtcacatggctcgtagctggtattgatgactgccttcttctactacccrttctgtattccctttgccttcagcaagcaccttggcagatcttgttttttttttttcctggtggagtgacccaaaccttcattcctgaagggtctgggtc

SEQ ID NO: 11427 - DNA, 201 bp, Homo sapiens
tctgtttcgaaagacattggtcaagggtatatcttctgaatcctcccaacttggttgagtaggtctaaagtgactaatccactccaccatcccaatctccmtaagtctttggattccttcctctacattaaaccaaggaagaccaagcatttccagcttgctcacagtgggccatctcttcatccgtatttcagctaaacc

SEQ ID NO: 11428 - DNA, 201 bp, Homo sapiens
cagtgagctcagatcgcgccattgcactccagcctgggcgacagagactctgtctcaaaaaaaaaaaaaaaagaaaaaaaaagaaaatttttttttccttyttacttgactcagctcgttgcattttgaaccccctccctgtttgcagtctctcctctggaaagagtcatgtcggctgttccctgacctgctgggctgggc

SEQ ID NO: 11429 - DNA, 201 bp, Homo sapiens
cccataaatgtctgccctcaccatctgcccttgtcccttcagctgcccggggcagcatgggtggctggccttgctcccacttcttgggtgagggtctgatrctgaagatcgcacagccgacacgtggaggagggagagcctggccttccacctcctggccagtgccctctccatctggagctgacgatgtatgggcgagca

SEQ ID NO: 11430 - DNA, 201 bp, Homo sapiens
taggaaggagtggggtgtggactcgcagctggggtctggtggggttttcagtactggtttgcagagtgactaagggatgtgcccccagcctgatgctgtcrtcaagacagaaggacgtgcgtgtcctggtggtgcatctgggagggccctccacccgctgagtggtgagccacctctcagcttgttctcttccctgcacag

SEQ ID NO: 11431 - DNA, 201 bp, Homo sapiens
gcacctggccccataaatgtctgccctcaccatctgcccttgtcccttcagctgcccggggcagcatgggtggctggccttgctcccacttcttgggtgasggtctgatgctgaagatcgcacagccgacacgtggaggagggagagcctggccttccacctcctggccagtgccctctccatctggagctgacgatgtat

SEQ ID NO: 11432 - DNA, 201 bp, Homo sapiens
ttggtggctttgtgagtgctgacaatacttccatgtgcttttttgttttttcttttttgagacagagtctcgctcagtcacccaggctggagtgtggtggygtgatctcggctcactgcaacctctgcctcccatgttcaggtgattctccctgcctcagcctcccgagtagctgggattataggcgcctgccaccatgcc

SEQ ID NO: 11433 - DNA, 201 bp, Homo sapiens
agctgcctcccctgcagcctcggtgacttcccgggtctctccctccggccctggtgtcccgggtgagcccagcacacgttgggattttggttgtttgttgrcctggcccgactgtccctgtctctgagggcagagtcgggtcccatcccgggacacgcctggggttagccaccgacctgcagcctcccggccgagggtgcg

SEQ ID NO: 11434 - DNA, 201 bp, Homo sapiens
tcccgggctcaaacaattctgccacctcagcctcctgagtagctgggactataagcacacaccaccatgcctggctaatttttgtattttttgtagagacrgggttttgccacgttgcccacgctggtctcgaactcatgggcttgtgatctgcccgcctaagcctcccaaagtgctgggattacaagcgtgagccactgc

SEQ ID NO: 11435 - DNA, 201 bp, Homo sapiens
ccccaccctctctcctggaggcacgagttgggtggctcttcctgcccttgctggctttggctggagctggggttattttgggtctggtcaggggccacccrtgacacactcctctcctgctcattgcctttggagcccgcccacgccagcccctagctgtcacagcctcatggttgtgttggaggagctgattttggcagg

SEQ ID NO: 11436 - DNA, 201 bp, Homo sapiens
aataggcagatctcgcggcctgggctggtgaggccggcctggccggaagcaagtcagcaagcaggcctctcaagtcctatcatccttgaattatcttattyattcaacaagaacatcctggggtacttttctatgccaggccctgcactgggtactgcagaacaaatctacatccaagctacgcatcctgcttttaagaag

SEQ ID NO: 11437 - DNA, 201 bp, Homo sapiens
aggaacttgggcctggaggagctcgggtttggaagctgggcttctgttggaggtgccagatgacgaaaatgcattccctggaagaagcttcccgttcctakttaggaaggtgatggaataattttaagaagcaagaatctgaatgaagtctggattccaggagagggtgtgggagctcctttgtggggattctccacatag

SEQ ID NO: 11438 - DNA, 201 bp, Homo sapiens
ggcacggtggctcacgcctgtaatcccagcactttgggaggccgaggcaggcggatcacctgaggtcaggagttcgagactagcctggccaacatggggamaccctgtctctactaaaaatacaaaaattagctgggcgtggtggcgggcgcctgtaatcccagctacttgggaggctgaggcagggagaatcgcttgaac

SEQ ID NO: 11439 - DNA, 201 bp, Homo sapiens
aataacccttttcaaacacataatagcatttgatagaatcaatcaggagactcaagtttttactgcgtgcattgctttagacttggagggcgtgtgttggytgttagcaaggctgtgactgcatttgctgagatggtcaagtaatttggactatgggaatatcacccagcatgaagtcaatgattacaggcctttgtgtct

SEQ ID NO: 11440 - DNA, 201 bp, Homo sapiens
ttactgcgtgcattgctttagacttggagggcgtgtgttggttgttagcaaggctgtgactgcatttgctgagatggtcaagtaatttggactatgggaayatcacccagcatgaagtcaatgattacaggcctttgtgtctgtggtctttctgttataactgatcttttttttttgaaacggagtctcgctcttgttgcc

SEQ ID NO: 11441 - DNA, 201 bp, Homo sapiens
gactcctgagttcaagcgattatcctgcctcaacttcctgagtacctgagattacaggtgcatgccgctacacctggctaatttttgtatttttagtagaracagcatttcaccgtgttggccaggatggtcttgaactcctgacctcaggtgatccgcctgcctcggcctcccaaagtgctgggattacaggtgcccgcc

SEQ ID NO: 11442 - DNA, 201 bp, Homo sapiens
ataattgatcagatatcaattatacattttcaagtgtaattctagcttaaagaggataaagttaatacttagctgtttatataagatgttcaaatgggcaytactgcctgatagtgacaagaagagagaatgttgggagtttcttttaagataagatgggtgtttggataaatgtctgacttggtctttttcccccttaga

SEQ ID NO: 11443 - DNA, 201 bp, Homo sapiens
tagtgatacctgcctcacctcacttgcaggctggctgtggtgctcgagagcggtcatggatgtaaaagcttttgtaaactgtaaattgctgcacggtcagygcgaagggctgactcatttgactgaggagggtggacttggctggcagggagaggggtacagctgtcctcctttctgacttacgctcaagggtcttccacc

SEQ ID NO: 11444 - DNA, 201 bp, Homo sapiens
ggtgatgtttagatgcttaggtccttttccactccctctatcaggaagtgcaatctgtgtattcttcctccgaatttgagcagaaggagggtatccctgtktagcatggccctcctggaccattcatgggttcacacttgctcattgtatgtcatcaaaggtaaatgccccacggtccccatgtcagagatgtgtccactc

SEQ ID NO: 11445 - DNA, 201 bp, Homo sapiens
ttgcctcatgagcgatgaatcaggagtttcaaatgcgtttatttttcataactctctaaacagttcatgccaaggactatcagtgttctccatactattaraagtggagtccttagcatttttggatctaatcgttaaccagccaaccccagaaaccccaaaaccaatgaaagaactccatctttaatattctcttcctct

SEQ ID NO: 11446 - DNA, 201 bp, Homo sapiens
agcattaactcacacgatcacaaggtcccacaataggccatctgaaggctgaggagcaaggagagccagtccgagtcccaaaactgaagaacttggagtcygatgttcaagggcaggaagcatccagcacaggagaaagatgtaggctgggaggctaggccagtctctcctatcacatttttctgcctgcttatagtctag

SEQ ID NO: 11447 - DNA, 201 bp, Homo sapiens
tactagttctgtgaccctggatacatcgtcagcctttcagagcctcaaggcccaccttatggttgattttgaagatggcctgaaatagtccagcaggcagygcctgatacagagtaaacactccataggtgtgagtgtgggtttcttcattcattggaaggtaactgggtgttcgtgtggcttttcattgaaatggggatg

SEQ ID NO: 11448 - DNA, 201 bp, Homo sapiens
tgagctccttctgtatgccactggggcactgtgtatttctctctctgtgtctgtgggagcagggaaggggaggctcaaaggtgagagcacccccacccccraggatctcgtgccctgggccccctgcgcacagagccttggcccagcccacccctcacccacaggatggtgcaggagcagtgctgccacagccagctggag

SEQ ID NO: 11449 - DNA, 201 bp, Homo sapiens
cctcccgggttcaagtgattctctcacctcagcctcctgagtagctgggatttcaggtgcccgccaccatgcccagctaatttttgtatttttagtggagrctgggttttaccatgttggccaggctggtctcgaactcctggactgaagtgatgtctgcccacttcagcctcccaaagtgctgagattacacccatgagc

SEQ ID NO: 11450 - DNA, 201 bp, Homo sapiens
aggtcatgctgatcatcatcataaaaataatagtgaaaaccccagaatgcccgtgtggagcacctactttctgtgtaccgtctgcacggacagcagccagyctggccccgggaaggacaagggctggggaggtggaccaacctggttgggtttcaggctgggtgacctgagccagctcaaaggcaccatgatacctccttt

SEQ ID NO: 11451 - DNA, 201 bp, Homo sapiens
gcgtttgagaccatcctggccaacatggcaagatctcatctctactaaaaatataaaaaattagctgggcatggtggcaggtgcctgtaatcccagctgcyggtgaggctgaggcaggagaatcacttgaacccaggaagcggaggttgcagtgagccctgatcgcaacattgcactccagcctgggcgacagagcaagac

SEQ ID NO: 11452 - DNA, 201 bp, Homo sapiens
gtttgagaagatgaaaaagttctggagatggatgggggtgatggtggcacgacagtgtgaatgcagtaatgcccctgaaccgtctacttaaaatggttacsatggcagattttgtgttacataaaatttgtagttcacatgtagttcaccacaatgagaaaagaaactctggccaggcacggtggctcacacttgtaatcc

SEQ ID NO: 11453 - DNA, 201 bp, Homo sapiens
actgaggccgcagattcagcagcactctgggccttgcttgtgaatggggattttagtcactatcaaatgtattactgacttctactcactaatgtctttgrtaaattttggagttatcttttttctttattttttgaaactgagtcttgctctgttgcccaggctggggtgcagtatgttgatcttggctcactgcaacct

SEQ ID NO: 11454 - DNA, 201 bp, Homo sapiens
tacttcatcaggtgctgggaggatggagtgcgagattgggtgtcaagggttgggtagagcacctggccccataaatgtctgccctcaccatctgcccttgwcccttcagctgcccggggcagcatgggtggctggccttgctcccacttcttgggtgagggtctgatgctgaagatcgcacagccgacacgtggaggaggg

SEQ ID NO: 11455 - DNA, 201 bp, Homo sapiens
cacggcctgtctcgtctgtaacagataaggtccttggcttagtgagtacttttgcttttcttaatgaattagagcaagaatgaatgaatgagtgaatgggracattcaaggttatccccatgataacacggttgtcactcctgatgacttttcctctggtgctgggaggcaactccagacaacttgacattagctctgcct

SEQ ID NO: 11456 - DNA, 201 bp, Homo sapiens
agaaatttcagacatacattagatttcctggaatgtaagaaataccatcagaatggctgagagggcattccttctctctttaagtgcgggtgcaagtccasactcctgggtatcgtgagtttccatatgacagtgtccctgaaacacgtggctcaatgcccaggacaccactccagggtcaccagatgcaagtgactggcc

SEQ ID NO: 11457 - DNA, 201 bp, Homo sapiens
gtgcttggaactttataaagtgcatccctcttctcagcaaccctgggaagacagtgcaagccccgttttcccactggggaagctgtgattcagagaggcgrcgctgcctgcccagggttagagagcaagaaagtgctggagctgggattggaaccaaaggctgtttggctccaaagcttacactgtttctactcaactctg

SEQ ID NO: 11458 - DNA, 201 bp, Homo sapiens
ggtgagaggctcagagaggactgcagggagaggccgacctctccgcaaccatgggctgtagccaagcaggggttaagcagcctgcagcttcaacaaggacrtgtttggggtggtcagaagatggcagctttgatgttttcccatcatgaatcatcttgactctaggtctccaccaaggcccgacattccttgggatccaga

SEQ ID NO: 11459 - DNA, 201 bp, Homo sapiens
cctcaggccacctttctttgtgagcagctgggggttcctgggccaggagggaggtggaaaaccccactgtttctccccctccactgtagccgtaaaccccrgaggacacctggggccgagtctcccacgaggccggggggtgaagtgagctggccttgccctgagaaccgcctgtctccaggcattgggcagatgcagaag

SEQ ID NO: 11460 - DNA, 201 bp, Homo sapiens
gttctggtgagtggggatcaatcggtgaacgaaatatgcaagtcccctggcctcgtggaggcggcattctataggggatgcagaatgcaaagaaagtaatwagtccgtctgatggtttgtaggaaggcaggatgtgccgtgggggaaacagggaggcataggggcttctgctcatggtgggtttataattttagagccgtg

SEQ ID NO: 11461 - DNA, 201 bp, Homo sapiens
agggtccagaggtaaaaatgggccctcactaagacctctgataagatctgacctctataacgaccctaaaagaggaaactgaggttcagagaggcccagcytccaaaatggcctctctgcagtcctgtcagggacccagacgggatcctgccctgaaggtaagctgtgaataaatggcatagtcctcttccctgagtgctc

SEQ ID NO: 11462 - DNA, 201 bp, Homo sapiens
tgtgactctcttttggcaacaccctcacagacacacccaggatcaatactttgtatccttcaatccaatcaagttgacactattaaccatcacaggacctrtccccgtctccactgcaggaagttaggacccatccctgtctccacccaggaagttaggacctgtctctgtttctatcacaggaagttgggatctggccct

SEQ ID NO: 11463 - DNA, 201 bp, Homo sapiens
ggaccattcatgggttcacacttgctcattgtatgtcatcaaaggtaaatgccccacggtccccatgtcagagatgtgtccactcaaggaaggagactgcygtgcagtgagctcagggagccatggcacctcccgggtgggcctggctcagcataggccctgtgaagcccagtcatcggaggggcctagagccttgctggg

SEQ ID NO: 11464 - DNA, 201 bp, Homo sapiens
tcatggttggctaccagtgtggacaggtcttccgggcatgctgtgtcaagagccaggagaccggagatttggatgtcgggggcctccaagaaacgggtaamtttcccccttccttccctaatgagcagtgtattaaggttctccgggatgtgtatatagagcgagagtggagagagagagattttaaggacttggctcatg

SEQ ID NO: 11465 - DNA, 201 bp, Homo sapiens
agagaagtggccagaggaccatggtaaaagaatgagtgtggcagggcacagtggctcacacctgtaatcccagcactttgggaggctgaggcaggtggatyacttgaggtcaggagttcgagaccagtatggccaacatcgtgaaaccctgtgtctactaaaaatacaaaaattagccgggcatggtggtgcacacctgta

SEQ ID NO: 11466 - DNA, 201 bp, Homo sapiens
aatatttgagtaccataccccagcccaattgacacttacgatgaaccattacaggtaacacgtgcatccgtgtcaccattgccttaactcagcacggactractccggttgtcggagccattcatgtttgtgaccttatctgaaagccgctgtcctggagtgacgctgagtgcttggagtctgggatcggacaaatctgtg

SEQ ID NO: 11467 - DNA, 201 bp, Homo sapiens
gaggtgaagtggagagcacaggatcagatttccatttgagaactagaatggactctggcagccaggtcggggcagacttccaggggccaaggctggaggckatcgctgccatcctggcaggagaagttgtggtcgaagcaggcaggagcagggatggagggtccggagccaccagcgatgacgcctctccctcggccacac

SEQ ID NO: 11468 - DNA, 201 bp, Homo sapiens
ctttctaagagcttggaatgatcactagccaagtaaatgcaaggcctcctgtcagtcctgacaaacctggaaagaggaggtaaaaggagaccccagtctcrataaatgcctcaagcaagtccaagtaacccagcacgagacatggaaacttaaaaagccaaaagggagatgtgatagaaggccaggacgagaggatgctcc

SEQ ID NO: 11469 - DNA, 201 bp, Homo sapiens
gtacacaggagacgacccctgtcccatcttgtgacaagaaattagaacttgttactatcctgtagcggaagataataccgatctccatcctgtcacaggargttagaatctgtaacaggaagttggaatctgtgctcatcctatacaggaagttaggacccgtccccgtctccaccacaggaagttaggacccgtccccgt

SEQ ID NO: 11470 - DNA, 201 bp, Homo sapiens
accgatctccatcctgtcacaggaggttagaatctgtaacaggaagttggaatctgtgctcatcctatacaggaagttaggacccgtccccgtctccaccrcaggaagttaggacccgtccccgtctccaccgcaggaggttaggacccgtccccgtctccaccgcaggaggttaggacccgtccccgtctccaccgcagg

SEQ ID NO: 11471 - DNA, 201 bp, Homo sapiens
ctccatcctgtcacaggaggttagaatctgtaacaggaagttggaatctgtgctcatcctatacaggaagttaggacccgtccccgtctccaccacaggargttaggacccgtccccgtctccaccgcaggaggttaggacccgtccccgtctccaccgcaggaggttaggacccgtccccgtctccaccgcaggaggttg

SEQ ID NO: 11472 - DNA, 201 bp, Homo sapiens; identical to SEQ ID NO: 1463

SEQ ID NO: 11473 - DNA, 201 bp, Homo sapiens
cgtgcctaatttagtccttgcatgcaatttccagcctggcctcaacttgttctatccttgcccacttcccttgagccacgctgcaagctctgctgcctccrgcccttggtacgtgctttgcacccttggcctgaatgttgcttaaactccagctcatgtgcctgcctcagagaggccttccctgccacccctggcttctgt

SEQ ID NO: 11474 - DNA, 201 bp, Homo sapiens
aaatgcacctctttgtcctgccttttactgctggggtggtccttccaaatgaaactgctctcacccggagccttcagtggctcccctttccttcaggacaragtgttgtcttcgttcctagattgtgaggcttcagggactgattttccttcttccttctctccttccttcactctcttttcttcttcttctgccttcatc

SEQ ID NO: 11475 - DNA, 201 bp, Homo sapiens
ttccctgccacccctggcttctgttttctctgtccgtccttctcatgacccctttccttcatggtgcttgtaacaggctgcggttcctgttgactcgcgtytcacatttgtcttccgcaccttccagaaggctctgtgaaggcagggaccaggtctatctcattcagtgcggtgttcccagctccttgcaagacatctcgc

SEQ ID NO: 11476 - DNA, 201 bp, Homo sapiens
gtgattgccctgtcctggctttcacggcaaatcccagggatgacgcgctttctcttttctgggagacacagccctgtcaccccgggggccacaccctggcyggcagccaagttctttcccagggtgctgggcccggcctcctctgggctgggatcagctgcggcctgactccatcttgagctgggggtgtcaccgagggtt

SEQ ID NO: 11477 - DNA, 201 bp, Homo sapiens
agcaagtcagcaagcaggcctctcaagtcctatcatccttgaattatcttattcattcaacaagaacatcctggggtacttttctatgccaggccctgcastgggtactgcagaacaaatctacatccaagctacgcatcctgcttttaagaagctccccaccagcatccatagcatcctgccagagttcccacagctgaa

SEQ ID NO: 11478 - DNA, 201 bp, Homo sapiens
agttaggacccgtccccgtctccaccacaggaagttaggacccgtccccgtctccaccgcaggaggttaggacccgtccccgtctccaccgcaggaggttrggacccgtccccgtctccaccgcaggaggttgggacccgtccccgtctccaccccaggaggttgggacccgtccgtgtctccaccgcaggaggttgggac

SEQ ID NO: 11479 - DNA, 201 bp, Homo sapiens
acagacacgccaagggataccagcagcgtctgagacctgaagcagaaatgccagggatgaggatttggaagattaacacaattgaactcagcactgtggcsttttttttctttctggggcttcggaaaggtaggaggcaaacaccctggcaggtaagacagacaagccaggtgtgatggaaatgcacctctttgtcctgcc

SEQ ID NO: 11480 - DNA, 201 bp, Homo sapiens
gggttgtggggagagaagggaggagagtctggagacctttaggaatagaatccattggcctcagtgatggtttaacctgagggatgggagtaaggggcctrtcgagggcgactccaagttcctggcttgggggtacctgcctggagagtgaggggtaggggaggaagggaagtgggtttaagggaggagggtaggtcagtg

SEQ ID NO: 11481 - DNA, 201 bp, Homo sapiens
ggtggggttgtggggagagaagggaggagagtctggagacctttaggaatagaatccattggcctcagtgatggtttaacctgagggatgggagtaagggscctatcgagggcgactccaagttcctggcttgggggtacctgcctggagagtgaggggtaggggaggaagggaagtgggtttaagggaggagggtaggtc

SEQ ID NO: 11482 - DNA, 201 bp, Homo sapiens
tcctggctctgagcacagtgggaagaggcatgggaggggtgaaaaggaaggtggtacacgtgttcaggtagatgcgacgaggccggaactgaggccaggtrgggttgtggggagagaagggaggagagtctggagacctttaggaatagaatccattggcctcagtgatggtttaacctgagggatgggagtaaggggcct

SEQ ID NO: 11483 - DNA, 201 bp, Homo sapiens
ccttgctccagcctgggggggctctgtgccatggccctgcagcagggggcccctttctgccctgaattggctcattcatggcgcctctcaggagtaaaggrgaagaaagtgatggttctccaccaacttcacctgtcccctcctgctgaactccagcagcggctcccatggctccaggagagagaaggggcatgactggcc

SEQ ID NO: 11484 - DNA, 201 bp, Homo sapiens
tccccagcccaaggctgccctgggcctagggacagtatttggagacttcgctggcagttttgcgttggaatcacctggtgcctccctgtacgtccacccaycctgtgcccagatccccttcgcaagcaccatatgctgttagatcctcgagcagccttgtgggacagccaccctggggctggtatcaccatttatgtaaga

SEQ ID NO: 11485 - DNA, 201 bp, Homo sapiens
cgtgatctcggctcactgcaacctctgcctcccatgttcaggtgattctccctgcctcagcctcccgagtagctgggattataggcgcctgccaccatgcycagctaatttttgtatttttagtagagacagggtttcgacatgttggccaggctggtctcgaactcctgacctcagatgatccacccaccttggcctccc

SEQ ID NO: 11486 - DNA, 201 bp, Homo sapiens
ccagccaggaagtgttcgaggatagggcttagacctgaactgcccagatccgggactccccatccccatggcctatgttaagccctgattattttttctgrtctatactagctggtatctacactggctggcatctgtcagccgtggttgagtctgagtcccagccgtagaggataaatagtgaagcacctcctttcacac

SEQ ID NO: 11487 - DNA, 201 bp, Homo sapiens
catcatcttcgacatcacggaagggaacctgcgggactcttttgacatcatcaagcgttacatggacggcatgaccgtgggtgagtggctgggaatatcarctctatccaggcacccctccccctccaccccgaaaccctctctggcccagcccaactcccatctgagtcccctccccaaattcaagcccacccaaccttc

SEQ ID NO: 11488 - DNA, 201 bp, Homo sapiens
ctcagcagcagggagaagccaccccgtatcagatcatcaaaatatgatgccgaaataggcatgcacagagacaggccttgatggcctgtggaggctctctyaggggaagtctcctggcaggttttacgtctttagttcccacctacatccttcctggggtgacccaagccaagaggttgggcagctgctgggcctagaacc

SEQ ID NO: 11489 - DNA, 201 bp, Homo sapiens
attccgcacaccagcacccggctgtgtctcccccatttcttatgagcagcgataagtcaatccccttcgacggtttaatcctccagccactgtttacagaraactttctgtgtgcttggaactttataaagtgcatccctcttctcagcaaccctgggaagacagtgcaagccccgttttcccactggggaagctgtgatt

SEQ ID NO: 11490 - DNA, 201 bp, Homo sapiens
ggtcccagtgtctggcacatgagacatggcaaatcagagtctgtaggatcaagtggatggatggaaccaggcccctggtggcagctctcatgtttgcgatsctgcatgtgggcagcgagtgttccttgctacttcttcctccttcccttgcctccctgtgttagagaagttggtggtggttctgaaagaacagtggtgtag

SEQ ID NO: 11491 - DNA, 201 bp, Homo sapiens
ggtcttgtgttggggatggggccaggagccctaagagcaggctccagttcgccctgcttcctcctgcagaggccaggtggtcttgaagaggggacacgagyctgtcctcatcctggaactgtaagggatgcagggacataggccaatctggctggacccctggtggcttcccagacaacatagtaaaactccgtctctact

SEQ ID NO: 11492 - DNA, 201 bp, Homo sapiens
caagcctcagggctatgggaggagctttctgggaaggggagagctggtctgcaaggaggaggtgggattagctgggaaaataaccctgaaacggtcctcakggagacctgaagccttgtaaagggcacggacccactgtagcagggtactgggaggcagtgggctggggaaggaggtggggttacagggccagagagaggg

SEQ ID NO: 11493 - DNA, 201 bp, Homo sapiens
gagctcttctctgccttgccccttccaggtccaccccagcctacaaagggcaccctgcacaccacctgattttccagacggggaggttgggacctgaagcmgcaggccctggggggtgtccagagccagagcctgggggtctcccagtagggcagcaggtgggctccagccaggtcagcctgccttcctgggttcatctgc

SEQ ID NO: 11494 - DNA, 201 bp, Homo sapiens
gaagccgcaggccctggggggtgtccagagccagagcctgggggtctcccagtagggcagcaggtgggctccagccaggtcagcctgccttcctgggttcrtctgcccagagggcgttttctatgacccagcctgaacggagctagaaaccaggcggtgcctgggtgcgtccatccctggctcatgcacgctgtgcttcca

SEQ ID NO: 11495 - DNA, 201 bp, Homo sapiens
tctgtgctggaggactgaccagggcctgccttctacaacccagaccccattcaggggtggagagcagcccaggacgcgctttctcgtgttcgctggagttygcagcgcagaggcccctgccgagacttccctccaagacaatataagcactggggttgggaaagaggatggagttggggtctaaccaggttccggatccag

SEQ ID NO: 11496 - DNA, 201 bp, Homo sapiens
gaacgatggaggtgctggagatttagggacaggaagaagggccagagaggtggtgtttgaggcggtatgcagtgataaaatttgggagccagctgggaggyggctgtgtggtccagagtgagggggttgagcccctccatttgtggttttgcaaagaggtgggaaggggagtttctttggagatccagtttttgggttctg

SEQ ID NO: 11497 - DNA, 201 bp, Homo sapiens
ttgaaaaagttgacagtagtgcaccggtgccagctagttcagctgttaggaaagatttacgttcttatggtgcagagtaaacgatggcagatttgggtttytaaaaaggctcagtgcatgactatttaaaatcaagaccagggatgaatttcaggttctcacatgtactttctacaaaaaaaaaaaaaaaaaaaaaaaaaa

SEQ ID NO: 11498 - DNA, 201 bp, Homo sapiens
gctgggtgtagtggcgcatgcctacagtcccagctacttgggaggctgaggtgggaggatcccttgagcagggaggtcgaggctgcagtgagctgtgatcrtgctactgcactccagtctgggcaacagagcaagaccctgtctcaaaaataaaataaaatataaaaataaaaaacagtctgtgttagtatttgaattcat

SEQ ID NO: 11499 - DNA, 201 bp, Homo sapiens
tccctgtcatcccctgggggagacttctgagctggggcgctgtggctcagctgccagttggcccctcgccagtcccttgccagcagggaggggtggttttygctcagcgcagggggtggtgagcagggaagccatgggctctccgggaccagcggggaggatagtcctgctcagacttgcagcctgctcaaaggggggtcc

SEQ ID NO: 11500 - DNA, 201 bp, Homo sapiens
ctcccttgagactttttgtttttttatgaaaatgggatcagactgttctgccacttgcttttcccccccacttgacagggtatttagaaatcatttcatgkcagcacctttatgttatctttttaaaaatgactgcatcagcagaaatacgtctttctaaggagaaaatacatcaagatagaaggtagtttcaggccgtct

SEQ ID NO: 11501 - DNA, 201 bp, Homo sapiens
ccactgatttaagggagctggaaagcaggagaccctgattctagacctaggccctggttggcccctgacttcagccatgagcccagagtcattcagtctcyggaccttggtttcctgtttataaagtgcaggcagtaatgatagtgatacctgcctcacctcacttgcaggctggctgtggtgctcgagagcggtcatgga

SEQ ID NO: 11502 - DNA, 201 bp, Homo sapiens
ccctggttggcccctgacttcagccatgagcccagagtcattcagtctctggaccttggtttcctgtttataaagtgcaggcagtaatgatagtgatacckgcctcacctcacttgcaggctggctgtggtgctcgagagcggtcatggatgtaaaagcttttgtaaactgtaaattgctgcacggtcagcgcgaagggct

SEQ ID NO: 11503 - DNA, 201 bp, Homo sapiens
tagtgcctgaatcagcagcctggaggtccacggcgcctcccgcaggtgagtgaggtgtgcccttcgtgttggctgaatcggccagaggggcggcgggaggycccgcctgccagccccgcatccccgcgctctgccgtttctccgcttgctggaccggccctaaccctcttcttgtctctctgcccacttttcttgcagccg

SEQ ID NO: 11504 - DNA, 201 bp, Homo sapiens
tggtgcagaaacacgggatgcggttgcggctcctaggatgcagctcttgcctcagtgaagtcgttttgcccccactgaggatcctggccctgtgccggggsgaggcaaaggaccacacaatacatgtgatactcaggggatccttcataggccttacaccagtcctgccaggcaggtggtcatcctcatgaagactcagag

SEQ ID NO: 11505 - DNA, 201 bp, Homo sapiens
ggatgcagctcttgcctcagtgaagtcgttttgcccccactgaggatcctggccctgtgccggggcgaggcaaaggaccacacaatacatgtgatactcasgggatccttcataggccttacaccagtcctgccaggcaggtggtcatcctcatgaagactcagagagggcaagtgatttgcccaagatcacacagctggt

SEQ ID NO: 11506 - DNA, 201 bp, Homo sapiens
tgcagctcttgcctcagtgaagtcgttttgcccccactgaggatcctggccctgtgccggggcgaggcaaaggaccacacaatacatgtgatactcagggratccttcataggccttacaccagtcctgccaggcaggtggtcatcctcatgaagactcagagagggcaagtgatttgcccaagatcacacagctggtatc

SEQ ID NO: 11507 - DNA, 201 bp, Homo sapiens
ctccaccacctttaggaagacctttccaaggtcacttatttgggtcactggtccatcaaagccaagcctgggccagccaagtacaaggcctgctggagccwtggccgctgtagctggtgggaaacaagaggccaggtgtggggctggacagtccaaggagccacatccggggacaaaacaagtgcaggggacatccatgca

SEQ ID NO: 11508 - DNA, 201 bp, Homo sapiens
ctctctggcttggagaagggacagtcctgtagtatcaagaccagaccttgtgtccccagcccaaggctgccctgggcctagggacagtatttggagacttygctggcagttttgcgttggaatcacctggtgcctccctgtacgtccacccaccctgtgcccagatccccttcgcaagcaccatatgctgttagatcctcg

SEQ ID NO: 11509 - DNA, 201 bp, Homo sapiens
taaaaatataaaaattagctggctgtggtggcgggcgtctgtaatcccagctactcgggaggctgagacaagagaatcgcttgaacccgggaagcggaggytgcagtgagctgagaccgttcattgtactccagcctaggtgacagagtgagactccgtgcccccaccatcaaaagaaaaaaatcagagatcacctatgaa

SEQ ID NO: 11510 - DNA, 201 bp, Homo sapiens
aagggcctcgcaggtttgtttttcatatgataaaactgcttttctttcatggaacattctggcatgtctagacctgcagatctgcctcacaagctctttcmgtggttccccctgtggttagggtgttaattaggggccagtttaatccttaaatgatgcagtcagtgtacagtgacagttggtccaggggcgctgtccagg

SEQ ID NO: 11511 - DNA, 201 bp, Homo sapiens
ggcttgttccagcccttggactcccgggactgatagtgaggaggggccaccccctctcagcactgctaacccctcagactggagttttgtattttacagcyccttttcctgctcatcaaaaatcgaagctgcttaacacgttttttcatctaagcttcagaaagcaatttttaaaatctaaaagagccatatttaggaggg

SEQ ID NO: 11512 - DNA, 201 bp, Homo sapiens
ggctttgccgttgcagacatcgacgagtgcgccctgcccaccgggggccacatctgctcctaccgctgcatcaacatccctggaagcttccagtgcagctscccctcgtctggctacaggctggcccccaatggccgcaactgccaaggtgagcaggagggatgccctggggtccctcacgctctgcttggggccctgcaa

SEQ ID NO: 11513 - DNA, 201 bp, Homo sapiens
tcatttcacatgtgttaacttgtcttcatttgtgttgaacccaaagaataaaggtggtggtggagaagggccctcagattgctgagcacagtcccctctcrttttacagatgtggaaactgaggcccagagagaaggggaagggttggccagggtcgtctggcctgctgtggccatgccaggtcaaggaagcgggtctgct

SEQ ID NO: 11514 - DNA, 201 bp, Homo sapiens
ctgcgcgccattttgcagacaggagggaggaagtgtcctgcgcgccattttgcagacaggagggaggaagtgtcctgcgcgccattttgcagacaggaggraggaagtgtcctgcgcgccattttgcagacaggaggaaggagatgtagtgggatgggaagatctgggctctgaggtcagtccccgctggacggaaacctg

SEQ ID NO: 11515 - DNA, 201 bp, Homo sapiens
ctgcacggtcagcgcgaagggctgactcatttgactgaggagggtggacttggctggcagggagaggggtacagctgtcctcctttctgacttacgctcargggtcttccaccatcactccctctctttgttcccccataccagatgctttgtaagtgtctgagcaaggttctccaaggtgatgtttagatgcttaggtcc

SEQ ID NO: 11516 - DNA, 201 bp, Homo sapiens
gctgtgtggtccagagtgagggggttgagcccctccatttgtggttttgcaaagaggtgggaaggggagtttctttggagatccagtttttgggttctggracaccctccaggtttaaccacatggtctctgtcttttcccgctgtagatatcaatgagtgtttgagtatcagtgccccgtgccctattgggcatacatgc

SEQ ID NO: 11517 - DNA, 201 bp, Homo sapiens
gatgtaaaagcttttgtaaactgtaaattgctgcacggtcagcgcgaagggctgactcatttgactgaggagggtggacttggctggcagggagaggggtrcagctgtcctcctttctgacttacgctcaagggtcttccaccatcactccctctctttgttcccccataccagatgctttgtaagtgtctgagcaaggtt

SEQ ID NO: 11518 - DNA, 201 bp, Homo sapiens
tttgggttctggaacaccctccaggtttaaccacatggtctctgtcttttcccgctgtagatatcaatgagtgtttgagtatcagtgccccgtgccctatygggcatacatgcatcaacacagagggctcctacacgtgccagaagaacgtgcccaactgtggccgtggctaccatctcaacgaggagggaacgcgctgtg

SEQ ID NO: 11519 - DNA, 201 bp, Homo sapiens
aatccactttcctgtctgcttccagcatgcaccctgccttctctggaagcagaaagttgatccccaaagcaaagccatttctatcagcccatccatcccaytgtcagttcccaagcatggggcttcattgtcttgcctggactggtgcaccagcccgtctactgcctcagccttgtctggcttgtcctgagcccaaagctc

SEQ ID NO: 11520 - DNA, 201 bp, Homo sapiens
gacctgagctcagtttgcgagggtgcagggaagcacttccaccgtggctttggcacattccttcctaggatgtattaggatgggtcgttcttgctggtcayccccgcactgcctcggtctctcctagatgtcaatgaatgcatcacgggcagccacagctgccggcttggagaatcctgcatcaacacagtgggctctttc

SEQ ID NO: 11521 - DNA, 201 bp, Homo sapiens
ctttcctgtctgcttccagcatgcaccctgccttctctggaagcagaaagttgatccccaaagcaaagccatttctatcagcccatccatcccactgtcarttcccaagcatggggcttcattgtcttgcctggactggtgcaccagcccgtctactgcctcagccttgtctggcttgtcctgagcccaaagctctcgcac

SEQ ID NO: 11522 - DNA, 201 bp, Homo sapiens
agtgatgtggtctgatcctcatctcagataatcccaagtgcaggcagaccctgagagaagatcctgagtcaggagaccccattctagccccagctctgctrctgcccagccaggcggccactggcaccacccccctgtgtgtgagcctgctccccatctgtggaaaggggttctgcttgacccaggacctccaagtgctga

SEQ ID NO: 11523 - DNA, 201 bp, Homo sapiens
attcaccgctgagctgtagatccccaggagctagagatgtgtgcctttagcccagggcagcgaggggaaaagttgaccaggagtggggtcaggtcttgtcyagccagtgcctgctgtcaccaaacctaggtgctcagggaagcctggcagctgccaaccactcccccaaagtgggcactttgctagatcctggcagaccct

SEQ ID NO: 11524 - DNA, 201 bp, Homo sapiens
tggcttgtgcttcctctagtcattcataaattgctgaaaagtcggcattcatatccacattagtggacaatattgtggatatagaaccagagcctggccarccttgctatgtgaccttactaaccatttgttaaggtcctgccccgggtgtgtagcaagaactcggtcctgcactggggagtgtctctagcgggggatgag

SEQ ID NO: 11525 - DNA, 201 bp, Homo sapiens
gaggcagggacgtatgatgctctgagcggtgaccctcgttttgtatttcagacatcaatgagtgcagcagcagcccctgtagccaggagtgtgccaacgtytacggctcctaccagtgttactgccggcgaggctaccagctcagcgatgtggatggagtcacctgtgaaggtgcggacgcccctgcctgctgagggggaa

SEQ ID NO: 11526 - DNA, 201 bp, Homo sapiens
aggcatgcaccagtatgcctgactaacttttttgattttttgtagacacagggtctcactttgttgccgaggctggtctcgaactcctgggctcaagtaaycctcctgcctcagcctcccatgcctgggattccaggcatgagccagtgcacccagctgaggtgtgtttcttattattgaactgtggtccatatttccccc

SEQ ID NO: 11527 - DNA, 201 bp, Homo sapiens
ctcagcaggtaagaagactgaggccggaagagccaagtccccaggatctcccagccaggaagtgttcgaggatagggcttagacctgaactgcccagatcygggactccccatccccatggcctatgttaagccctgattattttttctggtctatactagctggtatctacactggctggcatctgtcagccgtggttga

SEQ ID NO: 11528 - DNA, 201 bp, Homo sapiens
ttttcttatgggtaacggttgttctgcagagagccattaagcgctgattctgtgaccagcactggagaatcagggagggcctccgggaggaagtgatggcyaggctgggtcctgagtggtgaggtatttgagtgaaagggggagaaggggaggagggtgcccagtggagcaggacatggccagaagggtctggaggtatgg

SEQ ID NO: 11529 - DNA, 201 bp, Homo sapiens
gaaagggggagaaggggaggagggtgcccagtggagcaggacatggccagaagggtctggaggtatgggggggcggtgtgggcgtttgagaaactgagccraggttttctgctggagcgctagaggcttggcaagaggtgggctggaaggataaacaggaggctaaaactggagttgggccttcaacccccaggctttggg

SEQ ID NO: 11530 - DNA, 201 bp, Homo sapiens
cagtcacaagttcacttctcctaaaaggaggtgcctcagacagcagatccttccagaactctcccagaccttgtcttcctttggcaaggccacagagcttsgtggaaggggcagtggcccagggtctgggctccagttctggtttactgcttgctggccgtgtgattgtcagcaactcacgtaaccacacagagccaaatt

SEQ ID NO: 11531 - DNA, 201 bp, Homo sapiens
gtgctgggatgacaggcgtgagtcaccacgcccggccgcacatattctcaacgtttcctctttgccattggtctgtgctgctcgtcctcgcctgcaggaamtgtggagcctcttggggtgaatttactgaggcctggtgatggtttgcttcttcccagttgcctgcggtgcttgtgatgggcaagcctgcttgggtctcct

SEQ ID NO: 11532 - DNA, 201 bp, Homo sapiens
gcactaacctaattctgtcctttgcctgccctgatctccatagcctgcttcttcctggaaatttgctgctgctgctgcttcttttttttttttttttttttgagacagggtctcgctctgtcgcccaggctggagtgcagtggcgtgatctcagctcactgcagtctctgcctcccgggggttcaaaccattctctctgcc

SEQ ID NO: 11533 - DNA, 201 bp, Homo sapiens
atattctcaacgtttcctctttgccattggtctgtgctgctcgtcctcgcctgcaggaactgtggagcctcttggggtgaatttactgaggcctggtgatkgtttgcttcttcccagttgcctgcggtgcttgtgatgggcaagcctgcttgggtctcctctgagctcctggcctctctgtttcagcaccttgtccacaca

SEQ ID NO: 11534 - DNA, 201 bp, Homo sapiens
tgcactaacctaattctgtcctttgcctgccctgatctccatagcctgcttcttcctggaaatttgctgctgctgctgcttcttttttttttttttttttttgagacagggtctcgctctgtcgcccaggctggagtgcagtggcgtgatctcagctcactgcagtctctgcctcccgggggttcaaaccattctctctgc

SEQ ID NO: 11535 - DNA, 201 bp, Homo sapiens; identical to SEQ ID NO: 1485

SEQ ID NO: 11536 - DNA, 201 bp, Homo sapiens
tgaatccttcttgttgatctggtagaagaaacttggagggaaggtcccagaaggtgtcatagagtggtattcgaccagaaagctgcctgttttttttttttattcctaagggacatctattctactgtacagaggaagtctgtggcatgtgtcagaagtgcctgggctgcccagggtcctagcaggacccgttttaacatg

SEQ ID NO: 11537 - DNA, 201 bp, Homo sapiens
ttgaatccttcttgttgatctggtagaagaaacttggagggaaggtcccagaaggtgtcatagagtggtattcgaccagaaagctgcctgttttttttttttattcctaagggacatctattctactgtacagaggaagtctgtggcatgtgtcagaagtgcctgggctgcccagggtcctagcaggacccgttttaacat

SEQ ID NO: 11538 - DNA, 201 bp, Homo sapiens
agagaagtggcgtgtggcagggctgctatgtacagttggatgtgttgtgcactgcaaaatctaggcagcaccatccaccggtgagtctatttgcagtacamaacctgctcaactgtatgcagcagccccggtacaagggcttgtgaatggagatatctacctagctgtacctctccccctggccaggcaaggcctcagtca

SEQ ID NO: 11539 - DNA, 201 bp, Homo sapiens
aggcacagaaaggtgaaggaacttgcccaaagttccacagctggtttccagtggcactgggattcagacgcaggcagcctgggctgggatctgtgctctgrtcccctgtcctccactgcagcaaatacgggggagaggcagcatccctgggatgaatgagactgttgctccagccccatctcacagagcccgctctgccat

SEQ ID NO: 11540 - DNA, 201 bp, Homo sapiens
gaggctgaggcaggagaatggcttgaacccgggaggtggacgttgcaatgagccgagatcacgccattgcactccagcctgggcaacaagagtgaaactcygtcgcaaaaacaaaagacaaacaaaaaacacctgtcaggtaaatggtggtagagcagaaaacctgggctcagaagctggcattgatcccagagccatcca

SEQ ID NO: 11541 - DNA, 201 bp, Homo sapiens
ggtgggcagatcacaaggtcaagagttcgagaccagcctggtccacatggtgaaaccacacctctactaagaatacaaaaattagccgggtgtggtggcakgtgcctgtaatctcagcgacttgggaggctgaggcaggagaatcgcttgaacccaggaggcggaggttgcagtgagccgagatcatgccactgtactcca

SEQ ID NO: 11542 - DNA, 201 bp, Homo sapiens
ggtcgctcatgcctgtaatcccagcactttgggaggccaaagcgggtggatcacctgaggtcaggagtttgagactagcctgatcaacatggagaaacccygtctctactaaaaatataaaatgagccaggcatggtggcacatgcctgtaatcccagctactcgggaggctgaggcaggagaatggcttgaacccgggag

SEQ ID NO: 11543 - DNA, 201 bp, Homo sapiens
tcaagagttcgagaccagcctggtccacatggtgaaaccacacctctactaagaatacaaaaattagccgggtgtggtggcatgtgcctgtaatctcagckacttgggaggctgaggcaggagaatcgcttgaacccaggaggcggaggttgcagtgagccgagatcatgccactgtactccagcctgggtgacagggcaa

SEQ ID NO: 11544 - DNA, 201 bp, Homo sapiens
atgcgcagaccctctgtgcattggaactgttgataatattaatggtcccacatgcaccaggagtgtgtatttaaatatagacatttaagataaatatatamatatatcaacataagaatatgataattatatatacatatatcaacataagaatatgattactatatacatatatcaacataataatataattatatacat

SEQ ID NO: 11545 - DNA, 201 bp, Homo sapiens
tctgggggtcctaccacggagccaggtcagtttgtatcctgcaggtctcaaagggcctacttagaacgtctgtggcaggtccctgtcccacatggagctcrctgcatgagcactttcttctttctttctctgtccccagactgacccctgaggacagaccttcagtttctctacattcttatttagccagtgccaggcaca

SEQ ID NO: 11546 - DNA, 201 bp, Homo sapiens
tttagaattgttatcctgaggctactgtgtaggtaatgtgggataatgatgggatactgcatgtccttgaggaccaggattctgatgtggaagaaagaatrtgcctttgtaatacagaagagattaattaaaaaaccatatggtccttcttttgaattggatatcagtatgaactcttggtgtatattagtttttaaatgt

SEQ ID NO: 11547 - DNA, 201 bp, Homo sapiens
aaaggttgctgtttttaatccctgttcatagaagaggaaattgagactcaggaaggtcaaataatccatctgggggtcctaccacggagccaggtcagttygtatcctgcaggtctcaaagggcctacttagaacgtctgtggcaggtccctgtcccacatggagctcactgcatgagcactttcttctttctttctctgt

SEQ ID NO: 11548 - DNA, 201 bp, Homo sapiens
ggatcacaaggtcagaagttcaagaccagcctgaccaacatggtaaaaccctgtctctactaaaaaaaaatacaaaaaaaattagccgggcatggtggcaygcgcctgtaatcccagctactcaggaggctgaggcaggagaatcgcttgaacctgggaggcggaggttgcagtgagctgagactgtgccactgtactcca

SEQ ID NO: 11549 - DNA, 201 bp, Homo sapiens
gcgcgatctcagctcactacaacctccgcctcctggattcaagtgattctcctgcctcagcctcctgagtagctgggactgcaggcgtgtcccaccacgcycggctaattttttgtatttttagtagagacggggtttcaccgtgttagccaggatggtcttgatctcctgaccttgtgatccgcccgcctcggcctccca

SEQ ID NO: 11550 - DNA, 201 bp, Homo sapiens
tgagcctgtggcggctgcatccggcaggaacacttcagccctcctcccctcccctcagcagccccgtaaaggctggaacagaggcctttaggaagatgccmgccagggaggaagcagtccaggccaggggatggcgtggcctggtgtgggatggcccagggatactcatggctatgggtcagctccagcatcggctaagta

SEQ ID NO: 11551 - DNA, 201 bp, Homo sapiens
tcctctaacgcatgacatggcccaggatgggtggcctgctgaggggacatgtctggaaaccagggcctgcgtggcagggggggacggggcgggctcgcctrtgccctgctctgtaatacattcagtgatgacaacccgtccctgacctagacacactggctaaaagggatttttgggccgttcccagtctgacaggcagtt

SEQ ID NO: 11552 - DNA, 201 bp, Homo sapiens
aggtggaggttgcattgagctgagatccactccagccggggcagaggaatgagactgtgtctcaaaaaaaaaaaaaaaaaaaaaaaaaaaaagggcagctracatgggaagagtgaatacagagccaagccccctgctgctgattggcttttgaatgagcacatgatccaagctgtccaatcagagtcctgcctcagagag

SEQ ID NO: 11553 - DNA, 201 bp, Homo sapiens
gccacgccccacggtgacaacgccagcctggaggccacatttgtgaaggtgagagccaaagaccatgtggggtcgctgcccgtccccactagtcggcagayccaggccctcccagccaagcggcactgtctgtcagcgctccctgcctcaggccacctttctttgtgagcagctgggggttcctgggccaggagggaggtg

SEQ ID NO: 11554 - DNA, 201 bp, Homo sapiens
tcccgggttgcagggagctacggagttgtctttgtagttttttgcaggccagcccctcctgtcgcacgggcatgaccatggggcagtcaggggaggcttcytggaagaggtcacacacattctgggtcttgaggctgaggggtgagccagacaagtgggacacccaaactcacagccacgtctgtggctggcccatgaaca

SEQ ID NO: 11555 - DNA, 201 bp, Homo sapiens
gctgaccacttggaaggagatgttattcaggggactcgagcatctggcgtaggatgggactccatgaggtctatgcctccttctagctctgaaactcctcragggaaaccatttcccagatctctacgttgctgcagtcccttctaacttccagcacaccttctgctctctccgcaggtgtcgtgcgccaggtgcggccca

SEQ ID NO: 11556 - DNA, 201 bp, Homo sapiens
caggactgcagagtccgctgctgtgcctttctctctctctccactcagacggcttccatctggggaacatcccggcggccgagggctggtaactggagcawgacccaggaagctgggccgcaaaccacagggctcggccttgtggacaggaccaggctgttacagtcctgcccacacaattcccttctgcccgcaggagga

SEQ ID NO: 11557 - DNA, 201 bp, Homo sapiens
cgagtttgatttgtttctgattttgaaggttgctggggttttttttgttttatttttggttttgttttttgagacagagtcttgctctgtcgcccaggctrgagtgcaatggcgcgatctcagctcactacaacctccgcctcctggattcaagtgattctcctgcctcagcctcctgagtagctgggactgcaggcgtgt

SEQ ID NO: 11558 - DNA, 201 bp, Homo sapiens
cctgagaaaatccaggccccgaatctgaccatcagtgattcagcctagcgcctcccttccccttcacagcacccttttccctagtgtggtccttcctttckagttgctcgtctcaccacgcagctgtttacaatcagcttggagctctggtcttcagccattgtagagaccaaacctcgtgaagtactctggtgcaatgta

SEQ ID NO: 11559 - DNA, 201 bp, Homo sapiens
gttatgaagctatgaagaaaagtggtatcagaatcttgattctgcaggcatttatttggcatctattatgtgccaggaactgaggaccagctgaactgttwaggtcctctttcatgaagtcctccctagccactggcctgggttcagtcgaggtgagggcaaggaggtggaagtcatgcttgaactagcctggagatggag

SEQ ID NO: 11560 - DNA, 201 bp, Homo sapiens
agcagccgtggacggagcccctctgtgtcaggctctagggacatggtgataagaaggggtcctcccaccctctcaggggaggcatgcaacggagccagccrcgaggacaccagtgtttacaccatgacacaaccatgcgggggggtggggggaggagaggctccctcagcacgtggttgcccaaggagccgtccccagtcc

SEQ ID NO: 11561 - DNA, 201 bp, Homo sapiens
cctggccagtgccctctccatctggagctgacgatgtatgggcgagcagctgggggccatcgctggctaatagctggctatgctctgtcaaatcatagacwcttactcagcaaaggggcatgtgaccccaagagcagcttcaagagcgctctcagctgtgtgcccccccgttctgtgtcctcgccctgcatttctgtgtgg

SEQ ID NO: 11562 - DNA, 201 bp, Homo sapiens
ttggtgggtgaatggatggatggttggatccatgggtaggtgagtggatggattggtggatagatggatggatggatggatggatggatggatggatagatggatgggtgagtggatagatggatggatggatgagcagatggttgggttgatgggtgggtgaatggatggatggttggatccatgggtaggtgagttgat

SEQ ID NO: 11563 - DNA, 201 bp, Homo sapiens
gaacatgggagtttggaatcctaggaccttctagttcactcactcattctttccgtttctgaacccttcttgagcctctacctgtgcctgaccctgggctragccttgcagatacagagatggataaatgccacatagcccctgaggactttgcatctcagcagcagggagaagccaccccgtatcagatcatcaaaatat

SEQ ID NO: 11564 - DNA, 201 bp, Homo sapiens
cgcccaggctggagtgcaatggcatgatctcgactcactgcaacctccgcctcccgagttgaagcgattctcctgcttcagcctccccagcagctgggatkgcaggcgcccatcacgcccagctaatttttgtacttttagtagagatggggtttcaccatcttggccaggctagtctcgaactcctgacctcaggtgatc

SEQ ID NO: 11565 - DNA, 201 bp, Homo sapiens
attggtgggtgaatggatggatggttggatccatgggtaggtgagtggatggattggtggatagatggatggatggatggatggatggatggatggatagatggatgggtgagtggatagatggatggatggatgagcagatggttgggttgatgggtgggtgaatggatggatggttggatccatgggtaggtgagttga

SEQ ID NO: 11566 - DNA, 201 bp, Homo sapiens
tgactgctgctgtggtgggctaagttgctgtgagtttggatgtcccagaaaaacaatcagcgcacaggccccggggctcgccgtgttcagtcctcccagastaacagaagaagagggagaaatgccccgagtccactaagaacctgcaagggccgggtcgtcctctaatgtagccttgaaagacccgttcttagcggggat

SEQ ID NO: 11567 - DNA, 201 bp, Homo sapiens
cttcgcagcccttgggggctccctggcggctccttggaggagatgaggcttgatgtgaggggagcgcgggaagagcgcaattctgccaataccccagaatygttttccccaagatgcctctgcacattctactactactgaatttcccagccaggcgctgagcagaaggccccatggggctataggactggtagtcgtcag

SEQ ID NO: 11568 - DNA, 201 bp, Homo sapiens
gattggtgggtgaatggatggatggttggatccatgggtaggtgagtggatggattggtggatagatggatggatggatggatggatggatggatggatagatggatgggtgagtggatagatggatggatggatgagcagatggttgggttgatgggtgggtgaatggatggatggttggatccatgggtaggtgagttg

SEQ ID NO: 11569 - DNA, 201 bp, Homo sapiens
agagagaatgagagagagagacagagagagacctgtgggaccaaagcctttactggggtccagggtgttatccaggcaggtttcccgtgaggaattctaaytggggggcttggagcaggcaggagttccctgaggtcatgcggtggcggatgggggtcacttctgcataggcctgcactatcgatgtaggtgtgagggtct

SEQ ID NO: 11570 - DNA, 201 bp, Homo sapiens
gccaggtgacatagggggtccagggaagacttctgtgaagacttctatgaagcattccagctggtcccagtgtctggcacatgagacatggcaaatcagagtctgtaggatcaagtggatggatggaaccaggcccctggtggcagctctcatgtttgcgatgctgcatgtgggcagcgagtgttccttgctacttcttcc

SEQ ID NO: 11571 - DNA, 201 bp, Homo sapiens
acccccacttaaagggaactaccacagtttatgttttgaaatcgcattttaaattccatctgtgggtgtataaggattattacccaatttcaagtttaccrtttgaaaaatagcaatggcgtgagtggccccttttaggcaaagtgtgattgggtctgtgtggccgcggcaaactgctctgggcttgcggctttgttctct

SEQ ID NO: 11572 - DNA, 201 bp, Homo sapiens
cctcgagtgatgtggtctgatcctcatctcagataatcccaagtgcaggcagaccctgagagaagatcctgagtcaggagaccccattctagccccagctmtgctgctgcccagccaggcggccactggcaccacccccctgtgtgtgagcctgctccccatctgtggaaaggggttctgcttgacccaggacctccaagt

SEQ ID NO: 11573 - DNA, 201 bp, Homo sapiens
gttgttgttgttcttttgttgttgttaagtcatctttattttggttgcaaagttgcaatctattttttactgaacattttaagtctcatttgaagtttcayagcttgccgtgtaaaccattgcatacactgtcaaactgctgtacagaacattctgaaatacaatctactaaattaattcgcttgacactgttcagattac

SEQ ID NO: 11574 - DNA, 201 bp, Homo sapiens
ttgtatttttagtagagacgggctttctccatgttggtcaggctggtctcaaactcccaacctcaggtgatccacctgcctcggcctctcaaagtgctggrattacaggcatgagccaccatgcctggctttttttttttttttagacagtctcactctgtcacccaggatggagtacagtggcacgatcttggctcactg

SEQ ID NO: 11575 - DNA, 201 bp, Homo sapiens
gaggcatgtgggctgcttctcagacctgcgggtaccccacctcccagatgttgtcaatgggatgtgaggttcacgagcacgtcacggagcctctcccctcrtcatgtacgtgcgcatcatggcaaaatgtgcctggccactggttcctgacgctggaaggcacgaacccactccccacacccacagccggcgttgctgtga

SEQ ID NO: 11576 - DNA, 201 bp, Homo sapiens
gtctcaaactcccaacctcaggtgatccacctgcctcggcctctcaaagtgctgggattacaggcatgagccaccatgcctggctttttttttttttttaracagtctcactctgtcacccaggatggagtacagtggcacgatcttggctcactgcaacctctgcctcccgggttcaagtgattctctcacctcagcctc

SEQ ID NO: 11577 - DNA, 201 bp, Homo sapiens
cttgtgctgtaacagaattaacctggaagaaggcaggactccgcctgggccaagcttgctgtgtagttttcggcctgttccctcctctctctgagctttgyccccactctcctaaaaaataaaagaggtgtgagctgggcacggtggctcacgcctgtaatcccagcactttgggaggccgaggcaggcggatcacctgag

SEQ ID NO: 11578 - DNA, 201 bp, Homo sapiens
tgccaggtgacatagggggtccagggaagacttctgtgaagacttctatgaagcattccagctggtcccagtgtctggcacatgagacatggcaaatcagagtctgtaggatcaagtggatggatggaaccaggcccctggtggcagctctcatgtttgcgatgctgcatgtgggcagcgagtgttccttgctacttcttc

SEQ ID NO: 11579 - DNA, 201 bp, Homo sapiens
ggcatgtgggctgcttctcagacctgcgggtaccccacctcccagatgttgtcaatgggatgtgaggttcacgagcacgtcacggagcctctcccctcgtmatgtacgtgcgcatcatggcaaaatgtgcctggccactggttcctgacgctggaaggcacgaacccactccccacacccacagccggcgttgctgtgact

SEQ ID NO: 11580 - DNA, 201 bp, Homo sapiens
gtgagccaccgtacctggccaagcttgtttatttaaaaggggacagagacaactttttttcgtttctaatcggaatgtgtcttggaaaggatatgtctgargggtgggagtggagttggttttgtgcttcagggaacctgttcctgccctgtcccaaggtaagcttgtaaagaggtcggtgcccttgttttggaacccaag

SEQ ID NO: 11581 - DNA, 201 bp, Homo sapiens
tcaccgggcacattcataaattattcttttttaaaaatgaaatgttttagccaaacagcagtagaggcatgttgtgcaaaattagcaaaaaaaaaaaaaaaggaatgacgatgatatgaatcttttggcggcctctcctaaccgtctttaaatctgcgaaaggatctcagtgcccgccattacctggccagcaccgggagg

SEQ ID NO: 11582 - DNA, 201 bp, Homo sapiens
agccccttttgcaactctcctcatactcattctcccaacgagtaatgtgtgtatccctgggggcaggtcctgctctgaggaatgcagcagtgactaaggcrgacatgaacgcctctctcatacactttttatcccagagggtaggagtacacgagaaacaagcataatatatacacggtcagatggtagtgagggctgtgc

SEQ ID NO: 11583 - DNA, 201 bp, Homo sapiens
tctaatgggtgggaggtaaccagtgctgagtccactaggaagatcgaggcacatctccaaggctaagaaaccggcagttctgtagcctcagccactccccsacccctagctcatccctggcttttgccgaaattctaaccagccccgtattttgtgtgggtgggctccagcccctcgggattttcctgggggtcactgcct

SEQ ID NO: 11584 - DNA, 201 bp, Homo sapiens
tgggggtcccagggccccctagggcctccctcggcttcagctgagggcttggcctacaggagttgttccttgtaagatgtggcccaggctttgaaatgcasaactttcttttttttttttttttttttttgagacggagtctcgctctgtcgcccgggctggagtgcagtggtgccatctcggctcactgcaagctccacc

SEQ ID NO: 11585 - DNA, 201 bp, Homo sapiens
accgtttttattcttctctccctacattgactccagctctctgaaaattctgagaccgtgtaagcttagaataaataatgagaagccgggcgcggtggctmacgcctgtaatcccagcactttgggaggccgaggtgggtggatcacctgagatcaggagttcgagaccagcctggccaacatggtgaaaccccgtctcta

SEQ ID NO: 11586 - DNA, 201 bp, Homo sapiens
tttaaaagatgcaaaaaacagggatcactgaccacctggtttgtctgttgtgttagccagctctttttttttttctttttgagatggagtctggccctgtygcccaggctggagtgcaatggcgcaatctcagcttgctgcaacctccgcttcctgggttcaagcgattctcctgcctcagcctcctgagtagctaggagt

SEQ ID NO: 11587 - DNA, 201 bp, Homo sapiens
tgcctctgtttccttcactataagatgtgagtgtcctctgggtaattattataggtgaaatgctttacatttagtaaccaatgtcgtcatctcagcagccytacgaaataggtgatccagtgttgttttgaacctatttttattttttattattatttttgagacggggtctcactctgccggccaggctggagggcagta

SEQ ID NO: 11588 - DNA, 201 bp, Homo sapiens
tcaggtgtcagcctccacagaggcatgcacagcaaggggtccggaggcatgccccatggagaactgggggtgctctgcttgcaggaggatccagggcccaytgcagtcctcagatgttctgggggagaggatacgcctgcttcatttcttctcaggggtcagaactgggcacagggggttggaaggagggagaaagatgtc

SEQ ID NO: 11589 - DNA, 201 bp, Homo sapiens
cgatcttggctcactgcaacctctgcctcccgggttcaagtgattctctcacctcagcctcctgagtagctgggatttcaggtgcccgccaccatgcccarctaatttttgtatttttagtggagactgggttttaccatgttggccaggctggtctcgaactcctggactgaagtgatgtctgcccacttcagcctccca

SEQ ID NO: 11590 - DNA, 201 bp, Homo sapiens
cctagatgatttggagtagggggatggccttgctttgctatttgttgctgacatttagaagtggtatctaagccagacttgagtcatcactctacaggttstgtggacagggggctcagagaggcctcccctgaggcctctcgtggaccccgctgggctgtctgcccgctcctccatctgggatctccacctgtgtttgca

SEQ ID NO: 11591 - DNA, 201 bp, Homo sapiens
ccaaagtgctgagattacacccatgagccactgctcccggcctcttcccccatttttacagatgaaggaagtgagcctccttgagtcttagtaagggaggragctggattcaaggctgagcagttttaacccgcagcgttgccttccctgggaacattcgagttgaaggttaacgagattttgcaagagtttgctcttggt

SEQ ID NO: 11592 - DNA, 201 bp, Homo sapiens
tgaggccacagggacttggaagtaactattgggacctgggcccaggtggcagacagccaccctgtcctttgaccttgcttgatgactcgtcttgaagttcytgtgctttcaaatgcacggtgcaattcctgctgccagaacccctctaactcaaaaacggagaggcagcatgcatgtgtgtcatttttccgggcatggtag

SEQ ID NO: 11593 - DNA, 201 bp, Homo sapiens
gggggctcagggaccacctatatccctgactcagagctctaactcttcatctgtaacatgatgattaacttcagcctcaccagatcattggaggattaaaytagatgacagcaattacaggcaattaagggcaattacgatgattaccattttcatgtaaggtgtgtgtgtattttgtttgcttgtttgtttttgagacag

SEQ ID NO: 11594 - DNA, 201 bp, Homo sapiens
tcggcgtgtgtgctaggagggaggaggggaccccacctggctgggcgtgagggtgggcagggggctgtctggagtgggccatgcctgcatggaggtggaasggggagcgaattaggcagaagcggcgggagtatggacacatgtgcggtgaaatggggagttcagcctgaaacctgggccctgtgtgctgtgcagtaaggg

SEQ ID NO: 11595 - DNA, 201 bp, Homo sapiens
aaggagcacgaggctcgcccaccaggcaggcacagcgcggcagtcccggctctcccactgacttcccgcatgctcgggacaagtcactttgcattccttgyctgagaaatgaggctggaggccaggcgcgatggctcatgcctgtaatcccagcactttgggaggctaaggcaggtgaatcacttgaggtcaggagtttga

SEQ ID NO: 11596 - DNA, 201 bp, Homo sapiens
ggtttcaccatcttggccaggctagtctcgaactcctgacctcaggtgatccacctacctcggcctcccaaagtgctggaattacaggtgtgagccaccgygccggctggcagccctgttattaatgttagctattattcctgttgtccccttctctaggaagtgttggcaccaggagccttcgcagcccttgggggctcc

SEQ ID NO: 11597 - DNA, 201 bp, Homo sapiens
ttttccccaagatgcctctgcacattctactactactgaatttcccagccaggcgctgagcagaaggccccatggggctataggactggtagtcgtcagtrccaaacccgtgtcaggaaaggtggtgttcttagccattcagtcattcattcactaagggacagctcagtgccagacactgctctataacttgtggatgtg

SEQ ID NO: 11598 - DNA, 201 bp, Homo sapiens
aggtatgacagtgaaggtatattgctggccttgccagctgaagacaaattgcttctggtgggccttggaacaggaatggagaaaaaggcatttgtcaagtyagtggctacataccaggtaccaagagatatggtaatttgctcaagcaatgaaaccacatctggtacagcagctgcaaattggagtcaccacttggttaaa

SEQ ID NO: 11599 - DNA, 201 bp, Homo sapiens
ggcagtacagtcgggaagtgtcctgcgcgccattttgcagacaggagggaggaagtgtcctgcgcgccattttgcagacaggaggaaggaagtgtcctgcrcgccattttgcagacaggagggaggaagtgtcctgcgcgccattttgcagacaggagggaggaagtgtcctgcgcgccattttgcagacaggagggagga

SEQ ID NO: 11600 - DNA, 201 bp, Homo sapiens
aattttgtatccgtgttttattttatgatcaagaggttgtaaaaatctgtctagcacagtacctggaacccagacctctgagagactgtagcctcttctcctgcctccccgtcacctggtgatgtggaattgactgccctgtgctgggcaccgagcttggcgctttctatctgctccttcgtttattaccctgctgcccag

SEQ ID NO: 11601 - DNA, 201 bp, Homo sapiens
aaattagctggtcgtggtggtgcccgcctgtaatcccagctactcaggaggctgaggcaggagaatcacttgaacccgggaggtggaggttgcagtgagcygatatcgcaccacagcactccagcctgggtgacagagcgagactcatctcaaaaaatatataaaaataaaaataaatgaaaaacaaaaacagaaatacaa

SEQ ID NO: 11602 - DNA, 201 bp, Homo sapiens
ttttgcagacaggagggaggaagtgtcctgcgcgccattttgcagacaggaggaaggagatgtagtgggatgggaagatctgggctctgaggtcagtcccmgctggacggaaacctgcggccctgttagctccgtgatctggaaggtgctactagtagcgcctcatttttctccccaggagaaggagggcgaccgtgtctc

SEQ ID NO: 11603 - DNA, 201 bp, Homo sapiens
gagccaagattgtgccattgccctctggcctgggtgacagagcgagactctgtctcaaaaaaaaaaaaaaaaaaaagaaaagaaaagaaaagaaaaaaaaagaaaaagaaaaaaagaaagaaagaaaggaaaatagaaaaatcgagtcagaattagaagaaaactgagaaatgaagtaatagaccaaagaaacaaaaagtt

SEQ ID NO: 11604 - DNA, 201 bp, Homo sapiens
acaggaggaaggagatgtagtgggatgggaagatctgggctctgaggtcagtccccgctggacggaaacctgcggccctgttagctccgtgatctggaagrtgctactagtagcgcctcatttttctccccaggagaaggagggcgaccgtgtctcatccctaactgcgatgggggctgaatgcggctgtgggcacatagg

SEQ ID NO: 11605 - DNA, 201 bp, Homo sapiens
tgtaactctaggtctctttataaaccagtgtctagagtcagagacatgagactcaggcagagagaccccccccaccccccgccactgactttcatcatttsaaacaatggagagacaatcaagtgcaacatcaaatagcaggagctgaaagatggcttcgagatggggccgagaatgtggaccacagagcccaagaggcag

SEQ ID NO: 11606 - DNA, 201 bp, Homo sapiens
gagccccagcaagcctcagggctatgggaggagctttctgggaaggggagagctggtctgcaaggaggaggtgggattagctgggaaaataaccctgaaayggtcctcagggagacctgaagccttgtaaagggcacggacccactgtagcagggtactgggaggcagtgggctggggaaggaggtggggttacagggcca

SEQ ID NO: 11607 - DNA, 201 bp, Homo sapiens
gctgccctgggcctagggacagtatttggagacttcgctggcagttttgcgttggaatcacctggtgcctccctgtacgtccacccaccctgtgcccagakccccttcgcaagcaccatatgctgttagatcctcgagcagccttgtgggacagccaccctggggctggtatcaccatttatgtaagaaaaaaaaggaagt

SEQ ID NO: 11608 - DNA, 201 bp, Homo sapiens
agcccacactgaccctggtgggcagacccagcccagggaggggcaggcaggagtgaccccgtcatcaggttctgctggcgagcccagggtggtgacaggcscacgtcttttgccgggagctgaagacgttcatgggctttcaagcaggacaaagcttcaatgtcatcaccaggtagcaggcagagcaagggtgctgacagc

SEQ ID NO: 11609 - DNA, 201 bp, Homo sapiens
gcccagagagcgaaaggggggaacgttgtgcccagattctctttctgagcgtgaacttgatgttcctgaccaggaaccagccactcgtaccgaaggccttyctgacccctcagttctcccctgagcctttgctgtgtcctgggcaccaagaggtggagataggctgtcaccgtgcacgtttcctaagcctgcagaggaact

SEQ ID NO: 11610 - DNA, 201 bp, Homo sapiens
tccaagcaggtgtctcagtgccagctcacaccgttcacactgctcacaccagctctggagagctgcttgtacacatctctccacaagtccactttcagtgwtgccacgtggtaccggaaatttgccatagaaattggccgatggtacgaccagagagccacctgttagatagttaccccacatccccaccctcaacaccac

SEQ ID NO: 11611 - DNA, 201 bp, Homo sapiens
agctcacaccgttcacactgctcacaccagctctggagagctgcttgtacacatctctccacaagtccactttcagtgttgccacgtggtaccggaaattkgccatagaaattggccgatggtacgaccagagagccacctgttagatagttaccccacatccccaccctcaacaccaccttagacaaatcctactgtcag

SEQ ID NO: 11612 - DNA, 201 bp, Homo sapiens
agaacatgtggaacggagaagggaccttggcggttcattcataaatgtcagcacccataggtctgtgcctgtttggccgcagacactggggagcagcctgyagccttggcttgtgcagcttcctctgcaggaggggtgcctcttccaagaaacctgtcctgactccccagccctccccacctccattctcgcccccgctgg

SEQ ID NO: 11613 - DNA, 201 bp, Homo sapiens
cagcttcctctgcaggaggggtgcctcttccaagaaacctgtcctgactccccagccctccccacctccattctcgcccccgctggacaatgcacaccctycatcagagcgtggtgcatacctttcatcctagatctcccaccagctttgaaaccagcatcctgttcatgatgtctggaaccctgggaactgtcccagcac

SEQ ID NO: 11614 - DNA, 201 bp, Homo sapiens
ccctgcagagggaaggcagtgccagctgggcctggtcgggggccatggagatggcgggcccaggctggggaggacttgtggcacccactcccttacccgcyaacccggatcccctggaatctgcagaatgcctggggttgctcctcttctaccctgccgtggctgagctttgtctgtgccctgtcctctggccacggtctt

SEQ ID NO: 11615 - DNA, 201 bp, Homo sapiens
agaagagggctctctgccagctcaggagtcttccgccagctaagggactggaaatctccccccgccgtccccctgcctcaccccacccaaggttgtctcartgctcctcctgcccctcaaggttctggggcggggcccagcttgtgtattggaaaagcttcctacacacgtcgttttcaatgccatgcccaccctctgaga

SEQ ID NO: 11616 - DNA, 201 bp, Homo sapiens
acatctgcaaagtggagattcccagatggcagtgaggagcgctggagagcatgagtgcaagagggctttgtgcattgcaaagtgctgcatccgtgtgtgayggcttattatcattaaccgttaaaagcagcgatgacggtgatgacgataatggttgccactgtcaatcgagccacatgaacgcgctctggaagcttggca

SEQ ID NO: 11617 - DNA, 201 bp, Homo sapiens
ggggccgagtctcccacgaggccggggggtgaagtgagctggccttgccctgagaaccgcctgtctccaggcattgggcagatgcagaagtcaaagcaggsctcctcctgggcttccagaatcttcttctcaattcagggtcggcaccctcaccctacccaggaggctctcaggcttctctacccacagactcgtcagggt

SEQ ID NO: 11618 - DNA, 201 bp, Homo sapiens
aggtgtggctgcattccatttggagaattccactgtgattcatggtgtcagctgcgggttcaaggtgtcacaatttaattattaaacatcatgaggcattwggaggcttgggcacgcactgataagtgatccatttctaacacagctggtttattactgtttgtggcagctcctgcacgaattggtgtccgttaactaagc

SEQ ID NO: 11619 - DNA, 201 bp, Homo sapiens
ccagaaagacccagattcgacgaggagcctggagcttttggctccacccccaccctccaggaaagggagaggggctggagattgagctaataatccatcaygcgtaagtaatgaagcctccgtaaaaatccctgaactacaggatccagagagcttctgggctggtggacacatccgcatgctgggagggtggcgcccccc

SEQ ID NO: 11620 - DNA, 201 bp, Homo sapiens
cccagattcgacgaggagcctggagcttttggctccacccccaccctccaggaaagggagaggggctggagattgagctaataatccatcacgcgtaagtratgaagcctccgtaaaaatccctgaactacaggatccagagagcttctgggctggtggacacatccgcatgctgggagggtggcgccccccaactccacg

SEQ ID NO: 11621 - DNA, 201 bp, Homo sapiens
cctgtcaccatgcgtggctaattttggtatttttagtagagacgggagtttcaccatgttggccaggctggtctcgaactcctggcttcaagtgattggaygcctcagcctcccaacatgctgagattacaggcatgagccactgcacccagccaaattctcttcttttgaagtggctttctgtgaggctcaccagctgaa

SEQ ID NO: 11622 - DNA, 201 bp, Homo sapiens
ttgagtctgagtcccagccgtagaggataaatagtgaagcacctcctttcacacagtcacagtgctcccggccatgggatcttgggtcctgggccagcccytgatgaggaaagacctccctgtatgtccaggcagtcaaaagatgaagttcagatgtcaccatgctgcggaatggcgaggtcctggagggtctctctccgg

SEQ ID NO: 11623 - DNA, 201 bp, Homo sapiens
agccaccagcgatgacgcctctccctcggccacaccccccgggacctctgtctctccgagtgtgttaacctgagggaggtggagaggagattttctgttcrctgaccctgagggctactgtggaggcagggacgtatgatgctctgagcggtgaccctcgttttgtatttcagacatcaatgagtgcagcagcagcccctg

SEQ ID NO: 11624 - DNA, 201 bp, Homo sapiens
tcagtcaaggcttgagaccgtccattgtcccagccagcagggcccagatcacctcgttaaaattattacctcttaaggggttaaatgtgcgccgctgaccrcgtcctgcagcccatgtggagagtttggcccgggatcagtacacattacaaatgagattcagaaattccacctaaaaacaacagcgcggccgtccctgcc

SEQ ID NO: 11625 - DNA, 201 bp, Homo sapiens
gtcctgcagcccatgtggagagtttggcccgggatcagtacacattacaaatgagattcagaaattccacctaaaaacaacagcgcggccgtccctgcccracgatgagtgattgccctgtcctggctttcacggcaaatcccagggatgacgcgctttctcttttctgggagacacagccctgtcaccccgggggccaca

SEQ ID NO: 11626 - DNA, 201 bp, Homo sapiens; identical to SEQ ID NO: 1475

SEQ ID NO: 11627 - DNA, 201 bp, Homo sapiens; identical to SEQ ID NO: 1476

SEQ ID NO: 11628 - DNA, 201 bp, Homo sapiens
tctctgatggagctgtctctgggacagatgcccctgccctggccacctgctcctcctccctagacctcggcccctgtgggagctgctgtcccagcttcccygtcagcctcgtgtgctgtggttcccctcaggctccagcaggagaagacagacacggtccgctgcatcaagtcctgccgccccaacgatgtcacatgcgtg

SEQ ID NO: 11629 - DNA, 201 bp, Homo sapiens
gcccccaactgaaattctaatatacttttcccatccttaagcgtgagggtgggaaggcagcaaaccactcctgacttgttctttaataaatgtgcacggcrgtaattacaacatgcactgggaccttgggccgcatatctcaggtcttggtggtggtgcatggctgagaggtaaggagggggctcagggaccacctatatc

SEQ ID NO: 11630 - DNA, 201 bp, Homo sapiens
ttcgaggaggtaagccagcttttccaaagttctcaagtttgtccaggtgaaaaaacacctggaaatcaagggtttttttcctaatattgtaacatgaaaawtttcaaatatacagccgagttgaaggaattttacagtgaataccagggcaccttccacctagattctgccactgacattttatgagattcagttgcattt

SEQ ID NO: 11631 - DNA, 201 bp, Homo sapiens
ctcggcagggctagcagggcgagtcactgccatcgtccgagcttcagtttccacatctgcaaagtggagattcccagatggcagtgaggagcgctggagarcatgagtgcaagagggctttgtgcattgcaaagtgctgcatccgtgtgtgacggcttattatcattaaccgttaaaagcagcgatgacggtgatgacgat

SEQ ID NO: 11632 - DNA, 201 bp, Homo sapiens; identical to SEQ ID NO: 1482

SEQ ID NO: 11633 - DNA, 201 bp, Homo sapiens
ccttttccattcccaccagcaatgcacacgggttccagcatctccacatcctcaccaacacttgtgattttctggctagccaatagtttttgaatggatgyacgcatggctggtggctcgctctggcagtttagtgaaacgccgttatttgcaaatccaccgaaagcatgagtgaaatgtgtgctagctcagctcggtaat

SEQ ID NO: 11634 - DNA, 201 bp, Homo sapiens
aaggccattccactatcctatcaatctacctgcttcacgacgatggggaacatggtaaaaccagtgaattccatgagcatgagcccactgccacacctctwtagccgtaaagtgagtgctttggtcagaggcaatgctgtgtggaataccatgagggtggataaggcattctgtgaacccacggatggtagtcttggcaga

SEQ ID NO: 11635 - DNA, 201 bp, Homo sapiens; identical to SEQ ID NO: 1473

SEQ ID NO: 11636 - DNA, 201 bp, Homo sapiens
gtgccccccaactcagggctgcatttgccacccctgttaggtgtgtagggcaggagtaggggcacgcggctgactcatcttcaggtcctggagggctccaygggccttgtgagactagaaatcagtttgcatcagaaaaagccatgagatggtttggtggttttctcatttataaaatgaagggaacaaaaacctacttag

SEQ ID NO: 11637 - DNA, 201 bp, Homo sapiens
cgccagcctggaggccacatttgtgaaggtgagagccaaagaccatgtggggtcgctgcccgtccccactagtcggcagacccaggccctcccagccaagyggcactgtctgtcagcgctccctgcctcaggccacctttctttgtgagcagctgggggttcctgggccaggagggaggtggaaaaccccactgtttctcc

SEQ ID NO: 11638 - DNA, 201 bp, Homo sapiens
caccgcaggaggttaggacccgtccccgtctccaccgcaggaggttaggacccgtccccgtctccaccgcaggaggttgggacccgtccccgtctccaccscaggaggttgggacccgtccgtgtctccaccgcaggaggttgggacccgtctctgtctccaccacaagaagtttggacctgtattagggttctctagagg

SEQ ID NO: 11639 - DNA, 201 bp, Homo sapiens
agagccccacttttcacatccatccccgctgcccggccagagacacgtcctcagcccagagccccacttttcacatccatccccgctgcccggccagagasacgtcctcagcccagagccccacttttcacatccatccccgctgcccggccagagagacatcctcagcccagagcttcctatctccctcgcctgctccta

SEQ ID NO: 11640 - DNA, 201 bp, Homo sapiens
tgaaagaagataagagtttcttttccctgtggaaatagctcagattaaacaacgaggtgacacaatgctggctggaagtggagagactcacagctgctgtrtctctctctggattgtgaatttgtcagtttcttggtgcagcacttactcttctaggccattcctgctgggagccgcagaggtacagctgaacctggagcg

SEQ ID NO: 11641 - DNA, 201 bp, Homo sapiens
atctggaggaagagggctccaggcagagggaatggcagagtgctggagtggccatgcctggggaactccttctggaaagtctgtcgtgaaccagagcagakaaatgcttgtgctggggggaggggtgtcgtgaaaagggaaacaccaggagttgtggcattgggagtttcttcgcttgactttcaattccaccaaacaatt

SEQ ID NO: 11642 - DNA, 201 bp, Homo sapiens
tggtggtcagtgacatttgtcaaagactcaggagctgaggaagtgacccacacagagatctggaggaagagggctccaggcagagggaatggcagagtgcyggagtggccatgcctggggaactccttctggaaagtctgtcgtgaaccagagcagataaatgcttgtgctggggggaggggtgtcgtgaaaagggaaaca

SEQ ID NO: 11643 - DNA, 201 bp, Homo sapiens
gctgggattgcaagctcaccccaccaaacccggctaattgtagctgggattacaggcgtgagccactgcgcccggcccattttaaccatttctaagtgtayggtccaatggtattaaatacagtcacattattgtacaatcatcaccacctccatctccagaacttttcatattcccaaactgttaaatactaactccccg

SEQ ID NO: 11644 - DNA, 201 bp, Homo sapiens
tgggaaggccacattctctctgagcctcagtgtcctcatgtgaaaaatatcaccgaagccactgtcatggggtggtggcagtgatcacactagagagtgcrtggtgaggaagagctgagcacttggtaaacggcagcagctctgattgctagtggcagagatagtcatttcatgggtcacctccgagacacaaccaagagc

SEQ ID NO: 11645 - DNA, 201 bp, Homo sapiens
tttgcccccactctcctaaaaaataaaagaggtgtgagctgggcacggtggctcacgcctgtaatcccagcactttgggaggccgaggcaggcggatcacstgaggtcaggagttcgagactagcctggccaacatggggaaaccctgtctctactaaaaatacaaaaattagctgggcgtggtggcgggcgcctgtaatc

SEQ ID NO: 11646 - DNA, 201 bp, Homo sapiens
gagctgtctctgggacagatgcccctgccctggccacctgctcctcctccctagacctcggcccctgtgggagctgctgtcccagcttccccgtcagcctygtgtgctgtggttcccctcaggctccagcaggagaagacagacacggtccgctgcatcaagtcctgccgccccaacgatgtcacatgcgtgttcgacccc

SEQ ID NO: 11647 - DNA, 201 bp, Homo sapiens
acgccctccctctggtgaatcagttcccctctgtcctccccactctgtccagtcctcccctaggctgccaggttacatttccaaaactccgatctgatcargccctcttggtctcagatcctccaagggcttccttcaagggctcctgcaccaacctcgtggtgtggctgtgtgacataataagaaacattcacttctatt

SEQ ID NO: 11648 - DNA, 201 bp, Homo sapiens
agtgtgtatttaaatatagacatttaagataaatatataaatatatcaacataagaatatgataattatatatacatatatcaacataagaatatgattaytatatacatatatcaacataataatataattatatacatatatcaacataatataattatgtacatatagcaacataatatgataattatatatttatca

SEQ ID NO: 11649 - DNA, 201 bp, Homo sapiens
catttctaagtgtatggtccaatggtattaaatacagtcacattattgtacaatcatcaccacctccatctccagaacttttcatattcccaaactgttaratactaactccccgtcctctcccccgaagcctgtggcacccacccatccttttccttcctgtctctgacaaattccctacaaatttaactcctctaggga

SEQ ID NO: 11650 - DNA, 201 bp, Homo sapiens
acccaagctacagtgcaagagtggctttatacaagatgctctaggcaactgtattggtaagaggtgtgccgccaggattagcgggttattccaggaggggycagcgacctagccttggggcaggcctctagaatctgcggggccgcatggtatacagaacaggggttggcaaactttttgtgtaaagggctggacagcaaa

SEQ ID NO: 11651 - DNA, 201 bp, Homo sapiens
gcttgggagctctgtgctggaggactgaccagggcctgccttctacaacccagaccccattcaggggtggagagcagcccaggacgcgctttctcgtgttygctggagtttgcagcgcagaggcccctgccgagacttccctccaagacaatataagcactggggttgggaaagaggatggagttggggtctaaccaggtt

SEQ ID NO: 11652 - DNA, 201 bp, Homo sapiens
tgagctgagatcacactactacactccagcctaactccatctcaaagaaagaaagaaagagagaaagagagaaagggaaagagagagagagagagaaagaraaacagagagaaagaaagaaagaggaagagaaggaaagagagaaagggagaaagagagagagagagagaaagagagaaagaaagaaagagagaaaaagaa

SEQ ID NO: 11653 - DNA, 201 bp, Homo sapiens; identical to SEQ ID NO: 1454

SEQ ID NO: 11654 - DNA, 201 bp, Homo sapiens
ggtctggcctcagaccctgtcccaggctgtcaggacctctagcttgtcctgggggataggggtccatggtggtgcctacttccctgacacccagtgcctgrctttccaagtcaccagccacagggacaagaggatgtggagaggccatggaggacaggcctgggatgaggactagagtgagtgcctaaaaagggggcgcct

SEQ ID NO: 11655 - DNA, 201 bp, Homo sapiens
ggagccagcagaaagggctgggccaggccatgtggacagggtctacggacagtacagggccagaggtccctattctgggaccttgacatgctgccgttctygtgagcttctgggggactcctgcgaggcatgtgggctgcttctcagacctgcgggtaccccacctcccagatgttgtcaatgggatgtgaggttcacgag

SEQ ID NO: 11656 - DNA, 201 bp, Homo sapiens
ggggccgagaatgtggaccacagagcccaagaggcagcgaaggtctccccactgcacccgagcacttcgtgttcaggatcctggatccccagcacatcagytgcaacttacagagcagagccaagacatgaaagtgaagcgcccgaggggacctacatttttcaacagggagaaaaaaagtgcttaattatatctttaaga

SEQ ID NO: 11657 - DNA, 201 bp, Homo sapiens
tttcaccgtgttcgccaggatggtctcaatctcctgacctcatgatccacccgcctcagcctcccaaagtgctgggattacaggcgtgagccaccgcgccyggcaacttgacatgcagaactttctttgtgtctgtgtcccccccacacccacctggcacagcagcatttggcccattctcagctttccgttcaggtggtc

SEQ ID NO: 11658 - DNA, 201 bp, Homo sapiens
ggctgcagtgagctgagatcacactactacactccagcctaactccatctcaaagaaagaaagaaagagagaaagagagaaagggaaagagagagagagaragaaagaaaaacagagagaaagaaagaaagaggaagagaaggaaagagagaaagggagaaagagagagagagagagaaagagagaaagaaagaaagagag

SEQ ID NO: 11659 - DNA, 201 bp, Homo sapiens
atggcacaccccttctgacatctgagggccacagagcaaattctgtcctccccacccccgcacaccagctgggtggtttggacccctagagcccagtggcygagccagctgagtatacacatttgaccatttgacagccatgaacttcaagggaagggcagcccatcacatcccatcatgactgtaacccttgttaatatc

SEQ ID NO: 11660 - DNA, 201 bp, Homo sapiens
tttagtagagatgggtttcatcatgctggccaggctggtctcgaacccctgacctcgtgatccgcccacctcggcctcccgaagtgctggaattacaggcrtgagccaccatgccttgccgggctgtgttctaataaaactttatttataaaaacaagtgttgggacaaatttggcccatagactatgatttgctgacctc

SEQ ID NO: 11661 - DNA, 201 bp, Homo sapiens
agctggtcccagtgtctggcacatgagacatggcaaatcagagtctgtaggatcaagtggatggatggaaccaggcccctggtggcagctctcatgtttgygatgctgcatgtgggcagcgagtgttccttgctacttcttcctccttcccttgcctccctgtgttagagaagttggtggtggttctgaaagaacagtggt

SEQ ID NO: 11662 - DNA, 201 bp, Homo sapiens
tcgtccacattgccgatgacaccctgtttggtgccgtgcactggctcacaggacagcttctgcagcctgactcaaacatggcaggtcctaacattttgccrtgagaattttccttcctgatgagatggtcgcaggggttggatatgccacagtgagctgtggtgtgcatgattctcaaatcggaggacggacggtgtgagg

SEQ ID NO: 11663 - DNA, 201 bp, Homo sapiens
gagggtgtctcagagactgggagatggaaggagaacacacaccttttctgctccctatgtcgtgaccccatggggcagagatgggctctgaggcatcagascctgtgccctgtgtgacggcgcgtagccccccgaaacagctgctgttatccctccttgaggttatcagcccccaattccccagataccaaaactctcaga

SEQ ID NO: 11664 - DNA, 201 bp, Homo sapiens
cagtgagcctcgcgtgccttggttttatttggcatggttgggagtctgtgccgcttgttacccgggggtgagctgggcactggccaccgcctggtaccccygagggctgactgaggagcgctccccactagagggtgtgtgctcgggggtccctgttcacagagcccactgtctgtgccgacagggaggccaggccgggta

SEQ ID NO: 11665 - DNA, 201 bp, Homo sapiens
cctttactggggtccagggtgttatccaggcaggtttcccgtgaggaattctaactggggggcttggagcaggcaggagttccctgaggtcatgcggtggyggatgggggtcacttctgcataggcctgcactatcgatgtaggtgtgagggtctttgggttgtatccagctgtcccataaggcaggggcccccaggaggt

SEQ ID NO: 11666 - DNA, 201 bp, Homo sapiens
cacctcttgggtcccctccccatgcctctgcctcgtcgccatccagcctggccatggtccctgcttggctctttgtggactccctgatggggctgtgcagragctctcccttggctaatgacggggtgagctcagctcccctcgggcacagcccccagacagccctgctttgcagagttcagctctggggctgctcagaac

SEQ ID NO: 11667 - DNA, 201 bp, Homo sapiens
cgtgggcagtatggaaagtgggaagagcatcccaggccgagggaacagccagcgcaagagcccagaggagagggtgtgtacagcaaggcggccagggtggytggagtggagccagcaacggccagtcccagggaggaagcaccagatacaagggtaaccaggtggctgagggggccatgagatagaggctggggtgttggg

SEQ ID NO: 11668 - DNA, 201 bp, Homo sapiens
caccacaggaagttaggacccgtccccgtctccaccgcaggaggttaggacccgtccccgtctccaccgcaggaggttaggacccgtccccgtctccaccscaggaggttgggacccgtccccgtctccaccccaggaggttgggacccgtccgtgtctccaccgcaggaggttgggacccgtctctgtctccaccacaag

SEQ ID NO: 11669 - DNA, 201 bp, Homo sapiens
ccaggctggtctcgaactcctgacctcaggtgatccacccgcctcggcctcccaaagtgctgggtctacaggcgtgagccaccgcgcccggccggaaatgwgcttctttagaggaaagcaccgttgatcccacctccttgatctggtttctaagacctcatacaaactgggcccgttagtctttgctccctgatactatct

SEQ ID NO: 11670 - DNA, 201 bp, Homo sapiens
tttagcagtgcagttctgatttcaagcagtgacttaggcagaaacccttcatggtggtggagaggaagaaagcggcttccagggctgctgctcctggtggrgagcgtgggaggctcttgagcctcctgggcagccccgtgcagctctgtgctgcctgcagcacacggcagggaacgccgcctactcacggtgcttgctgaa

SEQ ID NO: 11671 - DNA, 201 bp, Homo sapiens
tgagattcagaaattccacctaaaaacaacagcgcggccgtccctgcccaacgatgagtgattgccctgtcctggctttcacggcaaatcccagggatgaygcgctttctcttttctgggagacacagccctgtcaccccgggggccacaccctggctggcagccaagttctttcccagggtgctgggcccggcctcctct

SEQ ID NO: 11672 - DNA, 201 bp, Homo sapiens
tcctggttggacccagttgatgcactaacctaattctgtcctttgcctgccctgatctccatagcctgcttcttcctggaaatttgctgctgctgctgctkcttttttttttttttttttttgagacagggtctcgctctgtcgcccaggctggagtgcagtggcgtgatctcagctcactgcagtctctgcctcccgggg

SEQ ID NO: 11673 - DNA, 201 bp, Homo sapiens
agttaggacccgtccccgtctccaccgcaggaggttaggacccgtccccgtctccaccgcaggaggttaggacccgtccccgtctccaccgcaggaggttrggacccgtccccgtctccaccccaggaggttgggacccgtccgtgtctccaccgcaggaggttgggacccgtctctgtctccaccacaagaagtttggac

SEQ ID NO: 11674 - DNA, 201 bp, Homo sapiens
agcagactccaggcctcccggttcccagcccccagtctcccctctgtgacagtctgcttgctcagcaacctgggaattaagatcctcgtggctcacaggcygctggggatgggatcaggcattgcccaaagcttctgcgatgtttacagctagcaggctgacattctggaagcttccacccaaggagtggtacagaatctc

SEQ ID NO: 11675 - DNA, 201 bp, Homo sapiens
ggagaccaaggcgggtggatcacctgatgtcaggagttccagaccagcctgaccaacgtggtgaaaccccgtctctactaaaaatataaaaattagctggytgtggtggcgggcgtctgtaatcccagctactcgggaggctgagacaagagaatcgcttgaacccgggaagcggaggttgcagtgagctgagaccgttca

SEQ ID NO: 11676 - DNA, 201 bp, Homo sapiens
agatggcagctttgatgttttcccatcatgaatcatcttgactctaggtctccaccaaggcccgacattccttgggatccagatctaaatccacctaaaastttggattagattaaacccacatgtccttcagcgtcttttggaggaatctggacacatccagtgaaacctaaagcaagtcccaagctgacattttccagc

SEQ ID NO: 11677 - DNA, 201 bp, Homo sapiens
ccctgtcatcccctgggggagacttctgagctggggcgctgtggctcagctgccagttggcccctcgccagtcccttgccagcagggaggggtggttttcrctcagcgcagggggtggtgagcagggaagccatgggctctccgggaccagcggggaggatagtcctgctcagacttgcagcctgctcaaaggggggtccg

SEQ ID NO: 11678 - DNA, 201 bp, Homo sapiens
ctcagtctcaaaaaaaataataaaataaataaagaggtggggaggtgccggaaggggcgaaagggaagaaccctcagacctgtagtctctaagtcaaggtratggctgtagggtcctgggtgacacggaacctttcacttcttgttcttaggttttcaagtccaggctgtagggcccctggtcacagaggacccgggtcac

SEQ ID NO: 11679 - DNA, 201 bp, Homo sapiens
tcccctcactcgctttcctcctctggtccccaccttcatgaatatgcacagtgactgatgacttctcaccagcccttcctctgattagctctgtgtccccraggaagatccaaaatctctcctgacttcagtttcccctgctataaaacagggatgggctatgatataggaaggtccagacccctccaccctccccacaca

SEQ ID NO: 11680 - DNA, 201 bp, Homo sapiens
gtctgtaaactggttcaagtctggaaattgattgaggggccgtgattctctttttttgtaattcaaattagtcttttgtccacttgatctagaagttttcrgcttatacaaatcaagtaggaatgcagtaggcttcctatcaatttcacttctaggaacactgtgattaattagccaatgccagagctctacacgagacag

SEQ ID NO: 11681 - DNA, 201 bp, Homo sapiens
tgtggcactatagatgggagaggagcccacccctctggcctttctgctgtctccctctgtcccctcactcgctttcctcctctggtccccaccttcatgartatgcacagtgactgatgacttctcaccagcccttcctctgattagctctgtgtccccaaggaagatccaaaatctctcctgacttcagtttcccctgct

SEQ ID NO: 11682 - DNA, 201 bp, Homo sapiens
accattctctctgcctcagcctcctgtgtagtgtggattacaggcaccccccaccatgcccagctaatttttgtatttttagtagagatgggttttcaccrtgttggccaggctggtctcgaactcctgacctcaggtgatccacccgcctcggcctcccaaagtgctgggtctacaggcgtgagccaccgcgcccggccg

SEQ ID NO: 11683 - DNA, 201 bp, Homo sapiens
cagaccatgcaaaaggaacagaactttggagctggtgcatggtgctataagaagctccctcttcctggatgtgtgcgagcagagccgggtggtctctgggyggggcagggatgttgaggggtgcaattgcatgttggggtggggaggggaggtggatgccaggccctttaagcttcctttcaaaactgggacctagatgat

SEQ ID NO: 11684 - DNA, 201 bp, Homo sapiens
cgggttactattttgacggcatcagcaggatgtgtgtcggtgcgtggggggccccgcaggcctcgggggaacccagccacgtggcaccagggacacatttmtgtggcacctcgagtgatgtggtctgatcctcatctcagataatcccaagtgcaggcagaccctgagagaagatcctgagtcaggagaccccattctagc

SEQ ID NO: 11685 - DNA, 201 bp, Homo sapiens
gccagctggaggagctgcactgtgccacgggcatcagcctggccaacgagcaggaccgctgtgccacgccccacggtgacaacgccagcctggaggccacrtttgtgaaggtgagagccaaagaccatgtggggtcgctgcccgtccccactagtcggcagacccaggccctcccagccaagcggcactgtctgtcagcgc

SEQ ID NO: 11686 - DNA, 201 bp, Homo sapiens
gtgaggaggacacagggagaagtcagacttctacaagccaaagagagaggcctcagaaagaaccaaacctgccaacaccttgatcttggactttcagcctycagaaccatgagacaatccatttctcttggttaggccacccagtctgttgtatagcaaacaaatgcacagctattataagcaaaaaagagaataagagac

SEQ ID NO: 11687 - DNA, 201 bp, Homo sapiens
aagaaaattacttctgagctttaattttttcctctataaaatgggagtaatcataatacctggcttagagacttgaggccaggattaggcgagtacttgckaagtactggtacacaggaagcactcggtgagtggtgattccctgccacaggcatttagcctattaaaaaattattttaaaaaatacttggctgggcacag

SEQ ID NO: 11688 - DNA, 201 bp, Homo sapiens
gtccccgtctccaccgcaggaggttaggacccgtccccgtctccaccgcaggaggttgggacccgtccccgtctccaccccaggaggttgggacccgtccstgtctccaccgcaggaggttgggacccgtctctgtctccaccacaagaagtttggacctgtattagggttctctagagggacagaactaatggaatatac

SEQ ID NO: 11689 - DNA, 201 bp, Homo sapiens
atagcctgcttcttcctggaaatttgctgctgctgctgcttcttttttttttttttttttttgagacagggtctcgctctgtcgcccaggctggagtgcastggcgtgatctcagctcactgcagtctctgcctcccgggggttcaaaccattctctctgcctcagcctcctgtgtagtgtggattacaggcaccccccac

SEQ ID NO: 11690 - DNA, 201 bp, Homo sapiens
cagggctacgggagcctgcccttccctgtgttttcctttctcagagtccgaaggaggctctggggccacagctcacctgcgggggattccgcacaccagcwcccggctgtgtctcccccatttcttatgagcagcgataagtcaatccccttcgacggtttaatcctccagccactgtttacagaaaactttctgtgtgct

SEQ ID NO: 11691 - DNA, 201 bp, Homo sapiens
tgggactcaggtgtgaggccacagggacttggaagtaactattgggacctgggcccaggtggcagacagccaccctgtcctttgaccttgcttgatgactygtcttgaagttcctgtgctttcaaatgcacggtgcaattcctgctgccagaacccctctaactcaaaaacggagaggcagcatgcatgtgtgtcattttt

SEQ ID NO: 11692 - DNA, 201 bp, Homo sapiens
tggtagagaaatctcagaccatgcaaaaggaacagaactttggagctggtgcatggtgctataagaagctccctcttcctggatgtgtgcgagcagagccrggtggtctctgggcggggcagggatgttgaggggtgcaattgcatgttggggtggggaggggaggtggatgccaggccctttaagcttcctttcaaaact

SEQ ID NO: 11693 - DNA, 201 bp, Homo sapiens
cccagactatcctcgcatgctccctcctctgggagggcttcctgtcttcacagccgcaccttcctcccactgctaccagtgccatggacccactgtatgtktcctgggggccatgcagaaggtccccagaccagtgctggcctgcgacaaataagtacagaaatggagaataacccttttcaaacacataatagcatttga

SEQ ID NO: 11694 - DNA, 201 bp, Homo sapiens
tgcagacaggagggaggaagtgtcctgcgcgccattttgcagacaggagggaggaagtgtcctgcgcgccattttgcagacaggagggaggaagtgtcctrcgcgccattttgcagacaggagggaggaagtgtcctgcgcgccattttgcagacaggaggaaggagatgtagtgggatgggaagatctgggctctgaggt

SEQ ID NO: 11695 - DNA, 201 bp, Homo sapiens
ctgttgggttgcaggaggggttgagttctgtctggcagttgcggggcgtttggtggctggccaagttctctttcttgacctgggtggtgattataaaggcrtttgccttgtaataactcgttaaactatactttcattttgtgtaattttgtatccgtgttttattttatgatcaagaggttgtaaaaatctgtctagcac

SEQ ID NO: 11696 - DNA, 201 bp, Homo sapiens
tggacggagcccctctgtgtcaggctctagggacatggtgataagaaggggtcctcccaccctctcaggggaggcatgcaacggagccagccgcgaggacwccagtgtttacaccatgacacaaccatgcgggggggtggggggaggagaggctccctcagcacgtggttgcccaaggagccgtccccagtcccagtcccc

SEQ ID NO: 11697 - DNA, 201 bp, Homo sapiens
ctatctgctccttcgtttattaccctgctgcccagcctcactgtgggctctgagaaggcgggaccatgtgtcccttgttcactttgctgtccctagcagcyggcgcctggcactcaaaacatatttgttgggcaagtgaacctgtgactctattttgccattgtagctattgatgctcaattcgtgcagttgacaaatgtc

SEQ ID NO: 11698 - DNA, 201 bp, Homo sapiens
aaacaaccaagtattgatctgctatttcctggtaattaaatcacaagagcacatgaagggaagcatctgtttacaggagtagtccagctaataaatggaartgaagtggtagaaccagactatcggcattttgcaatccttgatgaatcagtgggcgtaggccttgagcatcagtagatgctgtcctcacagagacagcca

SEQ ID NO: 11699 - DNA, 201 bp, Homo sapiens
agttgatggattgctgagtgggtgggtggatggatggatggacggatggatggatggatagatggattggtgagtggatggttgggttgatggatggttakgaagctatgaagaaaagtggtatcagaatcttgattctgcaggcatttatttggcatctattatgtgccaggaactgaggaccagctgaactgttaaggt

SEQ ID NO: 11700 - DNA, 201 bp, Homo sapiens
actgggaggaggtggagaactggaacccgcagcaagggtgactgagccctgctctggtgtgggagttaaacgcacattcagaatgcgtgccgaggcaacayaggatgagaagccggcacaacacccaggcttttccatgaaagtgaacttgacagccgctttcccacattgtctgtgctgagtcgtgggagcctctgagtt

SEQ ID NO: 11701 - DNA, 201 bp, Homo sapiens
ctactaaaaatacaaaaattagccaggcatggtggcaggtgcctgtaatcccagctactcaggaggctgaggcaggagaatcacttgaaccagggaggcaraggttgcagtgagccaagattgtgccattgccctctggcctgggtgacagagcgagactctgtctcaaaaaaaaaaaaaaaaaaaagaaaagaaaagaaa

SEQ ID NO: 11702 - DNA, 201 bp, Homo sapiens
gaggaacttgggcctggaggagctcgggtttggaagctgggcttctgttggaggtgccagatgacgaaaatgcattccctggaagaagcttcccgttcctwgttaggaaggtgatggaataattttaagaagcaagaatctgaatgaagtctggattccaggagagggtgtgggagctcctttgtggggattctccacata

SEQ ID NO: 11703 - DNA, 201 bp, Homo sapiens
gagagaaagagagaaagggaaagagagagagagagagaaagaaaaacagagagaaagaaagaaagaggaagagaaggaaagagagaaagggagaaagagaragagagagagaaagagagaaagaaagaaagagagaaaaagaaaagaaaagaaagaaagagggtcttaccatgttgcccagactggtctcgaattcctggg

SEQ ID NO: 11704 - DNA, 201 bp, Homo sapiens
ccacgtggcaccagggacacatttctgtggcacctcgagtgatgtggtctgatcctcatctcagataatcccaagtgcaggcagaccctgagagaagatcytgagtcaggagaccccattctagccccagctctgctgctgcccagccaggcggccactggcaccacccccctgtgtgtgagcctgctccccatctgtgga

SEQ ID NO: 11705 - DNA, 201 bp, Homo sapiens
tgaggactgtcccatactctcactgcgtacagagtatgggagagtctctgtgaggctttgggtgccctgcagagggaaggcagtgccagctgggcctggtygggggccatggagatggcgggcccaggctggggaggacttgtggcacccactcccttacccgctaacccggatcccctggaatctgcagaatgcctgggg

SEQ ID NO: 11706 - DNA, 201 bp, Homo sapiens
tgcccaacgatgagtgattgccctgtcctggctttcacggcaaatcccagggatgacgcgctttctcttttctgggagacacagccctgtcaccccggggsccacaccctggctggcagccaagttctttcccagggtgctgggcccggcctcctctgggctgggatcagctgcggcctgactccatcttgagctgggggt

SEQ ID NO: 11707 - DNA, 201 bp, Homo sapiens
cctaaccctagttgatgggaggcctgggctcctccgtctccagatgggtatggctcctgcagcctctgccttcactgtgctgctgtggggtctcttgcagwcattgatgagtgtgtgactggcatccacaactgctccatcaacgagacctgcttcaacatccagggcggcttccgctgcctggccttcgagtgccctgag

SEQ ID NO: 11708 - DNA, 201 bp, Homo sapiens
ccgttctgggctcagcaaagctggtttctgggagccttcttcagtagggtggggtgggaagaccgaggtgcaggctgctttgggaaaagagtttcccataytcctaacgggagttagggcaggccaggtgcagtgcctcacacctgtaatcccagaactttggcaggccaaggcaggtagatcacttgaggtcaggcgttc

SEQ ID NO: 11709 - DNA, 201 bp, Homo sapiens
gaaagggtcacatccattcaccctggagtcagcccgagggcccaggcagggtggggtcctagtgatgcctgtcggtgggtgacatcaggccatccacagcwccgggagccagcagaaagggctgggccaggccatgtggacagggtctacggacagtacagggccagaggtccctattctgggaccttgacatgctgccgt

SEQ ID NO: 11710 - DNA, 201 bp, Homo sapiens
ggggacgaggctgggactggggctggggccaggctgtgctgagcccttctccattctgtgcctctgcagagatcatcttcctccgggccatcacgccaccrcatcctgccagccaggctaacatcatcttcgacatcacggaagggaacctgcgggactcttttgacatcatcaagcgttacatggacggcatgaccgtgg

SEQ ID NO: 11711 - DNA, 201 bp, Homo sapiens
tctctggcttggagaagggacagtcctgtagtatcaagaccagaccttgtgtccccagcccaaggctgccctgggcctagggacagtatttggagacttcrctggcagttttgcgttggaatcacctggtgcctccctgtacgtccacccaccctgtgcccagatccccttcgcaagcaccatatgctgttagatcctcga

SEQ ID NO: 11712 - DNA, 201 bp, Homo sapiens
cagacccactccactctgcacagttgtttctgggcaagccctctgatatgatttagtgcacgtgtggctgggtgtggagtgtgtgcgtgtgtgtgggtgcrtgtgagtggtgagtgcgtatgcacagggtttgatctctgagatgttttatactctctggcttggagaagggacagtcctgtagtatcaagaccagacctt

SEQ ID NO: 11713 - DNA, 201 bp, Homo sapiens
ggctgggaacagcctcttagtctccagagcctcccgcaggaatgatttgtgaccctcttaggctgctggtctgcaccttctgaaaagcctttaatatcacygggcacattcataaattattcttttttaaaaatgaaatgttttagccaaacagcagtagaggcatgttgtgcaaaattagcaaaaaaaaaaaaaaaggaa

SEQ ID NO: 11714 - DNA, 201 bp, Homo sapiens
ggccaggctccctcaccacagcctggggtcccgcccagactcagcataaacacattcctgagccgggcctttgaggctggggagtgttgtttttgccaccratgctcaggcatttggcacctcttaatggatgtctcccagggttggtgacagcccctgagccccactgtttggctgctccagagtctatgggagttgggc

SEQ ID NO: 11715 - DNA, 201 bp, Homo sapiens
ggggaaccatcggaaggttgcagtggaggaggtttgcatatagaaacatcatcctgttgatccagggccaggtgaactggaggggccagacggggagcagraagctcaggtgtaacccagtcagtgctcccacaccccagcctggctctctaggaagctcctggcatgcagtgtagtcatgttgtgtaacctgccatcact

SEQ ID NO: 11716 - DNA, 201 bp, Homo sapiens
gaagttcagatgtcaccatgctgcggaatggcgaggtcctggagggtctctctccggctctttacctgccgagggcccactcatccttggtcacacaggcracccatcatgctgctccctgggacccccagacctgcctcctttccaggacccctcccagcctcaatgattccccagtgacagccacagccgcacctggtg

SEQ ID NO: 11717 - DNA, 201 bp, Homo sapiens
gatgcctgtcggtgggtgacatcaggccatccacagcaccgggagccagcagaaagggctgggccaggccatgtggacagggtctacggacagtacagggmcagaggtccctattctgggaccttgacatgctgccgttctcgtgagcttctgggggactcctgcgaggcatgtgggctgcttctcagacctgcgggtacc

SEQ ID NO: 11718 - DNA, 201 bp, Homo sapiens
catcatctggtttgctaaaatgctctttgacagccctgcacactccattacacgttgtcagctagaatcacaagcctcacgttggaggctgcactttagawgggaagatgacgtgcccaaggtcacacagctggtcgatgcagagccacctaggaactcgaggctgtaactctaggtctctttataaaccagtgtctagag

SEQ ID NO: 11719 - DNA, 201 bp, Homo sapiens
agagagaaagagagaaagggaaagagagagagagagagaaagaaaaacagagagaaagaaagaaagaggaagagaaggaaagagagaaagggagaaagagrgagagagagagaaagagagaaagaaagaaagagagaaaaagaaaagaaaagaaagaaagagggtcttaccatgttgcccagactggtctcgaattcctgg

SEQ ID NO: 11720 - DNA, 201 bp, Homo sapiens
tgtagggcatgctccttctgtaggagaatgctcctgtaggggaatgctccttctgtaagggaatgctcctcctgtaagggaatgcctcttctgtgggagartgctccttctgtaggggaatgcctcttctgtaggggaatgctccttctgtaggggagtgctccttctgtaggagaatgctcctgtaggggacttctgtag

SEQ ID NO: 11721 - DNA, 201 bp, Homo sapiens
aacccaaactaaaggttttcatcatggctttctttctcctttgcaagatgtggacgagtgcgcgccacctgctgagccctgtgggaagggacatcgctgcrtgaactctcccggcagtttccgctgcgaatgcaagacgggttactattttgacggcatcagcaggatgtgtgtcggtgcgtggggggccccgcaggcctc

SEQ ID NO: 11722 - DNA, 201 bp, Homo sapiens
gcatgctccttctgtaggagaatgctcctgtaggggaatgctccttctgtaagggaatgctcctcctgtaagggaatgcctcttctgtgggagaatgctcyttctgtaggggaatgcctcttctgtaggggaatgctccttctgtaggggagtgctccttctgtaggagaatgctcctgtaggggacttctgtaggggagt

SEQ ID NO: 11723 - DNA, 201 bp, Homo sapiens
gtccagggcccggcactcagtaggtgctctgtgaagtcgtgttgaaatggaatgcctgtttccatgtccatgtgttcctttcttgctttcctttctgatcmtcttggggggaaaaaacccaaactaaaggttttcatcatggctttctttctcctttgcaagatgtggacgagtgcgcgccacctgctgagccctgtggga

SEQ ID NO: 11724 - DNA, 201 bp, Homo sapiens
gctgagggggaaagcaccccctggtcttgccatgacacagcagcacggcctctgactttcaaaatccacagggaagagcctgctgggatttcttcacctgrcaaaccttccatgtccacccttggaggcaagcgggtggtttgctgttttccctccaactgaggtttttttttttttttttttttttttttgagacacggt

SEQ ID NO: 11725 - DNA, 201 bp, Homo sapiens
cgggggggtggggggaggagaggctccctcagcacgtggttgcccaaggagccgtccccagtcccagtccccctaggtttgctcctcccgaaaaggaatarcgctgaatcgtcacagggtggcacagacttgggtcagagaaaataactaactggtatttgccttttgcaaaatgatggggtttcaccaaaccacatacaa

SEQ ID NO: 11726 - DNA, 201 bp, Homo sapiens; identical to SEQ ID NO: 1469

SEQ ID NO: 11727 - DNA, 201 bp, Homo sapiens; identical to SEQ ID NO: 1450

SEQ ID NO: 11728 - DNA, 201 bp, Homo sapiens
caagttcaggagttccagaccagcctagccaacatggtgaaaccccatctctactaaaaatacaaaaaagtagccgggcgtagtggtgggcacctgtaatmccagctactcaggaggctgaggcaggagaatcactcgaacctgggaggtggaggttgcagtgagctcagatcgcgccattgcactccagcctgggcgaca

SEQ ID NO: 11729 - DNA, 201 bp, Homo sapiens
gcagagtaaacgatggcagatttgggtttctaaaaaggctcagtgcatgactatttaaaatcaagaccagggatgaatttcaggttctcacatgtactttytacaaaaaaaaaaaaaaaaaaaaaaaaaagcaaaaacaaaaatcccacaactgtttttgcacaacagctgccttccatccaaatccaggcttccttgaag

SEQ ID NO: 11730 - DNA, 201 bp, Homo sapiens
cgtccccgtctccaccgcaggaggttaggacccgtccccgtctccaccgcaggaggttgggacccgtccccgtctccaccccaggaggttgggacccgtcygtgtctccaccgcaggaggttgggacccgtctctgtctccaccacaagaagtttggacctgtattagggttctctagagggacagaactaatggaatata

SEQ ID NO: 11731 - DNA, 201 bp, Homo sapiens
agcattccagctggtcccagtgtctggcacatgagacatggcaaatcagagtctgtaggatcaagtggatggatggaaccaggcccctggtggcagctctyatgtttgcgatgctgcatgtgggcagcgagtgttccttgctacttcttcctccttcccttgcctccctgtgttagagaagttggtggtggttctgaaaga

SEQ ID NO: 11732 - DNA, 201 bp, Homo sapiens
aaagatgtactttttattgtggtaaaatacgcatcacatgggatttgccattttaaccatttcctttttttttttttttgagatgtagtctcactctgtcrcccaggctggaatgcagtggcataatccctgctcactacaacctttacctcccaggttctagtgattctcctgcctctcagcctcctgagtagctgggat

SEQ ID NO: 11733 - DNA, 201 bp, Homo sapiens
ttcggtaatcatctccaacacacacacattctctcacacacacatgtgcgcatgtgtgcacacacacacacaccacacacacacacacacacactccgcarcccttctgccatgcccagctcagggccatcttctcccacaaggatgccggtctcatctcctgaaatgaggttgcagtgagccgagattgagccactgcac

SEQ ID NO: 11734 - DNA, 201 bp, Homo sapiens
tctgtggtctttctgttataactgatcttttttttttgaaacggagtctcgctcttgttgcccaggctggagtgcaatggtgtgatcttgactcactgcawcctccgactcctgagttcaagcgattatcctgcctcaacttcctgagtacctgagattacaggtgcatgccgctacacctggctaatttttgtattttta

SEQ ID NO: 11735 - DNA, 201 bp, Homo sapiens
gctttttaagtctttagcaactggagcacgatttggctcagtgaagtcttttttgtgtatgatttctctattagaatgttttgggttatagtctgagtaaygcgcattagaaaaaagctttcttgtgattttaaagtgttgtaagatgcttctggcaggactcttgctaacaatttcctttttttatgatgtaccagatat

SEQ ID NO: 11736 - DNA, 201 bp, Homo sapiens
tgctctgggaagagatctttcaggtagtatatcctgagtgatgactaatgggggagccctggctgcagcaggggcgggctgtgtatcatcagcgtgcggawgagagagacagaaaggcaactcgaggccacccgggctccccgggcccctgggctatggctgctgtctgagcctcagacttcccctccagcctccagatca

SEQ ID NO: 11737 - DNA, 201 bp, Homo sapiens
attttgtatccgtgttttattttatgatcaagaggttgtaaaaatctgtctagcacagtacctggaacccagacctctgagagactgtagcctcttctcctgcctccccgtcacctggtgatgtggaattgactgccctgtgctgggcaccgagcttggcgctttctatctgctccttcgtttattaccctgctgcccagc

SEQ ID NO: 11738 - DNA, 201 bp, Homo sapiens
ccccctgcagagccacagtgggcccccacggttggatttacctcctggctctgagcacagtgggaagaggcatgggaggggtgaaaaggaaggtggtacaygtgttcaggtagatgcgacgaggccggaactgaggccaggtggggttgtggggagagaagggaggagagtctggagacctttaggaatagaatccattgg

SEQ ID NO: 11739 - DNA, 201 bp, Homo sapiens
tctagaaatccctgggggcaaataatgacccttccgcagccatgagtccctgccagacacaggcctgggccaggcatttgacatgaggtgcttcgctcatwcctcctggtggcccagtgtggtgggtatgatcacacacaatcttgagatggacaaactgggctcagagagaggaacttggctgccaaaattcacacattt

SEQ ID NO: 11740 - DNA, 201 bp, Homo sapiens
ggttaggacccgtccccgtctccaccgcaggaggttgggacccgtccccgtctccaccccaggaggttgggacccgtccgtgtctccaccgcaggaggttkggacccgtctctgtctccaccacaagaagtttggacctgtattagggttctctagagggacagaactaatggaatatacatatatatatatatataaaat

SEQ ID NO: 11741 - DNA, 201 bp, Homo sapiens
actctgagccgaatagggagagcatatcaaaaattattttcaataattatgttagtcatggtaactttagaattgttatcctgaggctactgtgtaggtaatgtgggataatgatgggatactgcatgtccttgaggaccaggattctgatgtggaagaaagaatatgcctttgtaatacagaagagattaattaaaaaac

SEQ ID NO: 11742 - DNA, 201 bp, Homo sapiens
gtaaatactaaactagatggaacacaaaagtgaataaacagataaatagaagttgaaaagaacaacaagttttaaaaatcaagaaagaaataacaagagatgaaaggcttgaagaaaaagtgacaaatattcaaaatctgtaagaagatctgacatttagataataggactccctgcagaagaagccgaatacatggggga

SEQ ID NO: 11743 - DNA, 201 bp, Homo sapiens
ggttggacccagttgatgcactaacctaattctgtcctttgcctgccctgatctccatagcctgcttcttcctggaaatttgctgctgctgctgcttcttytttttttttttttttttgagacagggtctcgctctgtcgcccaggctggagtgcagtggcgtgatctcagctcactgcagtctctgcctcccgggggttc

SEQ ID NO: 11744 - DNA, 201 bp, Homo sapiens; identical to SEQ ID NO: 1494

SEQ ID NO: 11745 - DNA, 201 bp, Homo sapiens
aaatgggcaggattttgaacatcgtggtttgtgggattggatgggttggagtagaaagagcatttccgattttgtttatttaaaatgctcaggtgcagtgmaggaatgtgcagggtactttcaaggtactttaggaaggagaggacttgtgtgtggccaccatggatggtctgggtggagacagagggacagagacccaaa

SEQ ID NO: 11746 - DNA, 201 bp, Homo sapiens
cccaaatgaaggactgaagccagattgtagggtgctcatggtcctcagccaaacttccagagctattatggtaaacgtcacagatcggcaatgtctcctcrtctgggaattagccccaacttggtagagatgccctttctttggaacaggtttactttgactcttttaatgagacaaaaacaaaacaccattaagaaaatt

SEQ ID NO: 11747 - DNA, 201 bp, Homo sapiens; identical to SEQ ID NO: 1498

SEQ ID NO: 11748 - DNA, 201 bp, Homo sapiens
cacttctgagacagtttgggtcacctacagacctcatcccagccggatccaggaatgctgccctgaagtgtggaattccttaggatgaccttggaaggcaratactgcctgtcctgttctgggatgctgtggtgactcctgggtctcattgatccagctccttttattctcccaccttcccttcctggtcatagtcaaggt

SEQ ID NO: 11749 - DNA, 201 bp, Homo sapiens
gccccgcaaatgtgtgcacaacaggacccagcacaacttctcccatggagacagagcactggagaagtgttttggttggcctcccacactagggccagtgytacctttggcagctcctgcccacccagtaactgaaattctcctggggccctggagctgaggctggctggttattgtcattgataggtggctcaaggtgta

SEQ ID NO: 11750 - DNA, 201 bp, Homo sapiens
cgcacccaccaggacctccgtctccaggcttatcctgaggggtcttctggatcttccttgatgggcccttgaagctggtgccatgtcccatgggccatttygatgtaccccgagtggggctgagaactctggccccaagtgggcatttctcactctgcccccacagaggtacatcgatgggggcttcacgggcatgcagcc

SEQ ID NO: 11751 - DNA, 201 bp, Homo sapiens
gttgcccaaggtgtatgaacctgtaagggtgatccccggtggaactaaggttagggaagtcctagatgggggatttcctaggaagctgtgagccgagagaragaacgggagctggaacgggagagaacctgaggaccctgaggccaagcctgcttctcactgctgtccggcacactcccctgactctgggcccttttgagg

SEQ ID NO: 11752 - DNA, 201 bp, Homo sapiens
atggcacctgatctcttgtttctgaagctggaaaggttcctctttagctcagcccaccatactactggagctggaagtctctccagtgttccttaatacakgaatgagaacctccattttttcctgttgcaggtgtgtgggtgagtgtgagtgggtgtgtacgtgtatatgttgcccagatgtaacttggatttcagtcct

SEQ ID NO: 11753 - DNA, 201 bp, Homo sapiens
tcatgtaggtgacatatgttaatccatccacctggtatcagcaggtgctaactgagcccctgtgagtgccaggcactgtatccctaacaaccttgcttgawctgtgtgtatgtgtgtgtttttaatttaatttaacttttttgagacagagtcttgctctgtcacccaggctggagtgcagtgacaagatctcagctcact

SEQ ID NO: 11754 - DNA, 201 bp, Homo sapiens
cattaaagacgttgttttgtttggtttggtttgaagtgctgaataggtcagagttgttttgctgttggtgaaaccctgtaatgcatttagggcagagcagmaaaatgtgagttttcacatacattctagttctatttctgcaaacaaaaactgtgtgacctaggtcctagggtatgtccttcctttatccatccatccatc

SEQ ID NO: 11755 - DNA, 201 bp, Homo sapiens
gactcatgggcatgatgttacttagataaatattcattgattatattttaaaaaaagtttgctgggaaatccaatcctcagccagggttgagaaccacagmgcgggtgtgtccacctgcggagctgagcaggccaccatgttggaggaccgaggtcaggcccataatgaaccatctacttaatctctttgcctagggagag

SEQ ID NO: 11756 - DNA, 201 bp, Homo sapiens
ctggaaagggccgcaggtaggtcccagtgtctttcgggacaaaggggttaagctgtgtggcctccttcccacatctccactctccttccttcccccacatrcaggggcttcgccactccatcctcatcccatactggcctggcagtaatcctggggatgagggatgaataggcagtgggcacagacaccacctccgtccct

SEQ ID NO: 11757 - DNA, 201 bp, Homo sapiens
cttctcaaaataagggctacattttactagaaatatttaagagctcttgcactggccatgaggttttcagcagcaaatatcaagggaacagtgactaaaarcaaagacattgagttatctgtcatcataggaagcacacacacaaatggtgtgggggttggtgcagtcacacaagaatctcatcaaggacccagggttttt

SEQ ID NO: 11758 - DNA, 201 bp, Homo sapiens
actttgtggcctttgtgtgtgctgttccctctgctgaaacaccctcaccaccccgccctgaccatcctgggccacgtacccttcagatctctactcactgscaatccctcagatgacctgccctctctcacagcaccacattcctctcttcctgcacttgcctcagttgaaactctagataatttgggtgggcaacgcctg

SEQ ID NO: 11759 - DNA, 201 bp, Homo sapiens
agaaagaaagaaagagacagagagaaagaaagaaagaaggaaggaaggaaggaagggaaggaaggaaggaaggaaggaaggaaggaaagaaagaaagaagkaaagaaagaaagaaagaaagaaagatcaaatggcatgacaaatacaaaaggactttttatacaatattatggaaatggtgtcattgtgcgatagttgttg

SEQ ID NO: 11760 - DNA, 201 bp, Homo sapiens
tagggcatagaaataaaatggtaaataaaccagggtcactgctcctcggaggctggctgtcactgtgaggataaactgagataataggtgggaaagcctgyttagggaaacgattgttgttaagatgataacaattattattacgttggggtagggtattcaagatatacccacaggaaaatgcagattacaattcagtct

SEQ ID NO: 11761 - DNA, 201 bp, Homo sapiens
cattgctctcaggtttttatattccgttgttcacacactgagagccttggtgggcatagaatatggcccatctctcccctggaggaatttccagccctcasgggaggtttctgaggagcttcctatgggcaaagctcagtgacaggctattgtgagaggaggaggagaaccagatttaccctcagagaatcccctcctctg

SEQ ID NO: 11762 - DNA, 201 bp, Homo sapiens
tgcgccccctgcttcccgcgcgcccaccacgcacgctgctctgggagcagggccggcggcgccgccgcctcgcagcgattggttgaaccggaggttgttgytaggctaccagtgcgccctgagcctggggccccgcagtcccatcctctgtggcagatccatccctcactgcagacctaattccggtaccctgtgaacggc

SEQ ID NO: 11763 - DNA, 201 bp, Homo sapiens
accggaggttgttgctaggctaccagtgcgccctgagcctggggccccgcagtcccatcctctgtggcagatccatccctcactgcagacctaattccggyaccctgtgaacggcatcctcagcagcttaaattatcagccccaactgcccgcctttctatgatttttcatttcgcaagaggccatgtggagttggggaag

SEQ ID NO: 11764 - DNA, 201 bp, Homo sapiens
cactactctgaaactggggtgcaccctcttactccaagctcgtattttgctcttttgattccacacatgagcctgaccacaccttgataaggatgtggggrcagggatcactgtctcctgttcagatgagcagtctgagagtctgaatcatcaaaatgccttgtcacataagaaattattgccatacccaatatttggtca

SEQ ID NO: 11765 - DNA, 201 bp, Homo sapiens
cctaagctctttccaagaaatggatgtggtcatggaaagactctctgatcagctgggcacagtggctcatgcctgtaatccccacactttgggaggctgaratgggaggattgcttgagcccaggagtttgagaccagccttagcaacagagtgagaccctgtttctacaaaataaaaagaattatctggtatggtggcac

SEQ ID NO: 11766 - DNA, 201 bp, Homo sapiens
tctcccctggaggaatttccagccctcaggggaggtttctgaggagcttcctatgggcaaagctcagtgacaggctattgtgagaggaggaggagaaccagatttaccctcagagaatcccctcctctgagcagaagtggatgtgcctagggtgggctgaggggtgggagcagtcaaccttgagtaccctgatcaggacac

SEQ ID NO: 11767 - DNA, 201 bp, Homo sapiens
atcggatataagccagtctgaacttttaaatccaattatttagtaaactcttagggttagaagaaggtctatgtggaggattgttattatccattaaagaygttgttttgtttggtttggtttgaagtgctgaataggtcagagttgttttgctgttggtgaaaccctgtaatgcatttagggcagagcagcaaaatgtga

SEQ ID NO: 11768 - DNA, 201 bp, Homo sapiens
gaaaacagaagccccagaaaggaaggggcttgtgggtgaacaggtggtggggctgtagcagaggagcacgtctcctgctttacccagagtatgggtcccckgcacacagagccctgggagccccagtctcagcgccactaagatagtggagggaggatcagtgcaggacagagcaccgggctgggagtccagaggccaatg

SEQ ID NO: 11769 - DNA, 201 bp, Homo sapiens
gggagcccagagtgggagaagaataggaaggggtggggagagaatacagaagctctcacttcaccttctgtcctgctggtccaggagcctcagcgagaagractgctacactgctaacccagagagagaaacactgtcccggacagcagatgcatctagcagccccaaggaacaagcccaacagcctagtgagctaccttg

SEQ ID NO: 11770 - DNA, 201 bp, Homo sapiens
cccagcaaggaagccccagctgcccacaggcctcaggtacatttgcttaccaaatcctgaaatgcaaaacccagaatgaatgggtggaggaccatactaarctgccctttggagcctgaggagaccatatgcaaatttaagcctggtggggctggggatttagagggttggggcttggctgcggcaacagaccccacttaa

SEQ ID NO: 11771 - DNA, 201 bp, Homo sapiens
acagaaactaccattttaatgtaattccttatagtctcttgttttttctaggtagagcatgtattttagtttcttgtactaggtagttgagtagtctgttrcctctctgacatcactgcggaaattcatggtacgactgggatgcaagtcctccccacgcctcctcagcctaagtctggctttttctcacttgctgttgtt

SEQ ID NO: 11772 - DNA, 201 bp, Homo sapiens
tacctctcaagggcatgatacttagggacttggcagtgaccctggttagagtgggcctgttttcctttaaatgaccggtatcccagtgtgaacaaaggatrtgtgagcaggttttgataaggcaatacagcaaggacactgagtccttgaggggaaggtttaaaaggagatgaaaagggcctacttgctgttggctgacct

SEQ ID NO: 11773 - DNA, 201 bp, Homo sapiens
tcttgatgaccttgacagagttgactatcggtcaggtattttgtagaacgtccctcagttggggtttgtctgatgtttttctcaagattaagctggggttktgagttctggggaggagaccacagaggtaaggtgctattcacatcacgttacctcatgggcacgtgctgccaacatgacgtatccctgctgatgttgacc

SEQ ID NO: 11774 - DNA, 201 bp, Homo sapiens
tggagtgcagtggtgcaatcttggctcactgcaagctccacctcccgggttcatgccattctcctgcctcagcctcccgagtagctggggctacaggtgcmtgccactacccccggctaattttttgtatttttagtagagatggggtttcaccgtgttagccaggatggtctcaatctcctgacctcataatccgcccgc

SEQ ID NO: 11775 - DNA, 201 bp, Homo sapiens
atcttttttattatgcacatcaagtgtctgggttgcataacatacactccattatatctttgcaataactatgagaggacctggggatctgcttttttaaraacttccctgaggaccacattacccaggctcccttgctggctgaatgccgtttgtactggtggtgggggaggcacagcaggagatcagaagttgggtcaa

SEQ ID NO: 11776 - DNA, 201 bp, Homo sapiens
agggagggtgcaggacggcagctcgaggtccctgggttcatgggatcaacaatcccagcctgggattcttctcactcattcttgatctccagccccaacasttccctgacctttgagtgtccttatctctgtctctaggagctcatggtcacgttcggccttgggaagccacggatctgcggtgggtgtggggagcctccc

SEQ ID NO: 11777 - DNA, 201 bp, Homo sapiens
ctagagcattgctaatttccagatagcaccattttcagatgtgagtactttggaatgtcgacactgtttgcattattttgtccactgttttgttcctgtcrcccaaccctacccctgaataggtgagagttgactgtagatgaataatatactaaagccaccattaaagtaagcattataagactttaaatatgcgtgcct

SEQ ID NO: 11778 - DNA, 201 bp, Homo sapiens
aaaccataaaacacaggaggagtagggcatccttagttttggcttgtccccagattgccatgtgactttgggtaaatcacttaacctctctgtgtctcagstgctctatttataaataggcgagtaaggcacactgattacttcccggatatattgcaaggtgcctgtgagaatcccagaatctcaaagttggaaggaatc

SEQ ID NO: 11779 - DNA, 201 bp, Homo sapiens
taaaaaagttagcaatcctttccagagctattttcactcctgattttcccaaaggcttgcacagggtagagatgagcaggggtcagcaaaaagcaggtgtsggctcggctgcagaagaagcttttggcttagtgtaatagaaggagcctgggctctggggtcacacatcctaggttgaaatgctactttacccacttacaa

SEQ ID NO: 11780 - DNA, 201 bp, Homo sapiens
tgattttcccaaaggcttgcacagggtagagatgagcaggggtcagcaaaaagcaggtgtgggctcggctgcagaagaagcttttggcttagtgtaatagmaggagcctgggctctggggtcacacatcctaggttgaaatgctactttacccacttacaaactggctgacgctgaccctgggaaagttatattacctatc

SEQ ID NO: 11781 - DNA, 201 bp, Homo sapiens
ctcctcctcatgattcaccggcccaaggccagcaccccttccctgcccacagactcagtgggcaccaagcaagtatcccagggcgtcacttaggaacaacktccaactgcaccagtgttttaataggaatctcatacaggaccccaaaaatgtcatctggcagtggacttccaggcagagtgacaagaagttagggaaagc

SEQ ID NO: 11782 - DNA, 201 bp, Homo sapiens
aagtaacttgccccaagtgacacaggaggtggaggcaagtcttggaagtgaggtcttctgattctcccttttgtctcccttcttttcacctgttcttcctyggcttctcctatccaggtctgctccctgcccactcaacttccctctgctctccacttctgagacagtttgggtcacctacagacctcatcccagccggat

SEQ ID NO: 11783 - DNA, 201 bp, Homo sapiens
tcatacagatgaatccacatcaggtctgtttcgattatttttatttattttgtttttctaagattacatcacaagcatttatctatctttccatatgattkttttctggggcagggaggagggtgcgggctctgtcacccagcctggagtgcatgcagtggtgccatcacagcacactgcagccttgacctcccaggctca

SEQ ID NO: 11784 - DNA, 201 bp, Homo sapiens
agtgacagatcattaggcattagattctcataaggagtgcacaacctagatccctcccatgcacagttcacaataaggttcacgctcctataagaatctartgctgccactgatctgacaggacgcggagctcaggcggtaatgtgagtgatggggagccgctgtaaatacagaagaagcttcacctgctgcttacctcct

SEQ ID NO: 11785 - DNA, 201 bp, Homo sapiens
ctcagccctgttctctccgcacaggccctatactgcagctgcttcgtcccggtgtactgtggcctcatccccccgacttaccgcggtgtggtgagtgcttyggcatggtgaggggtgagatgggatccaagggacctcgggtccctgtgactcacacctgggggagcaggggggtggtctcagaatgcagcgggaggacct

SEQ ID NO: 11786 - DNA, 201 bp, Homo sapiens
gtggcccaggggctgacaggtgagctgtccccaccccacccccgggcctccagcatctcagccctgttctctccgcacaggccctatactgcagctgcttygtcccggtgtactgtggcctcatccccccgacttaccgcggtgtggtgagtgctttggcatggtgaggggtgagatgggatccaagggacctcgggtccc

SEQ ID NO: 11787 - DNA, 201 bp, Homo sapiens
acctgggcaacataaggagaccctattttttttttttttttttttttgagacggagtctcgctctgtcgcccaggccggactgcggactgcagtggcgcartctcggctcactgcaagctccgcttcccgggttcacgccattctcctgcctcagcctcctgagtagctgggactacaggcgcccgccaccgcgcccggct

SEQ ID NO: 11788 - DNA, 201 bp, Homo sapiens
cttttaaagtttgagaatcactgtttgagcccagttccctcaagatgcagacaaggagtttgaggatcagattttggctgaattacggtgatgaaatagawcattcattcgctcattcattctaggtcctggggatctggcagtgagcaaagcagtggatgtccacactcatgaagctgatattctcttggtgaaattaaa

SEQ ID NO: 11789 - DNA, 201 bp, Homo sapiens
ggccctttacagaaaaggctttgtgggcagtagctcatgtaatcctctagcatcctctatgatcaatattataactgtccccattttatagatgaagaaawtgaggctgtgagaggggacagcaacacagccaataaggggcagcccagagacctgaactcaggctccaaactttgctcttcatatggccccagtgcacct

SEQ ID NO: 11790 - DNA, 201 bp, Homo sapiens
tggcagtgagcaaagcagtggatgtccacactcatgaagctgatattctcttggtgaaattaaaccatagaaaattaagcatataaaaaaggtcagcatgmgtgctcaaaggagaagataaagcaggggaaggatgggagaatgacacaaggggcacagtgttgggtgggctggccagaaggcccctctgaggtggatgaa

SEQ ID NO: 11791 - DNA, 201 bp, Homo sapiens
gggtaggcaccgtcctcctggagggaggcgggcttggaagcccttcacggccgcagcagcatgttggggagggaggtgtacaccgataaccatcacggagrttttgcaactgaatgttgcagctgagggctgggcagagcccgcctccttgggcatggccctgtgctggggagcagtgaatgcgccctggtataccatgga

SEQ ID NO: 11792 - DNA, 201 bp, Homo sapiens
ccaaagcgccgggattacaggcatgagccaccgggcctgcccctgggagttgtttctaatgttccaccaagggtccgagtcagccgctccacagatgccgygggcctgcgtctcagtcaagtcccacgacatgactctggttgtaaagatgagaatttgaggacaagagagttctttgctgtttttaaacattctcattta

SEQ ID NO: 11793 - DNA, 201 bp, Homo sapiens
tcagcctcctttgcttccagggcctggcccagggctgacacacattaatggttgttgaatcccactggattcatgaaagttcagcatcagaaggaaccccraagctatggaggaccccctcctgctttaaagctgggacatcagggccagatggaccaagcaggttaccaaggacccaattagtgaaggccaggccaggaa

SEQ ID NO: 11794 - DNA, 201 bp, Homo sapiens
cggggtctcgtaaaattatgcaagttctgatccaggcggtctgaggcagtgcctgagggtctgcgcccctaaccagcctcaggtgctgcccgtgctgctgrtgggtgggccacactctgagtggtgatggtctagctcatgccccctcctcattttatatgcagagaaagtcagggccagagactaggattcaggtagtag

SEQ ID NO: 11795 - DNA, 201 bp, Homo sapiens
cccaggggaggccgaggctccaccatgaatggtgtaactcatgaacggagcatcactggggcgtgtgatcaggaattgctcctcggttcttcttagcagayagtgagggatgggacactggatgggtacgttttgaaaagcccatcaaataaaattcaagagcaatgggagtagctgccctgggtcgggggaactgtggct

SEQ ID NO: 11796 - DNA, 201 bp, Homo sapiens
gtgctttggcatggtgaggggtgagatgggatccaagggacctcgggtccctgtgactcacacctgggggagcaggggggtggtctcagaatgcagcgggrggacctagagttggagagtttctcatgttgttactcagaattcccaatgtaggtggctttctgggcctttaagatgaacttctccagctggggtgggttc

SEQ ID NO: 11797 - DNA, 201 bp, Homo sapiens
gcttcccaggctcaagcaaccctttcacctttctcaatgagtcttacagccacagtgaccttctcagaaccagcctcagctgattacctcccctgcctaamagtcatgctacaataatgcttgccatgaaaactaaggatcctagctgctgcctacagccctgacatggtccggcccctgccgcctcctcagcctcctccc

SEQ ID NO: 11798 - DNA, 201 bp, Homo sapiens
gaccaggggcacaccacgcacccaccaggacctccgtctccaggcttatcctgaggggtcttctggatcttccttgatgggcccttgaagctggtgccatrtcccatgggccatttcgatgtaccccgagtggggctgagaactctggccccaagtgggcatttctcactctgcccccacagaggtacatcgatgggggct

SEQ ID NO: 11799 - DNA, 201 bp, Homo sapiens
attacctcccctgcctaaaagtcatgctacaataatgcttgccatgaaaactaaggatcctagctgctgcctacagccctgacatggtccggcccctgccrcctcctcagcctcctcccccagcacagtacccccgccccacactgacctttcaggcccccgaccacctggtgtgtcctcaaactttgtggcctttgtgtg

SEQ ID NO: 11800 - DNA, 201 bp, Homo sapiens
cttgcctcagttgaaactctagataatttgggtgggcaacgcctgcttccccacactacaccgtaagtgccagaaaccatcacgtttgttttcactcactrtaaattcaagtaagtacagaaagacctttgaaaagcactgttcctgtttaggaaaataactcaagaaaccatttttgcaaaggccatgctgctgccaggg

SEQ ID NO: 11801 - DNA, 201 bp, Homo sapiens
tgtaaattcaagtaagtacagaaagacctttgaaaagcactgttcctgtttaggaaaataactcaagaaaccatttttgcaaaggccatgctgctgccagrgctgagtaacaccccatgctattgtttatcctagatgctgtttatcttaattcttcctccaagagagtgattttcccccgggtggaagtgtactgccaga

SEQ ID NO: 11802 - DNA, 201 bp, Homo sapiens
ttgtttatcctagatgctgtttatcttaattcttcctccaagagagtgattttcccccgggtggaagtgtactgccagatagaactcgcccttggcaatgrgtgccctgaacgcagtcaaccaagccttcgagcacggcaggccagtctggaaggagccacacaacctcacaaggagtgggttcccaaaggggatggaagg

SEQ ID NO: 11803 - DNA, 201 bp, Homo sapiens
cagctgccttttttacaagccctccaggtgattttttgcctgctcacatttgagaccgctgggccagtagatttttactgtgaaacctgctgtgctgggcrtgctactcaaagagtggtccgcagaccaacccagccctcaactgtgtgttactagcccaccacggagggtgtgcagaaattaagagtaatcatttagaaa

SEQ ID NO: 11804 - DNA, 201 bp, Homo sapiens
gttggggggaatggcgggggttgggtaagaacttctccagggcatttgcaaggccattgggaaagtacattgtcaacttcagtagataatgccaaaatttwaaaaagtggttataaccattcgcacacccactagtagtttgagcattcccctcactccacttcttcaccaacacctgcaattatcagctttttttttttt

SEQ ID NO: 11805 - DNA, 201 bp, Homo sapiens
tctcagatgatgatgttcatctcccacccgcttcccttcgagccacccccacctcatagactcctcaggaattgtctctacccggcatctctcactttttyttttcttttttcttcctttctctctttctctttcttccttccttcctttccttccttccttcatttccttcccttccttccttccctttctttctgtttc

SEQ ID NO: 11806 - DNA, 201 bp, Homo sapiens
agcatggagagtgagggaggaaagatttggacatgtttgggaaccagtgtgtaactggggagagatgtggattgtaaagggtgagggacctactgcctgaraggtggcaagagctccatctttgacaactcagtgggcaaaacaaagtcctggggtgggcccaggaattggccctgcaccagaaattcagatgcgcacttg

SEQ ID NO: 11807 - DNA, 201 bp, Homo sapiens
ctaaattcaaacactgcttcactcgggctcgtgcttataaccttacctaggtgtcttaaatgccacaccaaaataacttctcatttttttttttttttgaracggagtcttgctctgtcgcccaggctggagtgcagtggcacgatctcggctcactgcaagtgcctcctggattcaagcaattctcctatctcagcctcc

SEQ ID NO: 11808 - DNA, 201 bp, Homo sapiens
acaggtttcactgtgttagccaggatggtctcaatctcctgactttgtgatctgcccgccttggcctcccaaagtgctgggactacaggcgtgagccaccrcgcccagccagaaatttttaaaaaactgtttccttactactacagacggtttcagaagcaccactatagggcctgcaaagataaaacgttctcaattcct

SEQ ID NO: 11809 - DNA, 201 bp, Homo sapiens
gtctcactatgttccccaggctggtcttgaactcctgggttcaagcaatcctccttcctcagcctcccaaaatgcaagagttacaggcctaaaccagtgcrcctggccatcctcttataatttgtgttttaaaatatctttattacaatgatttcttctacattgtctttcaaaagttttaaaattttcatatttagatta

SEQ ID NO: 11810 - DNA, 201 bp, Homo sapiens
aaatactgaaaaggtgaagtaaatatactagtaaagactattttgaaaaagaaagatccccgcaatcccaccacacaatggttttcactgtacagtccctstccacacacccacatttttatgtactgtatctccttgattataaaatactatcagtttcaagatccaacatcgatttagtaaaagcttttcaggagaaaa

SEQ ID NO: 11811 - DNA, 201 bp, Homo sapiens
gtcccaccttcaatccactttcccctgtcccccacctcgtcccaccctacctctgtcccacagacaaccctcccatcctccactgctcccactctgccctkaatccccagacaacagcaagcctaaatctcatcagccagacggggctacgcagcacatgtaatgaaacctcctgccccatttctaataattcaatttctt

SEQ ID NO: 11812 - DNA, 201 bp, Homo sapiens
agcaaagacattgagttatctgtcatcataggaagcacacacacaaatggtgtgggggttggtgcagtcacacaagaatctcatcaaggacccagggtttytcttgctttctcttatacgatttttgatgccttagccagccttcaaatttgcccttgataatacccaccctctggtattcacacttttcctacattttac

SEQ ID NO: 11813 - DNA, 201 bp, Homo sapiens
gaaacagaggggtgagggctggtatcacccctgctgcacagatgagggtaatgagtagcagggagcagagccagggtttaaacagatcccacatttttggwtttttttttttgacgaggtcttactctgtcacccaggctggagtgcagtggtacaatcacagttcactgcaccctccacctcccaggttcaaatgattct

SEQ ID NO: 11814 - DNA, 201 bp, Homo sapiens
gcctgagaggtggcaagagctccatctttgacaactcagtgggcaaaacaaagtcctggggtgggcccaggaattggccctgcaccagaaattcagatgcrcacttgtgtttgagaattgctattttcatctgaggaaggaggtgcagcctgggataaagggatgtggggttcagtagagcaggaccctactaccagagag

SEQ ID NO: 11815 - DNA, 201 bp, Homo sapiens
tctcactttttcttttcttttttcttcctttctctctttctctttcttccttccttcctttccttccttccttcatttccttcccttccttccttcccttyctttctgtttctctctctctctccccctcccttcctcccttccttttctttccttctttctttctttcctttttttttttttttttttgatcagggttct

SEQ ID NO: 11816 - DNA, 201 bp, Homo sapiens
gatctgtgtgaaattgtaactcactgtggttttagttttcatttccctggttatgcatgctgccttttttttacttaaaatatgtcttggtgactgttccrtatcagagcagtgaggacttcctcctcctttcttggctggaaagtgttccatcgtcatatggaaatcttgtggtcgatttaacccgttccctattgatag

SEQ ID NO: 11817 - DNA, 201 bp, Homo sapiens
atagtctagtgattctctactgggagtgattttgtctccaggagacatttagcaatgtctgcagacattttggttgtcacctagtggttacaggctggggwcaatgaaaaatatcctgtagtgcacagaagtctctgcacaaagtgctttctgaccgttagtgtcaatagcatgtactgagattgagaagccatgttatag

SEQ ID NO: 11818 - DNA, 201 bp, Homo sapiens
agccaggattagtggagaatagagttcccaggaaggaggagggctagggctgaacttccaactctgcccccaagttctgtaggttcttggctggccagggwcccatctcgcccttggttttgccatctgtaacttgggtgattggaaacacatcccttggacattatggtgaaagacaaaagaagtcatggatgcattcct

SEQ ID NO: 11819 - DNA, 201 bp, Homo sapiens
gtttagggctgttataaataacactgctgtgaacattcttgtacatgtcatttgatggacataagtgcttgtatgtcccaggagtggaattgctaggtcayggggcagatatatgtttagctttagtggattctgccagtttcccatttggtgttcaatttatatcccctcctgtatgagtctgatcttgcacagctcccc

SEQ ID NO: 11820 - DNA, 201 bp, Homo sapiens
gtctagtgattctctactgggagtgattttgtctccaggagacatttagcaatgtctgcagacattttggttgtcacctagtggttacaggctggggtcamtgaaaaatatcctgtagtgcacagaagtctctgcacaaagtgctttctgaccgttagtgtcaatagcatgtactgagattgagaagccatgttatagctt

SEQ ID NO: 11821 - DNA, 201 bp, Homo sapiens
cctccagcctgggcaataaaagtgaaactctgtgaaagagagaaagaaagaaagaaggaaagaaagaaagaaagaaagaaagaaagaaagaaagaaagaargaaagaaggaaggaaggaaggaaggaaggaaggaaggaaggaaggaaggaaggaaagagagacagagagagagagaaagaaagaaagagacagagagaaa

SEQ ID NO: 11822 - DNA, 201 bp, Homo sapiens
acatacaacaagtctctaacaaaataacttcagaagaacccacatatactttatattacctttatttatatataatacataattacatattaaccttcatrtattatgtatccccatactcattaaaaacatgtaaagagcttacttaagagtaatggccatgaaactattaatactctgttctaagaaacaaacaaaaag

SEQ ID NO: 11823 - DNA, 201 bp, Homo sapiens
tatcgaaaacagtgagtctcatctaagacacaactgttataattcttgataatttttttttaaagacagagtcttgctctgtcacagactagatgcagtgrtgtgatcatagcttactgtagcctcaaactgctgggctgaagtgatcctcctgccttagcctcccaagtggctgggactacaggaatgcatcactacacc

SEQ ID NO: 11824 - DNA, 201 bp, Homo sapiens
tgaaaaccttccctaacatgctgctttctgcgagggagctatttcttttcttttccttatttttctttacttttctctttttttttttttttttttttggkggtggaggaggagacagtatctcactcccggctcactgcactctcaacttttgaggctcaggtgattctcttacctcagcctcccgagtagctgagatca

SEQ ID NO: 11825 - DNA, 201 bp, Homo sapiens
gttccctaattgattagattgggccatcctaggaagggtgggtggctcacaactgtaatcccaacattttgggagactgaggtgggaggattgcctgaacscaggagcttgagactagcctgggcaacatagtgagaccctatctcaacagaaaatttaaaatattagccaggcgtggtggggtgcacctgtagtcccagc

SEQ ID NO: 11826 - DNA, 201 bp, Homo sapiens
aaaccttccctaacatgctgctttctgcgagggagctatttcttttcttttccttatttttctttacttttctctttttttttttttttttttttggtggkggaggaggagacagtatctcactcccggctcactgcactctcaacttttgaggctcaggtgattctcttacctcagcctcccgagtagctgagatcacag

SEQ ID NO: 11827 - DNA, 201 bp, Homo sapiens
atatctttacttttagctgtagctcttcttgtctcttcaaaaccaaaaagcgccgtgcctctggttcatgtgaaggaaaccgtcagcaagccttatgtaaygtaagtttccccttcgtggagcacgctctttcctttggacggaagaagcaagcccggctaagcgatatcttccaccaccttagctgccccaggaactctg

SEQ ID NO: 11828 - DNA, 201 bp, Homo sapiens
gcctagggagagccctgctgaagactcaaactgggtgaataaggtcttcaagaagaacaagcaaaagacaagtggcaccagaaaaggcttcccaagacatycgggatccaaaaaaccaagcagcaaagtgcagtgagcatgtctaatgttccttaaatcccacggagaggagcagctttgggaactgtgttcagagagatt

SEQ ID NO: 11829 - DNA, 201 bp, Homo sapiens
gtagtcccagctattcgggaggctgaggcaggaggattgcttgagcccaggagttggagtctgggctgggcaacatagtattctctgaatggaacagaccygcactgctatataatttgcttcaagtctttgttggtcagaaaaacctctaatcattctgagcaacatccttcctggttgttcttgtcccaagtggggtcc

SEQ ID NO: 11830 - DNA, 201 bp, Homo sapiens
catatatatatatttatttatttattttcgagatggagttttgctctgtctccaggctagagtgcattggtgtgatctcggctcactgcaacctccacctmctgggttcaaacaattcttctacctcagcctcccaagtagctgggactacaggcacgtgccaccatgcctggctaatttttgtatttttagtggagacgg

SEQ ID NO: 11831 - DNA, 201 bp, Homo sapiens
tgggctgggcaacatagtattctctgaatggaacagacccgcactgctatataatttgcttcaagtctttgttggtcagaaaaacctctaatcattctgarcaacatccttcctggttgttcttgtcccaagtggggtccctggatgggcacagggatttatcagacagacaagggtcagaggctcacccggcggccaaag

SEQ ID NO: 11832 - DNA, 201 bp, Homo sapiens
ttttcacgccagtacaagcgtgagctttacatcctagttttaaccaccccacacatccctgactaggggcttccctcagcaaacaaactacaaaaaatttyttaaaaaatccattgctattcccttcttccaagtattgtctcccctccaatatccatgccttttgatcactctccagagttttcatagttgttttttata

SEQ ID NO: 11833 - DNA, 201 bp, Homo sapiens
gtatttttaattaatgctcagaatttttcattttagcccttctaacaggtgcatgtcggtaacttattgtggttttaatcagtattcctctaatgactaaygactttgagcatcttttcatttgtctatttgcctcccatagatcttctttggtgaagcattcgttccactcttttgtacatttctcacctagactcttaa

SEQ ID NO: 11834 - DNA, 201 bp, Homo sapiens
ctatcttatggaccagaattgttttcatctgctctttcttaaactcctttgttctggggtcttcttgtcctgaagggcttggctgccctgaagaaggtaarcagaattaggatttgtttagtcaggaagaaagggaccagaatccaataaaacttgctacacagaacttttcagtgcctttaatatgaaggtttgcattgt

SEQ ID NO: 11835 - DNA, 201 bp, Homo sapiens
ggtatggagtcagaaaaatcactgcctggctgcctgacctcaggcaagacacttagcttttctctgtgtcagtttctgcgtctgtaaaatggtgctgaagyttttcttactcacctccaggactggggtggaataatcggtaaaccataaaacacaggaggagtagggcatccttagttttggcttgtccccagattgcca

SEQ ID NO: 11836 - DNA, 201 bp, Homo sapiens
atttgtttagtcaggaagaaagggaccagaatccaataaaacttgctacacagaacttttcagtgcctttaatatgaaggtttgcattgtcgctctccaartgcttatcccaatctcacctgcaatattccttaaatgtatttatttgatttagaagtcctttatccacagagatttgtcaggactggtctgaatttctgg

SEQ ID NO: 11837 - DNA, 201 bp, Homo sapiens
ctagtaaagactattttgaaaaagaaagatccccgcaatcccaccacacaatggttttcactgtacagtccctctccacacacccacatttttatgtactrtatctccttgattataaaatactatcagtttcaagatccaacatcgatttagtaaaagcttttcaggagaaaaaaaaaacactgtgagaacctaataaga

SEQ ID NO: 11838 - DNA, 201 bp, Homo sapiens
ccgcaatcccaccacacaatggttttcactgtacagtccctctccacacacccacatttttatgtactgtatctccttgattataaaatactatcagtttyaagatccaacatcgatttagtaaaagcttttcaggagaaaaaaaaaacactgtgagaacctaataagaatgaacattaatactatacagccataaaaaag

SEQ ID NO: 11839 - DNA, 201 bp, Homo sapiens
aggagatggggaggttgcagtgagccgagatcgcaccattgccctccagcctgggcaataaaagtgaaactctgtgaaagagagaaagaaagaaagaaggraagaaagaaagaaagaaagaaagaaagaaagaaagaaagaaagaaagaaggaaggaaggaaggaaggaaggaaggaaggaaggaaggaaggaaggaaaga

SEQ ID NO: 11840 - DNA, 201 bp, Homo sapiens
gggacctgcttttcagctttatactgtctgttattccacacacagatatacgaatggcacagggccatctcagcctgtttttgtttgccaacaaacatgaraaagattaggatatctagccaacattttgtgagtcctcacaacactgcaggcaggtctctgtgcacatacacgctcatctacttctcagaaacagagggg

SEQ ID NO: 11841 - DNA, 201 bp, Homo sapiens
tctccctgtgtgccttttaccttttatcaaggagggaaatctttccaagaagcaatccagcagagtccctgttacttctcattgtccaggggggtggggtytgatgatcaccgtgagctcatgattcacccttagctgaaaccaaggaccaggcctttcagctgctttacagggaggtgggcaaggagtaagtgggccgca

SEQ ID NO: 11842 - DNA, 201 bp, Homo sapiens
gtaaggaagtttgaggcagaactgtcagctccctatcctaatagaaactgccccttgccttctctccttcctccaggcagagactgcatcactgtagagayggaaaatgccaaacaagggctttcccagcctcccctgcagctcaggcatggacacatgacccagttccagctggcagatcctgaggactttctggagggc

SEQ ID NO: 11843 - DNA, 201 bp, Homo sapiens
gtggaagtcagccgggtccaagcaggtggggacaacgggggccatgtcaggatgcactgtctctgaaggggtggtgggtccccagccccccaggtgcctgmagcccatgtacagcaggtggccttgctttctatttcactgggatgacccggaaaaagaaacttatccatagctgtcctcccctcaacatgaccccacacc

SEQ ID NO: 11844 - DNA, 201 bp, Homo sapiens
agcagtggggtgtaatcaaggactagactgtgggctgctcgtaattatcgcagaagtccagggaagggtgagggaggtatgtgtgggactcacgctgtcckctcagcagcatgtttatgagacttgtcaatgtcactccagtctagttcattcactcattttaactgccatacaatttactcttaactagcacttcctttt

SEQ ID NO: 11845 - DNA, 201 bp, Homo sapiens
gaaaatagaggccagttgcagtggctcatgcctgtaatcccagcactttggaaggctgagacaggtggatcaggggttcaagaccagcctggccaaatggygaaaccccttctctactaaaaaaatacaaaaattagccaggcgtggtggtgcacacctgtagtcccagctactcgggaggctgaggtgggagattgcttg

SEQ ID NO: 11846 - DNA, 201 bp, Homo sapiens
cttctggcgtgtatgcccagttctgtgactaggccagttcaaggcacatgaaaatgttgtaaaagcacttaacatagtgcctggtttttactagagatgtrgtaaccttcattaatccattcattcacctaggaggggtggtctccgtgattgccactgggggatccagaatttccaatcttgtcagaagtggggttggaa

SEQ ID NO: 11847 - DNA, 201 bp, Homo sapiens
acctgtagtcccagctactcgggaggctgaggtgggagattgcttgaactccagaggcagaggttgcagtgagatcgcgctactacactccagcctgggtracaaagccagactctgtctcaaataaataaataataaataaataaataataaataaataaataaataaataaataaataaagagtagaaagaaagcctcc

SEQ ID NO: 11848 - DNA, 201 bp, Homo sapiens
gatgaataggcagtgggcacagacaccacctccgtccctcaggccccctgggtttatcagcagccagctcttccagatctgcctcctcacgcccacccccrttctgacttcactgcccactgctgcagttttctcttcccggccctctcccccaccttccactcctaccatgccaaccctagcaaaccacacacaagccag

SEQ ID NO: 11849 - DNA, 201 bp, Homo sapiens
gctaggcatggatctttccagatctttttaatgcacagtcttccttgaatgcagccattaatggctcttccccactgaactccaggccttcagaatggggrtagggtgacagcccccactctgtcctggagtcaccgaattcctgccttggaaacacctggtgcagggattctctctccttttccgggcgcctgcgttgct

SEQ ID NO: 11850 - DNA, 201 bp, Homo sapiens
gggtcctttctcccaacaaggggggtggagaggctggacggacaggagagcaggatggagaaaacctgggccctggaggcaagtagctctaaggcccccaycccacccacaagctgtgtgacctccggataattgcttcccctctctaaggcttggtttcctaatctgtaaaaaaaagggggtttagatcctagctcctga

SEQ ID NO: 11851 - DNA, 201 bp, Homo sapiens
aaaaaaaaaaaaaaaaaaagatgaagaaagaaagaaaagatttttcagacctaatttaactcattcagtttgatgaatactgctgcaaacctacttggccrggctgtgacggtcatggacggcagtggtaggaactaaaacctgtaaaaaggacatcaagcagtggggtgtaatcaaggactagactgtgggctgctcgta

SEQ ID NO: 11852 - DNA, 201 bp, Homo sapiens
tgcgcctggccatcctcttataatttgtgttttaaaatatctttattacaatgatttcttctacattgtctttcaaaagttttaaaattttcatatttagrttaattcctcaggaatttattttgttgatggttgaggtagagatctaatttttaaattgttttgccatgtgatagccaattagaggctatctccacactt

SEQ ID NO: 11853 - DNA, 201 bp, Homo sapiens
ataattttaaccataaaactttttgaaagagtttgtataaatttaacaattttgagcttaggcataagttatgcattttgttcacataatttaaacttttwtgcatttacatataactctataaaagtcggagtttcatttgactcatgggcatgatgttacttagataaatattcattgattatattttaaaaaaagttt

SEQ ID NO: 11854 - DNA, 201 bp, Homo sapiens
tgtcattgggtcacacctcctgcaccaggcaggtggttgtctgctgcgttcctttacagaacagatgctgagcctgcctggaggtggcaatttaccaatcratggtcttaagcaattccaaaggctggggtaaggggtagaaaagagaagctcaaaaatgttagggatggagaaggggggagtgattcaggaagaggagaa

SEQ ID NO: 11855 - DNA, 201 bp, Homo sapiens
agacccctgtgtaatgaaatgaaccccctaactggcttttggtgtagcttgagatttccaatttccatgcattggctataacaggcctggctacctgctgmgggttgcccaaggtgtatgaacctgtaagggtgatccccggtggaactaaggttagggaagtcctagatgggggatttcctaggaagctgtgagccgaga

SEQ ID NO: 11856 - DNA, 201 bp, Homo sapiens
gcgcctggccatcctcttataatttgtgttttaaaatatctttattacaatgatttcttctacattgtctttcaaaagttttaaaattttcatatttagawtaattcctcaggaatttattttgttgatggttgaggtagagatctaatttttaaattgttttgccatgtgatagccaattagaggctatctccacactta

SEQ ID NO: 11857 - DNA, 201 bp, Homo sapiens
tagtcctgtgcaaacttccagtccccagctgatatccctgcagacaagtagagagaggctagaacaaaagctaaagtgtagatgtcccatacactaatcartgttgttttttaatcagaggttgaaattcatactctgatgcaaactgtattagtcagttgttgctgctatgataacactgcataacaaacaaccccccaa

SEQ ID NO: 11858 - DNA, 201 bp, Homo sapiens
ctgcaattagggaccagatagcagccaactctcaggtgatccatgcagggattctgagcattcgtcggcgcctccccaggggctgctgcgccccctgcttyccgcgcgcccaccacgcacgctgctctgggagcagggccggcggcgccgccgcctcgcagcgattggttgaaccggaggttgttgctaggctaccagtgc

SEQ ID NO: 11859 - DNA, 201 bp, Homo sapiens
ttctccccataaaaaactggcaagccaatctgtccgtcccttcgttcctttcttcgttcgttcgttccttccttccttccttccttccttccttctccttscttccttccgtgttagttgagcacatactaggccctgcagaggatgcgaagatacaacacaaaatgaaactctgatcttgctgcaaggagcttacagtcc

SEQ ID NO: 11860 - DNA, 201 bp, Homo sapiens
ctcaacttccctctgctctccacttctgagacagtttgggtcacctacagacctcatcccagccggatccaggaatgctgccctgaagtgtggaattcctwaggatgaccttggaaggcagatactgcctgtcctgttctgggatgctgtggtgactcctgggtctcattgatccagctccttttattctcccaccttccc

SEQ ID NO: 11861 - DNA, 201 bp, Homo sapiens
tgagaagaacttcatcttctgaaaaagggggggtgtgggcaaggtcggcactgcttgttgcactggatgctggctgcatatctgccctagagaggcccaayggggaaggtgcagaggccaggggagaggtaacttgctcttacagagtcccacttcatgccaggtgtttctgtccattagtgctgcttagtttttgctagg

SEQ ID NO: 11862 - DNA, 201 bp, Homo sapiens
ggtatgatttcagagacaacaggaaggtcctttatgcataagaaactagacgctttcccacccagcttcgagtcactcacaattgcacaattcgagctccrtccttttgccacggctttgagctctgttgaaacaagatcctcccaggtgtttctcagtcttctaatgctcaggcctgcttttcatgacataaacagctct

SEQ ID NO: 11863 - DNA, 201 bp, Homo sapiens
atggagactatttcaggaaggtggtcagggaagcctttctgaggaggtgacattcaagcctagagctgggtatagtgatagaacaagctactgggagctcytgaaaaggagaattcctggtggaggagcagccacgaagcctgcggtgtggaaaaggtggtgggaggtcaacaggggccaggtcatgtggccttagccaca

SEQ ID NO: 11864 - DNA, 201 bp, Homo sapiens
ctcagatgatgatgttcatctcccacccgcttcccttcgagccacccccacctcatagactcctcaggaattgtctctacccggcatctctcactttttcttttcttttttcttcctttctctctttctctttcttccttccttcctttccttccttccttcatttccttcccttccttccttccctttctttctgtttct

SEQ ID NO: 11865 - DNA, 201 bp, Homo sapiens
ttcatttccttcccttccttccttccctttctttctgtttctctctctctctccccctcccttcctcccttccttttctttccttctttctttctttcctttttttttttttttttttgatcagggttcttgctctgtcacccaggctggagggcagtggtgcgatcatggctcactgtagcctcaaactcctggactcaa

SEQ ID NO: 11866 - DNA, 201 bp, Homo sapiens
gaggatcacttgagcccatgagttcaaggttgcagtgaactatgatcacagtactgcattccagcataggcgacggaggaaaaccctgtctcaaacaaacaaaaaaaaaaacaaaaaacagaaaaagaaaagaatgggccatcttaactggagtggagtttaaaagtccttgcaggctgctgtagggatggacctggcttt

SEQ ID NO: 11867 - DNA, 201 bp, Homo sapiens
gaaagggactgagaatgaaatggagactatttcaggaaggtggtcagggaagcctttctgaggaggtgacattcaagcctagagctgggtatagtgatagracaagctactgggagctcctgaaaaggagaattcctggtggaggagcagccacgaagcctgcggtgtggaaaaggtggtgggaggtcaacaggggccagg

SEQ ID NO: 11868 - DNA, 201 bp, Homo sapiens
acgcctgtaatcctagcactttgagaggccaaagcaggagaatcccttgaacccaggagtttgaaaccagcctgggcaacataggaagaacctgtcttagaaaaaaaaaaaatgtagtcacatacatttactgaaacttgggttaaacaaattaagccaaaatctttacttcagagtgttatcacttatgatgctctaaga

SEQ ID NO: 11869 - DNA, 201 bp, Homo sapiens
tttcttgtatttttattttgcttcgatgtcttttgttattcagattttaattttaatgctgtcaaatgtatccatcttttcatcttacaacttgggttttrttttgttttgtttttgagactaggtctcatcctgtcacccacatcggagtgcagtggcacattcatggctcactgcagcctcgaactcctaggctcaagt

SEQ ID NO: 11870 - DNA, 201 bp, Homo sapiens
aatctaaaataaaagttgaaattttttttttaagaaatgaaagaccattgaggccaggctcatacctataatcccagcactttgggaggctgaggagggasgatcacttgaggccaggagtttgagaccagcctgggcaacacagtgagaccccatctctacaaaaaattaaaaataagcaggtgttgtgttgtgtgcctg

SEQ ID NO: 11871 - DNA, 201 bp, Homo sapiens
tctttctttctttctttctttcttttgagacagagtctcgctctgttgcccaggctgacatgcagtggtgtgatctcggcttactgcaacctccgcctccygggttcaagagattctcctgcctcagcctcccgagtagctgggcttacaggcacccaccaccacgcccagctaatttttgtatttttagtagagacaggg

SEQ ID NO: 11872 - DNA, 201 bp, Homo sapiens
aaaccctactcccacttaagctacttcttggcacctttctccccataaaaaactggcaagccaatctgtccgtcccttcgttcctttcttcgttcgttcgttccttccttccttccttccttccttccttctccttgcttccttccgtgttagttgagcacatactaggccctgcagaggatgcgaagatacaacacaaaa

SEQ ID NO: 11873 - DNA, 201 bp, Homo sapiens
gctgtgctgaacttacaaaagcgagaaataaagaataaaaacagttaacacttggtaagcacttgccatgtgccaggagaaaaccctaggaggcaagtttrattattttcccattttctagatgagaaagctaaggcacagagatgtcaaataatttgtcaaaggtgcaactaacatagctgtgtcttgaactaagacagc

SEQ ID NO: 11874 - DNA, 201 bp, Homo sapiens
aaccctactcccacttaagctacttcttggcacctttctccccataaaaaactggcaagccaatctgtccgtcccttcgttcctttcttcgttcgttcgttccttccttccttccttccttccttccttctccttgcttccttccgtgttagttgagcacatactaggccctgcagaggatgcgaagatacaacacaaaat

SEQ ID NO: 11875 - DNA, 201 bp, Homo sapiens
ccacagacaaccctcccatcctccactgctcccactctgccctgaatccccagacaacagcaagcctaaatctcatcagccagacggggctacgcagcacrtgtaatgaaacctcctgccccatttctaataattcaatttcttcatagctattggaacaaaaggccctcttcacctcagaatattccaaatgccaaaaca

SEQ ID NO: 11876 - DNA, 201 bp, Homo sapiens
accctactcccacttaagctacttcttggcacctttctccccataaaaaactggcaagccaatctgtccgtcccttcgttcctttcttcgttcgttcgttccttccttccttccttccttccttccttctccttgcttccttccgtgttagttgagcacatactaggccctgcagaggatgcgaagatacaacacaaaatg

SEQ ID NO: 11877 - DNA, 201 bp, Homo sapiens
gcctgaatccttgtttctttatcgttatttttccttcttaccaatatatcttggagaacgttccctatgagcacacccaggtccacaattattcttttcartagctgcagagaattgcattatgtggctataccatcattcatttaactagcttgccattgatatacttttaggttatttctggatatttgctattacaat

SEQ ID NO: 11878 - DNA, 201 bp, Homo sapiens
ccctactcccacttaagctacttcttggcacctttctccccataaaaaactggcaagccaatctgtccgtcccttcgttcctttcttcgttcgttcgttccttccttccttccttccttccttccttctccttgcttccttccgtgttagttgagcacatactaggccctgcagaggatgcgaagatacaacacaaaatga

SEQ ID NO: 11879 - DNA, 201 bp, Homo sapiens
aattattcttttcaatagctgcagagaattgcattatgtggctataccatcattcatttaactagcttgccattgatatacttttaggttatttctggatmtttgctattacaattgatgctgtatttaaaaattctttgcatatatttttggaggactcctatgagtatttctgtaggataaattcctgcaagtattgat

SEQ ID NO: 11880 - DNA, 201 bp, Homo sapiens
attctgaacccttactaaactgttgcttcctgcagtcttggttactcagggctcccgagccaacgtttggatggctgtgattatctgggatgtctcaggartgacctaaccacttacctcttccaagttctgaattttacaacaggaaattgaggcccagagaacagaaggacacatgggtgctgctggtagagcccgaac

SEQ ID NO: 11881 - DNA, 201 bp, Homo sapiens
gttttaaatctggtaataagagaagtgacgtgattaggactcttataaacactcaatgggagtggaaactggcacacccactctagagagcaatcgagcarctccttgcagagttgcagaaatgcccattgtattaaccatgctttcttattttgtgaatttttgatgttctggcatttgtggcctcactgatgggggcaa

SEQ ID NO: 11882 - DNA, 201 bp, Homo sapiens
tattatacacactggagtttccattgagatgaataaaagagttggaaccagcttatcatcaggttttgactccaaaaaaggaaacagcttgttctaatttrccaaaccttaagtcaaatacagttctatttttgaccgaattgtccacaggattccaaatttgacattttgtctttttaaagatgagtgaactgatgtgga

SEQ ID NO: 11883 - DNA, 201 bp, Homo sapiens
ctctactaaaaatacaaaaaattagccgggcatggtggtaggcatctgtaatcccagctactcggggggctgaagcaggagaatcacttgaacccaggagrtggggaggttgcagtgagccgagatcgcaccattgccctccagcctgggcaataaaagtgaaactctgtgaaagagagaaagaaagaaagaaggaaagaa

SEQ ID NO: 11884 - DNA, 201 bp, Homo sapiens
agagtcccttcaacctggaacactccctccctggttctcctgggaggggaagtgaaaggtgatattgattaggaaacagtttgaggaggtttcacctttamttgtgacgtctcattgctttaaaaccagggaaatagctgagccaaatgtagtaaaatgttaagatttcttcagtctggctggtgggtatatgaatgtttg

SEQ ID NO: 11885 - DNA, 201 bp, Homo sapiens
ctgccaggctcagcctttggggtccaggttagcagctcctccacggccttgctgggtatagtcacggatttctggctggcgtgtttgcatggaggaggctktgcgtcattgctgtctccacgtccacagggaacagaaacatatgtgcattcgtggaagtcagccgggtccaagcaggtggggacaacgggggccatgtca

SEQ ID NO: 11886 - DNA, 201 bp, Homo sapiens
gctggcgtgtttgcatggaggaggctgtgcgtcattgctgtctccacgtccacagggaacagaaacatatgtgcattcgtggaagtcagccgggtccaagyaggtggggacaacgggggccatgtcaggatgcactgtctctgaaggggtggtgggtccccagccccccaggtgcctgaagcccatgtacagcaggtggcc

SEQ ID NO: 11887 - DNA, 201 bp, Homo sapiens
ctgtgactcacacctgggggagcaggggggtggtctcagaatgcagcgggaggacctagagttggagagtttctcatgttgttactcagaattcccaatgyaggtggctttctgggcctttaagatgaacttctccagctggggtgggttcctctctggacccacctacccactgccaagccgggcaaatcaaggctccat

SEQ ID NO: 11888 - DNA, 201 bp, Homo sapiens
cacaggaccaagaccctgctcacacaccgggggagccttctgcatctcattctggggcccctttccaacctttggagttgcctcctggcggagcttaacargctgaggcagcttcctgagcagcctgtggttgctccagccgggtagagacagccacattccaagctccggggtggcagggaagctgggtagggagttcct

SEQ ID NO: 11889 - DNA, 201 bp, Homo sapiens
tggttgtttggtttttaattcttacagtgtactaacggcttggcctgagctggtcactggaatcgctggctgaatttggtcaggcagcccaggcattgagmtctttagagctcccccgggattatgtggtgctgtggtgttgagacaggctgccctggagtcctgggtggctgtagaggaagaaggaggccaaatgtccct

SEQ ID NO: 11890 - DNA, 201 bp, Homo sapiens
tctctgtctgctgttcacacctcagtgaaaatgttccgtgaggaggacaacttcagcctcaatttttccagcctgtccagaaaataattgcccccctcctycccagagagcagacaacctccaggtcccgccaggcccagcaaggaagccccagctgcccacaggcctcaggtacatttgcttaccaaatcctgaaatgca

SEQ ID NO: 11891 - DNA, 201 bp, Homo sapiens
aggagaatcacttgaacccaggagatggggaggttgcagtgagccgagatcgcaccattgccctccagcctgggcaataaaagtgaaactctgtgaaagaragaaagaaagaaagaaggaaagaaagaaagaaagaaagaaagaaagaaagaaagaaagaaagaaagaaggaaggaaggaaggaaggaaggaaggaaggaa

SEQ ID NO: 11892 - DNA, 201 bp, Homo sapiens
ttcaaaatgcaaatacccttgggagaggcaactcttcaaatctctatcaccctgatggggacgtattgtccaccatttccaggtggctggaaagatgaacrccctgaggctggaggggtagacaggagggagcccagagtgggagaagaataggaaggggtggggagagaatacagaagctctcacttcaccttctgtcct

SEQ ID NO: 11893 - DNA, 201 bp, Homo sapiens
cagcctgggcaataaaagtgaaactctgtgaaagagagaaagaaagaaagaaggaaagaaagaaagaaagaaagaaagaaagaaagaaagaaagaaagaargaaggaaggaaggaaggaaggaaggaaggaaggaaggaaggaaggaaggaaagagagacagagagagagagaaagaaagaaagagacagagagaaagaaa

SEQ ID NO: 11894 - DNA, 201 bp, Homo sapiens
aaactctgtgaaagagagaaagaaagaaagaaggaaagaaagaaagaaagaaagaaagaaagaaagaaagaaagaaagaaagaaggaaggaaggaaggaargaaggaaggaaggaaggaaggaaggaaggaaagagagacagagagagagagaaagaaagaaagagacagagagaaagaaagaaagaaggaaggaaggaag

SEQ ID NO: 11895 - DNA, 201 bp, Homo sapiens
tgaaagagagaaagaaagaaagaaggaaagaaagaaagaaagaaagaaagaaagaaagaaagaaagaaagaaagaaggaaggaaggaaggaaggaaggaakgaaggaaggaaggaaggaaggaaagagagacagagagagagagaaagaaagaaagagacagagagaaagaaagaaagaaggaaggaaggaaggaagggaa

SEQ ID NO: 11896 - DNA, 201 bp, Homo sapiens
aagaaagaaagaaagaaagaaagaaagaaagaaagaaagaaagaaggaaggaaggaaggaaggaaggaaggaaggaaggaaggaaggaaggaaagagagasagagagagagagaaagaaagaaagagacagagagaaagaaagaaagaaggaaggaaggaaggaagggaaggaaggaaggaaggaaggaaggaaggaaaga

SEQ ID NO: 11897 - DNA, 201 bp, Homo sapiens
tgatggatgtaaaacagttgtcatagatccgcacaccatatgctcccaggacagtgtctctgtcaggaagaaaatgggatggggctacaggggtctccctrtgtgccttttaccttttatcaaggagggaaatctttccaagaagcaatccagcagagtccctgttacttctcattgtccaggggggtggggtctgatgat

SEQ ID NO: 11898 - DNA, 201 bp, Homo sapiens
ggaaggaaggaaggaaggaaggaaggaaggaaggaaggaaggaaggaaagagagacagagagagagagaaagaaagaaagagacagagagaaagaaagaargaaggaaggaaggaaggaagggaaggaaggaaggaaggaaggaaggaaggaaagaaagaaagaaggaaagaaagaaagaaagaaagaaagatcaaatggc

SEQ ID NO: 11899 - DNA, 201 bp, Homo sapiens
tgtttgaaagtgccatgtttcagggtaaatcgtcatgaagcaatgggtaaccaatacactcagtgtgtctgccacgtttcccctgatggatgtaaaacagytgtcatagatccgcacaccatatgctcccaggacagtgtctctgtcaggaagaaaatgggatggggctacaggggtctccctgtgtgccttttacctttt

SEQ ID NO: 11900 - DNA, 201 bp, Homo sapiens
aatgtgagttttcacatacattctagttctatttctgcaaacaaaaactgtgtgacctaggtcctagggtatgtccttcctttatccatccatccatccawccaaccatccaaccatccatccactcatccatccatccatccatccatccatccatccatccatccatccatccggctgacatttactgaggctcatctt

SEQ ID NO: 11901 - DNA, 201 bp, Homo sapiens
ctacaggtgatataattgaatgatgcagatttttaaggcagaaactaggatctacacaagattttcctaagtgtgcttgatatgtcaatagatgttacttwaaaaagatgtggtcagtcaggcatggtggctcacgcctgtaatcctagcactttgagaggccaaagcaggagaatcccttgaacccaggagtttgaaacc

SEQ ID NO: 11902 - DNA, 201 bp, Homo sapiens
tgagttttcacatacattctagttctatttctgcaaacaaaaactgtgtgacctaggtcctagggtatgtccttcctttatccatccatccatccaaccawccatccaaccatccatccactcatccatccatccatccatccatccatccatccatccatccatccatccggctgacatttactgaggctcatctttttc

SEQ ID NO: 11903 - DNA, 201 bp, Homo sapiens
gggaaacgattgttgttaagatgataacaattattattacgttggggtagggtattcaagatatacccacaggaaaatgcagattacaattcagtctgcamttagggaccagatagcagccaactctcaggtgatccatgcagggattctgagcattcgtcggcgcctccccaggggctgctgcgccccctgcttcccgcg

SEQ ID NO: 11904 - DNA, 201 bp, Homo sapiens
cacccagcattgacccagcatcttatttacttatttttcttggcacattagactcataaaacctggtgagctgaccacagtaatcaatattgttaactctygctgtctatccatctatctgggatgatctcgccttcaagcttttattgggtaattaagtcaagtagctcttccttgggggcatctccattgctctcaggt

SEQ ID NO: 11905 - DNA, 201 bp, Homo sapiens
cacatacattctagttctatttctgcaaacaaaaactgtgtgacctaggtcctagggtatgtccttcctttatccatccatccatccaaccaaccatccawccatccatccactcatccatccatccatccatccatccatccatccatccatccatccatccggctgacatttactgaggctcatctttttcctgggcaa

SEQ ID NO: 11906 - DNA, 201 bp, Homo sapiens
tcggaggctggctgtcactgtgaggataaactgagataataggtgggaaagcctgcttagggaaacgattgttgttaagatgataacaattattattacgytggggtagggtattcaagatatacccacaggaaaatgcagattacaattcagtctgcaattagggaccagatagcagccaactctcaggtgatccatgca

SEQ ID NO: 11907 - DNA, 201 bp, Homo sapiens
agttccagctactcaggaggctgaggtgggaggatcctttgaggagcctgggcaacagagggagaccctgtctctaaaaaaaaaaagtttaaattaaattwaaaaaagaaagactctctgagtggctgaaacttggaaacatagcttccaagtgccgttcaaaaatctcccagtctcaacatctttttacattttattttt

SEQ ID NO: 11908 - DNA, 201 bp, Homo sapiens
gaggtttcacctttacttgtgacgtctcattgctttaaaaccagggaaatagctgagccaaatgtagtaaaatgttaagatttcttcagtctggctggtgrgtatatgaatgtttgctgcactagtttgggtactttatgctagagctctttcattataagaaaaaagatactatttagactgcatgaataatctcaaggt

SEQ ID NO: 11909 - DNA, 201 bp, Homo sapiens
tacagttctatttttgaccgaattgtccacaggattccaaatttgacattttgtctttttaaagatgagtgaactgatgtggagtttctaaacagaggatkcccagtgtggcagaaaataaaacaatggcctgggtgttgggactcgtaggttttgggcctggctctgacttagggttgtggtgtgacttggagcaggtca

SEQ ID NO: 11910 - DNA, 201 bp, Homo sapiens
gcttcctgagcagcctgtggttgctccagccgggtagagacagccacattccaagctccggggtggcagggaagctgggtagggagttcctacagggagcrgcagcccaggctcgggcaggcaagtgctgaagggtggctccgccttccgcagaaagtcagaggccgaggagatggaagaacaggtgttcaagggggaccc

SEQ ID NO: 11911 - DNA, 201 bp, Homo sapiens
ggcacctttctccccataaaaaactggcaagccaatctgtccgtcccttcgttcctttcttcgttcgttcgttccttccttccttccttccttccttccttctccttgcttccttccgtgttagttgagcacatactaggccctgcagaggatgcgaagatacaacacaaaatgaaactctgatcttgctgcaaggagctt

SEQ ID NO: 11912 - DNA, 201 bp, Homo sapiens
gcacctttctccccataaaaaactggcaagccaatctgtccgtcccttcgttcctttcttcgttcgttcgttccttccttccttccttccttccttccttctccttgcttccttccgtgttagttgagcacatactaggccctgcagaggatgcgaagatacaacacaaaatgaaactctgatcttgctgcaaggagctta

SEQ ID NO: 11913 - DNA, 201 bp, Homo sapiens
cacctttctccccataaaaaactggcaagccaatctgtccgtcccttcgttcctttcttcgttcgttcgttccttccttccttccttccttccttccttctccttgcttccttccgtgttagttgagcacatactaggccctgcagaggatgcgaagatacaacacaaaatgaaactctgatcttgctgcaaggagcttac

SEQ ID NO: 11914 - DNA, 201 bp, Homo sapiens
gggaggatcacttgagcccaggagtttgaggctgcagtgaactatgattctgccattgcactccagcctgggtgacagacagagaccatgtctctaaaaacaaacaaacaatcacaaagccaagtccagtttgttgtctgggaaagggctcagctctggcccaccagcagctgcccctgtggcagtgggagcatgagtgcc

SEQ ID NO: 11915 - DNA, 201 bp, Homo sapiens
tgggctcaagtgatcctcctgcttcagcctcctgagtagttgggactataagcacgtgccaccatgtctggctaatttttaaaattttttttgtaaagacrgggtctcactatgttacccacattagtctcgaactcctggcctcaatcaatccgcctgcctccggctcccacattgctgggattgcaggcatgagccatg

SEQ ID NO: 11916 - DNA, 201 bp, Homo sapiens
atacaatattatggaaatggtgtcattgtgcgatagttgttgtagctcccactaccatgttggaaccagtatcttccatctcactcaaatgaacttatgcyttacatgtttaaacgtctctatccaaatggataaagattcattttccccaaacaatcccttggactttttagtagaagagcattgaatggaagatctggt

SEQ ID NO: 11917 - DNA, 201 bp, Homo sapiens
agttctatttctgcaaacaaaaactgtgtgacctaggtcctagggtatgtccttcctttatccatccatccatccaaccaaccatccaaccatccatccactcatccatccatccatccatccatccatccatccatccatccatccatccggctgacatttactgaggctcatctttttcctgggcaagatttcttacct

SEQ ID NO: 11918 - DNA, 201 bp, Homo sapiens; identical to SEQ ID NO: 1495

SEQ ID NO: 11919 - DNA, 201 bp, Homo sapiens
gttctatttctgcaaacaaaaactgtgtgacctaggtcctagggtatgtccttcctttatccatccatccatccaaccaaccatccaaccatccatccactcatccatccatccatccatccatccatccatccatccatccatccatccggctgacatttactgaggctcatctttttcctgggcaagatttcttacctg

SEQ ID NO: 11920 - DNA, 201 bp, Homo sapiens
tctatttctgcaaacaaaaactgtgtgacctaggtcctagggtatgtccttcctttatccatccatccatccaaccaaccatccaaccatccatccactcatccatccatccatccatccatccatccatccatccatccatccatccggctgacatttactgaggctcatctttttcctgggcaagatttcttacctgta

SEQ ID NO: 11921 - DNA, 201 bp, Homo sapiens
agaatatcttgggaagaacattctacgcagaagcaaaagtctcatcgttagttagaagccgaaaaggaaccagggctagatctttttagttagtcattttwttgatggatctgaccagtttccttgtcgttacaaccatccttgtttgtgtctcccatgctcacatgacatgtatatcattctagggtatttgtgtcatta

SEQ ID NO: 11922 - DNA, 201 bp, Homo sapiens
tatttctgcaaacaaaaactgtgtgacctaggtcctagggtatgtccttcctttatccatccatccatccaaccaaccatccaaccatccatccactcatccatccatccatccatccatccatccatccatccatccatccatccggctgacatttactgaggctcatctttttcctgggcaagatttcttacctgtaaa

SEQ ID NO: 11923 - DNA, 201 bp, Homo sapiens
cagaagcaaaagtctcatcgttagttagaagccgaaaaggaaccagggctagatctttttagttagtcattttattgatggatctgaccagtttccttgtygttacaaccatccttgtttgtgtctcccatgctcacatgacatgtatatcattctagggtatttgtgtcattaactttgttaatgactttgataagttac

SEQ ID NO: 11924 - DNA, 201 bp, Homo sapiens
agttctaatttccccacaatgtcacacttgaaaatcttatgccaaccgaataaatgtgaaattgtgtctcatctactgtatttaatctacctatcctgackgctagtgatgttcagcatccccatgtacttattgaccactagacgtttcctcttctgtactgtgcctgctcaccacctttccctgttttttcctactgag

SEQ ID NO: 11925 - DNA, 201 bp, Homo sapiens
aattgttcttacattagtttcagagttgccagataaaatagaggacattttgttaaatttgaatttcagataaacaatgaataattatttagtaggagtaygtcctcaatattgcaattatttgtaattttctgaaattcaaatttaactgggtctcctgtatttttatgtgctaaatctggcaacccaaattagcttctg

SEQ ID NO: 11926 - DNA, 201 bp, Homo sapiens
ttggctaatttgtctatttctgttttaatcattatagtcttataataaagggttcatcacatatgacaagcaatctcctcctcttcttcctccttttttcktcttcaaatattgcctccattatgtttggccctttctttgccccatgtgaaaagctctgctgggctttcgactgaaattgcatctttccatttgtaaata

SEQ ID NO: 11927 - DNA, 201 bp, Homo sapiens
ccctgaaaatggtcaaagtcccaggggtcttgcatcctctgcctactctggttgatctgtggccacaccagtcaaaggaagcagctggaggtgtgtactgkgggggagactgactagagaggcccgcccggccgcaggcctttcttccaggagtggcctccatgtttgcagaagcctgaggcctgggaaactagggggagg

SEQ ID NO: 11928 - DNA, 201 bp, Homo sapiens
tgtgaaaagctctgctgggctttcgactgaaattgcatctttccatttgtaaatatagttgatctttctattctggtctttttgtgtccttcagtaaagaytttgtgtgttttattagatttacttttcccttgtagttttattttttattgctacgggaaatgggaccttttttacctatggcattttctttctttcttt

SEQ ID NO: 11929 - DNA, 201 bp, Homo sapiens
catacagtaactctgggacacaaatcttaagattaatctctatgagtgtttatatgtgtacccacccatgaaattgtgatccaaatcaaaatacagaatgwttccagtgccctagaaggttcctcatgaccctgtccagtcaggacccctgctgcaagtgtaactaccatccagacttccattgctgtgggttagtgttgc

SEQ ID NO: 11930 - DNA, 201 bp, Homo sapiens
tgcaaagatcatgagatgactaaaaatcaaatacagagatgctggaaagtgattcttcctcgatgtcattcgcttgaagttcttagggcgtgagtagaggrtcaggaaccagggcgaatgaaaggaaccttctcaagagtttagcacccagcagaggacaggctgaggcctgctgctcaccagcccttgtcagctgtggag

SEQ ID NO: 11931 - DNA, 201 bp, Homo sapiens
agtaaccatcctcagcggttttatttctgaaatgttacatgcatatacatacagaagctcttcctctaccttttagacataaatggtagcatactatattscctgaatccttgtttctttatcgttatttttccttcttaccaatatatcttggagaacgttccctatgagcacacccaggtccacaattattcttttcaa

SEQ ID NO: 11932 - DNA, 201 bp, Homo sapiens
ggaaatgtagactttatttttgggaggccatgtggccagctaaaaattggaggttcgattacaaaggaagaaggggagaatgggtattggggacaaccagyagtctctgttgcaacaaccataatcaatggcatgaggatcctggagaaactctgcccctgcctgagaccaaaaccatgacttcctaatcacaaagttggc

SEQ ID NO: 11933 - DNA, 201 bp, Homo sapiens
tctcagggcagtgttttgggggctaccttcctaaggtgggtggggcgatgggacagtctcagaacagcctcaacccagaacagccacatttttagctgttytatatattgggtttctacttaagatttctttcgaacaaagcctcccttactgaaaactcactgccccagagggtctctgtaaaccttctagtagtgacac

SEQ ID NO: 11934 - DNA, 201 bp, Homo sapiens
aggaaccaaggcttccagcaaggacatagcatgacaacacgacaaagccacacagtggggaaacatgatgcctccagagcatggtaaacagtgcaagtcarctgacgtcaggagttgaaaggcgttgcctttcctgtggtccaagagccccctgccatatctgcactccagctagtcggaaagggaaaagggaagggcaca

SEQ ID NO: 11935 - DNA, 201 bp, Homo sapiens
tctcagagcctggcagcctgcagctcggaaggaggcctttaaatgggagaaggtgctggaaaatatggtaatacataaataagctaaatttatcccctttstcagcacccagcaattgctgtgcttaacacttaactttctaccagcatagatttgtttaaccagattagttgctgggagagagagaaaggagagagatag

SEQ ID NO: 11936 - DNA, 201 bp, Homo sapiens
catcctggccaacacggtgaaaccctgtctctactaaaaatacaaaaattagctgggcgtggtggtgcgtgcctgtagtcgtagctactcgggaggctgargcaggagaattgtgtgaacccgggaggcggcggttgcagtaaaccaatattgcaccactgcactccagcctggcaacacagcaagactccgtctcaaaaa

SEQ ID NO: 11937 - DNA, 201 bp, Homo sapiens
tatgcgtgcctttgacctagcatcctcacttctaggaatttatcctaaggaaaataagtatatggataaagaagctagcatgagattgttcattgcatcgytatttagaaaagcaatgaaacaaactaaatagccaaccactcttggtttcctgatcaataaataatggtataaccttacaacagctttccataccgcttt

SEQ ID NO: 11938 - DNA, 201 bp, Homo sapiens
tgctgccctcccttgaaggtaaacactgtttacctctgttggcacatggtaaggctaacctcactaaaaccgtagggcctttctgcctcccaggagcaccytcccctgtaggagggtgacaattacgatgctgcattgctcagggaggtccctgctacacatatgcaggtgtgattctgaaggttcgaaaaaaaaaaaggc

SEQ ID NO: 11939 - DNA, 201 bp, Homo sapiens
tgcgtctgtaaaatggtgctgaagcttttcttactcacctccaggactggggtggaataatcggtaaaccataaaacacaggaggagtagggcatccttarttttggcttgtccccagattgccatgtgactttgggtaaatcacttaacctctctgtgtctcaggtgctctatttataaataggcgagtaaggcacactg

SEQ ID NO: 11940 - DNA, 201 bp, Homo sapiens
ttcatcccctcccaccctgcctgcacccctcttgtggagccacggtgcccatgctcacctccaccatgcccctgtcaccccactgcaccgtcacccacttrctcactccctctcatagggcactcccaaaggtgggcctctcagcctcctttgcttccagggcctggcccagggctgacacacattaatggttgttgaatc

SEQ ID NO: 11941 - DNA, 201 bp, Homo sapiens
ttccagggcctggcccagggctgacacacattaatggttgttgaatcccactggattcatgaaagttcagcatcagaaggaaccccgaagctatggaggaycccctcctgctttaaagctgggacatcagggccagatggaccaagcaggttaccaaggacccaattagtgaaggccaggccaggaactgaactcggagct

SEQ ID NO: 11942 - DNA, 201 bp, Homo sapiens
tgagaactctggccccaagtgggcatttctcactctgcccccacagaggtacatcgatgggggcttcacgggcatgcagccctgtgccttctggaccgacrccatcaccatctccaccttcagtgggcagcaggacatctgtccccgggactgcccggccatcttccacgacttccgcatgttcaactgctccttccagtt

SEQ ID NO: 11943 - DNA, 201 bp, Homo sapiens
gtacaaacatctaatgagtgaggaagccaccatatggccatataattctcctcttgattgagaagttcccacctctgcttttgggtacagccaccagcatygggaacgaagatcactccacagcagatacaacatgcttccgaggtcaggaccagttagtggagtagtcaggtcaggagcaggaggaacagaccccgaagt

SEQ ID NO: 11944 - DNA, 201 bp, Homo sapiens
gcccccaccccacccacaagctgtgtgacctccggataattgcttcccctctctaaggcttggtttcctaatctgtaaaaaaaagggggtttagatcctarctcctgacacctactaactgtgtgatattgagcaggtaattaatctcctggggcctcagtttcctcatctgtaaaaggggccttatggttttattttgaa

SEQ ID NO: 11945 - DNA, 201 bp, Homo sapiens
acatagcatgacaacacgacaaagccacacagtggggaaacatgatgcctccagagcatggtaaacagtgcaagtcaactgacgtcaggagttgaaaggckttgcctttcctgtggtccaagagccccctgccatatctgcactccagctagtcggaaagggaaaagggaagggcacagtcctttagagcaggacttggag

SEQ ID NO: 11946 - DNA, 201 bp, Homo sapiens
cacccacccactatttttgagacaggttctcactctgtcacccaagctggagcgtagtggcacgatcatggctcactgaagcttcagcttcccaggctcargcaaccctttcacctttctcaatgagtcttacagccacagtgaccttctcagaaccagcctcagctgattacctcccctgcctaaaagtcatgctacaat

SEQ ID NO: 11947 - DNA, 201 bp, Homo sapiens
accagattagttgctgggagagagagaaaggagagagatagacagagacagagacaaagagacacagagaaagacagtcagagactttgaagacagacagmaacacacacacacacacacacacacacacacacacccctggagagaagtaagaagatgcagagataacagtatcctttggtgtgtggcttcagccagcag

SEQ ID NO: 11948 - DNA, 201 bp, Homo sapiens
tcagtaagtccagctccctcattttgcagataattgtatttagaccctgggagagaaagtgactagttggaggcagacctcacttaagccaatagtttccraactgtgttccagggatccttagggttctgcagatggggaggaaaagcaggggacagacacgtctgaagccccggctgcactagtacagccccgctgttg

SEQ ID NO: 11949 - DNA, 201 bp, Homo sapiens
accagcatcgggaacgaagatcactccacagcagatacaacatgcttccgaggtcaggaccagttagtggagtagtcaggtcaggagcaggaggaacagascccgaagtttgagtattttcatattttagatatagttttacatacagtaactctgggacacaaatcttaagattaatctctatgagtgtttatatgtgta

SEQ ID NO: 11950 - DNA, 201 bp, Homo sapiens
tagttgctgggagagagagaaaggagagagatagacagagacagagacaaagagacacagagaaagacagtcagagactttgaagacagacagaaacacacacacacacacacacacacacacacacacccctggagagaagtaagaagatgcagagataacagtatcctttggtgtgtggcttcagccagcagcaggaga

SEQ ID NO: 11951 - DNA, 201 bp, Homo sapiens
cacagtcacaggaaggaaagcccaaaagctgagaatatcatggtgtaaggctggaaagagcctaggtgctgggtgacattgctgagcagagaaaccaaccscagcagttattgggtgttagattttttgctctgtgaaaataccaccaccacccatgcttgtttaagccaatgatagttgggcatcttattccttgtagct

SEQ ID NO: 11952 - DNA, 201 bp, Homo sapiens
gttgctgggagagagagaaaggagagagatagacagagacagagacaaagagacacagagaaagacagtcagagactttgaagacagacagaaacacacacacacacacacacacacacacacacacccctggagagaagtaagaagatgcagagataacagtatcctttggtgtgtggcttcagccagcagcaggagagc

SEQ ID NO: 11953 - DNA, 201 bp, Homo sapiens
cctggattatcatttctctccttctggggcacaggatagccctgggcattgagagaggagcaagatccaagtagagactgcaaaaggatgttcaaagggakggcaggggcttgcctccgagtttaattgggcatcaaatgcctgcatcattgaaaacaatgacctagtgcccggacaatgaattgcaacttctttcccaac

SEQ ID NO: 11954 - DNA, 201 bp, Homo sapiens
tggacaaaggtcaggatgcctgggtccagctccatcattgcctagctctgggctctccggagccagcgacttccttcctcaatatcttgcttccgtcatgkgcaagacagcaggccgattcctggggttttcccagcttccgaattctaggtttccccatttgttggattcagagatgagttggagaaaccaccctagacc

SEQ ID NO: 11955 - DNA, 201 bp, Homo sapiens
tcccaggagcaccctcccctgtaggagggtgacaattacgatgctgcattgctcagggaggtccctgctacacatatgcaggtgtgattctgaaggttcgraaaaaaaaaaggctgtcaccatggcaacccaggcttgctcagcctcttcattcctgagatcagtccaagccccagggaaagaaggtggggtatggagtca

SEQ ID NO: 11956 - DNA, 201 bp, Homo sapiens
aagttcacctcctcctcatgattcaccggcccaaggccagcaccccttccctgcccacagactcagtgggcaccaagcaagtatcccagggcgtcacttaggaacaacttccaactgcaccagtgttttaataggaatctcatacaggaccccaaaaatgtcatctggcagtggacttccaggcagagtgacaagaagtta

SEQ ID NO: 11957 - DNA, 201 bp, Homo sapiens
aagttccatctgagtctcctcccctcaaatggtcctttaaacttcctcctagacctgcatcctggccttgctgctaactagctatgtgaccttgaacaagygcctcaagctctcccagcttcaatattctccccggtaaagcgagatgatgccagaagtgctgatagaaatattaactgaacccatccattcagacagttc

SEQ ID NO: 11958 - DNA, 201 bp, Homo sapiens
tcaaatggtcctttaaacttcctcctagacctgcatcctggccttgctgctaactagctatgtgaccttgaacaagtgcctcaagctctcccagcttcaayattctccccggtaaagcgagatgatgccagaagtgctgatagaaatattaactgaacccatccattcagacagttcatgtaccaaatcaaaggtcggcaa

SEQ ID NO: 11959 - DNA, 201 bp, Homo sapiens
caagctctcccagcttcaatattctccccggtaaagcgagatgatgccagaagtgctgatagaaatattaactgaacccatccattcagacagttcatgtmccaaatcaaaggtcggcaaactgcagcccacgggccaaatctagcctatggcttgtttttgtacagcctgtgagctaagaaagggttttccatttttaga

SEQ ID NO: 11960 - DNA, 201 bp, Homo sapiens
attctccccggtaaagcgagatgatgccagaagtgctgatagaaatattaactgaacccatccattcagacagttcatgtaccaaatcaaaggtcggcaarctgcagcccacgggccaaatctagcctatggcttgtttttgtacagcctgtgagctaagaaagggttttccatttttagagagttatgggggaaagaaaa

SEQ ID NO: 11961 - DNA, 201 bp, Homo sapiens
tatgctttcatttctcttgggtaaatacctagaaatggaatgacgggattgcatggtacattcatgtttaacatacatacacaaatattttaattgtggtaaaaaaacacgtaacaaattttaagcacacagttcagtagtgttaactatttcatattgttgtgcagcagatctctagaactttttcatcttgcaaaactg

SEQ ID NO: 11962 - DNA, 201 bp, Homo sapiens
aaagtttgctgggaaatccaatcctcagccagggttgagaaccacagcgcgggtgtgtccacctgcggagctgagcaggccaccatgttggaggaccgagrtcaggcccataatgaaccatctacttaatctctttgcctagggagagccctgctgaagactcaaactgggtgaataaggtcttcaagaagaacaagcaaa

SEQ ID NO: 11963 - DNA, 201 bp, Homo sapiens
tgctcccactctgccctgaatccccagacaacagcaagcctaaatctcatcagccagacggggctacgcagcacatgtaatgaaacctcctgccccatttytaataattcaatttcttcatagctattggaacaaaaggccctcttcacctcagaatattccaaatgccaaaacaaatagcagcgcacagaaaatgtgacc

SEQ ID NO: 11964 - DNA, 201 bp, Homo sapiens
tttaaatcttttgtatcaccgaagacaccattaaaatgttgactaaaaaactgcacaccgggagaggatatttccaatgcattcagcggagccaatattartaccaacgtctacatgttattaacaaaaagacaacactccccctgccctgcattcccaaatggaaaaggctaagaacaaggtattcagagaaaaggaaac

SEQ ID NO: 11965 - DNA, 201 bp, Homo sapiens
tttaattttaatgctgtcaaatgtatccatcttttcatcttacaacttgggttttgttttgttttgtttttgagactaggtctcatcctgtcacccacatyggagtgcagtggcacattcatggctcactgcagcctcgaactcctaggctcaagtgatcctcctgcatcagcctcctgagtagctgggaccacaggtgca

SEQ ID NO: 11966 - DNA, 201 bp, Homo sapiens
actgtaggagggcaaggcaggagaatcacttgagcccaggaatttgagaccagcctgggcgattgtgagattcccagctctacaagaaattaaacaattasctgagcatggtggcacacgcttatagccccagctacttgagatcaaggctgtagcgagccatgactgcaccactgtactctactctgggcaacagagtga

SEQ ID NO: 11967 - DNA, 201 bp, Homo sapiens
cggggtttcaccttgttagccaggatggtctcgatctcctgacctcatgatccacccgcctcggcctcccaaagtgctgggattacaggcgtgagccaccrtgcccggctggagaccctatttttaaaaaaataaaaaaatcagctgggtgcggtggcacatgcctgtaatcccagctactcaagaggctgaggtgagagg

SEQ ID NO: 11968 - DNA, 201 bp, Homo sapiens
ctcatgatccacccgcctcggcctcccaaagtgctgggattacaggcgtgagccaccatgcccggctggagaccctatttttaaaaaaataaaaaaatcakctgggtgcggtggcacatgcctgtaatcccagctactcaagaggctgaggtgagaggattgcctgagccaggcattccagggtgcagtgagctatcatgg

SEQ ID NO: 11969 - DNA, 201 bp, Homo sapiens
tgggaaatagagttagagaaattgatttcctgggcccctggtgagcagagcccctggccagaagcagcggctctttctgtttgatccagggtttcatacaratgctcatgttctctacaggcacttgatatgaaaaggttggaagcactttttctcttccttaaaatggggacaataatgcaacttatggggtcctcatga

SEQ ID NO: 11970 - DNA, 201 bp, Homo sapiens
agctagcacagcctgctgggcagggatctgtggcttttggagtacattttatgtccacttgaggagtgagtagcattggcagtgggggcattgcttgccakggctatcccctggcaggggctgggcaatcaagacagggagggcttgggggactcctgggtttcccttcgggcaggcacattctgcaacaagcccagaatg

SEQ ID NO: 11971 - DNA, 201 bp, Homo sapiens
taaggagaacgctaaaatctgctaattctgtatttaagctagataagtctccaacaaaagatcaatctgcacagagttaacaagagagacagctgtgaatrcatgactcactctagtttcatctttcgtttagtgagagagaattagattggtggcatgcattgaaaagactctcaattatgaagtctagtggggtttccc

SEQ ID NO: 11972 - DNA, 201 bp, Homo sapiens
aaacaatagtatacacgagctatctaacgctactgcttcacaccaaaatcacatgaaatacaaagagatacacacctagacacatcaaagtcaaactgttsggaaaaaaagagaaaatctgaaaagcagcttgagaaaaatgactcatcatgaacagggaacaatgcaattagcaactgacttctcatcagaaatgacaga

SEQ ID NO: 11973 - DNA, 201 bp, Homo sapiens
tgaagactttgggtcagaaaagctgaatgatattatttcttctcaaggagtccagattctggtgaggtttgatcttactcatccccaacatgatgggggawaacagacccgagaatcctcattatagctcactagtgctgaacaggagtatccactgaactagaataatgggaggtaacatgagaagatactggctcaata

SEQ ID NO: 11974 - DNA, 201 bp, Homo sapiens
gaaagaaaaataagaaagaaagaagaaagaaagaaagaaagaaagaaagaaagaaagaaagaaagaaagaaagaaagaaagaaagaaagaaagaaaggaaraacaagagagacccctaggtccacctttatttatcatttactttaaggtaaatgataagtaatgtcactaaaaaacatgaggaagtgtgatggctgcccc

SEQ ID NO: 11975 - DNA, 201 bp, Homo sapiens
tgtagctccagtcattgtgatcagacatcctttataaaacatgtttttataaatgtgtatgtggaataagatgaggaggaaaaggagtgaggtcataattyagcatttctgcatcataagtgtgcttccttatcagggaagacatcaggtagttccgataattggacaagagtggatctccgataagagtggatcaaggtg

SEQ ID NO: 11976 - DNA, 201 bp, Homo sapiens
tgattcttaaaaaagattgcaaaattgataaacttttagctaaactgaccaagaaaaaagacagaaaacacaaattaacaatcaagaatctaagagcagcygtcattgctgacccatcagaaattaaaagaatgataagtgaatattttaaacaactttatgtcaacaaatcagacaacttagatggaatggaaaaaatcc

SEQ ID NO: 11977 - DNA, 201 bp, Homo sapiens
cttgaacccaggaggcggaggttgcagtgagccgagatcgtgccactgcactccagcctgggtgacagaacgagactttctcaaaaataaaaataaaaatwaattaattaaacaatagtatacacgagctatctaacgctactgcttcacaccaaaatcacatgaaatacaaagagatacacacctagacacatcaaagtc

SEQ ID NO: 11978 - DNA, 201 bp, Homo sapiens
agtgagccgagatcgtgccactgcactccagcctgggtgacagaacgagactttctcaaaaataaaaataaaaattaattaattaaacaatagtatacacragctatctaacgctactgcttcacaccaaaatcacatgaaatacaaagagatacacacctagacacatcaaagtcaaactgttgggaaaaaaagagaaaa

SEQ ID NO: 11979 - DNA, 201 bp, Homo sapiens
ataaacgtgttatcttccattctaattttgtttgaagacattagattatataaagcattaattattgtactatgttgttggatttataacaatagagagakatattataaaggagagaggaagaaacaaagtattgtagcaatatttctatattttcttagaattaagtcagtattacctcaggtaatgatattagatatt

SEQ ID NO: 11980 - DNA, 201 bp, Homo sapiens
cacgcccagccttctctctccatttttggcaaatcaaattcatctgtctcagactcctcatatacacccagattagagggaaatttaatctccctcctgtsttggtgggggctcaccccagctctcggtttgttgaagagtcttcagggggttcctgcaatccaatagaggaagagcctctggtctctagcctgacacacc

SEQ ID NO: 11981 - DNA, 201 bp, Homo sapiens
tgtgcatcgtgtctctccgctttgctgcaggatggcatttcaggacttcaaggcccactttgataaagtggagatctgcaacctcactcccgatgccctgraggaagacgcgatccacaaatgggaggtgacggtccatcagggaagctgggttcgcggctccacggctgggggctgccgcaatttcctgggtaggtaggc

SEQ ID NO: 11982 - DNA, 201 bp, Homo sapiens
ggcctgtctactatcctcccgggctctgactcaggatcctgtcccgattctgaggtgccccttcttcctcccctttcagccctcaggcccaccttgcatcmaggttgattctcaagaaagacttttacaacagcactctaactttcacgaattgtatttatgtcaatacataaatgtgttacctcccatggtgatgtttat

SEQ ID NO: 11983 - DNA, 201 bp, Homo sapiens
tactgcctagtggaactgtgggaaggcggccatcatcctccagacccaagaatggtggatccactggcagcttgcaccttgagcctggaaaagccacaggyactcaacaacccatgacagcagccaaagtcacagggacagagcttcccaaggccttgggatcccaccctttgtaccagtgttccctggatgtaggacatg

SEQ ID NO: 11984 - DNA, 201 bp, Homo sapiens
gagaaaatagcttttgaatcagtagactgagtaaagaggattgctgccaccaatgtggacgagcattattcagtttgctaaagatccaaataaaagaaaaygacaaaggaagggtgaattccctttccctacttgaactgggacatccatattcccctgctcttggacattggagctcctcgttctcaaacctttggactc

SEQ ID NO: 11985 - DNA, 201 bp, Homo sapiens
atcagacaacttagatggaatggaaaaaatcctagaaaaagataaattaccaaaactaccttcagagaatactgaaaatctgaatagacctatgcattagyccactgtcacagtctaataaagacatgcctgagactgggtaattgataaaggaaagagatttagttgacttacagttcagtatggctggggaggcctcag

SEQ ID NO: 11986 - DNA, 201 bp, Homo sapiens
tatcaacctataatattttggtcctgagaccaaatcctttggacagtgcctggagagagcctcaggccacagtcatgtttatctgaaatacagggcctacytccaggctcctctccaccctgtcctgtgcagagctacgcagtgcgctgaggggccagggcttcagaaagcccagagcatgtgacctggttggcagaggta

SEQ ID NO: 11987 - DNA, 201 bp, Homo sapiens
tgcggccttcacataatgattccttccaaagagttcagcatggaaaggggagagaaggagcaactttccagtggagacacctgactaacactaccttagcyaggtgatcaaggccagcatcagctgtggtaaggcatgtggacggcaggtactcttgatatcatgagatgagaggggagctttacctctccggtcttcctt

SEQ ID NO: 11988 - DNA, 201 bp, Homo sapiens
tctaggaaatgggggtggccctcaggacagataagctcctttgcaaatgtacagacatcttgcgaggagagatacacgggggagggaaggcagagcccacytaggccaaaacatcattgtgggctttaagtttcaaactaggcttttaaaagtcgacaacagttaaggctagtgttgtggtgtacacctgtagtcccagcc

SEQ ID NO: 11989 - DNA, 201 bp, Homo sapiens
ctatagggttaaagctaaaaaaatataaaaggcatatagaaaagtctccccacattcctctacccccatctactccacctacccccagaaaacagaaccaytattatgagtagatctttgtgtagtttccgagaaatttttatgcagatataaataaatattttttgccttctttctccacaaatgctggcatactctaca

SEQ ID NO: 11990 - DNA, 201 bp, Homo sapiens
gtgtttcctactctgaggcatgtttgttttactcacaatgatgatgcaattctccaattacctagcaactatactaagactctaaagaaaaaggcaggttyttccaatacatagataagtcccaggtggaaggacaagaccccagcctggagaggtgtttgtatcgggaggagaatgagaacgtaaatccctgaagctggg

SEQ ID NO: 11991 - DNA, 201 bp, Homo sapiens
aagggattctcctgcctcagcctcccaagtagctgggattacaagcatccgccaccacaccgggctaattttttgtatttttagtagagacagggtttcaygatgttggccagactggtcttgatctcctgacctcgggtgatcaaccctcctcggcctcccaaagtgctgggattacaggtgtgagccaccacacccagc

SEQ ID NO: 11992 - DNA, 201 bp, Homo sapiens
cagggctctacctctgacccggcgccagctgggctggcttccattccctccaggtgggtacgggcctgggagtggctcctgtggggtccggttgcttttgsgcaaggaggggcagtacaagggatgctggtcctacaagtgagatcctgagtgcccgtcttatcctgacaatttgtctcatgcatatagtcatatcacttc

SEQ ID NO: 11993 - DNA, 201 bp, Homo sapiens
agttagagaaattgatttcctgggcccctggtgagcagagcccctggccagaagcagcggctctttctgtttgatccagggtttcatacagatgctcatgktctctacaggcacttgatatgaaaaggttggaagcactttttctcttccttaaaatggggacaataatgcaacttatggggtcctcatgagggtcagctg

SEQ ID NO: 11994 - DNA, 201 bp, Homo sapiens
tctgcgtgcctccctcggggcttcaggcagcagtctaggttcacttcaggtttgtcaagacccctgcaattgagacacctctgatcgtcctatcacaggastgtagcttcaggtaaccccttcctcatggcctcccaagcaacatttcacaggaacaaatgtacatccaggatcgacacgcacatgcaggacactcacacg

SEQ ID NO: 11995 - DNA, 201 bp, Homo sapiens
tgcagaaggctgggggaggggaggggcagggaggatgggaaggaggcgggcatccgggaacagccctgccccaggagctagcacagcctgctgggcagggwtctgtggcttttggagtacattttatgtccacttgaggagtgagtagcattggcagtgggggcattgcttgccagggctatcccctggcaggggctgggc

SEQ ID NO: 11996 - DNA, 201 bp, Homo sapiens
ctcctgggtttcccttcgggcaggcacattctgcaacaagcccagaatgtctaagctggtgacagatgaggatgcagccgtgagaagttaaatggcccacsctgaaccctactgctgagcggggcaggctattcctgggactctattgaggcccactgacatggtcctggtttgcattgtccttctgggctcagctcagag

SEQ ID NO: 11997 - DNA, 201 bp, Homo sapiens
acaccactcccaggcatctaacccaggcccaccgcctagctgccccttccacacatgcgtccgcagaaccccctgtgactggcacgtgtgcacaccaattmccagaaacactgacccacagaggagtcggtcacacatccagacacctccccaatttatacccgatggctaatttgtgtttacttggagagtttctgagtt

SEQ ID NO: 11998 - DNA, 201 bp, Homo sapiens
aacccagctctctcctgtcctctacagcaagcccgccagttcctcttctcccttactctctcgactccactcagctatgagtgtgccccaccaccccactmaccctgatcttgccagggacgccaccgactctcactttgctcgatcagattatcttgatccatcaggagcccttgacgtgctggattgcgggggaccaca

SEQ ID NO: 11999 - DNA, 201 bp, Homo sapiens
ctggaattagtaccatcacagtaattgctgcatatgagcaggaggtagaaaccagagtttgagaggctacctgaggtcaggctagtggaaagaaggtctgrtgcagacggtgggagaagccgggcagaggaaactcggaaattcacagcaggaagctccacaaagaagagcgtccatgtgagtgatccattgccctgcccc

SEQ ID NO: 12000 - DNA, 201 bp, Homo sapiens
gaaaggggagagaaggagcaactttccagtggagacacctgactaacactaccttagccaggtgatcaaggccagcatcagctgtggtaaggcatgtggayggcaggtactcttgatatcatgagatgagaggggagctttacctctccggtcttccttccactaaccaatagccccactcttttttttattattatttac

SEQ ID NO: 12001 - DNA, 201 bp, Homo sapiens
atgtctatcaccacctgcataatatatgctttaggtcttggcaccaaaatattcgtgccctactacctttaaattaaacagtggctgggcatggtggctcrcgcctgtaatcccagcactttcagaggtcaaggcgagcagatcacgaggtcaggagttcgtgaccagcctggtcaatgtggtgaaaccccatctctgcta

SEQ ID NO: 12002 - DNA, 201 bp, Homo sapiens
taaaaaaataccatagactgagtggcttacaaagaacaggaatttatttctcacagttctagataccaggaagtccaagaagatgacacaggcagtacctrtatctgtggagggccctgtttctgatttatagatggatccttctcactctgtcctcacatggtagaaagagggcaaggcagctctctggggcctctttta

SEQ ID NO: 12003 - DNA, 201 bp, Homo sapiens
ttctggaattagtaccatcacagtaattgctgcatatgagcaggaggtagaaaccagagtttgagaggctacctgaggtcaggctagtggaaagaaggtckggtgcagacggtgggagaagccgggcagaggaaactcggaaattcacagcaggaagctccacaaagaagagcgtccatgtgagtgatccattgccctgcc

SEQ ID NO: 12004 - DNA, 201 bp, Homo sapiens
gatgcttcttttttatttttaaaaagtcgtatatgacatatcgataaataatcgtatatgataaaatgtatatgacataaattttaccatttttaagtgtkcagttgagtagcattaagtacatccatgttgttgtgcagctatcaccacgatctatctccagcactttttcatcttgcaaaactgaaattctgtccctat

SEQ ID NO: 12005 - DNA, 201 bp, Homo sapiens
gcatagagtcgcagggagccggggggtagcgggccatagggaaatcacaagcattgccaggttccctgcagacctctgtggcttgggcatcatttgcagtrggactcagcattacacggtgcacgtctcagcagcccgtgggaccgtggggctggacggccctcctcctcagcaccaccttcttgtcaaacacagctgtgc

SEQ ID NO: 12006 - DNA, 201 bp, Homo sapiens
ccctgactctctcctctctctcttgccacccttgcaggctaaatgggagctatgaagctctgaagggaggcagcgccatcgaggccatggaagacttcacygggggtgtggcagagaccttccaaactaaagaggcccccgagaacttctatgagattctagagaaggctttgaagagaggctccctgctgggctgcttca

SEQ ID NO: 12007 - DNA, 201 bp, Homo sapiens
tctgccccttggtgagtgccccccacatcaggatgcaagcaaggcaacagaaactgtgtgccatctagtttctaaacataaaaaagatttattggggtcayttaaaaaggccaaaaatggttggcagaacagctcaccaaaaaaaaactgtatagatggtgttatggttagttttatgtgtcaacttgattgggccaaggg

SEQ ID NO: 12008 - DNA, 201 bp, Homo sapiens
aagcccacagaggtcacagagctcacagctgggatagccctggactcctagcccagtgcctgagtgagcacaggaatcctcagtgtgtggctgatgtccarctttgtggccgggtgtggcctgtgtttctggccagagattggtgctgagtgcagctcaggaggcaggacctctccccggcggaggagatttaccaaagat

SEQ ID NO: 12009 - DNA, 201 bp, Homo sapiens
tcccaggcatctaacccaggcccaccgcctagctgccccttccacacatgcgtccgcagaaccccctgtgactggcacgtgtgcacaccaattcccagaarcactgacccacagaggagtcggtcacacatccagacacctccccaatttatacccgatggctaatttgtgtttacttggagagtttctgagttttttcct

SEQ ID NO: 12010 - DNA, 201 bp, Homo sapiens
acacacttggaacagcatcaaggcatgctgttatctgcagggggtgggggtaggggtggagctgggtgagtgtgaggggatggagcatggcgagagggagrttggattgctggatcaagagcgactgcagtatggggtccctgagaacccaagaggcacagcgttccccctgcagtgagccgagatggtgccacttcactc

SEQ ID NO: 12011 - DNA, 201 bp, Homo sapiens
tccagacacctccccaatttatacccgatggctaatttgtgtttacttggagagtttctgagttttttccttttgtatttttctcctcattgggtgcgatytggtttaaaacaaaaacaaaaacagacctctcctgaacaaaacaaccaattgcaagataggagctgggaggcggtggcagctgcaggcacagttggtacg

SEQ ID NO: 12012 - DNA, 201 bp, Homo sapiens
gggtgggggtaggggtggagctgggtgagtgtgaggggatggagcatggcgagagggaggttggattgctggatcaagagcgactgcagtatggggtcccwgagaacccaagaggcacagcgttccccctgcagtgagccgagatggtgccacttcactccagcctgctcctcccatagtgccctctgctctgcaccaccc

SEQ ID NO: 12013 - DNA, 201 bp, Homo sapiens
caccgagtaggcattccttgaccttccaccccagacagtgtcaccttctcctgactcacaggccaccactcagggccagcccgtttcttctgtccctgaarcctgcaatctgataagcagaggtactctcaagccctgtcaccaatagcacagaagtgtttcaaaggcaaagagagtgagcaggtcacatgtagctcaggg

SEQ ID NO: 12014 - DNA, 201 bp, Homo sapiens
gcttccacccaagacgaaaaggaagacaaaagggagaccgacttcttttggaaggcccagtccaactgtggcctctgcggcccctagagggtagctccccsgggctggctgtcacccatttactgccatcagcgatgcctttcaggcacgctccttctcaaggcttctgctctccaccctttagaaccttttccttcggtt

SEQ ID NO: 12015 - DNA, 201 bp, Homo sapiens
accgagtaggcattccttgaccttccaccccagacagtgtcaccttctcctgactcacaggccaccactcagggccagcccgtttcttctgtccctgaagyctgcaatctgataagcagaggtactctcaagccctgtcaccaatagcacagaagtgtttcaaaggcaaagagagtgagcaggtcacatgtagctcaggga

SEQ ID NO: 12016 - DNA, 201 bp, Homo sapiens
ctgccagtttgctcactctcccttgctcatgttgtcccgtggttcccatgacactcccccagactccaataagtacaaaactggccagttaccggggccaytgtagcaatgacgggggtgggagaccatgggtctgagtgtcagaggtatgggagaaggattccagggggtttcaatcaccctctccccagaggatcccag

SEQ ID NO: 12017 - DNA, 201 bp, Homo sapiens
ccttgctggaaaaagcctacgccaagtgagtgacagcttccccagctcaggcagcctcccgacaggagtctctacactagtctttgtagtgagcatctaarggctgggaaaaaatcagggctctgggtttgcaggtgaggctcggcaggacccaaccctctcagggctcaagcggggttggaggtggttttcctgtcgtag

SEQ ID NO: 12018 - DNA, 201 bp, Homo sapiens
gggacaaagggcactgtttccaagtccagtgggtgggacccaagcccacctctgccccttggtgagtgccccccacatcaggatgcaagcaaggcaacagmaactgtgtgccatctagtttctaaacataaaaaagatttattggggtcacttaaaaaggccaaaaatggttggcagaacagctcaccaaaaaaaaactgt

SEQ ID NO: 12019 - DNA, 201 bp, Homo sapiens
ttggagctcctcgttctcaaacctttggactcaaacttggacttacatcatcaaccccccaattctcaggcctttggactcaaactgaatgataccaccarctttcctggttctccagtttgcaaatggcagattgtgagatttcttggcgtccgtaactatgagagccaatttcaaacgtatgaaataacctcattgaag

SEQ ID NO: 12020 - DNA, 201 bp, Homo sapiens
actgatcctgggggacacccagactccacacagcaccaccctgacttcaagggagctgttggttaggaggagagatccttgaggggcacaaggggaagagwaagaaagaattgaatgaaagaggaggacaagaagccaaaggtatcactctgccagactcaagctcagcaaagcccagcagcctgccttgcccactccatg

SEQ ID NO: 12021 - DNA, 201 bp, Homo sapiens
tcctccctgttctacagtgagaggccgcagatcccctttgtgtggaaacgaccaggggtgagtggggcgagcaggggaaggagcatagatgaggccgaggytcagcagcccccgcaggaagtggaaacaggggtgctggggaggggccggctacgctcagtgcaactgaggtgcatcatcccagtctaccgtggaaagctt

SEQ ID NO: 12022 - DNA, 201 bp, Homo sapiens
gctgacctaagtaactttggaaatcagtggagtctgtaagattaaaggcaaaagaaactgtacgtgagtgctatgctctagttgctaaaattgtttcttgwaggagtacaaatgaaaaattgatctaattatacatgtatattgagctgaacaatcgagtgaacggatggtggatggcgggagccgagtttctcactgttg

SEQ ID NO: 12023 - DNA, 201 bp, Homo sapiens
agtacttagaaggtgcagatgcacctggtcttctgtagccacccaccttttgagtgacatcctctgaatgcgtggggagtaaagaacactgaagggagacyctgcccttcctcctcactggagccaaggtgtgagacgccgttggactctttgggattctttagaatgttagctatttgtgttggctcctttgtcctcctt

SEQ ID NO: 12024 - DNA, 201 bp, Homo sapiens
gcaacctctgcctcccaggttcaagtgatactcctgcctcagcctcccaagcagctgagagtacaggcatgcgccaccacgcccgactcattttgtatctktagtagagatggggtttcaccgtgttggccaggctagtctcgaacccctgacctcagagaaaccacccaccttggcctcccaaagtgctggaattacagg

SEQ ID NO: 12025 - DNA, 201 bp, Homo sapiens
cagataaactttgaattttgaagtacaggggactttgagttagggggttacaagagaggagcaaaaactgcaggaagaaagctgagttctggaattagtamcatcacagtaattgctgcatatgagcaggaggtagaaaccagagtttgagaggctacctgaggtcaggctagtggaaagaaggtctggtgcagacggtgg

SEQ ID NO: 12026 - DNA, 201 bp, Homo sapiens
gtcatgtttcttttttgtggatcattttgtgcaagtttctttggctgttttttagcctccaaagccaactccacctgaccaggagacagaggaggagcagyggtttcgggctctgtttgaacaagtcgctggtgaggtaggacatgccccacttccatctccccaccaggctgagggcctggacctgcttcctagcaaagg

SEQ ID NO: 12027 - DNA, 201 bp, Homo sapiens
gataacttgcttcccgtcttccttccacaccacccagccagggcaagccctgggagatgcttcaggcttagttagaaaagctctgaaagcagggtgccccrgtggcctccctaggtccctgactctctcctctctctcttgccacccttgcaggctaaatgggagctatgaagctctgaagggaggcagcgccatcgaggc

SEQ ID NO: 12028 - DNA, 201 bp, Homo sapiens
acttgcttcatgtcactgctaaacatcctaggggagccccgtgcatagcccacgcacatggcctgcacctggggcagcagaaggggctggaggttgtgacygggccaggcatgtagctgggtctgatccagcaggggaggcttgacttagacggtgggtgtgactctgctctttccatgttttagaccagaagtgctgcag

SEQ ID NO: 12029 - DNA, 201 bp, Homo sapiens
cttctatgagattctagagaaggctttgaagagaggctccctgctgggctgcttcattgatgtaagttgctcatgggctcccattccaggcactatgctgrggctgcatagtgcattccaggcactatgctggggctgtaccaggtaccccagccacacccaaggaggggcataactcttgggggcagtgtttattcctgc

SEQ ID NO: 12030 - DNA, 201 bp, Homo sapiens
gggggtgtggcagagaccttccaaactaaagaggcccccgagaacttctatgagattctagagaaggctttgaagagaggctccctgctgggctgcttcaytgatgtaagttgctcatgggctcccattccaggcactatgctggggctgcatagtgcattccaggcactatgctggggctgtaccaggtaccccagccac

SEQ ID NO: 12031 - DNA, 201 bp, Homo sapiens
cctgccccctgcatcgcctgcggctttgatgggttgaccctgagtctttcagctgatgtcaatggttagtgctgggtggaatactcagcttgtaacttggwggacaaagcccaggtgccctaccttggaacccgtgtgtgattttcaaagctgtctatgggtagcttggtcagaggggaaaaaagcaacaggatcaacatt

SEQ ID NO: 12032 - DNA, 201 bp, Homo sapiens
tggagcagggcttggcctctgggggacccagtgaacctagagcagaggggatttaaaatggtgcagcaggctgcaggctataggctagaggaattgtattyggacaggggagaagggaaaacagcatcatgctattccgatgcttacgggagtaccaccgtgcttccacccaagacgaaaaggaagacaaaagggagaccg

SEQ ID NO: 12033 - DNA, 201 bp, Homo sapiens
ttatcatacacatatatattgatctatacttgggttatcatacacatatgtatttccttgctttgtcagtgagaggaactagaagcaatgacaatcctgtrgcaacaagcacacctatgtctcaagtcttggtttctaagatcattcttcaatcaaaggaactggggcttcttggagataaggctgattctaggactgggg

SEQ ID NO: 12034 - DNA, 201 bp, Homo sapiens
ttcccagccagcaattcctccctgttctacagtgagaggccgcagatcccctttgtgtggaaacgaccaggggtgagtggggcgagcaggggaaggagcayagatgaggccgaggttcagcagcccccgcaggaagtggaaacaggggtgctggggaggggccggctacgctcagtgcaactgaggtgcatcatcccagtc

SEQ ID NO: 12035 - DNA, 201 bp, Homo sapiens
cttatagtgccagaaaatgagaacacatgcaagacacacacacacacacacacacacacacacacacacacacacacacaaatgaggttatgccaaaaggrcacaagagcatactgaaggagctccaaacagccaaagctagaagaattcaaccaacgaaatagacaaagcagtactggattatgaacccaagtagaagct

SEQ ID NO: 12036 - DNA, 201 bp, Homo sapiens
cacacacaaatgaggttatgccaaaagggcacaagagcatactgaaggagctccaaacagccaaagctagaagaattcaaccaacgaaatagacaaagcastactggattatgaacccaagtagaagctgggtgcagtgactcacacctgtaatcccagcactttgggaggccgaagtaggtggatcacctgaggtcagga

SEQ ID NO: 12037 - DNA, 201 bp, Homo sapiens
aaatagacaaagcagtactggattatgaacccaagtagaagctgggtgcagtgactcacacctgtaatcccagcactttgggaggccgaagtaggtggatyacctgaggtcaggagttcgagaccagcctggccaacatgatgaaactcagtctctactaaaaatacacaaattagccaggcatggtggtgcatgcttgta

SEQ ID NO: 12038 - DNA, 201 bp, Homo sapiens
agttcgagaccagcctggccaacatgatgaaactcagtctctactaaaaatacacaaattagccaggcatggtggtgcatgcttgtaatcccaactactcrggaggctaaggcagcagaaccacttgaacccaggaggtagaggttgcagtaagccgagatcatgccactgcactccagcctgggcaacagagcaagactc

SEQ ID NO: 12039 - DNA, 201 bp, Homo sapiens
aggacagtcttataaactgtcacagccacaaaaagcctaaggatatgtgaggactcagtgcagtgtggggtcctgggtgggattctggaacagaaaaaggrcattaggtaaaaactaaagaagcccaaataagctattgtattaagtctgttttcacactgctgataaaaacataccctagactgggcaatttacaaaaga

SEQ ID NO: 12040 - DNA, 201 bp, Homo sapiens
agctttcctggttctccagtttgcaaatggcagattgtgagatttcttggcgtccgtaactatgagagccaatttcaaacgtatgaaataacctcattgawggggttggagagaaaggtgctgacctaagtaactttggaaatcagtggagtctgtaagattaaaggcaaaagaaactgtacgtgagtgctatgctctagt

SEQ ID NO: 12041 - DNA, 201 bp, Homo sapiens
gaacctcacagcagtcctagaagggagagcacaactctctcccccattttgcatataagaaaatgaaggcactagcgacttggtcattcagatggtaagtygtagaaccaggatttgaacctgcggccactcaggcaccagagctgctgctctataccaccacaccacactgcctcccttgcaggaaggtcaggatctttg

SEQ ID NO: 12042 - DNA, 201 bp, Homo sapiens
ctgtttgaggatgcagacttcccagccagcaattcctccctgttctacagtgagaggccgcagatcccctttgtgtggaaacgaccaggggtgagtggggygagcaggggaaggagcatagatgaggccgaggttcagcagcccccgcaggaagtggaaacaggggtgctggggaggggccggctacgctcagtgcaactg

SEQ ID NO: 12043 - DNA, 201 bp, Homo sapiens
aataaataaataaataaaaaataaaataaaataaaataaaaataaataaataaaacacaagttttaaccaagcatggtggtgtgtgtctggagtctgaggyaggaggatcccttgagcccaggagtttgaggccgcagtgaactatgatcgtgtcactgctctccaggctgggtgacagatcaagaccctgtctctaataa

SEQ ID NO: 12044 - DNA, 201 bp, Homo sapiens
aactttttgttgttttttatggactgctatgacactatgtattttttttaatcaattctagttttctgtttcctcttagattagccttggggtctgttttytgctaatgaattagccagttcctctgcactttcaggtttgtgacgcagagctgtgtgtcctgttgttatattcttcttttcgtctctgggatgtatgtga

SEQ ID NO: 12045 - DNA, 201 bp, Homo sapiens
aaagggagaccgacttcttttggaaggcccagtccaactgtggcctctgcggcccctagagggtagctcccccgggctggctgtcacccatttactgccaycagcgatgcctttcaggcacgctccttctcaaggcttctgctctccaccctttagaaccttttccttcggtttgatgctgacaagtccggcaccatgtct

SEQ ID NO: 12046 - DNA, 201 bp, Homo sapiens
cgaagagttgatgttacttgaatttttacacatccaaaatataatttatgccaaatgcatgaggataaaacattctgactgctacagtttctggttagtcrataactagaagtcttttactttcactctctctcctctaaaacccttctcaaatgcattggcccttgtccctgctcccaggcagagcctgagggcacacag

SEQ ID NO: 12047 - DNA, 201 bp, Homo sapiens
ggacacaagatgagaggagaagcagggtgctgagaagcctgaggaagacaattcaaagcagaggtctctcggggaaggcggcgcagcttgagctccccacrtggcgtccgcccagacactgctggaaccttccacctccagcccaggcccctcctcagtcctggtgcctggaaaagtgggaagaggtgggaaaaatccttc

SEQ ID NO: 12048 - DNA, 201 bp, Homo sapiens
ggcccggcttcctccctccctccctccctccctccctttgtttaggtctgtgctcctctgcttcccccagagacgcctcccctgctgactgctgtagctasccttgccccatcccaccccttccctctccatcctcgctcttttctctcctggtttatggtttgtctcttcctcaaatgcaatttgcaaaactctcctgaa

SEQ ID NO: 12049 - DNA, 201 bp, Homo sapiens
acaactcacttactttttgtcaaagttagaattctccaagataaaagctggacgcacaaaccagcatggagggcatctttgtctcccccttcagaagtctyccctcctgggaccagggccaccaaggcctgcccagcgactctagagtcccagatctctgctccaaggggctgtcttccttagtattatctcctctggcat

SEQ ID NO: 12050 - DNA, 201 bp, Homo sapiens
gcggacaggaacaagatgatttaatgaataagtgaatgatttaatgaatgagtgaatggatgatgccctcactcttgccctcctgtgcatcgtgtctctcmgctttgctgcaggatggcatttcaggacttcaaggcccactttgataaagtggagatctgcaacctcactcccgatgccctggaggaagacgcgatccac

SEQ ID NO: 12051 - DNA, 201 bp, Homo sapiens
ataaacaggcaaggcagggagattaggggaccacaggatcggatggagaaaatgggggctcatgtgactgcttaaagcacagcaggaaggtggctgagcgyagccctgggcgggacagagcatggtgaggggggaaggcagtggtgacctccctgctccaggtgctatctggagcatgctgggtcagacccagcaagacag

SEQ ID NO: 12052 - DNA, 201 bp, Homo sapiens
catccttagccagcagaatagtcttcttcacagaaaataacccaaagctgggggacccccatgctgaaattggatcagaatcaagatgcacaagactgccyagtggtgggggtggggagcttttgaagggacttgggggtcttcttgccactttgggatcccatccaagggaacagagttctgtttttgtgaactttccgg

SEQ ID NO: 12053 - DNA, 201 bp, Homo sapiens
attctccaagataaaagctggacgcacaaaccagcatggagggcatctttgtctcccccttcagaagtctcccctcctgggaccagggccaccaaggcctscccagcgactctagagtcccagatctctgctccaaggggctgtcttccttagtattatctcctctggcattgccccaaacgctgggtgaggccttcatcc

SEQ ID NO: 12054 - DNA, 201 bp, Homo sapiens
tactgtgttgctgtcgttcccacagactcattttcagaatctgttctgccttttcctttgtctgcaactgaagattgtccctttggtctggtcctcattcycgtacccctatctgtttcttatttaggggagttaggagctttacatcatatcttacagatttctgtaaaatcaggaacaaaagggctgaggatgagcatg

SEQ ID NO: 12055 - DNA, 201 bp, Homo sapiens
tgataacttgcttcccgtcttccttccacaccacccagccagggcaagccctgggagatgcttcaggcttagttagaaaagctctgaaagcagggtgcccyagtggcctccctaggtccctgactctctcctctctctcttgccacccttgcaggctaaatgggagctatgaagctctgaagggaggcagcgccatcgagg

SEQ ID NO: 12056 - DNA, 201 bp, Homo sapiens
gtgattttcaaagctgtctatgggtagcttggtcagaggggaaaaaagcaacaggatcaacatttacaaacagggcctggagctcccatgtagctgactcrcatcatttctgtctttttcctgggcaacagttctggcagcacagtgagtggctggacgtggtgatcgatgaccgcctgcccaccttcagggaccgcttgg

SEQ ID NO: 12057 - DNA, 201 bp, Homo sapiens
tgccgaccacaacgagttctggagcgccttgctggaaaaagcctacgccaagtgagtgacagcttccccagctcaggcagcctcccgacaggagtctctayactagtctttgtagtgagcatctaagggctgggaaaaaatcagggctctgggtttgcaggtgaggctcggcaggacccaaccctctcagggctcaagcgg

SEQ ID NO: 12058 - DNA, 201 bp, Homo sapiens
gacgtggtgtggggagaatcgcccctcatccccctcctctagccccaaacatcaggattctggccaaggctggcagccagcactgccgtgcaggctccagrgactctgtgctctgtgtctgacctgcctgctcctctgctggaattaggaagaagcagaaagaccctgggtggatttctgaacaatcctgtgaacacctcc

SEQ ID NO: 12059 - DNA, 201 bp, Homo sapiens
gctccacaggtccagctaataaagtccttctagtctcaccttctaaaagagccttcatgagaaaatgttcctcacgctacaggacgcagcttgtgcacacygcctcaggagggtgacatggggctgggcacacaggctcctggcttctttcctgctatttttgtcatgtttcttttttgtggatcattttgtgcaagtttc

SEQ ID NO: 12060 - DNA, 201 bp, Homo sapiens
aatataatttatgccaaatgcatgaggataaaacattctgactgctacagtttctggttagtcgataactagaagtcttttactttcactctctctcctcyaaaacccttctcaaatgcattggcccttgtccctgctcccaggcagagcctgagggcacacaggctcaagggtgattgaggtgaacagcaggaatcctca

SEQ ID NO: 12061 - DNA, 201 bp, Homo sapiens
cacctggcctgtatccttcccagctctctatctgctcgtacaaacaggcacacacttccacacacaaacatcaaggtcagttggtttgattttactgaaaygggatcttcctatctagttttctgaaatttgttttttttttttcatttcatgtactatgaaaaaaatagcagatagaagtctaatgatattttttaaaat

SEQ ID NO: 12062 - DNA, 201 bp, Homo sapiens
gcttgttcctgtgttaactgcagatacgagcaagtcccatggccctggggcgtaaggagcactgtgcttctctctcgctttcctttttctttctttctttytttttttttttttttttttgagacggagttttgttcttattgcccaggctggagtgcagtggtgcgatctcgtctcactgcaacctctgcctcccaggtt

SEQ ID NO: 12063 - DNA, 201 bp, Homo sapiens
tgtatccttcccagctctctatctgctcgtacaaacaggcacacacttccacacacaaacatcaaggtcagttggtttgattttactgaaacgggatcttyctatctagttttctgaaatttgttttttttttttcatttcatgtactatgaaaaaaatagcagatagaagtctaatgatattttttaaaattttctctat

SEQ ID NO: 12064 - DNA, 201 bp, Homo sapiens
tattgcccaggctggagtgcagtggtgcgatctcgtctcactgcaacctctgcctcccaggttcaagtgatactcctgcctcagcctcccaagcagctgaragtacaggcatgcgccaccacgcccgactcattttgtatctttagtagagatggggtttcaccgtgttggccaggctagtctcgaacccctgacctcaga

SEQ ID NO: 12065 - DNA, 201 bp, Homo sapiens
tgctcgtacaaacaggcacacacttccacacacaaacatcaaggtcagttggtttgattttactgaaacgggatcttcctatctagttttctgaaatttgttttttttttttcatttcatgtactatgaaaaaaatagcagatagaagtctaatgatattttttaaaattttctctatgcatacaaacacacacacttata

SEQ ID NO: 12066 - DNA, 201 bp, Homo sapiens
ccaatcaagtcttgcctgagctcatctctttcttgtaacagcttttaaaatacaacagcagggcacggtggctcacgcctgtaatcccagcactttgggargccaaggcgggtggatcacgaggtcaggagattgaaaccatcctggctaacacagtgaaaccccacccctgctaaaaatacaaaaaattagccaggggtg

SEQ ID NO: 12067 - DNA, 201 bp, Homo sapiens
agaataaaataaaacattgaaaaagacactctcactttctaaaaatcttgactcagaagtaaatgcgtcacggctcacattctactcccaaatggaaggartggggtgcagtcttggtcctgtgctgatgactgccagccatctctgcctcgggaaccatgagggtttaggttccccagatttgtggaacacatgcagggt

SEQ ID NO: 12068 - DNA, 201 bp, Homo sapiens
atttgtggaacacatgcagggtgcttgagagattcccaagctgtcaaattagaaattacagataaactttgaattttgaagtacaggggactttgagttarggggttacaagagaggagcaaaaactgcaggaagaaagctgagttctggaattagtaccatcacagtaattgctgcatatgagcaggaggtagaaaccag

SEQ ID NO: 12069 - DNA, 201 bp, Homo sapiens
aacactatcatttctcctacctgcaaagaaaaaaaaagcctctcttgacccactcaagtgaccaacccagctctctcctgtcctctacagcaagcccgccrgttcctcttctcccttactctctcgactccactcagctatgagtgtgccccaccaccccactcaccctgatcttgccagggacgccaccgactctcactt

SEQ ID NO: 12070 - DNA, 201 bp, Homo sapiens
cctcccataccatcagcctggaccaagccacccttgtctctcacttggacaccggcactaacttcctagctgcctctctgcttccacttgtgtccccaaartctgttctcaacacagcagccatggagcatgtgactcctctgtttactgccttctaaaagctctccatcttctcagagtcaaagccaaaatccctatacc

SEQ ID NO: 12071 - DNA, 201 bp, Homo sapiens
gagcaacacaggcttgaacttatatggggattttcttccatctctaccacccctgagacagcaagaccaactcctcctcctccttctcagcctactcaacrtgaagataataaggatgaagacctttacaatgacccagttccacttaataaatagtaaatgtatttcctcttccctatgattttcttgataacatttctt

SEQ ID NO: 12072 - DNA, 201 bp, Homo sapiens
tcaacacagcagccatggagcatgtgactcctctgtttactgccttctaaaagctctccatcttctcagagtcaaagccaaaatccctatacctatttgaygtactatgatctcttgatcttattccttacagacacctcgtgccttcctggtgttctgtgagcacctcaagcacctctctgcctcggggccttgctgtcc

SEQ ID NO: 12073 - DNA, 201 bp, Homo sapiens
ggtagcgggccatagggaaatcacaagcattgccaggttccctgcagacctctgtggcttgggcatcatttgcagtgggactcagcattacacggtgcacrtctcagcagcccgtgggaccgtggggctggacggccctcctcctcagcaccaccttcttgtcaaacacagctgtgcttggggagggtgggcagagcacaa

SEQ ID NO: 12074 - DNA, 201 bp, Homo sapiens
ttcttccatctctaccacccctgagacagcaagaccaactcctcctcctccttctcagcctactcaacatgaagataataaggatgaagacctttacaatkacccagttccacttaataaatagtaaatgtatttcctcttccctatgattttcttgataacatttcttttctctggcttatttattgtaagaatacagta

SEQ ID NO: 12075 - DNA, 201 bp, Homo sapiens
ccttcactcctctgcaggccccggcccagttaactcaccacccctgcagggtgagccagaacgtgcctcgctgccacaggattggctgttacctctcccgrgaccggcccggcttcctccctccctccctccctccctccctttgtttaggtctgtgctcctctgcttcccccagagacgcctcccctgctgactgctgta

SEQ ID NO: 12076 - DNA, 201 bp, Homo sapiens
tcatcccccaggaccaaagctttggccctggttatgccgggatattccatttccaggtaagagggagccctgggccagtgggtttacctctctggggcccrgcatgagggcaggtgcatttccacactgcctggtaaccctagaaaaaaatgtcatcagatctgtgtgacatatggtcctaaaccatgctaaagccacatt

SEQ ID NO: 12077 - DNA, 201 bp, Homo sapiens
acgcttaatcaaaaagcactggccagagtcatcccccaggaccaaagctttggccctggttatgccgggatattccatttccaggtaagagggagccctgrgccagtgggtttacctctctggggcccggcatgagggcaggtgcatttccacactgcctggtaaccctagaaaaaaatgtcatcagatctgtgtgacata

SEQ ID NO: 12078 - DNA, 201 bp, Homo sapiens
catggcgagagggaggttgagtcactgggacaggcaagcaactgcagcatggggtccctgaggacccaagaggcacggggctgggggaacaacactgcttyggcctctgcttcctcactccctctgaatggagtccagtggcctcaagcccctgcacctccgttcctctagagtcagacatgcctgtgatgtggggctcac

SEQ ID NO: 12079 - DNA, 201 bp, Homo sapiens
tgtgagcttatataaaaattcacatcatggccttttaactgtacccattaactcaagaccccttgtctccaaacctcaactttgactagttagagaatcayacagaaatcattataaagtgcttagaacatcagagttttcacgtggtgactaatacttttattgacttatttttattgatacataatatttgtacgtatt

SEQ ID NO: 12080 - DNA, 201 bp, Homo sapiens
gtactgcctagtggaactgtgggaaggcggccatcatcctccagacccaagaatggtggatccactggcagcttgcaccttgagcctggaaaagccacagktactcaacaacccatgacagcagccaaagtcacagggacagagcttcccaaggccttgggatcccaccctttgtaccagtgttccctggatgtaggacat

SEQ ID NO: 12081 - DNA, 201 bp, Homo sapiens
aggaaatcgtgaaaaacccagaattcattcttggaggggccaccaggactgatatctgccagggagagctgggtgagtgtaagtggatggagcatggcgaragggaggttgagtcactgggacaggcaagcaactgcagcatggggtccctgaggacccaagaggcacggggctgggggaacaacactgcttcggcctctg

SEQ ID NO: 12082 - DNA, 201 bp, Homo sapiens
ccaggaaatcgtgaaaaacccagaattcattcttggaggggccaccaggactgatatctgccagggagagctgggtgagtgtaagtggatggagcatggcragagggaggttgagtcactgggacaggcaagcaactgcagcatggggtccctgaggacccaagaggcacggggctgggggaacaacactgcttcggcctc

SEQ ID NO: 12083 - DNA, 201 bp, Homo sapiens
gcaggggaaggagcatagatgaggccgaggttcagcagcccccgcaggaagtggaaacaggggtgctggggaggggccggctacgctcagtgcaactgagktgcatcatcccagtctaccgtggaaagctttgcagtttggaggcagaaaataatgtacaggcctgggatgctctgcggtggggacccggggcatctggtt

SEQ ID NO: 12084 - DNA, 201 bp, Homo sapiens
acatgtatacacatgtgtgcgcacatgcattcacacacacccacactccactcatgtctcctcactggcacgcagggattactgagtccacctgcctcctrtgtgaatggccaacaaatcagtcttaggggctccacttatgggcgaggagggagcaaggttaaggaaaattggagctagaccctgaaactggatgggaga

SEQ ID NO: 12085 - DNA, 201 bp, Homo sapiens
tctatatttttagcctggtttttacctttttaacctttattttacttttaaaaaattttccatctccccacactttgcagtccccccactccttgcggacrggaacaagatgatttaatgaataagtgaatgatttaatgaatgagtgaatggatgatgccctcactcttgccctcctgtgcatcgtgtctctccgctttg

SEQ ID NO: 12086 - DNA, 201 bp, Homo sapiens
tgccatctcagctcactgcaacctccacctcccaggttcaagcaattctcctggctcatcctcccgagtagcaaggattacaggcacccaccaccacaccyggctaattttttttgtatttttagtagagacggggtttcaccatgttagccaggctggtctcgaactcctgaccttaggtgatccacccgcctcagcctc

SEQ ID NO: 12087 - DNA, 201 bp, Homo sapiens
catgattagctggaccataattttctttaccattcccccaacagagggcactaagtgctttccaaccttttttaatgtaaacaatgccaccatgaaatgarcaagctggtatacctttcacttttcggggtgcggctctatcatcaggataaagataaatttctagaagggaaacagctggatcagagtgggtgcattggt

SEQ ID NO: 12088 - DNA, 201 bp, Homo sapiens
tgaatggtctccaacagatatgtatctcctttgaagatgcaaagttcatggagagtgaatgtgtaatgcaactgcactgtttatgcgtctttggaggtgcygctattctacaaaacactttatcagttgcccttgttaaagtacattaaagaaataaggagtgactgctggcttaacttcttttagtttcataaatccaga

SEQ ID NO: 12089 - DNA, 201 bp, Homo sapiens
tgcactgtttatgcgtctttggaggtgctgctattctacaaaacactttatcagttgcccttgttaaagtacattaaagaaataaggagtgactgctggcytaacttcttttagtttcataaatccagaattcacaagttcttggtgatggctgatttagtttgaatatgtgtccccatcaaatctgaagttgaattgtaa

SEQ ID NO: 12090 - DNA, 201 bp, Homo sapiens
atgccctagcaaagaacttggctgaattgtgtccatgccctagggatctgtggaagtttgaacgtcatagtgatgatttagggtatctggaagaagaaatktctaagcagcaaagcattcaggatgtgacctggctgcttctaacaacctatactcagatatgggagcaaagatatgagttaaagctggaatatatacatt

SEQ ID NO: 12091 - DNA, 201 bp, Homo sapiens
tttgcagcctggctatatagcagagaaagaaaaagctttttcgagagaggaattcaagcaggctatggagcaaccacttgctagagatatttacataactraaaagagccaagtgctataaccaagacaatggggaaaaggcctcaaaggcattttagagacctttgcagcagcacctcctcccatcacaggccgagaggc

SEQ ID NO: 12092 - DNA, 201 bp, Homo sapiens
gtccttcattgtgcaaacaaagagacaaaagagatgccttgcaagttgaggcaagtcaggctcagaaggagaccatgaaattcagcagcatctgtgggagkggcagggggtgcagagaggataggggaaagggaggaatcagcagctcctgatcccctccatgtgccagactttgcaagtggctttgcttccacaaacccg

SEQ ID NO: 12093 - DNA, 201 bp, Homo sapiens
ccagagcttagtggtagaaacagactcttgccttcaacgattttaccagctatcaaaacagatgatgaagtaagtcattccagtccagggtggtaagaagyaagccagaggaagggcaggaagcatgaaaatccaatggccaggacctaacttaggcacgggtcaaggtcctttggcctcctcgtctgtaaggcagaaggg

SEQ ID NO: 12094 - DNA, 201 bp, Homo sapiens
aactttccagtggagacacctgactaacactaccttagccaggtgatcaaggccagcatcagctgtggtaaggcatgtggacggcaggtactcttgatatsatgagatgagaggggagctttacctctccggtcttccttccactaaccaatagccccactcttttttttattattatttacttttttttggagacagggt

SEQ ID NO: 12095 - DNA, 201 bp, Homo sapiens
cagtgctttcttaccaacaccaaacatcccaaacccccattccccaggcccagaggcttcaggacggacatgtgttagaagcactccacagcataacacayggctagcgcaaaaccctgactaaaatgaggtctatgtcagtgctactcaaacacacatgtgcataaagtcacctgggcatcctgggaaaaaaaacacaga

SEQ ID NO: 12096 - DNA, 201 bp, Homo sapiens
ttcttaccaacaccaaacatcccaaacccccattccccaggcccagaggcttcaggacggacatgtgttagaagcactccacagcataacacacggctagygcaaaaccctgactaaaatgaggtctatgtcagtgctactcaaacacacatgtgcataaagtcacctgggcatcctgggaaaaaaaacacagattcctca

SEQ ID NO: 12097 - DNA, 201 bp, Homo sapiens
cctatagtcccagctacttgggaggctgaggtaggaggattgcttgagcatgggaaattgaggctgcagtcagctgtggtcacaccactaatactccaatytggatgacagagcaagaccctgtatcaaaaaaaaaaaaaaaaaaaaaaaaaaagcctgagtctcagggcaaggtctgagactctccatttctaaccagct

SEQ ID NO: 12098 - DNA, 201 bp, Homo sapiens
gtgtctgtaacctcaataccttgggaatccaaggcgggaggatcacttgaggccaggagtttgagaccagcctgggcaacatagcgagacccccatctccmcaaaaaaaaaaaaaaaaattaaaaagtggctgggcgtggtgactcacgtctgtagtcccagttacttgggaggctgaggtgggaggattgcttgagccca

SEQ ID NO: 12099 - DNA, 201 bp, Homo sapiens
agcccctgcacctccgttcctctagagtcagacatgcctgtgatgtggggctcacagccccggagtttacagaggaaagtgacacccagcagcgttggtcrggctctcctacaccaccacagtagctaacacctgcacacatgaactcagtcacctgcgaggtactctccccagcacacattgcctcattccatcttcaca

SEQ ID NO: 12100 - DNA, 201 bp, Homo sapiens
tccacgagcgctctgcagacctcccgcctgccgggctgcctgcgcttctcaccaagcacacctcacagataggggcctcctgaaccttttaaagtggttcyctcccagggaaagcaaaatctggaaacatgtccaggctcaggcctgataaaaggatgaagtatacacagccaggaccatctcgggtcctatgtgagggag

SEQ ID NO: 12101 - DNA, 201 bp, Homo sapiens
cctggtgcctggaaaagtgggaagaggtgggaaaaatccttcactcctctgcaggccccggcccagttaactcaccacccctgcagggtgagccagaacgkgcctcgctgccacaggattggctgttacctctcccgagaccggcccggcttcctccctccctccctccctccctccctttgtttaggtctgtgctcctct

SEQ ID NO: 12102 - DNA, 201 bp, Homo sapiens
tggcaaagatagaccacagagagccatggtctgatgtgtgtggacccatgggcctgtgcggttagctaaggagcagaatgtgccagcctcccctgcagcaygtttcttagcatcgcctttctttatacattcacagtgcctctgtgggaggatgatgggctggggcaggtttgtgccttgtgtttgaggaaaggttcaatt

SEQ ID NO: 12103 - DNA, 201 bp, Homo sapiens
atgccaggtactgcctgtgggcaacctgagcagatggcaggtcttctctctgctgcccaggaggtgggcctctgagcccagttggtgattcttaaggtcayggcccttggagtggtggcaccagggttcagacccaggactcacttcctgacaccagggccctcattttaaaccactgtgaacattggtagaaacttttta

SEQ ID NO: 12104 - DNA, 201 bp, Homo sapiens
ccatcagcgatgcctttcaggcacgctccttctcaaggcttctgctctccaccctttagaaccttttccttcggtttgatgctgacaagtccggcaccatrtctacctatgaactacggactgcactgaaagctgcaggtaaagaaaagactggagtacaggtggctgactgcatgccaggtactgcctgtgggcaacctg

SEQ ID NO: 12105 - DNA, 201 bp, Homo sapiens
gaaagtgactgagagccaaggctggaataaaatttgtcttccactcatgcagcctccatgggtgatgggaggggcaggcgccatcccgactccctgacttygctgtgctgctggtgacatgtgagtagggttgaaggcaccgcatggccagcctgtcaggccaattatctgggtgtgagccacttaggataatggctccaa

SEQ ID NO: 12106 - DNA, 201 bp, Homo sapiens
gcagaggggatttaaaatggtgcagcaggctgcaggctataggctagaggaattgtattcggacaggggagaagggaaaacagcatcatgctattccgatrcttacgggagtaccaccgtgcttccacccaagacgaaaaggaagacaaaagggagaccgacttcttttggaaggcccagtccaactgtggcctctgcggc

SEQ ID NO: 12107 - DNA, 201 bp, Homo sapiens
aaacaattgtctccacttcaacaggacatggaggtgacagcagaggaacttgagtatgttttaaatgctgtgctgcaaaagagtaagtgccaaccccatcrgggtcctggggcacctatggagggacaagcgaccacactgcctgggtcccctccctgctcctccgagccgcagatctgcttcccagggctgatttgtagg

SEQ ID NO: 12108 - DNA, 201 bp, Homo sapiens
gagacaccaatttacactcccttcagcaagtaggggggtgttttactttttctttttgagatggagtctcgctcctcgcccaggctggagtgccgtggctsgatctcggctcactgcagcctctgactcccgggttcaagcaattctcctgcctcagcctcccaagtagctgggattacaggcacccccaccacgcctgac

SEQ ID NO: 12109 - DNA, 201 bp, Homo sapiens
atagaataatatatatatataatgcacttcggtgaaacaatatgagagatgtgtgcatatctctctttatatggtatagatacatgaaattttacctaagygcatctctgtaaaaagaaacactgagcagggtggcatgtgtctgtaacctcaataccttgggaatccaaggcgggaggatcacttgaggccaggagtttg

SEQ ID NO: 12110 - DNA, 201 bp, Homo sapiens
aggacaatagatgtaaactggagctgtcctaggaaaattgcgatttatggccattcacattatgtctatcaccacctgcataatatatgctttaggtcttrgcaccaaaatattcgtgccctactacctttaaattaaacagtggctgggcatggtggctcgcgcctgtaatcccagcactttcagaggtcaaggcgagca

SEQ ID NO: 12111 - DNA, 201 bp, Homo sapiens
tccaggctgtttggcatatccctcaaaacccaggccctgctgtaaggcctggaccgggtggggtcctagaggtcatctccctgcacccatgtgaagcttcygagcatttgtccttggggttttgccccatggcatcccagagccacccaggcactatgttcacctcctgctgcccttcaagatgaacaagaagaagagaaa

SEQ ID NO: 12112 - DNA, 201 bp, Homo sapiens
acatgattctctgcccaagctcagagccctttccctctgagccactcagggcatttcccagtgtgggtgaggaagtgtgcaaggcctggtagaccttagaytgcatggctgcagtttctgtaactattgttcatcctgagaagtgaaggtttggaaaactaaatgaagacacccaagaatgccatctgctttcttgaggca

SEQ ID NO: 12113 - DNA, 201 bp, Homo sapiens
catttggactggccagaactgcactctggtcccagccagaggaccccagttccaaagtccttcattgtgcaaacaaagagacaaaagagatgccttgcaakttgaggcaagtcaggctcagaaggagaccatgaaattcagcagcatctgtgggaggggcagggggtgcagagaggataggggaaagggaggaatcagcag

SEQ ID NO: 12114 - DNA, 201 bp, Homo sapiens
gcatctgtgggaggggcagggggtgcagagaggataggggaaagggaggaatcagcagctcctgatcccctccatgtgccagactttgcaagtggctttgyttccacaaacccgccatgcctctagcaggcagcaccgattatcctgattcacagcttggaagcagggacagacagcatggataactcgcccaagatcacc

SEQ ID NO: 12115 - DNA, 201 bp, Homo sapiens
aatcacacagaaatcattataaagtgcttagaacatcagagttttcacgtggtgactaatacttttattgacttatttttattgatacataatatttgtaygtattgatggggtacatgtgctattttgttacatgtgcagaatgtgtgatatcgagttggggtatttaggctatctatcccctccagtatttatcatttc

SEQ ID NO: 12116 - DNA, 201 bp, Homo sapiens
agttggggtatttaggctatctatcccctccagtatttatcatttcttttcttctttccttctctctctctcttttctttctctctctctctcttttttcyttttttttttttttttttttgacagagtctctctctgtcacccaggctagagggcagtggcacgacctcagttcactgcaacctccacctcccaggttca

SEQ ID NO: 12117 - DNA, 201 bp, Homo sapiens
taggaatgggccctggcagagtatcattctccgtgggcagcagcatcccctccaagaaactttctagggccacagctggaagtgacctgagacatagaacrcgaggggaggctggtgtaggaatgaacttggggctcagacaccacccagtgttaagttcccccaaacaaagcttcctgtaaagtcagcgagactctatgg

SEQ ID NO: 12118 - DNA, 201 bp, Homo sapiens
ggattacaagcatccgccaccacaccgggctaattttttgtatttttagtagagacagggtttcatgatgttggccagactggtcttgatctcctgacctygggtgatcaaccctcctcggcctcccaaagtgctgggattacaggtgtgagccaccacacccagcctgtataatcatttctatgggcaaacacatttatc

SEQ ID NO: 12119 - DNA, 201 bp, Homo sapiens
agtggctcacgcctgtaatcccagcactttgggaggttgaggcagttggatcgtgaggtcaggagctcgagaccagctcatagcgaaactttgtctctackaaaaatacaaaaaattagtcaaatgtggtggtatgcacctgtaatcccagctactcgggaggctgaggcaggagaaccccttgaacctgggaggtggagg

SEQ ID NO: 12120 - DNA, 201 bp, Homo sapiens
aaaccacctccatcctctaacatttgttttttctcagacgtgagatcctatttgtaggactataacaacaaggaactttattaatatgatgtctagagaaygaaagaggcacatgtgccctagaggaagagccgatgtcctctgtgagttctcctctatcaggggtcaggttggatgaaatctaacccccacctgcctttg

SEQ ID NO: 12121 - DNA, 201 bp, Homo sapiens
aatctaacccccacctgcctttgtaaataaagttttattggaacacagccacacccattcatctgtgtcacatctacggctgctttgtcactacaacagcwaagttgagtagttgcagcacagactttgcgtggcccacaaagctgaaaatattcatggtctgggcctttacagaaaaggtttgctgaccccagtgctgaa

SEQ ID NO: 12122 - DNA, 201 bp, Homo sapiens
ggcatgctgttatctgcagggggtgggggtaggggtggagctgggtgagtgtgaggggatggagcatggcgagagggaggttggattgctggatcaagagygactgcagtatggggtccctgagaacccaagaggcacagcgttccccctgcagtgagccgagatggtgccacttcactccagcctgctcctcccatagtg

SEQ ID NO: 12123 - DNA, 201 bp, Homo sapiens
cagcagggtcctgaaggctggtctgtcactggagccaaatgaagctcagaactgatttaaaacaaaaataaactataaaagaaggtgccaagggctataamaaacaattgtctccacttcaacaggacatggaggtgacagcagaggaacttgagtatgttttaaatgctgtgctgcaaaagagtaagtgccaaccccatc

SEQ ID NO: 12124 - DNA, 201 bp, Homo sapiens
gaagctgggaaaccactgccttgccctgcccagcttttcatgcgctttcctgggttgggatgtctctcaagttaggctctctcctagttgggctggcatgyccctaaaacatgtgacatatgagacacatagctgcagctacacaggagataggtacatctgcccacagcagggtcctgaaggctggtctgtcactggagc

SEQ ID NO: 12125 - DNA, 201 bp, Homo sapiens
cagtgcaactgaggtgcatcatcccagtctaccgtggaaagctttgcagtttggaggcagaaaataatgtacaggcctgggatgctctgcggtggggaccsggggcatctggttgtacccgctccccggctccaagctgtctgactcccaccgaggctgaggacctggagtcagagtgggtcttgtcagcaggtgataggc

SEQ ID NO: 12126 - DNA, 201 bp, Homo sapiens
gtttggaggcagaaaataatgtacaggcctgggatgctctgcggtggggacccggggcatctggttgtacccgctccccggctccaagctgtctgactccyaccgaggctgaggacctggagtcagagtgggtcttgtcagcaggtgataggcacgaatcaaaaccttatccacaaggacaggcccccaccctgtgtgtgg

SEQ ID NO: 12127 - DNA, 201 bp, Homo sapiens
cccagagctgagggtgctcagtgtggatggatgtttggctcagcaaggtctcagcaaccgggtgacagatggaatacaagggaagcaggaatcttctcccragaaccatgcaccccccattcccagagatcagggtgaacagtgccccacctctgacagtctggaggtgtcgtcccaagaggcaccagctggtcactgggt

SEQ ID NO: 12128 - DNA, 201 bp, Homo sapiens
ttgtgcctgggacgccatgtcaatatttgcggtgctggattagtcagggctctacctctgacccggcgccagctgggctggcttccattccctccaggtgkgtacgggcctgggagtggctcctgtggggtccggttgcttttgggcaaggaggggcagtacaagggatgctggtcctacaagtgagatcctgagtgcccg

SEQ ID NO: 12129 - DNA, 201 bp, Homo sapiens
gggtacgggcctgggagtggctcctgtggggtccggttgcttttgggcaaggaggggcagtacaagggatgctggtcctacaagtgagatcctgagtgccygtcttatcctgacaatttgtctcatgcatatagtcatatcacttcatttccctgagcctcagtctcctcacctgtaaaatgggaacaataatggctaatg

SEQ ID NO: 12130 - DNA, 201 bp, Homo sapiens
ccgtcttatcctgacaatttgtctcatgcatatagtcatatcacttcatttccctgagcctcagtctcctcacctgtaaaatgggaacaataatggctaaygcaggccaatgtctagcacacagaaggtttccagtacattacagctattgtcacattattactattactgatactattattatcatcattacaatgatta

SEQ ID NO: 12131 - DNA, 201 bp, Homo sapiens
gaatctgttctgccttttcctttgtctgcaactgaagattgtccctttggtctggtcctcattctcgtacccctatctgtttcttatttaggggagttagragctttacatcatatcttacagatttctgtaaaatcaggaacaaaagggctgaggatgagcatggagactctttttgcagcatagagtcgcagggagccg

SEQ ID NO: 12132 - DNA, 201 bp, Homo sapiens
gatggggtttcaccgtgttggccaggctagtctcgaacccctgacctcagagaaaccacccaccttggcctcccaaagtgctggaattacaggtatgagcyaccacgcccagccttctctctccatttttggcaaatcaaattcatctgtctcagactcctcatatacacccagattagagggaaatttaatctccctcct

SEQ ID NO: 12133 - DNA, 201 bp, Homo sapiens
aggccccggcccagttaactcaccacccctgcagggtgagccagaacgtgcctcgctgccacaggattggctgttacctctcccgagaccggcccggcttyctccctccctccctccctccctccctttgtttaggtctgtgctcctctgcttcccccagagacgcctcccctgctgactgctgtagctagccttgcccca

SEQ ID NO: 12134 - DNA, 201 bp, Homo sapiens
gcgagacccccatctccacaaaaaaaaaaaaaaaaattaaaaagtggctgggcgtggtgactcacgtctgtagtcccagttacttgggaggctgaggtggraggattgcttgagcccagaaggtcaaggctgtagtgagctatgatcatgtcactgcactccagcctgggtgacacagcaagattctgtctctaaacctat

SEQ ID NO: 12135 - DNA, 201 bp, Homo sapiens
gacatagcctaaggtattgaccatgcctctctattggtcattatttcacttccaaatttttgccactataaataatatgatgacaaaaatcttcatatgtwattctttgctcggggttcttagaactagaataaatggatgaaggcgtattcccacttttattgcttttttcacatttagccaattttccttctgaaaggt

SEQ ID NO: 12136 - DNA, 201 bp, Homo sapiens
aggctgggctccaggtggcatttcccactcttgtccggtgctggatggctgtcggcatctctgtggtcccatgtcctgcacacacaaccgtagtttccacragcgctctgcagacctcccgcctgccgggctgcctgcgcttctcaccaagcacacctcacagataggggcctcctgaaccttttaaagtggttccctccc

SEQ ID NO: 12137 - DNA, 201 bp, Homo sapiens
actcaatcttgctctgaacaagattctttaatctgctatgatattgagtataagaatcagctctgtagcttggtaacaaaaattcacactgagctgtgttygcattggtttagctctcagacagactcctgattaaacaaacagaagttctgaaagggttatgttatggatgcccaggggatgaggaggaaagggaggact

SEQ ID NO: 12138 - DNA, 201 bp, Homo sapiens
ttaatgaatgagtgaatggatgatgccctcactcttgccctcctgtgcatcgtgtctctccgctttgctgcaggatggcatttcaggacttcaaggcccamtttgataaagtggagatctgcaacctcactcccgatgccctggaggaagacgcgatccacaaatgggaggtgacggtccatcagggaagctgggttcgcg

SEQ ID NO: 12139 - DNA, 201 bp, Homo sapiens
atgcaggacactcacacgtagacaatgctcccaagtgcacatgcaaccagcatacatgtggagcatgcacaagcacacacgtgtaccacacctgggcacayacaacaaggcaagtcacaggcaccttgcacatgtgggcatgtgggccgtcagcatacacaccactcccaggcatctaacccaggcccaccgcctagctgc

SEQ ID NO: 12140 - DNA, 201 bp, Homo sapiens
ccactgacatggtcctggtttgcattgtccttctgggctcagctcagagccacctgcaaactcctgcgctagccaaggtggaggaggaagaagagcagtgygcttcctacagatgagaggggtccgcacaggcaagccaagccaggaccccagaactgagcagctgccccccaccttcactccctttccagccaccacgga

SEQ ID NO: 12141 - DNA, 201 bp, Homo sapiens
cttacttaggtgggtgacctcagacaattttcttagtgacattaaacctttctacactcgtctgaaaaaaggagagactgacagttccctgcaggcttccygtagagctaaatggcatcacacacaggagccggcacagagccaggcaccgagtaggcattccttgaccttccaccccagacagtgtcaccttctcctgac

SEQ ID NO: 12142 - DNA, 201 bp, Homo sapiens
cttagtgacattaaacctttctacactcgtctgaaaaaaggagagactgacagttccctgcaggcttcccgtagagctaaatggcatcacacacaggagcyggcacagagccaggcaccgagtaggcattccttgaccttccaccccagacagtgtcaccttctcctgactcacaggccaccactcagggccagcccgttt

SEQ ID NO: 12143 - DNA, 201 bp, Homo sapiens
gcaccgagtaggcattccttgaccttccaccccagacagtgtcaccttctcctgactcacaggccaccactcagggccagcccgtttcttctgtccctgargcctgcaatctgataagcagaggtactctcaagccctgtcaccaatagcacagaagtgtttcaaaggcaaagagagtgagcaggtcacatgtagctcagg

SEQ ID NO: 12144 - DNA, 201 bp, Homo sapiens
aacagttctggcagcacagtgagtggctggacgtggtgatcgatgaccgcctgcccaccttcagggaccgcttggttttcctccactctgccgaccacaaygagttctggagcgccttgctggaaaaagcctacgccaagtgagtgacagcttccccagctcaggcagcctcccgacaggagtctctacactagtctttgt

SEQ ID NO: 12145 - DNA, 201 bp, Homo sapiens
gggaccgcttggttttcctccactctgccgaccacaacgagttctggagcgccttgctggaaaaagcctacgccaagtgagtgacagcttccccagctcargcagcctcccgacaggagtctctacactagtctttgtagtgagcatctaagggctgggaaaaaatcagggctctgggtttgcaggtgaggctcggcagga

SEQ ID NO: 12146 - DNA, 201 bp, Homo sapiens
tgggctcactctcagcccatcatagggctgagatccctctgcaggatccaggctgtttggcatatccctcaaaacccaggccctgctgtaaggcctggacygggtggggtcctagaggtcatctccctgcacccatgtgaagcttctgagcatttgtccttggggttttgccccatggcatcccagagccacccaggcact

SEQ ID NO: 12147 - DNA, 201 bp, Homo sapiens
cccatttcccccagccccaggcaaccactcatctactttctctatagattctatttacatattctgaatattttatataaaaggaatcataggccgggtgyggtggctcacgcctgtaatcccagcactttgggaggccgagacaggcggatcacctaggtcaggagttcaagaccagcctggtcaacatggtgaaacccc

SEQ ID NO: 12148 - DNA, 201 bp, Homo sapiens
ggaaagaaggaagggagagagggaggaagggagggagggaggatggaaggaaggaaggaaggaaggaaggaaggaaggaaggaaggaaggaaggaaggaarggagaaaatatactattccaggatttgaaacccgcatatacagagggctgacttggtataggcagattccacagggcttactgtgggacttgagtatgca

SEQ ID NO: 12149 - DNA, 201 bp, Homo sapiens
gctgggaagttcagtaggtcagtcaataaatcttgaaaatgcaagataatttaaagcaaatggagccaccacggagataccattatctgtaattaagctgwgtctgggttggggctgcagggagatttctaaccaccctcccaagtactgccgaaccacttgggtggcagctatgaaatgtctgctcgcccagcccgtgct

SEQ ID NO: 12150 - DNA, 201 bp, Homo sapiens
atgagggcaggtgcatttccacactgcctggtaaccctagaaaaaaatgtcatcagatctgtgtgacatatggtcctaaaccatgctaaagccacattttatcatggaataacagctaaatgcctcagaagaacattaacggcattgcacggtgaatccttatggagcatacatttaaaactataagtgatgttttggcaa

SEQ ID NO: 12151 - DNA, 201 bp, Homo sapiens
caacctcccttcctgttcccagcagaccacacacaagctcatacacatgcatacatgtgctcaaacacacacgtgtgtagaagcacttgcaaacacatgcrtgcacacatacatgcacacacatgcacacatgtgagcaaacacatgctttcacacatgcaatgtataaataaaccacaaacagtgcacatacctgtcatg

SEQ ID NO: 12152 - DNA, 201 bp, Homo sapiens
gtgctaaatgactagttaatgggtgcagcacaccaacatggcacaggtatacatatgtaacaaacctgcacgttgtgcacatgtaccctaaaacttaaagwataataaataaataaataaataaataaataaataaataaataaataaaaaataaaataaaataaaataaaaataaataaataaaacacaagttttaacca

SEQ ID NO: 12153 - DNA, 201 bp, Homo sapiens
tggggttcctgaattatgaaaggggtcacctggaggggtgatatctaaacctaggggctgtctgatggtagtatattaggcactgcaataaacaggcaagrcagggagattaggggaccacaggatcggatggagaaaatgggggctcatgtgactgcttaaagcacagcaggaaggtggctgagcgcagccctgggcggg

SEQ ID NO: 12154 - DNA, 201 bp, Homo sapiens
tgctaaatgactagttaatgggtgcagcacaccaacatggcacaggtatacatatgtaacaaacctgcacgttgtgcacatgtaccctaaaacttaaagtataataaataaataaataaataaataaataaataaataaataaataaaaaataaaataaaataaaataaaaataaataaataaaacacaagttttaaccaa

SEQ ID NO: 12155 - DNA, 201 bp, Homo sapiens
gagcccaaagaagcttggaataggcccagacgctttgttttttagttctgttttgctttagacagagtctcactcttttaccctggctggagtgcagtggyataagcctagctcactgcagcctcaaactcatgggctcaagagatcctatcacctcagcttcctgagtagccgggactataggcacatgccatcatgctt

SEQ ID NO: 12156 - DNA, 201 bp, Homo sapiens
ctaaatgactagttaatgggtgcagcacaccaacatggcacaggtatacatatgtaacaaacctgcacgttgtgcacatgtaccctaaaacttaaagtataataaataaataaataaataaataaataaataaataaataaataaaaaataaaataaaataaaataaaaataaataaataaaacacaagttttaaccaagc

SEQ ID NO: 12157 - DNA, 201 bp, Homo sapiens
tgaagtgggtagacttttaattgtattttaagaaatctaatcaatgaaaagaaaaccagagaggcagggagatgttttttactgtggactcaggggaacayattacatctcccctatgttatgtggtgtggaaggggtgacatgggggtggctttaccctcgtccaagggctggaggactcgcaagaggccctgagatact

SEQ ID NO: 12158 - DNA, 201 bp, Homo sapiens
aatgactagttaatgggtgcagcacaccaacatggcacaggtatacatatgtaacaaacctgcacgttgtgcacatgtaccctaaaacttaaagtataataaataaataaataaataaataaataaataaataaataaataaaaaataaaataaaataaaataaaaataaataaataaaacacaagttttaaccaagcatg

SEQ ID NO: 12159 - DNA, 201 bp, Homo sapiens
cctcctggagaccaagatgtgtgtgttctagtctgtgctcttctagtccacaaggacctggcatgggagtgaggtgggtgcttggtataaagttctgttcsatgtcatcttcctctgtgctactgtcaactgaaataacaaacacagagacactctctaaaagaaaagctatttatttagggataaagcactgcaatggga

SEQ ID NO: 12160 - DNA, 201 bp, Homo sapiens
atgactagttaatgggtgcagcacaccaacatggcacaggtatacatatgtaacaaacctgcacgttgtgcacatgtaccctaaaacttaaagtataataaataaataaataaataaataaataaataaataaataaataaaaaataaaataaaataaaataaaaataaataaataaaacacaagttttaaccaagcatgg

SEQ ID NO: 12161 - DNA, 201 bp, Homo sapiens
agaacttctactagggctatgcagatggggaaatgtgaggttcaaggtctcgcacagagtccccactggggtactgcctagtggaactgtgggaaggcggycatcatcctccagacccaagaatggtggatccactggcagcttgcaccttgagcctggaaaagccacaggtactcaacaacccatgacagcagccaaagt

SEQ ID NO: 12162 - DNA, 201 bp, Homo sapiens
tgggaagaggtgggaaaaatccttcactcctctgcaggccccggcccagttaactcaccacccctgcagggtgagccagaacgtgcctcgctgccacaggwttggctgttacctctcccgagaccggcccggcttcctccctccctccctccctccctccctttgtttaggtctgtgctcctctgcttcccccagagacgc

SEQ ID NO: 12163 - DNA, 201 bp, Homo sapiens
aattgataaaggaaagagatttagttgacttacagttcagtatggctggggaggcctcaggaaacatataatcatggcggaaggtgaaggggaagcaagayaccctcttcacaaagcggcaggaaggagaagtgccagcaggggaaatacaagacacttataaaaccatcagatctcatgagactcactcattttcatgac

SEQ ID NO: 12164 - DNA, 201 bp, Homo sapiens
ctccagcctgggtgacacagcaagattctgtctctaaacctatatatatttggaatccactttgtgggggaaggattatataaagaaagaaatggagaagmtgggtgggtagggagtatgtttagtccaaggccccagcctgtggtacatgcattactcagctccttgaagcccacagaggtcacagagctcacagctggg

SEQ ID NO: 12165 - DNA, 201 bp, Homo sapiens
tgtgaccgggccaggcatgtagctgggtctgatccagcaggggaggcttgacttagacggtgggtgtgactctgctctttccatgttttagaccagaagtrctgcagaatctgaggcccggacgccgtttggtcttattaagggtcatgcctacagtgtaacgggaattgaccaggtaggcgacttgaactccaactgcag

SEQ ID NO: 12166 - DNA, 201 bp, Homo sapiens
gcagcagaaggggctggaggttgtgaccgggccaggcatgtagctgggtctgatccagcaggggaggcttgacttagacggtgggtgtgactctgctcttyccatgttttagaccagaagtgctgcagaatctgaggcccggacgccgtttggtcttattaagggtcatgcctacagtgtaacgggaattgaccaggtagg

SEQ ID NO: 12167 - DNA, 201 bp, Homo sapiens
gcacctggggcagcagaaggggctggaggttgtgaccgggccaggcatgtagctgggtctgatccagcaggggaggcttgacttagacggtgggtgtgackctgctctttccatgttttagaccagaagtgctgcagaatctgaggcccggacgccgtttggtcttattaagggtcatgcctacagtgtaacgggaattga

SEQ ID NO: 12168 - DNA, 201 bp, Homo sapiens
actagttaatgggtgcagcacaccaacatggcacaggtatacatatgtaacaaacctgcacgttgtgcacatgtaccctaaaacttaaagtataataaataaataaataaataaataaataaataaataaataaataaaaaataaaataaaataaaataaaaataaataaataaaacacaagttttaaccaagcatggtgg

SEQ ID NO: 12169 - DNA, 201 bp, Homo sapiens
cgcctgagagtcccccgcacactcgcccctgcaccacagattcacactctcacgctgcattcacaccaagggcagcagtcccactgggtctggggaccccmgctttgaggagtgaaacagtggcttcctcttctgagccctctcctcagctgcctgggagctccctcaaaggtgcagactcacctcggggctcggatacag

SEQ ID NO: 12170 - DNA, 201 bp, Homo sapiens
aatttcctttctttcccaattctccttcagtcctgtgttagtcaggattcttcagagaaatagaatcactagggaaccaaatatatatacatacaattaaacacacacacacctatctatctatctatctatctatctatctatctatctatctatctatctatctatctatctacatcacacagttgacccttgagcaac

SEQ ID NO: 12171 - DNA, 201 bp, Homo sapiens
atttcctttctttcccaattctccttcagtcctgtgttagtcaggattcttcagagaaatagaatcactagggaaccaaatatatatacatacaattaaacacacacacacctatctatctatctatctatctatctatctatctatctatctatctatctatctatctatctacatcacacagttgacccttgagcaaca

SEQ ID NO: 12172 - DNA, 201 bp, Homo sapiens
ttcccaattctccttcagtcctgtgttagtcaggattcttcagagaaatagaatcactagggaaccaaatatatatacatacaattaaacacacacacacctatctatctatctatctatctatctatctatctatctatctatctatctatctatctatctacatcacacagttgacccttgagcaacacaggcttgaac

SEQ ID NO: 12173 - DNA, 201 bp, Homo sapiens
tcccaattctccttcagtcctgtgttagtcaggattcttcagagaaatagaatcactagggaaccaaatatatatacatacaattaaacacacacacacctatctatctatctatctatctatctatctatctatctatctatctatctatctatctatctacatcacacagttgacccttgagcaacacaggcttgaact

SEQ ID NO: 12174 - DNA, 201 bp, Homo sapiens
ccaattctccttcagtcctgtgttagtcaggattcttcagagaaatagaatcactagggaaccaaatatatatacatacaattaaacacacacacacctatctatctatctatctatctatctatctatctatctatctatctatctatctatctatctacatcacacagttgacccttgagcaacacaggcttgaactta

SEQ ID NO: 12175 - DNA, 201 bp, Homo sapiens
gtagaaatcaagaaagtgactgagagccaaggctggaataaaatttgtcttccactcatgcagcctccatgggtgatgggaggggcaggcgccatcccgaytccctgacttcgctgtgctgctggtgacatgtgagtagggttgaaggcaccgcatggccagcctgtcaggccaattatctgggtgtgagccacttaggat

SEQ ID NO: 12176 - DNA, 201 bp, Homo sapiens
aattctccttcagtcctgtgttagtcaggattcttcagagaaatagaatcactagggaaccaaatatatatacatacaattaaacacacacacacctatctatctatctatctatctatctatctatctatctatctatctatctatctatctatctacatcacacagttgacccttgagcaacacaggcttgaacttata

SEQ ID NO: 12177 - DNA, 201 bp, Homo sapiens
aaggtgatgggtggtgttaaatcatgcactctgtgcgtggagcccttcctcctggaatcctgactctgaagccctgtgtagcctctttccattcttcaccrgctctaggatgtacctcctgcaactctcttctctccccttacgtatgaattccccccttcttctgaatcattccccttagcactccaacactatcatttc

SEQ ID NO: 12178 - DNA, 201 bp, Homo sapiens
cacagaggtagaaatcaagaaagtgactgagagccaaggctggaataaaatttgtcttccactcatgcagcctccatgggtgatgggaggggcaggcgccrtcccgactccctgacttcgctgtgctgctggtgacatgtgagtagggttgaaggcaccgcatggccagcctgtcaggccaattatctgggtgtgagccac

SEQ ID NO: 12179 - DNA, 201 bp, Homo sapiens
attctccttcagtcctgtgttagtcaggattcttcagagaaatagaatcactagggaaccaaatatatatacatacaattaaacacacacacacctatctatctatctatctatctatctatctatctatctatctatctatctatctatctatctacatcacacagttgacccttgagcaacacaggcttgaacttatat

SEQ ID NO: 12180 - DNA, 201 bp, Homo sapiens
agaggaaactcggaaattcacagcaggaagctccacaaagaagagcgtccatgtgagtgatccattgccctgcccctcttgaaggagcagccccaacaccwgggctgagcctgcccaaggtgatgggtggtgttaaatcatgcactctgtgcgtggagcccttcctcctggaatcctgactctgaagccctgtgtagcctc

SEQ ID NO: 12181 - DNA, 201 bp, Homo sapiens
cacagctaccaggtcaccagacatggtgcagccgctgctgtattagccagaccccagcgtgagggcagggcacacaggcctgtgctttccaggctgtcatkgtccccatggaggctctcgtcccaccatcctctgctctggccttggctgccgccttctgagaaccaagaagcattggcagagatgagctgagatgggttg

SEQ ID NO: 12182 - DNA, 201 bp, Homo sapiens
ttctccttcagtcctgtgttagtcaggattcttcagagaaatagaatcactagggaaccaaatatatatacatacaattaaacacacacacacctatctatctatctatctatctatctatctatctatctatctatctatctatctatctatctacatcacacagttgacccttgagcaacacaggcttgaacttatatg

SEQ ID NO: 12183 - DNA, 201 bp, Homo sapiens
gaagttcagtaggtcagtcaataaatcttgaaaatgcaagataatttaaagcaaatggagccaccacggagataccattatctgtaattaagctgagtctrggttggggctgcagggagatttctaaccaccctcccaagtactgccgaaccacttgggtggcagctatgaaatgtctgctcgcccagcccgtgctgacac

SEQ ID NO: 12184 - DNA, 201 bp, Homo sapiens
gtgtgtccccacagctcctccagctctggtcccttgggaagtggaccaggtgactaagaaccagggatgtttgtgtgggtgcgtggcagggcctgcctgargctgttgctcgtccgctgcttgttgggctcctgaagccctttcctgccacatccatggcccctgagcttctggggaaatctgaagctagtctagaacttg

SEQ ID NO: 12185 - DNA, 201 bp, Homo sapiens
caatggtaaaagtcccagtctgagggcaggagagacggatgtcccagctcaggcacccaggaagagagagtgaattcccccttcctctgcctttttgttcwggtcaggtcttcacagatgagatgaggcccacctacactggggagggcaatctgttttactcaatcaacttaaatttcatgtcacccagaagcacccttg

SEQ ID NO: 12186 - DNA, 201 bp, Homo sapiens
gtgccgcctctgagtggaatgtgccaggccccagagctgcctctgagtctgcaggagtgcagagtgggcagagggctctctctgctgttttccatcagggygtgtcccatctcagtctaacagggaggtgcccagaaaataggtggaggtgagggccactcagcccagtggccctctgagctgttccttcttgaccggcac

SEQ ID NO: 12187 - DNA, 201 bp, Homo sapiens
aatcactgatgcagcaagatgctcaggatgacacagcaaagctgtaaataaatggctcccaaaaccactgtgcctaccctcctctttcaacccttttcttyttactcttagaggttaccttaggatcgctctcaggccaactgaaccagaaggaacgggtaggaggtgggtcactgcaggatacacagagaaactaccatg

SEQ ID NO: 12188 - DNA, 201 bp, Homo sapiens
ggatcttcaagccatgagaatactatccccagagacagaagcaaggatggtcttgcttctacctccaagtgggacataaaagtggcaaaatagaggggagkcatactgtggttaaattaatcctgaaatcagcaggacagaattaaagccatcaaataagaaccaaagatgcccacgcttgccctctgtcccacccaggtc

SEQ ID NO: 12189 - DNA, 201 bp, Homo sapiens
tgacagtccagggaggatgttcatattctgtgggtggctctgttcatacagtgattcaggaacccaaacgccttctattgtgtggctctgccatcttctarggtcacgtcatcatctgcacatagccagcagaagagaagaataaaataaaacattgaaaaagacactctcactttctaaaaatcttgactcagaagtaaa

SEQ ID NO: 12190 - DNA, 201 bp, Homo sapiens
atgtgttacctcccatggtgatgtttataacccagtgatatggtgaaaagctttatctgtagttgtgagtaactccagtaagcagtgtgcatatgcataartgcgtgtgtgtttgtgtgtgtgtgtgtatttggagtgtcggaatccctgaaatattacctagcatgtaactataggattctctctgatggtcactgacca

SEQ ID NO: 12191 - DNA, 201 bp, Homo sapiens
tgcttattttcttatcattcatctgtgcatgggatgctaggatgaagaaagttcagtaatagttccatgagcacctttgaggactactctttaccattcaytctgctagatgctgaagatgcctaagacttggctcctgcctctagggagatccaagtctagagagaaacccatttttagattcatatggactaatttctt

SEQ ID NO: 12192 - DNA, 201 bp, Homo sapiens
tttgagacggagttttgttcttattgcccaggctggagtgcagtggtgcgatctcgtctcactgcaacctctgcctcccaggttcaagtgatactcctgcytcagcctcccaagcagctgagagtacaggcatgcgccaccacgcccgactcattttgtatctttagtagagatggggtttcaccgtgttggccaggctag

SEQ ID NO: 12193 - DNA, 201 bp, Homo sapiens
caggcagagcctgagggcacacaggctcaagggtgattgaggtgaacagcaggaatcctcacagacacctgaaataaggagaatattgggtctagaagacrtaaaagctgtttttgtttattgttgtgtttaaatccccaacatgtgcttattttcttatcattcatctgtgcatgggatgctaggatgaagaaagttcag

SEQ ID NO: 12194 - DNA, 201 bp, Homo sapiens
taagcacagagacacccatccctccccaaccccaccagtggaatcaggaatttacatctgtgatgagaggcaggagttagggatgcagcttcaaaaggtgrtctttaggccaggcacggtggctcatgcctgtaatcccagcactttgggaggccgaggcaggaggatcacctgaagtcaggagtttgagaccagcctggc

SEQ ID NO: 12195 - DNA, 201 bp, Homo sapiens
ccgaagagttgatgttacttgaatttttacacatccaaaatataatttatgccaaatgcatgaggataaaacattctgactgctacagtttctggttagtygataactagaagtcttttactttcactctctctcctctaaaacccttctcaaatgcattggcccttgtccctgctcccaggcagagcctgagggcacaca

SEQ ID NO: 12196 - DNA, 201 bp, Homo sapiens
gagaatcacttaaaacccaggaggcagaggttgcagtgagccgagatcatgccattgcactccagcctgtgccacagagtgagactccgtctaaaaaaaawggtggtttttttggttctgattcaactttgtaatcttttaaaatgcaccccctccccagtgcctaccactcaataggctgaatggtctccaacagatatg

SEQ ID NO: 12197 - DNA, 201 bp, Homo sapiens
attttgcttcctctcccccctacaaggaactcacctgccctgaacctttcaaattaaatgagcccctttaatggtgagccacaagccacatcttggactcygaagagttgatgttacttgaatttttacacatccaaaatataatttatgccaaatgcatgaggataaaacattctgactgctacagtttctggttagtcg

SEQ ID NO: 12198 - DNA, 201 bp, Homo sapiens
tcctaggtctccctagaagtcaaggagttaagttaacttctagggaatacaccatgcttctttgtaaagccaattgaacctcttttctttgtaaattagtsttaggtatttctttatagcagtacaagaacagcctaatacagaaaattggtacagaagagtggggcattgttataaagataactgaaaatgtggaagtga

SEQ ID NO: 12199 - DNA, 201 bp, Homo sapiens
cgttggactctttgggattctttagaatgttagctatttgtgttggctcctttgtcctccttcaccatccatagatgacttgcagattgctcactcaagcrggcatgtgatgtttctaggttagatcttctacgtattccacgtaacaacagaaacctctcatcatcttggtttgcttgattttgcttcctctccccccta

SEQ ID NO: 12200 - DNA, 201 bp, Homo sapiens
tagggtatctggaagaagaaatgtctaagcagcaaagcattcaggatgtgacctggctgcttctaacaacctatactcagatatgggagcaaagatatgasttaaagctggaatatatacatttaaaagggaagcagggcataaaaatttggaaaatttgcagcctggctatatagcagagaaagaaaaagctttttcgag

SEQ ID NO: 12201 - DNA, 201 bp, Homo sapiens
agaacgcgaggggaggctggtgtaggaatgaacttggggctcagacaccacccagtgttaagttcccccaaacaaagcttcctgtaaagtcagcgagactstatgggtgatgttagcatcaaaattaagatcacaaactcgctaaactcagaagccattaaacacagaaagcacgcctgagagtcccccgcacactcgccc

SEQ ID NO: 12202 - DNA, 201 bp, Homo sapiens
cctatgattttcttgataacatttcttttctctggcttatttattgtaagaatacagtatataatataaataattataaaacatgttaattggttctttaygttatcgataagacttctggtcaatggtaggctattcggagttcagctttagggaatacaagattttttgacaatgcaggagggttggcaccccaacccc

SEQ ID NO: 12203 - DNA, 201 bp, Homo sapiens
aagcctgcaggcacacagagtgcaagactgaatgaggcttggcagcctccacctagatttcagaggatgtatggaaaagcctgcatgcctaggcaaaagcytgctgcagggacagagccctcacagagaacttctactagggctatgcagatggggaaatgtgaggttcaaggtctcgcacagagtccccactggggtact

SEQ ID NO: 12204 - DNA, 201 bp, Homo sapiens
ggtactgcctagtggaactgtgggaaggcggccatcatcctccagacccaagaatggtggatccactggcagcttgcaccttgagcctggaaaagccacaggtactcaacaacccatgacagcagccaaagtcacagggacagagcttcccaaggccttgggatcccaccctttgtaccagtgttccctggatgtaggaca

SEQ ID NO: 12205 - DNA, 201 bp, Homo sapiens
actcccattgtattttggaagtataaaatggaatttgtatatcttggaacttgattttgatttgacaggctcataggtgatgggacttgccttatctcagrtgagactttggactttggaattttgagttaatgctggaatgacttaagactttgggggttattgggaaggcataattatattttgcagtgtgagaaggac

SEQ ID NO: 12206 - DNA, 201 bp, Homo sapiens
taatgttagaatgtttcatcactccaacaagaaaccctttacccattaacagtgttaaccctgtacccatttcccccagccccaggcaaccactcatctaytttctctatagattctatttacatattctgaatattttatataaaaggaatcataggccgggtgcggtggctcacgcctgtaatcccagcactttgggag

SEQ ID NO: 12207 - DNA, 201 bp, Homo sapiens
tcccagggaccttcccacatcagtgtatgcagagtttccttgttccgttttatggctgtacactgttccacttcatgattagctggaccataattttcttyaccattcccccaacagagggcactaagtgctttccaaccttttttaatgtaaacaatgccaccatgaaatgagcaagctggtatacctttcacttttcgg

SEQ ID NO: 12208 - DNA, 201 bp, Homo sapiens
ctgaagaaaagatttgttatggttcatgaatgagtgcccactaggacaggggtgaaactaggagtgttccagggatggacaagtccctggatgaagaaagkgagaccctcacctgatgtcaggcttaccaatgaccttgggaggggatggatagggaagcaaggtctgggtgaagatctagttctcatcttctaggaaatg

SEQ ID NO: 12209 - DNA, 201 bp, Homo sapiens
catgcatacatgtgctcaaacacacacgtgtgtagaagcacttgcaaacacatgcatgcacacatacatgcacacacatgcacacatgtgagcaaacacaygctttcacacatgcaatgtataaataaaccacaaacagtgcacatacctgtcatgcctgcctgtatgcacatgtatacacatgtgtgcgcacatgcattc

SEQ ID NO: 12210 - DNA, 201 bp, Homo sapiens
actctgccgaccacaacgagttctggagcgccttgctggaaaaagcctacgccaagtgagtgacagcttccccagctcaggcagcctcccgacaggagtctctacactagtctttgtagtgagcatctaagggctgggaaaaaatcagggctctgggtttgcaggtgaggctcggcaggacccaaccctctcagggctcaa

SEQ ID NO: 12211 - DNA, 201 bp, Homo sapiens
tgcaggtgaggctcggcaggacccaaccctctcagggctcaagcggggttggaggtggttttcctgtcgtagcctagatgtgcccatctttgggagcagtsgctacattcatgaccctttttctccctgggccatgaatctggcctttggaagagctgggaaggcaagcggaggggaattctggctgtgccgacagcactt

SEQ ID NO: 12212 - DNA, 201 bp, Homo sapiens
catccccttctgacacagagttttcctatttgctgtgaaatagcaatgaaaattgtgatttatggcttccattttgcaggagactgctggctattagccgycatcgcctcccttacgcttaatcaaaaagcactggccagagtcatcccccaggaccaaagctttggccctggttatgccgggatattccatttccaggta

SEQ ID NO: 12213 - DNA, 201 bp, Homo sapiens
acccaccttttgagtgacatcctctgaatgcgtggggagtaaagaacactgaagggagaccctgcccttcctcctcactggagccaaggtgtgagacgccrttggactctttgggattctttagaatgttagctatttgtgttggctcctttgtcctccttcaccatccatagatgacttgcagattgctcactcaagcag

SEQ ID NO: 12214 - DNA, 201 bp, Homo sapiens
aggcaagcggaggggaattctggctgtgccgacagcacttagtgcttcacacttccctcggacactggcatggctcaaacatctgggctattacgcacgtkgatatagagacatcaattgtccgtcctacgggatgcttcttttttatttttaaaaagtcgtatatgacatatcgataaataatcgtatatgataaaatgt

SEQ ID NO: 12215 - DNA, 201 bp, Homo sapiens
cgaaccacttgggtggcagctatgaaatgtctgctcgcccagcccgtgctgacactgatgtatgcagtcttggtcctctggaaagggagttgctggaattyacagagctgatgcatcaggcagccatatgtctgaaacccaagtaagcatgtcctataacagtgccaagaaggcaacagctgtttatgatagacgggcaga

SEQ ID NO: 12216 - DNA, 201 bp, Homo sapiens
gatgtgcagtgcccctcaactttgagatcgtagcctataaagggaaaatgggccattgtctcccattttctgggactcacagaggtagaaatcaagaaagkgactgagagccaaggctggaataaaatttgtcttccactcatgcagcctccatgggtgatgggaggggcaggcgccatcccgactccctgacttcgctgt

SEQ ID NO: 12217 - DNA, 201 bp, Homo sapiens
gctgagtctgggttggggctgcagggagatttctaaccaccctcccaagtactgccgaaccacttgggtggcagctatgaaatgtctgctcgcccagcccrtgctgacactgatgtatgcagtcttggtcctctggaaagggagttgctggaattcacagagctgatgcatcaggcagccatatgtctgaaacccaagtaa

SEQ ID NO: 12218 - DNA, 201 bp, Homo sapiens
ctccaataagtacaaaactggccagttaccggggccactgtagcaatgacgggggtgggagaccatgggtctgagtgtcagaggtatgggagaaggattcyagggggtttcaatcaccctctccccagaggatcccagtggacccatctgctcacagggaggtccatgggccagcagcagcataggcatcacttaggagag

SEQ ID NO: 12219 - DNA, 201 bp, Homo sapiens
tcggacactggcatggctcaaacatctgggctattacgcacgttgatatagagacatcaattgtccgtcctacgggatgcttcttttttatttttaaaaartcgtatatgacatatcgataaataatcgtatatgataaaatgtatatgacataaattttaccatttttaagtgtgcagttgagtagcattaagtacatcc

SEQ ID NO: 12220 - DNA, 201 bp, Homo sapiens
ccagaaagggccatattacaatgtcccaagcccagtgacatacggtgctttccagaaatgtgaactcagaaactgccaagctgagtgtgatgggcttttakgttctgatgacgttgatgttgtctactgaaaacaagtgaatctggataaaggtgattcggataaatggatcctcccagatatctgcttacacaggcggca

SEQ ID NO: 12221 - DNA, 201 bp, Homo sapiens
acagccagaaagggccatattacaatgtcccaagcccagtgacatacggtgctttccagaaatgtgaactcagaaactgccaagctgagtgtgatgggctyttaggttctgatgacgttgatgttgtctactgaaaacaagtgaatctggataaaggtgattcggataaatggatcctcccagatatctgcttacacaggc

SEQ ID NO: 12222 - DNA, 201 bp, Homo sapiens
gtgacacctctcagaaagccagaaccagggcgattcggaattagctttcccgatgttcagccctggcgagtctctcttgcctgtgtcaaacagccagaaarggccatattacaatgtcccaagcccagtgacatacggtgctttccagaaatgtgaactcagaaactgccaagctgagtgtgatgggcttttaggttctga

SEQ ID NO: 12223 - DNA, 201 bp, Homo sapiens
tctgtgctccagctaaggctgggggtggcttgtactctgctggtgacacctctcagaaagccagaaccagggcgattcggaattagctttcccgatgttcrgccctggcgagtctctcttgcctgtgtcaaacagccagaaagggccatattacaatgtcccaagcccagtgacatacggtgctttccagaaatgtgaact

SEQ ID NO: 12224 - DNA, 201 bp, Homo sapiens
atgttataaagaataacaagaaaatgaacagccgtgatctgttgccacccacaataagaactagaacatctggtcatgtagagtgctcacacctgtaatcrcagcgctttgggagggggaggtgggaagatctcttgagcccaggagttttagactagcctgggcaacatagcaagaccacatctctatcaaaaaaaaaaa

SEQ ID NO: 12225 - DNA, 201 bp, Homo sapiens
gcctggaccgggtggggtcctagaggtcatctccctgcacccatgtgaagcttctgagcatttgtccttggggttttgccccatggcatcccagagccacscaggcactatgttcacctcctgctgcccttcaagatgaacaagaagaagagaaacaaagggagttcgccacaggcctgagtgtggaggagacagagaaag

SEQ ID NO: 12226 - DNA, 201 bp, Homo sapiens
ggttttgccccatggcatcccagagccacccaggcactatgttcacctcctgctgcccttcaagatgaacaagaagaagagaaacaaagggagttcgccasaggcctgagtgtggaggagacagagaaagaacagcacagaaaagagaggccaggaaggccccagatgccaggtcaggttcatttcatgtagaaatcactt

SEQ ID NO: 12227 - DNA, 201 bp, Homo sapiens
atggcttccattttgcaggagactgctggctattagccgccatcgcctcccttacgcttaatcaaaaagcactggccagagtcatcccccaggaccaaagmtttggccctggttatgccgggatattccatttccaggtaagagggagccctgggccagtgggtttacctctctggggcccggcatgagggcaggtgcatt

SEQ ID NO: 12228 - DNA, 201 bp, Homo sapiens
ctagtggtgggggtggggagcttttgaagggacttgggggtcttcttgccactttgggatcccatccaagggaacagagttctgtttttgtgaactttccrggaccacccccattccacttctgccgtttcccctcttcagagatttgtggtttaatcattaaaaccacttccccagggccccaaacctgtgcacccaggc

SEQ ID NO: 12229 - DNA, 201 bp, Homo sapiens
tgagccaagattgtgccactgcactccagcctgggcgacagagtgagactccatcaaaagaaagaaggaaagaaggaaaagaaagaaaagaaagaaaaatragaaagaaagaagaaagaaagaaagaaagaaagaaagaaagaaagaaagaaagaaagaaagaaagaaagaaagaaagaaagaaaggaaaaacaagagaga

SEQ ID NO: 12230 - DNA, 201 bp, Homo sapiens
tgccactgcactccagcctgggcgacagagtgagactccatcaaaagaaagaaggaaagaaggaaaagaaagaaaagaaagaaaaataagaaagaaagaaraaagaaagaaagaaagaaagaaagaaagaaagaaagaaagaaagaaagaaagaaagaaagaaagaaagaaaggaaaaacaagagagacccctaggtccac

SEQ ID NO: 12231 - DNA, 201 bp, Homo sapiens
ggaaaagaaagaaaagaaagaaaaataagaaagaaagaagaaagaaagaaagaaagaaagaaagaaagaaagaaagaaagaaagaaagaaagaaagaaagwaagaaagaaaggaaaaacaagagagacccctaggtccacctttatttatcatttactttaaggtaaatgataagtaatgtcactaaaaaacatgaggaag

SEQ ID NO: 12232 - DNA, 201 bp, Homo sapiens
aaagaaagaaaaataagaaagaaagaagaaagaaagaaagaaagaaagaaagaaagaaagaaagaaagaaagaaagaaagaaagaaagaaagaaagaaagraaaaacaagagagacccctaggtccacctttatttatcatttactttaaggtaaatgataagtaatgtcactaaaaaacatgaggaagtgtgatggctgc

SEQ ID NO: 12233 - DNA, 201 bp, Homo sapiens
caccttctaaaagagccttcatgagaaaatgttcctcacgctacaggacgcagcttgtgcacaccgcctcaggagggtgacatggggctgggcacacaggstcctggcttctttcctgctatttttgtcatgtttcttttttgtggatcattttgtgcaagtttctttggctgttttttagcctccaaagccaactccacc

SEQ ID NO: 12234 - DNA, 201 bp, Homo sapiens
caacctcccttccgactacaaaactctgccattctctgatgcaggagatgggactcaagaccacaccgtgcacttctccgtaaagccacctcctggaccasttgggtttcttgctccttttccttctgaagcaatcctctctctcccatgaggccccctgagcgcactaagcagaggtgccgcctctgagtggaatgtgcc

SEQ ID NO: 12235 - DNA, 201 bp, Homo sapiens
acacctgactaacactaccttagccaggtgatcaaggccagcatcagctgtggtaaggcatgtggacggcaggtactcttgatatcatgagatgagagggsagctttacctctccggtcttccttccactaaccaatagccccactcttttttttattattatttacttttttttggagacagggtcttgctctctcaccc

SEQ ID NO: 12236 - DNA, 201 bp, Homo sapiens
tcccccatgtatgccatattctagatacaatgtagacttttcaaaaggtttacattcaggtggtccttctccaggagatcctccctgccgctgcccacctstccccctcttcctctgcctcccttcccctcgaccccgtagtcctccattgctatccaataggaaatcattctactggctcctttgtttttcaaagttttg

SEQ ID NO: 12237 - DNA, 201 bp, Homo sapiens
gaaggcggcgcagcttgagctccccacgtggcgtccgcccagacactgctggaaccttccacctccagcccaggcccctcctcagtcctggtgcctggaaragtgggaagaggtgggaaaaatccttcactcctctgcaggccccggcccagttaactcaccacccctgcagggtgagccagaacgtgcctcgctgccaca

SEQ ID NO: 12238 - DNA, 201 bp, Homo sapiens
aacctgagtgcacctcaagtcactcaaattgggtcctgcattttaggacttaatccaactgggctgggtttacctttgttctatctatgaaagacagagaragtgagagagcgagagactttcttttaaaaaataccagtgaaatcagcctagagaacaaaccactgcaagcttgtgtggaccctgacttatttctagctg

SEQ ID NO: 12239 - DNA, 201 bp, Homo sapiens
ggggcagcagaaggggctggaggttgtgaccgggccaggcatgtagctgggtctgatccagcaggggaggcttgacttagacggtgggtgtgactctgctytttccatgttttagaccagaagtgctgcagaatctgaggcccggacgccgtttggtcttattaagggtcatgcctacagtgtaacgggaattgaccaggt

SEQ ID NO: 12240 - DNA, 201 bp, Homo sapiens
tagtcaaatgtggtggtatgcacctgtaatcccagctactcgggaggctgaggcaggagaaccccttgaacctgggaggtggaggttgcagtgagctgagrtttgccactgcactccagcctgggcaacagtgggagactccatctcaaaaatataaataaataaataaataaataaataaataaataaataaataataaa

SEQ ID NO: 12241 - DNA, 201 bp, Homo sapiens
aggacccaagaggcacggggctgggggaacaacactgcttcggcctctgcttcctcactccctctgaatggagtccagtggcctcaagcccctgcacctcygttcctctagagtcagacatgcctgtgatgtggggctcacagccccggagtttacagaggaaagtgacacccagcagcgttggtcgggctctcctacacc

SEQ ID NO: 12242 - DNA, 201 bp, Homo sapiens
acgtgtgagacctggcagaggacaggccagcatttgggaggtccttacttctgccgggcctggggttttggcgcatctaaaaacaccccgtgttcttcagmaattctcctggccaagctttcttgagtattttagacactaatgccacacatagctctccctgggcaggcgcccctggtgtctgtcactcctccaggttgt

SEQ ID NO: 12243 - DNA, 201 bp, Homo sapiens
caggcacattctgcaacaagcccagaatgtctaagctggtgacagatgaggatgcagccgtgagaagttaaatggcccaccctgaaccctactgctgagcsgggcaggctattcctgggactctattgaggcccactgacatggtcctggtttgcattgtccttctgggctcagctcagagccacctgcaaactcctgcgc

SEQ ID NO: 12244 - DNA, 201 bp, Homo sapiens
gcattgcttgccagggctatcccctggcaggggctgggcaatcaagacagggagggcttgggggactcctgggtttcccttcgggcaggcacattctgcarcaagcccagaatgtctaagctggtgacagatgaggatgcagccgtgagaagttaaatggcccaccctgaaccctactgctgagcggggcaggctattcct

SEQ ID NO: 12245 - DNA, 201 bp, Homo sapiens
ctgggtgagtgtgaggggatggagcatggcgagagggaggttggattgctggatcaagagcgactgcagtatggggtccctgagaacccaagaggcacagygttccccctgcagtgagccgagatggtgccacttcactccagcctgctcctcccatagtgccctctgctctgcaccacccagatagccgagcaacacgct

SEQ ID NO: 12246 - DNA, 201 bp, Homo sapiens
ttttcctggctgagttggcctcacctgcaatcactttcctaaaaaggcctgtgcacctttcattacagtagctctcatactatatacactgtgcccaggarggaggacagagaagggagaaaaaaaccatctcatataatcacgttgccccaagtcaccatgctgtaataaacaagctgttgggaaggaggaggcagggtg

SEQ ID NO: 12247 - DNA, 201 bp, Homo sapiens
ataaatagtatctcaaaaatattagctattttgttataatcactcccacagaaactaggcatttttcttctctagttttgtctttcaacttcagcatgtargacacatgtaataactatacctcctttgatcaatccaagattccaaagaaagatgtgcacacacaaattattcttttatgaaaataagaggaagctgggc

SEQ ID NO: 12248 - DNA, 201 bp, Homo sapiens
agccaattacgtattattacggtgagccaaatggggatactattggtacttagctcacagaattattgtaatggcttaattgattacttcataaatagtakctcaaaaatattagctattttgttataatcactcccacagaaactaggcatttttcttctctagttttgtctttcaacttcagcatgtaggacacatgta

SEQ ID NO: 12249 - DNA, 201 bp, Homo sapiens
tggagcagcttccccacaggctccactggaaggccctttggtcgctgggaaacaaacttggtaaaggaattgtctttaaaaggatgcctttcccccttctytcctatcaggggtgttccaggctctcagtacaaagaacaaggagttcattcatctcaatataaatgaggtatggccaatccagaccctctgctcagggac

SEQ ID NO: 12250 - DNA, 201 bp, Homo sapiens
accccttgaacctgggaggtggaggttgcagtgagctgagatttgccactgcactccagcctgggcaacagtgggagactccatctcaaaaatataaatawataaataaataaataaataaataaataaataaataataaaattaaattaaattaaaataaaaaggtgagggctgtgacccttggttatcagcatgatagc

SEQ ID NO: 12251 - DNA, 201 bp, Homo sapiens
cagaccacacacaagctcatacacatgcatacatgtgctcaaacacacacgtgtgtagaagcacttgcaaacacatgcatgcacacatacatgcacacacrtgcacacatgtgagcaaacacatgctttcacacatgcaatgtataaataaaccacaaacagtgcacatacctgtcatgcctgcctgtatgcacatgtata

SEQ ID NO: 12252 - DNA, 201 bp, Homo sapiens
tgaatatcctagtatctgttcacacaaaagtaccctgtatgagatccatgcagattgacatctcttatgggtggcaagaacaagagagacccaagttatgscaatgccatgcctcttgttctctatcttattagtggggtgagctcagagtcactgacatgcataaggtgacttgtacatggcaaaaaactccatactcaa

SEQ ID NO: 12253 - DNA, 201 bp, Homo sapiens
tctactaaaaatacacaaattagccaggcatggtggtgcatgcttgtaatcccaactactcgggaggctaaggcagcagaaccacttgaacccaggaggtrgaggttgcagtaagccgagatcatgccactgcactccagcctgggcaacagagcaagactccatctcaaaaacaaaaacaaaacaaaacaaaaaaacaca

SEQ ID NO: 12254 - DNA, 201 bp, Homo sapiens
atccatggcccctgagcttctggggaaatctgaagctagtctagaacttggttaaaactgagccagtgtttgtcttcagtccagacacagctaccaggtcrccagacatggtgcagccgctgctgtattagccagaccccagcgtgagggcagggcacacaggcctgtgctttccaggctgtcatggtccccatggaggct

SEQ ID NO: 12255 - DNA, 201 bp, Homo sapiens
gggactcaagaccacaccgtgcacttctccgtaaagccacctcctggaccagttgggtttcttgctccttttccttctgaagcaatcctctctctcccatkaggccccctgagcgcactaagcagaggtgccgcctctgagtggaatgtgccaggccccagagctgcctctgagtctgcaggagtgcagagtgggcagagg

SEQ ID NO: 12256 - DNA, 201 bp, Homo sapiens
gtgccagctgtgttcacataatgcatcctgctttcattcaccaacctcccttccgactacaaaactctgccattctctgatgcaggagatgggactcaagrccacaccgtgcacttctccgtaaagccacctcctggaccagttgggtttcttgctccttttccttctgaagcaatcctctctctcccatgaggccccctg

SEQ ID NO: 12257 - DNA, 201 bp, Homo sapiens
gaaaaggtttgctgaccccagtgctgaatcactatgggattgcctgtgcaggagctgtgccagctgtgttcacataatgcatcctgctttcattcaccaasctcccttccgactacaaaactctgccattctctgatgcaggagatgggactcaagaccacaccgtgcacttctccgtaaagccacctcctggaccagttg

SEQ ID NO: 12258 - DNA, 201 bp, Homo sapiens
ttacacggtgcacgtctcagcagcccgtgggaccgtggggctggacggccctcctcctcagcaccaccttcttgtcaaacacagctgtgcttggggagggkgggcagagcacaaagccaaggggacattggagggcagtggacagccaggcttgccctcaagggagcccagggcaaggagtgcactgagggtgactcaggg

SEQ ID NO: 12259 - DNA, 201 bp, Homo sapiens
tatcatggaataacagctaaatgcctcagaagaacattaacggcattgcacggtgaatccttatggagcatacatttaaaactataagtgatgttttggcmaatctggaggtccatctgttaagggttttattatttggaatttcttgtgctttaagcacaaattgactaaaccaattatacctccaggaaactggttgat

SEQ ID NO: 12260 - DNA, 201 bp, Homo sapiens
cccaggcccgaactttaaacacctaacccaactgtgcctcagtcccacctgaagctgtggatagccccaaaagcgggaagccctggaggggaggtccagcwggagcaggtgacaagaatcttccttaaaacacacacacacacacagacaccctcagccacatcgtggccaactcttctgattgggattgaatcactgatg

SEQ ID NO: 12261 - DNA, 201 bp, Homo sapiens
caggcccgaactttaaacacctaacccaactgtgcctcagtcccacctgaagctgtggatagccccaaaagcgggaagccctggaggggaggtccagctgsagcaggtgacaagaatcttccttaaaacacacacacacacacagacaccctcagccacatcgtggccaactcttctgattgggattgaatcactgatgca

SEQ ID NO: 12262 - DNA, 201 bp, Homo sapiens
gctgggtgagtgtaagtggatggagcatggcgagagggaggttgagtcactgggacaggcaagcaactgcagcatggggtccctgaggacccaagaggcayggggctgggggaacaacactgcttcggcctctgcttcctcactccctctgaatggagtccagtggcctcaagcccctgcacctccgttcctctagagtca

SEQ ID NO: 12263 - DNA, 201 bp, Homo sapiens
ggttcaatgtttactcagcaaatgtgcatcgtgctcctgccctgcactgggctgagctgggagcaggattagacgctaagacaaagtcatggagaagtccrgtgccatgagctctgcaggaaagatggacccagggctctgtgggcagacattgggcaggaagaatgatgaggctgtaaatcctgagaatgcactccctcc

SEQ ID NO: 12264 - DNA, 201 bp, Homo sapiens
gtctagcacacagaaggtttccagtacattacagctattgtcacattattactattactgatactattattatcatcattacaatgattattagctctgartctcatcttacatatgagtagcaaaggactcatcataactacctcctcactatctcccaacattaaaataatgttgatgattaaaaacaattttttttaa

SEQ ID NO: 12265 - DNA, 201 bp, Homo sapiens
cggagttggggtgaaagctcccaggcaccttcctcaccgaagccacgctgtgattgtttttggttctctgcatatggccaattgcagtgtgaggtcacggyactggcagatcacgtggggttgcactttacagacaggattagtaggtcatgctctgctaagtaagaaaaaggacatttccaaactaaaaaagcagaagtt

SEQ ID NO: 12266 - DNA, 201 bp, Homo sapiens
tacacatccaaaatataatttatgccaaatgcatgaggataaaacattctgactgctacagtttctggttagtcgataactagaagtcttttactttcacyctctctcctctaaaacccttctcaaatgcattggcccttgtccctgctcccaggcagagcctgagggcacacaggctcaagggtgattgaggtgaacagc

SEQ ID NO: 12267 - DNA, 201 bp, Homo sapiens
cgaaaaggaagacaaaagggagaccgacttcttttggaaggcccagtccaactgtggcctctgcggcccctagagggtagctcccccgggctggctgtcayccatttactgccatcagcgatgcctttcaggcacgctccttctcaaggcttctgctctccaccctttagaaccttttccttcggtttgatgctgacaagt

SEQ ID NO: 12268 - DNA, 201 bp, Homo sapiens
aaggcctgtgcacctttcattacagtagctctcatactatatacactgtgcccaggagggaggacagagaagggagaaaaaaaccatctcatataatcacrttgccccaagtcaccatgctgtaataaacaagctgttgggaaggaggaggcagggtggactcgggagagaaaatgaggaggaattccatgctacttctcc

SEQ ID NO: 12269 - DNA, 201 bp, Homo sapiens
ggagggcccccatccttgcagtctatattgacatcatctagtttaaagtgtaatctgtactctacaactcacttactttttgtcaaagttagaattctccragataaaagctggacgcacaaaccagcatggagggcatctttgtctcccccttcagaagtctcccctcctgggaccagggccaccaaggcctgcccagcg

SEQ ID NO: 12270 - DNA, 201 bp, Homo sapiens
agagtttgagaggctacctgaggtcaggctagtggaaagaaggtctggtgcagacggtgggagaagccgggcagaggaaactcggaaattcacagcaggargctccacaaagaagagcgtccatgtgagtgatccattgccctgcccctcttgaaggagcagccccaacaccagggctgagcctgcccaaggtgatgggtg

SEQ ID NO: 12271 - DNA, 201 bp, Homo sapiens
caaggccattgttgctcttcatcatgacctctgcctgaacaccaattttgtttactcctagttctccggagtggcgttctgttggtccagctgagcagaarcgtctgtgtcacactgctctggatgatggggaattctggtaccgtgcttgttcctgtgttaactgcagatacgagcaagtcccatggccctggggcgtaa

SEQ ID NO: 12272 - DNA, 201 bp, Homo sapiens
tttgtcagtgagaggaactagaagcaatgacaatcctgtagcaacaagcacacctatgtctcaagtcttggtttctaagatcattcttcaatcaaaggaastggggcttcttggagataaggctgattctaggactggggcatacacacatacatacatatatatacacatacatatatacatacatacataaaatgaacc

SEQ ID NO: 12273 - DNA, 201 bp, Homo sapiens
atgtacttgctgtatcagatggaacaatcttgaggcccatacaggcgcatttttacctccctcccacccgtttctcagctgcctctgttctccagctccaycctgggactgggatcacctggcctgtatccttcccagctctctatctgctcgtacaaacaggcacacacttccacacacaaacatcaaggtcagttggtt

SEQ ID NO: 12274 - DNA, 201 bp, Homo sapiens
tttactgaaacgggatcttcctatctagttttctgaaatttgttttttttttttcatttcatgtactatgaaaaaaatagcagatagaagtctaatgataytttttaaaattttctctatgcatacaaacacacacacttataattttatctcatctttttaaaactttttgttgttttttatggactgctatgacactat

SEQ ID NO: 12275 - DNA, 201 bp, Homo sapiens
atgaataagtgaatgatttaatgaatgagtgaatggatgatgccctcactcttgccctcctgtgcatcgtgtctctccgctttgctgcaggatggcatttmaggacttcaaggcccactttgataaagtggagatctgcaacctcactcccgatgccctggaggaagacgcgatccacaaatgggaggtgacggtccatca

SEQ ID NO: 12276 - DNA, 201 bp, Homo sapiens
atatatatacatacaattaaacacacacacacctatctatctatctatctatctatctatctatctatctatctatctatctatctatctatctacatcayacagttgacccttgagcaacacaggcttgaacttatatggggattttcttccatctctaccacccctgagacagcaagaccaactcctcctcctccttct

SEQ ID NO: 12277 - DNA, 201 bp, Homo sapiens
atctgtttcttatttaggggagttaggagctttacatcatatcttacagatttctgtaaaatcaggaacaaaagggctgaggatgagcatggagactcttyttgcagcatagagtcgcagggagccggggggtagcgggccatagggaaatcacaagcattgccaggttccctgcagacctctgtggcttgggcatcattt

SEQ ID NO: 12278 - DNA, 201 bp, Homo sapiens
agggagatttctaaccaccctcccaagtactgccgaaccacttgggtggcagctatgaaatgtctgctcgcccagcccgtgctgacactgatgtatgcagwcttggtcctctggaaagggagttgctggaattcacagagctgatgcatcaggcagccatatgtctgaaacccaagtaagcatgtcctataacagtgccaa

SEQ ID NO: 12279 - DNA, 201 bp, Homo sapiens
atttctaaccaccctcccaagtactgccgaaccacttgggtggcagctatgaaatgtctgctcgcccagcccgtgctgacactgatgtatgcagtcttggwcctctggaaagggagttgctggaattcacagagctgatgcatcaggcagccatatgtctgaaacccaagtaagcatgtcctataacagtgccaagaaggc

SEQ ID NO: 12280 - DNA, 201 bp, Homo sapiens
aagggtctagtatatcaagccaggaagccggctttccctaaggggttactggtagctagtgagaggtgcattctagaaagacccctcctgaaacagaatcygttattagacttacagggtggtcagagctgaccctagaaataatgagatttgctagtttctcttctctccattgctctttccctttctaaaccacccagg

SEQ ID NO: 12281 - DNA, 201 bp, Homo sapiens
cagaaaacacaaattaacaatcaagaatctaagagcagccgtcattgctgacccatcagaaattaaaagaatgataagtgaatattttaaacaactttatrtcaacaaatcagacaacttagatggaatggaaaaaatcctagaaaaagataaattaccaaaactaccttcagagaatactgaaaatctgaatagacctat

SEQ ID NO: 12282 - DNA, 201 bp, Homo sapiens
gtcctggggcacctatggagggacaagcgaccacactgcctgggtcccctccctgctcctccgagccgcagatctgcttcccagggctgatttgtaggtaractttaaaaatagctttcattgtttgttttcctgattccaaaaacgatgcaggtttatagtagaaaattcttaaaaatgcagaaaagcctaatgacaaag

SEQ ID NO: 12283 - DNA, 201 bp, Homo sapiens
gtaggaatgggccctggcagagtatcattctccgtgggcagcagcatcccctccaagaaactttctagggccacagctggaagtgacctgagacatagaaygcgaggggaggctggtgtaggaatgaacttggggctcagacaccacccagtgttaagttcccccaaacaaagcttcctgtaaagtcagcgagactctatg

SEQ ID NO: 12284 - DNA, 201 bp, Homo sapiens
cagctggaagtgacctgagacatagaacgcgaggggaggctggtgtaggaatgaacttggggctcagacaccacccagtgttaagttcccccaaacaaagyttcctgtaaagtcagcgagactctatgggtgatgttagcatcaaaattaagatcacaaactcgctaaactcagaagccattaaacacagaaagcacgcct

SEQ ID NO: 12285 - DNA, 201 bp, Homo sapiens
gcaggtcaaatcccatcatagcatatagaaacaggagagtctcagtcccccttcctccccccttccccgccctgtaagccctagacattgacccagttatytcaaataagatttgttacaccacaaatagagagggattatgtgcccgtgcgcttcagtgtttgcagtttattgtcatagccatcctgcccctcaaaggtg

SEQ ID NO: 12286 - DNA, 201 bp, Homo sapiens
tgccactgcactccagcctggacaacagagtaagacactgtctcaaacaaacaaaaaggaaaaaaaggaaggaaagaaggaagggagagagggaggaaggragggagggaggatggaaggaaggaaggaaggaaggaaggaaggaaggaaggaaggaaggaaggaaggaaaggagaaaatatactattccaggatttgaaa

SEQ ID NO: 12287 - DNA, 201 bp, Homo sapiens
gtggttttgaaggtgaggctgagtgaagcatgtccagggcctgtaactcagtactggagtggctatgaggacatgccctgtgtgcaggtgccaaaggaccygtgccctcaagggtgcctcgtgcttggtttaatgttctggcgtttccatcttgaaagtcttcacaacttaggagcagggggccccgcatttccattttgt

SEQ ID NO: 12288 - DNA, 201 bp, Homo sapiens
cttggtttaatgttctggcgtttccatcttgaaagtcttcacaacttaggagcagggggccccgcatttccattttgtcctgcttggtattttctaatctrtgttccataggccacttcgaggtatgaatacttgattaaaaaaaaaaaaaaggcagggggctgggcacagtggctcacgcctgtaatcccagcactttgg

SEQ ID NO: 12289 - DNA, 201 bp, Homo sapiens
atcagagacagaccagcaggccccaaagggtctagtatatcaagccaggaagccggctttccctaaggggttactggtagctagtgagaggtgcattctakaaagacccctcctgaaacagaatctgttattagacttacagggtggtcagagctgaccctagaaataatgagatttgctagtttctcttctctccattgc

SEQ ID NO: 12290 - DNA, 201 bp, Homo sapiens
cactctggcatcctcacattagatttgcctggagaacttttagaattaccaaggatggagctttgctgcagtattattttaactttttattgtaagaatgycaaccctccagttagatataaagaatcataataggttcccatgcactccacatcagcacttctcaaacttcgctgtacattacaatctccaggggtgcct

SEQ ID NO: 12291 - DNA, 201 bp, Homo sapiens
attttccccctaaataatttaatagcagatctcagaaactctgtccattcatctgagtatctccagctgatagacttgtttttagcatcatcttcataccrtttgcacacctaacgaaattctcagcaaaccctcaacattctctagtgcccggttcatgcccaagtcttccaggccacctttttacagttgcttggttga

SEQ ID NO: 12292 - DNA, 201 bp, Homo sapiens
caagacccagtcaccatgtttggttgttgggtctcttccatttcttgtgtccagtgatggtcccccaccccgctttgggttgtattattaaagctacccgwgagattctcaagtgaagccagggctgattggctcgacctcgtcttctgaaggtgaggaggctgaggccccaagagggcagtgacttgctcaggtgcactc

SEQ ID NO: 12293 - DNA, 201 bp, Homo sapiens
tgggactcagcattacacggtgcacgtctcagcagcccgtgggaccgtggggctggacggccctcctcctcagcaccaccttcttgtcaaacacagctgtrcttggggagggtgggcagagcacaaagccaaggggacattggagggcagtggacagccaggcttgccctcaagggagcccagggcaaggagtgcactgag

SEQ ID NO: 12294 - DNA, 201 bp, Homo sapiens
ccaaagtgctgggattacaggagtgagccaccacgccaggctgcaggacactttcttagcttatctgcaaggcaaggcacatatcccttctagctctgctcctcgctccctcaagcaaaccattgaaaagttgctgttttctactggtcccagagtcatgctcacaagacattcttgggtggagaccttcatttttcagac

SEQ ID NO: 12295 - DNA, 201 bp, Homo sapiens
agtataacaactgtgttcgtttctcattccaccacatgatactgccccctcagttggcactgtgatgacttacctctgaccaagcactttggaggaagcayaggattcagactcacattgacttgggttcaagtcctaggtctgtcaatgactggttatgtgactttaagctgggtcacctctaatcctgaatttcctcaa

SEQ ID NO: 12296 - DNA, 201 bp, Homo sapiens
taaacttgagcaggcatcagcaccatctggagagcttaagaaccatataactaaatccatcccaaggtttctgattcagcagctgagaatttgcatttctkatctattccaaggtgatgctgctgatggtgtttcatcgatcatgctttgggaactactacattaaacaattctattcaattaataatttatgcatggatt

SEQ ID NO: 12297 - DNA, 201 bp, Homo sapiens
gaaatactatactaagccattcctcaaaggccagtttagacactagcattaggcatcccttgcaaagcccaagagacaaaaggtctgagctgtagcccttrtacttctgacttgctgtgaccatgcttagatcgttggcctcagtacgcttcttcattaaatgggaagactaagctctactggactgcttcataagagtgt

SEQ ID NO: 12298 - DNA, 201 bp, Homo sapiens
ttgtgctgtttgcagtttttggtatattaaggtgtttccaatctgctaaataatcaaaggttactattaaaggcagccttccagtcaatgagtcgatggcwgctataaaactctttgtttctcttttccatgaccttgagcccaagcagggtctcatgccttgagatcatctcagcaagcatttgccaaatacttgttgta

SEQ ID NO: 12299 - DNA, 201 bp, Homo sapiens
ttaggcaatggggatgcccgaagggttaataaaacacagtcccagagttcctggagcttacagcctggttctccactttatgtgcattccagtttatgtcrtagaattggattggtatccggatgcccctggagaaatggtggtcctcacctgtgacacccctgaagaagatggtatcacctggaccttggaccagagcag

SEQ ID NO: 12300 - DNA, 201 bp, Homo sapiens
tgactttaccattatttcactgagtaaattaagcattggggtctcactttttcatctttaaaaggaaaatgcttactaaagaaatgtttctccaagtgcawaaagacataatcagcagaggaatggttaaataaaacatggtacactatactcttgcttaatgtgcagtcattgaagtggataacccaacccatatgtttt

SEQ ID NO: 12301 - DNA, 201 bp, Homo sapiens
actgtgtcctcagacaacagttgaggccttacctgccttactggctacaatcactaggaactctctccccaatgtgtaacacaggctaatttctgtctttsacttcagctcttctgacccccaaggggtgacgtgcggagctgctacactctctgcagagagagtcagaggggacaacaaggagtatgagtactcagtgga

SEQ ID NO: 12302 - DNA, 201 bp, Homo sapiens
acagataccgaattgttcccttacctcttcctctaggttcaagttaatatgttattggttgccttctataatatgttatctcattgcctttcccaacaagyctttgagataagtattaggtccattttatagacaaagagactgaggctcagcgagtaacttggccaacaagttgctcccactgctcaacagcaaatgagc

SEQ ID NO: 12303 - DNA, 201 bp, Homo sapiens
gggacttctttcttagaatataaacccttccaaaatggacatctttttttttaattggcagatagggatttcaccataagtcatttcctttactatttatkcattgaccaggcagcatgataaagtgtaatagaaccagagaacttgcttcaaaacttatggagggtttgtacttggtgggtggggtctagttcacatagg

SEQ ID NO: 12304 - DNA, 201 bp, Homo sapiens
gcctctctgaggaggtgacatttagctgacaccaaaaggaaagatgtcagttgtgttaagagcagagggaagcatatgtgcgaagcacctgctaggagccrtgatctttgtgtggagcagtgccaggcctacagagcccaaccacacaccctagcatgtctctgcctcctcttatctagaagacctaattgaggaaggagt

SEQ ID NO: 12305 - DNA, 201 bp, Homo sapiens
ctctgctcctggcctggaggaatggtgggtggcttctgtcattctttgccaacctttggagcatatggtcccgtgttataagcccacacttgacagcatayggttgttaataacaagtgtttgtccccctacagggtctttcatctgcagttaccaaagtacttaacggacatttaatgaacaacactaaccagattttta

SEQ ID NO: 12306 - DNA, 201 bp, Homo sapiens
tctgcctcctcttatctagaagacctaattgaggaaggagtctttgtgaaactcactgctgtatccttcatgcacagtccagtggctggaacataatgggygctcagtattcatggaataaacaagcaaattgagcatagagacaattgactgtaactgctccaagacatgtccgcaccaaaagctatgaaaagacaaaag

SEQ ID NO: 12307 - DNA, 201 bp, Homo sapiens
taagcactgagaactgggacctttccccaaatttctggccagcctggggcagaggtgagatgttctggctcccaccatgcccagtgcttttgcgacatgayctcttagcattcgattaatttcagtgcatgcaatgcagagtttttcttctttaaagatagtctccaggactgtcctttttattgtaaatctagccactac

SEQ ID NO: 12308 - DNA, 201 bp, Homo sapiens
gacatgacctcttagcattcgattaatttcagtgcatgcaatgcagagtttttcttctttaaagatagtctccaggactgtcctttttattgtaaatctasccactacaaaatgtactaaatgtctaagccaaagatcttaggactgggaatcagaggagcagactccagtcccaactatggttacataacagacttgtga

SEQ ID NO: 12309 - DNA, 201 bp, Homo sapiens
attgagcatagagacaattgactgtaactgctccaagacatgtccgcaccaaaagctatgaaaagacaaaagaaagggcagtaaatagaaaatctatcatytcatccccagggagaggctcagcttagttccatgttcagtgcaaagtgagggattagcacagacagggtggtccttcaatgcatggcccataaccattaa

SEQ ID NO: 12310 - DNA, 201 bp, Homo sapiens
ttcacaatgccccatgcactgtggggtaggtggttgacaagcatcatctcttttattctgcatccaaaaacaaaatacgatgtagatactgttatctgcaytttaaggaagaggaaattgagtcttagaaaagttaagcaacttgccccagatctcagatcttacagctagccgttcaaatccagatccactccactacag

SEQ ID NO: 12311 - DNA, 201 bp, Homo sapiens
tggccacagggatattgcaggaaagaaaacagaccggggttctggcctcctaaagagaaaggcaaagaaaagagagaggtagccaggaggcagagcatggmggacttgcaagcttgcaggactcagaatcttgttctgggggccccgggccctgaaacccactgaagggttttcagcaaggaagtaacacaatcagatatt

SEQ ID NO: 12312 - DNA, 201 bp, Homo sapiens
acagcactgagcagtgtccaagaaggcttgacttctaggcctgtctctgccactcacaaactttataagggaataaagtacatagcaaggtccgcctagasttagtagcagttctgacaaagctgtaatttgtcaatattccgtcacccaacccaggaatgctcatttttaaggtatttgactgaaacagttgagcattgc

SEQ ID NO: 12313 - DNA, 201 bp, Homo sapiens
tgaagtaggcattattgttatccctatttataagtgaggaaacagacacagagaacctaagacattttcctgaagttacacagctattaagtagcagtgcyagaatttgaaggcaagttttctgatgaaatgatcaggatatggtatttctcaatatctcagggatggctagagcaaatctgtctctctctcaccatcagc

SEQ ID NO: 12314 - DNA, 201 bp, Homo sapiens
caatgtgtaacacaggctaatttctgtctttgacttcagctcttctgacccccaaggggtgacgtgcggagctgctacactctctgcagagagagtcagargggacaacaaggagtatgagtactcagtggagtgccaggaggacagtgcctgcccagctgctgaggagagtctgcccattgaggtcatggtggatgccgt

SEQ ID NO: 12315 - DNA, 201 bp, Homo sapiens
ggtgatttaaaacagagggaacgaaatccttaaatatccatggaaaattgttaagagagtttctctgtacagttggctgactcctcagtctataagtaacrataactaacaccgaatttactgtgtggcagacactgtgctaagtactttacgtgctttttttttttttcatttaatcctcagtcaaatgtaaggcagata

SEQ ID NO: 12316 - DNA, 201 bp, Homo sapiens
gacaattgactgtaactgctccaagacatgtccgcaccaaaagctatgaaaagacaaaagaaagggcagtaaatagaaaatctatcatctcatccccaggsagaggctcagcttagttccatgttcagtgcaaagtgagggattagcacagacagggtggtccttcaatgcatggcccataaccattaaagcagaggtctt

SEQ ID NO: 12317 - DNA, 201 bp, Homo sapiens
cctacttctccctgacattctgcgttcaggtccagggcaagagcaagagagaaaaggtaagaagtgattcaggtgcagtatattccttggtcagttttacrgaggcccaccataaagtgagaagatgaatgatgataataacaatgacatccatgtatcacttaacaacagggatacattctgagaaattcatctttaggc

SEQ ID NO: 12318 - DNA, 201 bp, Homo sapiens
agtaaagctgtagctgatgcaggaattttgtgtaggtgttagcagcactgccctcactacgtgctcattggacagtagcccaaccccaagaaaaggatggytggtagccagtagtattatcatcatttcacaagtgattgaagactcagagaggttaagtgactttaccaaggtcacccagctaggaaatgacataaccaa

SEQ ID NO: 12319 - DNA, 201 bp, Homo sapiens
caagagtttagaaaacctatgaaattgcacacacaaaaatgtgttttaatcatcaagactctcagacttaccatgctgagaaatgtgggctgagggatagygctccctagtatcagctgatgggccagagagccaaaggaggagacccaccaccatcacctctcctggacagtgctctgtggtttcaaatgtaggtgatac

SEQ ID NO: 12320 - DNA, 201 bp, Homo sapiens
ggttggtagccagtagtattatcatcatttcacaagtgattgaagactcagagaggttaagtgactttaccaaggtcacccagctaggaaatgacataacsaagacataaactcaatctgccagacagaaaggccatgcacctaaccactccactacctctgatgttggtcattgatcttggcactcagaattagtcctga

SEQ ID NO: 12321 - DNA, 201 bp, Homo sapiens
tagcgagctcaggaaccttggtcctggcatatttgaccccttagtgacttctgatttggtaaaccacagaaattccagaaaatcagtgtgagaaactctcygaggtgtgacttaggagggcagacgatgcagtgaggctaagtgccaggttcttgatgctcctcttcagctttcctcctgcagctgttttccctgctgttg

SEQ ID NO: 12322 - DNA, 201 bp, Homo sapiens
gctgatgggccagagagccaaaggaggagacccaccaccatcacctctcctggacagtgctctgtggtttcaaatgtaggtgatactaaaatgggagttgyttcttagaaccatggccggggttcccttgaccctgaagtgcagttcacctgagattgtcaaatgcatctgaggcatgcagaggaagtgctgggcacacag

SEQ ID NO: 12323 - DNA, 201 bp, Homo sapiens
ggaggctatcctggaatagatatttacctaaatattattttacatcttggcaagtactttccctatttaagatctgtatgactaataggtgatattgagtrcttcctatgtgctaaagacttgctaagagtttaacgtgatttttaccttgaactataattctatgaagtaggcattattgttatccctatttataagtga

SEQ ID NO: 12324 - DNA, 201 bp, Homo sapiens
atcctggaatagatatttacctaaatattattttacatcttggcaagtactttccctatttaagatctgtatgactaataggtgatattgagtgcttcctwtgtgctaaagacttgctaagagtttaacgtgatttttaccttgaactataattctatgaagtaggcattattgttatccctatttataagtgaggaaaca

SEQ ID NO: 12325 - DNA, 201 bp, Homo sapiens
acctaagacattttcctgaagttacacagctattaagtagcagtgccagaatttgaaggcaagttttctgatgaaatgatcaggatatggtatttctcaawatctcagggatggctagagcaaatctgtctctctctcaccatcagctcaggactgggtgagtggccatggggtcttgaggcaaggcaattgtgctagaaa

SEQ ID NO: 12326 - DNA, 201 bp, Homo sapiens; identical to SEQ ID NO: 1529

SEQ ID NO: 12327 - DNA, 201 bp, Homo sapiens
gtaattataataggggtgtttgtttacattcctgattttcagtgtcccctggagccctatgccactctgctcctggcctggaggaatggtgggtggcttcygtcattctttgccaacctttggagcatatggtcccgtgttataagcccacacttgacagcatatggttgttaataacaagtgtttgtccccctacagggt

SEQ ID NO: 12328 - DNA, 201 bp, Homo sapiens
aagtacttaacggacatttaatgaacaacactaaccagatttttaaaaaataaataactaatcacatttcataagcactgagaactgggacctttccccaratttctggccagcctggggcagaggtgagatgttctggctcccaccatgcccagtgcttttgcgacatgacctcttagcattcgattaatttcagtgcat

SEQ ID NO: 12329 - DNA, 201 bp, Homo sapiens; identical to SEQ ID NO: 1534

SEQ ID NO: 12330 - DNA, 201 bp, Homo sapiens
tgtggtcttagcgccagcagcatctgcttcccctggaaactttctagaaatgcatattctcaggccctcatgcctgctgaatcagacactctgggggtggkactcagccgtctgttgtagcagtgcttccaggttatcctgacagtcactcaaattttagaaccactaggttctctatatgggagagagtagtctttgaac

SEQ ID NO: 12331 - DNA, 201 bp, Homo sapiens
gaagtttctctcccccagacctttggcaaagagtcttgtgctgtttgcagtttttggtatattaaggtgtttccaatctgctaaataatcaaaggttactrttaaaggcagccttccagtcaatgagtcgatggcagctataaaactctttgtttctcttttccatgaccttgagcccaagcagggtctcatgccttgaga

SEQ ID NO: 12332 - DNA, 201 bp, Homo sapiens
ctcctttcataaggagcaccatcccttcacttctatccatcaggctgcttgcaaaaggagctaacccgggcatgtgggattccaaggaactgaacattcckccagtggctctggggtttggtgaagagggaaagtcgagggacaaatcttgggtaagccacagtgttcggtgagcttcctccttcccacgaccaacataca

SEQ ID NO: 12333 - DNA, 201 bp, Homo sapiens
ctccatgagaatttgagagatttagacactctcttaagtaaaggcaaaggcctgagccaggggtatatggcagatcccttccaaccctgggattgttagcragctcaggaaccttggtcctggcatatttgaccccttagtgacttctgatttggtaaaccacagaaattccagaaaatcagtgtgagaaactctccgagg

SEQ ID NO: 12334 - DNA, 201 bp, Homo sapiens
atcctgacagtcactcaaattttagaaccactaggttctctatatgggagagagtagtctttgaacttggaaaacaagagaagctaaacccctacagcaakggctggtgaccaggtcgttgccagaacctgaaagttcgcctctgtattaccgttcctgtccctaacccaagtccttcagttctgggtgctccagcacaca

SEQ ID NO: 12335 - DNA, 201 bp, Homo sapiens
aaggtttttttacttgcccaggtaaaattgtgtgcaacaacaatgtcattttaacaaagggattactaaaccccaggtgatgacccactttttcaaacaargaattgcaagatactagatggaatgtgggtaacctcttagagtttagtttactggaatctgaaattgtatgatttccgtacattccttcatgctactaat

SEQ ID NO: 12336 - DNA, 201 bp, Homo sapiens
ccaaagtagaggatttgcaaagtataacaactgtgttcgtttctcattccaccacatgatactgccccctcagttggcactgtgatgacttacctctgacmaagcactttggaggaagcataggattcagactcacattgacttgggttcaagtcctaggtctgtcaatgactggttatgtgactttaagctgggtcacct

SEQ ID NO: 12337 - DNA, 201 bp, Homo sapiens; identical to SEQ ID NO: 1528

SEQ ID NO: 12338 - DNA, 201 bp, Homo sapiens
tctccactggtgatttaaaacagagggaacgaaatccttaaatatccatggaaaattgttaagagagtttctctgtacagttggctgactcctcagtctayaagtaacgataactaacaccgaatttactgtgtggcagacactgtgctaagtactttacgtgctttttttttttttcatttaatcctcagtcaaatgtaa

SEQ ID NO: 12339 - DNA, 201 bp, Homo sapiens
gggttttacaggcgcatgtaattgcagtacctctgtgcacatttccctactgcctagaatgactttcttgactatccatgatatataaaacacagataccraattgttcccttacctcttcctctaggttcaagttaatatgttattggttgccttctataatatgttatctcattgcctttcccaacaagcctttgagat

SEQ ID NO: 12340 - DNA, 201 bp, Homo sapiens
gtaaggcagatactgttattattatcattttacagatgaggaaactgaggctcatgataatgaaataccttgttccaaatcccccagctggttagtggagmcaggatgacagtcttggttcgttgttctcgacaccctgagcttttaaccactatgttactctgctgaatattgtgccctgccgtattctctatgaaactg

SEQ ID NO: 12341 - DNA, 201 bp, Homo sapiens
gatactgttattattatcattttacagatgaggaaactgaggctcatgataatgaaataccttgttccaaatcccccagctggttagtggagacaggatgmcagtcttggttcgttgttctcgacaccctgagcttttaaccactatgttactctgctgaatattgtgccctgccgtattctctatgaaactgaaattgtg

SEQ ID NO: 12342 - DNA, 201 bp, Homo sapiens
ctggaatagatatttacctaaatattattttacatcttggcaagtactttccctatttaagatctgtatgactaataggtgatattgagtgcttcctatgkgctaaagacttgctaagagtttaacgtgatttttaccttgaactataattctatgaagtaggcattattgttatccctatttataagtgaggaaacagac

SEQ ID NO: 12343 - DNA, 201 bp, Homo sapiens
gtagtaaatgctgtggaaggaggggagcaaatagtgggtcctgacttcatctaggcaccatgacacttcacgtgaattatgtcactaactccttaccacartagcatgcccattttatagatcaggagtgtggggcttaaaggggccaagtgactcacccagagtcacacagttctagaagtctgcctggccctcaaacta

SEQ ID NO: 12344 - DNA, 201 bp, Homo sapiens
acacactctgaaatactatactaagccattcctcaaaggccagtttagacactagcattaggcatcccttgcaaagcccaagagacaaaaggtctgagctrtagcccttgtacttctgacttgctgtgaccatgcttagatcgttggcctcagtacgcttcttcattaaatgggaagactaagctctactggactgcttca

SEQ ID NO: 12345 - DNA, 201 bp, Homo sapiens
tgtgaccatgcttagatcgttggcctcagtacgcttcttcattaaatgggaagactaagctctactggactgcttcataagagtgtaagatagctaaaaawaataataataataataataatgcagagagaatgaaaatctccactggtgatttaaaacagagggaacgaaatccttaaatatccatggaaaattgttaag

SEQ ID NO: 12346 - DNA, 201 bp, Homo sapiens
tgaaaatctccactggtgatttaaaacagagggaacgaaatccttaaatatccatggaaaattgttaagagagtttctctgtacagttggctgactcctcrgtctataagtaacgataactaacaccgaatttactgtgtggcagacactgtgctaagtactttacgtgctttttttttttttcatttaatcctcagtcaa

SEQ ID NO: 12347 - DNA, 201 bp, Homo sapiens
agcacagtgccctaagaccaagatgggcttgttttgggagagtatgcattgcagaaacaggctcagcttaccctgtgactatgttgccaaggggtcttcayagctttccttctcttttgcagaaagatagagtcttcacggacaagacctcagccacgttcatctgccgcaaaaatgccagcattagcgtgcgggcccagg

SEQ ID NO: 12348 - DNA, 201 bp, Homo sapiens
tttcctcgtccaggatacaatctaagacacaacactgaatttagtttcatgccctataatcacctcaagtctgggaaggttccttggtcttccttaaccaygcattaccttgacacatttgaagagctaggagcagttattttgtaaaatgtccctcaagtgacatttgtctcatgtttcttcatgattaaatttgggttc

SEQ ID NO: 12349 - DNA, 201 bp, Homo sapiens
accccttagtgacttctgatttggtaaaccacagaaattccagaaaatcagtgtgagaaactctccgaggtgtgacttaggagggcagacgatgcagtgargctaagtgccaggttcttgatgctcctcttcagctttcctcctgcagctgttttccctgctgttgagcaaacatcttctagggcttccgagcctcagttg

SEQ ID NO: 12350 - DNA, 201 bp, Homo sapiens
atgttcaaaaattgctttaaaatgtacctgatccaataagtaaaagcttactgtaaagtaaaatgtacctgatctaataactaaaagcttattgttattarttttattgtgctatttagaacctgaaagaagcataattctggaccctgtgcttcttgcaaggtttaggggatgaaggggtggtttttacctggccttggt

SEQ ID NO: 12351 - DNA, 201 bp, Homo sapiens
gtgaaagtaaatgtcagctagtattactattttggttgtttaaaatatctttcatgattcaagagatactttttattatcccaatgatcagtaaaaattawtagtagactaatagaatagttaatggtaaaataaggagttctgcccatccttctagtatctcacactcagtaaatgtgcattctgaccgttggctgtacc

SEQ ID NO: 12352 - DNA, 201 bp, Homo sapiens
ttatcattttacagatgaggaaactgaggctcatgataatgaaataccttgttccaaatcccccagctggttagtggagacaggatgacagtcttggttcrttgttctcgacaccctgagcttttaaccactatgttactctgctgaatattgtgccctgccgtattctctatgaaactgaaattgtgctggaagtttctc

SEQ ID NO: 12353 - DNA, 201 bp, Homo sapiens
cttgaacaagttatttaacatcttcgagcctcagttttctcatccttcaaatggaatgatagtacctacctcatagtgtggttgtgaggatcaaatgaaayaatgttcaaaaattgctttaaaatgtacctgatccaataagtaaaagcttactgtaaagtaaaatgtacctgatctaataactaaaagcttattgttatt

SEQ ID NO: 12354 - DNA, 201 bp, Homo sapiens
cccagttaaaaaatgaaaagctattattgcttcctaaagagtttttaaatctgtgagaagggggaaaaaaaggtttttttacttgcccaggtaaaattgtrtgcaacaacaatgtcattttaacaaagggattactaaaccccaggtgatgacccactttttcaaacaaggaattgcaagatactagatggaatgtgggta

SEQ ID NO: 12355 - DNA, 201 bp, Homo sapiens
ctatcatctcatccccagggagaggctcagcttagttccatgttcagtgcaaagtgagggattagcacagacagggtggtccttcaatgcatggcccatarccattaaagcagaggtcttctcactgtgcggtcccatctgattgttcagtgatgaggattctgagcatctctcagatcctgcaatacatgtggatctgag

SEQ ID NO: 12356 - DNA, 201 bp, Homo sapiens
aaaactaagcaccaaaggcagccatagaagctgcctcacgaggtccctaacaaccctgtgcaggaggaattctcatcccattattacagataaggaaactrtggccaaggtccctgttccaagggcagcctgagcatcagcaggactcacctgaaggcggggagagattggggatcccacaggaaagcacctctactgtcc

SEQ ID NO: 12357 - DNA, 201 bp, Homo sapiens
gagtttctctgtacagttggctgactcctcagtctataagtaacgataactaacaccgaatttactgtgtggcagacactgtgctaagtactttacgtgctttttttttttttcatttaatcctcagtcaaatgtaaggcagatactgttattattatcattttacagatgaggaaactgaggctcatgataatgaaatac

SEQ ID NO: 12358 - DNA, 201 bp, Homo sapiens
gtgtttccaatctgctaaataatcaaaggttactattaaaggcagccttccagtcaatgagtcgatggcagctataaaactctttgtttctcttttccatgaccttgagcccaagcagggtctcatgccttgagatcatctcagcaagcatttgccaaatacttgttgtaaacaaggttgtgtttaggcaatggggatgcc

SEQ ID NO: 12359 - DNA, 201 bp, Homo sapiens
gtctctgccactcacaaactttataagggaataaagtacatagcaaggtccgcctagagttagtagcagttctgacaaagctgtaatttgtcaatattccrtcacccaacccaggaatgctcatttttaaggtatttgactgaaacagttgagcattgcccttcatatagtttaaaacagtggtttcagaaccactttcct

SEQ ID NO: 12360 - DNA, 201 bp, Homo sapiens
cttatttaacataaaattatgcattttactatttcatggtggatatatcaatatgttgtggtcttttcccaatgaacactttgattttcaggggttctggrccctgaacatgggttaaaccagtggttctcaaggtgtggtcttagcgccagcagcatctgcttcccctggaaactttctagaaatgcatattctcaggcc

SEQ ID NO: 12361 - DNA, 201 bp, Homo sapiens
cccatgccatctgtgactatatctttttattctttaataataactcccttttctaattaaaggtaacaaacaaaacttaaaaaagagatgcccacccaagygtcattggcatgctgatgttggcaccagtgttgggaagcccttagcatactccaggaagtaggagtgtgtaacgtggggtccctttgtccttcatgcaag

SEQ ID NO: 12362 - DNA, 201 bp, Homo sapiens
ccaggttatcctgacagtcactcaaattttagaaccactaggttctctatatgggagagagtagtctttgaacttggaaaacaagagaagctaaacccctrcagcaagggctggtgaccaggtcgttgccagaacctgaaagttcgcctctgtattaccgttcctgtccctaacccaagtccttcagttctgggtgctcca

SEQ ID NO: 12363 - DNA, 201 bp, Homo sapiens
taacataaaatgtaacattttaaccattttcaggtgtacagttcagtggcattaaatacattcatattgttgtgcaaccatcactccacccatcaccagarctatttaatcagacccccatctatgagaggctgctggccaagtcagaaaaaggacccatgccagcacaggaagaaacctggggtttggtgtcagaaaacc

SEQ ID NO: 12364 - DNA, 201 bp, Homo sapiens
cagagtcacacagttctagaagtctgcctggccctcaaactagggatctttgcatgtgccacccatgccatctgtgactatatctttttattctttaatartaactcccttttctaattaaaggtaacaaacaaaacttaaaaaagagatgcccacccaagcgtcattggcatgctgatgttggcaccagtgttgggaagc

SEQ ID NO: 12365 - DNA, 201 bp, Homo sapiens; identical to SEQ ID NO: 1531

SEQ ID NO: 12366 - DNA, 201 bp, Homo sapiens; identical to SEQ ID NO: 1533

SEQ ID NO: 12367 - DNA, 201 bp, Homo sapiens
acactgacttaataaatatttattgagtaaaagtatttgctcctaggaagcgggatccaggtaagccctttttttctctctcaactgcttctagcccagtkctctttatgtagtaagcactaaataaacaactgctagatgttgatccagaaagtcacattccttctctaagctttaagtttctcatcttaaaaataagag

SEQ ID NO: 12368 - DNA, 201 bp, Homo sapiens
ccctgaaacccagttgcccaggatcatatgttgtgagaaataagaagagacattgctgttacaatgtcaccccacatcaacttttggcattctcttccagrttctgatccaggatgaaaatttggaggaaaagtggaagatattaagcaaaatgtttaaagacacaacggaatagacccaaaaagataatttctatctgat

SEQ ID NO: 12369 - DNA, 201 bp, Homo sapiens
attattttacatcttggcaagtactttccctatttaagatctgtatgactaataggtgatattgagtgcttcctatgtgctaaagacttgctaagagtttracgtgatttttaccttgaactataattctatgaagtaggcattattgttatccctatttataagtgaggaaacagacacagagaacctaagacattttcc

SEQ ID NO: 12370 - DNA, 201 bp, Homo sapiens
aaatggatagctcctggctgttccagatattataaaattattttactaaacagaatgtctacacttatagaggctaagatattggcttcccagcttcctcrccttacagcagaattcctttgcctgttgcaaggttccagaggcccttttgtaccgccccagactcctttcaccccacttttaaaatcactggacaaagcc

SEQ ID NO: 12371 - DNA, 201 bp, Homo sapiens
atctgagatgtggccattgataatgactgccttcccgaggcaccagcgtgagcacctgcggcagaggtgcctcacatttgccagccaggtgctcacagaasttaagtaactatccagtggactcacagctgatcaaaggtgcaagtgagatcataagccaaaaccactgaactccaaagccttattaggaaaataaagcat

SEQ ID NO: 12372 - DNA, 201 bp, Homo sapiens
ctgggtagaaatcagcccagttggagaaactgtgtcctcagacaacagttgaggccttacctgccttactggctacaatcactaggaactctctccccaakgtgtaacacaggctaatttctgtctttgacttcagctcttctgacccccaaggggtgacgtgcggagctgctacactctctgcagagagagtcagagggg

SEQ ID NO: 12373 - DNA, 201 bp, Homo sapiens
tattgggaactgagaatagtctctgctgtgtttgaacccactcatccaaattgcctggccatgcttcctgaagcctcatagcaccaaagaaagggataaamggagaattcaaagctacaaatgacttgctgaaattgcaccttgagtcaaaaataaaaacaagagctccagggcgtagatcttaggggccctgaagcagac

SEQ ID NO: 12374 - DNA, 201 bp, Homo sapiens
tctgccagtaggtggtgcaagttctatgcacacccctgtgaattgcaagcacagtgccctaagaccaagatgggcttgttttgggagagtatgcattgcaraaacaggctcagcttaccctgtgactatgttgccaaggggtcttcacagctttccttctcttttgcagaaagatagagtcttcacggacaagacctcagc

SEQ ID NO: 12375 - DNA, 201 bp, Homo sapiens
cacaaaaaggaagatggaatttggtccactgatattttaaaggaccagaaaggtaattctatacccttggatagtatcaattttctctttcgctcataagrgttaaaaacaacaacaacaacaaattgaaaagccaagtcatggtgagtgtaatgaattaacatcaagtctcttattgatgttaattgatgttaacctcca

SEQ ID NO: 12376 - DNA, 201 bp, Homo sapiens
ataagtaaaatatatatagtggatatatataatgtagagatgtatataacatggattatatatataatgtgtgtatacatatgtgtgtgtgtgtgtgtgtrtatatatatatatatatataaaatgtgtatacaattatcttgaatattcattgaaaaagttctggccaggcacagtggctcacacctgaaatcctaactc

SEQ ID NO: 12377 - DNA, 201 bp, Homo sapiens
actatgttactctgctgaatattgtgccctgccgtattctctatgaaactgaaattgtgctggaagtttctctcccccagacctttggcaaagagtcttgkgctgtttgcagtttttggtatattaaggtgtttccaatctgctaaataatcaaaggttactattaaaggcagccttccagtcaatgagtcgatggcagct

SEQ ID NO: 12378 - DNA, 201 bp, Homo sapiens
aggctcagcttaccctgtgactatgttgccaaggggtcttcacagctttccttctcttttgcagaaagatagagtcttcacggacaagacctcagccacgktcatctgccgcaaaaatgccagcattagcgtgcgggcccaggaccgctactatagctcatcttggagcgaatgggcatctgtgccctgcagttaggtgag

SEQ ID NO: 12379 - DNA, 201 bp, Homo sapiens
gccagcattagcgtgcgggcccaggaccgctactatagctcatcttggagcgaatgggcatctgtgccctgcagttaggtgagcaggccctcaaaggccascccaggcctgcactctcagtgcacctggatgcagggatatgattgggggctgtgttggagaggaaagggggatggagtggccagcacccagttgccagaa

SEQ ID NO: 12380 - DNA, 201 bp, Homo sapiens
atatttgaccccttagtgacttctgatttggtaaaccacagaaattccagaaaatcagtgtgagaaactctccgaggtgtgacttaggagggcagacgatrcagtgaggctaagtgccaggttcttgatgctcctcttcagctttcctcctgcagctgttttccctgctgttgagcaaacatcttctagggcttccgagcc

SEQ ID NO: 12381 - DNA, 201 bp, Homo sapiens
tgggctcaagcgattctcccgcctcaccctcccgcgattgtttttctcagagcaggccaacaaggagaggcaatcctaaagcccacttctttttccctccycatgaatatgaaggttgactttggacatgtacagaagccttccagtcctaactcagaaagctatgtccttccagccaccagccctttgctgggcatacag

SEQ ID NO: 12382 - DNA, 201 bp, Homo sapiens
caaagtcagtgtcttcctgagctcaggggatgtccctgtaatctgacaaggaaggatcctttgcaagggcactgaactgcattgtgccttttttaggggtrgaagctctcacttattccaccctctatcctggaatcgactctactggtatcccaagaatcatgaaataaaactctaacctggtacagccatggacatctc

SEQ ID NO: 12383 - DNA, 201 bp, Homo sapiens
gaaaaggtgagaaagccattgtgcccttgtcgcctttgacatgtcccagagcaaacctgaaaacaatttgggatgtacctcaagtacaggtggggacaggsgaaggagcaaggacttggaatcctttccacagagtgggagtggagaccatggggctgccgagatttaaatggggaagacgaatattagtgactctggtcc

SEQ ID NO: 12384 - DNA, 201 bp, Homo sapiens
cagtatcatcgatatcatttggggcaggacaggtacacatgatccccacctggcagtgctgtttaaaatgggccatgtagaaggcagggactgtgtcttaygcatcgtgcttgcaaagattggctacaggaacggcttcttgagaaaggtctggggaaatgctttgtaatgcgaagcactacagactttcagagtaagagg

SEQ ID NO: 12385 - DNA, 201 bp, Homo sapiens
gcctgaattgatccacctgcctcagcctcccaaagtgctaggattacaggcatgagccacacgcccggcccaatcctgggtttcttttgacaaagctttcytgagggcattcaaagggcttgatgttggcacagagaggctccaagagactgtagaaatatttagtgtggggcaaggagattctaacgcagtctcttcttg

SEQ ID NO: 12386 - DNA, 201 bp, Homo sapiens
catttataaagggtttcatccttttttcctttttggactctaaaatgtatgcattgagctggactgaaatatgaaagtgcagttcccagagcggtttgctyagggaaagttgtgctgtagccctcaactccagtagaacttctaagactctctctcacttggttttttgtcccatttcccatccagatttggaacttggct

SEQ ID NO: 12387 - DNA, 201 bp, Homo sapiens
atggcattgtttgtgaatttttaaagtgcttggctaatagaaacagctggtttctcacacctgcttctactttaaatctgttggtgatgtgctgtttttaytgaaggagaggaagataatccagccttacacagataagcagtgggaaaagggaggaatattttaatagccttttcaaataattatggatattcttctttg

SEQ ID NO: 12388 - DNA, 201 bp, Homo sapiens
gggatccttttgctcctcaggaacaatttcttgtccttcaagtcacattcctacccagccttcctggcacagcacaaatctcatctccccttaccacccakttgtcatctttgagctttttttcagctattgctggggaacgttaagacacacataacatacgactttgtgctgataattctttctctaagtctattacta

SEQ ID NO: 12389 - DNA, 201 bp, Homo sapiens
caggagtgttgcagggcatagagagtgtggtggtgttctgaggtggctgagaacaagatcaaagccaggagcagaagatggtaaccaaggtccctctgccrtgagttgcagaacccggaatggcagggcaaggcaggggatgtagatcagccttccagcctccacaggaaaatggggagataacccagcatttccagtgcc

SEQ ID NO: 12390 - DNA, 201 bp, Homo sapiens
gacagagtaagactccatctcaaaaaaaaaaaaaaaaaaaagagaaaccattcttaacttccaggctgtacagaatcagatgatagtctccattggcctgtgggccacactttgcagacccctatcttagagcattcttaggaaaaagcttccaagtccccattatatatcctcttgcctttaaatgtgcaactctgagct

SEQ ID NO: 12391 - DNA, 201 bp, Homo sapiens
tagagagtgtggtggtgttctgaggtggctgagaacaagatcaaagccaggagcagaagatggtaaccaaggtccctctgccgtgagttgcagaacccggmatggcagggcaaggcaggggatgtagatcagccttccagcctccacaggaaaatggggagataacccagcatttccagtgcccggggaggcaggagggtg

SEQ ID NO: 12392 - DNA, 201 bp, Homo sapiens
taacttccaggctgtacagaatcagatgatagtctccattggcctgtgggccacactttgcagacccctatcttagagcattcttaggaaaaagcttccargtccccattatatatcctcttgcctttaaatgtgcaactctgagctaggtctgcatgcgaagctgtagtcagatcaccaccctctctgtgtgggcatgac

SEQ ID NO: 12393 - DNA, 201 bp, Homo sapiens
agagagtgtggtggtgttctgaggtggctgagaacaagatcaaagccaggagcagaagatggtaaccaaggtccctctgccgtgagttgcagaacccggamtggcagggcaaggcaggggatgtagatcagccttccagcctccacaggaaaatggggagataacccagcatttccagtgcccggggaggcaggagggtgg

SEQ ID NO: 12394 - DNA, 201 bp, Homo sapiens
ggggagaggggaagatggcattataggtagagggacagatgagcaaaggtccagaggtaaggaagtgtcagagggtggctgtaccagcagcacccagaagygcaggtgagccaaggcatgtgaggtggggaggcaagaggagagctgtgggctaagcttctgcgtgcctggtagaggaatttgaaacaaagtcaggaagca

SEQ ID NO: 12395 - DNA, 201 bp, Homo sapiens
tgtgatgggaataaaaaggaggatgggatgaactctgcctgagaggtataggggaaggattcacagagaaagtgacatttgggctgggtgctgaagtttgwgtgcagattagagttgatgggcttttcaagtcaaaggaatagcacctataaaggcgagggaatcgtctgtgtgcacacagcctgccatgtgtggaagtgt

SEQ ID NO: 12396 - DNA, 201 bp, Homo sapiens
gtgacacatagagccagagtcaagtaaaagttctgtctacaccttctacccagccccattttccatacagtcccccaaacgtctgcctctttctccatcartcatatccctggtggttaataattgcttctttaaaaggcacttggttgcctggggagtatgcatattacataagctatttagcgtcctaatcaagtttaa

SEQ ID NO: 12397 - DNA, 201 bp, Homo sapiens
ctactcaggaggctgaggtgggaggatcacttgagcccaggaggttgaggctgcagtgagctgagatggcaccactgcactccagcctgggtgacacagtragaccctgtccccaaacaaacaaacaaaaatttgaacaatcaaaaactgggcaaaataaatgattgtttcaaaagcaaagttatacagttcacttgaaat

SEQ ID NO: 12398 - DNA, 201 bp, Homo sapiens
ccccaaacgtctgcctctttctccatcagtcatatccctggtggttaataattgcttctttaaaaggcacttggttgcctggggagtatgcatattacatragctatttagcgtcctaatcaagtttaagttccctgctctgtattttcttgcagtgggaaacatttcccttttttctaaaaaagtgtggatttactttta

SEQ ID NO: 12399 - DNA, 201 bp, Homo sapiens
caaagaaagggctgtgtgtgtgtggccactttttactttacgagtgtcaccagtatttgctgtttgtagcaggtctacaactaacaactccatgtggcccrtttcctcactcatacattttgcatcaggtttactttggagcgcatatcaggaagttgccttactcaaagctagactttctcaagacttttttttttttta

SEQ ID NO: 12400 - DNA, 201 bp, Homo sapiens
ttactttggagcgcatatcaggaagttgccttactcaaagctagactttctcaagactttttttttttttaaatgggtgagataggtatttggttacacayactattttaaaagttcaggctgaaatgtctgtggctaggcaccatggtggtggttggagagaggagtagccaagagagtgggattccagggctcttactg

SEQ ID NO: 12401 - DNA, 201 bp, Homo sapiens
gtccactgagttgacgtgacgttgactatctattttggacactttatttctaatttttctccagaatgtagacaccatgatgagcatctttatgcatgtgkatttttatttgcttttgaattactttcataataaacaagttcaagaaaaataggattgctggcttaaagggtgcgggcattttaatgacacccgataggt

SEQ ID NO: 12402 - DNA, 201 bp, Homo sapiens
gccacttgcagattccgtacctgtttgcttgaaggcagggaggcaggcctgcatggtcgtctccttctcagggttacagccccaggaaaatcccagtgtgyggtttttagagccacacctgctgatctggagacagctgttttcctttctcagcatagccctcgggaagcttagcccactttgaggagttgattgcttttg

SEQ ID NO: 12403 - DNA, 201 bp, Homo sapiens
ggtgtattgcttgaggtcaggagttcgagaccagcctgactaacatggtgaaaccccatctctactgaaaatacaaaaatattagccaggcgtgggtggcrcatgcctgtaatcccagctactctagaagctgaggcaggagaattgtttgaccccaggagagggaggttgcagggaaccgagatcgcactactgcactcc

SEQ ID NO: 12404 - DNA, 201 bp, Homo sapiens
ttgttttggattttacagaatcgtgttacatgtagctccatagaagcagaaatgactcagtgcagaggatattaatacattaatagattcttaggaagggrcaagcccagcttgcagtcttatttacccagcaactcacaggttttatggtttgaatgaagctcattcatataacagaactgcagcctcaattcacagcac

SEQ ID NO: 12405 - DNA, 201 bp, Homo sapiens
gtggcgtgatcttgactcactgcaacctccacctcctgggttaaaacgattttcctgactcagcctcctgagtggctgggactacaggtgcacgccaccaygcctggctaatttttgtatttttagtagagacaggatttcaccatgttggccaggctgctctcgaactcatgacctcaagcaatctacctgctttggcct

SEQ ID NO: 12406 - DNA, 201 bp, Homo sapiens
cgctgctgggaggcctctgatgaccagggctccgttccctggctacgtatgctgtgtgcgggctggtggcaatggcttcaagatcatcccccagtttcacrgttaaactttggacatgcatctgttacagtatggtggatgttttaatctatttcagtctagatgtttgagattcccctttcaggagtgtgagtcttagtc

SEQ ID NO: 12407 - DNA, 201 bp, Homo sapiens
attataattgtcttgattagcctgtcttcctactggactatgagctccttgaaagcaaagaacctgacttttatcttagcattcctggcactgagcataawgcctagaacagagaagccaggccaaggtgtgtgctgaagggatagaaacgaaactccagtactcagcattcgtgtgatcttcacagctcagctgtgttca

SEQ ID NO: 12408 - DNA, 201 bp, Homo sapiens
ttgaacctggggttggggggtgggggtggcggaggttgcagtgagccaagatcgtgccattgcactctagcctgggcaacaagaatgaaacgcagtctccmaaaaaaaaaaaaaaaaagaaatttcttcccattgacatccattcttctgggtgaaaaggggacacagatttaaagacatacaatgggctacatgttttta

SEQ ID NO: 12409 - DNA, 201 bp, Homo sapiens
tagtagagaaggggtttcactatgttggccagactggtcttgaactcctgacctcaggcgatccaactgcctcggcctcccaaaatgctgggattacaggygtgagccaccatgcccagccaatttccatgcccatcttttcttcaccagccactgactttctctgagtccccagaatcctgcccatttcactccattgaa

SEQ ID NO: 12410 - DNA, 201 bp, Homo sapiens
tttttaaatgggtgagataggtatttggttacacacactattttaaaagttcaggctgaaatgtctgtggctaggcaccatggtggtggttggagagaggrgtagccaagagagtgggattccagggctcttactgcttccaatttcacctgttatccctgataagatttcatgtgaaaaagaaaagaagtaggcagagag

SEQ ID NO: 12411 - DNA, 201 bp, Homo sapiens
ccaatttttgtggctcttgaatgtgtcatgcagttgtggggtcagtgctccgggtaagtccattagatcaagagtgctaattgtgtggttcagaacatccrtatttttcctgtcttttaaaatttggtctaattattctgttgaatacagagatgattgcgggtttctttcttccctgtagttttgtcaacttttgcattc

SEQ ID NO: 12412 - DNA, 201 bp, Homo sapiens
tggagtgcagaggcatgatctcggatcatagcagtctcaacctcctgggatcaagtgatcctctcacctcagctttcaagtagctggaagcacaggcatgyaccaccacgcccagctaatttttgtttatttttcatagagatgaggcctcactatgttgcccaggttggtctcaaactctctttccccagccatccctga

SEQ ID NO: 12413 - DNA, 201 bp, Homo sapiens
tgtttattgatttttgactgtattacaaattaaaatggaaaagtatgtaaaatatttatgtattaattcacttgaaaataacaataatgtctcattacatkgtaacattttttaagtgaaaaatgactgtcttttccaagacaaaaacactttcatgagaaggatggcattgtttgtgaatttttaaagtgcttggctaat

SEQ ID NO: 12414 - DNA, 201 bp, Homo sapiens
tcaagtacaggtggggacaggggaaggagcaaggacttggaatcctttccacagagtgggagtggagaccatggggctgccgagatttaaatggggaagaygaatattagtgactctggtccttagccagtgtgagaccctaactaacccctccacccaccagccccctgcacgaccacccagtgtgcttttcctcatgtc

SEQ ID NO: 12415 - DNA, 201 bp, Homo sapiens
ggtgcccgccaccacgcccagctaagtttttgtatttttagtagagatggggtttcaccgtgttagccaggatggtctcgatctcctgacctcgtgatctrcccacctcggcctcccaaagtgctgggattacaggcgtgagccaccacacctggcctatccactcctgatttttataccattgtagtcatgtatgttagt

SEQ ID NO: 12416 - DNA, 201 bp, Homo sapiens
tatatttttttttctgccaaactattcagtcctgtttttcatcttcataaacagaggggatataattcctttaaaatccgtgtctgataacctcagtcttygccattcttttcccattcgtttatttccattgtctattatttctgctgttttcattcatatgatcatgtttctttgcatacctggttattttttattgtg

SEQ ID NO: 12417 - DNA, 201 bp, Homo sapiens
ccttgagggagctggaggtgtcagggaaggcttgtggaggaagaagatccttacatggagactggaggagtgacagggtcatgcggggcgtgggatggacrgtggagaggaggatattgagtttccaaacccaggggaaagcctgggcgaagggcctgaagggggtgggagctgggagaaatgcagggtccctggagaggc

SEQ ID NO: 12418 - DNA, 201 bp, Homo sapiens
ttcttcctgtagacatgatttttgttgttgttgctttaatcgagtgcttgggggcaacacaaatctgctatcatgtcattccggtctcaggaattgagacratgtgtgtcagtttattttggatacctttccttctatggtgtagccctttagaaatttcatccccaaggaaataaccaaagatgagcacaaaaatgcata

SEQ ID NO: 12419 - DNA, 201 bp, Homo sapiens
caaaaagaaaaaaagacaaaaacaacaacaacaacaaaaaaaaaaaccccaaaaaaaccttaacctttaagtttcacatggtgcagattactgcctatcayagcctcagctcttggagtgctcatggtcacaacggaatgtacagacatatccacggatggtcaggacacaaagaagactagaaagaagacacagatataa

SEQ ID NO: 12420 - DNA, 201 bp, Homo sapiens
aattcctcacagctgctttcattgctaaattgaggttctcatttttatcttgtccccataacctctgacatcagtgactgcaccgccattccttcctggaygtctccctccgcagacatccgtgactgcaccccccccccccgccccgaattccttcctggacgtctccctccgcagacatccgtggcggcacctccccat

SEQ ID NO: 12421 - DNA, 201 bp, Homo sapiens
ttaattgacactttcaccactttcatagataatatgaagacctcagaactttaactccatttacccactcgcccaggctggagtgcagtggcgctatctcrgctcactgcaagctgcctcctgggttcacgccattctcctgcctcagcctcccgagtagctgggactacaggtgcccgccaccacgcccagctaagtttt

SEQ ID NO: 12422 - DNA, 201 bp, Homo sapiens
acacagatataacatcggattacaattagaatctcagtgttggaaaaggacctcagagaccatccgggccaatctttaaccttggaagaatgccctctgarttaatctgttctcacgctgctaataaagacatatccaaggctgggtaatttgtaaagaaaagaggtttaatgaactcacagttccacatggctggggagg

SEQ ID NO: 12423 - DNA, 201 bp, Homo sapiens
accggaaagttggggttagtgtaattcttgtgtgtagatgggtccctggtcctggcgagtgatttctgagtgagtgaatgaacgggtgaacaaatagccaytggaatggggactgtttcccatggatgcaaagcctctgccaagcgatagacccatatgtaacttactaggttggtggagtcggaagtggtgtcagcttct

SEQ ID NO: 12424 - DNA, 201 bp, Homo sapiens
gacaagagagatctgtgtcatgctggttcctgggacatgagtttgctgcctctcccatctgcaggtgtagcatggatgctcaattccatttgggccaataytcactgagcacccactatgctgaagttgggagatacctgctgtcgaagtgcgttaattacaaacacgcatcattcaaccccagaaccgtgtttgaggaat

SEQ ID NO: 12425 - DNA, 201 bp, Homo sapiens
ttatgagcattgcggggagtcagttggctgcctgctgagctgaccctcaggaagtgctcaccacctttgtgaattcacagcagtccaggatcagtcaggcyaggcccagaaatacaattgtatctatctatctatcatctgcctgtctgtctgtctgtctgtctgtctatctatctatctatctaaaagagacaaggtctc

SEQ ID NO: 12426 - DNA, 201 bp, Homo sapiens
ctattttgggagccgggcgtggtggctcacacctgtaatcccagtactttgggaggctgaggtgggtggatcacttgaggtcaggagtttgaaaccagccygggcaacatagtgaaaccccaatctctactaaaaatacaaaattagtcaggcatggtcgcacgtgcctgtaataccagttacttaggaagttgaggcagg

SEQ ID NO: 12427 - DNA, 201 bp, Homo sapiens
gccctgagtgggtaaggggccttctctgtgttcccacgataccactgcatgccctggtcattgcgcttcccagagtgtggcatgggaacccttctacataytctcctgactaggctgtgagcaacttgagggcatgtacagcaccagtcaattgtcccccatggccaggcacagtggctcacacctgtaatcccagcactt

SEQ ID NO: 12428 - DNA, 201 bp, Homo sapiens
tcatgggtgtctgtgctgcgggtacacgcagggctgagtgtgtgcatctgagtattcgtgtgcacgtgaaagtctgcgtatgtgagtttgtgcaaggaaaygaacatagcctgagctgtgaagatcacacgaatgctaagcactggagtttctactgtaaatctcaggtacgggtctaacccgacgggggtgaagctgctc

SEQ ID NO: 12429 - DNA, 201 bp, Homo sapiens
gtaaatctcaggtacgggtctaacccgacgggggtgaagctgctcccattgatgaaagactctgcatcactgtagcaggcagaaaaccagatcttgggggrcagcaagcaaataggggtcctcttccttgcgttccatgtctctgcgtttatcatgttctgatagccgcttgcaagtggcaggcctgtgtctctctgggct

SEQ ID NO: 12430 - DNA, 201 bp, Homo sapiens
actgtagcaggcagaaaaccagatcttggggggcagcaagcaaataggggtcctcttccttgcgttccatgtctctgcgtttatcatgttctgatagccgyttgcaagtggcaggcctgtgtctctctgggctacatcattgtgaccttttagcaggggccttcaaatctcaagccaaggatgtaatgatgctatttccct

SEQ ID NO: 12431 - DNA, 201 bp, Homo sapiens
ttggccaggctggtcttgaactcctgacctcaagtgattcacccacctcagcctcccaaagtgctgggattacaagcatgagccaccgtaccaggcctgtwcctcatcatttcaaatgctcattccttgggcccttccacagatgcagttcttaaaaaaaaatcaactcaacattctcatccccttaaggcttgcagagac

SEQ ID NO: 12432 - DNA, 201 bp, Homo sapiens
aatggaaaatgacatgagagagtgctgcacagtgagggtgtcttggcttgtcatgggggtggggaagctccttccatgaaggaagagttgttatgctgtgrccatgagcccacaagcagagaggcctggaggaaatgaaggggaggggaaggggaaggtggtaagagacagatgagagaagggcttaaaaaatcctcagat

SEQ ID NO: 12433 - DNA, 201 bp, Homo sapiens
ctgagatgggtggattacttgagcctgggaggttgaggctgcagtaagccagaattgcaccactgcattcgagcccagggcaacagagtgagaccctgtcyaagaaaaaaaaaaaaaaaaagtctcctaaaatcagaagtgattcctaatggattttttttccctgttagattttaatttaacttaaaaatttcaccctaa

SEQ ID NO: 12434 - DNA, 201 bp, Homo sapiens
atttcctatcatgagaacagcacaggaaagacctgcccccatgattcaattacctcccactgagtccctcccacaacaagtgggaattatgggagctacarttcaagatgagatttgggtggggacacagccaaaccatatgactttcctataaggaaagtaggatattatagagtttggtatagctgcatttgacctgtc

SEQ ID NO: 12435 - DNA, 201 bp, Homo sapiens
acttctgcttaaatgcctcaagggattggtttcttactaatttttaagacagccagctcttctgtgggttagctcgggtagaaaagtttgtgagttactgkcatcaaacaagtaagggcattttaaggtgaagttaataaacagttggaaggagggcttttcagctctcaactctatgattggcaatttctggttccctac

SEQ ID NO: 12436 - DNA, 201 bp, Homo sapiens
tacaggcatgtaccaccacacccagctaatattttttatttttagtagagttgaggtcttgctctgttacccaggctagtctcaaactcctgggctcaagygatccttcctcctcagtctctggaaatgctgggattacaggtgtgagtcactgctcctggcctcttttttcttttttgaaaatgctttgtccatatgttt

SEQ ID NO: 12437 - DNA, 201 bp, Homo sapiens
ctacagtgcatttactgactgcgtttggcatctatttgtgaatcaaatcacaaaatatttggccttcatcatagcctgggctcttaacgcaggaatcagaytgcctgtgtttaaatctttgcttttctatttacttgctctgtgagtttgagcacgttaacatctctatgtctgtttcttcacctataaaacgcatataat

SEQ ID NO: 12438 - DNA, 201 bp, Homo sapiens
ctaagtctcatttccagttcctccatgacgtggcaagtgaagacaggaatgaaaggaatgtaaagcagcttttctctgaagagaagaagagagagagacasagccaaggtacgctgaggtggagaagagggaagctggagggctctgtggtggaggaggttcttctcctaaggaatgaggtggtcgtgtgctgaggggtgt

SEQ ID NO: 12439 - DNA, 201 bp, Homo sapiens
ttgtttgaccccaggagagggaggttgcagggaaccgagatcgcactactgcactccagcgtgggtgacagagcaagactgtgtctcaaaaaaaaaaaaawaataataataacatgatattttaaggtgttaaagctctacattcatacatttgtaggaatagataaggggcaatcagatgtgtgcacaagtccttcctta

SEQ ID NO: 12440 - DNA, 201 bp, Homo sapiens
ggaatgaaaggaatgtaaagcagcttttctctgaagagaagaagagagagagacacagccaaggtacgctgaggtggagaagagggaagctggagggctcygtggtggaggaggttcttctcctaaggaatgaggtggtcgtgtgctgaggggtgtggggaggagtggagagtagaggagagtggagctgtctgagagcca

SEQ ID NO: 12441 - DNA, 201 bp, Homo sapiens
gtaaagcagcttttctctgaagagaagaagagagagagacacagccaaggtacgctgaggtggagaagagggaagctggagggctctgtggtggaggaggwtcttctcctaaggaatgaggtggtcgtgtgctgaggggtgtggggaggagtggagagtagaggagagtggagctgtctgagagccactgggagggctcag

SEQ ID NO: 12442 - DNA, 201 bp, Homo sapiens
tttggaaggccgaggcaggtggattgcttgaggtcaggggttcaagaccagcctggccaacatggtgaaaccctgtctccactaaaaatacaaaaaattamccgggcgtggtggtgcacacctgtagtcctagctactcaagaggctgaggcaggagaatcacttgaatccaggaggtggaggttgcagtgagctgagatc

SEQ ID NO: 12443 - DNA, 201 bp, Homo sapiens
tctcttcaccctcaagagccattctgtagaaagtcctcagggcatgaaagtgctttgccagggacctttgaggctaagtgtaaagcttttggaactggcartgtgccccagacttgtctaaagaatgggaacagtggcctgaaacaccaaatgtcaaaagcaatgtttgtttggataatatagaggattgattctgcccta

SEQ ID NO: 12444 - DNA, 201 bp, Homo sapiens
aaagtgatggaattcagacatgagccatgtgcctggcctcatttttaaaatttttaattaaaaaaattttttttaaatagagacagggtcttgctatgttrcccagactggtcttgatctcctggcctcaagcaatactcccacctcggtcccccatagtgctgaggttataggtgtgagccaccgtacgcagccatggtt

SEQ ID NO: 12445 - DNA, 201 bp, Homo sapiens
tctatgtctgtttcttcacctataaaacgcatataataacagccctaggccgggcgcgatggctcacacctgtaatcccagcactttgggaggccaaggcrtgcggatcatttgaggtcaggagtttgacaccagcctggccaacatggtgaaaccccatctctactaaaaatacaaaattagctgggcatagtggtgggt

SEQ ID NO: 12446 - DNA, 201 bp, Homo sapiens
ccacgggaaatgattaccctggaggtaagttctccactttgctggcctccccaggtaaggacagtcatgaagcctgtctccttgaaggccctgagagccasttgcagattccgtacctgtttgcttgaaggcagggaggcaggcctgcatggtcgtctccttctcagggttacagccccaggaaaatcccagtgtgcggtt

SEQ ID NO: 12447 - DNA, 201 bp, Homo sapiens
aatcacttgaactggggaggtggaggttatagtgaaccgtgattgtgccactgcactccagcctgggcaacagagtgagactctgtctcaaaaaaaaaaawaaaaaatagggtgggctggactggccaatgataactattaaccccaaagaaagggctgtgtgtgtgtggccactttttactttacgagtgtcaccagtat

SEQ ID NO: 12448 - DNA, 201 bp, Homo sapiens
ccatctctactaaaaatacaaaaaattagctgggcatggtggcaggtgcctataatcccagctactcaggagactgaggcaggagaattgcttgaacctgmgaggcagaggttgcagtgagccaagattgcgccactgcactccagcctggacaacaagagcaaaactctgtctcaaaaaaaaaaaaaaaaaaagaagaag

SEQ ID NO: 12449 - DNA, 201 bp, Homo sapiens
cacatgttcctgagtggtttctgagcacccagacgtttgaaaactatggccccacccgctgactgggagacaaagcaaacacctgccttggggaagagcargatgagaggtaggagggtgaagtggagagtggagggaggcacgaattgaggccagggctcctagtgcctctggagctcatatgaagggagaggtagaatc

SEQ ID NO: 12450 - DNA, 201 bp, Homo sapiens
tcccaggctgagggccagttctggggttagagcagttggcaggagaagcttactgaggcactgctccagggtcccagggtctgggtggtgagcggtcaagsttgagctgttgctgctgcttgcttctggaagaaaagataggagatagtctgaggcactggcaaaagctattcccaggcatagattttgaaatgttttttg

SEQ ID NO: 12451 - DNA, 201 bp, Homo sapiens
tgtgtttcaatctcccatttcttaccccacggcctcccctcaacaacagggttgagttccagaacaagttctatgtcggggatggttacaagttttctccrttctcctttaaacacatcctggatggcacagccgaggagtaggctgagggctgcacctcccacggtggtcaccatgccaatgaaggaagttcagtcttgt

SEQ ID NO: 12452 - DNA, 201 bp, Homo sapiens
ggttttttccgatccccatccatgacctccctcctcttggatttcactcccctcagggccttttaaaacattccccgactgtcagcctttgagagactccrtgggcatgtaagaaatgtgtagaaaagacctttagagctgggggtgtgggaaacagctgaggaggtaacgggtagggaagtgggggtggggggacggtgg

SEQ ID NO: 12453 - DNA, 201 bp, Homo sapiens
attatcctcctccctctgtttcttgtttgtctcctctgtgcagccttgaaatcctggaatttctctgtattcaggcttggacctccactgcctctccctcrttatgggttgaagtgtgctgccccattccattcatatgttgtagttctaatccggaggatctgagaatgtggctgtatttggaaacagggtctttgccga

SEQ ID NO: 12454 - DNA, 201 bp, Homo sapiens
gagcccttgtagggcagttagctggggacacgggctcagctacgagtccgggttttttccgatccccatccatgacctccctcctcttggatttcactccyctcagggccttttaaaacattccccgactgtcagcctttgagagactccatgggcatgtaagaaatgtgtagaaaagacctttagagctgggggtgtggg

SEQ ID NO: 12455 - DNA, 201 bp, Homo sapiens
tgaagtgtgctgccccattccattcatatgttgtagttctaatccggaggatctgagaatgtggctgtatttggaaacagggtctttgccgagataattarttaagatgagtttatagcagagtggggtgggcccctaatccaatatgattggtgtccttataaaaagggatttggacacagacacacacatgtgaatgtg

SEQ ID NO: 12456 - DNA, 201 bp, Homo sapiens
aacatggtaaaaccccctctctactaaaaatataaaattagctgggtgtggtggcacacgcctgtaatcccagctactcgggagggtgaggcaggagaatmacttgaacctgggagctggaagttacagtgagccgagatcacaccactgcactccagcctgggtgacagagcgagactctgtctcgaaaaaggaaaaaaa

SEQ ID NO: 12457 - DNA, 201 bp, Homo sapiens
ttaattaagatgagtttatagcagagtggggtgggcccctaatccaatatgattggtgtccttataaaaagggatttggacacagacacacacatgtgaakgtgaaggcatagattggagtgatgcttctccaagccaaggaatgccaaagattgccagcaaccaccagcagccaagtaagagacctggaagattcttcct

SEQ ID NO: 12458 - DNA, 201 bp, Homo sapiens
cagtccatactaacacagttgcttaaagaggtaatgtggaaaaatggggaaaaaattaaaacactgacttaaattctggttccttttctaccacttttggytgagtaacttatacaagaaatttaacctttgtgtgccggggctttcatcagtggtcctagtagttagcctcctgcactggtcaggttaggctaaactctg

SEQ ID NO: 12459 - DNA, 201 bp, Homo sapiens
gacccaaactctacaaaaaaaaaaaaaaagagagagagagacagagaaaaatttctttaaaaaaaattgctgagaagattaggaacaaggcaaggacattsttcctcaccactccatttcacatcatactggagtcctaactaatgccataagaaaaagaaatgaaaaccatactgattaggaaggaagacataaaatttt

SEQ ID NO: 12460 - DNA, 201 bp, Homo sapiens
taggctgagatgggaggatcacctgaacctgggaggtcaaggctgcagtgagctatgattgtgctactgcattccagcctgagtgacagagcaagaccctyccccccccacaaaaaaaattgtctgtcacatcagagagcatgaggggagaatgagctatggctgtcttcttcgttctgttatttacttctttcctgtgtt

SEQ ID NO: 12461 - DNA, 201 bp, Homo sapiens
aggccagggtgggtggatcacgaggttaggagttcaagaccagcctggccaagatggtgaaaccccgtgtctactaaaagtacaaaataattagccaggcrtggtggcaggtgcttgtaatcccagctacttgggaggctgaggcagagaattgtttgaacccaggaggtggaggctgcagcgagccaagattgcaccact

SEQ ID NO: 12462 - DNA, 201 bp, Homo sapiens
ctactaaaagtacaaaataattagccaggcatggtggcaggtgcttgtaatcccagctacttgggaggctgaggcagagaattgtttgaacccaggaggtrgaggctgcagcgagccaagattgcaccactgcactccagccttggtgataagagcaagactcgtctacaaaaaaagaaaaagaaaaaaaaaaagaaaatc

SEQ ID NO: 12463 - DNA, 201 bp, Homo sapiens
ccctgctctataattagggtcaatgggaaactgcaacaacacaacccaggcagaactacaaatggcccacactcttcaggaatgaaaatttgggtcactcyaccaggtaaagaaccacaaccagctgaggtgcttgctgaaggtaaagggaacatagaacaggtattctgtagtgtaggtagttataaatactggatacaa

SEQ ID NO: 12464 - DNA, 201 bp, Homo sapiens
tcgtccttcataactcagctggaaatcttctttcctagtcccccagtctggaagatgccttcctgtggttctggggcatgctcttaacctagcttcaattrtaattgtcttgattagcctgtcttcctactggactatgagctccttgaaagcaaagaacctgacttttatcttagcattcctggcactgagcataatgcc

SEQ ID NO: 12465 - DNA, 201 bp, Homo sapiens
aacacaggaagccctgtgttaaaggaatgcccgttttaaaggcacgtaagtggaatgctcatctcttcaccctcaagagccattctgtagaaagtcctcarggcatgaaagtgctttgccagggacctttgaggctaagtgtaaagcttttggaactggcagtgtgccccagacttgtctaaagaatgggaacagtggcct

SEQ ID NO: 12466 - DNA, 201 bp, Homo sapiens
ttgagtgatctgcccacctctgcctcccaaagtgctgggattacaggcatgagccaccatacctgactgattctcagattctgaaatgacagttaagcccrggactcaagccagggacagaagcagataacctggttttggtgagaaggttatgcacttgcttctgaaaatgttgatgatgagactaagtcttatagtttc

SEQ ID NO: 12467 - DNA, 201 bp, Homo sapiens
cttgattatgtcaaatttctctcctactctttttttttttttgagaaagagtcttgctctgtcacccaggctggagtgcagtggcgtgatcttgactcacygcaacctccacctcctgggttaaaacgattttcctgactcagcctcctgagtggctgggactacaggtgcacgccaccacgcctggctaatttttgtatt

SEQ ID NO: 12468 - DNA, 201 bp, Homo sapiens
aatcccagctactggggaggctgaggcaggagaatcacttgaacctgggaggcagaggttgcaatgagctgagatcatgccactgtactcccagcctgggygacagagcaagactgtctggaaaaaaaaaaaattatcttgattaattagaattaatgaaaaatctcaatcgtgaaaattcttcccaagaaaattctaggt

SEQ ID NO: 12469 - DNA, 201 bp, Homo sapiens
agaggacatcagcgtctagctctgacacacagacggtttgagatggtcgttctctgctttcctctattagtgcaaaagattaagcggaatgtgctgagacygtgtatgttttaaatggttgtagatatgttcagattaaattctatttttctgagatctttgttggatattgacctggacaggcagcagagtcagggacct

SEQ ID NO: 12470 - DNA, 201 bp, Homo sapiens
cccaaagtgctgggattacaggcatgagccaccatacctgactgattctcagattctgaaatgacagttaagcccaggactcaagccagggacagaagcarataacctggttttggtgagaaggttatgcacttgcttctgaaaatgttgatgatgagactaagtcttatagtttcttgtgcacctcccttggtgcctaga

SEQ ID NO: 12471 - DNA, 201 bp, Homo sapiens
ccagctctctcccaccttgcagatcattcccaactctctaagcatgtggttggtctttctggtgtggccagaccccacttcaactataaggtgcccaactkaagccactgcattcgcataaacgatcaggtgtggtcccaggggcccagcatgaataacaaagaccctttcacgtgggaaatgccagtggtttagaggtta

SEQ ID NO: 12472 - DNA, 201 bp, Homo sapiens
ggaatgatcttgttttttctcactctatcatagtcgccaggtggccttgcctgatgttgctgttctatgaagttgcttatgctcagcaggagacacgatgrcttagctatgggtgccaggccagttccttcctgtcaggggtgacttttccctttatgaacacacaaacacttctctgctatggaaatccagccatttgca

SEQ ID NO: 12473 - DNA, 201 bp, Homo sapiens
ttaagcccaggactcaagccagggacagaagcagataacctggttttggtgagaaggttatgcacttgcttctgaaaatgttgatgatgagactaagtctyatagtttcttgtgcacctcccttggtgcctagaagaaaggttaaaacaggatacattacagagggactatcttgagagaggagttacctgggcacagccc

SEQ ID NO: 12474 - DNA, 201 bp, Homo sapiens
ttgatgtgtggcaagatgtgcagagaatcgccagcctaggccggtcacccaagcttcagtgtccaaagttttactggagtttcctcatgcaggcaggattsactgattgattgactgatgattgattggtggatgcagccccagcagttgctgcagagtccccagctctctcccaccttgcagatcattcccaactctcta

SEQ ID NO: 12475 - DNA, 201 bp, Homo sapiens
accacgtccagcaaatttttgtatttttagtagagacggggtttcaccatgttggctgggctgctcttaaactcctgacctcaggtgattcgcctgcctcracctcccaaagtgctgacattacaggtgtgagacatcacacccggccatactgagcattaatgtgccagtctctcagctagactatcgttttggggggat

SEQ ID NO: 12476 - DNA, 201 bp, Homo sapiens
aatagagacggggtgccaggctggtctcgaactcctgaccccaggtgagccacggtgcctggcctaatttttgtatttttagtagagatgggttttcaccrtgttggccacgctagtcttggactcctgacctcaagtgatctgccagcctccgcctcccgaaatgctgggattacaggcgtgagtcaccacacgcagctg

SEQ ID NO: 12477 - DNA, 201 bp, Homo sapiens
ctgaaagtcacctctgtgctgaggtgctcttgtctcctggaaatccccaggccagggggcattatattgctaagtgacaggtagtattgggcttgtgagaygcttcggtggcctcatggctctcgttaatcttagagccagcatgtctctcttacagtgtgtctcttacagaggccatgtgtgctgaaaaagattaccctg

SEQ ID NO: 12478 - DNA, 201 bp, Homo sapiens
gctgttgacctagaccggtgtgggagtggaaacagggaatggttctagcctcgtggacttcactggtttgtgtgtggggaatccaggcagttaaacaagcrattgcaaatgattgctcttctgggggcatgtaggagggggcttagctccttgagggagctggaggtgtcagggaaggcttgtggaggaagaagatcctta

SEQ ID NO: 12479 - DNA, 201 bp, Homo sapiens
gagtctctccaaggtaagtgctcctctggccccagaaatatttgagggttcaaaaaaagactggaggccaggtgcggtgtctcacacctgtaatcccagcrctttggaaggccgacaggtggatcacctgaggtcaggagttcaagaccagcctggccaacatggtgaaagcccatctctactaaaaatacaaaaattagc

SEQ ID NO: 12480 - DNA, 201 bp, Homo sapiens
ttgatttctgtgcccatcttttttttggaatggagtcttgctctgtcccccaggctgcagtgcagtggtgcaatctcggctcactgcaacctccgcctctygggttcaagcaattctccttcctcagcctcccgagtagctgggattacaggcatctgctaccacgcccagctaatttttgtatttttagtagagaagggg

SEQ ID NO: 12481 - DNA, 201 bp, Homo sapiens
gttttcttcctatgaggggtacttccctgggcatctgggcttgagccaagacaagctggttggctggaaatggcagcacctccgtttctcctgagcagagwctctccaaggtaagtgctcctctggccccagaaatatttgagggttcaaaaaaagactggaggccaggtgcggtgtctcacacctgtaatcccagcgctt

SEQ ID NO: 12482 - DNA, 201 bp, Homo sapiens
tcatggttcaaagagattgtctcagatatacatcatgggtaagaaaaagtaggagttcccattttaaaagttatttttttgagacagggtcttactcttgycaccttggctggagtgcagtggtacaatcatggctcactgtggccttgcactcccgagctcaagtgattctcccacctcagcctcctgagtagctgggac

SEQ ID NO: 12483 - DNA, 201 bp, Homo sapiens
gtgccacttagatgccaaagcccatgtgagggtagaggaggcatctctggggtctgggcacctgttattgaagtcccttctccccgcttcccagcagccgsctcctcagtgggtgcccctctggcctggctcaggacattgcaaaggaaggatcagtgcaaattagcacctgactgtgtgagcacgtgtgtgtgtgtgatg

SEQ ID NO: 12484 - DNA, 201 bp, Homo sapiens
ccgccctcactgcattgagtgtgcctgtgggaactgtccaaacaggtgagcaaggggaatgccgagggctggggcaggcttggtgccacttagatgccaargcccatgtgagggtagaggaggcatctctggggtctgggcacctgttattgaagtcccttctccccgcttcccagcagccggctcctcagtgggtgcccc

SEQ ID NO: 12485 - DNA, 201 bp, Homo sapiens
cagcctcccaaaatggtaggattacaagcgtgagccactgcacctggccaacatttttaatgtgtcagatttggctgggtctaaagtgtactagcagaccygccctcactgcattgagtgtgcctgtgggaactgtccaaacaggtgagcaaggggaatgccgagggctggggcaggcttggtgccacttagatgccaaag

SEQ ID NO: 12486 - DNA, 201 bp, Homo sapiens
attattctgttgaatacagagatgattgcgggtttctttcttccctgtagttttgtcaacttttgcattcaatatttgaggctgtaattgaggtacaaacraatacggaattttgacaacttcctggcaaattgaaccttcttttaaaaaatcattgtgtaatatccctcatctcttttatatttttgagatggagtctct

SEQ ID NO: 12487 - DNA, 201 bp, Homo sapiens
ttttgttgcccaggctggagtgcaattgtgcgatctcggctcgccacagcctccacctcctgggttcaagtgattcttctgcctctgcctcctgagtagcygggattacaggcataagccaccatgccatgctgggctaattttttaaaaaagcttttgtagagacggggtctcactttgttaccagcctcccaaaatggt

SEQ ID NO: 12488 - DNA, 201 bp, Homo sapiens
ggaggcaggcctgcatggtcgtctccttctcagggttacagccccaggaaaatcccagtgtgcggtttttagagccacacctgctgatctggagacagctsttttcctttctcagcatagccctcgggaagcttagcccactttgaggagttgattgcttttgtgggtgtttgattcttacaggcagtgtggtcttgtctg

SEQ ID NO: 12489 - DNA, 201 bp, Homo sapiens
taccacctgttacctcatggaggttatagtctagctagaaagatgaataaccaagcatctataataagagccaaaatatgtagatcgcttgcggtgtgtcygagatggctaagcactctgtcctcgttgagttctcaccgctccctccattcattccttagacattccctgtgtactaggaacggatctagggcttacaca

SEQ ID NO: 12490 - DNA, 201 bp, Homo sapiens
tgagaaagttctgtttcctccttcctttgcgcaggaccaaccctggccaaagaatcttccccctcctccttctttccctcccacctctcttccctccttcyctcccccttcccagcctggccatgaataaagctcataacgctacctgccgagcaagccgagtggagggaggcaaaggccaggctgaggatcagggtggcc

SEQ ID NO: 12491 - DNA, 201 bp, Homo sapiens
aaaggaatgcccgttttaaaggcacgtaagtggaatgctcatctcttcaccctcaagagccattctgtagaaagtcctcagggcatgaaagtgctttgccrgggacctttgaggctaagtgtaaagcttttggaactggcagtgtgccccagacttgtctaaagaatgggaacagtggcctgaaacaccaaatgtcaaaag

SEQ ID NO: 12492 - DNA, 201 bp, Homo sapiens
aatctttaaccttggaagaatgccctctgagttaatctgttctcacgctgctaataaagacatatccaaggctgggtaatttgtaaagaaaagaggtttamtgaactcacagttccacatggctggggaggactcacaatcatggcagaaggcaaaggagaagcaaaggcacatcttacatggtggcaggcaagaaagcgt

SEQ ID NO: 12493 - DNA, 201 bp, Homo sapiens
ggctaattttttaaaaaagcttttgtagagacggggtctcactttgttaccagcctcccaaaatggtaggattacaagcgtgagccactgcacctggccarcatttttaatgtgtcagatttggctgggtctaaagtgtactagcagacccgccctcactgcattgagtgtgcctgtgggaactgtccaaacaggtgagca

SEQ ID NO: 12494 - DNA, 201 bp, Homo sapiens
agcagtggacatcttgatttgtgggtatgagggatataagatttgatagacattgataaattgctctctgaaaaagctacaaagaatttacacgttaacgytggatatacccaatgggcatatggattaccaaatctcattctgatgacaaaaactatttttcctgactagggaaattgaagacaaagtattctggaatcc

SEQ ID NO: 12495 - DNA, 201 bp, Homo sapiens
gccaccatgccatgctgggctaattttttaaaaaagcttttgtagagacggggtctcactttgttaccagcctcccaaaatggtaggattacaagcgtgarccactgcacctggccaacatttttaatgtgtcagatttggctgggtctaaagtgtactagcagacccgccctcactgcattgagtgtgcctgtgggaact

SEQ ID NO: 12496 - DNA, 201 bp, Homo sapiens
ctacttgggaggctgaggcaggagaatcgcttgaacccgggaggcagaggttgtagtgagccgagattgcaccattgcaccccagcctgagcaacagagcsagactctgtctcaaaaaaataaaaataaaaataaaaaaaacagcagccctaactcctaggattgcttggcaaatgaaattatgtttacatgtaaaactgc

SEQ ID NO: 12497 - DNA, 201 bp, Homo sapiens
gcgatggctcacacctgtaatcccagcactttgggaggccaaggcatgcggatcatttgaggtcaggagtttgacaccagcctggccaacatggtgaaacyccatctctactaaaaatacaaaattagctgggcatagtggtgggtgcctgtaatcccagctacttgggaggctgaggcaggagaatcgcttgaacccggg

SEQ ID NO: 12498 - DNA, 201 bp, Homo sapiens
cgggtggatcacttgaggtcaggagttcgagaccagcctggccaacatggtgaaaccttgtctccactaaaaatacagaaattagctgggcatggtggcayacaccagtagtcccagctacttgggaggctgaggcaggagaattgctttaacctgggaggtggaggttgcagtgagctgagatcatgccactgcactcca

SEQ ID NO: 12499 - DNA, 201 bp, Homo sapiens
tgcaatggaagaatctgaggcatgcatatatatataatatatattataaatatatattatgttataaatatatatattatttatatttataatatatattwtatatatatatatatattttttttttttttttttttgagacagagtcttgctctgtcacccaggccggagggcagtggggcaatctcagctcactgcaac

SEQ ID NO: 12500 - DNA, 201 bp, Homo sapiens
aggtgcaatggaagaatctgaggcatgcatatatatataatatatattataaatatatattatgttataaatatatatattatttatatttataatatatwttttatatatatatatatattttttttttttttttttttgagacagagtcttgctctgtcacccaggccggagggcagtggggcaatctcagctcactgc

SEQ ID NO: 12501 - DNA, 201 bp, Homo sapiens
tgaggccttgcttgcacttcagtttattttctaatgcaggtgcaatggaagaatctgaggcatgcatatatatataatatatattataaatatatattatrttataaatatatatattatttatatttataatatatattttatatatatatatatattttttttttttttttttttgagacagagtcttgctctgtcacc

SEQ ID NO: 12502 - DNA, 201 bp, Homo sapiens
aagtctggccacccctgagaagccatctgtgctccaatttccgtctaagacttggccacggtgaggggagcaaaagagcctgaaattggaagactgtccamggaatatacagaggtgagaaatttgtgggcaacattgatctggacttattttttcctgctgctgtagagggtggggtggggcattgactgttagtttgtg

SEQ ID NO: 12503 - DNA, 201 bp, Homo sapiens
cgtttccccactcttaagtttctccacctttgcagagtgctgtgaaggctgagacaactcaggagggtgcattggttcaaagtttattggctggccaggcrcagtggctcacacctgtaaccccaccactttgggaggccatggtgggtgggtcatttgagatcaggggttcgaggccaacgtggccaacatggtgaaacc

SEQ ID NO: 12504 - DNA, 201 bp, Homo sapiens
aaaaggaagcttctgtgtcaccttccatgtcagtatcatgacttttccagcacagtggaaggcacatattagatgctcaatattcacttaatgagattgarcaaaagaatgatagctaaggtcagaaggtgtacatgtttgagtcccaactttgatgctttatcatgagtgccctcaggaaagaaatggagttgttcccct

SEQ ID NO: 12505 - DNA, 201 bp, Homo sapiens
agaggctgaggtgggaggatcacttgagcccaggaggtggaggttgcagtgagccatgattgtgccactgcactccagcctgggtgacagagcgagacccwctttcaaaaaaaattgaaaaacagaatgcctaggaacagatgcactcatttatgtggcagctaagcatgtgtcagggtagggatggtgagaaaagacaac

SEQ ID NO: 12506 - DNA, 201 bp, Homo sapiens
aaatgagaaaccccatcactctaatgtcttcatttgtattttgcctcttgtactatttctctctatagccgtagacaggtataattttatatgattgtagyatacatggaaataatttttttcttttctttgttttacctaatatgagatccctccccatattactgtgcatccttcgtaaagatcatttttaaatttgac

SEQ ID NO: 12507 - DNA, 201 bp, Homo sapiens
atatctttttttttttttttttttcaggctggagtgccgtggcgtgatctcggctcactgcaacctccgcctcccaggttcaagcaattcttctgcctcarcctcctgagtagctgggactacaggtgcacaccaccatgcccagctaattttttttttttttaatttttgtattttcagtagagacggggtttcaccatg

SEQ ID NO: 12508 - DNA, 201 bp, Homo sapiens
cccggaagacagaggttgcagtaagctgagatgctcctgaccctgcattccagcttggccgacagagggagactccatctccaaaaaaaaaaaaaaaaaaraaaagaaaatggcatttggcctgggccttgaaggatggctagaattttgacagggggagaggggaagatggcattataggtagagggacagatgagcaaa

SEQ ID NO: 12509 - DNA, 201 bp, Homo sapiens
tgaacccggaagacagaggttgcagtaagctgagatgctcctgaccctgcattccagcttggccgacagagggagactccatctccaaaaaaaaaaaaaaraaaaaaaagaaaatggcatttggcctgggccttgaaggatggctagaattttgacagggggagaggggaagatggcattataggtagagggacagatgag

SEQ ID NO: 12510 - DNA, 201 bp, Homo sapiens
agtgatccgcctccctcagcctcctgagtagctgggactatcagtgtgcaccaccacgcctggctaatcttttttttttttttgtagagacagggtctcaytatgttgctcaggctcagactcttttatgtatgtgatcatttaacacttaggaacaagaaatccatcccgttgcactgattcaacatctgagattcagaa

SEQ ID NO: 12511 - DNA, 201 bp, Homo sapiens
cctgtcctagcctcctatgtagttgggacaggtgctccctcagccaggctaaattttttttttttttttttttgagagatgggatctcactttgttgcccrggctgaccttgaactcctaggctcaaacatgaaacatattttatttaggaatttgttggcttgatgtataacttttaaatatttcaacctatggcatgtg

SEQ ID NO: 12512 - DNA, 201 bp, Homo sapiens
catgttggccacgctagtcttggactcctgacctcaagtgatctgccagcctccgcctcccgaaatgctgggattacaggcgtgagtcaccacacgcagcygggcacatttcttttctttttttatttttattttattttatttatttatttttttgagacggagtctctctctgtcgcccaggctagagtgtagtggcac

SEQ ID NO: 12513 - DNA, 201 bp, Homo sapiens
gtgctcttgtctcctggaaatccccaggccagggggcattatattgctaagtgacaggtagtattgggcttgtgagatgcttcggtggcctcatggctctygttaatcttagagccagcatgtctctcttacagtgtgtctcttacagaggccatgtgtgctgaaaaagattaccctgtttgttgtatcatcaaaacataa

SEQ ID NO: 12514 - DNA, 201 bp, Homo sapiens
ggggcctcctgggttgagggtccctgcgagcaaactgctggtggtgtgtggtgcatgtgaatggtggagaaacagacaaaagatgggtgtggagaagagtrtagaaagcacctagagagagaaagctgatcttgtgttccatcaaactttgtgatttttttttttttgactttgtgatttttgacaagtcacttagcttct

SEQ ID NO: 12515 - DNA, 201 bp, Homo sapiens
taatgtaacgcagcagctctgaaaatcctaaaacaccgccacttgctcccgtaaggaaatgccaaagacaggattcattttgatagtatttttaaggaatrtctattgtgtccactgagttgacgtgacgttgactatctattttggacactttatttctaatttttctccagaatgtagacaccatgatgagcatcttta

SEQ ID NO: 12516 - DNA, 201 bp, Homo sapiens
aggcggagattgcagtgagctgagactgcaccactgcactccagccttggtgacagagcgagatcctgtctcaaaaaatagataaaataaaataaaatgaraggatagaccagataccctttatccaagcagtgcatggtgattgttcttctccagcctgaggcccagtcgaatttgtggcctgtaatgcaggggcctcct

SEQ ID NO: 12517 - DNA, 201 bp, Homo sapiens
aaatcaagaagatctgtgatgggtaagagggagtgaatggctctttcttcagtgatttgggccaggattagataaagagatgtgcaatgccaaatgcacaygactgtggcttctagaggtcagtaaggctttagaataactttctcacataaaagtcagccccaactgatttttaatagttgtaagaatatgaatagggag

SEQ ID NO: 12518 - DNA, 201 bp, Homo sapiens
tggtgtcctaagctgtggaatcttgctaccttggttaataaaataaaggtgtaggctgggtttggtggctcacgcctgtaatcccagcactttgggaggcrgaggaggtggatcgcttgaggtcaggagttcgagaccagcttgaccaacatggcaaaaccctgtttctactaaaaatacaaaaattagtagggcatggtg

SEQ ID NO: 12519 - DNA, 201 bp, Homo sapiens
tctttcttcagtgatttgggccaggattagataaagagatgtgcaatgccaaatgcacacgactgtggcttctagaggtcagtaaggctttagaataactktctcacataaaagtcagccccaactgatttttaatagttgtaagaatatgaatagggagaacttgaatatgcaaaatgtgagggtaactaaaagtggaca

SEQ ID NO: 12520 - DNA, 201 bp, Homo sapiens
gtctggcccgttactccctggctctgtgggcaccaaagtcattagtcatttcttaagtgcctgcactaacaaactcctaagagtccgataagatatatatrtgatacacaagatatatatcatatatgatatatgtgataaacaagatatatatgtttgcatatatatatagagaggtagggtctcactcttgcccaggct

SEQ ID NO: 12521 - DNA, 201 bp, Homo sapiens
ttgaccttttgtgagtacgtattgagctttttttttaaaaaaaaaaaaatagaatctcgctctgtagcccaggctgttgtgcagtggcacagtctcggctyactgcaacctctgcctcccgggttcaagtgattctcctgcctcagcctcctgagtagctgggattacaggtgagccctaccacgtccagcaaatttttgt

SEQ ID NO: 12522 - DNA, 201 bp, Homo sapiens
aatagggagaacttgaatatgcaaaatgtgagggtaactaaaagtggacatgttccccatttcagtctattccatctgagacttttcatcagctgctccasagtaatccaactgcatggctaacttgttttggattttacagaatcgtgttacatgtagctccatagaagcagaaatgactcagtgcagaggatattaata

SEQ ID NO: 12523 - DNA, 201 bp, Homo sapiens
caaactcctaagagtccgataagatatatatatgatacacaagatatatatcatatatgatatatgtgataaacaagatatatatgtttgcatatatatakagagaggtagggtctcactcttgcccaggctggagtgcagcggtgagatcacagctcactgcagcctcagcctcccaagctcaaatgttcctcccacctc

SEQ ID NO: 12524 - DNA, 201 bp, Homo sapiens
ctactcgggaggctgaggcaggagaatcgtttgaacctgagaggcaaaggtttcagggagccgagatcgcgccactgcactccagcctgggcaacaaagcragactccatctcaaaataaaataaaaggaaataaaatacataaaatttagtagctgcatgtggctgtggtagaagtcaactcagttttagattctggaca

SEQ ID NO: 12525 - DNA, 201 bp, Homo sapiens
aagtgacgtactgggaacccttatgactgggactccttttccagtggccaaagacgcagttattctaggataggctggccatctaactaaagtcagcaaaygatgtcttagcagaaaaggggatgcagaatgctttgcagcaagaactcacctgtttcctttggaatatattaaacacaggtttcgagccactgtctaccc

SEQ ID NO: 12526 - DNA, 201 bp, Homo sapiens
ttaaaagacaccatatgaccaatttttgtggctcttgaatgtgtcatgcagttgtggggtcagtgctccgggtaagtccattagatcaagagtgctaattrtgtggttcagaacatccatatttttcctgtcttttaaaatttggtctaattattctgttgaatacagagatgattgcgggtttctttcttccctgtagtt

SEQ ID NO: 12527 - DNA, 201 bp, Homo sapiens
ttccttcaccaatacaatgagggccatatcttggcatcttcacagtcctgtggttattgtgtgggaaagacaccagtacacagaacttagaagactcgatkcttggtgtcctaagctgtggaatcttgctaccttggttaataaaataaaggtgtaggctgggtttggtggctcacgcctgtaatcccagcactttgggag

SEQ ID NO: 12528 - DNA, 201 bp, Homo sapiens
cctgattccatctgcaaagaccctctttccaaaaaggccatattcacaggtatcagagttcaggactcttttatgtggacaattcaacccataacaatagracaatgaggaatttagaagaaaaggaagatacaatctctgcctaagggttttagcctctagcgggggagataaactgctcaggagagttcaaggccaggt

SEQ ID NO: 12529 - DNA, 201 bp, Homo sapiens
ctttgggaggccgaggtgggcggatcacctgaggtcaggaatttgagaccatcctggccaacatggtgaaactctgtctctactaaaaataaaaaaattakccaggagtggtggcgcacacctgtagtgccagctacttgcgaggctgaggcaggagaatcactggtacccaagaggcggaggttgcagtgagctgagatt

SEQ ID NO: 12530 - DNA, 201 bp, Homo sapiens
ggacaatgaggaatttagaagaaaaggaagatacaatctctgcctaagggttttagcctctagcgggggagataaactgctcaggagagttcaaggccagrtgacagccacaggtcaaaggagcctgccagagcagaggaagctgctgtggcctgtgacactccatttttggcaccttgtcaaacagctctgtgaaggttc

SEQ ID NO: 12531 - DNA, 201 bp, Homo sapiens
cagcgctttgggagcccaaggtgggaggatcgtttgaggtcaggggattgagaccagcctgggcaacatagcaagaaaacatctctacaaaaaaaagttarccaagtgtggtggcacacaccggtagtcccagctacttaggaggctgaggtgggaggacaacttgagcccaggaggtcaaggctgcagtgagctatgatc

SEQ ID NO: 12532 - DNA, 201 bp, Homo sapiens
tgaataatttcacggggtgggaggagtgaagccattaggttgaggagtgggtggcatgcagctggttcggccgatggggaactagctgggtggcatatctrgtgacggcagatctcgtggtatctgaagaaaccctctctgagcaggcggcattgatagcatgggaaggttgggggcgggaggaagggtttttcaggcgga

SEQ ID NO: 12533 - DNA, 201 bp, Homo sapiens
gaaacgagagggtgaatgttgaagcatttgggggattgaatgtaagaacactaaggtgtgttttgcctgtaactcacctgtcttgtgcatggaagtatctrttcctaagataattccagcaacattctctagtattaaaaagataataaaatgaccaaaagggggcttagcgcagtgcctcacgcttgtaatcccagcact

SEQ ID NO: 12534 - DNA, 201 bp, Homo sapiens
tagaagaagaagaaatatgtatgccaaggacgccaaaaccaagctgttgcattgggtggaagttggactagatgatttcttatggcctttccacctccaarcttcttcaagcatttgaacctagggcattgttagctgctgacctgggatgggtcattaaagcaatctgtgtcaaagattgtgcacctagatggggatcag

SEQ ID NO: 12535 - DNA, 201 bp, Homo sapiens
gggaactagctgggtggcatatctggtgacggcagatctcgtggtatctgaagaaaccctctctgagcaggcggcattgatagcatgggaaggttgggggmgggaggaagggtttttcaggcggaggaatctgaaggtaaaggccttgcagtaggaatgggttagaaggtgggagctttctttatccccttcgtacagata

SEQ ID NO: 12536 - DNA, 201 bp, Homo sapiens
gtgttttactctggatattgccttttgcccaatcttttatgaaatctcttgtcatctgtgtctaatcctcttttataactacccattgggttcttaatttygattatcttagttttagttccagaatttccattctgttcttttttatatttttttttctgccaaactattcagtcctgtttttcatcttcataaacagag

SEQ ID NO: 12537 - DNA, 201 bp, Homo sapiens
agtcatattttaaaatattttgccagctgagagcagtggctcatgcctgtaatcccagcactttgagagaccagagtgggaggatcacttcagtccaggarttcaataccagcctgggcaacacagcaagactctgtctcaacaaaaaaataaaacaactagctgggtgtggtggtgcacacctgcagtcccagctacata

SEQ ID NO: 12538 - DNA, 201 bp, Homo sapiens
atagtggttgctctatgaattactgagcgccttgtggctagaagtaggcaagaagaggaaaaacgtgcatagaagaagaagaaatatgtatgccaaggacrccaaaaccaagctgttgcattgggtggaagttggactagatgatttcttatggcctttccacctccaaacttcttcaagcatttgaacctagggcattgt

SEQ ID NO: 12539 - DNA, 201 bp, Homo sapiens
gctactcaggaggcagaggcaggagaatcgcttgaatccaggaggcggagattgcagtgagctgagactgcaccactgcactccagccttggtgacagagygagatcctgtctcaaaaaatagataaaataaaataaaatgaaaggatagaccagataccctttatccaagcagtgcatggtgattgttcttctccagcct

SEQ ID NO: 12540 - DNA, 201 bp, Homo sapiens
cagcctcccgagtagctgggactacaggtgcccgccaccacgcccagctaagtttttgtatttttagtagagatggggtttcaccgtgttagccaggatgrtctcgatctcctgacctcgtgatctgcccacctcggcctcccaaagtgctgggattacaggcgtgagccaccacacctggcctatccactcctgattttt

SEQ ID NO: 12541 - DNA, 201 bp, Homo sapiens
tactatatataatgtatataatatataatatataatgtatataatgtatataatatataatatataatgtatataatatatataatgtatataatatattrtatatatagatatatatatttatttatttatttttgagatggagtctggctctgttgcccaggctggagtgcagtggcgtgatctaggctcactgcaacc

SEQ ID NO: 12542 - DNA, 201 bp, Homo sapiens
cagtggcgctatctcggctcactgcaagctgcctcctgggttcacgccattctcctgcctcagcctcccgagtagctgggactacaggtgcccgccaccaygcccagctaagtttttgtatttttagtagagatggggtttcaccgtgttagccaggatggtctcgatctcctgacctcgtgatctgcccacctcggcctc

SEQ ID NO: 12543 - DNA, 201 bp, Homo sapiens
actccatttacccactcgcccaggctggagtgcagtggcgctatctcggctcactgcaagctgcctcctgggttcacgccattctcctgcctcagcctccygagtagctgggactacaggtgcccgccaccacgcccagctaagtttttgtatttttagtagagatggggtttcaccgtgttagccaggatggtctcgatc

SEQ ID NO: 12544 - DNA, 201 bp, Homo sapiens
gttcacatggtctcccttcctcttttggacatttaaaagtagagtgaggccaggcgcggcggctcatgcctgtaaccccagcactttgggaggccgaggcrggcggatcacgaggtcaggagatcgagaccatcctggctaacacggtgaaaccccgtccctactaaaaatacaaaaaaattagccgggtgtggtggcaca

SEQ ID NO: 12545 - DNA, 201 bp, Homo sapiens
ataacctcatttcggggttatgcagctggaagaggcaatacaagttaataaagtcccttcccaacattgtcctggctgtctttgaatatcaaaggatagcyacacacacacacacacacacacacacacacacacacacacacactcatcccgttgctttgtacgtcatcgggggaaaatcctgttgcataaaaatggaca

SEQ ID NO: 12546 - DNA, 201 bp, Homo sapiens
gaacctgagaggcagaggttgcagtgagccaagattgcgccactgcactccagcctggacaacaagagcaaaactctgtctcaaaaaaaaaaaaaaaaaaagaagaagaagaagaaaaaatgccttgtaatcaggttttcataaggagtgagtgtagataagaatcagaaacaggtgcattactgttgggcaccattttgt

SEQ ID NO: 12547 - DNA, 201 bp, Homo sapiens
attgcttgaacctgagaggcagaggttgcagtgagccaagattgcgccactgcactccagcctggacaacaagagcaaaactctgtctcaaaaaaaaaaawaaaaaaagaagaagaagaagaaaaaatgccttgtaatcaggttttcataaggagtgagtgtagataagaatcagaaacaggtgcattactgttgggcacc

SEQ ID NO: 12548 - DNA, 201 bp, Homo sapiens
ttattgccactctgatttcttccatttcttttagcctcattatcaacttaatattttatttatttatttatttatttatttatttatttatttatttatttttatttttggagatggagtcccactctgtcacccaggctggagtgcagtggcacgatcttggctcattgcgacctccgcctcctgggttcaagtgattct

SEQ ID NO: 12549 - DNA, 201 bp, Homo sapiens
agcaccaccacactcagctaattcttgtattttttgtagagatggggttttaccatgttgcccaggctggtcttgaacccctgggctcaagccatccaccygccttagcctcccaaagtgctgggattacaggtgtgagctactgcacccggtctgggttttgtcattttacctttaccccctcaaactaaataagattgg

SEQ ID NO: 12550 - DNA, 201 bp, Homo sapiens
tttattgccactctgatttcttccatttcttttagcctcattatcaacttaatattttatttatttatttatttatttatttatttatttatttatttatttttatttttggagatggagtcccactctgtcacccaggctggagtgcagtggcacgatcttggctcattgcgacctccgcctcctgggttcaagtgattc

SEQ ID NO: 12551 - DNA, 201 bp, Homo sapiens
ctttattgccactctgatttcttccatttcttttagcctcattatcaacttaatattttatttatttatttatttatttatttatttatttatttatttatttttatttttggagatggagtcccactctgtcacccaggctggagtgcagtggcacgatcttggctcattgcgacctccgcctcctgggttcaagtgatt

SEQ ID NO: 12552 - DNA, 201 bp, Homo sapiens
actttattgccactctgatttcttccatttcttttagcctcattatcaacttaatattttatttatttatttatttatttatttatttatttatttatttatttttatttttggagatggagtcccactctgtcacccaggctggagtgcagtggcacgatcttggctcattgcgacctccgcctcctgggttcaagtgat

SEQ ID NO: 12553 - DNA, 201 bp, Homo sapiens
gggaacacaagtctggccacccctgagaagccatctgtgctccaatttccgtctaagacttggccacggtgaggggagcaaaagagcctgaaattggaagrctgtccaaggaatatacagaggtgagaaatttgtgggcaacattgatctggacttattttttcctgctgctgtagagggtggggtggggcattgactgtt

SEQ ID NO: 12554 - DNA, 201 bp, Homo sapiens
catcctcatccacttcatcaacatgtttctgtttaactacagtgactcttccaacgcacccctctacaaacatcaggtatttctgctatttttttttttttactcttcttttatttacttgattatgtcaaatttctctcctactctttttttttttttgagaaagagtcttgctctgtcacccaggctggagtgcagtgg

SEQ ID NO: 12555 - DNA, 201 bp, Homo sapiens
atataattcgggctatgctctttgaggtttctgaaagtcacctctgtgctgaggtgctcttgtctcctggaaatccccaggccagggggcattatattgcwaagtgacaggtagtattgggcttgtgagatgcttcggtggcctcatggctctcgttaatcttagagccagcatgtctctcttacagtgtgtctcttacag

SEQ ID NO: 12556 - DNA, 201 bp, Homo sapiens
tctgagacccgacctgaaaggagaggataagaccagggagccaggcgtcttgggaacacaagtctggccacccctgagaagccatctgtgctccaatttcygtctaagacttggccacggtgaggggagcaaaagagcctgaaattggaagactgtccaaggaatatacagaggtgagaaatttgtgggcaacattgatct

SEQ ID NO: 12557 - DNA, 201 bp, Homo sapiens
aggccagggggcattatattgctaagtgacaggtagtattgggcttgtgagatgcttcggtggcctcatggctctcgttaatcttagagccagcatgtctstcttacagtgtgtctcttacagaggccatgtgtgctgaaaaagattaccctgtttgttgtatcatcaaaacataaaaatgattccattaaataaattctg

SEQ ID NO: 12558 - DNA, 201 bp, Homo sapiens
ctgttgtgcagtggcacagtctcggctcactgcaacctctgcctcccgggttcaagtgattctcctgcctcagcctcctgagtagctgggattacaggtgmgccctaccacgtccagcaaatttttgtatttttagtagagacggggtttcaccatgttggctgggctgctcttaaactcctgacctcaggtgattcgcct

SEQ ID NO: 12559 - DNA, 201 bp, Homo sapiens
ttggttcttgcagaaggatgtgattagcttgtttgaataatttcacggggtgggaggagtgaagccattaggttgaggagtgggtggcatgcagctggttyggccgatggggaactagctgggtggcatatctggtgacggcagatctcgtggtatctgaagaaaccctctctgagcaggcggcattgatagcatgggaag

SEQ ID NO: 12560 - DNA, 201 bp, Homo sapiens
ggaggagtgaagccattaggttgaggagtgggtggcatgcagctggttcggccgatggggaactagctgggtggcatatctggtgacggcagatctcgtgktatctgaagaaaccctctctgagcaggcggcattgatagcatgggaaggttgggggcgggaggaagggtttttcaggcggaggaatctgaaggtaaaggc

SEQ ID NO: 12561 - DNA, 201 bp, Homo sapiens
accactgcactccagccttggtgacagagcgagatcctgtctcaaaaaatagataaaataaaataaaatgaaaggatagaccagataccctttatccaagsagtgcatggtgattgttcttctccagcctgaggcccagtcgaatttgtggcctgtaatgcaggggcctcctgggttgagggtccctgcgagcaaactgct

SEQ ID NO: 12562 - DNA, 201 bp, Homo sapiens
tatactatatataatgtatataatatataatatataatgtatataatgtatataatatataatatataatgtatataatatatataatgtatataatatawtatatatatagatatatatatttatttatttatttttgagatggagtctggctctgttgcccaggctggagtgcagtggcgtgatctaggctcactgcaa

SEQ ID NO: 12563 - DNA, 201 bp, Homo sapiens
ccttaaggaatgtcttcccttctggctgcctaggttcatagccggtgtgatcaacagggagaggatggcttcctttgagcggttactgtggcgaatctgcygaggaaacgtgtacttgaagttcagtgagatggacgcccctctggaggatcctgtgacggtgggaaccttgggctgcaaaaactttctctgagacttccc

SEQ ID NO: 12564 - DNA, 201 bp, Homo sapiens
cgccattctcctgcctcagcctcccgagtagctgggactacaggtgcccgccaccacgcccagctaagtttttgtatttttagtagagatggggtttcacygtgttagccaggatggtctcgatctcctgacctcgtgatctgcccacctcggcctcccaaagtgctgggattacaggcgtgagccaccacacctggccta

SEQ ID NO: 12565 - DNA, 201 bp, Homo sapiens
ttgttcttctccagcctgaggcccagtcgaatttgtggcctgtaatgcaggggcctcctgggttgagggtccctgcgagcaaactgctggtggtgtgtggkgcatgtgaatggtggagaaacagacaaaagatgggtgtggagaagagtatagaaagcacctagagagagaaagctgatcttgtgttccatcaaactttgt

SEQ ID NO: 12566 - DNA, 201 bp, Homo sapiens
tgtatatatactatatataatgtatataatatataatatataatgtatataatgtatataatatataatatataatgtatataatatatataatgtatatwatatattatatatatagatatatatatttatttatttatttttgagatggagtctggctctgttgcccaggctggagtgcagtggcgtgatctaggctca

SEQ ID NO: 12567 - DNA, 201 bp, Homo sapiens
tgaggcccagtcgaatttgtggcctgtaatgcaggggcctcctgggttgagggtccctgcgagcaaactgctggtggtgtgtggtgcatgtgaatggtggrgaaacagacaaaagatgggtgtggagaagagtatagaaagcacctagagagagaaagctgatcttgtgttccatcaaactttgtgatttttttttttttg

SEQ ID NO: 12568 - DNA, 201 bp, Homo sapiens
tccaagttaccctgaatatatgttctcacaagtgcattcttaacatatcaaagtctaatattaattgacactttcaccactttcatagataatatgaagamctcagaactttaactccatttacccactcgcccaggctggagtgcagtggcgctatctcggctcactgcaagctgcctcctgggttcacgccattctcct

SEQ ID NO: 12569 - DNA, 201 bp, Homo sapiens
tacatatgtatatatactatatataatgtatataatatataatatataatgtatataatgtatataatatataatatataatgtatataatatatataatrtatataatatattatatatatagatatatatatttatttatttatttttgagatggagtctggctctgttgcccaggctggagtgcagtggcgtgatcta

SEQ ID NO: 12570 - DNA, 201 bp, Homo sapiens
tttttttttgactttgtgatttttgacaagtcacttagcttctctaagcctcagcacatctgtaaagtggggaataagaatgcctactcataggctgggcrcagtggctcatgcccataatcccaacactttgggaggccgaggtgggaggattgcttgaaaccaggagttcgagaccagcccgggcaatatagcgagacc

SEQ ID NO: 12571 - DNA, 201 bp, Homo sapiens
tcccaaagtgctgggattacaggtgtgagccactgcgcccagccttctttatctctagtaatgtttttttgccataaactttactttgtctgatattgctrtagctataacaggtttcttttgttttgtttggcatgctaaatcattttcccatcatattactttcaacttttctaaaaccctgttcaagatgggaggatt

SEQ ID NO: 12572 - DNA, 201 bp, Homo sapiens
acacgtatatacatatgtatatatactatatataatgtatataatatataatatataatgtatataatgtatataatatataatatataatgtatataatrtatataatgtatataatatattatatatatagatatatatatttatttatttatttttgagatggagtctggctctgttgcccaggctggagtgcagtgg

SEQ ID NO: 12573 - DNA, 201 bp, Homo sapiens
agatagtctgaggcactggcaaaagctattcccaggcatagattttgaaatgttttttgtaaatcagtagtgagtattatgaaagtattatagaagctccmgcatgggcatattgaggctttctgcaacaaagctaactccctgttatggaccgaattatgttcccctctcccaagtttcatatattgaagtcctaacccc

SEQ ID NO: 12574 - DNA, 201 bp, Homo sapiens
tatattttttctaactctgatgtttttgcctgattatgaaagcaatacataatcactgtaaaaattagaaaaatgcaaccatctaatgaccgagagaaaartcaccatgaatgcttttggatatctttccaatttgtttgtgcttatccaccaatttttcaaaaattggcatcaagtaatgcatactatttgtagtgtttt

SEQ ID NO: 12575 - DNA, 201 bp, Homo sapiens
aggttaaatagctttcccaaggtcacgcatggtaaatggcagagctgggatcctgactccagtagttgggctggagcctctgctcttaaccattaggtacrtgtactcttttctccacatgttcctgagtggtttctgagcacccagacgtttgaaaactatggccccacccgctgactgggagacaaagcaaacacctgc

SEQ ID NO: 12576 - DNA, 201 bp, Homo sapiens
gcgcccagctgcaaaactttctattagctagacatgcataatagtggttgctctatgaattactgagcgccttgtggctagaagtaggcaagaagaggaaraacgtgcatagaagaagaagaaatatgtatgccaaggacgccaaaaccaagctgttgcattgggtggaagttggactagatgatttcttatggcctttcc

SEQ ID NO: 12577 - DNA, 201 bp, Homo sapiens
tgagaaagcactttattcttctcagcagacatagtcagacagggaatcaactttacaatgacaagacgcaaaatgagtatatatctgacttgtcataaatrtagcagccatgggaggccagttcagtgcttatttcctggaagcacctgagacaacagccacctgctttcaagtcccttcctaagcagatgaggccttgct

SEQ ID NO: 12578 - DNA, 201 bp, Homo sapiens
ctcaagccatcgctcctggcccaataccacagtcttgattactggtgctgtacagtaagtcttgaagttgggtagagcgtttctcccacttcattcttctmttcacgagatctctgctgctaccaccggggctggaggagcagagatgcctcattactgctctgcatgtgatcttcaccatcaatgatcgggggaggggag

SEQ ID NO: 12579 - DNA, 201 bp, Homo sapiens
ggattacaggcatgagccaccatgcccacctgatcctcacattctttttttttttttttttttctgatacagagtcttgctctgccgcccaggctggagtrcagtggcatgatcttggctcactgcaacctccgcctccgaggttcaagagattctcctgcctcggcctcccaagtagctgggattacaggtgtgcaccac

SEQ ID NO: 12580 - DNA, 201 bp, Homo sapiens
ctcgacctccccaggctcaggtcatcctcccaagtcggcctcccaagtagctgggatcacaggcacacaccacaaacctggctaatatttttattattatyatttgtagagatgatagtctcactgtgttgcccaggctggtctgaaactcctgggctcaagcaatccacctgtcttggcctcccaaaatgctgggattat

SEQ ID NO: 12581 - DNA, 201 bp, Homo sapiens
ctacaatgactgcttctccaagtccttgaacatctttggctcttcttggagtgtccaacccatgttcagaaacggcacatggaagtgagttgacagacagrgatggtgtagtcgctggccatccaggtggcctcagtgactgttttcatggttgggggagtctacacctaggtctactcagaggtgcacttgaaaattcaa

SEQ ID NO: 12582 - DNA, 201 bp, Homo sapiens
ttgaatagattagcatttgaatgggtagactgagtaaagaagacagatattccatctatatgtctatccttccaccaatattacaatcttttattttttawtttttttttaagatagggtctcactttgtcacccaggctggagtgcagtggcatgatcatggctcactgcagcctcgacctccccaggctcaggtcatcc

SEQ ID NO: 12583 - DNA, 201 bp, Homo sapiens
ggtggttaataattgcttctttaaaaggcacttggttgcctggggagtatgcatattacataagctatttagcgtcctaatcaagtttaagttccctgctytgtattttcttgcagtgggaaacatttcccttttttctaaaaaagtgtggatttacttttatgtttgctttgttttactgcatagaattgacgcttttta

SEQ ID NO: 12584 - DNA, 201 bp, Homo sapiens
ccaagttgacaagggttggacttggaaaggttaattttatggtcaacttgagtgagccaagtgatgtccacatagctggtaaaacattgtttctggatgtrcctgtgggggtatttcttgaatagattagcatttgaatgggtagactgagtaaagaagacagatattccatctatatgtctatccttccaccaatattac

SEQ ID NO: 12585 - DNA, 201 bp, Homo sapiens
aaaaaggtatttgcttcattttatgtttgttatatctatctcagtcagctagatttgagctaagcaaaacgatacttcctcgcagcctgtagatataaagsggttttgaggagatacaacacatgcccgttcatgtaaagctgttcatttctattggcccagtgcatgctgccaccaggtggcggccttgtgctccaaatg

SEQ ID NO: 12586 - DNA, 201 bp, Homo sapiens
tcctaggaaactcatacacccaattctgcggtccccaggctagtggttgtccaatgtttttgtctcaggtcctctttacactgttaagaattattggggtycaggtgcagtggctcatacctgtaatcccagcactttgggaggccaaggtgggagaattgcttgaggccaggagtttgagacaagccttggcaacactgt

SEQ ID NO: 12587 - DNA, 201 bp, Homo sapiens
cacctccattcaagagatggtcctataatggcattatttgccccttctccacctctccttcatgaaatcctacagacctaatacataaacaatttgttctsacggacttcaggtgatatgaacaggggtcctgtctattagcctctcctacaacctgggtccctgcagaatgtggcctgggaacctctccactagagggcc

SEQ ID NO: 12588 - DNA, 201 bp, Homo sapiens
acatcattctgcaatttatccctgagatgatttttatcctgtgtctgtttggatacctggttttcatgatcattttcaaatggtgctgctttgacgtccaygtatctcagcacgcccccagcatcctcatccacttcatcaacatgtttctgtttaactacagtgactcttccaacgcacccctctacaaacatcaggtat

SEQ ID NO: 12589 - DNA, 201 bp, Homo sapiens
gggaggccgaggcaggcggatcacgaagtcaggaattcgagaccagcctggccaacatggtgaaaccctgtctctactaaatatacaaaaattagccgggkgtggtggtaggtgcctgtaatcccagctacttgggaggctgaggcacgagaatcgcttgaatccgggacgcagaggttgcattgagctgagattgtgcca

SEQ ID NO: 12590 - DNA, 201 bp, Homo sapiens
aaatgtgcaactctgagctaggtctgcatgcgaagctgtagtcagatcaccaccctctctgtgtgggcatgacctttgctttagacgttacttctagaccrtggttctctctgactcttttgtgcaaaagcactttccagtatttcctttcaattttcttttctatgcatccatacaggattgctgtttgctgggggggtg

SEQ ID NO: 12591 - DNA, 201 bp, Homo sapiens
gagtgtggcatgggaacccttctacatattctcctgactaggctgtgagcaacttgagggcatgtacagcaccagtcaattgtcccccatggccaggcacrgtggctcacacctgtaatcccagcactttgggaggctgaggcaggcagattgcttaaggccaggagttccagaccagcctgggcaacatggtgaaacccc

SEQ ID NO: 12592 - DNA, 201 bp, Homo sapiens
ctaacgttcccttgatgttctatcttgtgtatgtgtgtgtcttccacccccagatacttcagaagaactctcaacatcattctgcaatttatccctgagaygatttttatcctgtgtctgtttggatacctggttttcatgatcattttcaaatggtgctgctttgacgtccatgtatctcagcacgcccccagcatcctc

SEQ ID NO: 12593 - DNA, 201 bp, Homo sapiens
tcacacctgtaatcccagcgctttggaaggccgacaggtggatcacctgaggtcaggagttcaagaccagcctggccaacatggtgaaagcccatctctastaaaaatacaaaaattagccaggcatggtgtcgggcacctgtaatcccagctacttaggaggctggggcaggggaatcccttggacctggaggcagaggt

SEQ ID NO: 12594 - DNA, 201 bp, Homo sapiens
catttgattcctaaaaacccatatggttcatggctgcctgccctgattcacccactgggtcattctagaagtccctgctagacgtggcttccagtccataytaacacagttgcttaaagaggtaatgtggaaaaatggggaaaaaattaaaacactgacttaaattctggttccttttctaccacttttggctgagtaact

SEQ ID NO: 12595 - DNA, 201 bp, Homo sapiens
agcaaggacttggaatcctttccacagagtgggagtggagaccatggggctgccgagatttaaatggggaagacgaatattagtgactctggtccttagcyagtgtgagaccctaactaacccctccacccaccagccccctgcacgaccacccagtgtgcttttcctcatgtcagtatcatcgatatcatttggggcagg

SEQ ID NO: 12596 - DNA, 201 bp, Homo sapiens
tttaggcgataggcagcctttgaagattttaaagcaggagagtaacatgagtaaaatagtgctttttgtttgttttattaaaagagtgcttgagcaatctrggtgttagataaacggagaggggagaggctggcagagatgctgaggcttggagctagggtgatagctgtgggaatcggaggaaagattccgaaaggagaa

SEQ ID NO: 12597 - DNA, 201 bp, Homo sapiens
gatcagtgcaaattagcacctgactgtgtgagcacgtgtgtgtgtgtgatggagggagcgagatgattgtgtctgaggttgtgtctggttggatgttggcsccttaacagaagcaaagaagtttggaggaggaagtcatttagcagaaaaggtgagaaagccattgtgcccttgtcgcctttgacatgtcccagagcaaac

SEQ ID NO: 12598 - DNA, 201 bp, Homo sapiens
caagattctaggaatctgggagaatggaggctctgctgaaggggcagggagtttgtggaggggacctggctttgtggagagttgatgaattcaggattagrctcctggattttgtggggttggtgacacattggagtttgaaagtctaagcaggcaattaggaaaaaattggggaagggccagagccatttggaagagggg

SEQ ID NO: 12599 - DNA, 201 bp, Homo sapiens
gctaatttttgtttgtttgtttgtttgttttgagatggagtttcacttttgttgcccaggctggagtgcaattgtgcgatctcggctcgccacagcctccrcctcctgggttcaagtgattcttctgcctctgcctcctgagtagctgggattacaggcataagccaccatgccatgctgggctaattttttaaaaaagct

SEQ ID NO: 12600 - DNA, 201 bp, Homo sapiens
tcccatctgcaggtgtagcatggatgctcaattccatttgggccaatattcactgagcacccactatgctgaagttgggagatacctgctgtcgaagtgcsttaattacaaacacgcatcattcaaccccagaaccgtgtttgaggaatggcttgggaggataaagcactgtgggtttcaacagtggaggccacatctgct

SEQ ID NO: 12601 - DNA, 201 bp, Homo sapiens
gtcccagtctctaaccaacaatgactgtgtcctcactggtgaacccatatgagggagctccaagctcaagaggtgcaggccccttccagatcctcccagaygcatctgtgtgacccccagcaagggcagtaatcaccaccaaaatcttcatttgcaataggtgtacaacaggatgaatgcaaacgcctagtaaagaaactc

SEQ ID NO: 12602 - DNA, 201 bp, Homo sapiens
gctctgctgaaggggcagggagtttgtggaggggacctggctttgtggagagttgatgaattcaggattaggctcctggattttgtggggttggtgacacrttggagtttgaaagtctaagcaggcaattaggaaaaaattggggaagggccagagccatttggaagagggggatgaattgagaaagtggagaggaggaaa

SEQ ID NO: 12603 - DNA, 201 bp, Homo sapiens
actacaggcacgtgccatgccatgctgggctaatttttgtttgtttgtttgtttgttttgagatggagtttcacttttgttgcccaggctggagtgcaatkgtgcgatctcggctcgccacagcctccacctcctgggttcaagtgattcttctgcctctgcctcctgagtagctgggattacaggcataagccaccatgc

SEQ ID NO: 12604 - DNA, 201 bp, Homo sapiens
gtcacaccttctctcacctctctagaagggaagccaaaccgttggctgaggaaggaagggaggggcaagctgtgcccttctcccctgagcgcaaatattgyccttattgagaaacaaggggaggacaagagagatctgtgtcatgctggttcctgggacatgagtttgctgcctctcccatctgcaggtgtagcatggatg

SEQ ID NO: 12605 - DNA, 201 bp, Homo sapiens
caatctccctgcttcagccttccaagcagctgggactacaggcacgtgccatgccatgctgggctaatttttgtttgtttgtttgtttgttttgagatggrgtttcacttttgttgcccaggctggagtgcaattgtgcgatctcggctcgccacagcctccacctcctgggttcaagtgattcttctgcctctgcctcct

SEQ ID NO: 12606 - DNA, 201 bp, Homo sapiens
cattccttcctggacgtctccctccgcagacatccgtgactgcaccccccccccccgccccgaattccttcctggacgtctccctccgcagacatccgtgrcggcacctccccattcctccccattcctccccattcctccccattccgccccatgcctctccggatgtctccctccgcagacatcggtgactgcaccacc

SEQ ID NO: 12607 - DNA, 201 bp, Homo sapiens
tagaaagcacctagagagagaaagctgatcttgtgttccatcaaactttgtgatttttttttttttgactttgtgatttttgacaagtcacttagcttctstaagcctcagcacatctgtaaagtggggaataagaatgcctactcataggctgggcacagtggctcatgcccataatcccaacactttgggaggccgagg

SEQ ID NO: 12608 - DNA, 201 bp, Homo sapiens
ctaggtatgtaagtaacttaatcttcctgaggttatgataaattaccttatctgtaaaatgagaataactatatctcatagagttttcagtagaactaaaygagataaacacatctaaattgcttagtatgtacttggtacttaactattaacattttaaaattttctttttatttatttatttatttagagacagagtct

SEQ ID NO: 12609 - DNA, 201 bp, Homo sapiens
gcgagactctgtctcaaaaaaataaaaataaaaataaaaaaaacagcagccctaactcctaggattgcttggcaaatgaaattatgtttacatgtaaaacygccagaacagagtcttatgcacaaacgtggtaaatgctccttgaatattagttcctcttatgttatttcttcctaggtatgtaagtaacttaatcttcct

SEQ ID NO: 12610 - DNA, 201 bp, Homo sapiens
tatgggaatacaattcaagatgaaatttgggtgggacacaaccaaaccatatcaatgtctgtgcctatgttagtttgtatcatatatatatatatatatatatatatatatatatatatatatatatatatgggcttactttttacataacacaaatttctacagtgcatttactgactgcgtttggcatctatttgtgaa

SEQ ID NO: 12611 - DNA, 201 bp, Homo sapiens
ggtcctgattcctctggatgaagccctgtgactagttccacaaggccagctgcccttcagtgcagaggttgtctgttggggattgcacccatcagatgtcrtagttaatgtcatgcttctacggccatgccccttctcatgagttcagttcctagttgtgttctctttccctacccaagcatcaataagaaaaagaaaagg

SEQ ID NO: 12612 - DNA, 201 bp, Homo sapiens
gcccggccgagatgagttttgaaacttgttcaatctgcataatttcgccagcctaccaacatgaaattccatttcccatagagtatgattgtgaaaggccygaattaactgtcttgttaccactctgcagacatgggtatgaatgctgttctcttatgcacctgcaaatgtcttcttccccaattcaagactctttggtct

SEQ ID NO: 12613 - DNA, 201 bp, Homo sapiens
agccctgtgactagttccacaaggccagctgcccttcagtgcagaggttgtctgttggggattgcacccatcagatgtcgtagttaatgtcatgcttctayggccatgccccttctcatgagttcagttcctagttgtgttctctttccctacccaagcatcaataagaaaaagaaaaggctgggcgtagtggctcacgcc

SEQ ID NO: 12614 - DNA, 201 bp, Homo sapiens
ggattacaggtgtgagccaccgtgcccggccgagatgagttttgaaacttgttcaatctgcataatttcgccagcctaccaacatgaaattccatttcccrtagagtatgattgtgaaaggcccgaattaactgtcttgttaccactctgcagacatgggtatgaatgctgttctcttatgcacctgcaaatgtcttcttc

SEQ ID NO: 12615 - DNA, 201 bp, Homo sapiens
gtgactagttccacaaggccagctgcccttcagtgcagaggttgtctgttggggattgcacccatcagatgtcgtagttaatgtcatgcttctacggccaygccccttctcatgagttcagttcctagttgtgttctctttccctacccaagcatcaataagaaaaagaaaaggctgggcgtagtggctcacgcctgtaat

SEQ ID NO: 12616 - DNA, 201 bp, Homo sapiens
gactgtgtttgctaatgcttggcctgtttcaactttccaagaatcagcaatgctatgaaatgttgcacataaaaaaattgagctcagacaggaaacttctrgagaaatgtcaaagatgtcatggttcaaagagattgtctcagatatacatcatgggtaagaaaaagtaggagttcccattttaaaagttatttttttgag

SEQ ID NO: 12617 - DNA, 201 bp, Homo sapiens
tcccaagtgaaaaacttaggctagcgccgggtgtggtggctcatgcctgtaatcccagcattttgggaggctgaggtgggagggctgcttgagcccaggastttgagaccagcctgggcaacatagggagaatctctctctctcaatctgtctctctctctctccttaggctataggtaaaaaaatccatccatgataaac

SEQ ID NO: 12618 - DNA, 201 bp, Homo sapiens
cagtaatcctcccacctcagcctccttagtagctcgggctacaggtatgcaccaccatgcctagctcctcatcttctcttgtccaagctgcctctaggttkgttggttgggaacacaagaatcctgagtcaagagtcctggattccagttttcatgttgtcacttggagtgtgaccttggaggagtcatgtaaccttggtg

SEQ ID NO: 12619 - DNA, 201 bp, Homo sapiens
gaggttgcagtaagctgagatcacaccactgcactccagcttgggtgatacagagagactcttctcaaaaaaaaaaaaaaaaaaaaagaaaaagaaaagcrggagttgcctttcctacctctccagttcctgcagtcctgttcctcagagataaccactttaacagaacacgtctgtattagtcccttttcatgctggtga

SEQ ID NO: 12620 - DNA, 201 bp, Homo sapiens
tgtatttatttagagacagggtgttgcctaggttggagtacagtggctattcgcaggtgcaatcacagtgtattacagcctcgaactcctgggctccagtratcctcccacctcagcctccttagtagctcgggctacaggtatgcaccaccatgcctagctcctcatcttctcttgtccaagctgcctctaggttggttg

SEQ ID NO: 12621 - DNA, 201 bp, Homo sapiens
cagggcattctgttgtctctcttttttttttttcctgagacaaggtctcactctgtcacccaggctggagtgcagtggtgcaatcttcgttcactgcagcrtcgacctccctggctcaagcgatcctcccacctcagcctcctgagtagctgggactagagatgcatgccacgaaggccagctaagtttattttgtgtaga

SEQ ID NO: 12622 - DNA, 201 bp, Homo sapiens
taccaccacacccagctaatattttttatttttagtagagttgaggtcttgctctgttacccaggctagtctcaaactcctgggctcaagcgatccttcckcctcagtctctggaaatgctgggattacaggtgtgagtcactgctcctggcctcttttttcttttttgaaaatgctttgtccatatgtttcattttattt

SEQ ID NO: 12623 - DNA, 201 bp, Homo sapiens
gccttttctataacttcccttcattctctttctctttttttctttttccgtttttaagacagaatctcactctattgcccagggtggagtgcagtggtgcratcacaactcactgtagcctccacctcctagggctcaagccatcctcctgcctcagcctcctgagtagctgggactacaggcatgtaccaccacacccag

SEQ ID NO: 12624 - DNA, 201 bp, Homo sapiens
acaaaaaaaaaaaccccaaaaaaaccttaacctttaagtttcacatggtgcagattactgcctatcatagcctcagctcttggagtgctcatggtcacaayggaatgtacagacatatccacggatggtcaggacacaaagaagactagaaagaagacacagatataacatcggattacaattagaatctcagtgttggaa

SEQ ID NO: 12625 - DNA, 201 bp, Homo sapiens
ccttagtagctcgggctacaggtatgcaccaccatgcctagctcctcatcttctcttgtccaagctgcctctaggttggttggttgggaacacaagaatcytgagtcaagagtcctggattccagttttcatgttgtcacttggagtgtgaccttggaggagtcatgtaaccttggtgtcgatgcgactttctagaagggg

SEQ ID NO: 12626 - DNA, 201 bp, Homo sapiens
aacaacaacaacaaaaaaaaaaaccccaaaaaaaccttaacctttaagtttcacatggtgcagattactgcctatcatagcctcagctcttggagtgctcrtggtcacaacggaatgtacagacatatccacggatggtcaggacacaaagaagactagaaagaagacacagatataacatcggattacaattagaatctc

SEQ ID NO: 12627 - DNA, 201 bp, Homo sapiens
attattattattattttccaagtgaatatatgagtgaaatttattaaatttatttacatgtttaccggtttattgttcttaatttatttctgcatgtctgrtcttccatctgtgatcattttccttctctttgaagaataccatttagtattccctcagtggagtgattaacatgttactttgtttgtctggatatgtttt

SEQ ID NO: 12628 - DNA, 201 bp, Homo sapiens
cgagaatgcaccactgcactccagcctgggcaacagagcgagactctgtctcaaaaagaaaaaaagacaaaaacaacaacaacaacaaaaaaaaaaacccmaaaaaaaccttaacctttaagtttcacatggtgcagattactgcctatcatagcctcagctcttggagtgctcatggtcacaacggaatgtacagacata

SEQ ID NO: 12629 - DNA, 201 bp, Homo sapiens
caagcggttctcctgcctcagcctcctgagtagttgggattacaggcacccgccaccatgcccagctaatttttgtattttggtgtagagacagggtttcrccaggttgaccagactggtctcgaactcctgagctcaagtgatacacctgcctcggcctcccagattatcttttcacgtaggatttttctcccctgtttc

SEQ ID NO: 12630 - DNA, 201 bp, Homo sapiens
ccgagaatgcaccactgcactccagcctgggcaacagagcgagactctgtctcaaaaagaaaaaaagacaaaaacaacaacaacaacaaaaaaaaaaaccmcaaaaaaaccttaacctttaagtttcacatggtgcagattactgcctatcatagcctcagctcttggagtgctcatggtcacaacggaatgtacagacat

SEQ ID NO: 12631 - DNA, 201 bp, Homo sapiens
cctggacgtctccctccgcagacatccgtgactgcaccccccccccccgccccgaattccttcctggacgtctccctccgcagacatccgtggcggcaccyccccattcctccccattcctccccattcctccccattccgccccatgcctctccggatgtctccctccgcagacatcggtgactgcaccacccgccccat

SEQ ID NO: 12632 - DNA, 201 bp, Homo sapiens
aaattatgggaatacaattcaagatgaaatttgggtgggacacaaccaaaccatatcaatgtctgtgcctatgttagtttgtatcatatatatatatatatatatatatatatatatatatatatatatatatatgggcttactttttacataacacaaatttctacagtgcatttactgactgcgtttggcatctatttg

SEQ ID NO: 12633 - DNA, 201 bp, Homo sapiens
tggaaattatgggaatacaattcaagatgaaatttgggtgggacacaaccaaaccatatcaatgtctgtgcctatgttagtttgtatcatatatatatatatatatatatatatatatatatatatatatatatatatgggcttactttttacataacacaaatttctacagtgcatttactgactgcgtttggcatctat

SEQ ID NO: 12634 - DNA, 201 bp, Homo sapiens
gcagtcctgttcctcagagataaccactttaacagaacacgtctgtattagtcccttttcatgctggtgataaagacatccctgagactgggtaatttatraagaaaaagattgtgtggggaggccacacaatgatggtggaaagtgaaaggcacatcttacatggcggcaggcaagagagagaatgagagccaggtgaaa

SEQ ID NO: 12635 - DNA, 201 bp, Homo sapiens
gaatctgggaagcagaggttgcagtaagctgagatcacaccactgcactccagcttgggtgatacagagagactcttctcaaaaaaaaaaaaaaaaaaaaagaaaaagaaaagcgggagttgcctttcctacctctccagttcctgcagtcctgttcctcagagataaccactttaacagaacacgtctgtattagtccct

SEQ ID NO: 12636 - DNA, 201 bp, Homo sapiens
tacttgaatctgggaagcagaggttgcagtaagctgagatcacaccactgcactccagcttgggtgatacagagagactcttctcaaaaaaaaaaaaaaaraaaaagaaaaagaaaagcgggagttgcctttcctacctctccagttcctgcagtcctgttcctcagagataaccactttaacagaacacgtctgtattag

SEQ ID NO: 12637 - DNA, 201 bp, Homo sapiens
aaattgtctgtcacatcagagagcatgaggggagaatgagctatggctgtcttcttcgttctgttatttacttctttcctgtgttactgagctcataaccmaattgtccttttttttttttctttaaggctgtcccttctctaaactatgatgctaccagagtaacctgcctctatggctcctcactgaatccaggttgtt

SEQ ID NO: 12638 - DNA, 201 bp, Homo sapiens
gctttaacctgggaggtggaggttgcagtgagctgagatcatgccactgcactccagcctaggcaaccagagtgagagcccatctcaaaaaaaaaaaaaaagtaaaaataccaaaattagccaggcatggtagcatatgcttgtgatcccagctactcgggaggctgaggcaggagaagtacttgaatctgggaagcagag

SEQ ID NO: 12639 - DNA, 201 bp, Homo sapiens
gtcacatcagagagcatgaggggagaatgagctatggctgtcttcttcgttctgttatttacttctttcctgtgttactgagctcataaccaaattgtccytttttttttttctttaaggctgtcccttctctaaactatgatgctaccagagtaacctgcctctatggctcctcactgaatccaggttgtttcttcaact

SEQ ID NO: 12640 - DNA, 201 bp, Homo sapiens
ttctacctcatttctgatgtggtacaaatcctgatctcccttccttttccttccctttccccttctgtcccctctcccccttctcccttttttttttttttcctttcaacagagtctcactctgttgcccaggctggagtgcagtggtacaatcatggctcactgcagccttgacctcccaggctcaaggcagtcctcctg

SEQ ID NO: 12641 - DNA, 201 bp, Homo sapiens
aaccccatctctaataaaaatacaaaaattagccaggtgtggtggtgcatgcctgtagtcccagccacttgggaagctgaggcaggaaaatcgcttgaacycggaagacagaggttgcagtaagctgagatgctcctgaccctgcattccagcttggccgacagagggagactccatctccaaaaaaaaaaaaaaaaaaaa

SEQ ID NO: 12642 - DNA, 201 bp, Homo sapiens
gaggccaaagtgggaggattgcttgagcccaggaattcaagaccagcctgggcaatatagggagaccctgtctctacataaaatgaaaaaaaaaaaaaaaattagctgggcagtggcacatgcctgtgcttccagctacttgggaggctgagacaggaagatcatttgagcctgggaggttgaggctgcaatgaaccgtga

SEQ ID NO: 12643 - DNA, 201 bp, Homo sapiens
aaaagaaaatggcatttggcctgggccttgaaggatggctagaattttgacagggggagaggggaagatggcattataggtagagggacagatgagcaaargtccagaggtaaggaagtgtcagagggtggctgtaccagcagcacccagaagtgcaggtgagccaaggcatgtgaggtggggaggcaagaggagagctgt

SEQ ID NO: 12644 - DNA, 201 bp, Homo sapiens
cttgaatccaggaggtggaggttgcagcgagccgagatcacaccattgcactccagcctgggcaacagagcaagactccaactgaaaaaaaaaaaaaaaaagcagatgaggaaatggttggttttgtaatgctgtctccctgtatttgtcctgtggctgacagagttgggggcaggggacacctggtaaggatatgtgggt

SEQ ID NO: 12645 - DNA, 201 bp, Homo sapiens
ccatcatgaccacagtgcaatctaaaacagcccctcccacatttaacaggaccaataaattcacagctggcttccagaatattgttgatgcctatggtgtyggcagctaccgggagataaacccaggtaaagatctgatgaactgcacgactgggtagcttgaaagtgaaaactggtaagatggacccctgaggtgaccga

SEQ ID NO: 12646 - DNA, 201 bp, Homo sapiens
gggctgttcacaggcatgggcatactgccctacagcctcaaactcctgggctcaggtgatcctcccatctcagcctcccaagtggctaggactacaggcaygcgccaccatgcccagctccactctgctagactgtagataccacctgttacctcatggaggttatagtctagctagaaagatgaataaccaagcatctat

SEQ ID NO: 12647 - DNA, 201 bp, Homo sapiens
agcgcaaatattgtccttattgagaaacaaggggaggacaagagagatctgtgtcatgctggttcctgggacatgagtttgctgcctctcccatctgcagktgtagcatggatgctcaattccatttgggccaatattcactgagcacccactatgctgaagttgggagatacctgctgtcgaagtgcgttaattacaaac

SEQ ID NO: 12648 - DNA, 201 bp, Homo sapiens
gtgcttttaaaatttacaaaataatagtatcttatttaattttaaattttctttttctttcttcttcttttttttttttttttgagacagggcctcactckgtctcagggacttgctggagtttagtggtgcaatcttagctcgctgtgacctccggcctcccaggttcaagcaatctccagcctcagcctcctgagtagc

SEQ ID NO: 12649 - DNA, 201 bp, Homo sapiens
gagatggagtttcacttttgttgcccaggctggagtgcaattgtgcgatctcggctcgccacagcctccacctcctgggttcaagtgattcttctgcctcwgcctcctgagtagctgggattacaggcataagccaccatgccatgctgggctaattttttaaaaaagcttttgtagagacggggtctcactttgttacca

SEQ ID NO: 12650 - DNA, 201 bp, Homo sapiens
attcttttccatgttattccctattttcctgagttggtctaactgatcatccatctgccatccatccatccatccatccatccatccatccatccatcctyttactgggttagaaaggatttagaatgacacaggaaaccagccgggtgcggtggctcacgcctgtaatcccagcactttgggaggctgaggtgggtggat

SEQ ID NO: 12651 - DNA, 201 bp, Homo sapiens
agaaaaagtaggagttcccattttaaaagttatttttttgagacagggtcttactcttgtcaccttggctggagtgcagtggtacaatcatggctcactgyggccttgcactcccgagctcaagtgattctcccacctcagcctcctgagtagctgggactacaagtgtgcaccactctgcctggctaatttttaaatttt

SEQ ID NO: 12652 - DNA, 201 bp, Homo sapiens
cagaagaattgcttgaacccaggaggcagagtttgcagtgagccgagaatgcaccactgcactccagcctgggcaacagagcgagactctgtctcaaaaaraaaaaaagacaaaaacaacaacaacaacaaaaaaaaaaaccccaaaaaaaccttaacctttaagtttcacatggtgcagattactgcctatcatagcctc

SEQ ID NO: 12653 - DNA, 201 bp, Homo sapiens
ctcagcctcctgagtagttgggattacaggcacccgccaccatgcccagctaatttttgtattttggtgtagagacagggtttcgccaggttgaccagacyggtctcgaactcctgagctcaagtgatacacctgcctcggcctcccagattatcttttcacgtaggatttttctcccctgtttccttccagcaatttgat

SEQ ID NO: 12654 - DNA, 201 bp, Homo sapiens
aactgctcaggagagttcaaggccaggtgacagccacaggtcaaaggagcctgccagagcagaggaagctgctgtggcctgtgacactccatttttggcaycttgtcaaacagctctgtgaaggttctctgttttcctgtgtgttgttttttgtataggtcataacacaaacagagtctcaccgccagcgcctgctgcagg

SEQ ID NO: 12655 - DNA, 201 bp, Homo sapiens
aggcaggcgtgatggtgggcacctgtaatcccagctactcgggagggtgaggcagaagaattgcttgaacccaggaggcagagtttgcagtgagccgagawtgcaccactgcactccagcctgggcaacagagcgagactctgtctcaaaaagaaaaaaagacaaaaacaacaacaacaacaaaaaaaaaaaccccaaaaa

SEQ ID NO: 12656 - DNA, 201 bp, Homo sapiens
tcagcctcctgagtagttgggattacaggcacccgccaccatgcccagctaatttttgtattttggtgtagagacagggtttcgccaggttgaccagactrgtctcgaactcctgagctcaagtgatacacctgcctcggcctcccagattatcttttcacgtaggatttttctcccctgtttccttccagcaatttgata

SEQ ID NO: 12657 - DNA, 201 bp, Homo sapiens
cacccaggctggagtgcagttgtgcaatctaggctcactgcaacatctgcctcccgggttcaagtgattctagtgtctcagcctcccgagtagctgggatyacaggcatgtaccaccatgcccagctaattttgtatttttagtagagacagagttctccatgttggtcaggctggtctcaaactcccaacctcaggtgat

SEQ ID NO: 12658 - DNA, 201 bp, Homo sapiens
actccatctcaaaaaaaaaaaaaaaaaaaagagaaaccattcttaacttccaggctgtacagaatcagatgatagtctccattggcctgtgggccacactktgcagacccctatcttagagcattcttaggaaaaagcttccaagtccccattatatatcctcttgcctttaaatgtgcaactctgagctaggtctgcatg

SEQ ID NO: 12659 - DNA, 201 bp, Homo sapiens
tttttttttttttttgagacagagtcttgctctgtcacccaggctggagtgcagttgtgcaatctaggctcactgcaacatctgcctcccgggttcaagtrattctagtgtctcagcctcccgagtagctgggattacaggcatgtaccaccatgcccagctaattttgtatttttagtagagacagagttctccatgttg

SEQ ID NO: 12660 - DNA, 201 bp, Homo sapiens
ttttttttttttttttgagacagagtcttgctctgtcacccaggctggagtgcagttgtgcaatctaggctcactgcaacatctgcctcccgggttcaagygattctagtgtctcagcctcccgagtagctgggattacaggcatgtaccaccatgcccagctaattttgtatttttagtagagacagagttctccatgtt

SEQ ID NO: 12661 - DNA, 201 bp, Homo sapiens
cctcctgagtggctgggactacaggtgcacgccaccacgcctggctaatttttgtatttttagtagagacaggatttcaccatgttggccaggctgctctygaactcatgacctcaagcaatctacctgctttggcctcgcaaaatgctgggattacaggtgtgagccaccgcacctggcctctctcctactcttgagtgt

SEQ ID NO: 12662 - DNA, 201 bp, Homo sapiens
tacttttttttttttttttttttttgagacagagtcttgctctgtcacccaggctggagtgcagttgtgcaatctaggctcactgcaacatctgcctcccrggttcaagtgattctagtgtctcagcctcccgagtagctgggattacaggcatgtaccaccatgcccagctaattttgtatttttagtagagacagagtt

SEQ ID NO: 12663 - DNA, 201 bp, Homo sapiens
aagactttgtcccatcaaaaatctcaatgcaacagtaatcagggaagtcaggcacattgatgtctgtatgggaataacgaacagaagcagggacattgagrcccacagagttgacccaagacaggctcatggcctggccactcagtgactcctggcatagcaaaggctgctccttgtacagcacaggcagcttcagggtgg

SEQ ID NO: 12664 - DNA, 201 bp, Homo sapiens
aaataaaatcaagttaatacttttttttttttttttttttttgagacagagtcttgctctgtcacccaggctggagtgcagttgtgcaatctaggctcacygcaacatctgcctcccgggttcaagtgattctagtgtctcagcctcccgagtagctgggattacaggcatgtaccaccatgcccagctaattttgtattt

SEQ ID NO: 12665 - DNA, 201 bp, Homo sapiens
ccaaataggagaaccctttcctagcctcgccatcctcttttgaagactttgtcccatcaaaaatctcaatgcaacagtaatcagggaagtcaggcacattratgtctgtatgggaataacgaacagaagcagggacattgaggcccacagagttgacccaagacaggctcatggcctggccactcagtgactcctggcata

SEQ ID NO: 12666 - DNA, 201 bp, Homo sapiens
ggcgagggaatcgtctgtgtgcacacagcctgccatgtgtggaagtgttcctgcgcatgaatgggcctggtaagggtgaggggtggactccagctctgtgkaaagacatagaaggcgtgagtaagccccaaggaaagatttcctagtggagtgtaacagcccaggggaggcacttttttctaattggctctaagatataaa

SEQ ID NO: 12667 - DNA, 201 bp, Homo sapiens
gctctcaaataactcttctacagtgacgcaaagactgaaaggagcctacaacttgagtcccagtctctaaccaacaatgactgtgtcctcactggtgaacycatatgagggagctccaagctcaagaggtgcaggccccttccagatcctcccagatgcatctgtgtgacccccagcaagggcagtaatcaccaccaaaat

SEQ ID NO: 12668 - DNA, 201 bp, Homo sapiens
gtgcgtcaggttggggaaaccaccgtctgccccagaccctgacccaggacccgcctggaggaagctggggtaagaagggtgttgatgctgtgcttttgatmtgcataaagtgaatgccttgggtctctggtctatgttcacttggctgtagttactagacagggcagtaggagagctttgaattcatcttggtgtcaaaag

SEQ ID NO: 12669 - DNA, 201 bp, Homo sapiens
attctatataatataatatattatataatatatataatatattatataatatatataatatattatatattaatatattaatattgatgtatatataatawtatatataataatatatatgatatattatacacacacacacacacacacacacacacacacacacacacacatataaattagctaggcatggtggtatat

SEQ ID NO: 12670 - DNA, 201 bp, Homo sapiens
ttatttttatatatatataaatatatatataatataatatatattataatatatatattataaatataaatataaatataaataaatataaatatatttakaatataattattatatagaatatataatataatatatattctatataatataatatatattatataatatattctatataatataatatattatataata

SEQ ID NO: 12671 - DNA, 201 bp, Homo sapiens
cgattctcctgcctcagcctcctgagtagctgggattacaggcgtctgccactacgcccagctaagttttgtatttttggcagagacggggtttccccatstttgctaggctggtctcgaactcttggcctcaagtgattcacccgcctcagcctcctgaagtgctgggattacaggcatgcaccgtcacacctgactaat

SEQ ID NO: 12672 - DNA, 201 bp, Homo sapiens
taacgcagcagctctgaaaatcctaaaacaccgccacttgctcccgtaaggaaatgccaaagacaggattcattttgatagtatttttaaggaatgtctawtgtgtccactgagttgacgtgacgttgactatctattttggacactttatttctaatttttctccagaatgtagacaccatgatgagcatctttatgcat

SEQ ID NO: 12673 - DNA, 201 bp, Homo sapiens
ttgacatatgacagtcatagtgggagagaaagtaaaagcatctggaaaaagatgagcgtggacgccgaaggtcaccaaagggaagtcatgagattagagcrgattcctgattctggtggatcaggagaaaagaaaatttaagagactcagaaaaggaccagggtagactccacgggtagagaaaccttttggaaataatgt

SEQ ID NO: 12674 - DNA, 201 bp, Homo sapiens
tttttttttgtagagacagggtctcattatgttgctcaggctcagactcttttatgtatgtgatcatttaacacttaggaacaagaaatccatcccgttgyactgattcaacatctgagattcagaaattatctgctgttttggaagactacaagatgaaccaggcaatctcttcagtttctgttgtcagggaactttact

SEQ ID NO: 12675 - DNA, 201 bp, Homo sapiens
cccagcactttgggaagctgaggcaggaggatcacttgaggccaggagtttgagatcagcctgagcaacatagcaagactctgtgtctacaaaaaaaaaawttttaataaaaaaaagaaatgggatagttatgcaatcaagttatttccaagaagcagtgatatgatgtgtcgtagccatgaaaataatgtggtgattcaa

SEQ ID NO: 12676 - DNA, 201 bp, Homo sapiens
tatatatcatatatgatatatgtgataaacaagatatatatgtttgcatatatatatagagaggtagggtctcactcttgcccaggctggagtgcagcggygagatcacagctcactgcagcctcagcctcccaagctcaaatgttcctcccacctcagcctcctgacgagctgggactacaggtgtgtaccaccatgccc

SEQ ID NO: 12677 - DNA, 201 bp, Homo sapiens
ctcgatctcctgacctcgtgatccgcctgccttggcctcccaaagtgttgggattacaggtgtgatccaccgcacctggcctgaatttgtgtgttttttttgacacgggctctcactctgttgcccaggctggagtgcagaggtgcaatcatagctcactgcagccttgacctctcaggctcaagtgatcttcctacctct

SEQ ID NO: 12678 - DNA, 201 bp, Homo sapiens
gtgagggacggcaggagctgggactgtgacctttgtgctgacacccagcccaagactcttctccttacatctttgtcgcttttttttttttttccaggaamtaagtggctcctccatggcccccatcatgaccacagtgcaatctaaaacagcccctcccacatttaacaggaccaataaattcacagctggcttccagaa

SEQ ID NO: 12679 - DNA, 201 bp, Homo sapiens
agcattacaagcttaggaactttctcatgaattttcactgaggaagaagagataatgttctctgtttggagggagggccgcccccggtgtggctctctggwtgctaaatcctgtgaaatgaagtgtggcaacatgacatcatcgaggactttgtttactgtcaatgcacgttatgctggagtaactggagaaagagatttg

SEQ ID NO: 12680 - DNA, 201 bp, Homo sapiens
caccacacccggctaatttttttgtgtttttggtagagacggggtttcaccgtgttaggcaggatggtctcgatctcctgacctcgtgatccgcctgcctyggcctcccaaagtgttgggattacaggtgtgatccaccgcacctggcctgaatttgtgtgttttttttgacacgggctctcactctgttgcccaggctgg

SEQ ID NO: 12681 - DNA, 201 bp, Homo sapiens
tctgcaacttgctatttcatcaatttcatatatattatatacatatacatatatacatacgtgtgtgtgtgtatatatatacatatatatatatatatatwttttttttgagacagagtctgaaaaaaagctttgtctcccaggtgggagtgcagtggtgcgacctctgctcactgtaacctctgcctcccggattcaagc

SEQ ID NO: 12682 - DNA, 201 bp, Homo sapiens
aacctgagaggcggaggttatagtgagccaagatcacgacactgcactccagcctgggtgatggagcaagactctgtctcaaaaaaaaaaaaaaaaaaaaatcctcaggattctcatggcagccatcagcctgggtgcccgccgtggccaacccttctgactttgtgcttgattttacgaacgctctgcttcctccttccc

SEQ ID NO: 12683 - DNA, 201 bp, Homo sapiens
cttctgcaacttgctatttcatcaatttcatatatattatatacatatacatatatacatacgtgtgtgtgtgtatatatatacatatatatatatatatwttttttttttgagacagagtctgaaaaaaagctttgtctcccaggtgggagtgcagtggtgcgacctctgctcactgtaacctctgcctcccggattcaa

SEQ ID NO: 12684 - DNA, 201 bp, Homo sapiens
atttataatataattattatatagaatatataatataatatatattctatataatataatatatattatataatatattctatataatataatatattatrtaatatatataatatattatataatatatataatatattatatattaatatattaatattgatgtatatataatattatatataataatatatatgatat

SEQ ID NO: 12685 - DNA, 201 bp, Homo sapiens
tgttagtttgtggccgaaggcaaatggagcatgaaaatttccttggatattgcaaaacaaattacatcacacatcacacacaaaactcagtttaaaaaagrtctactgtggcccaattatttctggttaaaaaacaatcagtataacaaaatacaatagaataaaatgtcaatcagtcctttagaatttgttttaatgaag

SEQ ID NO: 12686 - DNA, 201 bp, Homo sapiens
ttcttctgcaacttgctatttcatcaatttcatatatattatatacatatacatatatacatacgtgtgtgtgtgtatatatatacatatatatatatatwtattttttttttgagacagagtctgaaaaaaagctttgtctcccaggtgggagtgcagtggtgcgacctctgctcactgtaacctctgcctcccggattc

SEQ ID NO: 12687 - DNA, 201 bp, Homo sapiens
tatataatatatttatttttatatatatataaatatatatataatataatatatattataatatatatattataaatataaatataaatataaataaatawaaatatatttataatataattattatatagaatatataatataatatatattctatataatataatatatattatataatatattctatataatataata

SEQ ID NO: 12688 - DNA, 201 bp, Homo sapiens
tagtaattcaattttgtctaatactaagcatttcagggagagctaacatttacaggattatcattttttattgtttaaaaaaaatctctttgtgccaggcrcagtggctcacggctgtaatcccagcactttgggaggccgaggtgggtggatcacttgaggtcaggagtttgagactagcctggccaacatggtgaaacc

SEQ ID NO: 12689 - DNA, 201 bp, Homo sapiens
atatataatatatttatttttatatatatataaatatatatataatataatatatattataatatatatattataaatataaatataaatataaataaatataaatatatttataatataattattatatagaatatataatataatatatattctatataatataatatatattatataatatattctatataatataat

SEQ ID NO: 12690 - DNA, 201 bp, Homo sapiens
gtcctacagaggccttgttcctcagtctcctgagggcagaccaggccactggcatggacaccacgagtccctgggtggccaaggggcagctgtctgtaggsaatgcgagcagaacttagacattttgggtcagggtgtctgtgtgcacatacaaggccctcatgatataggatgaagccagaggtgaaaaaaagagggctc

SEQ ID NO: 12691 - DNA, 201 bp, Homo sapiens
gtttgaccccaggagagggaggttgcagggaaccgagatcgcactactgcactccagcgtgggtgacagagcaagactgtgtctcaaaaaaaaaaaaataataataataacatgatattttaaggtgttaaagctctacattcatacatttgtaggaatagataaggggcaatcagatgtgtgcacaagtccttccttaga

SEQ ID NO: 12692 - DNA, 201 bp, Homo sapiens
atatatataatatatttatttttatatatatataaatatatatataatataatatatattataatatatatattataaatataaatataaatataaataaatataaatatatttataatataattattatatagaatatataatataatatatattctatataatataatatatattatataatatattctatataatata

SEQ ID NO: 12693 - DNA, 201 bp, Homo sapiens
gcctctctcctactcttgagtgttgcaaagagtagttatttgtaaaactgagccatcttggcatccagtggagggtgttacatcctttacatctcaaaagkgtcttattaaatgaaggtgcaagcactgagggctatagtgtggctccaaccattcttgttggggtaatacatgaaagggataattgcagagggattgaag

SEQ ID NO: 12694 - DNA, 201 bp, Homo sapiens
ttatcacagatggtaaccatgagccatccccagaatgttgacatgaactgaacgtattttgaaggttcatttactcagtgctggatctaaacaaacatttrtttggatttcccaaataactcttctgttttaaggcagagaactcagattcaccaaaatagttcgtgtgctaactgctttcattaagactgaagtcctcac

SEQ ID NO: 12695 - DNA, 201 bp, Homo sapiens
gaatcatgactcaccaactcacttgtaagccccatcttgatctctgggtccttctccagtcttgtttcttgtcagttttccttagtgccccagcgctccasacccatccgtttcatatgcagtggccctgaggagcgttttttttttttttttcctaagacagggtctccctctgttgcccaggatggagtgcagtggcgc

SEQ ID NO: 12696 - DNA, 201 bp, Homo sapiens
ttccttcctggacgtctccctccgcagacatccgtgactgcaccccccccccccgccccgaattccttcctggacgtctccctccgcagacatccgtggckgcacctccccattcctccccattcctccccattcctccccattccgccccatgcctctccggatgtctccctccgcagacatcggtgactgcaccacccg

SEQ ID NO: 12697 - DNA, 201 bp, Homo sapiens
ttgagcctgggaggcagaggttgcagtgagctgagatcgcactattgcactccagcctggaccacaagagcaaaactctgtctcaaaaaatatatatatataatatatttatttttatatatatataaatatatatataatataatatatattataatatatatattataaatataaatataaatataaataaatataaat

SEQ ID NO: 12698 - DNA, 201 bp, Homo sapiens
gctgggggggtggggggtgccgttgtttgccagtagtgcaaaaaaaaaaaagatagaacattttgtgcttttgtgctttgagagaataattaagtcctaaygttcccttgatgttctatcttgtgtatgtgtgtgtcttccacccccagatacttcagaagaactctcaacatcattctgcaatttatccctgagatgatt

SEQ ID NO: 12699 - DNA, 201 bp, Homo sapiens
ttttgggagccgggcgtggtggctcacacctgtaatcccagtactttgggaggctgaggtgggtggatcacttgaggtcaggagtttgaaaccagcctggscaacatagtgaaaccccaatctctactaaaaatacaaaattagtcaggcatggtcgcacgtgcctgtaataccagttacttaggaagttgaggcaggaga

SEQ ID NO: 12700 - DNA, 201 bp, Homo sapiens
tactcaggagactgaggcaggagaattgcttgaacctgagaggcagaggttgcagtgagccaagattgcgccactgcactccagcctggacaacaagagcmaaactctgtctcaaaaaaaaaaaaaaaaaaagaagaagaagaagaaaaaatgccttgtaatcaggttttcataaggagtgagtgtagataagaatcagaa

SEQ ID NO: 12701 - DNA, 201 bp, Homo sapiens
atggagccactgcactccagcctgggcaacagagcgagactccgtctcaaaataaataaataaataaataaataaataaataaataaataaataaataaaataaaacataaatcatccgacatggtatcagttatgtgagttacaaaaatacaggtcaagggtctttgcgttctataatatgtgagtcccacattttagaa

SEQ ID NO: 12702 - DNA, 201 bp, Homo sapiens
ttaggctagcagacaactttacttttccagaaaacctgtgtttaatttttttttttttttttttgagatggagttttgctcttgttgcccaggctggagtrcagtggcgcaatctcggctcaccgcaacctccgcctcccgggttcaagtgattctcctgcctcagccttccgagtagctgggattacaggcatgcgccac

SEQ ID NO: 12703 - DNA, 201 bp, Homo sapiens
gtcttttagatggattaaaaactagcatgataatctcttctttaataggtgaccttaatccatttccgtttattgtgatttctgattcactggctttttcrgttattattccttttgttttttacttcccttccctttcctgtctttctgtaatacctgccaacccttccccactactgattggtgtgcaagctacagatg

SEQ ID NO: 12704 - DNA, 201 bp, Homo sapiens
ttgctctgtcacccaggctggagtgcagtggcgtgatcttgactcactgcaacctccacctcctgggttaaaacgattttcctgactcagcctcctgagtrgctgggactacaggtgcacgccaccacgcctggctaatttttgtatttttagtagagacaggatttcaccatgttggccaggctgctctcgaactcatga

SEQ ID NO: 12705 - DNA, 201 bp, Homo sapiens
tgagatggagccactgcactccagcctgggcaacagagcgagactccgtctcaaaataaataaataaataaataaataaataaataaataaataaataaataaaataaaacataaatcatccgacatggtatcagttatgtgagttacaaaaatacaggtcaagggtctttgcgttctataatatgtgagtcccacatttt

SEQ ID NO: 12706 - DNA, 201 bp, Homo sapiens
aaggggccttctctgtgttcccacgataccactgcatgccctggtcattgcgcttcccagagtgtggcatgggaacccttctacatattctcctgactagkctgtgagcaacttgagggcatgtacagcaccagtcaattgtcccccatggccaggcacagtggctcacacctgtaatcccagcactttgggaggctgagg

SEQ ID NO: 12707 - DNA, 201 bp, Homo sapiens
caactttttttccattcaaaagcattatttggagttggttggttttcacacaccctagtgtgaagattaattgtcttgatacagtttgaagttttcataayctcatttcggggttatgcagctggaagaggcaatacaagttaataaagtcccttcccaacattgtcctggctgtctttgaatatcaaaggatagccacac

SEQ ID NO: 12708 - DNA, 201 bp, Homo sapiens
tttcttgtgcacctcccttggtgcctagaagaaaggttaaaacaggatacattacagagggactatcttgagagaggagttacctgggcacagcccagggscccttgggagtgacatgcaagggcagcactggcttgccttatttggttctcccgctctttcttctttcccttgtaaaagtaactgaagcttaaaggtgaa

SEQ ID NO: 12709 - DNA, 201 bp, Homo sapiens
gtcccttcccaacattgtcctggctgtctttgaatatcaaaggatagccacacacacacacacacacacacacacacacacacacacacacactcatcccrttgctttgtacgtcatcgggggaaaatcctgttgcataaaaatggacaaagggccatgagacagcattgtgtgcgggtactaggatggataagttcagct

SEQ ID NO: 12710 - DNA, 201 bp, Homo sapiens
gtgaaaccccatctctactaaatatacaaaaattagctgggtgtagttgcatacacctgtagtcccagctactcgggaggctgaggcaggagaattgcttraactcgggaggtagaggttgcagtgagccaagatcacgccattgcactccagactgggcgacaagagcgaaactctgtctcaaaaaaaaaaaaaaaaaaa

SEQ ID NO: 12711 - DNA, 201 bp, Homo sapiens
tgaggctgaattcacctcctgtgctcagtacctggcatgtgcccttgtacattgcagtgactgaataaatattagctaaacgttttttgaaatgtggttargatttcaatctttttaaaaacatttttactttgaaatatagcatgtttacaaaaatgcataaaatatatattcagcctaatggatttttgtaaagcaaac

SEQ ID NO: 12712 - DNA, 201 bp, Homo sapiens
gctcatgcctgtaaccccagcactttgggaggccgaggcgggcggatcacgaggtcaggagatcgagaccatcctggctaacacggtgaaaccccgtccckactaaaaatacaaaaaaattagccgggtgtggtggcacatgccggttgtcccagctacttgggaggctgaggcaagcaactcgcttgaacccaggaggca

SEQ ID NO: 12713 - DNA, 201 bp, Homo sapiens
caagtccttcaaactactgctgaggttggagctgaagaccaacatcaggaccacggatgacttgaagcgctgagatccactttaaggaacaaagtggggcygggcgtggtggctcacacctataatcccagcactttgggaggccaaggtggtggggggattacctgaggtcaggagttcgagaccagcctggccaacatg

SEQ ID NO: 12714 - DNA, 201 bp, Homo sapiens
gcaagcaactcgcttgaacccaggaggcagaggttgcagtgagccaagatggcgccactgcactccagcctaggcaacagagcgagactccatctcaaaaraaaaagttgagtgaggatggaagatggaaccgataaagtgttcactctattatcagggggaatcttgttacaattgggataataaattgtctcctggcat

SEQ ID NO: 12715 - DNA, 201 bp, Homo sapiens
acctccgcctcccaggttcaagcaattcttctgcctcagcctcctgagtagctgggactacaggtgcacaccaccatgcccagctaatttttttttttttwaatttttgtattttcagtagagacggggtttcaccatgatggccaggatggtctcgatctcttgacctcgtgatctgcccgcctcggcctcccaaaatgc

SEQ ID NO: 12716 - DNA, 201 bp, Homo sapiens
tcagaataaggaatacagagagtttccagtgtctaccccgtgtcgaacatttggaaacactggacagatatttctctatctgcaaggggaatattccaggygtgaaggtgaatggattcattgaaatgctttagatctctcaaaataaagtgctagtgaagtggcccatagtggtcattttcatcacgtaaagtgtgctgt

SEQ ID NO: 12717 - DNA, 201 bp, Homo sapiens
ctctcaaactcatggcctcaagtgattgtaattttttttttctaggaactaaatctgtccataagccaagagccaggttactgcaggctctcctgagttcsaggactgtaaaataatagcttgtcttgctctttgtaccacacaagctctttaaatagttgctgatctcaaagtggtagatttctcctttgcgccaccaga

SEQ ID NO: 12718 - DNA, 201 bp, Homo sapiens
tgcccaggcttgtcttgaacttctgggctcaaacagtcctcctgccttggcctcccaaagtgctgggattacaggtgtgagccattgtgcctggcctgaaraactatctcctgaagacgcagtactccctgggcccctctgtgtgtttgcccctgcagcccccttgcctgaaatagtcccttctttaattctctctctatc

SEQ ID NO: 12719 - DNA, 201 bp, Homo sapiens
agggcatgtacagcaccagtcaattgtcccccatggccaggcacagtggctcacacctgtaatcccagcactttgggaggctgaggcaggcagattgcttraggccaggagttccagaccagcctgggcaacatggtgaaaccccatctctacaaaaaatacaaaaattagccaggtatggtgatgcatgcctgtagtccc

SEQ ID NO: 12720 - DNA, 201 bp, Homo sapiens
gcctcaagtgattgtaattttttttttctaggaactaaatctgtccataagccaagagccaggttactgcaggctctcctgagttccaggactgtaaaatratagcttgtcttgctctttgtaccacacaagctctttaaatagttgctgatctcaaagtggtagatttctcctttgcgccaccagatgacttaaatagag

SEQ ID NO: 12721 - DNA, 201 bp, Homo sapiens
tgaaaatacaaaaattagctgggcatggtggcgggtgcctgtaactctagctactcggagactgaagcaggagaattgcttgaacccggaaggcagaggtygcagtgagccgagatcacatcactgcactccaccctgggctacagagtgagactccatctcaaacaaacagacaaacaaaaaacccaacaacacaaattt

SEQ ID NO: 12722 - DNA, 201 bp, Homo sapiens
tcagtagagacggggtttcaccatgatggccaggatggtctcgatctcttgacctcgtgatctgcccgcctcggcctcccaaaatgctggaattacaggcktgagccaccgcgcccggccgcatgtctttactcctgtgcactgctgtgcattcatgtgaagtggctgtcccaggactgtcacctacttgttccttagagt

SEQ ID NO: 12723 - DNA, 201 bp, Homo sapiens
aggatgaatgcaaacgcctagtaaagaaactcgaatgggttaccctgataggcattgcactcattctttactccttttttatctttttttttttttttcaracagagtctcactctctctcccaggctggagtgtgcagtggcgcgatcttggctcactgcaacctccgcctcccaggttcaagcacttctcctgcctcat

SEQ ID NO: 12724 - DNA, 201 bp, Homo sapiens
tgggaggatcacctgaacctgggaggtcaaggctgcagtgagctatgattgtgctactgcattccagcctgagtgacagagcaagaccctcccccccccamaaaaaaaattgtctgtcacatcagagagcatgaggggagaatgagctatggctgtcttcttcgttctgttatttacttctttcctgtgttactgagctca

SEQ ID NO: 12725 - DNA, 201 bp, Homo sapiens
taatcccagcactttgggaggctgaggcaggcagattgcttaaggccaggagttccagaccagcctgggcaacatggtgaaaccccatctctacaaaaaawacaaaaattagccaggtatggtgatgcatgcctgtagtcccagctactcggtaggctgagatgggaggatcacctgaacctgggaggtcaaggctgcagt

SEQ ID NO: 12726 - DNA, 201 bp, Homo sapiens
cctgcctcagcctcccgagtagctgggaccgcaggtgcatgccaccacacctgcctaattttttgaatttttggtaaagatggggtctcactttgttgctygggttggttctgaactccttggctcaagtgatcctcatgcctcggccttccaaagtgctgggattacaggcatgagccaccacacctggccaagatgaat

SEQ ID NO: 12727 - DNA, 201 bp, Homo sapiens
gtaaaagttctgtctacaccttctacccagccccattttccatacagtcccccaaacgtctgcctctttctccatcagtcatatccctggtggttaataaytgcttctttaaaaggcacttggttgcctggggagtatgcatattacataagctatttagcgtcctaatcaagtttaagttccctgctctgtattttcttg

SEQ ID NO: 12728 - DNA, 201 bp, Homo sapiens
tgaggcaggagaattgtttgaccccaggagagggaggttgcagggaaccgagatcgcactactgcactccagcgtgggtgacagagcaagactgtgtctcaaaaaaaaaaaaataataataataacatgatattttaaggtgttaaagctctacattcatacatttgtaggaatagataaggggcaatcagatgtgtgcac

SEQ ID NO: 12729 - DNA, 201 bp, Homo sapiens
ctgaggcaggagaattgtttgaccccaggagagggaggttgcagggaaccgagatcgcactactgcactccagcgtgggtgacagagcaagactgtgtctcaaaaaaaaaaaaataataataataacatgatattttaaggtgttaaagctctacattcatacatttgtaggaatagataaggggcaatcagatgtgtgca

SEQ ID NO: 12730 - DNA, 201 bp, Homo sapiens
ccttgcctaggtcttctctttcagaaattcttccagctgtcctgagaacaacatagtaatttcctccaaagttcggcagcctctttcagtcttaacaagaratgtaatttcccctttaaaaggagatcaagtgcaggctgctgagaagagggtgtgccctaggtgtcattcacttgcccagaatgcgaagttggcccttaa

SEQ ID NO: 12731 - DNA, 201 bp, Homo sapiens
agctgaggcaggagaattgtttgaccccaggagagggaggttgcagggaaccgagatcgcactactgcactccagcgtgggtgacagagcaagactgtgtytcaaaaaaaaaaaaataataataataacatgatattttaaggtgttaaagctctacattcatacatttgtaggaatagataaggggcaatcagatgtgtg

SEQ ID NO: 12732 - DNA, 201 bp, Homo sapiens
tttttcccttgaggactctgaatgaaatatgtgttgtgtgcctgagttttgattgcgacctgtcacatgaagtcagcgaaattttccacttgtggtgtcaygttggtgctcggagtttgggattttggagtatttccgattttgaattttcagattagggatactcaacctgtaggaagtaacaagaaaacccagagaact

SEQ ID NO: 12733 - DNA, 201 bp, Homo sapiens
tccctttcctgtctttctgtaatacctgccaacccttccccactactgattggtgtgcaagctacagatgacagttacacttaacacttcaaggcacatawtcactaaatttttctcataatatttgctactggttcaattatcacccctttgtggatatatgtcctttttttccctgatagcctttaaagttttatcttt

SEQ ID NO: 12734 - DNA, 201 bp, Homo sapiens
agtgcatgaaagggcctgttttctcataccctccacaacttgagtctttagtcatattttaaaatattttgccagctgagagcagtggctcatgcctgtaatcccagcactttgagagaccagagtgggaggatcacttcagtccaggagttcaataccagcctgggcaacacagcaagactctgtctcaacaaaaaaata

SEQ ID NO: 12735 - DNA, 201 bp, Homo sapiens
tactcgggaggctgaggcaggagaattgcttaaactcgggaggtagaggttgcagtgagccaagatcacgccattgcactccagactgggcgacaagagcraaactctgtctcaaaaaaaaaaaaaaaaaaaattaacagacagtggcggcacacttctgtggtcccagctacttaggaggctgaggtgggaggatcactg

SEQ ID NO: 12736 - DNA, 201 bp, Homo sapiens
atataatatataatgtatataatatatataatgtatataatatattatatatatagatatatatatttatttatttatttttgagatggagtctggctctrttgcccaggctggagtgcagtggcgtgatctaggctcactgcaacctctgcttcctgggttcaagcgattctcctgcctcagcctcctgagtagctggga

SEQ ID NO: 12737 - DNA, 201 bp, Homo sapiens
cacctgtagtcccagctactcgggaggctgaggcaggagaattgcttaaactcgggaggtagaggttgcagtgagccaagatcacgccattgcactccagmctgggcgacaagagcgaaactctgtctcaaaaaaaaaaaaaaaaaaaattaacagacagtggcggcacacttctgtggtcccagctacttaggaggctga

SEQ ID NO: 12738 - DNA, 201 bp, Homo sapiens
ttaattttttcatttatatatgtatatacacacatatatacacacgtatatacatatgtatatatactatatataatgtatataatatataatatataatrtatataatgtatataatatataatatataatgtatataatatatataatgtatataatatattatatatatagatatatatatttatttatttatttttg

SEQ ID NO: 12739 - DNA, 201 bp, Homo sapiens
caaataggggtcctcttccttgcgttccatgtctctgcgtttatcatgttctgatagccgcttgcaagtggcaggcctgtgtctctctgggctacatcattgtgaccttttagcaggggccttcaaatctcaagccaaggatgtaatgatgctatttccctgcaaggtgcatatcccaggctgttgggcatgataactagg

SEQ ID NO: 12740 - DNA, 201 bp, Homo sapiens
ataacaatctgcatttacaagataatcccagtggtttctcgtaccttgcagaactgtctgaagtgctctggactatggtgatgaacagcggccttcagacrcgaggctggggaggaatcgtcggggtttttattatttttgccgtatttgctgtcctgacagtagccatccttctgatcatggagggcctctctgctttcc

SEQ ID NO: 12741 - DNA, 201 bp, Homo sapiens
ttttaattttttcatttatatatgtatatacacacatatatacacacgtatatacatatgtatatatactatatataatgtatataatatataatatatamtgtatataatgtatataatatataatatataatgtatataatatatataatgtatataatatattatatatatagatatatatatttatttatttatttt

SEQ ID NO: 12742 - DNA, 201 bp, Homo sapiens
gcaaataggggtcctcttccttgcgttccatgtctctgcgtttatcatgttctgatagccgcttgcaagtggcaggcctgtgtctctctgggctacatcattgtgaccttttagcaggggccttcaaatctcaagccaaggatgtaatgatgctatttccctgcaaggtgcatatcccaggctgttgggcatgataactag

SEQ ID NO: 12743 - DNA, 201 bp, Homo sapiens
aataacaatctgcatttacaagataatcccagtggtttctcgtaccttgcagaactgtctgaagtgctctggactatggtgatgaacagcggccttcagaygcgaggctggggaggaatcgtcggggtttttattatttttgccgtatttgctgtcctgacagtagccatccttctgatcatggagggcctctctgctttc

SEQ ID NO: 12744 - DNA, 201 bp, Homo sapiens
aacccaggaggcagagcttgcagtgagccgagatcgcgccactgcactccagcctgggcgacagagcgagagactgtctcaaaaaaaaaaaaaaaaaaaaatcagcccaatcatagtgatgcacacctgtagtcctagctactcaggaggctgaggtgggaggatcacttgagcccaggaggttgaggctgcagtgagctg

SEQ ID NO: 12745 - DNA, 201 bp, Homo sapiens
agcaaataggggtcctcttccttgcgttccatgtctctgcgtttatcatgttctgatagccgcttgcaagtggcaggcctgtgtctctctgggctacatcattgtgaccttttagcaggggccttcaaatctcaagccaaggatgtaatgatgctatttccctgcaaggtgcatatcccaggctgttgggcatgataacta

SEQ ID NO: 12746 - DNA, 201 bp, Homo sapiens
tttttactggttgggaagaaaaagtatttctactccctttttccagatgcagaagccaaagtaatatatatgtgtgtgtgtgtgtgtgtgtgtgtgtgtgkattttttttttttttttgagacggagtttccctctctttgcccaggctggggtgcaatggcacgatcttggctctccacaacctcctccttccgggttca

SEQ ID NO: 12747 - DNA, 201 bp, Homo sapiens
cccaagtccttcaaactactgctgaggttggagctgaagaccaacatcaggaccacggatgacttgaagcgctgagatccactttaaggaacaaagtggggccgggcgtggtggctcacacctataatcccagcactttgggaggccaaggtggtggggggattacctgaggtcaggagttcgagaccagcctggccaaca

SEQ ID NO: 12748 - DNA, 201 bp, Homo sapiens
cttgaatagattagcatttgaatgggtagactgagtaaagaagacagatattccatctatatgtctatccttccaccaatattacaatcttttattttttwttttttttttaagatagggtctcactttgtcacccaggctggagtgcagtggcatgatcatggctcactgcagcctcgacctccccaggctcaggtcatc

SEQ ID NO: 12749 - DNA, 201 bp, Homo sapiens
acacactttcacatgcacatgaacgctgatgcacacactcagccctgcaagtggctgcagcacagacacccataagcatatctttttttttttttttttttcaggctggagtgccgtggcgtgatctcggctcactgcaacctccgcctcccaggttcaagcaattcttctgcctcagcctcctgagtagctgggactaca

SEQ ID NO: 12750 - DNA, 201 bp, Homo sapiens
cctcaaactcttgggctcaagcagttctcctgtcttggcctcccaagtagcagggactataggcacacaccaacatacttggcgaacttttttttttttttggtagagacagggttttgccatgttgcccaggcttgtcttgaacttctgggctcaaacagtcctcctgccttggcctcccaaagtgctgggattacaggt

SEQ ID NO: 12751 - DNA, 201 bp, Homo sapiens
actcccaggctcatgtcattctaccgcctcagcttcccaagtagctgggaccacaggtgcatgccaccatgcctgggccaattttttttttttttttttttggtagaggtagggttttgcctttttgcctaggctagcctcaaactcttgggctcaagcagttctcctgtcttggcctcccaagtagcagggactataggc

SEQ ID NO: 12752 - DNA, 201 bp, Homo sapiens
tctccagtcttgtttcttgtcagttttccttagtgccccagcgctccagacccatccgtttcatatgcagtggccctgaggagcgttttttttttttttttcctaagacagggtctccctctgttgcccaggatggagtgcagtggcgctatcacggcctcgaactcccaggctcatgtcattctaccgcctcagcttccc

SEQ ID NO: 12753 - DNA, 201 bp, Homo sapiens
tctgtgtgtatgtgtattagggtctgcaatcatgttatgtgctgattcctttgattttttttagtcatctgttgtgggtaatgtatttcaggaatgtcatrgcactttctgttggcttaccttctttttccttcctgcatagactgttctagaaaaactggaaggagagttacaggaagccaaccagaaccagcaggcctt

SEQ ID NO: 12754 - DNA, 201 bp, Homo sapiens
gaatctcgctctgtagcccaggctgttgtgcagtggcacagtctcggctcactgcaacctctgcctcccgggttcaagtgattctcctgcctcagcctccygagtagctgggattacaggtgagccctaccacgtccagcaaatttttgtatttttagtagagacggggtttcaccatgttggctgggctgctcttaaact

SEQ ID NO: 12755 - DNA, 201 bp, Homo sapiens
gtggaggcctgttcccttggcccttgggatgcacggctgttggttgtttcctcaggcggctgcttagggtccttttcgtgtcggaaacattaccacctccrttcaagagatggtcctataatggcattatttgccccttctccacctctccttcatgaaatcctacagacctaatacataaacaatttgttctgacggact

SEQ ID NO: 12756 - DNA, 201 bp, Homo sapiens
ccttctgacttgctgctatgaacccaggtccccccatactcccacatctcaggtcacagtgaaataactgtgtgtttctatttaaaatcttcggccgggcrcggtggctcacgcctgtaatcccagcactttgggaggccgaggcgggcggatcacaaggtcaggagatcgagaccatcctggctaacacggtgaaacccc

SEQ ID NO: 12757 - DNA, 201 bp, Homo sapiens
tactaaaaatacaaaaattagccggcgtggtggtgagtgccttataatcccagctactcggaaggctgaagcaggagaattgcttgaacctgagaggtggrgatggcagtgagctgagatcgccgccattgcactccagcctgggcgacataagcgagactccgtctcaaaaaaaaaaaaagttttttttgccttcttcct

SEQ ID NO: 12758 - DNA, 201 bp, Homo sapiens
cctgagaggtggagatggcagtgagctgagatcgccgccattgcactccagcctgggcgacataagcgagactccgtctcaaaaaaaaaaaaagttttttktgccttcttcctgtcactcttaccccaagagcaaacattgtgctgacctccaggactgtcagttcgttttgcctgttcttgaactgtatttaaatgaaat

SEQ ID NO: 12759 - DNA, 201 bp, Homo sapiens
gcctttgcctcccaaagcactgggattgtaagtgtgagccactgtgcccagccacatgtgtttttagaaagttgccagtagctaatttacaatgattgctrtatgttttatttcatacgccacccagcttaagcattgtgcgattttagtaagaggactgcaagtaagtatctggaaggaagatagtcactaggattcaca

SEQ ID NO: 12760 - DNA, 201 bp, Homo sapiens
gagtttagggttggaaatggagaaaccgtaatatatctctcctttgatattttcttctataagttgaaggagagagaaaataggatttcgagatgacaaayataaagttaacttgagccacgtccctccccatgggataaagaaccacaaggtgttggggacagcctaacctagaagctggctcttggcacctggcaccct

SEQ ID NO: 12761 - DNA, 201 bp, Homo sapiens
agaggatcagaacagctatttagcaaccaatctgggcacattttaatatttctagtccaagtaccgctgcatctgtatgtgtcaggtgaatatcagcctcrgatctagtgacatagaaggtcctgcgtgtcactgaggactccttggctcagcaccacgcccctataagctctcttttttgtttgtttttgagatagagtc

SEQ ID NO: 12762 - DNA, 201 bp, Homo sapiens
tccttgcttgcttctctccacggtagggttagccaaactcaaggttaagggtgcagtccttgactgtcacatctgcccaagactgatcccagccgcaagtytgggggttcccagggccaccctcacttcaggcaagctgactatacattcgcaggacccttagggtcctttggggccaaaatgactcacagaactccggaa

SEQ ID NO: 12763 - DNA, 201 bp, Homo sapiens
tgtcttcttcgttctgttatttacttctttcctgtgttactgagctcataaccaaattgtccttttttttttttctttaaggctgtcccttctctaaactrtgatgctaccagagtaacctgcctctatggctcctcactgaatccaggttgtttcttcaactttacccatagcttgcctttctagaaacttccacacagg

SEQ ID NO: 12764 - DNA, 201 bp, Homo sapiens
cttgcccagaatgcgaagttggcccttaaagaatcctgatctgagacccgacctgaaaggagaggataagaccagggagccaggcgtcttgggaacacaaktctggccacccctgagaagccatctgtgctccaatttccgtctaagacttggccacggtgaggggagcaaaagagcctgaaattggaagactgtccaagg

SEQ ID NO: 12765 - DNA, 201 bp, Homo sapiens
actatcattgtcaatcagtatcttttcctttattttttatgaacacacttgtgcatatatatactcatattaagcaaatatctgttttctctcttttcctyttatcatgagacataaaatgtattgattttatatcagtatttaactattgttaattttacatcatagtaatgaagttatggggtatcaggagaagagtat

SEQ ID NO: 12766 - DNA, 201 bp, Homo sapiens
gccaaggtgggagaattgcttgaggccaggagtttgagacaagccttggcaacactgtgagacccaaactctacaaaaaaaaaaaaaaagagagagagagacagagaaaaatttctttaaaaaaaattgctgagaagattaggaacaaggcaaggacattgttcctcaccactccatttcacatcatactggagtcctaac

SEQ ID NO: 12767 - DNA, 201 bp, Homo sapiens
ggccaaggtgggagaattgcttgaggccaggagtttgagacaagccttggcaacactgtgagacccaaactctacaaaaaaaaaaaaaaagagagagagagacagagaaaaatttctttaaaaaaaattgctgagaagattaggaacaaggcaaggacattgttcctcaccactccatttcacatcatactggagtcctaa

SEQ ID NO: 12768 - DNA, 201 bp, Homo sapiens
agtaagccgagatcacgccactgcacttcagcctgggagacagagcgagacaccatctcaaaaaaataaaaacaaaaaatttttttaaagtaaaaaattasaactacctaaaagacattgcacctttcaagtgtatgacagtgtaacagtgtttaacagttgttttattaagtgaatgcttgaacgtattcaacattaaat

SEQ ID NO: 12769 - DNA, 201 bp, Homo sapiens
aggccaaggtgggagaattgcttgaggccaggagtttgagacaagccttggcaacactgtgagacccaaactctacaaaaaaaaaaaaaaagagagagagagacagagaaaaatttctttaaaaaaaattgctgagaagattaggaacaaggcaaggacattgttcctcaccactccatttcacatcatactggagtccta

SEQ ID NO: 12770 - DNA, 201 bp, Homo sapiens
aaccagaaccagcaggccttgaaacaaagcttcctagaactgacagaactgaaatacctcctgaagaaaacccaagacttctttgaggtggtcacgtgggsatgagttactaaagggcccgttcctcagaacctcaaatttccattttggaaactggctggcctgggatctgagtaaatcactctgtttctgttccatggc

SEQ ID NO: 12771 - DNA, 201 bp, Homo sapiens
ttctccagtcttgtttcttgtcagttttccttagtgccccagcgctccagacccatccgtttcatatgcagtggccctgaggagcgttttttttttttttttcctaagacagggtctccctctgttgcccaggatggagtgcagtggcgctatcacggcctcgaactcccaggctcatgtcattctaccgcctcagcttcc

SEQ ID NO: 12772 - DNA, 201 bp, Homo sapiens
gaggccaaggtgggagaattgcttgaggccaggagtttgagacaagccttggcaacactgtgagacccaaactctacaaaaaaaaaaaaaaagagagagagagacagagaaaaatttctttaaaaaaaattgctgagaagattaggaacaaggcaaggacattgttcctcaccactccatttcacatcatactggagtcct

SEQ ID NO: 12773 - DNA, 201 bp, Homo sapiens
taaagcttcactaaaaccagagaaaatcttgaggtgtaggtgccttttgagtttccctaaatatatttaaatgaaaatcatagtgctttgactttcagacrgaaaccaatttagctgatgatttctttactgaggacacttctggcctcctggagttgaaagcagtgcctgcatatatgaccggaaagttggggttagtgt

SEQ ID NO: 12774 - DNA, 201 bp, Homo sapiens
tgtgaattcacagcagtccaggatcagtcaggccaggcccagaaatacaattgtatctatctatctatcatctgcctgtctgtctgtctgtctgtctgtctatctatctatctatctaaaagagacaaggtctcactatgttgcccaggctgatctcacactcctggcctcaagggatcctcttgcctcagcctcccaaag

SEQ ID NO: 12775 - DNA, 201 bp, Homo sapiens
caacaacagggttgagttccagaacaagttctatgtcggggatggttacaagttttctccattctcctttaaacacatcctggatggcacagccgaggagyaggctgagggctgcacctcccacggtggtcaccatgccaatgaaggaagttcagtcttgtctttgatatcagcccctgcaaggcgctcaatgggaaggtt

SEQ ID NO: 12776 - DNA, 201 bp, Homo sapiens
cactttgggaggccaaggtgggagaattgcttgaggccaggagtttgagacaagccttggcaacactgtgagacccaaactctacaaaaaaaaaaaaaaagagagagagagacagagaaaaatttctttaaaaaaaattgctgagaagattaggaacaaggcaaggacattgttcctcaccactccatttcacatcatact

SEQ ID NO: 12777 - DNA, 201 bp, Homo sapiens
ttgtgaattcacagcagtccaggatcagtcaggccaggcccagaaatacaattgtatctatctatctatcatctgcctgtctgtctgtctgtctgtctgtctatctatctatctatctaaaagagacaaggtctcactatgttgcccaggctgatctcacactcctggcctcaagggatcctcttgcctcagcctcccaaa

SEQ ID NO: 12778 - DNA, 201 bp, Homo sapiens
ggaatcgtcggggtttttattatttttgccgtatttgctgtcctgacagtagccatccttctgatcatggagggcctctctgctttcctgcacgccctgcractgcactggtaaggatggttgtcccctggaagctcaatgtggtgttgggaaagggagtgggctgtggggccagccgactgggttcagatcgtgagctgt

SEQ ID NO: 12779 - DNA, 201 bp, Homo sapiens
ctgggctcaagcgatcctcctgcttcagcctcctaaagtgatggaattcagacatgagccatgtgcctggcctcatttttaaaatttttaattaaaaaaawtttttttaaatagagacagggtcttgctatgttgcccagactggtcttgatctcctggcctcaagcaatactcccacctcggtcccccatagtgctgagg

SEQ ID NO: 12780 - DNA, 201 bp, Homo sapiens
ttgaactggggaggtggaggttatagtgaaccgtgattgtgccactgcactccagcctgggcaacagagtgagactctgtctcaaaaaaaaaaaaaaaaaatagggtgggctggactggccaatgataactattaaccccaaagaaagggctgtgtgtgtgtggccactttttactttacgagtgtcaccagtatttgctg

SEQ ID NO: 12781 - DNA, 201 bp, Homo sapiens
tttgtgaattcacagcagtccaggatcagtcaggccaggcccagaaatacaattgtatctatctatctatcatctgcctgtctgtctgtctgtctgtctgtctatctatctatctatctaaaagagacaaggtctcactatgttgcccaggctgatctcacactcctggcctcaagggatcctcttgcctcagcctcccaa

SEQ ID NO: 12782 - DNA, 201 bp, Homo sapiens
gctatgaaatgttgcacataaaaaaattgagctcagacaggaaacttctagagaaatgtcaaagatgtcatggttcaaagagattgtctcagatatacatyatgggtaagaaaaagtaggagttcccattttaaaagttatttttttgagacagggtcttactcttgtcaccttggctggagtgcagtggtacaatcatgg

SEQ ID NO: 12783 - DNA, 201 bp, Homo sapiens
ctttgggaggccgaggtgggaagatcacttgagccagggagttcaagaccagcctgcacaacatagtaagaccctgcctccgcaaaacaaacaaaaaaaaacacaaaaaaattacttgggtatggtagtgtgcacctgtagtctcagctactcaggaggctgaggtgggaggatcacttgagcccaggaggttgaggctgc

SEQ ID NO: 12784 - DNA, 201 bp, Homo sapiens
ctttgtgaattcacagcagtccaggatcagtcaggccaggcccagaaatacaattgtatctatctatctatcatctgcctgtctgtctgtctgtctgtctgtctatctatctatctatctaaaagagacaaggtctcactatgttgcccaggctgatctcacactcctggcctcaagggatcctcttgcctcagcctccca

SEQ ID NO: 12785 - DNA, 201 bp, Homo sapiens
tactcgggaggctgaggctggagaattacttgaacccgggaggtggaggttgcagtgagctgagattgcgccactttactccagcctgggtgacagagagrgactccatcttaaaaaaaaaaaaaatatctgcaatgttttattacaggttgaattaattacagctaggtcagcgatgtcgaggttagtgagcagaatcaa

SEQ ID NO: 12786 - DNA, 201 bp, Homo sapiens
ctgtattatctggctttgggcaagtcacttagcctcactgtgccttacttttctgcaagagtggattggactagatcatctatatcttacctgccaatggrcacccttttgggggctagagctgtgtttggttcttctctcctcctttccttcttcctttactcttgaggttcacagtagggaacttagaaaatttactct

SEQ ID NO: 12787 - DNA, 201 bp, Homo sapiens
actttgggaggccgaggtgggaagatcacttgagccagggagttcaagaccagcctgcacaacatagtaagaccctgcctccgcaaaacaaacaaaaaaaaacacaaaaaaattacttgggtatggtagtgtgcacctgtagtctcagctactcaggaggctgaggtgggaggatcacttgagcccaggaggttgaggctg

SEQ ID NO: 12788 - DNA, 201 bp, Homo sapiens
tattaggattagaattaggatgtagacatctttggggatgggggaacatattttttcaggctaccatgcccttctgcaaggtgctgacctttaagagaacrcctgccttggttatgagcattgcggggagtcagttggctgcctgctgagctgaccctcaggaagtgctcaccacctttgtgaattcacagcagtccagga

SEQ ID NO: 12789 - DNA, 201 bp, Homo sapiens
taaaaatacaaaagcagccgggcgtggtggtgcatgcctgtaatcccagctacttgggaggctggggcagcagaattgcttgaacccaggaggcggaggttcagtgagctgagatcacaccattgcactccagcctgggtgacgagtgaaactccgtctaaaaaaaaaaaaaaaagaagaagaagaagaagaagaagaaac

SEQ ID NO: 12790 - DNA, 201 bp, Homo sapiens
gcgccactgcaccccagcctatgtgacagagtgagactccatctcaaaaaaaaaaaaaaatacatatatatatatgtgtgtgtgtgtgtgtgtgtgtgtgtatatatatgtatatatatatatatatataatgtttaaggattcataggtggattagtttctttttaaaaaattcaatggcacaaataattagagaaataa

SEQ ID NO: 12791 - DNA, 201 bp, Homo sapiens
agacggaaaccaatttagctgatgatttctttactgaggacacttctggcctcctggagttgaaagcagtgcctgcatatatgaccggaaagttggggttrgtgtaattcttgtgtgtagatgggtccctggtcctggcgagtgatttctgagtgagtgaatgaacgggtgaacaaatagccattggaatggggactgttt

SEQ ID NO: 12792 - DNA, 201 bp, Homo sapiens
tgggtctggctgcacgttgctggggtggtcaccctctatattaatagtctcctactgctgctgtaacaaattgtcacaaacactcgtggcttaaaacaacacaaatttggccgggcacggtggctcacacctgtaatcccagagctttgggaggcagagtttgggcgaattgtttgagcccaggagttcaagatcagcctg

SEQ ID NO: 12793 - DNA, 201 bp, Homo sapiens
acagcaacctctgcctcccaggttcaagcaattctcctgtctcagcctccctagtagctggcactacaggcgcatgccaccacatccagctaatttttttstatttttaatagagacagggtttcaccatattggtcaggctggtctcaaactcctgaccttaggtgatccacctgcttcatcttccgaaaatgctgggat

SEQ ID NO: 12794 - DNA, 201 bp, Homo sapiens
gcagtgcctgcatatatgaccggaaagttggggttagtgtaattcttgtgtgtagatgggtccctggtcctggcgagtgatttctgagtgagtgaatgaaygggtgaacaaatagccattggaatggggactgtttcccatggatgcaaagcctctgccaagcgatagacccatatgtaacttactaggttggtggagtcg

SEQ ID NO: 12795 - DNA, 201 bp, Homo sapiens
gtgggtctggctgcacgttgctggggtggtcaccctctatattaatagtctcctactgctgctgtaacaaattgtcacaaacactcgtggcttaaaacaacacaaatttggccgggcacggtggctcacacctgtaatcccagagctttgggaggcagagtttgggcgaattgtttgagcccaggagttcaagatcagcct

SEQ ID NO: 12796 - DNA, 201 bp, Homo sapiens
atccttcgttttaagtgcctaagttaatgcattcggtcattcaatgagggcaggataaagggaaccagacaaaataaagtggaactttctcttttttttttgagagggagtctcactgtgttgcccaggctggagtgcagtggtgcaatttcggctcacagcaacctctgcctcccaggttcaagcaattctcctgtctca

SEQ ID NO: 12797 - DNA, 201 bp, Homo sapiens
cctgcctcagcctcctgagtagctgggactacaggcatgtaccaccacacccagctaatattttttatttttagtagagttgaggtcttgctctgttaccsaggctagtctcaaactcctgggctcaagcgatccttcctcctcagtctctggaaatgctgggattacaggtgtgagtcactgctcctggcctcttttttc

SEQ ID NO: 12798 - DNA, 201 bp, Homo sapiens
gttcagtgagatggacgcccctctggaggatcctgtgacggtgggaaccttgggctgcaaaaactttctctgagacttcccatagccctcagcagaagcgyttcgttctcccaaaacatgggggatctttagtttgatgagactaatatctatttcctttttttctcctttttttccttcccttttactttgttccttttt

SEQ ID NO: 12799 - DNA, 201 bp, Homo sapiens
tgtgggtctggctgcacgttgctggggtggtcaccctctatattaatagtctcctactgctgctgtaacaaattgtcacaaacactcgtggcttaaaacaacacaaatttggccgggcacggtggctcacacctgtaatcccagagctttgggaggcagagtttgggcgaattgtttgagcccaggagttcaagatcagcc

SEQ ID NO: 12800 - DNA, 201 bp, Homo sapiens
aagatggcagaagaactcaaacgcaagtctgcaggactctgaagccatactcttaacctctatgtattattccctaatacccttccttttttttttttttyctttttgagacagagtctcactctgttgcccaggctggagtgcaatggcatgatctcagctcactgcaacttctgccttctgggttcaagcaattctcct

SEQ ID NO: 12801 - DNA, 201 bp, Homo sapiens
ttttttttttttttttccagacagggtctcactttgttgcccaggctggagtgcagtggcacaaacatggctcactgcagctttgaactctctagctcaaktgatccgcctccctcagcctcctgagtagctgggactatcagtgtgcaccaccacgcctggctaatcttttttttttttttgtagagacagggtctcatt

SEQ ID NO: 12802 - DNA, 201 bp, Homo sapiens
ctgctctgcatgtgatcttcaccatcaatgatcgggggaggggagcttattaccaatggatgggggtaaaagttctgattaggtttcttctgacacccccracaggggcaaacaagggagccttgttaccacagagtggggctgaattcagactccccactcggcctggaagtctaggctccccacttgggctttgctggc

SEQ ID NO: 12803 - DNA, 201 bp, Homo sapiens
ccactcggcctggaagtctaggctccccacttgggctttgctggcaatggggtggggggcagggccatagttttttctgtggcgtttaactggattcgcgygattattgtctgaaagttttctttcttggcagactgcccctttcctggtccttttgctagagcgagcaggctttctttggaacttttctgctgcacatgt

SEQ ID NO: 12804 - DNA, 201 bp, Homo sapiens
tgataaagacatccctgagactgggtaatttataaagaaaaagattgtgtggggaggccacacaatgatggtggaaagtgaaaggcacatcttacatggcrgcaggcaagagagagaatgagagccaggtgaaaggggtttccccttataaaaccatcagatctcatgagacttatgcactcccatgagaacagtatggag

SEQ ID NO: 12805 - DNA, 201 bp, Homo sapiens
gagactgaagcaggagaattgcttgaacccggaaggcagaggtcgcagtgagccgagatcacatcactgcactccaccctgggctacagagtgagactccrtctcaaacaaacagacaaacaaaaaacccaacaacacaaatttggtgtcttccagtttttgaagccagagtcctaaaatcaaggcgtgggcagccgtgct

SEQ ID NO: 12806 - DNA, 201 bp, Homo sapiens
actctagtgatgacattgggcatatccagataatccgggataatgcccctctgtcaggattcttggcttaatctcatctgcaaagccactgttgccatgtratatagtatgttgacaggttattaggattagaattaggatgtagacatctttggggatgggggaacatattttttcaggctaccatgcccttctgcaagg

SEQ ID NO: 12807 - DNA, 201 bp, Homo sapiens
ttggttatgagcattgcggggagtcagttggctgcctgctgagctgaccctcaggaagtgctcaccacctttgtgaattcacagcagtccaggatcagtcrggccaggcccagaaatacaattgtatctatctatctatcatctgcctgtctgtctgtctgtctgtctgtctatctatctatctatctaaaagagacaagg

SEQ ID NO: 12808 - DNA, 201 bp, Homo sapiens
aaacagctgggcctccctcgctggcagactctcatcagtgctagagttcgatagaactttcggttatgatagaaggttcatgtgtcctgtgctgtccaacrctgtagtcacgagccacatgtggctattgagcccttgaaacatggctagtgccactaagtcatttagtttgtatttttaattttaattcaatttaaattt

SEQ ID NO: 12809 - DNA, 201 bp, Homo sapiens
cgtcaggaatcatgactcaccaactcacttgtaagccccatcttgatctctgggtccttctccagtcttgtttcttgtcagttttccttagtgccccagcrctccagacccatccgtttcatatgcagtggccctgaggagcgttttttttttttttttcctaagacagggtctccctctgttgcccaggatggagtgcag

SEQ ID NO: 12810 - DNA, 201 bp, Homo sapiens
cacatgaacgctgatgcacacactcagccctgcaagtggctgcagcacagacacccataagcatatctttttttttttttttttttcaggctggagtgccrtggcgtgatctcggctcactgcaacctccgcctcccaggttcaagcaattcttctgcctcagcctcctgagtagctgggactacaggtgcacaccaccat

SEQ ID NO: 12811 - DNA, 201 bp, Homo sapiens
ggctccgttccctggctacgtatgctgtgtgcgggctggtggcaatggcttcaagatcatcccccagtttcacagttaaactttggacatgcatctgttasagtatggtggatgttttaatctatttcagtctagatgtttgagattcccctttcaggagtgtgagtcttagtctttctttaatcagcagtgtcaatacac

SEQ ID NO: 12812 - DNA, 201 bp, Homo sapiens
tatatattttttttttttttttttttgagacagagtcttgctctgtcacccaggccggagggcagtggggcaatctcagctcactgcaacctccgcctccygggttcaagtgattctcctgcctcagcctcctgagtaactgcgactaacgtgcataccaccacatctggctaattttagtagagacggggtttcaccatg

SEQ ID NO: 12813 - DNA, 201 bp, Homo sapiens
caagtagctgggattacaggcatgcaccaccacgcccagctaatttttgcctatatggtttttgtttcatgataacaaataccagcctaggactttttggygcacctatatgttccaaaaaccatgatgtgtgtgctcttcctgtctggatgattgatgtctgctgtggtcatgtggctcccccaagggtgcctgcaccgg

SEQ ID NO: 12814 - DNA, 201 bp, Homo sapiens
tggctcactgcagctttgaactctctagctcaagtgatccgcctccctcagcctcctgagtagctgggactatcagtgtgcaccaccacgcctggctaatyttttttttttttttgtagagacagggtctcattatgttgctcaggctcagactcttttatgtatgtgatcatttaacacttaggaacaagaaatccatcc

SEQ ID NO: 12815 - DNA, 201 bp, Homo sapiens
gacacccagcccaagactcttctccttacatctttgtcgcttttttttttttttccaggaactaagtggctcctccatggcccccatcatgaccacagtgyaatctaaaacagcccctcccacatttaacaggaccaataaattcacagctggcttccagaatattgttgatgcctatggtgtcggcagctaccgggagat

SEQ ID NO: 12816 - DNA, 201 bp, Homo sapiens
cattcatataacagaactgcagcctcaattcacagcacaagtgacgtactgggaacccttatgactgggactccttttccagtggccaaagacgcagttawtctaggataggctggccatctaactaaagtcagcaaacgatgtcttagcagaaaaggggatgcagaatgctttgcagcaagaactcacctgtttcctttg

SEQ ID NO: 12817 - DNA, 201 bp, Homo sapiens
cgcgccactgcaccccagcctatgtgacagagtgagactccatctcaaaaaaaaaaaaaaatacatatatatatatgtgtgtgtgtgtgtgtgtgtgtgtgtatatatatgtatatatatatatatatataatgtttaaggattcataggtggattagtttctttttaaaaaattcaatggcacaaataattagagaaata

SEQ ID NO: 12818 - DNA, 201 bp, Homo sapiens
ttcatggtgtgtcttcacgtcctacagggccttctctctgcatcccaatccctgtgccttaaggaatgtcttcccttctggctgcctaggttcatagccgrtgtgatcaacagggagaggatggcttcctttgagcggttactgtggcgaatctgccgaggaaacgtgtacttgaagttcagtgagatggacgcccctctg

SEQ ID NO: 12819 - DNA, 201 bp, Homo sapiens
cacttgaatccaggaggtggaggttgcagtgagctgagatcacgacactacactccagactgggcgacagagcaagactccactcaaaaaaaaaaaaaaaagaaaaaagaaagtgagaagtattcagtttgagtggatgataaaatcagttatttgaatgaaggctatctggagggaattcagttcagaaaaatcagatgc

SEQ ID NO: 12820 - DNA, 201 bp, Homo sapiens
tgactatacattcgcaggacccttagggtcctttggggccaaaatgactcacagaactccggaaagtgctatgctgacagttgtttttgttttttttttttgagacagagtcttgccctattgcccaggctggagtgcaatggtgcgatctcagctcactgcaacctttgcctcccaggttcaagcaattctcccgcctca

SEQ ID NO: 12821 - DNA, 201 bp, Homo sapiens
tttttttctcctttttttccttcccttttactttgttcctttttaaaaatatatatttgaaaggtcagttcaaggactgattcttgtcaacacctcataaytggtttattcttcccagagacatagctatacttttctctagaacttagttatactagtactatcctaggcggcagctgtgtcttaaagaactgagaactg

SEQ ID NO: 12822 - DNA, 201 bp, Homo sapiens
tgaactgggggacagaggttgcagtgaaccgagattgtaccacttcactccagcctgggcgaaggagcaaaattccttctcaaaaaaaaaaaaaaaaaaaagaaaagaaagaagggtccagatacgttgatgcctaatttgcaatacccctcccatgaaatcattctagaaaaactttggacatgggacattaagcttcat

SEQ ID NO: 12823 - DNA, 201 bp, Homo sapiens
cctcaacatcccaggctcaagagatcctcctgtcctagcctcctatgtagttgggacaggtgctccctcagccaggctaaattttttttttttttttttttgagagatgggatctcactttgttgcccaggctgaccttgaactcctaggctcaaacatgaaacatattttatttaggaatttgttggcttgatgtataac

SEQ ID NO: 12824 - DNA, 201 bp, Homo sapiens
ctgccccccagggcccttgctgggaggctggctggaatgctggctatgcctttctggttgtggctgtggaagatttcacaattgggaaactgttcgataarctagagggaacgaagctgtgtcttaagaatgctttgcccagggtcagatttgaccacagccctagtcagccttcaggtggccaccccgatctgataaaag

SEQ ID NO: 12825 - DNA, 201 bp, Homo sapiens
gcctcaacatcccaggctcaagagatcctcctgtcctagcctcctatgtagttgggacaggtgctccctcagccaggctaaattttttttttttttttttttgagagatgggatctcactttgttgcccaggctgaccttgaactcctaggctcaaacatgaaacatattttatttaggaatttgttggcttgatgtataa

SEQ ID NO: 12826 - DNA, 201 bp, Homo sapiens
tgcttgaacctgagaggtggagatggcagtgagctgagatcgccgccattgcactccagcctgggcgacataagcgagactccgtctcaaaaaaaaaaaaagttttttttgccttcttcctgtcactcttaccccaagagcaaacattgtgctgacctccaggactgtcagttcgttttgcctgttcttgaactgtattta

SEQ ID NO: 12827 - DNA, 201 bp, Homo sapiens
gggaggcggagcttgcagtgagccgaaattgcaccactgcactccagcccaggcgacagaacgagactctgtctcaaaaaataaataaataaataaataawcttcatttcaacatgtgcgttttttatggttaatgttattgaaacatataacatacagacaagtgcatgaataacgaggcaccaatccatgaagtatcgc

SEQ ID NO: 12828 - DNA, 201 bp, Homo sapiens
tccgactcccgggctcaagccatcctcttgcctcagcctcccaagtaacaggcatgcccccctgcctggctcagcatttttttttttttttttttttttttgagatgagctctcactatgctgcccaggctgctctcaaactcatggcctcaagtgattgtaattttttttttctaggaactaaatctgtccataagccaa

SEQ ID NO: 12829 - DNA, 201 bp, Homo sapiens
ctccgactcccgggctcaagccatcctcttgcctcagcctcccaagtaacaggcatgcccccctgcctggctcagcatttttttttttttttttttttttttgagatgagctctcactatgctgcccaggctgctctcaaactcatggcctcaagtgattgtaattttttttttctaggaactaaatctgtccataagcca

SEQ ID NO: 12830 - DNA, 201 bp, Homo sapiens
cctccgactcccgggctcaagccatcctcttgcctcagcctcccaagtaacaggcatgcccccctgcctggctcagcatttttttttttttttttttttttttgagatgagctctcactatgctgcccaggctgctctcaaactcatggcctcaagtgattgtaattttttttttctaggaactaaatctgtccataagcc

SEQ ID NO: 12831 - DNA, 201 bp, Homo sapiens
actgagggggtcatttgattcctaaaaacccatatggttcatggctgcctgccctgattcacccactgggtcattctagaagtccctgctagacgtggctyccagtccatactaacacagttgcttaaagaggtaatgtggaaaaatggggaaaaaattaaaacactgacttaaattctggttccttttctaccacttttg

SEQ ID NO: 12832 - DNA, 201 bp, Homo sapiens
tctagaagtccctgctagacgtggcttccagtccatactaacacagttgcttaaagaggtaatgtggaaaaatggggaaaaaattaaaacactgacttaarttctggttccttttctaccacttttggctgagtaacttatacaagaaatttaacctttgtgtgccggggctttcatcagtggtcctagtagttagcctcc

SEQ ID NO: 12833 - DNA, 201 bp, Homo sapiens
ttaacttaaaaatttcaccctaaggttttcacacatttattaccttaaatattaatatctttttctttttctcctgtagaccgaggctgggccaagatggygtctgtgtttcgaagcgaggagatgtgtttgtcacaactgtttctccaggtggaagctgcatattgctgtgtggctgagctcggagagctcggattggtt

SEQ ID NO: 12834 - DNA, 201 bp, Homo sapiens
acttatacaagaaatttaacctttgtgtgccggggctttcatcagtggtcctagtagttagcctcctgcactggtcaggttaggctaaactctgttgcaayaacaacttaccctctaaatctcaggtccctaggccagagtttggcactatgtgttggggtgtcctctggccaaaattcctcctgtcttatttagacccat

SEQ ID NO: 12835 - DNA, 201 bp, Homo sapiens
cgtttattgagctgagctgagagttgaagttttgttgatgactgtgatacgttacatggagctgtgcaatcttcaaggtctggtcatttttatgaccccaktgaggattttgaggctcatttggatagccaaggcagagaaataaggtaaacttagatgaggacagacttcctttccttccttccttcctttcttccttcc

SEQ ID NO: 12836 - DNA, 201 bp, Homo sapiens
gcaataacaacttaccctctaaatctcaggtccctaggccagagtttggcactatgtgttggggtgtcctctggccaaaattcctcctgtcttatttagayccatccctggtatgacccaagtccttcaaactactgctgaggttggagctgaagaccaacatcaggaccacggatgacttgaagcgctgagatccacttt

SEQ ID NO: 12837 - DNA, 201 bp, Homo sapiens
acagtcatgaagcctgtctccttgaaggccctgagagccacttgcagattccgtacctgtttgcttgaaggcagggaggcaggcctgcatggtcgtctccytctcagggttacagccccaggaaaatcccagtgtgcggtttttagagccacacctgctgatctggagacagctgttttcctttctcagcatagccctcgg

SEQ ID NO: 12838 - DNA, 201 bp, Homo sapiens
ccttcaaactactgctgaggttggagctgaagaccaacatcaggaccacggatgacttgaagcgctgagatccactttaaggaacaaagtggggccgggcrtggtggctcacacctataatcccagcactttgggaggccaaggtggtggggggattacctgaggtcaggagttcgagaccagcctggccaacatggtaaa

SEQ ID NO: 12839 - DNA, 201 bp, Homo sapiens
gagaccagcctgactaacatggtgaaaccccatctctactgaaaatacaaaaatattagccaggcgtgggtggcgcatgcctgtaatcccagctactctaraagctgaggcaggagaattgtttgaccccaggagagggaggttgcagggaaccgagatcgcactactgcactccagcgtgggtgacagagcaagactgtg

SEQ ID NO: 12840 - DNA, 201 bp, Homo sapiens
gaagaccaacatcaggaccacggatgacttgaagcgctgagatccactttaaggaacaaagtggggccgggcgtggtggctcacacctataatcccagcaytttgggaggccaaggtggtggggggattacctgaggtcaggagttcgagaccagcctggccaacatggtaaaaccccctctctactaaaaatataaaatt

SEQ ID NO: 12841 - DNA, 201 bp, Homo sapiens
ccgggcgtggtggctcacacctataatcccagcactttgggaggccaaggtggtggggggattacctgaggtcaggagttcgagaccagcctggccaacayggtaaaaccccctctctactaaaaatataaaattagctgggtgtggtggcacacgcctgtaatcccagctactcgggagggtgaggcaggagaatcactt

SEQ ID NO: 12842 - DNA, 201 bp, Homo sapiens
tctcctgcctcagcctccagagttttgcccggctaatttctgtatttttagtagaaacagggtttcaccatgttggccaggctggtcttgaactcctgacytcaagtgatccacttgcctcagcctcccaaagtgctgggattacaggatgagccaccgtgcctggcccatcattttctattttaagactccatattgttt

SEQ ID NO: 12843 - DNA, 201 bp, Homo sapiens
ctttattctcatgcagctatacttttacataattatatatccattgtgtatagtaatagcagcattatttttatggcatccttaagtggatagaggaaatrattgggaaatgaagatttacttttccccccaactttgtgtcattatattcagtgttcaaaattcagggtaatggctttctctgagacgggaggtaatgga

SEQ ID NO: 12844 - DNA, 201 bp, Homo sapiens
ggggggattacctgaggtcaggagttcgagaccagcctggccaacatggtaaaaccccctctctactaaaaatataaaattagctgggtgtggtggcacaygcctgtaatcccagctactcgggagggtgaggcaggagaatcacttgaacctgggagctggaagttacagtgagccgagatcacaccactgcactccagc

SEQ ID NO: 12845 - DNA, 201 bp, Homo sapiens
cattgatgaaagactctgcatcactgtagcaggcagaaaaccagatcttggggggcagcaagcaaataggggtcctcttccttgcgttccatgtctctgcktttatcatgttctgatagccgcttgcaagtggcaggcctgtgtctctctgggctacatcattgtgaccttttagcaggggccttcaaatctcaagccaag

SEQ ID NO: 12846 - DNA, 201 bp, Homo sapiens
ggaataattgtagtgctggttggattgaagggaaaaatattatggtgctcagtaaaatgtatgtgctgaaaatggctcaggcagaaagagaagtcagaacyaagcacagcagttggtttgagaagttttagggttttggtaggaaaagaccagggaagctttttgatctggccaggagcactctgttttctgacttctgtt

SEQ ID NO: 12847 - DNA, 201 bp, Homo sapiens
ttcccatccagatttggaacttggcttcaaacaaactcacatttctgaactcgtataaaatgaagatgtcggtgatcctgggaattgtccagatggttttyggtgtcatcctcagccttttcaatcacatgtaagtttcttgatgcactctctgcctgctctgtctgatcacactgatgatgaatggtgacagagccactg

SEQ ID NO: 12848 - DNA, 201 bp, Homo sapiens
aggttctcatttttatcttgtccccataacctctgacatcagtgactgcaccgccattccttcctggacgtctccctccgcagacatccgtgactgcaccmcccccccccgccccgaattccttcctggacgtctccctccgcagacatccgtggcggcacctccccattcctccccattcctccccattcctccccattc

SEQ ID NO: 12849 - DNA, 201 bp, Homo sapiens
ggtaaagtcatgaggcctgccatagttttcatgcaggcccaggtgaaaacgacccccatgggacagagttcaagacaaggggtgcctttataatgtttcaygcgtacttcttgtttaaaagattggttacgtatggtacaagggactactcagaataaggaatacagagagtttccagtgtctaccccgtgtcgaacattt

SEQ ID NO: 12850 - DNA, 201 bp, Homo sapiens
ctgcatggtcgtctccttctcagggttacagccccaggaaaatcccagtgtgcggtttttagagccacacctgctgatctggagacagctgttttcctttstcagcatagccctcgggaagcttagcccactttgaggagttgattgcttttgtgggtgtttgattcttacaggcagtgtggtcttgtctgctgggtgcca

SEQ ID NO: 12851 - DNA, 201 bp, Homo sapiens
gacgtcagcctgtggatttgatacgacttaaccacgtcagaggaaggactttggcaagtgatattgtcttcatgtggggtattaattctcaaataataaartaattgacaaatgaggggagaatgctaaacagatgtcttcttgcaatattttaaatattgtatttgagaaaataaacatctgagtcattcactttttcct

SEQ ID NO: 12852 - DNA, 201 bp, Homo sapiens
tgtctacccttgcccagagcctgcggtggagcgcagagagatgttggagagcgtcaatgtgaggctggaagatttaatcaccgtgagtgaggggtttgggygcatggtctgatggcagctgcaggagggctgcctctgctgttttcatacaagccctgccccccagggcccttgctgggaggctggctggaatgctggcta

SEQ ID NO: 12853 - DNA, 201 bp, Homo sapiens
agaaaaggggatgcagaatgctttgcagcaagaactcacctgtttcctttggaatatattaaacacaggtttcgagccactgtctacccttgcccagagcstgcggtggagcgcagagagatgttggagagcgtcaatgtgaggctggaagatttaatcaccgtgagtgaggggtttgggcgcatggtctgatggcagctg

SEQ ID NO: 12854 - DNA, 201 bp, Homo sapiens
ggttttgggagcaggagtgttgcagggcatagagagtgtggtggtgttctgaggtggctgagaacaagatcaaagccaggagcagaagatggtaaccaagrtccctctgccgtgagttgcagaacccggaatggcagggcaaggcaggggatgtagatcagccttccagcctccacaggaaaatggggagataacccagca

SEQ ID NO: 12855 - DNA, 201 bp, Homo sapiens
ttgttcagatgggttatcacaactcttccctggcgttggaacaaggctatggggacttatgtttttcctttctctttaaaatactattttgggagccgggygtggtggctcacacctgtaatcccagtactttgggaggctgaggtgggtggatcacttgaggtcaggagtttgaaaccagcctgggcaacatagtgaaac

SEQ ID NO: 12856 - DNA, 201 bp, Homo sapiens
ataaagcactgtgggtttcaacagtggaggccacatctgctgatgggatgcttcaagaagaaaatggcatttgaggttgggcatgggggctcaccctgtartcccagcactctgggaggctgaggcaggtggatcacttgaagtcaggagttcaagaccagcctggccaaaatggtgaaaccccatctctaataaaaatac

SEQ ID NO: 12857 - DNA, 201 bp, Homo sapiens
tggtgaaaccccatctctaataaaaatacaaaaattagccaggtgtggtggtgcatgcctgtagtcccagccacttgggaagctgaggcaggaaaatcgcytgaacccggaagacagaggttgcagtaagctgagatgctcctgaccctgcattccagcttggccgacagagggagactccatctccaaaaaaaaaaaaaa

SEQ ID NO: 12858 - DNA, 201 bp, Homo sapiens
gttagatctttccactccatcctgtaattctcttaccttcttctttattctttatctttttgttttcctgtgttttactctggatattgccttttgcccartcttttatgaaatctcttgtcatctgtgtctaatcctcttttataactacccattgggttcttaatttcgattatcttagttttagttccagaatttcca

SEQ ID NO: 12859 - DNA, 201 bp, Homo sapiens
cactgtagcaggcagaaaaccagatcttggggggcagcaagcaaataggggtcctcttccttgcgttccatgtctctgcgtttatcatgttctgatagccrcttgcaagtggcaggcctgtgtctctctgggctacatcattgtgaccttttagcaggggccttcaaatctcaagccaaggatgtaatgatgctatttccc

SEQ ID NO: 12860 - DNA, 201 bp, Homo sapiens
aggcctgtgtctctctgggctacatcattgtgaccttttagcaggggccttcaaatctcaagccaaggatgtaatgatgctatttccctgcaaggtgcatrtcccaggctgttgggcatgataactagggaagaagcattcacatgtgctctgtgaccagggacacctaagcatggacccttacttgcataggttggacag

SEQ ID NO: 12861 - DNA, 201 bp, Homo sapiens
gggccttcaaatctcaagccaaggatgtaatgatgctatttccctgcaaggtgcatatcccaggctgttgggcatgataactagggaagaagcattcacaygtgctctgtgaccagggacacctaagcatggacccttacttgcataggttggacagtgagagcccttgtagggcagttagctggggacacgggctcagct

SEQ ID NO: 12862 - DNA, 201 bp, Homo sapiens
ggttgttgtgagggcttaatgagatagtgtagtgtttagaacagtgtctggtacataggtagtatttgaggagagcctttatttatatttatatgtgttasaattctcagggtgagttgagcgcattcctcatttccctgcttgttgtcagctgcaggcatccaggatccaagaagatgccactgagaacattgaaggtga

SEQ ID NO: 12863 - DNA, 201 bp, Homo sapiens
tgaaaataaaaatatttattggaaatatttgatcagaaagtaatacaggatcaatgaacatttaaagtaataagccagtgaaagtcactggctaacatgaraagtttgggtcagcagttatctacatgcttggataatggaaaaaacagatatatatagacatcaatgtatttttccctcttagtattaaaatatttttgg

SEQ ID NO: 12864 - DNA, 201 bp, Homo sapiens
attcacatgtgctctgtgaccagggacacctaagcatggacccttacttgcataggttggacagtgagagcccttgtagggcagttagctggggacacggrctcagctacgagtccgggttttttccgatccccatccatgacctccctcctcttggatttcactcccctcagggccttttaaaacattccccgactgtca

SEQ ID NO: 12865 - DNA, 201 bp, Homo sapiens
ttatctacatgcttggataatggaaaaaacagatatatatagacatcaatgtatttttccctcttagtattaaaatatttttggaaaaatgcatagagacyactgttgaatatttgctatcattagctacaatgcatgatgaatggtctatcatattcttttttttttttttttttttgagacagagtttcacccttctct

SEQ ID NO: 12866 - DNA, 201 bp, Homo sapiens
ctcaggaagtgctcaccacctttgtgaattcacagcagtccaggatcagtcaggccaggcccagaaatacaattgtatctatctatctatcatctgcctgkctgtctgtctgtctgtctgtctatctatctatctatctaaaagagacaaggtctcactatgttgcccaggctgatctcacactcctggcctcaagggatc

SEQ ID NO: 12867 - DNA, 201 bp, Homo sapiens
ccaaagaaaacagaaggtcaaagggacttggggcaagtcagggctggatgcggggtggccttgggactcatgtcggtagagctgtgtcggggtccctcctrctcacagagtgaatggcccttcctttcatggtgtgtcttcacgtcctacagggccttctctctgcatcccaatccctgtgccttaaggaatgtcttccct

SEQ ID NO: 12868 - DNA, 201 bp, Homo sapiens
cctggcacagcacaaatctcatctccccttaccacccatttgtcatctttgagctttttttcagctattgctggggaacgttaagacacacataacatacractttgtgctgataattctttctctaagtctattactatttcttttcccctagttagactgaaagtgtctgaacagcaaagcccatgtcttattcatctt

SEQ ID NO: 12869 - DNA, 201 bp, Homo sapiens
agtgagatggacgcccctctggaggatcctgtgacggtgggaaccttgggctgcaaaaactttctctgagacttcccatagccctcagcagaagcgcttcrttctcccaaaacatgggggatctttagtttgatgagactaatatctatttcctttttttctcctttttttccttcccttttactttgttcctttttaaaa

SEQ ID NO: 12870 - DNA, 201 bp, Homo sapiens
cactgcactccagcctgggtgatggagcaagactctgtctcaaaaaaaaaaaaaaaaaaaaatcctcaggattctcatggcagccatcagcctgggtgccygccgtggccaacccttctgactttgtgcttgattttacgaacgctctgcttcctccttccctccaccttccagcctctaactgatgtgtttcaatctccc

SEQ ID NO: 12871 - DNA, 201 bp, Homo sapiens
aaagactgaaaggagcctacaacttgagtcccagtctctaaccaacaatgactgtgtcctcactggtgaacccatatgagggagctccaagctcaagaggkgcaggccccttccagatcctcccagatgcatctgtgtgacccccagcaagggcagtaatcaccaccaaaatcttcatttgcaataggtgtacaacaggat

SEQ ID NO: 12872 - DNA, 201 bp, Homo sapiens
accaagaggtctggcccgttactccctggctctgtgggcaccaaagtcattagtcatttcttaagtgcctgcactaacaaactcctaagagtccgataagwtatatatatgatacacaagatatatatcatatatgatatatgtgataaacaagatatatatgtttgcatatatatatagagaggtagggtctcactcttg

SEQ ID NO: 12873 - DNA, 201 bp, Homo sapiens
gtgctgggattacaggcgtgagccactgcgcctggcctgtgtttaattttttaatcctctccattacttctttgtcacttgtcaggaacactgtttccccraagccattgaagtcctttccccccaattctccatgcttgattttatgaaaacgtcatgaggagaatggaaaataaattctgctagatgtgtgcttacatt

SEQ ID NO: 12874 - DNA, 201 bp, Homo sapiens
ccatctcaaaaaaataaaaacaaaaaatttttttaaagtaaaaaattagaactacctaaaagacattgcacctttcaagtgtatgacagtgtaacagtgtktaacagttgttttattaagtgaatgcttgaacgtattcaacattaaattcaatttacttcacagtaatgtttgcaaatacattatcacttcttaaatatt

SEQ ID NO: 12875 - DNA, 201 bp, Homo sapiens
tgtgcttacatttagtatgacgggttgctgctgtgtcgagggcttcagatgatcccagctgagcagcttctgcaggggcagctttctcctttggctcagtscctgccaaagatgaatcttagacactgtctgatgctgaggcatataattcgggctatgctctttgaggtttctgaaagtcacctctgtgctgaggtgctc

SEQ ID NO: 12876 - DNA, 201 bp, Homo sapiens
tgcctcccaaagtgctgggattacaggcatgagccaccatacctgactgattctcagattctgaaatgacagttaagcccaggactcaagccagggacagragcagataacctggttttggtgagaaggttatgcacttgcttctgaaaatgttgatgatgagactaagtcttatagtttcttgtgcacctcccttggtgc

SEQ ID NO: 12877 - DNA, 201 bp, Homo sapiens
aggttgcagtgagccaagattgcgccactgcactccagcctggacaacaagagcaaaactctgtctcaaaaaaaaaaaaaaaaaaagaagaagaagaagaraaaatgccttgtaatcaggttttcataaggagtgagtgtagataagaatcagaaacaggtgcattactgttgggcaccattttgttatcacagatggtaa

SEQ ID NO: 12878 - DNA, 201 bp, Homo sapiens
cagctcactgcaacttctgccttctgggttcaagcaattctcctgcctcagcctcccaagtagctgggattacaggcacgcaccaccacacccagctaatkttttgtatttttagtagagactgggttttgccatgttggccaggctggtcttgaactcctggcctcaagtgatccacccacctgggcctcccaaagtgct

SEQ ID NO: 12879 - DNA, 201 bp, Homo sapiens
caattcctcacagctgctttcattgctaaattgaggttctcatttttatcttgtccccataacctctgacatcagtgactgcaccgccattccttcctggrcgtctccctccgcagacatccgtgactgcaccccccccccccgccccgaattccttcctggacgtctccctccgcagacatccgtggcggcacctcccca

SEQ ID NO: 12880 - DNA, 201 bp, Homo sapiens
cgaagaggcagttaagcttaaatgaggtcctatgggtgggccctaatccaatatggcggggtccttataagatgaggaagaggccaggtgcagtggttcasacctgtaatcccagcattttgggaggccgaggtgggcagatcacctgaggtcaggagttcaagaacagcctggccaacatgatgaaaccctgtctctact

SEQ ID NO: 12881 - DNA, 201 bp, Homo sapiens
tacctaatatgagatccctccccatattactgtgcatccttcgtaaagatcatttttaaatttgacattaaatcatcactttttataatcctgttttgacrtatgacagtcatagtgggagagaaagtaaaagcatctggaaaaagatgagcgtggacgccgaaggtcaccaaagggaagtcatgagattagagcagattc

SEQ ID NO: 12882 - DNA, 201 bp, Homo sapiens
gaaggtctcagggaaggggacctactagctagtctaagaggatcagaacagctatttagcaaccaatctgggcacattttaatatttctagtccaagtacygctgcatctgtatgtgtcaggtgaatatcagcctcggatctagtgacatagaaggtcctgcgtgtcactgaggactccttggctcagcaccacgccccta

SEQ ID NO: 12883 - DNA, 201 bp, Homo sapiens
cattataggtagagggacagatgagcaaaggtccagaggtaaggaagtgtcagagggtggctgtaccagcagcacccagaagtgcaggtgagccaaggcakgtgaggtggggaggcaagaggagagctgtgggctaagcttctgcgtgcctggtagaggaatttgaaacaaagtcaggaagcaaaggggaaggttctgtag

SEQ ID NO: 12884 - DNA, 201 bp, Homo sapiens
catggggtggagcaaaggaaacttggcctgtcacaccttctctcacctctctagaagggaagccaaaccgttggctgaggaaggaagggaggggcaagctrtgcccttctcccctgagcgcaaatattgtccttattgagaaacaaggggaggacaagagagatctgtgtcatgctggttcctgggacatgagtttgctgc

SEQ ID NO: 12885 - DNA, 201 bp, Homo sapiens
gagccaccacacccagcttattcattttatttaacgtaagagatttttcctttttttttttttttttttttttttttgagacaaggtctcactctgttacycgggccggaatggagtggctcaatcatagctcactgaagcttcaaattcctgggctcaaacgatactcctgcctcagcctcccaagtagctgggactaca

SEQ ID NO: 12886 - DNA, 201 bp, Homo sapiens
ttgaactggggaggtggaggttgcagtgagccgagatggcaccaacggactccagcctgggtgacacagtgagattcttcctcaaaaaaaaaaaaaaaaargaaagaaaagaaaagaaaaagaaatacactacttaaaaataaaaggaaatgttatattggcatgtctagagaattgctcctttctcctcctccagggagg

SEQ ID NO: 12887 - DNA, 201 bp, Homo sapiens
aaatctgggcagtgcaataatggggcacttctatttcttccgttttctgtattttccatttccctctattttctgtattagaaatacactacttagccggrcatggtggctcatgcctgtaatcccagcactttgggaggtcaaggcgggcagatcacctgaggtcagaagttcgagaccagcctggccaacatggtgaaa

SEQ ID NO: 12888 - DNA, 201 bp, Homo sapiens
ggcacaatctaatgtctgctcttagaagacggatagctgttacgtgggaattatttgtaaagaatgtgggaaaagcagaggcaagaaaggcaggccgaagsttattgcaacagccctggcaagaaagggtagcttgaattacaacggcagtggaaatggagagaagtgaatgggtttaggatatattttggccctgaaatg

SEQ ID NO: 12889 - DNA, 201 bp, Homo sapiens
aaaaaaaaaaaaagaaagaaaagaaaagaaaaagaaatacactacttaaaaataaaaggaaatgttatattggcatgtctagagaattgctcctttctccycctccagggaggaaaacagaggaccttatatttagcaatccagcatcactctcctgacattccctctagtagagaatcatgcctaactaaagagctcaga

SEQ ID NO: 12890 - DNA, 201 bp, Homo sapiens
gtaactcctccctgctgggggcatgggaagggagaaatgaaggaacaattatttttcatttggtaccattctctgtatggcttggattttcttgctattayttttatttgttaaaatctgggcagtgcaataatggggcacttctatttcttccgttttctgtattttccatttccctctattttctgtattagaaataca

SEQ ID NO: 12891 - DNA, 201 bp, Homo sapiens
tggtttttatacttgagactctgtagtcactgtggaaagaggtgtgactgataaagaactgcctttaaatacctgagtcctcgtcagcttcttcactgctrcaacctggagacctcgtaatttggttgggacgcaaatttgcaactggtattctgctccaaagaggttctccccatgtacctgcaaattaaaatcagagta

SEQ ID NO: 12892 - DNA, 201 bp, Homo sapiens
taagtaagagggggaaacatacaaatttaaaatgtgcacataagaaacttaatagtaactcctccctgctgggggcatgggaagggagaaatgaaggaacmattatttttcatttggtaccattctctgtatggcttggattttcttgctattatttttatttgttaaaatctgggcagtgcaataatggggcacttctat

SEQ ID NO: 12893 - DNA, 201 bp, Homo sapiens
gaatcggtccaaaccgactcacagatgacctcttgaggacggggtgaccaatcctgcagttcatgatcaggacagaagcaaccggctgagggtcatcacastgaatgtttggagagggaggctgttaaaagagcagatgacattctcttaaagagccaaacaaaacaaaacaaaaacgtggtttcctcacagcaattcagc

SEQ ID NO: 12894 - DNA, 201 bp, Homo sapiens
ggctggagtgcagtggcaggatctcggctcactgcaagctccgcctcccgggctcacaccattctcctgcctcagcctcccaagtagctgggactacaggygcccgccaccacgcccggagaattttttgtatttttagtagagacggggtttcaccgtgttagccaggatggtctcgatctgctgaccttgtgatccacc

SEQ ID NO: 12895 - DNA, 201 bp, Homo sapiens
accgctagctactcgtggaacagacctaggagacgattcctcagattttcacattcctcacatttttctaacacagcatgtttcctttcccttcctttttyttttttttttttttttttgagagggagtctcgctctgtcacccaggatggagtgcaatggtgtgatctcagctcactgcaacctctgcctcccaggttca

SEQ ID NO: 12896 - DNA, 201 bp, Homo sapiens
atgttacatcactcacacagagaagcagaatttatcaattttcaaagggaaaatgtctctgtctactgacaaggttttaatttttgcttttttttttttttgagatggagtctcactctgtctcccaggctggagtgcagtggcaggatctcggctcactgcaagctccgcctcccgggctcacaccattctcctgcctca

SEQ ID NO: 12897 - DNA, 201 bp, Homo sapiens
cccatcaccccctactttcagagccagcttagccactgtaagcactgctggggacacactgcagtcaagcgaagcgcaaagctggaaccgagagattgagrtgagaccaagatgcagaagacgccaactgcagggtggtgagaagagcgaatcggtccaaaccgactcacagatgacctcttgaggacggggtgaccaatc

SEQ ID NO: 12898 - DNA, 201 bp, Homo sapiens
atttatgcattcctgagtactgtttaatactataactaaacactgatacagcacactaagacagttactggatacaaaaaacaatttctcacttaggtaaytcattttttatttatttatttattttttgagactgagtctcactctatcactgaggctggagtggagtggtgtgatctcggctcactgcaacctctgcct

SEQ ID NO: 12899 - DNA, 201 bp, Homo sapiens
cctggtcaacatagcaagacccctgtctctatttttttaaataaataaactacatgtgaaaacaaacgtttatatttataaaccctctttttttttttttwaattttattgagacagagtcttgctctgtcacccaggctagagtgcagtggtgcgatctcagctcactgcaacctccgcctcccgggttcaagcaattct

SEQ ID NO: 12900 - DNA, 201 bp, Homo sapiens
aactttttgtctgacacgccctccatactacccacaacttcactctgcttcacggaggtgagcaggcagttcacctagggctgtgtactggaaagctctcrtccccatcaccccctactttcagagccagcttagccactgtaagcactgctggggacacactgcagtcaagcgaagcgcaaagctggaaccgagagattg

SEQ ID NO: 12901 - DNA, 201 bp, Homo sapiens
caattatttttcatttggtaccattctctgtatggcttggattttcttgctattatttttatttgttaaaatctgggcagtgcaataatggggcacttctrtttcttccgttttctgtattttccatttccctctattttctgtattagaaatacactacttagccggacatggtggctcatgcctgtaatcccagcactt

SEQ ID NO: 12902 - DNA, 201 bp, Homo sapiens
ccaagtaggtgggattacaggcacccaccatcatgtccggctaatttttgtatttttggtagacagggtttctccatgttggccaggcttgtgttgaactyctgacctcaggtgatccacctgtctcggcctcccaaagtgctaggattacaggcgtgagccacctgcgcccagctgcgaaatttttttttttaatcaatc

SEQ ID NO: 12903 - DNA, 201 bp, Homo sapiens
cacttgaacccgggaggcggaggttgcagtgagtagagatcgtgccactgcactccagcccgggtgacagagcaagactccatctaaaaaaaaaaaaaaaraaaagaaaagaacacctgagctaaatttaagaagaaaccacctacgtcaggacctagaggaagagcagtgtcaagcaaaggaacagcaagtacaaagtct

SEQ ID NO: 12904 - DNA, 201 bp, Homo sapiens
ctggtattctgctccaaagaggttctccccatgtacctgcaaattaaaatcagagtaggaaatcaaagctggtattgctttgccatctacagctttacaawaataagtacttacatggaagaggaattctttgtggtgagaaagcccctggcctgtgttcacgtacattatggatggtctgcaattgacaggacatgcgtc

SEQ ID NO: 12905 - DNA, 201 bp, Homo sapiens
ccagctactcgggaggctgaggaagaagaatcacttgaactggggaggtggaggttgcagtgagccgagatggcaccaacggactccagcctgggtgacasagtgagattcttcctcaaaaaaaaaaaaaaaaaagaaagaaaagaaaagaaaaagaaatacactacttaaaaataaaaggaaatgttatattggcatgtc

SEQ ID NO: 12906 - DNA, 201 bp, Homo sapiens
cctgtaatcccagctactcgggaggctgaggcaggagaatcacttgaacccgggaggcggaggttgcagtgagtagagatcgtgccactgcactccagccmgggtgacagagcaagactccatctaaaaaaaaaaaaaaaaaaaagaaaagaacacctgagctaaatttaagaagaaaccacctacgtcaggacctagagg

SEQ ID NO: 12907 - DNA, 201 bp, Homo sapiens
gcctgtaatcccagctactcgggaggctgaggcaggagaatcacttgaacccgggaggcggaggttgcagtgagtagagatcgtgccactgcactccagcscgggtgacagagcaagactccatctaaaaaaaaaaaaaaaaaaaagaaaagaacacctgagctaaatttaagaagaaaccacctacgtcaggacctagag

SEQ ID NO: 12908 - DNA, 201 bp, Homo sapiens
gcgggcgatcacctgaggtcaggagttcgagaccagcctggccaacatggtgaaaccccctctctactaaaaatacaaaaattagctgggcgtggtcgccrgcgcctgtaatcccagctactcgggaggctgaggcaggagaatcacttgaacccgggaggcggaggttgcagtgagtagagatcgtgccactgcactcca

SEQ ID NO: 12909 - DNA, 201 bp, Homo sapiens
aaagaacacctaggtcgggtgcggtggctcacgcctgtaatcccagcactttgggaggctgaggcgggcgatcacctgaggtcaggagttcgagaccagcytggccaacatggtgaaaccccctctctactaaaaatacaaaaattagctgggcgtggtcgccggcgcctgtaatcccagctactcgggaggctgaggcag

SEQ ID NO: 12910 - DNA, 201 bp, Homo sapiens
actcctggcctcaagcaatcctcccgcctcagcctcccaaagtgttgggatgacagatgtgagccaccacactcacaattctttttttttaaattatttcytgtatctgtccctttcttttccacccccattgctacttcttcagttgagacctcacaaatgtcacctggatcactgtaaaacattaaacttgatcacttg

SEQ ID NO: 12911 - DNA, 201 bp, Homo sapiens
ctgtaatcccagctacttgggaggctgaggcaggagaatcgcttgaacccgggaggcggaggttgcagtgagccgagatcgtgccattgcacaacaagagygaaactccgtcttgaaagaaagaaaagaaaagaaaagaacacctaggtcgggtgcggtggctcacgcctgtaatcccagcactttgggaggctgaggcgg

SEQ ID NO: 12912 - DNA, 201 bp, Homo sapiens
cagaatgtctgtggaggtgctcaaaggttaggcacaattttccttgggcactactcagaagccagccaggaattaccttagttctgtggttctctgcattmagtccctcatatagagatttgttgaaagatatttcaccaaggatctgcagttcagttacatcttttagtaactagaagatggggaaaggaatgagggaaa

SEQ ID NO: 12913 - DNA, 201 bp, Homo sapiens
ctgtttcatccctgaaaagggaaggcacatgaagaaaaatccaacatccttttgctactgacttcttgcttcctgttttgtatcctgccatgtgaaaatayagcatttggagatgtggcaactttgtgctggccatgaaggaatgcgtcccccacacggcagagtacaaggaccaaagaagccaggccatcgccccaggcc

SEQ ID NO: 12914 - DNA, 201 bp, Homo sapiens; identical to SEQ ID NO: 1627

SEQ ID NO: 12915 - DNA, 201 bp, Homo sapiens; identical to SEQ ID NO: 1629

SEQ ID NO: 12916 - DNA, 201 bp, Homo sapiens; identical to SEQ ID NO: 1630

SEQ ID NO: 12917 - DNA, 201 bp, Homo sapiens; identical to SEQ ID NO: 1631

SEQ ID NO: 12918 - DNA, 201 bp, Homo sapiens
ggaggaaaactgacaggttgctttaagagctgagtgattgagagtccttctgaacaggacttcgggaatttactcctaatcttttcccatggttaacttgycttcactctgtttctagaactctggtttttatacttgagactctgtagtcactgtggaaagaggtgtgactgataaagaactgcctttaaatacctgagt

SEQ ID NO: 12919 - DNA, 201 bp, Homo sapiens; identical to SEQ ID NO: 1632

SEQ ID NO: 12920 - DNA, 201 bp, Homo sapiens
gagtcacaccgctgctggcctcttgggagtactcacttggacagaactgcaacgaagccatgcctgaattgaagggtgtgggtctcgttggccaaagaccrtctttcattggaactaggaataagagtgttagttcatagcacacctgctttgtacatagcaagtgcttcttaaaaagggcttcgctctgttgcccaggca

SEQ ID NO: 12921 - DNA, 201 bp, Homo sapiens
gtcccacagctgccttcttccctccacagcgtcatattaattcccttttgtagcacgactagttggcaatacacctcctttgatgaccacagtggggtttytgtgacccaaatgttagcaccctagagatcaatatcagagcctgggttctaagcaggctcctctcagaaggacagtgtccacattcatcctgaccaccag

SEQ ID NO: 12922 - DNA, 201 bp, Homo sapiens
tcaagaccagcctggccaacatggtgaaatccctgtctctattaaaaattttttaaaaattagctgggcctggtggtgtccacctgtagtctcaactactygggaggctgaggcaggagaatcgcttgaacctgggcggcagaggttgcagtgagccgagatggcaccactgcactccagcctgggcgacagagtgagact

SEQ ID NO: 12923 - DNA, 201 bp, Homo sapiens
cctcttgaggacggggtgaccaatcctgcagttcatgatcaggacagaagcaaccggctgagggtcatcacactgaatgtttggagagggaggctgttaamagagcagatgacattctcttaaagagccaaacaaaacaaaacaaaaacgtggtttcctcacagcaattcagcaaacattcactaatttttctgcctgtca

SEQ ID NO: 12924 - DNA, 201 bp, Homo sapiens
acacactgcagtcaagcgaagcgcaaagctggaaccgagagattgagatgagaccaagatgcagaagacgccaactgcagggtggtgagaagagcgaatcrgtccaaaccgactcacagatgacctcttgaggacggggtgaccaatcctgcagttcatgatcaggacagaagcaaccggctgagggtcatcacactgaat

SEQ ID NO: 12925 - DNA, 201 bp, Homo sapiens
caacctctgcctcctgggtttaagtgattctcctgcctaagcccccaagtagctgagattacaggcgcctgccaccacacctggctaattttcatattttyagtagagacggggtttcgccatgttagccaggctggtcttgaactcctgacctcaggtgatccacccacctcagcctcccaaagtgctgggatgacaggc

SEQ ID NO: 12926 - DNA, 201 bp, Homo sapiens
atcaaaacaggcacagcctctggtgggcagaatcacctccctttgagaactcttcccagcagcgttccccaccttaccccccaacacagaggtcttgcagrtaacatagctatcccaagctattccaaagctgagtgaacgagaaccagaactccagggctcattccaccaggctgtaccacagttttactttgtgtgtga

SEQ ID NO: 12927 - DNA, 201 bp, Homo sapiens
tcccaggctcaagtgatcctccacctcagcctgcgaaagtgttgggatgacaggcatgagccactacactcatccctttttttttttttttttttttgagstggagtcttgctctgttgcccaggctggagtgcagtggtgcgatctcagctcactgcaacctctgcctcctgggtttaagtgattctcctgcctaagccc

SEQ ID NO: 12928 - DNA, 201 bp, Homo sapiens
acagctttacaataataagtacttacatggaagaggaattctttgtggtgagaaagcccctggcctgtgttcacgtacattatggatggtctgcaattgasaggacatgcgtcagcccttgaggagtctttctcccttttttggagacagggtctcactctgttgcccaggctagagcacagtggaacaatcatggctcag

SEQ ID NO: 12929 - DNA, 201 bp, Homo sapiens; identical to SEQ ID NO: 1625

SEQ ID NO: 12930 - DNA, 201 bp, Homo sapiens
gagtcactgtaagtcaggggcttattgtcaggaactacttaacactttgcttaggatattggatttaaagaaaggaattttggggaatccatgctatagarataaaagtatcagtaagtaagagggggaaacatacaaatttaaaatgtgcacataagaaacttaatagtaactcctccctgctgggggcatgggaaggga

SEQ ID NO: 12931 - DNA, 201 bp, Homo sapiens
ttccctttcttgtggctgaaatgcatttggatacagtttgtttatactcatagagtcactgtaagtcaggggcttattgtcaggaactacttaacactttrcttaggatattggatttaaagaaaggaattttggggaatccatgctatagaaataaaagtatcagtaagtaagagggggaaacatacaaatttaaaatgt

SEQ ID NO: 12932 - DNA, 201 bp, Homo sapiens
aaactgtttcatccctgaaaagggaaggcacatgaagaaaaatccaacatccttttgctactgacttcttgcttcctgttttgtatcctgccatgtgaaartacagcatttggagatgtggcaactttgtgctggccatgaaggaatgcgtcccccacacggcagagtacaaggaccaaagaagccaggccatcgccccag

SEQ ID NO: 12933 - DNA, 201 bp, Homo sapiens
atcttttcccatggttaacttgtcttcactctgtttctagaactctggtttttatacttgagactctgtagtcactgtggaaagaggtgtgactgataaakaactgcctttaaatacctgagtcctcgtcagcttcttcactgctacaacctggagacctcgtaatttggttgggacgcaaatttgcaactggtattctgc

SEQ ID NO: 12934 - DNA, 201 bp, Homo sapiens
agcaatttcagcgctcacctcggcccaagcgaagctccagcgggagcaattgagacccagggacgaagctagggagggcctggcagcccccggcactggcmggcaggggtaacccaggaaaaacagtctcctggcctctcgttacccgcttcaggccctccgccctcccctggcctctcgggacggccgcgcttacctgaa

SEQ ID NO: 12935 - DNA, 201 bp, Homo sapiens; identical to SEQ ID NO: 1635

SEQ ID NO: 12936 - DNA, 201 bp, Homo sapiens
agcctcccgagtagctggaattatgggcatgtgccaccatgccaggctaatttttgtatttttagtagagatggggttttgccatgttggccaggcttgtytcgaactcctgacctcagatgatctacccacctcggcctcccaaagtgctgggattacaggcgtgagctgccgcgcctggccttttcttcaacttctttt

SEQ ID NO: 12937 - DNA, 201 bp, Homo sapiens
tcgagttccttgtactgtaactggagtatatctccctcctgagggtagctaaggaacgggttgggacagagggttggttttttgcaccaaaagatctattwtggacatggacatgttatgcaaagatgctattatctcttctaggggcgatgcccgtgagcaactggataatcaaatctggagcatttcagtctcaaacac

SEQ ID NO: 12938 - DNA, 201 bp, Homo sapiens
taatcccagctactcgggaggctgaggaagaagaatcacttgaactggggaggtggaggttgcagtgagccgagatggcaccaacggactccagcctgggbgacacagtgagattcttcctcaaaaaaaaaaaaaaaaaagaaagaaaagaaaagaaaaagaaatacactacttaaaaataaaaggaaatgttatattggc

SEQ ID NO: 12939 - DNA, 201 bp, Homo sapiens
ggccagatgtgagtagaagaaatgtccctatttctcaaagccacctccctttatcttcttctaaacccacagattcccaaaagtgccccaaagatgcccargtagaggttaagggagaagcaaggcaccgggtactactgtttgcagcaaacacggatgctggcctgcccaggggcccctctctcctttcggattttattc

SEQ ID NO: 12940 - DNA, 201 bp, Homo sapiens; identical to SEQ ID NO: 1626

SEQ ID NO: 12941 - DNA, 201 bp, Homo sapiens
tgcggaaagtctgaaatctttttaacacttcggacacagagcatcgtaaggtcccagaatagagggtgtgagcaatttcagcgctcacctcggcccaagcraagctccagcgggagcaattgagacccagggacgaagctagggagggcctggcagcccccggcactggccggcaggggtaacccaggaaaaacagtctcc

SEQ ID NO: 12942 - DNA, 201 bp, Homo sapiens
tcacacagagaagcagaatttatcaattttcaaagggaaaatgtctctgtctactgacaaggttttaatttttgcttttttttttttttgagatggagtckcactctgtctcccaggctggagtgcagtggcaggatctcggctcactgcaagctccgcctcccgggctcacaccattctcctgcctcagcctcccaagta

SEQ ID NO: 12943 - DNA, 201 bp, Homo sapiens
caagatggtgaaaccccatctctactaaaactacaaaaattagctgggcgtggtggcgggcgcctgtaatcccagctactcgggaggctgaggcagagaaytgcttgaacctggaggcagaggttgcagtgagccgagatcacgccacagcactccagcctgggcgacagagcgagactcgtctcaaaaaataaataaata

SEQ ID NO: 12944 - DNA, 201 bp, Homo sapiens
ctgaggcaaagcagagaccaaaaaagagtctcaggggagaagaagggaagctagtaagcaacttatagggggcagtgtaagaaatgtcacatgttacatcrctcacacagagaagcagaatttatcaattttcaaagggaaaatgtctctgtctactgacaaggttttaatttttgcttttttttttttttgagatggagt

SEQ ID NO: 12945 - DNA, 201 bp, Homo sapiens
gcctgttgcttcaggtatcaaggctagctttgggaaccagactacagatgagacaactgaaagcaaagaggctgaggcaaagcagagaccaaaaaagagtytcaggggagaagaagggaagctagtaagcaacttatagggggcagtgtaagaaatgtcacatgttacatcactcacacagagaagcagaatttatcaatt

SEQ ID NO: 12946 - DNA, 201 bp, Homo sapiens
tgacctataagccctctttctaattgtcagcagagtcctttctgtaaattcctttccgttttttgagccttaacacttatgtagtctgagcaaaaaaaaaatgcccaggcttcagcttcatactgagcagagcctgttgcttcaggtatcaaggctagctttgggaaccagactacagatgagacaactgaaagcaaagag

SEQ ID NO: 12947 - DNA, 201 bp, Homo sapiens
caagtactgccttgctctggccatgaaaaaagtatggattttagtctaagtgtgctcaagcatcagttttgtttgtttgttatttttaataagcaggggartggcacaatctaatgtctgctcttagaagacggatagctgttacgtgggaattatttgtaaagaatgtgggaaaagcagaggcaagaaaggcaggccgaa

SEQ ID NO: 12948 - DNA, 201 bp, Homo sapiens
gtctcactctatcactgaggctggagtggagtggtgtgatctcggctcactgcaacctctgcctcccagattcaagcgattctcgtgcctcagcctcccargtaggtgggattacaggcacccaccatcatgtccggctaatttttgtatttttggtagacagggtttctccatgttggccaggcttgtgttgaacttctg

SEQ ID NO: 12949 - DNA, 201 bp, Homo sapiens
ctactttcagagccagcttagccactgtaagcactgctggggacacactgcagtcaagcgaagcgcaaagctggaaccgagagattgagatgagaccaagrtgcagaagacgccaactgcagggtggtgagaagagcgaatcggtccaaaccgactcacagatgacctcttgaggacggggtgaccaatcctgcagttcat

SEQ ID NO: 12950 - DNA, 201 bp, Homo sapiens
atggccctaacgtacacaacactacataaagttacccaaacaagacatctgcagttattcttcaacttccttttttttttttttgagatggagtttcgctytttcgcccaggctggagtgaagtggtgcgatctcggctcactgcaacctccaccccgtcaggttcaagcgattctcctgccttagcctcccgagtagctg

SEQ ID NO: 12951 - DNA, 201 bp, Homo sapiens
ggggaaaggaatgagggaaacaaaacatattttagacatgaactcactgtgtttgaacagccttcaccacctttccctttaaaggtattcctgggcttagktaatggccctaacgtacacaacactacataaagttacccaaacaagacatctgcagttattcttcaacttccttttttttttttttgagatggagtttcg

SEQ ID NO: 12952 - DNA, 201 bp, Homo sapiens
tcaccatgttggccaggctggtctcgaactcctgacctcaaatgatccacccacctcggtctcccaaagtgctgggattacaggcatgagccaccgcgccyggccccgttatttcagttaagcctcaaatacaaatatggagtaagcaaggcaggcggcctcattccccttttacaggtgaagaagccacttcagagattt

SEQ ID NO: 12953 - DNA, 201 bp, Homo sapiens
aactgcttgaacctggaggcagaggttgcagtgagccgagatcacgccacagcactccagcctgggcgacagagcgagactcgtctcaaaaaataaataaataaataaaaggctttcagagataagcaattggagttcagaattgtctctagaagaccacacttagaagaatactgattttaaaagggcttctcagcctcc

SEQ ID NO: 12954 - DNA, 201 bp, Homo sapiens
agagaactgcttgaacctggaggcagaggttgcagtgagccgagatcacgccacagcactccagcctgggcgacagagcgagactcgtctcaaaaaataaataaataaataaaaggctttcagagataagcaattggagttcagaattgtctctagaagaccacacttagaagaatactgattttaaaagggcttctcagc

SEQ ID NO: 12955 - DNA, 201 bp, Homo sapiens; identical to SEQ ID NO: 1633

SEQ ID NO: 12956 - DNA, 201 bp, Homo sapiens
tcgggaggctgaggcagagaactgcttgaacctggaggcagaggttgcagtgagccgagatcacgccacagcactccagcctgggcgacagagcgagactcgtctcaaaaaataaataaataaataaaaggctttcagagataagcaattggagttcagaattgtctctagaagaccacacttagaagaatactgatttta

SEQ ID NO: 12957 - DNA, 201 bp, Homo sapiens; identical to SEQ ID NO: 1634

SEQ ID NO: 12958 - DNA, 201 bp, Homo sapiens
agtagagatggggtttcaccatgttggccaggctggtctcgaactcctgacctcaagtgatctgcctgccttggcctcccaaagtgctgggattacaggcrtgagccactgcgcctggctatttttttaagttccagggtacatgtgcagatgtgcaggtttgttacataggtgaacgtgtgccatggtgctttgctgcag

SEQ ID NO: 12959 - DNA, 201 bp, Homo sapiens
aggaataagagtgttagttcatagcacacctgctttgtacatagcaagtgcttcttaaaaagggcttcgctctgttgcccaggcaggagtgcagtgttgcygtctcagctcactgcaacctccgccccccgggttcaagcaattctcatgcctcagcctcctgagtagctggaattacaggcgtgagccaccatacccagt

SEQ ID NO: 12960 - DNA, 201 bp, Homo sapiens
ggtggctcatgcctgtcatcccagcactttgggaggtcgaggcaggtggatcacttgaggacaggagtttgagaccagcctggccaacatggtgaaacccyatctctaccaaaaatattttaaaaattagccgggtgtagtgctgcacgcctgtaatcccagctactcaggaggctgaggaaggagaatcacttgaacccg

SEQ ID NO: 12961 - DNA, 201 bp, Homo sapiens
gcatgagccaccacacccagcttattcattttatttaacgtaagagatttttcctttttttttttttttttttttttttttgagacaaggtctcactctgwtacccgggccggaatggagtggctcaatcatagctcactgaagcttcaaattcctgggctcaaacgatactcctgcctcagcctcccaagtagctgggac

SEQ ID NO: 12962 - DNA, 201 bp, Homo sapiens
tggcagagccaagatcagaagtgttaaggctgaaaacaggaagagggcaacagaatgtctgtggaggtgctcaaaggttaggcacaattttccttgggcastactcagaagccagccaggaattaccttagttctgtggttctctgcattcagtccctcatatagagatttgttgaaagatatttcaccaaggatctgcag

SEQ ID NO: 12963 - DNA, 201 bp, Homo sapiens
atttcagtctcaaacacctcctcagagtgatcccaggagatctctgcagccacggtgacattttctttatctgaagcgatgacacagctcactgaatgccmttcttccacatgctggaaaagcgaggtctagtgaacacaattcctttccgtgcggaaagtctgaaatctttttaacacttcggacacagagcatcgtaag

SEQ ID NO: 12964 - DNA, 201 bp, Homo sapiens
aaagatgcccaagtagaggttaagggagaagcaaggcaccgggtactactgtttgcagcaaacacggatgctggcctgcccaggggcccctctctcctttyggattttattcaggaatcatcgttggtctcaggtgatcatgacacagctattctcctttgccagtgactgacatgagattcagatctcactaataagatg

SEQ ID NO: 12965 - DNA, 201 bp, Homo sapiens
actgtaactggagtatatctccctcctgagggtagctaaggaacgggttgggacagagggttggttttttgcaccaaaagatctattttggacatggacaygttatgcaaagatgctattatctcttctaggggcgatgcccgtgagcaactggataatcaaatctggagcatttcagtctcaaacacctcctcagagtga

SEQ ID NO: 12966 - DNA, 201 bp, Homo sapiens
ccacagtgctgagattacaggcatgagccaccacacccagcttattcattttatttaacgtaagagatttttcctttttttttttttttttttttttttttgagacaaggtctcactctgttacccgggccggaatggagtggctcaatcatagctcactgaagcttcaaattcctgggctcaaacgatactcctgcctca

SEQ ID NO: 12967 - DNA, 201 bp, Homo sapiens
ccacaggtgcaccccaccacactgggctaatttttgtattttttgtagagatggggttttaccatgttgcccaggctggtctcaaactcctgggctcaagyaatccacccaccttagcctcccacagtgctgagattacaggcatgagccaccacacccagcttattcattttatttaacgtaagagatttttcctttttt

SEQ ID NO: 12968 - DNA, 201 bp, Homo sapiens
atgcctgtcatcccagcactttgggaggtcgaggcaggtggatcacttgaggacaggagtttgagaccagcctggccaacatggtgaaaccccatctctaycaaaaatattttaaaaattagccgggtgtagtgctgcacgcctgtaatcccagctactcaggaggctgaggaaggagaatcacttgaacccgggaggcgg

SEQ ID NO: 12969 - DNA, 201 bp, Homo sapiens
ctgatacagcacactaagacagttactggatacaaaaaacaatttctcacttaggtaattcattttttatttatttatttattttttgagactgagtctcrctctatcactgaggctggagtggagtggtgtgatctcggctcactgcaacctctgcctcccagattcaagcgattctcgtgcctcagcctcccaagtagg

SEQ ID NO: 12970 - DNA, 201 bp, Homo sapiens
ctttgagaactcttcccagcagcgttccccaccttaccccccaacacagaggtcttgcagataacatagctatcccaagctattccaaagctgagtgaacragaaccagaactccagggctcattccaccaggctgtaccacagttttactttgtgtgtgaacaaaagaacattttcattatctctggtaacaagaagaga

SEQ ID NO: 12971 - DNA, 201 bp, Homo sapiens
tcctgagtactgtttaatactataactaaacactgatacagcacactaagacagttactggatacaaaaaacaatttctcacttaggtaattcattttttwtttatttatttattttttgagactgagtctcactctatcactgaggctggagtggagtggtgtgatctcggctcactgcaacctctgcctcccagattca

SEQ ID NO: 12972 - DNA, 201 bp, Homo sapiens
gatgtcctactgaacacccccctccccaagtcatggcaatcaaaacaggcacagcctctggtgggcagaatcacctccctttgagaactcttcccagcagygttccccaccttaccccccaacacagaggtcttgcagataacatagctatcccaagctattccaaagctgagtgaacgagaaccagaactccagggctca

SEQ ID NO: 12973 - DNA, 201 bp, Homo sapiens
cctctagtagagaatcatgcctaactaaagagctcagagctcacagatagatcacctctgaagccatgtccaggcaagggtcaacaagaatgaaaacacasggtaacacacaaagcattcagtccacaaatcacaggcatcagtctgacttctagtcatacttttgcaaaaagaattccaagagttccagtatctagtcta

SEQ ID NO: 12974 - DNA, 201 bp, Homo sapiens
cagggtctcactctgttgcccaggctagagcacagtggaacaatcatggctcagtgtagcctcaacctcccaggctcaagtgatcctccacctcagcctgsgaaagtgttgggatgacaggcatgagccactacactcatccctttttttttttttttttttttgaggtggagtcttgctctgttgcccaggctggagtgc

SEQ ID NO: 12975 - DNA, 201 bp, Homo sapiens
gctggtctcgaactcctgacctcaaatgatccacccacctcggtctcccaaagtgctgggattacaggcatgagccaccgcgcctggccccgttatttcakttaagcctcaaatacaaatatggagtaagcaaggcaggcggcctcattccccttttacaggtgaagaagccacttcagagatttcccacagcacagagat

SEQ ID NO: 12976 - DNA, 201 bp, Homo sapiens
aacctgggcggcagaggttgcagtgagccgagatggcaccactgcactccagcctgggcgacagagtgagacttcgtctcagtttaaaaaaaaaaaaaaaaggaataaaagctgaatgtcaaaatataaagtggtcgtagcgcagttggggtgaggtggaatatttgaattctgtatcgttgggctggttcattttctaat

SEQ ID NO: 12977 - DNA, 201 bp, Homo sapiens
agttcccactttagaataagtgatcagggaaggcctctctaagaaaataacacgtgtggccgggtgtggtggctcatgcctgtaatcccagcacttcgggwggctgaggtgggtagatcatctgaggtcaggagttcaagaccagcctgaccaacacgatgaaaccccatctctactaaaaatacaaaattagccgggcgt

SEQ ID NO: 12978 - DNA, 201 bp, Homo sapiens
gaacctgggcggcagaggttgcagtgagccgagatggcaccactgcactccagcctgggcgacagagtgagacttcgtctcagtttaaaaaaaaaaaaaaaaggaataaaagctgaatgtcaaaatataaagtggtcgtagcgcagttggggtgaggtggaatatttgaattctgtatcgttgggctggttcattttctaa

SEQ ID NO: 12979 - DNA, 201 bp, Homo sapiens
cagcctcccaagtagctgggactacaggcatgagccaccatgcgtggctaatttatgtatttatttatttttaagaaatggggtttcactatgctgcccakgctgatcttgaactcctggcctcaagcaatcctcccgcctcagcctcccaaagtgttgggatgacagatgtgagccaccacactcacaattctttttttt

SEQ ID NO: 12980 - DNA, 201 bp, Homo sapiens
tgaacctgggcggcagaggttgcagtgagccgagatggcaccactgcactccagcctgggcgacagagtgagacttcgtctcagtttaaaaaaaaaaaaaaaaggaataaaagctgaatgtcaaaatataaagtggtcgtagcgcagttggggtgaggtggaatatttgaattctgtatcgttgggctggttcattttcta

SEQ ID NO: 12981 - DNA, 201 bp, Homo sapiens
gcctcagcctcccaagtagctgggactacaggcatgagccaccatgcgtggctaatttatgtatttatttatttttaagaaatggggtttcactatgctgyccaggctgatcttgaactcctggcctcaagcaatcctcccgcctcagcctcccaaagtgttgggatgacagatgtgagccaccacactcacaattctttt

SEQ ID NO: 12982 - DNA, 201 bp, Homo sapiens
gtggttcatgcctatcatcccagcactttgggaggccgaggcaggcggatcacctgaggccaggagttcaagaccagcctggccaacatggtgaaatcccygtctctattaaaaattttttaaaaattagctgggcctggtggtgtccacctgtagtctcaactactcgggaggctgaggcaggagaatcgcttgaacctg

SEQ ID NO: 12983 - DNA, 201 bp, Homo sapiens
caaattcctgggctcaaacgatactcctgcctcagcctcccaagtagctgggactacaggcatgagccaccatgcgtggctaatttatgtatttatttatytttaagaaatggggtttcactatgctgcccaggctgatcttgaactcctggcctcaagcaatcctcccgcctcagcctcccaaagtgttgggatgacaga

SEQ ID NO: 12984 - DNA, 201 bp, Homo sapiens
gcctgggtgacagaatgaaactccatctcaaaaacaaacaaacaaaaaaactttttgtctgacacgccctccatactacccacaacttcactctgcttcayggaggtgagcaggcagttcacctagggctgtgtactggaaagctctcgtccccatcaccccctactttcagagccagcttagccactgtaagcactgctg

SEQ ID NO: 12985 - DNA, 201 bp, Homo sapiens
tcgccatgttagccaggctggtcttgaactcctgacctcaggtgatccacccacctcagcctcccaaagtgctgggatgacaggcgtgagccaccgcaccyggccttctctttttgaatgaactcgactgctttcaactgaatacattaggacagagggcaccagacctttaccaggaatgaggccgggtgcagtggttca

SEQ ID NO: 12986 - DNA, 201 bp, Homo sapiens
accacacctggctaattttcatattttcagtagagacggggtttcgccatgttagccaggctggtcttgaactcctgacctcaggtgatccacccacctcrgcctcccaaagtgctgggatgacaggcgtgagccaccgcacccggccttctctttttgaatgaactcgactgctttcaactgaatacattaggacagagg

SEQ ID NO: 12987 - DNA, 201 bp, Homo sapiens
aacctcccaggctcaagtgatcctccacctcagcctgcgaaagtgttgggatgacaggcatgagccactacactcatccctttttttttttttttttttttgaggtggagtcttgctctgttgcccaggctggagtgcagtggtgcgatctcagctcactgcaacctctgcctcctgggtttaagtgattctcctgcctaa

SEQ ID NO: 12988 - DNA, 201 bp, Homo sapiens
caacctcccaggctcaagtgatcctccacctcagcctgcgaaagtgttgggatgacaggcatgagccactacactcatccctttttttttttttttttttttgaggtggagtcttgctctgttgcccaggctggagtgcagtggtgcgatctcagctcactgcaacctctgcctcctgggtttaagtgattctcctgccta

SEQ ID NO: 12989 - DNA, 201 bp, Homo sapiens
atggcttggattttcttgctattatttttatttgttaaaatctgggcagtgcaataatggggcacttctatttcttccgttttctgtattttccatttccytctattttctgtattagaaatacactacttagccggacatggtggctcatgcctgtaatcccagcactttgggaggtcaaggcgggcagatcacctgagg

SEQ ID NO: 12990 - DNA, 201 bp, Homo sapiens; identical to SEQ ID NO: 1628

SEQ ID NO: 12991 - DNA, 201 bp, Homo sapiens
aatccctcgagttccttgtactgtaactggagtatatctccctcctgagggtagctaaggaacgggttgggacagagggttggttttttgcaccaaaagayctattttggacatggacatgttatgcaaagatgctattatctcttctaggggcgatgcccgtgagcaactggataatcaaatctggagcatttcagtctc

SEQ ID NO: 12992 - DNA, 201 bp, Homo sapiens; identical to SEQ ID NO: 1636

SEQ ID NO: 12993 - DNA, 201 bp, Homo sapiens
tgtaatcccagctactcgggaggctgaggaaggagaattgcctgaacccaggaggcggaggttgcagtgagcagagatcatgccgctgcactccagcctgkgcaacagagcaatactcagtcttggaaaaaaaaaaatgatgttactgtgaaattcttgtatcagtttcctggtacacatatgtaagattttctctgagga

SEQ ID NO: 12994 - DNA, 201 bp, Homo sapiens
gatggaagtgtttaagtgcagtaggtcagtgccagtgagaaaaaaaataaaatcatacaaaaaaagaaatattgaataaattaagaaaaaggtatatcatraatacataaaatatatgtagacactagtctattttatcatttactactataagatatatacaaatctattatgaatgattaaaatttatgcacacactta

SEQ ID NO: 12995 - DNA, 201 bp, Homo sapiens
taagctcaagtgttgcaagtactgcttagaatgcctgtcatttccgtgagcagtttgtctctccagtaaattgtgtattgtaataaaaaatgatctctagyggttctcacatattttttattgtgtttagtgcagtactgtagtaaaccttgcataacaccatgggatccatatgaagtgatgcttcaagtgctcccaaga

SEQ ID NO: 12996 - DNA, 201 bp, Homo sapiens
gagccaccgtgctcagccctggccaattttcttagtaacattttcttttctcagcccggcgctgtggctcacgcctgtaatcccagcactttgggaggccraggtgggcagatcatgaggtcaggagttcaagaccagcctggccaacatggtgaaaccccgtctctactaaaaatacaaaaattagccgagcatggtgtg

SEQ ID NO: 12997 - DNA, 201 bp, Homo sapiens
gatcctcctgcctcagcctcctaaagtgctaggattacaggtgtgagccaccgtgctcagccctggccaattttcttagtaacattttcttttctcagccsggcgctgtggctcacgcctgtaatcccagcactttgggaggccaaggtgggcagatcatgaggtcaggagttcaagaccagcctggccaacatggtgaaa

SEQ ID NO: 12998 - DNA, 201 bp, Homo sapiens
ctggtctcgaactcctggcctcaagtgatcctcctgcctcagcctcctaaagtgctaggattacaggtgtgagccaccgtgctcagccctggccaattttyttagtaacattttcttttctcagcccggcgctgtggctcacgcctgtaatcccagcactttgggaggccaaggtgggcagatcatgaggtcaggagttca

SEQ ID NO: 12999 - DNA, 201 bp, Homo sapiens
cacagtggcgcgatctcagctcactgcaacctgcacctccggggttcaagagattattctgcctcagcatcctgagtagctgggattacaggcatgttccmccatgcccgcctaatttttgtatttttagtagaggtgggatttcgccatgttggccaacctggtctcgaactcctggcctcaagtgatcctcctgcctca

SEQ ID NO: 13000 - DNA, 201 bp, Homo sapiens; identical to SEQ ID NO: 1638

SEQ ID NO: 13001 - DNA, 201 bp, Homo sapiens
attgactgtttatgttatctgtaaggtttctagttactggtaggctataagttgaattgcttgatatgtaccatagatcaaggtttgccattgtggttgcrtgccattttaagataattaatccagtaaggagtgttgtaaaaaaagaaaagaaaatctgtgaagccatcactgtagctacgttagcagccatgaaaacct

SEQ ID NO: 13002 - DNA, 201 bp, Homo sapiens
tcagactcccaagtagtagctgggattataggcgcccaccaccacacctggctaattttttgtatttttagtagatacagggtttcaccatattggccagsctggtctcgatctcctgacctcaggtgatccacccgccttggccttccaaagcgctgggattattggcatgagccactgcacccggccctgaaatttttt

SEQ ID NO: 13003 - DNA, 201 bp, Homo sapiens
tctcctggctcagactcccaagtagtagctgggattataggcgcccaccaccacacctggctaattttttgtatttttagtagatacagggtttcaccatrttggccaggctggtctcgatctcctgacctcaggtgatccacccgccttggccttccaaagcgctgggattattggcatgagccactgcacccggccctg

SEQ ID NO: 13004 - DNA, 201 bp, Homo sapiens; identical to SEQ ID NO: 1640

SEQ ID NO: 13005 - DNA, 201 bp, Homo sapiens
tgattctcctggctcagactcccaagtagtagctgggattataggcgcccaccaccacacctggctaattttttgtatttttagtagatacagggtttcaycatattggccaggctggtctcgatctcctgacctcaggtgatccacccgccttggccttccaaagcgctgggattattggcatgagccactgcacccggc

SEQ ID NO: 13006 - DNA, 201 bp, Homo sapiens
ctaggctctttctgaagtttgttcagcagaaagcaacatagcaaagtttttgtagtttcgtgaagaatctgctttgatgaattatgatttaatgagatagstttaattttatatattatcagtatattaaaatgttcctcatatgtatctcttatcttttgcaaaactattgtctatatatataacatgtttgttattaca

SEQ ID NO: 13007 - DNA, 201 bp, Homo sapiens
gactgaatttgaatcccgactcagccacttacttgctgtgtgaccttgggaaattattcagccattctgtgcctcagtttcttcatctatcaaatggaaawaataatagtatctacctcatagaataatgctgggtatgtagtaactactcaatatgtgctgtcattattattattatgcttagttgtaatacatgtcctt

SEQ ID NO: 13008 - DNA, 201 bp, Homo sapiens
atgggaaaagtgtcaagaatatcttcgaaaaatcaaccgtgatattgcccagctactgactcattcacgttcaataggtaccctcctaatctaactgcacrtttaacagaatgtactataatggcttaaaatggttacttattttaaattgtttgaatttttaaaggtatgtgtcccaggcaggaaagttgagaacgcttt

SEQ ID NO: 13009 - DNA, 201 bp, Homo sapiens
aaaattatttaaaatattatgtaaagttacctttaggttatgtgtatacggtacatatgaaacattaataaacttcgtgtttagacttgggacctgtcccsaggacatctcattatgtatatgcaaatattgcaaatcccaaaaaacccaaaatccaaacacttgtggccccaagcattttggataagggatactcaactt

SEQ ID NO: 13010 - DNA, 201 bp, Homo sapiens; identical to SEQ ID NO: 1637

SEQ ID NO: 13011 - DNA, 201 bp, Homo sapiens
ccctgcattgttcaggggtcagctatatttgagttctgacatatttgtccatttatggattcgtcttaccattcatcagtagatcttttttttttttttttgagatggagtcttgctctgttgcctaggctggagtacaatggcgtgatcactgctcactgcaacttctgcctcctgggttcaagcaattctcctgcctca

SEQ ID NO: 13012 - DNA, 201 bp, Homo sapiens
ggaaaaaaaaaaaaaaaaactgccacaaaggacatttattagttaaatttcaggtagttaaaagttatacatggatttttcagggagttgaaagttatacwtggatttttaactgtgttagggagggggctcagcatccctaacccctgcattgttcaggggtcagctatatttgagttctgacatatttgtccatttatg

SEQ ID NO: 13013 - DNA, 201 bp, Homo sapiens
tgcattgttcaggggtcagctatatttgagttctgacatatttgtccatttatggattcgtcttaccattcatcagtagatcttttttttttttttttgaratggagtcttgctctgttgcctaggctggagtacaatggcgtgatcactgctcactgcaacttctgcctcctgggttcaagcaattctcctgcctcagcc

SEQ ID NO: 13014 - DNA, 201 bp, Homo sapiens
tctactaaaaatacaaaaattagctgggcgtcgtggcgtgagcctgtagtctcagctactcgggaggctgagacaggagaactgcttgaacccagaaggtsgaggttgcagtgagctgagatcacaccactgcactccagcctgggcgacagagcaagactccatccccccccgcaaaaaaaaaaaaaaaaaaaagacata

SEQ ID NO: 13015 - DNA, 201 bp, Homo sapiens
gcttctgccaaccaagaggcagcagacaagttcccaggtgccactgaggggaaaggatacctgcctgaacaggtttttagtgcagaagaaagtaccttttytggaaaaaaaaaaaaaaaaactgccacaaaggacatttattagttaaatttcaggtagttaaaagttatacatggatttttcagggagttgaaagttata

SEQ ID NO: 13016 - DNA, 201 bp, Homo sapiens
ttcatgtacaaaattatttaaaatattatgtaaagttacctttaggttatgtgtatacggtacatatgaaacattaataaacttcgtgtttagacttgggacctgtccccaggacatctcattatgtatatgcaaatattgcaaatcccaaaaaacccaaaatccaaacacttgtggccccaagcattttggataagggat

SEQ ID NO: 13017 - DNA, 201 bp, Homo sapiens
ggagaactgcttgaacccagaaggtggaggttgcagtgagctgagatcacaccactgcactccagcctgggcgacagagcaagactccatccccccccgcmaaaaaaaaaaaaaaaaaaagacatatattatgatttgagaaaaagcaaactcattatataacaaagcaaaaggaaagtgaaggatctacagctagagaat

SEQ ID NO: 13018 - DNA, 201 bp, Homo sapiens
aatttgcatgtgctgtggccatgagataagacagcttagggagcatgtagagaaatttattttattgtatttttttgagatggagtcttgcactgtcgcccaggctagatgcagtggcgcagtctcagctcactacaacctctgcctcccaagttcaagcgattctccttgcctcagcgtcccgagaagctgggattacag

SEQ ID NO: 13019 - DNA, 201 bp, Homo sapiens
caggagaactgcttgaacccagaaggtggaggttgcagtgagctgagatcacaccactgcactccagcctgggcgacagagcaagactccatccccccccscaaaaaaaaaaaaaaaaaaaagacatatattatgatttgagaaaaagcaaactcattatataacaaagcaaaaggaaagtgaaggatctacagctagaga

SEQ ID NO: 13020 - DNA, 201 bp, Homo sapiens
ctgagaatttgcatgtgctgtggccatgagataagacagcttagggagcatgtagagaaatttattttattgtatttttttgagatggagtcttgcactgtcgcccaggctagatgcagtggcgcagtctcagctcactacaacctctgcctcccaagttcaagcgattctccttgcctcagcgtcccgagaagctgggat

SEQ ID NO: 13021 - DNA, 201 bp, Homo sapiens
tttttgtgaaatacctttttatctcataatgaaaatgtagcatttatgtaggtgcaaggttgctataagacatacttacagaccgggcacagtagctcacrcctgtaatcccagcactttggcaggccacagcgggttggtcaccttaggtcaagaattcaagaccagcctgaccaatatggtgaaactctcgtctctact

SEQ ID NO: 13022 - DNA, 201 bp, Homo sapiens
caaaactagctgatcagtaagcacttctgagatctaaagcctatagttttctcattagccaagagttacttcatttattcaatttttttttttttttttttgagatggggtctcactctgtcactcaggctggagtacagttgtgtgatcatagctcacttcagcctctacctcctgggctcaggtgatcctcccacttca

SEQ ID NO: 13023 - DNA, 201 bp, Homo sapiens; identical to SEQ ID NO: 1639

SEQ ID NO: 13024 - DNA, 201 bp, Homo sapiens
aggtcgaagctggtggaacacttgaggtcatgagttggagaccagcctggccaacatgctgaaactccttctctactaaaaataaaaaaattagccaggtrtggtggcacgcgcctgtaatcccagctactctggaggctgaggcaggagaattgcttgaacccaggaggcggaggttgtggtgagcagagattgcatcac

SEQ ID NO: 13025 - DNA, 201 bp, Homo sapiens
attatgcttagttgtaatacatgtccttcacacattttatccggtttcctatcttcatgctacaaagcttagacctctaacaccttaaattaattgttcarttacaaaagcagattcaaaattcttctgtgagaaatgttttggatttatccataggcataattgctactcacctctgcaaaaggggagagccttccatgt

SEQ ID NO: 13026 - DNA, 201 bp, Homo sapiens
gccctggactggatctcccccaacccaccaacatacccactcggagcccactcctgctctgtacccagctctgagctcggagctctgaggactgcggcagscagagccaagggccctaagccggagaaggagaaaccagtactggacaatagcaggtgacagcagaggagaaaaagggggtagggaggggacaaggaaaga

SEQ ID NO: 13027 - DNA, 201 bp, Homo sapiens
ctcccagggagccccctccctgtcttccccaggggtctccccctgcctcctatgattcagcacctcaccgtgagggcatcttgagactctggggccaatcracactgagcccaaaccaatatgccatgaggaccaagcctgggcattgctcatttcatgttggttctcacacagacacagatggcacaggtgcctgtacag

SEQ ID NO: 13028 - DNA, 201 bp, Homo sapiens
gacatcggggtaggggccggggcactggtcagagcaaggggagcaaggccaagtccctgtgtcctgggaggaggtcagtgggcagtgctggcaagggtccyggagggattgtggtcactcatcctcctgcttatgcgccccctccagacggtgactgtgaaggaggaccaggtgttgcagcagaacccacccaagttcgac

SEQ ID NO: 13029 - DNA, 201 bp, Homo sapiens
acagaatgagatagaggacttgatggtggacgtagagcgctccaatgctgctgctgcagccctggacaagaagcagagaaactttgacaaggtggaccatrggcgggggccgcagccagcatgcagggcaagggggcatgaggggttcagtgagaggccaaaggcaacctccttggaggtggaggaggagggctaagccca

SEQ ID NO: 13030 - DNA, 201 bp, Homo sapiens
ggtcagaagacctgggttcagacctaccagctggcctgggcaagttactttaccacttcgaatctcattgcaaattcttcttcttcttcttcttcttcttyttttttttttaaagaaacttctctataggaaaatgcaaattaagacaccaatgaaataccattttaaaacactagactttgcttgctcagatggtctaca

SEQ ID NO: 13031 - DNA, 201 bp, Homo sapiens
aattagccgggtgtggtggcagatgcctgtagtcccagctactctggaggctgaggcaggagaatggcatgagcccgggaggcagagcttgcagtgagccragatcgagccactgcactctagcctgggcgacagagcgagactccatctcaaaaaaaaaaaagttgaacagctgcatacttctccattccactcctgagt

SEQ ID NO: 13032 - DNA, 201 bp, Homo sapiens
caaaaacaagattcagctggaggccaaagtaaaggagatgaatgagaggctggaggatgaggaggagatgaacgcggagctcactgccaagaagcgcaagytggaagacgagtgctcagagctcaagaaggacattgatgacctggagctgacactggccaaggtggagaaggagaagcatgcaacagagaacaaggtgag

SEQ ID NO: 13033 - DNA, 201 bp, Homo sapiens
ggcttctccttctgagatctgctctgcctcagggactttctactctaagacaaatgatagagctctattctcctctaacccttcctctggtagttcagccstctgaacgcagggtgaaaaaaaaaaaaggcttcaaggagcaccttcctgtgagctgctctgttcatattcttcccggtactaaccccagccactaaccca

SEQ ID NO: 13034 - DNA, 201 bp, Homo sapiens
ccgtggaggctgttaatgccaagtgctcctcactggagaagaccaagcaccggctacagaatgagatagaggacttgatggtggacgtagagcgctccaaygctgctgctgcagccctggacaagaagcagagaaactttgacaaggtggaccatgggcgggggccgcagccagcatgcagggcaagggggcatgaggggt

SEQ ID NO: 13035 - DNA, 201 bp, Homo sapiens
tggaggctgttaatgccaagtgctcctcactggagaagaccaagcaccggctacagaatgagatagaggacttgatggtggacgtagagcgctccaatgcygctgctgcagccctggacaagaagcagagaaactttgacaaggtggaccatgggcgggggccgcagccagcatgcagggcaagggggcatgaggggttca

SEQ ID NO: 13036 - DNA, 201 bp, Homo sapiens
cacctttgttcccatgccctgtccctgcccaataccatctctccaaggactgattggactttgtttcctttcaaaagggcttgaatgaggagtagctttgmcacatcttgatctgctcagccctggaggtgccagcaaagccccatgctggagcctgtgtaacagctccttgggaggaagcagaataaagcaattttcctt

SEQ ID NO: 13037 - DNA, 201 bp, Homo sapiens
aagttccccctgacacaaggaggttccacaggaaacccagaaacctcttttctccttctctgactctccatttctttctctgcatcattctgagtctcctrcatgttgtctccatctttccatcttccttcctcctttggatggcttccttcccttgatcctggttttatcttgcctcttggtcttcatcgacacttgtca

SEQ ID NO: 13038 - DNA, 201 bp, Homo sapiens
ccttcccttgatcctggttttatcttgcctcttggtcttcatcgacacttgtcacaatcatgcttctttgtctctctcccttgtccttccttcttggcacktgttctcacctccctgcctctctgcttctaaccctgtttccacaccccgtccctcgcactcatattgactcggtgccctttcttttctgcctctgcgtct

SEQ ID NO: 13039 - DNA, 201 bp, Homo sapiens
gtgagtagggcatggcgccggggcagaagggaaggaggtctgggaaagaagatgcagaggtggagccacttgcagggggagctgagagggctggagaaaasccaaggccagtggggatgccaggacatgctcctttgaggagcccagaatctgatccctctcaaattgacctgagctggtgcaacaggtgccacccagggc

SEQ ID NO: 13040 - DNA, 201 bp, Homo sapiens
cgtggcaagaaggacaatgccaatgcgaacaaggtgccatgggggacacaggctcggcagaacaggggttggggggcaggctgacccgagttacccctaaycctcccctccctgtgacgtggtggggacagccacactgagctgggctcccgatggtcagcccagtatggaagaccttcctgacaggagacactcaccctg

SEQ ID NO: 13041 - DNA, 201 bp, Homo sapiens
agggcatggcgccggggcagaagggaaggaggtctgggaaagaagatgcagaggtggagccacttgcagggggagctgagagggctggagaaaagccaagsccagtggggatgccaggacatgctcctttgaggagcccagaatctgatccctctcaaattgacctgagctggtgcaacaggtgccacccagggccatgtt

SEQ ID NO: 13042 - DNA, 201 bp, Homo sapiens
cagaagggaaggaggtctgggaaagaagatgcagaggtggagccacttgcagggggagctgagagggctggagaaaagccaaggccagtggggatgccagsacatgctcctttgaggagcccagaatctgatccctctcaaattgacctgagctggtgcaacaggtgccacccagggccatgttccccctgccagagagga

SEQ ID NO: 13043 - DNA, 201 bp, Homo sapiens
gggaaagaagatgcagaggtggagccacttgcagggggagctgagagggctggagaaaagccaaggccagtggggatgccaggacatgctcctttgaggascccagaatctgatccctctcaaattgacctgagctggtgcaacaggtgccacccagggccatgttccccctgccagagaggatgctgaggaagaagaacc

SEQ ID NO: 13044 - DNA, 201 bp, Homo sapiens
attgacctgagctggtgcaacaggtgccacccagggccatgttccccctgccagagaggatgctgaggaagaagaacctcagtgttcgcctaagaggggtsttgtagataaagagggcacagacacagcattaaatgatgcccccttcttgcacttgtatccctcttccctgtgcctcagtttcctccatgagtccacttt

SEQ ID NO: 13045 - DNA, 201 bp, Homo sapiens
aaagagggcacagacacagcattaaatgatgcccccttcttgcacttgtatccctcttccctgtgcctcagtttcctccatgagtccactttctcaaattmcgttcacccaaatcaagagtaattcttagacccagatgaacacaaagatcagaaacttttgagctgagcactctccttgactggcactcagaagctctgg

SEQ ID NO: 13046 - DNA, 201 bp, Homo sapiens
aagagggcacagacacagcattaaatgatgcccccttcttgcacttgtatccctcttccctgtgcctcagtttcctccatgagtccactttctcaaattcmgttcacccaaatcaagagtaattcttagacccagatgaacacaaagatcagaaacttttgagctgagcactctccttgactggcactcagaagctctggt

SEQ ID NO: 13047 - DNA, 201 bp, Homo sapiens
ccaggtctgccccaagacccttggaacatagggactgaagagtgatggtcatgggcacagggtgtccccaggatggtctggggatctggcaagagaaaggwaccctaggacagtctctaggatgggagatacaatgggaagggaaattacctggggaaagtgtcccaggggacatcggggtaggggccggggcactggtca

SEQ ID NO: 13048 - DNA, 201 bp, Homo sapiens
caagtgcctctaacgtgggaccacaggatccctggggccctgcctctccctccaagggcatctcccttaggcctctgaaagccccagggatttgtccccayacacttctccctcttgccagctgccccctcacacctcttattctttttgcagcaaaaaatgcacgatgaggagtgacactgcctcgggaacctcactctt

SEQ ID NO: 13049 - DNA, 201 bp, Homo sapiens
aatcaggtaacaaagtgtagtatatatttgatcatttttctctctccatgtctagaacaccagcctcatcaaccagaagaagaagatggagtcggatctgwcccagctccagtcggaagtggaggaggcagtgcaggagtgcagaaacgccgaggagaaggccaagaaggccatcacggatgtaagtgaccgcccaccttc

SEQ ID NO: 13050 - DNA, 201 bp, Homo sapiens
accaacctcatgcccagccttgtctcctgctccagacctactcgggcctcttctgtgtcactgtcaacccctacaagtggctgccggtgtacaatgccgargtggtggccgcctaccggggcaagaagaggagtgaggccccgccccacatcttctccatctccgacaacgcctatcagtacatgctgacaggtgagcctg

SEQ ID NO: 13051 - DNA, 201 bp, Homo sapiens
acaatcagacattgccaactgttccctggggcacaaaattgcccctagttgagaaccactgcttgagaggaacctaagttcctggtagcttttcagagccrgggggattccagtggaggggtccaggcggtgggtctgagccctttgtgtctgacccaggcacgcatcgaggagctggaggaggagctggaggccgagcgc

SEQ ID NO: 13052 - DNA, 201 bp, Homo sapiens
gccttgtctcctgctccagacctactcgggcctcttctgtgtcactgtcaacccctacaagtggctgccggtgtacaatgccgaggtggtggccgcctacmggggcaagaagaggagtgaggccccgccccacatcttctccatctccgacaacgcctatcagtacatgctgacaggtgagcctggtggcccctggtctct

SEQ ID NO: 13053 - DNA, 201 bp, Homo sapiens
taaagcaattttccttgaagccgagatcctgactccagactcttcttcactgccctgaggacccggggatggggtctggactaggggaggtggaaatgcasgggagtgggggcaaattcaaaggcctggcctaggaggccttcgtggagcagcactgaaaacccctttcacttcccccaaaccagccaaatgcagcagagg

SEQ ID NO: 13054 - DNA, 201 bp, Homo sapiens
ttgatctgctcagccctggaggtgccagcaaagccccatgctggagcctgtgtaacagctccttgggaggaagcagaataaagcaattttccttgaagccragatcctgactccagactcttcttcactgccctgaggacccggggatggggtctggactaggggaggtggaaatgcaggggagtgggggcaaattcaaag

SEQ ID NO: 13055 - DNA, 201 bp, Homo sapiens
cagtttgacttgagtctatgagtttttccagcaaatgaagaatctacttctacttcctgaaaactcttctaactagtctttccccaggtttctttctttctttttttttttttttaataactctaagtgctaccatgaagacttcagaacagttcaaagaatccttccaccttcgactgtggggataagagtcaggggagg

SEQ ID NO: 13056 - DNA, 201 bp, Homo sapiens
gtgcccctaaccaaccccctgcctagggcaggacatgacttgtgaaatggcccacaagcccctcatttcacctccaggagagttggcccggcagctagagsaaaaggaggcgctaatctcgcagctgacccgggggaagctctcttatacccagcaaatggaggacctcaaaaggcagctggaggaggagggcaaggtgag

SEQ ID NO: 13057 - DNA, 201 bp, Homo sapiens
gaaatggagcctggagctggaaagagtcctctgcaagggaaagaccctccagtctaggttctgccctgcagctaagcgtcatttaatgcctcttttcttaytcgtaaggggatggggtgagcagactgggaaactcctcaaacagtgaggtgccacatcagcccacatggtgaataaggctgggcttggttgaagtactac

SEQ ID NO: 13058 - DNA, 201 bp, Homo sapiens
agccctggactggatctcccccaacccaccaacatacccactcggagcccactcctgctctgtacccagctctgagctcggagctctgaggactgcggcasccagagccaagggccctaagccggagaaggagaaaccagtactggacaatagcaggtgacagcagaggagaaaaagggggtagggaggggacaaggaaag

SEQ ID NO: 13059 - DNA, 201 bp, Homo sapiens
gggtgtccccaggatggtctggggatctggcaagagaaaggtaccctaggacagtctctaggatgggagatacaatgggaagggaaattacctggggaaastgtcccaggggacatcggggtaggggccggggcactggtcagagcaaggggagcaaggccaagtccctgtgtcctgggaggaggtcagtgggcagtgctg

SEQ ID NO: 13060 - DNA, 201 bp, Homo sapiens
caggtctgccccaagacccttggaacatagggactgaagagtgatggtcatgggcacagggtgtccccaggatggtctggggatctggcaagagaaaggtwccctaggacagtctctaggatgggagatacaatgggaagggaaattacctggggaaagtgtcccaggggacatcggggtaggggccggggcactggtcag

SEQ ID NO: 13061 - DNA, 201 bp, Homo sapiens
cctcctttctttaattcaagtctctcttcagactgcgccctcccacaccttctgtgtccccctcctgccctctggcattccccatctctgaccctctcttycttcctctggtcgactcagcccctcccacactcacccttcctgtcttgcttcctgaaggcaaacctggagaaagtgtctcggacgctggaggaccaggcc

SEQ ID NO: 13062 - DNA, 201 bp, Homo sapiens
ggggtaggggccggggcactggtcagagcaaggggagcaaggccaagtccctgtgtcctgggaggaggtcagtgggcagtgctggcaagggtcccggaggrattgtggtcactcatcctcctgcttatgcgccccctccagacggtgactgtgaaggaggaccaggtgttgcagcagaacccacccaagttcgacaagatt

SEQ ID NO: 13063 - DNA, 201 bp, Homo sapiens
aggcggtgggtctgagccctttgtgtctgacccaggcacgcatcgaggagctggaggaggagctggaggccgagcgcaccgccagggctaaggtggagaarctgcgctcagacctgtctcgggagctggaggagatcagcgagcggctggaagaggccggcggggccacgtccgtgcagatcgagatgaacaagaagcgcg

SEQ ID NO: 13064 - DNA, 201 bp, Homo sapiens
gggtaggggccggggcactggtcagagcaaggggagcaaggccaagtccctgtgtcctgggaggaggtcagtgggcagtgctggcaagggtcccggagggrttgtggtcactcatcctcctgcttatgcgccccctccagacggtgactgtgaaggaggaccaggtgttgcagcagaacccacccaagttcgacaagattg

SEQ ID NO: 13065 - DNA, 201 bp, Homo sapiens
ccgagaactccctgcaccccatccctgttctgccgctgtctcccacttctccctcacctgggggtgaccctgaccccaggacaaaatctattcattccatrttctttgttcaacattatctacccactattcactacccatgactgcctccaaagccaaggtctgcacaaaggaaaatgtcagtctgattagaggccaaag

SEQ ID NO: 13066 - DNA, 201 bp, Homo sapiens
attgtggtcactcatcctcctgcttatgcgccccctccagacggtgactgtgaaggaggaccaggtgttgcagcagaacccacccaagttcgacaagattsaggacatggccatgctgaccttcctgcacgagcccgcggtgcttttcaacctcaaggagcgctacgcggcctggatgatatatgtgagtggctcctgcac

SEQ ID NO: 13067 - DNA, 201 bp, Homo sapiens
cgggctgtggcagtgtctgctccaaactcccctgagccttcccatagcattcactgtggggagctcttgaccagcttgtctctttcccagcctgtgagtgytaaagggcaggccccccgtcacctctgaggccctggcacccagcacagtgtgcatgggagatgctcaggaaatgtgtgctgaggagctggcaagctggga

SEQ ID NO: 13068 - DNA, 201 bp, Homo sapiens
ccctctgggccgaggttccactaggaggtccctgcacagtgtgtgagggtggcatcctctgcccggcttcacttatactcaactgagacaccaaagaggtygtttacatttccagaaccatccagggcttctgggctgaacagagggccaggatttcactctgtccttcccgccagttccctcactctgtcccattcgtcc

SEQ ID NO: 13069 - DNA, 201 bp, Homo sapiens
ctggctgcacatctgtctgtctcggcccagcagggctgactcccgggctgtggcagtgtctgctccaaactcccctgagccttcccatagcattcactgtrgggagctcttgaccagcttgtctctttcccagcctgtgagtgctaaagggcaggccccccgtcacctctgaggccctggcacccagcacagtgtgcatgg

SEQ ID NO: 13070 - DNA, 201 bp, Homo sapiens
ttgcctctgggctttaggatcctttttatttaagccacatcttctcgcctggccctcttcatcaagctgtgggtgccccctgccctctgcccccatggccrcctttttctggctctactctctttccttcctcacctgccttcctcccctccgcccacctcagacctgctggagaagtcccgggtgatcttccagctgaaa

SEQ ID NO: 13071 - DNA, 201 bp, Homo sapiens
agaagagaatctagagaatggggcacagggagtccctcccacctcctggtgcccccccccctccccaggcgaagaacgccctggcccatgcactgcagtcrgcccggcatgactgcgacctgctgcgggagcagtacgaggaggagacagaggccaaggccgagctgcagcgcgtcctgtccaaggccaactcggaggtgg

SEQ ID NO: 13072 - DNA, 201 bp, Homo sapiens
ttgagaggctgagaatcccatagcccatctccagctcattcacccatccccactgtcccaccacaggaggagcaagccaacaccaacctgtccaagttccrcaaggtgcagcatgagctggatgaggcagaggagcgggcggacatcgctgagtcccaggtcaacaagcttcgagccaagagccgtgacattggtgccaag

SEQ ID NO: 13073 - DNA, 201 bp, Homo sapiens
tgccccctgccctctgcccccatggccacctttttctggctctactctctttccttcctcacctgccttcctcccctccgcccacctcagacctgctggaraagtcccgggtgatcttccagctgaaagctgagagaaactaccacatcttctaccagattctgtccaacaagaagccggagttgctgggtgaacctgcct

SEQ ID NO: 13074 - DNA, 201 bp, Homo sapiens
ggtcaccaacaatccctacgactacgccttcgtgtctcagggagaggtgtccgtggcctccattgatgactccgaggagctcatggccaccgatgtgagtkagggggctgctgcggccgttcgagggaccccaggagctcctggggccaccgctccaacccccctctttgtctctcgctctgtcccagagtgcctttgacg

SEQ ID NO: 13075 - DNA, 201 bp, Homo sapiens
ctatgggaaccaagcagtgacgcactggccatgggctaaccccccggctcgaattctggggcctcgagtaacctagagctggggacaggtggcctgcatcycctgggggtaatgatttggcataagcacctgcagaagatggggatgtggggtcaactaaggtccctccaaggacattgagaaaaggtccaaatgctctgg

SEQ ID NO: 13076 - DNA, 201 bp, Homo sapiens
aagccccatgctggagcctgtgtaacagctccttgggaggaagcagaataaagcaattttccttgaagccgagatcctgactccagactcttcttcactgmcctgaggacccggggatggggtctggactaggggaggtggaaatgcaggggagtgggggcaaattcaaaggcctggcctaggaggccttcgtggagcagc

SEQ ID NO: 13077 - DNA, 201 bp, Homo sapiens
cagcagccaggactggaggacaaaggcggattgttgggggacaagggggcgctctgtgcctgctgcaatgcctcaatgggcctctgtctctccagcatgcygggagcgcggcctagcccccaccctggtgtttgggatgggccagggagacagagatgggagaggacgggagggtgcagcggaaactctggagggcggaga

SEQ ID NO: 13078 - DNA, 201 bp, Homo sapiens
tgtgcctgctgcaatgcctcaatgggcctctgtctctccagcatgccgggagcgcggcctagcccccaccctggtgtttgggatgggccagggagacagasatgggagaggacgggagggtgcagcggaaactctggagggcggagagagctggcagggtggacagaggtgagggccaatggtggaaaggagaagggacag

SEQ ID NO: 13079 - DNA, 201 bp, Homo sapiens
atttcagctcctgtttcagtggtaggttcatggatagtcattttgctttcatgctgcataacttacatacttattatagacattcttatatgtaaaccccyacataatttttaacatatttgaagttcttatgagaatagaaaaaccaaacagagtagacattctataagtggtagtttccattaccactaatatcccagc

SEQ ID NO: 13080 - DNA, 201 bp, Homo sapiens
ggttgcttaggcaggcctgggactgtgggccacagaggtcaggggcttgaaaggcactggggctgtcggccccactgggaacctgggaagcagtggttcarccctggactggatctcccccaacccaccaacatacccactcggagcccactcctgctctgtacccagctctgagctcggagctctgaggactgcggcagc

SEQ ID NO: 13081 - DNA, 201 bp, Homo sapiens
agggaagggatggctcccgagagggccaggaggtggaggaaagagtaagtctcctccaactaaacaagttcagcccctttggagttcctgccacagctggrttgcttaggcaggcctgggactgtgggccacagaggtcaggggcttgaaaggcactggggctgtcggccccactgggaacctgggaagcagtggttcagc

SEQ ID NO: 13082 - DNA, 201 bp, Homo sapiens
aggtgggtgtgcacaagaaggaagtctacgtgcctacgaacttgcttagtagggcccatgattgggaagctctcttttatagtgccccaccctgcctccaygtttccttgccagggatgccctgctggtaatccagtggaacattcgggccttcatgggggtcaagaattggccctggatgaagctctacttcaagatcaa

SEQ ID NO: 13083 - DNA, 201 bp, Homo sapiens
aaactgccctttcatcaaattgattaataaatatttatcaagcaactccatgttcagtgtagtgatgttggaggtgggtgtgcacaagaaggaagtctacrtgcctacgaacttgcttagtagggcccatgattgggaagctctcttttatagtgccccaccctgcctccacgtttccttgccagggatgccctgctggta

SEQ ID NO: 13084 - DNA, 201 bp, Homo sapiens
agagctcatagaacagggggagccaggctgccctgatgggaatgggatctgcaggtgaccctggaattctgtgggcagagcagatcactgcagagcatggrtgactctggacacttccctcctcaggtatcgcatcctgaacccagtggccatccctgagggacagttcattgatagcaggaaggggacagagaagctgct

SEQ ID NO: 13085 - DNA, 201 bp, Homo sapiens
accaccttcctgttggttgagaaataagccagtctccagccctcttgcttatgggcattcctcagaagagacaaggccgcaggcgggaggccccataggcyggggctgacttgctctcagtgaacctctgctctttgtcagcataggccagagcccggattgtctgacccacacccagcccagccacggccttcatgaaat

SEQ ID NO: 13086 - DNA, 201 bp, Homo sapiens
gcgctgcaatggcgtgctggagggcatccgcatctgcaggaagggcttccccaaccgcatcctctacggggacttccggcagaggtgggtatgagggtgcmccagagctcatagaacagggggagccaggctgccctgatgggaatgggatctgcaggtgaccctggaattctgtgggcagagcagatcactgcagagcat

SEQ ID NO: 13087 - DNA, 201 bp, Homo sapiens
ccaccttcctgttggttgagaaataagccagtctccagccctcttgcttatgggcattcctcagaagagacaaggccgcaggcgggaggccccataggccrgggctgacttgctctcagtgaacctctgctctttgtcagcataggccagagcccggattgtctgacccacacccagcccagccacggccttcatgaaatg

SEQ ID NO: 13088 - DNA, 201 bp, Homo sapiens
ccctagaattaacttctatggcccctgaagcttttttgctctctgtagttcctcactacagtaggtctctgaatcctttgtgcttgcaggatttctctgtyggtttgacttccaatcccactggacttcaagtttagaaggaggcaaaagagcatacactatggatttcatgttttccacactttgcttattttcttccct

SEQ ID NO: 13089 - DNA, 201 bp, Homo sapiens
gtaagaggtaccagcacagcgccccttcagcaggccagcgctactggctccagattccttttcctgtcagggtatgggactgtggaagcctgggagtgtgytcagtgattctctctttgcctcttcaccctgccctcagcccatgggcatcatgtccatcctggaggaggagtgcatgttccccaaggccactgacatgac

SEQ ID NO: 13090 - DNA, 201 bp, Homo sapiens
atgataaactgcagctggaagaaaagcttaagaagtaggagactgtggtggccaggaggggctaatggaggtgtctggcctggtagatagagtgcagggtsctgcgcctccactggccacagttgccttgggtatgctgggaataaggtcaatcacagccctcttccgccactttctgggctggcgaggggagggggaggt

SEQ ID NO: 13091 - DNA, 201 bp, Homo sapiens
tgataaactgcagctggaagaaaagcttaagaagtaggagactgtggtggccaggaggggctaatggaggtgtctggcctggtagatagagtgcagggtgstgcgcctccactggccacagttgccttgggtatgctgggaataaggtcaatcacagccctcttccgccactttctgggctggcgaggggagggggaggtg

SEQ ID NO: 13092 - DNA, 201 bp, Homo sapiens
ccagtgcatgaaagtgggagctcaatagccctgaggtaactgaggctgcagcagctgcttagggttctacacaatatctggaactccaggcagcctcataracccaaccatccctgacttacaggcgctcaggaacactagccttcccccatagagcaagaatacattacgttagcaaaactgtttgagaagggggactca

SEQ ID NO: 13093 - DNA, 201 bp, Homo sapiens
aggcccatggcccaggctgcaagtaatgtatgaacacaattccactcctctggggctgcacagggactggcccgccttcattagtaatttgccctcccatsttcttggatgccccttctgggttttagctagaatatcgggccatcctcaggttcttctaccctaggtctgggcaacttgtttggcctcttggacacagaa

SEQ ID NO: 13094 - DNA, 201 bp, Homo sapiens
aagagagcataggctttggagccaaaggtctgactttccacttgctcagcaagtccttacacctctctgagccctagttccttcacctgtgaaacaggggractaatatccaccctgcagattactgggaggattaggtgagatcatatgagaggtatgagcaggaggcattctgtatgtgttcccctctgggccgaggtt

SEQ ID NO: 13095 - DNA, 201 bp, Homo sapiens
gaggcagacagatgaggggctggggaaggttatgtgtgaacaggactctggggagagggagggaagggatggctcccgagagggccaggaggtggaggaargagtaagtctcctccaactaaacaagttcagcccctttggagttcctgccacagctgggttgcttaggcaggcctgggactgtgggccacagaggtcagg

SEQ ID NO: 13096 - DNA, 201 bp, Homo sapiens
aaaaatctgcatgtgtggctgaagatgggcacagacacggtcaagtctgtatgtgagagtgctgaactggggttctgtgtgaaaatctgcctgaggcggcrgggagaatcactgccattgcgtgagcaggttggatgttggccactctatcaggagcattagggaaggggtggggactccagacgtgtccccaaaccaggg

SEQ ID NO: 13097 - DNA, 201 bp, Homo sapiens
gaagatgggcacagacacggtcaagtctgtatgtgagagtgctgaactggggttctgtgtgaaaatctgcctgaggcggcagggagaatcactgccattgygtgagcaggttggatgttggccactctatcaggagcattagggaaggggtggggactccagacgtgtccccaaaccagggtggcctcaagaccttgggag

SEQ ID NO: 13098 - DNA, 201 bp, Homo sapiens
ggcagggagaatcactgccattgcgtgagcaggttggatgttggccactctatcaggagcattagggaaggggtggggactccagacgtgtccccaaaccagggtggcctcaagaccttgggagaacacttgtctgaagacttggggaacagaaggagaccaggcatggcacttatgcagactgaggccaggacagaattt

SEQ ID NO: 13099 - DNA, 201 bp, Homo sapiens
gcagaactttgaaaacctttcctgagagaaaatgacaggacaccagcttccggcggccctaagcagcagctgctcttttcaaaatgtgcagaagtgcaggytttccccaaagccccccatcctgtcccgggatcctgctgctccagacagcacttcacaggggccaagcatctgggcatcctggcccttcatggcaagtgg

SEQ ID NO: 13100 - DNA, 201 bp, Homo sapiens
gcagggaggggcagcaaaggcaaggggagaagagtaaaatgatggaggagggaaaggtgattgcatttgctccccctccaaaccagcttctcccaccctcycacccccagacagaggaagacaaaaagaacctgctgcggctacaggacctggtggacaagctgcaactgaaggtcaaggcctacaagcgccaggccgagg

SEQ ID NO: 13101 - DNA, 201 bp, Homo sapiens
gcgtctagaggcccagacccggccctttgacattcgcactgagtgcttcgtgcccgatgacaaggaagagtttgtcaaagccaagattttgtcccgggagrgaggcaaggtcattgctgaaaccgagaatgggaaggtgagtagggcatggcgccggggcagaagggaaggaggtctgggaaagaagatgcagaggtggag

SEQ ID NO: 13102 - DNA, 201 bp, Homo sapiens
gcccgatgacaaggaagagtttgtcaaagccaagattttgtcccgggagggaggcaaggtcattgctgaaaccgagaatgggaaggtgagtagggcatggygccggggcagaagggaaggaggtctgggaaagaagatgcagaggtggagccacttgcagggggagctgagagggctggagaaaagccaaggccagtgggg

SEQ ID NO: 13103 - DNA, 201 bp, Homo sapiens
ccctgggggtaatgatttggcataagcacctgcagaagatggggatgtggggtcaactaaggtccctccaaggacattgagaaaaggtccaaatgctctgraaagagaggtgtgttcctgagcccaggaatggggtggcagcgtcctagggagctaggggagaggccacatcttaatggaaagtgctcctacccagagaag

SEQ ID NO: 13104 - DNA, 201 bp, Homo sapiens
ggagcccagaatctgatccctctcaaattgacctgagctggtgcaacaggtgccacccagggccatgttccccctgccagagaggatgctgaggaagaagracctcagtgttcgcctaagaggggtcttgtagataaagagggcacagacacagcattaaatgatgcccccttcttgcacttgtatccctcttccctgtgc

SEQ ID NO: 13105 - DNA, 201 bp, Homo sapiens
gagtaattcttagacccagatgaacacaaagatcagaaacttttgagctgagcactctccttgactggcactcagaagctctggtccctggtttgctcacrccagccaagagaatcacccctggttaccagctgcggctcagggctgtgtgcctcatgaactcgttgactgaatgttacaacccattgaagtgtagaataa

SEQ ID NO: 13106 - DNA, 201 bp, Homo sapiens
agagaggtgggagggagggtccctccggaaggactccaaatttagacagagggtgggggaaacgggatataaaggaactggagctttgaggacagatagasagactcctgcggcccaggtaagaggaggtttggggtgggatgccctgcagcccgtccacagagcccccaccgtgagggacctccttcaccaggagtgggg

SEQ ID NO: 13107 - DNA, 201 bp, Homo sapiens
ctgtcccaggctctccccaccaacctcatgcccagccttgtctcctgctccagacctactcgggcctcttctgtgtcactgtcaacccctacaagtggctrccggtgtacaatgccgaggtggtggccgcctaccggggcaagaagaggagtgaggccccgccccacatcttctccatctccgacaacgcctatcagtaca

SEQ ID NO: 13108 - DNA, 201 bp, Homo sapiens
ggtatgaaatcaggtaacaaagtgtagtatatatttgatcatttttctctctccatgtctagaacaccagcctcatcaaccagaagaagaagatggagtckgatctgacccagctccagtcggaagtggaggaggcagtgcaggagtgcagaaacgccgaggagaaggccaagaaggccatcacggatgtaagtgaccgcc

SEQ ID NO: 13109 - DNA, 201 bp, Homo sapiens
ctgctagtttccagttcccttccacctaattttgtcctgcaatcttgtaactcaaacctaaaatggacatcccagagaacccgggcctggctttgttctcrcccaggcaacttccctctgaccaaccccagaaccctaccctccagaacttgccccccgaacatcgatccctggaaacacatgtgctgctgccacaggggc

SEQ ID NO: 13110 - DNA, 201 bp, Homo sapiens
cacaacctcggcttgggccgagatccctagggccattcctctggctaggaacagacttggacagcaatgaagagataactagaaacaaaggagagaacccytgaaaagggagctatgcagagagacccagggcacctaagcaaccagagcaagagagaccgcaagagatacagatcctatgagaatggtcgggggctggat

SEQ ID NO: 13111 - DNA, 201 bp, Homo sapiens
gcacaacctcggcttgggccgagatccctagggccattcctctggctaggaacagacttggacagcaatgaagagataactagaaacaaaggagagaaccsttgaaaagggagctatgcagagagacccagggcacctaagcaaccagagcaagagagaccgcaagagatacagatcctatgagaatggtcgggggctgga

SEQ ID NO: 13112 - DNA, 201 bp, Homo sapiens
ggctgtcggccccactgggaacctgggaagcagtggttcagccctggactggatctcccccaacccaccaacatacccactcggagcccactcctgctctstacccagctctgagctcggagctctgaggactgcggcagccagagccaagggccctaagccggagaaggagaaaccagtactggacaatagcaggtgaca

SEQ ID NO: 13113 - DNA, 201 bp, Homo sapiens
gccaggacacctggtggaatggcccagcccagagacttctggctgcaccacctattctgatgcttgagtttgatgaggaaagaagctagggctacgtagtygttttttagtgtgtagattccacaaaagcctgaactcacgtcacaaattatgtggcagcccctgtccctttgatgattctggtggagagtgtctggggac

SEQ ID NO: 13114 - DNA, 201 bp, Homo sapiens
aatctggccataataataaccacttagacagtgggtaggagtgtggggttccagagtcaaacaggcctgagttggaacacagcttgaggactttcactgcrgcgttgggcaaaatctttaatctctctctgcctcagttttctcatctgtaaaatggaattaactgtacatacctcatatgattttacacatgattattat

SEQ ID NO: 13115 - DNA, 201 bp, Homo sapiens
tggctgcaccacctattctgatgcttgagtttgatgaggaaagaagctagggctacgtagtcgttttttagtgtgtagattccacaaaagcctgaactcaygtcacaaattatgtggcagcccctgtccctttgatgattctggtggagagtgtctggggaccagggtttaagggcctaagggatggtccttgtggctcct

SEQ ID NO: 13116 - DNA, 201 bp, Homo sapiens
ccgcatggctgccgaggcccagaagcaagtcaagagcctccagagcttgctgaaggtacatgggggcgggaggtcccctcaggggactggcctccatgtgscctggagaagcagtggtgtctggatacaggcaccagattcctcctgcccctgggttactgcagggacctctgacaggtgccctcagtgaagggcaccgag

SEQ ID NO: 13117 - DNA, 201 bp, Homo sapiens; identical to SEQ ID NO: 1668

SEQ ID NO: 13118 - DNA, 201 bp, Homo sapiens
tggcctggagaagcagtggtgtctggatacaggcaccagattcctcctgcccctgggttactgcagggacctctgacaggtgccctcagtgaagggcacckaggctggcttctgctcacacccactctcctgatgctcaggacacccagatccagctggacgatgcggtccgtgccaacgacgacctgaaggagaacatcg

SEQ ID NO: 13119 - DNA, 201 bp, Homo sapiens
gtgacagaggcagtcattgtccctgtcttcaggggaagccctcctccactgccctgacatggaggggacagccataccctgctgggctcggcacagtgcaygggcacagccccaatggccactcacacccactttctgactgctcccacccctcatgccccctgcagttcaacagctttgagcagctctgcatcaacttca

SEQ ID NO: 13120 - DNA, 201 bp, Homo sapiens
ctgcagggacctctgacaggtgccctcagtgaagggcaccgaggctggcttctgctcacacccactctcctgatgctcaggacacccagatccagctggaygatgcggtccgtgccaacgacgacctgaaggagaacatcgccatcgtggagcggcgcaacaacctgctgcaggctgagctggaggagctgcgtgccgtgg

SEQ ID NO: 13121 - DNA, 201 bp, Homo sapiens
cctggggaagggagaggacggtacagcggagcagacgggcagggcctggggctgagtgaacaccttccttcctcctccttccacaggagcgggggactacmccccaccacctccactccccgctgccctgccaccaccacctataccaagtgaggcctgctcagagcacagggttccctgaggacaaagcctggtctttgt

SEQ ID NO: 13122 - DNA, 201 bp, Homo sapiens
taaaagtgggcttgttgttttaaaaaaaaaatgaccacctttaattctttctggagaaagggtatgaaatcaggtaacaaagtgtagtatatatttgatcrtttttctctctccatgtctagaacaccagcctcatcaaccagaagaagaagatggagtcggatctgacccagctccagtcggaagtggaggaggcagtgc

SEQ ID NO: 13123 - DNA, 201 bp, Homo sapiens
agccctctcctcccctcccctagattatagcccatctcacaaccagggactgggagtctaggagtgccagctctttttaagaccctaggtctcctctcttyaaccatcagcttcctccctgttctcttctcccaggaacaagacaacctcaatgatgctgaggagcgctgcgaccagctgatcaaaaacaagattcagctg

SEQ ID NO: 13124 - DNA, 201 bp, Homo sapiens
ccactctcctgctcaaaacagccccccactgactggaacttctgcagagatccccagttccatccccctaaaccacaagtgcctctaacgtgggaccacargatccctggggccctgcctctccctccaagggcatctcccttaggcctctgaaagccccagggatttgtccccacacacttctccctcttgccagctgcc

SEQ ID NO: 13125 - DNA, 201 bp, Homo sapiens
gatccccagttccatccccctaaaccacaagtgcctctaacgtgggaccacaggatccctggggccctgcctctccctccaagggcatctcccttaggccyctgaaagccccagggatttgtccccacacacttctccctcttgccagctgccccctcacacctcttattctttttgcagcaaaaaatgcacgatgaggag

SEQ ID NO: 13126 - DNA, 201 bp, Homo sapiens
gctttgagctttctggccctctggtccccagaggaaatctcggaccttactgagcagctaggagaaggaggaaagaatgtgcatgagctggagaaggtcckcaaacagctggaggtggagaagctggagctgcagtcagccctggaggaggcagaggtgagggccgagaactccctgcaccccatccctgttctgccgctg

SEQ ID NO: 13127 - DNA, 201 bp, Homo sapiens
tccccagttccatccccctaaaccacaagtgcctctaacgtgggaccacaggatccctggggccctgcctctccctccaagggcatctcccttaggcctcwgaaagccccagggatttgtccccacacacttctccctcttgccagctgccccctcacacctcttattctttttgcagcaaaaaatgcacgatgaggagtg

SEQ ID NO: 13128 - DNA, 201 bp, Homo sapiens
gttctgctcagtcaaccacacaagggtggagagggagaaatttcaaaagtgaagaaaacaatggcatcaaaatggtgagccagtccaagatgctacgagayagaattttggtgccgaagttgaagccactctccacctaccccacccctgaggctgcaatgattaaaggtgtcctaggacacccattctttctgaaatgaa

SEQ ID NO: 13129 - DNA, 201 bp, Homo sapiens
tggcaggatggggaaacagacaggagcaagaaggcacttcgagaaacctgaaagtgaagcaggaggcttgcccacagggccccgggagagaaggcaggcgmtgggggccttgcccagatgggccctcacccagctgcccagagtgcctctgctgctgcctgcaccagccccctagagacccatggggaggggcagagagga

SEQ ID NO: 13130 - DNA, 201 bp, Homo sapiens
gaatgagatagaggacttgatggtggacgtagagcgctccaatgctgctgctgcagccctggacaagaagcagagaaactttgacaaggtggaccatgggygggggccgcagccagcatgcagggcaagggggcatgaggggttcagtgagaggccaaaggcaacctccttggaggtggaggaggagggctaagcccaggc

SEQ ID NO: 13131 - DNA, 201 bp, Homo sapiens
gggattgcagggagcatggggcactgagctctcattagaggggtgccagagcaatgaaccatgtcaggcaaatcctgctgggtgctgggctctgatggccrggctgggaaggggagcatgtgatgctgagccctgtatggagaacagtaggaatcctgagttttgattggtctctgtggcccccaggggagaatccggggc

SEQ ID NO: 13132 - DNA, 201 bp, Homo sapiens
gctgttttgccacacccagttgattgtactgtatctggctttgggatatcaacatgcacacgttggtgggaagagagcataggctttggagccaaaggtcygactttccacttgctcagcaagtccttacacctctctgagccctagttccttcacctgtgaaacagggggactaatatccaccctgcagattactgggag

SEQ ID NO: 13133 - DNA, 201 bp, Homo sapiens
cttatactcaactgagacaccaaagaggtcgtttacatttccagaaccatccagggcttctgggctgaacagagggccaggatttcactctgtccttcccrccagttccctcactctgtcccattcgtccccaggggaaattcattaggatccactttggggccactggaaagctggcttctgcagacatagagacctgtg

SEQ ID NO: 13134 - DNA, 201 bp, Homo sapiens
ggctaaccccccggctcgaattctggggcctcgagtaacctagagctggggacaggtggcctgcatcccctgggggtaatgatttggcataagcacctgcrgaagatggggatgtggggtcaactaaggtccctccaaggacattgagaaaaggtccaaatgctctggaaagagaggtgtgttcctgagcccaggaatggg

SEQ ID NO: 13135 - DNA, 201 bp, Homo sapiens
ccctcttcatcaagctgtgggtgccccctgccctctgcccccatggccacctttttctggctctactctctttccttcctcacctgccttcctcccctccrcccacctcagacctgctggagaagtcccgggtgatcttccagctgaaagctgagagaaactaccacatcttctaccagattctgtccaacaagaagccgg

SEQ ID NO: 13136 - DNA, 201 bp, Homo sapiens
tagcccctcagccacacccttgccctggagaggcgagggatatggtgaaggtggggatatgcccacagcagtgcttgtgaaagacctgacccagagatgcyacagatgtagagacagagctgagaagagccagttgtggcaagaggccatgggccggataagggggctgtgctccagcctgactcaggcacacgttggttg

SEQ ID NO: 13137 - DNA, 201 bp, Homo sapiens
agttcacccttcgggttaaaaataactgaggtaagggccatggcagggtgggagaggcggtgtgagaaggtcctgtcttcccactatctgctcatcagccytttgaaggggaggaatgtgcccaaggactaaaaaaaggccgtggagccagagaggctggggcagcagacctttcttgggcaaatcagggggccctgctgt

SEQ ID NO: 13138 - DNA, 201 bp, Homo sapiens
cccctgggagtgggagaacaatcactcgcttgctcctacattcaacagccatttgctgagagccagctgtggaccagacatgggaaggcagtggggactgygtggtgacagaggcagtcattgtccctgtcttcaggggaagccctcctccactgccctgacatggaggggacagccataccctgctgggctcggcacagt

SEQ ID NO: 13139 - DNA, 201 bp, Homo sapiens
tcatgtttcagagccctcagaatgccataaaactgtgtgtggaaaaaagcatgtgtacattcatacatacatgtgtgtgcttgtgcatgtgtgtgtgtgtrcgtgtgtgtgtgtacatgcgtttttctggagagacagtctttagcttcaacaaattcttaaaaggattcctgccccaagaaaaatcaagaaccaccaggt

SEQ ID NO: 13140 - DNA, 201 bp, Homo sapiens
gtaaaagcaaaggaggcaagaaaaagggctcatccttccagacggtgtcggctctccaccgggtaagaagggcccaggggtgccaggacacctggtggaayggcccagcccagagacttctggctgcaccacctattctgatgcttgagtttgatgaggaaagaagctagggctacgtagtcgttttttagtgtgtagatt

SEQ ID NO: 13141 - DNA, 201 bp, Homo sapiens
tcattgatagcaggaaggggacagagaagctgctcagctctctggacattgatcacaaccagtacaagtttggccacaccaaggtgagtctagagccccaytgggtggttgcagggcaggtggccatgttgagtggagcagagaggagtttaggaggcagaagcctaattctggcttccttatcaaccttatcaagggctg

SEQ ID NO: 13142 - DNA, 201 bp, Homo sapiens
ctcccctctgaggctgcggcctgttgcatctaccccttgcctgcaggtgttcttcaaggcagggctgcttgggctgctggaggagatgcgggatgagaggmtgagccgcatcatcacgcgcatgcaggcccaagcccggggccagctcatgcgcattgagttcaagaagatagtggaacgcaggtgagacaggaggaaaag

SEQ ID NO: 13143 - DNA, 201 bp, Homo sapiens
gccacagctgggttgcttaggcaggcctgggactgtgggccacagaggtcaggggcttgaaaggcactggggctgtcggccccactgggaacctgggaagsagtggttcagccctggactggatctcccccaacccaccaacatacccactcggagcccactcctgctctgtacccagctctgagctcggagctctgagga

SEQ ID NO: 13144 - DNA, 201 bp, Homo sapiens
agagggccaggaggtggaggaaagagtaagtctcctccaactaaacaagttcagcccctttggagttcctgccacagctgggttgcttaggcaggcctggkactgtgggccacagaggtcaggggcttgaaaggcactggggctgtcggccccactgggaacctgggaagcagtggttcagccctggactggatctccccc

SEQ ID NO: 13145 - DNA, 201 bp, Homo sapiens
ctccttgggaggaagcagaataaagcaattttccttgaagccgagatcctgactccagactcttcttcactgccctgaggacccggggatggggtctggamtaggggaggtggaaatgcaggggagtgggggcaaattcaaaggcctggcctaggaggccttcgtggagcagcactgaaaacccctttcacttcccccaaa

SEQ ID NO: 13146 - DNA, 201 bp, Homo sapiens
gcttgctcctacattcaacagccatttgctgagagccagctgtggaccagacatgggaaggcagtggggactgtgtggtgacagaggcagtcattgtcccygtcttcaggggaagccctcctccactgccctgacatggaggggacagccataccctgctgggctcggcacagtgcacgggcacagccccaatggccactc

SEQ ID NO: 13147 - DNA, 201 bp, Homo sapiens
caaaatggtgagccagtccaagatgctacgagatagaattttggtgccgaagttgaagccactctccacctaccccacccctgaggctgcaatgattaaakgtgtcctaggacacccattctttctgaaatgaattttccaccaatgccagaaaaggctcagagctggctgagaattaaggtatgggaaaggagatgggag

SEQ ID NO: 13148 - DNA, 201 bp, Homo sapiens
cagaggagaaagctggcgtctacaagctgacgggagccatcatgcactacgggaacatgaagttcaagcagaagcagcgggaggagcaggcggagccagasggcaccgaaggtgggaggggcaggcaggcagccctgggaaggcctgaggtgctgaccaggctctctgcgggactcagatcccagagactctgaggcttgt

SEQ ID NO: 13149 - DNA, 201 bp, Homo sapiens
gagtggctgccaccaaggaagcagagcgctctgaccagagttcaagatccagggttcgggcaggacttgggagctggggcctgcagctggaaggagcgctscagaagaaggattgtatctcagggcgggaacacacacacatcagcgacaggagatagcacgtcagctgggatggagctgctgagccaggccatgctgggc

SEQ ID NO: 13150 - DNA, 201 bp, Homo sapiens
cttcagaggagaaagctggcgtctacaagctgacgggagccatcatgcactacgggaacatgaagttcaagcagaagcagcgggaggagcaggcggagccmgacggcaccgaaggtgggaggggcaggcaggcagccctgggaaggcctgaggtgctgaccaggctctctgcgggactcagatcccagagactctgaggct

SEQ ID NO: 13151 - DNA, 201 bp, Homo sapiens
tgcatgagctggagaaggtccgcaaacagctggaggtggagaagctggagctgcagtcagccctggaggaggcagaggtgagggccgagaactccctgcaycccatccctgttctgccgctgtctcccacttctccctcacctgggggtgaccctgaccccaggacaaaatctattcattccatattctttgttcaacatt

SEQ ID NO: 13152 - DNA, 201 bp, Homo sapiens
cattgtccctgtcttcaggggaagccctcctccactgccctgacatggaggggacagccataccctgctgggctcggcacagtgcacgggcacagccccartggccactcacacccactttctgactgctcccacccctcatgccccctgcagttcaacagctttgagcagctctgcatcaacttcaccaacgagaagctg

SEQ ID NO: 13153 - DNA, 201 bp, Homo sapiens
agcgggtgaagcagaagctggagaaggagaagagcgagttcaagctggagctggatgacgtcacctccaacatggagcagatcatcaaggccaaggcaggstctgctcggcctcccctcgccctctcccctgcacagcggagcctcccccatgccttctctctctgtctgccatctcccttgtcattctcattctcttcat

SEQ ID NO: 13154 - DNA, 201 bp, Homo sapiens
ggccgagcagaagcgcaacgcagagtcggtgaagggcatgaggaagagcgagcggcgcatcaaggagctcacctaccaggtgcggcggacgccagacaccrggagtagatgtggaagtttcttctctggccccactgccccgccctcacagggctcctctcacctcctccttgagatgctgttggtagatttaacgttctt

SEQ ID NO: 13155 - DNA, 201 bp, Homo sapiens
gctggtagtactgggtggcatagaggaagaggaaggcaagtgtgatgaagaactccagtagcgccgcggccatgtaggcagagatggaggccgtgaagcaratgaagatgatgagggtcagggcctgcaggaccgagcatgtggaacatgccaagaaggggacacaggcaggggccagggctttgccttcccctccttgga

SEQ ID NO: 13156 - DNA, 201 bp, Homo sapiens
tccactcctgagtacattcctacagagaaactcttatacatgtacaccatgacatgaaaaataatcttttagcagcattggtcataatagcaaagatcttraaacaacttgaatttccatccacaggggaatgggtaaatagtattacagtcattcagtggaatattataaaacagtgaaaagatgtgaactccaactaca

SEQ ID NO: 13157 - DNA, 201 bp, Homo sapiens
gtggcttctgatacagaaagtgtgcaagcaccagcctgagctcttgaggggctaaggagtcctgcagggctgaactcacaaaagcagcaatggcagctccrtcccgggaggtcacagctgcaaaggagaccaccaggaagatgatgatggcactgacacagcgcaggaagtcctgggggccaggggtgcagggttaacagg

SEQ ID NO: 13158 - DNA, 201 bp, Homo sapiens
agagaggctggggcagcagacctttcttgggcaaatcagggggccctgctgtcctcctgtcacctccagagccaaaggatcaaaggaggaggagccaggargggagagaggtgggagggagggtccctccggaaggactccaaatttagacagagggtgggggaaacgggatataaaggaactggagctttgaggacagat

SEQ ID NO: 13159 - DNA, 201 bp, Homo sapiens
atcttaaaacaacttgaatttccatccacaggggaatgggtaaatagtattacagtcattcagtggaatattataaaacagtgaaaagatgtgaactccarctacatgatacaatatgtttgaacattaaagcatattgttagtaaacaaaggcaaatcttggaaggatacatacagtatgatgcaatttttataaagctc

SEQ ID NO: 13160 - DNA, 201 bp, Homo sapiens
tctccctcctctgatacctcaggctgccctctccctgcgtcctgtgggccaagtcttccccacaccacaagggggagctctgcacacgccccaggcgagcscctggcctccagcccactaacctgcgggaacaggtgtggtggtgcatgcatgctcccatgaggaaggctgtgccttctcagacacagaactccagatgcc

SEQ ID NO: 13161 - DNA, 201 bp, Homo sapiens
gaggaaggaaggctacctgtcactcccccacccccacccttctcctgcaggaaggagtttgacattaatcagcagaacagtaagattgaggatgagcaggygctggcccttcaactacagaagaaactgaaggaaaaccaggtgactttttttcccagtgcatgaaagtgggagctcaatagccctgaggtaactgaggct

SEQ ID NO: 13162 - DNA, 201 bp, Homo sapiens
tgcagtggcacaacctcggcttgggccgagatccctagggccattcctctggctaggaacagacttggacagcaatgaagagataactagaaacaaaggaragaacccttgaaaagggagctatgcagagagacccagggcacctaagcaaccagagcaagagagaccgcaagagatacagatcctatgagaatggtcggg

SEQ ID NO: 13163 - DNA, 201 bp, Homo sapiens
cttcattagtaatttgccctcccatcttcttggatgccccttctgggttttagctagaatatcgggccatcctcaggttcttctaccctaggtctgggcawcttgtttggcctcttggacacagaataacagtcctgttagtctcatcagctctcggcaataggctatggctcctccttcatccccaagatcttgctcaga

SEQ ID NO: 13164 - DNA, 201 bp, Homo sapiens
ggattccagtggaggggtccaggcggtgggtctgagccctttgtgtctgacccaggcacgcatcgaggagctggaggaggagctggaggccgagcgcaccrccagggctaaggtggagaagctgcgctcagacctgtctcgggagctggaggagatcagcgagcggctggaagaggccggcggggccacgtccgtgcagat

SEQ ID NO: 13165 - DNA, 201 bp, Homo sapiens
acgttggttgagtaaccaaggcaagccctgtgctcttccaggccttgatttcttcctctttaaggaaaagaaattggacctgatgcttcctaaagtcttgkccccaggacagggaaggaggctcactccctgaaagtgttcactcaggccaggtgcagtggctcatgcctgtaatcccagcactttgggaggccaaggcag

SEQ ID NO: 13166 - DNA, 201 bp, Homo sapiens
ccttcaagcgggagaacaagaaccttcagggtgtgctgggggtccaagaggccagagatgagttggtgggagggagggccatgcaggggcagggggaacayaggctttgagctttctggccctctggtccccagaggaaatctcggaccttactgagcagctaggagaaggaggaaagaatgtgcatgagctggagaaggt

SEQ ID NO: 13167 - DNA, 201 bp, Homo sapiens
tggcctggtagatagagtgcagggtgctgcgcctccactggccacagttgccttgggtatgctgggaataaggtcaatcacagccctcttccgccactttytgggctggcgaggggagggggaggtgccgattctggcatactaaggccaagaagagaatgagccccagaggaaggaaggctacctgtcactcccccaccc

SEQ ID NO: 13168 - DNA, 201 bp, Homo sapiens
agaggaccctagaatgctctaaaacctccacttgcatagctgagagctgtgcccttggcccgttattttcagtgtacctgggaagaaaaggccaaggagaygagggtgtcagtccatttgatagatggataccagaggcacaagaaagaggttacagatacagaaccacagagtgatttgtggacagaagtagaaatggca

SEQ ID NO: 13169 - DNA, 201 bp, Homo sapiens
tcaaaagactagtaactacactagaatgcacccaaagtagatgctcactgagtgatgagtaaacaaacaaataaaaccaggggctctttcttctccagcamgggggaaatatctagaaagtgcctgtgctgggccagggtagcaggggatgggaaaagaggaagagacaggagtggtggcctccagaaatgggcagaactt

SEQ ID NO: 13170 - DNA, 201 bp, Homo sapiens
tgcctgcaggtgttcttcaaggcagggctgcttgggctgctggaggagatgcgggatgagaggctgagccgcatcatcacgcgcatgcaggcccaagcccrgggccagctcatgcgcattgagttcaagaagatagtggaacgcaggtgagacaggaggaaaagggaggcatgcactagagatgtagaggcagatccgcaa

SEQ ID NO: 13171 - DNA, 201 bp, Homo sapiens
gctctttcttctccagcaagggggaaatatctagaaagtgcctgtgctgggccagggtagcaggggatgggaaaagaggaagagacaggagtggtggcctmcagaaatgggcagaactttgaaaacctttcctgagagaaaatgacaggacaccagcttccggcggccctaagcagcagctgctcttttcaaaatgtgcag

SEQ ID NO: 13172 - DNA, 201 bp, Homo sapiens
gatatcaacatgcacacgttggtgggaagagagcataggctttggagccaaaggtctgactttccacttgctcagcaagtccttacacctctctgagcccyagttccttcacctgtgaaacagggggactaatatccaccctgcagattactgggaggattaggtgagatcatatgagaggtatgagcaggaggcattctg

SEQ ID NO: 13173 - DNA, 201 bp, Homo sapiens
gagtgccatcctcccacagaagggactgggctgggggcatacacgctgatgcctagggtgtagttgggaggagaggtttaaggctgggattgcagggagcmtggggcactgagctctcattagaggggtgccagagcaatgaaccatgtcaggcaaatcctgctgggtgctgggctctgatggccaggctgggaaggggag

SEQ ID NO: 13174 - DNA, 201 bp, Homo sapiens
agacctccctggatgcagagacacgcagccgcaacgaggtcctgagggtgaagaagaagatggaaggagacctcaatgagatggagatccagctcagccaygccaaccgcatggctgccgaggcccagaagcaagtcaagagcctccagagcttgctgaaggtacatgggggcgggaggtcccctcaggggactggcctcc

SEQ ID NO: 13175 - DNA, 201 bp, Homo sapiens; identical to SEQ ID NO: 1643

SEQ ID NO: 13176 - DNA, 201 bp, Homo sapiens
tcaccaaggggcagagcgtgcagcaggtgtactactccatcggggctctggccaaggcagtgtatgagaagatgttcaactggatggtgacgcgcatcaaygccaccctggagaccaagcagccacgccagtacttcataggagtcctggacatcgctggcttcgagatcttcgacgtgagttgggacccctgggagtggg

SEQ ID NO: 13177 - DNA, 201 bp, Homo sapiens
ctgggggtccaagaggccagagatgagttggtgggagggagggccatgcaggggcagggggaacacaggctttgagctttctggccctctggtccccagargaaatctcggaccttactgagcagctaggagaaggaggaaagaatgtgcatgagctggagaaggtccgcaaacagctggaggtggagaagctggagctgc

SEQ ID NO: 13178 - DNA, 201 bp, Homo sapiens
tggagcctgtgtaacagctccttgggaggaagcagaataaagcaattttccttgaagccgagatcctgactccagactcttcttcactgccctgaggaccyggggatggggtctggactaggggaggtggaaatgcaggggagtgggggcaaattcaaaggcctggcctaggaggccttcgtggagcagcactgaaaaccc

SEQ ID NO: 13179 - DNA, 201 bp, Homo sapiens
gctccttgggaggaagcagaataaagcaattttccttgaagccgagatcctgactccagactcttcttcactgccctgaggacccggggatggggtctggmctaggggaggtggaaatgcaggggagtgggggcaaattcaaaggcctggcctaggaggccttcgtggagcagcactgaaaacccctttcacttcccccaa

SEQ ID NO: 13180 - DNA, 201 bp, Homo sapiens
tgatagagctctattctcctctaacccttcctctggtagttcagccctctgaacgcagggtgaaaaaaaaaaaaggcttcaaggagcaccttcctgtgagstgctctgttcatattcttcccggtactaaccccagccactaacccaggctgagtccccatagggcactcatgataagagccaattccaacaactgtgagc

SEQ ID NO: 13181 - DNA, 201 bp, Homo sapiens
aaatggacatcccagagaacccgggcctggctttgttctcgcccaggcaacttccctctgaccaaccccagaaccctaccctccagaacttgccccccgamcatcgatccctggaaacacatgtgctgctgccacaggggcttccacctgcccacaaagcaggccccccaccatcagacccctctcacctttgttcccatg

SEQ ID NO: 13182 - DNA, 201 bp, Homo sapiens
gatagagctctattctcctctaacccttcctctggtagttcagccctctgaacgcagggtgaaaaaaaaaaaaggcttcaaggagcaccttcctgtgagckgctctgttcatattcttcccggtactaaccccagccactaacccaggctgagtccccatagggcactcatgataagagccaattccaacaactgtgagca

SEQ ID NO: 13183 - DNA, 201 bp, Homo sapiens
tctagaacaccagcctcatcaaccagaagaagaagatggagtcggatctgacccagctccagtcggaagtggaggaggcagtgcaggagtgcagaaacgcygaggagaaggccaagaaggccatcacggatgtaagtgaccgcccaccttccgcctcccctaaagacagaaacaaggccttgggtccaggccaggccactg

SEQ ID NO: 13184 - DNA, 201 bp, Homo sapiens
aaccacttagacagtgggtaggagtgtggggttccagagtcaaacaggcctgagttggaacacagcttgaggactttcactgcggcgttgggcaaaatctktaatctctctctgcctcagttttctcatctgtaaaatggaattaactgtacatacctcatatgattttacacatgattattataaagattaaatgaggta

SEQ ID NO: 13185 - DNA, 201 bp, Homo sapiens
tcttctcagctcttcttctctgggcgatagtcctggctgacaccgtgtatcttctcatcctccctctcaaccctgccctgtgccctgtctgcccgccctcrccccaccccttcccaggcctccctggagcacgaggagggcaagatcctccgggcccagctagagttcaaccagatcaaggcagagatcgagcggaagctg

SEQ ID NO: 13186 - DNA, 201 bp, Homo sapiens
gtgtccccaggatggtctggggatctggcaagagaaaggtaccctaggacagtctctaggatgggagatacaatgggaagggaaattacctggggaaagtstcccaggggacatcggggtaggggccggggcactggtcagagcaaggggagcaaggccaagtccctgtgtcctgggaggaggtcagtgggcagtgctggc

SEQ ID NO: 13187 - DNA, 201 bp, Homo sapiens
cagagacacgcagccgcaacgaggtcctgagggtgaagaagaagatggaaggagacctcaatgagatggagatccagctcagccacgccaaccgcatggcygccgaggcccagaagcaagtcaagagcctccagagcttgctgaaggtacatgggggcgggaggtcccctcaggggactggcctccatgtggcctggagaa

SEQ ID NO: 13188 - DNA, 201 bp, Homo sapiens
ttagtaatcttagatacaatgtctagaatgtatgcactttcataggaaaagggaaagcaggtacaaaacgatcaatagtctaaaagtgggcttgttgtttwaaaaaaaaaatgaccacctttaattctttctggagaaagggtatgaaatcaggtaacaaagtgtagtatatatttgatcatttttctctctccatgtcta

SEQ ID NO: 13189 - DNA, 201 bp, Homo sapiens
tgtatgcactttcataggaaaagggaaagcaggtacaaaacgatcaatagtctaaaagtgggcttgttgttttaaaaaaaaaatgaccacctttaattctytctggagaaagggtatgaaatcaggtaacaaagtgtagtatatatttgatcatttttctctctccatgtctagaacaccagcctcatcaaccagaagaag

SEQ ID NO: 13190 - DNA, 201 bp, Homo sapiens
tgacttcagccttcattgctctgtggatccctgactgacaaccttgcattgcccctttgacctacgatagagtcagagaatcttccccaccacctctttgmcctggatcattgcagggaggggcagcaaaggcaaggggagaagagtaaaatgatggaggagggaaaggtgattgcatttgctccccctccaaaccagctt

SEQ ID NO: 13191 - DNA, 201 bp, Homo sapiens
ggggcagtggatggccgtgaaggactctgagtgctggacatgtttgagaagagtgcaaggcagttgcaggatacccttgggaaggctgttgcaggaatatkcatgaggcatgggtgcctcagggacagggagctggaacctcaggttgagaggctgagaatcccatagcccatctccagctcattcacccatccccactgt

SEQ ID NO: 13192 - DNA, 201 bp, Homo sapiens
ggatggccgtgaaggactctgagtgctggacatgtttgagaagagtgcaaggcagttgcaggatacccttgggaaggctgttgcaggaatatgcatgaggyatgggtgcctcagggacagggagctggaacctcaggttgagaggctgagaatcccatagcccatctccagctcattcacccatccccactgtcccaccac

SEQ ID NO: 13193 - DNA, 201 bp, Homo sapiens
tcatggatagtcattttgctttcatgctgcataacttacatacttattatagacattcttatatgtaaacccctacataatttttaacatatttgaagttmttatgagaatagaaaaaccaaacagagtagacattctataagtggtagtttccattaccactaatatcccagctgggaggatataaactgccctttcatc

SEQ ID NO: 13194 - DNA, 201 bp, Homo sapiens
cccgacccagactgacctggcgttctcagctccttatcatgtccccagagctatgggaaccaagcagtgacgcactggccatgggctaaccccccggctcraattctggggcctcgagtaacctagagctggggacaggtggcctgcatcccctgggggtaatgatttggcataagcacctgcagaagatggggatgtggg

SEQ ID NO: 13195 - DNA, 201 bp, Homo sapiens
taggaaaacagtttatcactatcttttaaagttgaacagctgcaggccaggcgcggtggctcatgcctgaaatcccagcactttgggaggccgaggcgggyggatcacgaggtcaggagatcaaaaccatcctggctaacatggtgaaaccccatctctactaaaaaaatacaaaaaattagccgggtgtggtggcagatg

SEQ ID NO: 13196 - DNA, 201 bp, Homo sapiens
acttcagaggagaaagctggcgtctacaagctgacgggagccatcatgcactacgggaacatgaagttcaagcagaagcagcgggaggagcaggcggagcmagacggcaccgaaggtgggaggggcaggcaggcagccctgggaaggcctgaggtgctgaccaggctctctgcgggactcagatcccagagactctgaggc

SEQ ID NO: 13197 - DNA, 201 bp, Homo sapiens
cctcttcatcaagctgtgggtgccccctgccctctgcccccatggccacctttttctggctctactctctttccttcctcacctgccttcctcccctccgsccacctcagacctgctggagaagtcccgggtgatcttccagctgaaagctgagagaaactaccacatcttctaccagattctgtccaacaagaagccgga

SEQ ID NO: 13198 - DNA, 201 bp, Homo sapiens; identical to SEQ ID NO: 1653

SEQ ID NO: 13199 - DNA, 201 bp, Homo sapiens
ctgaaacctgctgtaaatgtctccgggtggagaggcagcaagaaggcagagtaggagacgaagaaggggcagctgcgggcaggagaggtgtccagagggcytggggaaggaggctactgaagggtgagctgggggctggcataaggctggccaggagccgggggtcagggagatggaggcaccaggttgggaggcagctgt

SEQ ID NO: 13200 - DNA, 201 bp, Homo sapiens
taaatgtctccgggtggagaggcagcaagaaggcagagtaggagacgaagaaggggcagctgcgggcaggagaggtgtccagagggcttggggaaggaggmtactgaagggtgagctgggggctggcataaggctggccaggagccgggggtcagggagatggaggcaccaggttgggaggcagctgttaccagctcggtt

SEQ ID NO: 13201 - DNA, 201 bp, Homo sapiens
aatgcctcaatgggcctctgtctctccagcatgccgggagcgcggcctagcccccaccctggtgtttgggatgggccagggagacagagatgggagaggaygggagggtgcagcggaaactctggagggcggagagagctggcagggtggacagaggtgagggccaatggtggaaaggagaagggacaggctgggagaccg

SEQ ID NO: 13202 - DNA, 201 bp, Homo sapiens
atgcaggggagtgggggcaaattcaaaggcctggcctaggaggccttcgtggagcagcactgaaaacccctttcacttcccccaaaccagccaaatgcagyagaggcgacacctctcctcccagccttctccctggtccagccaggatttaaaggagatttagggagacccctaaagttcacctagagcaccctgagccca

SEQ ID NO: 13203 - DNA, 201 bp, Homo sapiens
atgaaatcaggtaacaaagtgtagtatatatttgatcatttttctctctccatgtctagaacaccagcctcatcaaccagaagaagaagatggagtcggayctgacccagctccagtcggaagtggaggaggcagtgcaggagtgcagaaacgccgaggagaaggccaagaaggccatcacggatgtaagtgaccgcccac

SEQ ID NO: 13204 - DNA, 201 bp, Homo sapiens
tgcaggcaaatcatttagtcatttagagccacggatttctccactataaaaaacactggaatacctactggcaggatctaatgacatcagggcatggcaarctgactgctgccaatcaaaccacaccaacagtgatggatggggagtgtggagtagatgggtgaactacttttccagcaggggtgaaggtttgccctgagc

SEQ ID NO: 13205 - DNA, 201 bp, Homo sapiens
cgacaagattgaggacatggccatgctgaccttcctgcacgagcccgcggtgcttttcaacctcaaggagcgctacgcggcctggatgatatatgtgagtrgctcctgcacactgcagaggcttcctgtgctgcgtggaggcctaaataagccaggggggctctcccaagaagagggggagagactcccaagggacccaag

SEQ ID NO: 13206 - DNA, 201 bp, Homo sapiens
acagatacaaaaattagcctggcatggtggctcatgtctgtagtcccagctacttgggaggctgaggcaggaaaatcacttgaacccaggaggtggaggcygtagtgagccaagatcgtgccactgcactcaagcctgggtgacagagcaagcctctatcttaaaaaaaaaaaaaggaagtgctcacttatcctttccctc

SEQ ID NO: 13207 - DNA, 201 bp, Homo sapiens
gatggtgacgcgcatcaacgccaccctggagaccaagcagccacgccagtacttcataggagtcctggacatcgctggcttcgagatcttcgacgtgagtwgggacccctgggagtgggagaacaatcactcgcttgctcctacattcaacagccatttgctgagagccagctgtggaccagacatgggaaggcagtgggg

SEQ ID NO: 13208 - DNA, 201 bp, Homo sapiens
tgggtcagaagacctgggttcagacctaccagctggcctgggcaagttactttaccacttcgaatctcattgcaaattcttcttcttcttcttcttcttctttttttttttttaaagaaacttctctataggaaaatgcaaattaagacaccaatgaaataccattttaaaacactagactttgcttgctcagatggtcta

SEQ ID NO: 13209 - DNA, 201 bp, Homo sapiens
gggtcagaagacctgggttcagacctaccagctggcctgggcaagttactttaccacttcgaatctcattgcaaattcttcttcttcttcttcttcttctttttttttttttaaagaaacttctctataggaaaatgcaaattaagacaccaatgaaataccattttaaaacactagactttgcttgctcagatggtctac

SEQ ID NO: 13210 - DNA, 201 bp, Homo sapiens
gtggcagtggacaaagagattgagcaaccacaggacaaggtaaccagaggaaacagagacaaggaaaaaagatgcaggaaatgaggaggccccagaaagayccgcaggcgccgccacctttctcctcatagccacctccattctccttccctaggccaacccagacagagctccctcaaaccagggatgcttccttttcat

SEQ ID NO: 13211 - DNA, 201 bp, Homo sapiens
gacccagggcacctaagcaaccagagcaagagagaccgcaagagatacagatcctatgagaatggtcgggggctggatgcagacagcagggttgagagagstctgagagccaagccagggagaaggaggggtgctgagggggatggggagagaggaaaagagagggagccttggagggagaagcttgaagagctgcgggtg

SEQ ID NO: 13212 - DNA, 201 bp, Homo sapiens
aacagcctgctgaagacctgacacctacagcctctgagagatggcagcattggaggatggggagcggggccttgagggcctagggtgcttgaggacacccrcaaagaagggaatgtgagtataagccctggagggcttggaaaggggcaacaaaattctgcctggggagggggcaggtggcagagccccaccccgatggaa

SEQ ID NO: 13213 - DNA, 201 bp, Homo sapiens
ggccaggacagaatttcctgacaaaagaaaactgagccatggagatggacaacagatcccttccctgggcaccatactgcagcttttagtccctagcactkggggctccagtactaacagcaggaagatgctcccagcctgggactgtgtgagggaggtcagaatgggaaggagaggctggggaacaggggaggaaagccc

SEQ ID NO: 13214 - DNA, 201 bp, Homo sapiens
tcccttccctgggcaccatactgcagcttttagtccctagcactgggggctccagtactaacagcaggaagatgctcccagcctgggactgtgtgagggakgtcagaatgggaaggagaggctggggaacaggggaggaaagcccatggttgggaggcggaggacaggcatttggcctgcaggagaaggtgaccctcaccc

SEQ ID NO: 13215 - DNA, 201 bp, Homo sapiens
gaacatcgatccctggaaacacatgtgctgctgccacaggggcttccacctgcccacaaagcaggccccccaccatcagacccctctcacctttgttcccrtgccctgtccctgcccaataccatctctccaaggactgattggactttgtttcctttcaaaagggcttgaatgaggagtagctttgccacatcttgatct

SEQ ID NO: 13216 - DNA, 201 bp, Homo sapiens
ggcaccatactgcagcttttagtccctagcactgggggctccagtactaacagcaggaagatgctcccagcctgggactgtgtgagggaggtcagaatggraaggagaggctggggaacaggggaggaaagcccatggttgggaggcggaggacaggcatttggcctgcaggagaaggtgaccctcacccatgttttcagt

SEQ ID NO: 13217 - DNA, 201 bp, Homo sapiens
gggaacaggggaggaaagcccatggttgggaggcggaggacaggcatttggcctgcaggagaaggtgaccctcacccatgttttcagttcacccttcgggktaaaaataactgaggtaagggccatggcagggtgggagaggcggtgtgagaaggtcctgtcttcccactatctgctcatcagccctttgaaggggaggaa

SEQ ID NO: 13218 - DNA, 201 bp, Homo sapiens
tctgaccaaccccagaaccctaccctccagaacttgccccccgaacatcgatccctggaaacacatgtgctgctgccacaggggcttccacctgcccacamagcaggccccccaccatcagacccctctcacctttgttcccatgccctgtccctgcccaataccatctctccaaggactgattggactttgtttcctttc

SEQ ID NO: 13219 - DNA, 201 bp, Homo sapiens
ggaacaggggaggaaagcccatggttgggaggcggaggacaggcatttggcctgcaggagaaggtgaccctcacccatgttttcagttcacccttcgggtkaaaaataactgaggtaagggccatggcagggtgggagaggcggtgtgagaaggtcctgtcttcccactatctgctcatcagccctttgaaggggaggaat

SEQ ID NO: 13220 - DNA, 201 bp, Homo sapiens
ggttgtatggccccatcaccggggcaattcagaaaggctgtttctataaacaaatccttaaacgtctggtaagaaatgagtccgcgacggaacgagagcakatcgtggttcgcgtgtttactgccgagtgggacgcggactggggccggaccttccacagatctgggctctcctgctctttgttttctaaactttcagcgg

SEQ ID NO: 13221 - DNA, 201 bp, Homo sapiens
aaatgcatacttttttggtgtgatcagagatgggtaactccttattacttgtgggttagattagtttttggaaatagcctggagtcattgagagccaatcyttatcaacaaaatggcataaatggacaggaatgggtttcttcttcactttagagatagctctgaagacatgtctcagttgggattagttcagttgcatat

SEQ ID NO: 13222 - DNA, 201 bp, Homo sapiens
ctatacttaaattgtggtgaaatacgtatgacataaaacttaccatcttaacttttttttattgagacaggatctcattctgtcacccaggctggagtgcrgtggcgcgatctctgctcactgcaacctctgcctcctgggttcaggcgattctcatgcctcagccacccgagtagctggaattacacgcgcccgccacca

SEQ ID NO: 13223 - DNA, 201 bp, Homo sapiens
ttagaagacacgggagaaataatccattttgttatgttatgcagttgaactgtatagcttctctagttttgtgtttttaatgttctgaaattcaaaacagyagggatggccttcgccgacgcaggagtcgggcattttaaaataggctgtttttcttttggagcgttcttcttgaaggatattctttgtgcaagacggcga

SEQ ID NO: 13224 - DNA, 201 bp, Homo sapiens
gtagtcctagctactccgaggcaggagaattgcttgaacctgggaggcagaggttgcagtgagccaagatcacactacttcattccatcctgggagacagmgtctcactctgtctccaaaaaaaaaaaaaaaaaagagaagttcgttataacaaatgccatatgcccttttgtacatgtcaactggacttctataaatttg

SEQ ID NO: 13225 - DNA, 201 bp, Homo sapiens
gttcagtttttagccgggaaggtgctagaccacttaactctgatagaaataagctgctgagccctatcagggagggcgttctttcagctgttgtctggtgragaaataaagacagggtgttggttcagttgcaggtattttgctggcgtattgagagattagagtttcctctttgagtgtgatggcagtagaaagagtgtt

SEQ ID NO: 13226 - DNA, 201 bp, Homo sapiens
ccgcctccgggttcacaccattcccctgcctcagcctcccgagtagccgggactacaggcgctcaccaccacgcccgactaatttttttgtatttttagtrgagacggggtttcaccatgttagccagtatggtctcgatcatctgacctcgtgatctgcctgcctcggcctctgaaagtgctgggattacaggtgtgagc

SEQ ID NO: 13227 - DNA, 201 bp, Homo sapiens
tttttagccgggaaggtgctagaccacttaactctgatagaaataagctgctgagccctatcagggagggcgttctttcagctgttgtctggtggagaaawaaagacagggtgttggttcagttgcaggtattttgctggcgtattgagagattagagtttcctctttgagtgtgatggcagtagaaagagtgttgtttat

SEQ ID NO: 13228 - DNA, 201 bp, Homo sapiens
cctcagcctcccgagtagccgggactacaggcgctcaccaccacgcccgactaatttttttgtatttttagtagagacggggtttcaccatgttagccagkatggtctcgatcatctgacctcgtgatctgcctgcctcggcctctgaaagtgctgggattacaggtgtgagccaccgtgcctggcctgatgggtgaatat

SEQ ID NO: 13229 - DNA, 201 bp, Homo sapiens
ctaaggttgaatagatgaagcttaaaaatatcacaaaaagtgaaagaagtcagtcacaaaagaccacatatcgtatgatccggtttatgtgaaatgtctaraataaacaaatccatagaggcagaaggtagatgagtggttgccaggggctgggggcggatggaatggggagtgactgctggtgggcacagggtttctttt

SEQ ID NO: 13230 - DNA, 201 bp, Homo sapiens
ttttagtacagacgaggttttgctatgttgctcaggttggactcaagcgatccactcacctcggcctcccggagggctgggatcacaggtgcgagccaccrcccccagcctacaagaatttgtaaactcatagattgctcttctgttttcactggaccacaacagaaagtagtttcttttatggtgagggatgaacaccta

SEQ ID NO: 13231 - DNA, 201 bp, Homo sapiens
tgattaggctttttgcacattgaggtgaataaaaaaaattagaactcctggaagggtaatttgtgagtctggccttgtgtcaagatcacctcatccctgtrgatggagactttgttccataagttccctatagataagatgtaatgaataattcattggcaccgatttatgtctgtagtgtgcttttaaaccctcctggag

SEQ ID NO: 13232 - DNA, 201 bp, Homo sapiens
attttcccatcaaatgttcttccaggaaaagagaaccttttctaatgattttaacaacagccaaaataatttttcgatggtacagaccttcccctggctgkcttttctggtatacagatactgctgctggtgcatacttttccaaacgcgatgcgctagccttcccaatcaaataagcctttttatttccaatgaagtaaa

SEQ ID NO: 13233 - DNA, 201 bp, Homo sapiens
ttgccagaatctcagaaagaatctctggactctggctcaggacctctgaggtgattatgcatctagaggcatccccaggtgctgcccaatttggggaagcrgcacttcccgctggaagctgggaagtttcccctggctgggggtcctgtgaggatggagaggccagaatgaggaatgggttgtgagtcaagaccaaccaga

SEQ ID NO: 13234 - DNA, 201 bp, Homo sapiens
ttggccttggatctgtcttcattaatatttctttctttctttttttttttaatcaaagtttttagcagttcagtgaatatgtcaaaacttgtgggactgtrtggggtgccccaaggaaacacaggctttagagatgaatgtggccagcgcagtaatcaatttatttaattgcttgagatgttatgctagaatgaaaacagc

SEQ ID NO: 13235 - DNA, 201 bp, Homo sapiens
gcaaacaaagttgaatcatgaagtgatgtcactctgaaccaattggagcagtggtgtcatgtgcctggcagctacttcaaatgcccacaaaacaggagtamtggtttaagctgtttccctcttcccctcccaccaccaatcagcagcagactgctagaggacagatgcaaaacagttattagaccaggcttagttagacat

SEQ ID NO: 13236 - DNA, 201 bp, Homo sapiens
gtgggcacagggtttctttttggggtgatgaaaattgttctaaaattagtttgtggcgatggctgcatagctctaaatatacttaaaaccattggattatrtactttaaatcggggactttaatggtatgtgaattatatctcaataaaccctttttttttttttttaaagaaatgtgatcaggttgaaaataacttgtta

SEQ ID NO: 13237 - DNA, 201 bp, Homo sapiens
gaatccgcaggatttctccttttgtgactgccttatttcacttagcataatgtcctcaagctccatccaggttgttgcatgtgagaggatttccttcctgkgcatgaactagagtgatgcagggactgacctctggccatgtgatgggtggttggtgatggatccaagaggtagctggtctctgaatactagcccagtcct

SEQ ID NO: 13238 - DNA, 201 bp, Homo sapiens
cctaggacctcaaggttgtgtctaagacataatttacagttctcgtgtaggtcttccaaatacttagctacacagctttggggcgttttctcagccaaatrcttttctttagcccttctcatattaacatttagttcttagggatttattttcaaaatatatatagcttgtatatgccattcacctaagttgttagagcag

SEQ ID NO: 13239 - DNA, 201 bp, Homo sapiens
caagtgattcttgggcctcagccacccaagtagctgggattacaggcgtgcaccaccacgcctggctaatttttgtatttttagtagagatggggtttcaractcttggcctcaagcgatctacctgccttgggctaccagagtgctgggactgcaggcatgaaccactgtgcctgacttttaaggctttctttaaaatgg

SEQ ID NO: 13240 - DNA, 201 bp, Homo sapiens
gggggagggagaaggcccagggttgaccccccacaagcttgtctccctgtctcatgctgtctcctatcccatcatgctgctgattgggcaggatttacttscatggataatgggagactttagagcaaagtgtacgctgttccgattgggtagcagagcatgtctgttctctcatggactgctttcaagcacgttgtacat

SEQ ID NO: 13241 - DNA, 201 bp, Homo sapiens
ccagatggcaaagtgaagcagattctttcctcctgtctgcattttgattgcagtatgaagttcaacttgcttcagtctttgtcttcatgttgtttcactargtactgaattttgtgatctgttggaaataacaagtaaatagatgcctaacgctttatacaggttgagcctgtctaatccaaaaatccaaaatccagaatg

SEQ ID NO: 13242 - DNA, 201 bp, Homo sapiens
aaaaagatggagtgagcctgcagccctgagttgatattgctttttaaattgagaacaatataattacagccttgtactggttataaaactttaaggtctcrtatcagagatacagcagtgcctttctcatctaaccctgtgtagaatacggctgttgagaatggcgtggctctctggctggatagggttataaaagtaaat

SEQ ID NO: 13243 - DNA, 201 bp, Homo sapiens
cccttaaaatggtgatgtagaaggacatgtattgacctagtaaaatattaagtgaaggaagtgtgtttacaaatgtcatttttgtctgatttcacttaccktcatttatagagagtggataattggcatagatagtgttaacattgtttatcgtggaatgttgagatcgttgatgatttttactggtttttttttttttgg

SEQ ID NO: 13244 - DNA, 201 bp, Homo sapiens
tgtcttggggtgctgagcctgttcccccctcatttgggggtgtggtgctatgctggcgtttgggtccatgccccgcatttctgatggctgccccatctgcyctgtgtggggtggcagagttctgtgtacacagagttacatttcgttgttcctggcttctctatggatgacagcagcactgataaatgccacacctgcttt

SEQ ID NO: 13245 - DNA, 201 bp, Homo sapiens
gctgttcctctctctttctgtttgaaagtgacttggcagggtgaagttgagaaccccttggaaaggaggaagccgaaatgcaaacaaagttgaatcatgargtgatgtcactctgaaccaattggagcagtggtgtcatgtgcctggcagctacttcaaatgcccacaaaacaggagtaatggtttaagctgtttccctct

SEQ ID NO: 13246 - DNA, 201 bp, Homo sapiens
gtcttggtacattttctaggctggtctggaagtcctggcctcaagcagttcttccacctgaacctcccaaagtgctgggattataggcgtgagccactgcrcctggcttatttaaatttttatgggtatgaattcacttaaaagctgaaggttttgagaggagagggagcatatgaaaaaacctaaaggttttgggaggag

SEQ ID NO: 13247 - DNA, 201 bp, Homo sapiens
gaggaagcatctgcaggctggactcggctgcctggtggtctccggagtggcctggtgcagagggccagggtggcatctcagaaagttgggtgggtagggtrcttgcacacctgctgaccttgagttacagggtggacctaggtcatttcacaggcccttccagccttcagatctcaagatactaggcagagagagagatgg

SEQ ID NO: 13248 - DNA, 201 bp, Homo sapiens
ataacattttggatatattagattaagtaaaatgtgttcttaaatttcacctgcctgtttcctttttattcttttttttttttttttgaggcggagtttckctctcatcacccaggctggagtgcagcggcgcgatctcagctcactgcaacctccgtctcctgggttcaagcgattctcttgcctcagcctcccaagtag

SEQ ID NO: 13249 - DNA, 201 bp, Homo sapiens
ctgaaggttttgagaggagagggagcatatgaaaaaacctaaaggttttgggaggaggaggagaaggaagagagggagcatgtgaacaagagcaactgatkacttccttgtcattcatttgcccagtgtttactaagcacctgctgtgtctcagacctgtgctggtttggcccttgtgaaggacagtaaatacagtgcagt

SEQ ID NO: 13250 - DNA, 201 bp, Homo sapiens
accaccatgttggccaggctggtctcaaactcctgacctcagatgatccgcccgcctcagcctcccaaagtgttaggattacaggtgtgagccaccatgcycgactctttttaattcttaatgtggctacttgaaaatttaaaattacagatgtggcttgcattctgtgttggtaagctgctttagagcatttcttttaac

SEQ ID NO: 13251 - DNA, 201 bp, Homo sapiens
ttgttggttcctgtaaacattagaattctgttttaaggtttctagggggagccacaaagcccatttcttcatatttgaccaaagcagcaattagagggtcrcaccctcatgcctcatctgccctttttggtgagaatgtcctttttgtgatgactttatgcactcccttttgcttttcggttgttccaagccccattcaaa

SEQ ID NO: 13252 - DNA, 201 bp, Homo sapiens
aagagtcttactctgtcacccaggctggagtgcagtggtgcgatcttggctcattgcaacctccgggctcccaggttcaagtgattctactgcctcagcckcctgagtagctgggattacaggcccgcaccaccacacccagctaatttttgtatttttagtagagacggggtttcaccatgttaaccaggctggtctcga

SEQ ID NO: 13253 - DNA, 201 bp, Homo sapiens
tagaaacacgcctcctttgggcatatggtgtgaatcagggactctggctataaaaggtggggtctctgagcaccatcctggttggaatgttcccctgactyggaggtagcgagagacagccaaggtgtttgttccagggaggctggtgggtgggagatgggatttttctgtctgtggcacaggcagtattaagtagagcag

SEQ ID NO: 13254 - DNA, 201 bp, Homo sapiens
gcgaatctgatcagttcactgctgggcctgaaagctttcgctgactccttttaatctgcagaatgagggtgaaactgcttagcttgggctgggtcccttgkgagctggccctgacttctctccagtatcatcattttctaggaaagccatttccccacaacccccaaggaaagcatatcataaacaagttttcccttgggg

SEQ ID NO: 13255 - DNA, 201 bp, Homo sapiens
gagatttgtttagatgtttgattccctcactgattatgattatactggaagtttttcatttgttttgacagctcaattttttttttattgtaaatggactscctcattacagaggggggagcccttgaaagaaagggattgacctctgcaggcaagaatctgagcatcctaaaagtagaaaagggctagaggcttcgcctt

SEQ ID NO: 13256 - DNA, 201 bp, Homo sapiens
aatcttgattagacctgccagagctgtgcttattttgtgtccccatccaaatccagaattaattgccgtgctccacatgttttggtcaatggtggacctcrtctgtaacagtagtcccatgagattataatggggctgaaaacagtgctgtcccctagggatatcgtgtctgttgtagtgcaaggcactgctcacgtgttt

SEQ ID NO: 13257 - DNA, 201 bp, Homo sapiens
caaactcctgggctcaagtgatcgcctgcctcagacttcattttgatttgtgaacctcgtgattctattacttgttccacaaaaaattttaaatgaaaaartatttcaaaaatacatatattccggccaggcatagtagctcatgcctctaatcccatcactttgggaggccaaggcagacagatcacctgaggtcaggag

SEQ ID NO: 13258 - DNA, 201 bp, Homo sapiens
aggctgggtaccggggacatggaccaaaccctggaacattctgtggaatgtgggaaattagtgtcaaatgtatgcattttcactaacagtcattaaactgygtacaaagattatttttcttcagtctatcattgaaactattgcaccagaatatactgtactttaaaaaatgagtatatgcctcagtctgcacatatttac

SEQ ID NO: 13259 - DNA, 201 bp, Homo sapiens
agcagtcgaactttttaggatgggccctacccttagggactgcctacgaaactagatctagaagaggaggctgtggacattaggaggtggctgcaattggraagttccagagagcttactgagggataacggatgtaggacaggaggctggcaaagcacctcagtgatagggcagaaggaaataaagtggttagggaagga

SEQ ID NO: 13260 - DNA, 201 bp, Homo sapiens
gacagatcacctgaggtcaggagtttcagaccagcctggccaacatggtgaaaccccgtctctactgaaaatacaaaagttagctgggcgtggtggcacgwgcctgtaatcccagttactcgggagactgaggcaggagaattgcttgaacccgggaggtggaggttgcagtgaaccgagattgcatcattatgctccagc

SEQ ID NO: 13261 - DNA, 201 bp, Homo sapiens
aacttctttttcccaaagctataatctgcatgtcaccattctccagagtacattgaaaatcccctacaggaaagtgctgataacattgtgcacagaaaccrctcctggctggtggcactggggacgcctgcttaaagtcggagccgttgggttgaatcgagagaaaaggattgagcgtattgacttcagggacctcccagg

SEQ ID NO: 13262 - DNA, 201 bp, Homo sapiens
ccaatttaaacaatttgtagtttttttctaataaccagtaagttcttcgtcttcgaataattcttttatactgttctatttccagctccactgagtgcccmtgtgttttcagagaaaacaggagtctgttttggacttcctctttggtatatatggtgggagatttgtttaaaaaatttttttatagaggtaaaattcata

SEQ ID NO: 13263 - DNA, 201 bp, Homo sapiens
actgacatttcatatggatcttatggaacaggttgattttattttcgtttttaccctacccatttggaggtgtagaattgagcctgtgtttggttttgttwtctttctttccaacctttttcctttctttctctttgttttgccttccttcctgcatagaaatatttatttattcattcattcatttttttgagacaggtt

SEQ ID NO: 13264 - DNA, 201 bp, Homo sapiens
tagatttaccttgagttttttgaaacggtagaattaatatattaaaacatatggtttttagttaaaataggatgttaaaggaatagagcgcacgaacaaaraactttccacttgaacccatgttgtttcatctgacagtgggtatggtgtccctggcaggatagggcttccacctcctgctggtgccggtaggacagggaa

SEQ ID NO: 13265 - DNA, 201 bp, Homo sapiens
caggcttggtatctactgtgcattcctcccaaatctctacccattggtcaaggtccctgagttcacagagcccaggccagagccctggaaacgcctctgcycgtccgctgcctaattgcctgtccacgctgggcaccaccgggtctctccctcagtctcagagctcagttgcttctgcacctcatcagggatccagccatc

SEQ ID NO: 13266 - DNA, 201 bp, Homo sapiens
acctcctgctggtgccggtaggacagggaagaggtggggaacactgtgtctccatctcccaagcatcttacctcccaagtcagatccctggcattgtttgmatacttgcgtgtttgtgtgtggggtgatgttttcctgagaatgtggcaaaataatagaaggtcccagggttcctcagtctgcagaccatagctgagtggt

SEQ ID NO: 13267 - DNA, 201 bp, Homo sapiens
ccccatctttactaaaaatacaaaaactagctgggcgtggtggtgcgtgcctataatttcagctacttgggaggctgaggcaggagaatcactttaaccaragagttggaggttgcagggagccgagatcgcaccactgcactccagcctgggtgacaaagcgagactccatctcaaaaaaaaaaaaaaatgcccacaact

SEQ ID NO: 13268 - DNA, 201 bp, Homo sapiens
gacgcccgctccgccggctgtggtgtgcgcccttcctgctctcccctccgaggggctgaggctccttttgtctggcgcgcgcgccccaccccgccccgggygagggaagagggagcgggcaccccgcgcccgcgccgccgccgtggaccaaggttgtttactactttccactccgaataacacgccaatcaccagggccca

SEQ ID NO: 13269 - DNA, 201 bp, Homo sapiens
ccatctttactaaaaatacaaaaactagctgggcgtggtggtgcgtgcctataatttcagctacttgggaggctgaggcaggagaatcactttaaccagaragttggaggttgcagggagccgagatcgcaccactgcactccagcctgggtgacaaagcgagactccatctcaaaaaaaaaaaaaaatgcccacaactgg

SEQ ID NO: 13270 - DNA, 201 bp, Homo sapiens
ctcaaatgatccacgtgcctcagcctcccaaagtgctgggattacaggcttgagccaccatgccctgtccgattatttttcagggaagagccagtgtgctycagccctatgagctctacccttctgctcccacagaagggaagcacaggcctgtggggtggagggggctctgccctaagcgcagcccctgtgggccacggg

SEQ ID NO: 13271 - DNA, 201 bp, Homo sapiens
ttggatcccctctgctaagcccctctgtgcctttgttcctgcattccctccacccccagtcccctccccacatcagtgtccacctgccaagccaggccagygccactccctccccgaagctttcctgccccactccagtagctatctcctctgctaacttctcgatgcgcttgactcacatcctcgtatgtgttctctctc

SEQ ID NO: 13272 - DNA, 201 bp, Homo sapiens
agcaggccgagaaggaggaggctgaataccgcaaagtctttgagaatttcctgcacaactccatcttcgtgcccaggtacccagctcatgtgaaatttcakttggcaaaacccactgctcaggccggttctgttgcctttctccccaccaggtagtgtgtaagtcagcagctggggggtacaatacagtagccactgagac

SEQ ID NO: 13273 - DNA, 201 bp, Homo sapiens
tctttgtctttactgacactcaggatcattgttaggtgggaggtcagatcaggcagctggagtccccagtgtggtgagtttagttggcaggccccagattyctcctgcattcatgggaaattgacatgtatgttttatttccccaggatcagcgagaatgtgtgtccagacaggaatacaggaagtatggaggggccaagc

SEQ ID NO: 13274 - DNA, 201 bp, Homo sapiens
atccatctgatcatcgctctgcccgtcgctgtcctgttgatcgtgggagggttggtgattatgctgtacgtcttccatagaaagaggtcagtgatgtgcaragttatgacactttctgtggctgagtggtttgatgatttgaatgtgagtgaaggtgatatttttgaagatttcaaggaaatattttatggactggaaaac

SEQ ID NO: 13275 - DNA, 201 bp, Homo sapiens
ttcccaaactgaaactccatgtccatcaaacaactccccattgcctttttccccaagtctttggcaaccgccattccactttctgtctgtaaatttgactrtctggatacctcatgtaagtggactcgtacactatttgtccttttgtgactggcccattttatgagcataatgtcctcaaggttcattcaggctgtagca

SEQ ID NO: 13276 - DNA, 201 bp, Homo sapiens
taatatatgtatgtgtgataacacatttatataatgtccattaccatgtggtatatatgcttatccatttgtctgtcgatggacacttgagttgctccccygctttggctactgtgaataatatgactgtgatcatggatatgcaaatatttccttaagtctttcagttcttttgggtatatacccagaagtggaattgct

SEQ ID NO: 13277 - DNA, 201 bp, Homo sapiens
ttgtccttttctcattgtccaaaagagtcttaagcgatctccaggaaatcccctgctcctgccaggaatctgcctgtgagtatttgagtgagttgctgctytttaagtaccagttgagaagctgaaggttggtgttgtggttgtgataaactcccaacatgaaaactgaggaccaccagcgttttcagctcacctttgact

SEQ ID NO: 13278 - DNA, 201 bp, Homo sapiens
tgcttatttagtctttggctttcccttgttgttagacactgcctgtcactcgggcattcatccatctttgaaggtgggtgccttcaaagacagaacaagarctgccctgtcctttagtaggcctcaggtggtagaaagagcacggaggtgaccagagtctggggtgtggggtcctcctgggtgcagttctggcactgaagt

SEQ ID NO: 13279 - DNA, 201 bp, Homo sapiens
aaaagaagggccagagcggtgtcctgcagagggtggtgtaccttgggagggaagtgtgtagggttgttgaggaacagtgtgctgcacagggaggaaagacrtggggcagcattgtgggaagagcaaccaagattctcataggcttgggagcggaagccctgaggtctgttgctggactagatatgtgaggtgtgagaggag

SEQ ID NO: 13280 - DNA, 201 bp, Homo sapiens
ccagagtaaacattgcccctcaagatcaactcctggagtagcctctggtcttgcttatttagtctttggctttcccttgttgttagacactgcctgtcacycgggcattcatccatctttgaaggtgggtgccttcaaagacagaacaagagctgccctgtcctttagtaggcctcaggtggtagaaagagcacggaggtg

SEQ ID NO: 13281 - DNA, 201 bp, Homo sapiens
atcgggttgccccctcctgagctctcacatgtccagagatgtctccagttagttgccttgatccagagtaaacattgcccctcaagatcaactcctggagyagcctctggtcttgcttatttagtctttggctttcccttgttgttagacactgcctgtcactcgggcattcatccatctttgaaggtgggtgccttcaaa

SEQ ID NO: 13282 - DNA, 201 bp, Homo sapiens
tttgcaggtttccttgctagttccttggccagagtttccatcgtgtccctcagctgcacaattaaggtgcccccgttttgtgcaagtctcatgctaggcastatgagatgacacaaactaggattctgttgtgagataagataaaaacacttgacatttaaaagagagagacaacttatgcggtgtgacgagacactctac

SEQ ID NO: 13283 - DNA, 201 bp, Homo sapiens
tggtatagatgagggaggcagtgaggacaggctcagggagggaagtcttgtctctagacctgagaccaggaagcaggaatggactggacaggttggcccasctgagggaggtgactggtgagatgggtcctcggtgtgaggggctgggttgccagaggagctgtgggctggggtggtttgtcgagagagcagtcccagttg

SEQ ID NO: 13284 - DNA, 201 bp, Homo sapiens
aacgtgcagtcattggcaggtggcgtgtagaccagctgcccagggaacagagcccacgctctcctagtgacaccactcccagcttggtctctccatagaaygtgctgggagcagggagctgtctgcagggtccaccctccacctgctacttggtgcacatcgtgcattcctgctgtcctttgccccctcttgcgcacaaat

SEQ ID NO: 13285 - DNA, 201 bp, Homo sapiens
gaaaaactctgcatatgatctttggcctggagaaatattaaatctatgttaagtatgcagacatgaatgggcaaatgaaggatttgtggcaaagaagatcygccgaaacaaataagtcatgtaaatgggcagagggaaatattaaattgattgcatctttcagctcctggtacttaatgcaaagataaagtagtgggaaaa

SEQ ID NO: 13286 - DNA, 201 bp, Homo sapiens
actggggaaaccgccggccggccctggtgcgctgtcaccccgaaggaatgcgggccaggccggggctgctgggcctggaaagttctccagtccctgttgcrgatctggcctgccgactcaaagtaaatctctcttcccctttatttcccatcaaataaaaaaggaacacgaggtagccactgtactcactgaagatgcatt

SEQ ID NO: 13287 - DNA, 201 bp, Homo sapiens
gttctttcagcatcgaactcctcttctcagttaatcgtgaagtggaaccctccctctctgcccaacggcaacctgagttactacattgtgcgctggcagcrgcagcctcaggacggctacctttaccggcacaattactgctccaaaggtaagggtgcagcagcggcctggacggagggtgtgaccgttcattcctgtggt

SEQ ID NO: 13288 - DNA, 201 bp, Homo sapiens
gcacatggcattctaccgtggggtagacttttaaaattctggctacagagatacttttccataaaagtggccacatggaactctccaaatctaagaagcayactgtgggggccttcatattttgtctaattcttttctccccagaacaggaacctgcacccttccttcttttaaagggcgacgtggtaaataaacattttt

SEQ ID NO: 13289 - DNA, 201 bp, Homo sapiens
ctccacccccagtcccctccccacatcagtgtccacctgccaagccaggccagcgccactccctccccgaagctttcctgccccactccagtagctatctyctctgctaacttctcgatgcgcttgactcacatcctcgtatgtgttctctctcgttatgttgtgttgtgctgttgttggagtgtgtcccccctccacccc

SEQ ID NO: 13290 - DNA, 201 bp, Homo sapiens
ttgtaaaataatttcaagtcagttattaaagtaacaaaaataatggcaaacttgataccttcccgtatttttttttcatatttttccttgaatgcttacaraaatattaaagaatattatcacatcattgtagtcaccgatgaattattttctggtggcttatgattagaagagcttgactcggagtggaaacagataaca

SEQ ID NO: 13291 - DNA, 201 bp, Homo sapiens
aaaaattcagaacacatggccttggtcctggctctgtggctggctgcctgtggtcctcagacagctgctgcaggttcctgggcctcagtgtcctcaatatraaataagagggtgggacaagattactgaagtccctttcagaactaaaattcacctttagattggtcagatttaaactttttctttctagctcatgtcagg

SEQ ID NO: 13292 - DNA, 201 bp, Homo sapiens
ggtgctgcccccttcacgctactgaaccccagggtcataattaaaagctgtgttagctcttctctggttagaggcatacaggttggaggcttgtacatagmcgtgagccggttggtctaggccaggaagcaaaccattggaaaatgtggttagcagtgacagttgacagcatgtttgcctgcagtagtggtggttggtgct

SEQ ID NO: 13293 - DNA, 201 bp, Homo sapiens
cgtgatctcagctcactgcaacctctgcctcccaggttcaagcagttctcctgcctcagcctcccaagtagctgggattacaggtgtctgccaccacactyggctaatttttatatttttagtagggacaaagtttcatcatgttattcaaattcctgacctcaagccatctgcctgccttggcctcccaaagtgctggga

SEQ ID NO: 13294 - DNA, 201 bp, Homo sapiens
ggaggccacatttaaaaaggcactccttccttttaaaagctttgcaagggggctgcatatattttcctaattagtgggaatattttcttttttcttttttyttttttttttttgagacagagtttcactttattgtccaggctggagtggagtggcatgatctcggcttactgcaacctctgcctcccgggttcaagcaat

SEQ ID NO: 13295 - DNA, 201 bp, Homo sapiens
ctcaaaaaaaaaaaaaaatgcccacaactgggcatggtggctcatgcctgtaatcccagcactttgggaggctgaggcgggcagatcacgaggtcaggagwtcgagaccatcctggctaacacggtgaaaccccgtctctactaaaaatacaaaaaaaaaaaaaaaaaaaaagccgggcgcggtgccgggcgcctgtagtc

SEQ ID NO: 13296 - DNA, 201 bp, Homo sapiens
tggaaatctcctgccccaggtttttccatgtggcttgaccagcacctgcagcccaggacaggtccagctagaatccctgctccccaccctgctcccgcccytacttggtgatgagtagcctattttactccaccaaagtgaaccacatggaaaggcacacaggtcagggagaatttgtgaattacggaatttgccctggga

SEQ ID NO: 13297 - DNA, 201 bp, Homo sapiens
tattagcagacactctcgtgttgacatgtccattttcctttccattaagctgtctccattgcagttctgttgatatggctttatatagttttcctgagctkttttttttttttttttttttttttggtaacaagatacctatgcaagctgaaaaactcttggctttttagtttgtatcacttccagaaacttttagatgct

SEQ ID NO: 13298 - DNA, 201 bp, Homo sapiens
gcggaggttgcagtgagcggagatcacaccactgcactccaacctgggtgacagagtgagattccgtctcaaaaaacaacaacaacaacaacaacaacaamacctcacaaccctggtctcccagagcttccatattaataaatctagacaatgtgaaatgcaaatccacttaatatttgatgcaaaaaaaatttatttgac

SEQ ID NO: 13299 - DNA, 201 bp, Homo sapiens
aggctgcagtgagccatgtctgtgccactgtactccaacttgggtgacagagcaagactatcccaaaacaaaaacaaaaacacatgcttatggtaggcaaktaaaacaggaggtaaggagtaaacatgccaggcccctcctcctctcctctgactcttccttcttcccccctgcttcccaagggtaagctttgcagatact

SEQ ID NO: 13300 - DNA, 201 bp, Homo sapiens
gctttcttttagggttaggtaagatacttccttttttggaaatagttttgccatttggtctcgctgcctgatttgtgctttttcttcttcagcaggtagtrggaggctgtgtattgtattgccttttaccagacacccagaggggtcatgttggaaaatagcatcctcttagcaaaaacacaatcccttctctgagaataa

SEQ ID NO: 13301 - DNA, 201 bp, Homo sapiens
acaacaacaaaacctcacaaccctggtctcccagagcttccatattaataaatctagacaatgtgaaatgcaaatccacttaatatttgatgcaaaaaaawtttatttgacctgttattttaactctttgacataaaatctctaaatcaaaataatcagcaacagttttaagtgtataaatatgtatttctttcagtgctt

SEQ ID NO: 13302 - DNA, 201 bp, Homo sapiens
catttggtctcctacagtgtctgtgggccaggaatccagatgcaggtgttcttgctctcagctcagagtcacaggaggcagaaatcaagatgtcagtgggrctgcagtctcacctgaggctcagggacatcttcaggctccttcagggttctgcacttgcaggactgaggtccccatattcttggcacctgtcagctgggg

SEQ ID NO: 13303 - DNA, 201 bp, Homo sapiens
aaatgatgaatttaataaaatttgaaaataaaccccacataactagtgctgctattgatcattcatatagccagcaggagtggtgagaggcttggtctgcytgaggtgtggagatgcttgtggcggggggcaaggtggacgagggctggggctgctcctggagcatctttacgcgggtggaggagctctgacacagtggca

SEQ ID NO: 13304 - DNA, 201 bp, Homo sapiens
tgggtgccatggctcacgcctgtaatcccagcactttgggaggccgaggcgggcggatcacctgtggtcgggagtttgagaccagcctggcgagcacggcraaaccccgtctctacgaaaaatacaatacaaaaattagccgcgtgtggtggtgtgcgcctgtagtcccagctactcgggaggctgaggtgggagaatcac

SEQ ID NO: 13305 - DNA, 201 bp, Homo sapiens
ctccaacttgggtgacagagcaagactatcccaaaacaaaaacaaaaacacatgcttatggtaggcaattaaaacaggaggtaaggagtaaacatgccagkcccctcctcctctcctctgactcttccttcttcccccctgcttcccaagggtaagctttgcagatacttgctatgcaagcaaaaatgctattcttagcca

SEQ ID NO: 13306 - DNA, 201 bp, Homo sapiens
acttctgagtcaagcaggcatttggaaatgtggactggtgccgagaaggaattcccagcagtgacttggtttaggtggtcctggaaagtagaaacacacaygagataattctggggatggagcttaaagggacgtcagcgttcaagggccaggtagaggatcatgagctgtaaagggacccaggtggttccagcacagcga

SEQ ID NO: 13307 - DNA, 201 bp, Homo sapiens
agacataggtgtaggcatagatttttaagctgagaaccttttgacagggaagaccagggatggttttagggtgtggggaatctgtgtaagttggccgttasctgtcaacaggcaacaatcactgtctctcaggtccctcccgctcccggccgtgtcctggttctacttgccggcagggatctaagttggaattcctttcca

SEQ ID NO: 13308 - DNA, 201 bp, Homo sapiens
caaacacagctgtgggcgtcacataagctagcgtggctgtgttccaatacagctttatttttaatactggaatttgaattccacatcatccctgtgttgtyacaaaatattcttattttgaatttcttttagccatttacatgaaaaccattcttagctcatagaccttggaaaactaggcagcaggccagattttaccca

SEQ ID NO: 13309 - DNA, 201 bp, Homo sapiens
tttaagctgagaaccttttgacagggaagaccagggatggttttagggtgtggggaatctgtgtaagttggccgttagctgtcaacaggcaacaatcactstctctcaggtccctcccgctcccggccgtgtcctggttctacttgccggcagggatctaagttggaattcctttccaacatggaatcctgagtgtccacc

SEQ ID NO: 13310 - DNA, 201 bp, Homo sapiens
ttctgttgctacaagacatgaaagaatggcctccgtttatcccggagaggagagtccctgagcccttgggagttgccttgaaacctctgccgggtcccagktgagaaagtgtgtgagttgtgtggttctgagatctgaacaggcaccatctggtgacactaggggctgaaggagctcggtggctgcaggtggactggagct

SEQ ID NO: 13311 - DNA, 201 bp, Homo sapiens
taagctgagaaccttttgacagggaagaccagggatggttttagggtgtggggaatctgtgtaagttggccgttagctgtcaacaggcaacaatcactgtstctcaggtccctcccgctcccggccgtgtcctggttctacttgccggcagggatctaagttggaattcctttccaacatggaatcctgagtgtccaccat

SEQ ID NO: 13312 - DNA, 201 bp, Homo sapiens
gaatcctggtttggttctgcgggaatcgagtgcttgagtgggacccagacagacaggaagggcgctcctgctcagttagccccagtaagctcactgaggcrcacaggccccatgtccacagccgctcctggctgaggcgtggttcctaagacgacccttactgttgagggctgccaggagggagagacacattcagccccg

SEQ ID NO: 13313 - DNA, 201 bp, Homo sapiens
caagtgagatcttcttgtcagtgcttaatccagcctcccgttgtttgtcagccctagctggaggcctcacaggagttcctgtgtccttccagtttgatacsaagtttagaccaagaaaagttcctttctgtggcacacctgtagtctcttacctgtctttggtggttgtacacgaacaggcagatatccacaactgcagaa

SEQ ID NO: 13314 - DNA, 201 bp, Homo sapiens
ggaagaccagggatggttttagggtgtggggaatctgtgtaagttggccgttagctgtcaacaggcaacaatcactgtctctcaggtccctcccgctccckgccgtgtcctggttctacttgccggcagggatctaagttggaattcctttccaacatggaatcctgagtgtccaccatgtcaaaattgtgtcaaaattcg

SEQ ID NO: 13315 - DNA, 201 bp, Homo sapiens
gactttgtttgaagagtcacccaggtttttgtaaagaagtgtttcagatcagtatgcaatggatgactgtaaatttctcttcagatctaagaatctgtgaytggatgaaagggagaaaggactgcataagtgcttgttgcttgtaaactgggccaggtggatgtcatggccctaggagcttcttgcctgcctttgcatgcc

SEQ ID NO: 13316 - DNA, 201 bp, Homo sapiens
ggccgtgtcctggttctacttgccggcagggatctaagttggaattcctttccaacatggaatcctgagtgtccaccatgtcaaaattgtgtcaaaattcrtctgtatgcatttttcttggtagaagggtccccaaaagtcaccacattctcagagacttctgatccctaaaactttagatcaacagtcaataaaaaggtc

SEQ ID NO: 13317 - DNA, 201 bp, Homo sapiens
gcctggcacagggcagggcctctccagatggcagttcctgtctgtgtcttattcccaccctccgggcacatggggggaactcagtttctccccactgcgcrtcaccctgggagaggtgttttttgtgccaattgccattttaaatccaaatcagcagggatcatgtttgctgttcaaccatgtggcatatttatagtgatt

SEQ ID NO: 13318 - DNA, 201 bp, Homo sapiens
tttctaaggtgtgctgggaccatttacatttagttctttggagaacacaactacttaggatttttgttgttgttgttgttttcctgtacattgtcttcctmtctcccttctggtacccattccaccctctctccccttcctcactgccgtttcataggggttctcagattcctgtgaataaagcaaaccgatgtgcagata

SEQ ID NO: 13319 - DNA, 201 bp, Homo sapiens; identical to SEQ ID NO: 1690

SEQ ID NO: 13320 - DNA, 201 bp, Homo sapiens
gacacagatgggaaggggtttccagggactcagccccactgttgatgcaggtttgcaaggaaagaaattcaaacaccacaacagcagtaagaagaaaagcrgtcaatggattcaagcattctaagctttgttgacattttctctgttcctaggacttcttcatgggtcttacagttctatgttagaccatgaaacatttgc

SEQ ID NO: 13321 - DNA, 201 bp, Homo sapiens
gtgtagacaagagctgctgtagacagtaagctctccccattctgttctgataccgtgtgagagaggataaatgaaactgttgtagcgaagatgaaagtatwtacaggaatgtatggaggtggggttttgttaacgtgaatttaatctttttgacagaaataacagcaggctggggaatggagtgctgtatgcctctgtgaa

SEQ ID NO: 13322 - DNA, 201 bp, Homo sapiens
gaggccgcaagcatgcgtgagaggattgagtttctcaacgaagcttctgtgatgaaggagttcaattgtcaccatgtggtaagagaaagttcctgaaaagycaaaatgcagcacagggagagggtatcacacaagcctcccagtatgttcttggctgcatgtacccgtgggtttggtgtcttgcctttgccttctggatag

SEQ ID NO: 13323 - DNA, 201 bp, Homo sapiens
cactttccaccagctcagtctctagggctttatctttctctgttcattgttacccgttgccagctttagctcagtgttgtgtgagccacacttcttcatcrttgaggtgttcctgttgtcagtgggctagctaagggcagaagggcattcgtgggattttaaagaatttatgggaccaacattctttccgccttcagcaga

SEQ ID NO: 13324 - DNA, 201 bp, Homo sapiens
atcaatttgtacaaaaatctttgattcaccgaaagtagctgaagcagcgaataaaacgttctcatacagtcaggagcactgtgggcttgggcacaaggtcwaggtcccaagagctcttggttggaaatctcctgccccaggtttttccatgtggcttgaccagcacctgcagcccaggacaggtccagctagaatccctgc

SEQ ID NO: 13325 - DNA, 201 bp, Homo sapiens
ggtctgtcctctgattgctaagattctatttctgtctaacatctacttttagtatcaatttgtacaaaaatctttgattcaccgaaagtagctgaagcagygaataaaacgttctcatacagtcaggagcactgtgggcttgggcacaaggtcaaggtcccaagagctcttggttggaaatctcctgccccaggtttttcc

SEQ ID NO: 13326 - DNA, 201 bp, Homo sapiens
agtttgtgggtagcccagtaactgggaacttggaatggagcagttgggccgggagggccagggtgggagccgtgccgtgagaactggctgcctgcaagccrctgacacagccaggaagggcacgtggggcaagaggagaagtgggtctgggagggagccacatcctcaggccatttcccagaccagcctgcagtcagcaaa

SEQ ID NO: 13327 - DNA, 201 bp, Homo sapiens
gcatgggtgacagcaggcagactgctcgggtggaatgggcatcagctgcagggaagccgggggaagaacagggcacaaatcagagttcagtgtgagacgcrgtgagtttgtgggtagcccagtaactgggaacttggaatggagcagttgggccgggagggccagggtgggagccgtgccgtgagaactggctgcctgcaa

SEQ ID NO: 13328 - DNA, 201 bp, Homo sapiens
ctgctacctcctgtatcgttgcctgtgggtgatggtaaggctcttgggggtgtggaagatgcggggatgatgatgatgacgatgatgacgatgacgacgaygacagcgtcgtcgtcgtcctggtcctggaaggataaagtcttgtggagaagaggaggcaattctgacagtttggggttgcatcatcttcttcacagaaga

SEQ ID NO: 13329 - DNA, 201 bp, Homo sapiens
gcttctgctaagaggtttccttccagggactccatgttcactgcctcacaaaggcaggccagcctcatgctttagacatccttgctcttaacaaatctttygtgttctgctacgtcagcctctgtgtgacacccattggaccttctctctgtagcacaattgcataccttgctctgttcttgataagataggtctaggagt

SEQ ID NO: 13330 - DNA, 201 bp, Homo sapiens
ctctcaaaagaatggaaatgatttcagattgtattcagcagcacgaagcaatgattcctaaatagttaaaaatctagaaagaaacactaagaattgtattkggctttgtagaagagaccccagaattttaggatttgggatgtatccctgcagtcaggcccagtccccagtgcacctgcagatctttgacagctgctggtt

SEQ ID NO: 13331 - DNA, 201 bp, Homo sapiens
gtcttggctttcctctggggggatcccgttgctgttgtgttacagaaatggtagttgtttactccaacagtctggatgaccgcatagaggaactatttcartagtgactgacatcattttttttttaacctcgtaaacctttcacagttcaggggccttggatcttattttgaagacaggtgcaaattggaaatagcattt

SEQ ID NO: 13332 - DNA, 201 bp, Homo sapiens
gaagaaactaccattctcctcatttgatggatgaggaccctaagccctggagaggccaggaaacattcccagagtccctcaggaggaggactagtgctggkctcctttcctcctgttctgctgcctctgagaggagccaggattgaatcgtagccttgtcctctgacctggaggtctgggagtaactctcttatgactttt

SEQ ID NO: 13333 - DNA, 201 bp, Homo sapiens
atgtaagtgcagtgtaatgtaaaatcaagccggcaactccagcaatttgctcttcaaactatagctctatcagttcccattcatttatacacttacactaytcaatttgtcgttgttgttgttgttgttgttgtttttgagacagagtttcactcttgtcacccaggctggagtgcaatggcatggtctcggctcactgca

SEQ ID NO: 13334 - DNA, 201 bp, Homo sapiens
gcaactccagcaatttgctcttcaaactatagctctatcagttcccattcatttatacacttacactactcaatttgtcgttgttgttgttgttgttgttktttttgagacagagtttcactcttgtcacccaggctggagtgcaatggcatggtctcggctcactgcaacctccacctcccgggttcaagtgattctcct

SEQ ID NO: 13335 - DNA, 201 bp, Homo sapiens
actgttggggaagctgcggtcactcatcagccttcctggtgagaaaccaggggtttcctgctaattctggaaaggatgtttcagcagtgcctgcatgagaygcctcagatagaaaactggttatttttgtttcttagcactgccaccatagataacagctgtcacgatggacagtgtggacctggattagtccttcttggg

SEQ ID NO: 13336 - DNA, 201 bp, Homo sapiens
cagggccaagagtgaagtgagaatacggaggcacctctgtgtgctcaccctgctgaccgtcacccagcctccggggggggtcacagctggcccccaggaarctgcttcccagcagggcaggaattccatttgagtcttgtccctgttccaggagaagggctgggtatgtgtcccccaaaggggagagcattcgagaaggat

SEQ ID NO: 13337 - DNA, 201 bp, Homo sapiens
acataatacagactcttcactgtttgtattatacatgtattttgtgagtctgtgtcagtatttgtttacacgggaattagggcatcaggctgtcttcctakggttcctctgtgcagacttgtagacagtatgggttctttgcgtgctgagttgaggtggccccaaacctttcagacagttgctcagatacctggcagttgc

SEQ ID NO: 13338 - DNA, 201 bp, Homo sapiens; identical to SEQ ID NO: 1674

SEQ ID NO: 13339 - DNA, 201 bp, Homo sapiens
tagtgcttctgttccctcatctgtaacatgggggtatattatagtcagtagcacctgcttcacaaactcgtgaggacttcagcagttcacacacataactscctcgctgcctggcacctagcgtgcacatggcattctaccgtggggtagacttttaaaattctggctacagagatacttttccataaaagtggccacatg

SEQ ID NO: 13340 - DNA, 201 bp, Homo sapiens
ttgtattatacatgtattttgtgagtctgtgtcagtatttgtttacacgggaattagggcatcaggctgtcttcctagggttcctctgtgcagacttgtaracagtatgggttctttgcgtgctgagttgaggtggccccaaacctttcagacagttgctcagatacctggcagttgctcatttacccttccagaccttcc

SEQ ID NO: 13341 - DNA, 201 bp, Homo sapiens; identical to SEQ ID NO: 1681

SEQ ID NO: 13342 - DNA, 201 bp, Homo sapiens
gcttttatttggtggtgtaataaattacgttgattagatttcccaatattgaatcatctttgcattcctggaataagccctaatttgttatggtgtgatawtctttggatatgttgctatttgatttgctaatatttttttaaaaattgtgactgtagcctacaaagccctacagataggggtctttagtttttttccttg

SEQ ID NO: 13343 - DNA, 201 bp, Homo sapiens
accccattagctaacttccagcaaggctgtgttaggaatgtggaatcaattagatgaattttgaaaataacttggtctgttctaaaaggccctatgagatycaaactgttgtggcctggtgcctggtaactttgatggccattttgaaatgttaccgtagtgataattcttctggaatctcaagtcattaaaagtgatatg

SEQ ID NO: 13344 - DNA, 201 bp, Homo sapiens
tgagaccagcctggcgagcacggcaaaaccccgtctctacgaaaaatacaatacaaaaattagccgcgtgtggtggtgtgcgcctgtagtcccagctactygggaggctgaggtgggagaatcacttgaacctgggaggcagaggttgcagcgagacaagatggcgccattgcactccagcctgagtgacagagcaagact

SEQ ID NO: 13345 - DNA, 201 bp, Homo sapiens
agggtctcagactttccttgtccttggtgactttgacagtttcgagggacactggccaggttttgtgcacactgccccttaatttggagttgtctcatggktttttttgtttttttttttttttgagacagagtctcactcgtctcccaagctggagtgcaatggtgcaacctcgactcactgcaacttctgcctcccagg

SEQ ID NO: 13346 - DNA, 201 bp, Homo sapiens
ctgtccttgaatttttcttttgcttaccttttgatattgtttatatgatttatgaatgcagctctgaggtatctgagaggatttattaacgtttacttgcrtccaagtacatgattaagttttaattgctttgtggacattaaaaaattatgcccttggtaaaatgcaaaggttttattttctgtatttagtaaatcaaac

SEQ ID NO: 13347 - DNA, 201 bp, Homo sapiens
cccacggttttgctggttgacagtgatttgtcttgttccttgcttgtaattttattaggaccatggagccaaagtggctggtttgaatctcagctcttcastagctaagctctcaggcaaataatttaatcttcttgtgcctcagtttcctcatctgtgaaattataattttaatagaatctactttaaacattcatagaa

SEQ ID NO: 13348 - DNA, 201 bp, Homo sapiens
ttacacatgtggacgtatttgaggaggtaagagggacctgcacaaggctttagtgagtaagcagagaagttatttatatatagtgagacccagtaaacggygatgtcgcaggtgaggcagttgatctggtcagaatatgcctccagagacatcactggtgaggcctgcatgcatgttgaaaagagtgtatcttacatctag

SEQ ID NO: 13349 - DNA, 201 bp, Homo sapiens
gaaatgccctcccttcagtgatttgtcagcatgacctatcaccattgttgttaaccttcaccacctggatgaggcagtgtatgcgtggggacatacatctrtttgccccactgacatgagggttggatctctagaagaggagtcactgttcagaggttataggcatttgtattttttggcagatgttgtccttcaaaatgg

SEQ ID NO: 13350 - DNA, 201 bp, Homo sapiens
tgtttttttttttttaattcctgaaagtttttatactccaattgtgtctccacatatgctcttagactcctcttcccgtctagttctcctttcttggttcrattagttctgtttcagctggtgccacctgttgcagctgagcttggtcaccctccctcaggctcctgcgtcgtcctcagtgggtcatggtttttctttgct

SEQ ID NO: 13351 - DNA, 201 bp, Homo sapiens
tgatattacgatgtttgttatcacagaatatgtttgcttttgataggggttgggtgctgaagggtaagtggttagaatcattctttttctaagggtacagycattaatactccttgattcaaatcactatttaagttataaatacatggatttattttctaacctcaaaattatagcatcttaccacatatttgcatgcct

SEQ ID NO: 13352 - DNA, 201 bp, Homo sapiens
tgctgtgggtttagacatcatgccgtgacaaaaagaagaggatcttagaagcgggggacattcactgaagctttatgagcctttcctgaatcccttcaaaycagatcaagttctctctctcctgtgcttagaaatgctgcctgttaagtcacgttggctacagcacccatctcagatcccttgtgattcagttgtaaagta

SEQ ID NO: 13353 - DNA, 201 bp, Homo sapiens
ggtaatttttttgtgtgtgaatctgttaagttaaaaatatttctttctttggccgggcacagagtggctcatgcctgtaatcccagcactttgggagtccsaggcgggcagatcacttgagctcaggagttcaagatcagcctgggcaacatggtgaaaccccatctctaccaaaaatacaaaaaaattagctgggcatgg

SEQ ID NO: 13354 - DNA, 201 bp, Homo sapiens
tctctctctcctgtgcttagaaatgctgcctgttaagtcacgttggctacagcacccatctcagatcccttgtgattcagttgtaaagtagattcttctgstctgaattagaggccaaaacacaagacagatcaaaaatggggaacatattgcaaatttccccacaaaagactgaaggatgtgtttaccattgattgcaca

SEQ ID NO: 13355 - DNA, 201 bp, Homo sapiens
aatttttttgtgtgtgaatctgttaagttaaaaatatttctttctttggccgggcacagagtggctcatgcctgtaatcccagcactttgggagtccgagscgggcagatcacttgagctcaggagttcaagatcagcctgggcaacatggtgaaaccccatctctaccaaaaatacaaaaaaattagctgggcatggtgg

SEQ ID NO: 13356 - DNA, 201 bp, Homo sapiens
tccttatagttcaaaggtctttttctcaacttagttgatgatcatgctgtaagttgttttcttttgctttatcaacttttaaaaacgtttattaacttttwaatttgaaataatttcagacttgcataaaggttacaaagagtaccaggagttctggaacaccctccacccagcttccacagatgttaacatcttacataa

SEQ ID NO: 13357 - DNA, 201 bp, Homo sapiens
cacaaaaggacaaatactctatgtgatttcatttagatgaggttccctggagtagtcgcattcagagacagaaaacagaatgatggctgcggtggtggggkggtggggggtggtttggggaagggagtggagtgatggtttcacttttgcaagatggaaaaagttctggaggtggctggcggtgatgttgtacaacagtgt

SEQ ID NO: 13358 - DNA, 201 bp, Homo sapiens
taataccataggtctctacttcagtaagagttacataatacgaatgccgtttgttcagaattgtgtatctccatccatccgtccatcgtccaaattctgcragtttgaaatacattgttgttgctgttttgtatacttttgttcaaccattttctttttaacatggcactagctttctcaaactggctttggaattatttg

SEQ ID NO: 13359 - DNA, 201 bp, Homo sapiens
ccaaatcagcagggatcatgtttgctgttcaaccatgtggcatatttatagtgattttttttgtaatcatggtttttctttctggaatttcaagtttttcrtttgtgctgaggaaggtcgtttgtgttttttaataggattccttcttttccaccttgtgcaagtaaaggcaaatcccctatttgcatgtcactgtattaa

SEQ ID NO: 13360 - DNA, 201 bp, Homo sapiens
tgtgtggtttctggtttcacagaaggctttgtttcttggttcttgttgctgctttcagccttggcctgtaatcactgggcgccagggagggctgcggtctktttcccggggtgtgctcagataccgtgtcagttcacatgtgttgctgcagcggcagggggccaggcaggaggggcgggtgtcctgaagcacgctcaattt

SEQ ID NO: 13361 - DNA, 201 bp, Homo sapiens
ataacaaacattcgcatttattgaaaacttaaagtataataaaaaaataaataaaataaaaaaagaaaaaagaaaacttattcctgtgtcaggcacttttytaagtgctttgcagtgtattgtctcatttaatagttgtttaaattaacagagtaggccgggtgtggtggctcacatctgtaatcccagtactttgggagg

SEQ ID NO: 13362 - DNA, 201 bp, Homo sapiens
acgtaaatgagacatcaccaatttaagtcagccaaagtttagtcaatagaactttaaagaacagaagtctaatggtaattagggagagatgaatttatttrtaggagttttccccaaattcaaagcgtcttagtgacctttgataacttcctggaaaaagtaggaagcatggagagaaattccaggtaggagcccatgatc

SEQ ID NO: 13363 - DNA, 201 bp, Homo sapiens
cccaccctcaggtcggggacaggctcgtgacgatgctcagggtagtggtggagccccagaagcctccagtttccattttggacccacggagatctccaggktgcctatcactcttggcccaggcctgggctttccaggaacttccccgattgatgttttactgaacgtggtgccgaaagttagtcacaggaagacattatc

SEQ ID NO: 13364 - DNA, 201 bp, Homo sapiens
aatcattttgactttcacagagtgatagtgtctagagagggtttttgttgtactaagttattggttccaaagaattcattttaagaggagtaaagaactaytatagtatgccgcttactgagacaaaaccgacttctcacataagcccaaaggttttgttatgttggattttaccattagagttaaagatgatgattggtt

SEQ ID NO: 13365 - DNA, 201 bp, Homo sapiens
atgtatctagacattgacagatgttaacctgggattagggggtggggagaccaaaattgtaccctgttgagaaccactggaccagagtcatagcaatttgyagtggatagatttaggaatatttgaagacttgtaaaatatagcctgaagggaatggagactgggagagtgaaagatacctctgagacattttggcttgga

SEQ ID NO: 13366 - DNA, 201 bp, Homo sapiens
gctatatgcacatagagtttttgattggtctattgcaaatactatggcatctgaaattttttttttttttttttttttttttttgagatggagtctccctytgttgcccaggctagagtgcaatggcgcagtctcagctcactgcagcctctgcctcccgggttcaagcgattctcctgcctcagcctcccaagtagctgg

SEQ ID NO: 13367 - DNA, 201 bp, Homo sapiens
tttttaattcggaaatctttgtttggctgtctgagagagaacttcagcctcccttcctcccagacattttgaacagttcaggctgtactcattcgtgtctytttgtcttggcaggtggaagcccctctgcttggaatagcaaacaatactaccagcttgccctctggcaagctcctttaagagttagctgtaatttcaccc

SEQ ID NO: 13368 - DNA, 201 bp, Homo sapiens
ctgtgctgtggctgggagacctgtttggtcttggaagctgggtcctggatgagcagaatgaggcaggcatagaggtgatgttggctacgggcaggggagcrtttgctttgccttggagtagtgccatttccatgtagaggggcaagatttaccaccctgttgtggggatttgagactttgggttttgttttcctttacacc

SEQ ID NO: 13369 - DNA, 201 bp, Homo sapiens
gccttctggatagttaccccattacctcactgctaccttcagacccctgtgctcagaccaggccgcagcaccacagagacagttccagacaacacaggcaycagcaagggccaccctgaccctctgagtctttctctttttgattcctcccaggtgcgattgctgggtgtggtgtcccaaggccagccaacactggtcatc

SEQ ID NO: 13370 - DNA, 201 bp, Homo sapiens
aaattttttttttttttttttttttttttttgagatggagtctccctctgttgcccaggctagagtgcaatggcgcagtctcagctcactgcagcctctgsctcccgggttcaagcgattctcctgcctcagcctcccaagtagctgggattgcaggcacccgcaaccacacccgggtaatttttgtatttgtagtggaga

SEQ ID NO: 13371 - DNA, 201 bp, Homo sapiens
ccttcctcccagacattttgaacagttcaggctgtactcattcgtgtctctttgtcttggcaggtggaagcccctctgcttggaatagcaaacaatactaycagcttgccctctggcaagctcctttaagagttagctgtaatttcaccctctctctggccttgattctgcatgcagaatgattgcactgacttgagctcc

SEQ ID NO: 13372 - DNA, 201 bp, Homo sapiens
cgctggatgtctcctgagtccctcaaggatggagtcttcaccacttactcggacgtctggtatgagaacctttactgcattgccagcctggagcccccagyctctgcactttccaccagctcagtctctagggctttatctttctctgttcattgttacccgttgccagctttagctcagtgttgtgtgagccacacttct

SEQ ID NO: 13373 - DNA, 201 bp, Homo sapiens
cgggaaaccactgcaggcggcccatgaagcctcctggccatgtgcgccctcccggtttggaccccctcccgtgtgtcttggctgcaggtttgaactgatgygcatgtgctggcagtataaccccaagatgaggccttccttcctggagatcatcagcagcatcaaagaggagatggagcctggcttccgggaggtctcctt

SEQ ID NO: 13374 - DNA, 201 bp, Homo sapiens; identical to SEQ ID NO: 1693

SEQ ID NO: 13375 - DNA, 201 bp, Homo sapiens; identical to SEQ ID NO: 1695

SEQ ID NO: 13376 - DNA, 201 bp, Homo sapiens
atttagagtgtcccaaagcaggctgggcgggaagtttgtttttctctatcatgggcccttggttacgttgctgtcttgttccaccaaccagcaggaggttygggttgtgagtcaaggttttggaaagattttgctgaaaggccccttgctttcagttgtagttacgaggcaagacctgtttttttctcatcagatgtggag

SEQ ID NO: 13377 - DNA, 201 bp, Homo sapiens
tgttcccctctccagttccttccattcccttggacgttctttcagcatcgaactcctcttctcagttaatcgtgaagtggaaccctccctctctgcccaayggcaacctgagttactacattgtgcgctggcagcggcagcctcaggacggctacctttaccggcacaattactgctccaaaggtaagggtgcagcagcgg

SEQ ID NO: 13378 - DNA, 201 bp, Homo sapiens
ttatatctcaataaaccctttttttttttttttaaagaaatgtgatcaggttgaaaataacttgttatgctaccttaaattacgttaaaattattacatayatttgacaggctgatgtctctctctcttttcatttatgagtttttcagatccgtgagttgcagcaatacaacaaactgataattgaagcttagcaacagg

SEQ ID NO: 13379 - DNA, 201 bp, Homo sapiens
ggttttgtaggatttggagacagagacaaatttggagtgtttggatgttcggggacctgcaggaggtatgtgaggtgtgtaaaatgcagcccctgttttawaaagagcttacattgtctcttgagaagataaggtgtgcccagctgtggaatggaaccagatgcttttatgagtgaggatggagtgagcacactgggaaag

SEQ ID NO: 13380 - DNA, 201 bp, Homo sapiens
gccaggcgcagtggctcgtgtctccaatgtcagcactttgggaggccagggcgggcagatcgcttgaggtcgggagttcgagactagcctggccaacgtgrcgaaaccccgtctctgctaaaaatacaaaaattagatggttgtggtggtgcatgcctgtaatcccagctactcagagaagtgtttgaacccgggagttgg

SEQ ID NO: 13381 - DNA, 201 bp, Homo sapiens
cacacctgtagtcccagatacttgggaggctgagatggaggtcaaggcttcagtgagccatgatggcaccactgcactccagcctggacaacagagtaagmccttgtctccaaaaaaaaaaaaaaaaaaaaaaaagccaaatctgttgggtttttttttttgggggggggggtcctttagaatggccctgacagatcttta

SEQ ID NO: 13382 - DNA, 201 bp, Homo sapiens
cttatggtttccactggctcggctccgtgcgtgtgcggattgggcttcctgagagcctggttagccccttttatctgctctctgaaacctgcgcaagggtktttagcatgcaccttgaaacctctgctgcctgaagacagtgtgcttaaatgaagggtatacaaacccatgtgaggttttctcttcccttttccatgaact

SEQ ID NO: 13383 - DNA, 201 bp, Homo sapiens
ttggacttacttgctttccatttatatgttgtctaattccaaagagatttcgagacagctttcaattaaaaaaaacaaacaacaacaacaacaaaaaaaamcaccacataccgcatgggtattacacaggacctgtatggtcaaattggcaacgaccacaccacatgagaaggaagattattcttcctggaacctggctcc

SEQ ID NO: 13384 - DNA, 201 bp, Homo sapiens
aaagaaaagaaaattggagaatttataacgtctgatgtgacctgttctttaggtgttgaaattagaacggcctcactcacctgggacattcttcagctcaygccctgtacctggcttacagttgctcagtgaaatgctttcttgattgtagcatggtgggatttttataaatccaaatgacttagaggtaggtgtcacatt

SEQ ID NO: 13385 - DNA, 201 bp, Homo sapiens
gccaaaaggctgggcccttgtctcccaccccactgctgttactcatgtgttctcccacttgctcggcattctttcccatgctttttccttgatcatcactyactagctaacatctattttttcctaaacactctgttgcagttgtagtctgcagtcactctcctaagacttgatcatctattacgctgtttcgttctttat

SEQ ID NO: 13386 - DNA, 201 bp, Homo sapiens
ctgtgcacagggagcaaaccccaagccgactgcttgtctgtgccaccctcaaacaatgatttccccaaattggacagcctgggtttgtatccttgagcacrgttttgggaagagcattctgcatgaggcattgtagctatgtatatggagtataattctgttttcaggttgctctgccacagaggttaagaactccctctt

SEQ ID NO: 13387 - DNA, 201 bp, Homo sapiens
cacatgggagcatctttttattttattttacttttttttaaaaaaatgaggtctttattatcctggctggagtgcagtggtgtgatcatggctcactgtarccttgaactcctgggctcaagtgatcctcttgcctcaacctcccaagtagttgggctgatagacatgagctactgtgccacgtagcattcttggggatta

SEQ ID NO: 13388 - DNA, 201 bp, Homo sapiens
tggtttggtccagccttagagcgggtttgcaggtagacaccttcctaatgtttgttccacgtaagcccccggagcacagtatttccatcagctattttgtrgaagtgagcgattctcttttggttgtaaaccttcactatttcatgtgggtgacttgacaatggctccatttttgaatggcccattgatagttgtagtcta

SEQ ID NO: 13389 - DNA, 201 bp, Homo sapiens
ttgaacacttgattgaggtggtgcctgccaggtttctccagtgtaaattttctgcttttcgcattgttactgatatcttagggctgatactcacagtatgyagatgtctcgtttctcttttttcatatttcttttcttttttctttttttgagacagtcttgctctgttgcccaggcaggggagtgcagcctcagacttct

SEQ ID NO: 13390 - DNA, 201 bp, Homo sapiens; identical to SEQ ID NO: 1694

SEQ ID NO: 13391 - DNA, 201 bp, Homo sapiens
gctctgcagtgaacaattgaacctcatttctttaataataatacaggattcctgaaaaccaactgtattattgtttggaaaatagtttaaaaattatttcyttctaactgagacgtttaccctcttgtctcccttcagtctgcgggccaggcatcgacatccgcaacgactatcagcagctgaagcgcctggagaactgca

SEQ ID NO: 13392 - DNA, 201 bp, Homo sapiens; identical to SEQ ID NO: 1697

SEQ ID NO: 13393 - DNA, 201 bp, Homo sapiens
tggccattgaaagaaaaaataaatagcaaaatccccatcccagaagttctacttcctgttgttgtactattgagctctgaaaaacagctttgtaagtttargctcttgtttggactatttcagtggaattcttgagatctttttgtttggacaggcaagtatgaaggcgataagtcgaaagaactacagcttactcagcac

SEQ ID NO: 13394 - DNA, 201 bp, Homo sapiens
aattctaaagcttaagtaaattcagtaataataaactgtcaattatccaagcgatgaatataaatccataaggtttttcaaatccccagaaatccctttcrtctcccacctggttttgctgagcgcctgtctcttctgtctcttttctgattcccacctttcacttttcctccatttttcgcttaatggatttatacttta

SEQ ID NO: 13395 - DNA, 201 bp, Homo sapiens
ataagaagctgctcaagacatttacctatcctgaatgtttcaggccctcaaggtgccaggtagctgcaatatagttctagtgtagaaaagaaaaccctgaygaggtctatatattccaggactctgtctgaggccctttgacactccgggggcaccctgccgtgaccctgactctttcctgcatgtactgaggatggaggt

SEQ ID NO: 13396 - DNA, 201 bp, Homo sapiens
atcaggcctttctctgaaattcccatcaataactacaagatctgcccagtaccttgtgcatatcaggtctcaggaaattgtgagtttcttgtttcattaarcatttttctttccaggaatcatcattcatcgcattgccatatgtgtccagatcccccttttcagggagccagtaattcgaaagcacttgcctgtgttgaa

SEQ ID NO: 13397 - DNA, 201 bp, Homo sapiens
ggtgtggctttcatagctttggttctctggtcttcactttatctgccaagtgaagacatttgactggatgtcgtgatcttgagttgctttcagctccagawttcgaagaccccttccattgggcattcatctaatttcaaagatgctccctggctccagctctgcagtgaagcagaacaaactgatacagcctagcttggg

SEQ ID NO: 13398 - DNA, 201 bp, Homo sapiens
ttgaattgcactgaaaacgaaatttcataggtacacgatacagtagttagttttaaaagtttttaaaatattaaaaaattgaaagtatttaaaatattttwaaaatattttaaaatctgctgtgtgagatagataggagacctagcttttcttccttcttaccttgatccatagagaaagcaaccctgaaagaagaaaaac

SEQ ID NO: 13399 - DNA, 201 bp, Homo sapiens
gcagacctgaaaggaagcggagagatgtcatgcaagtggccaacaccaccatgtccagccgaagcaggaacaccacggccgcagacacctacaacatcacygacccggaagagctggagacagagtaccctttctttgagagcagagtggataacaaggagagaactgtcatttctaaccttcggcctttcacattgtacc

SEQ ID NO: 13400 - DNA, 201 bp, Homo sapiens
tacgtggtgccaggcaggtatccgggtacctttttacgtagggtattcagagaaggtctctagagaggtgacatttggacgaagacctaaaggaaagggargggaaaggcgaggagcttggagagcttggtgcatcttggtgggggatggggtaaactgagtcagttatgtagggccctggaggccacggtgaggacttcg

SEQ ID NO: 13401 - DNA, 201 bp, Homo sapiens
agaccccatagtcctgtggtttaccttctaatgagcatacttttgtcgatcaaacagggtgacctctctggtgtctctgcacactacctgtatggtctttscgtagctgatggggtctcctgactagtgattggtgattttaatctggattttgccacagcacttattttctaacatatgacttaatttacttaataattg

SEQ ID NO: 13402 - DNA, 201 bp, Homo sapiens
gcaagaactcagtgggtgagcacttccatttcttcaacaaatgcttctgagtccctgacctgtgccaggtgctcttcttgagctgagaatcctgcagggaraaaagagataaagaccccatagtcctgtggtttaccttctaatgagcatacttttgtcgatcaaacagggtgacctctctggtgtctctgcacactacct

SEQ ID NO: 13403 - DNA, 201 bp, Homo sapiens
cttgctttccatttatatgttgtctaattccaaagagatttcgagacagctttcaattaaaaaaaacaaacaacaacaacaacaaaaaaaaacaccacatrccgcatgggtattacacaggacctgtatggtcaaattggcaacgaccacaccacatgagaaggaagattattcttcctggaacctggctcccttgagatt

SEQ ID NO: 13404 - DNA, 201 bp, Homo sapiens
gtgccttttgatttgatacctatttatttgtttggaaagaagcttttaaaatcaaaaccatgaatctgtggttatcttcaaaggataaattatgataggtrgttgttacccaggttaccattttaagatgattatggctggcccaaattaggggatcttttcatatatgtattatatattttaacttcagtcttttaaaaa

SEQ ID NO: 13405 - DNA, 201 bp, Homo sapiens
ttcaagatttctctttaggtaaatagatttgtatttttgatggccatcctagtccagtgtaaagatatggacaagaaaccccacataaaggaagcaagatygctggctgctttctctaggtagcttgagttgtatactaatttgtagattatttctcttcatcgaaaaaacaaaacattctgcagagggcagtcatgtgtc

SEQ ID NO: 13406 - DNA, 201 bp, Homo sapiens
gggattacaggcatgagccaccatgctggccttctggttctttttaaatcaattttagtaatttagtaatttccagcaagtcaattaaaaattatagctcrgttgtatgtagtattttctgtgtggtgttatgccctctgtatctgttttctcagatgttttagttgcttttctctcttaatcttgattagacctgccaga

SEQ ID NO: 13407 - DNA, 201 bp, Homo sapiens
taaagtgtgccttttgatttgatacctatttatttgtttggaaagaagcttttaaaatcaaaaccatgaatctgtggttatcttcaaaggataaattatgrtaggtagttgttacccaggttaccattttaagatgattatggctggcccaaattaggggatcttttcatatatgtattatatattttaacttcagtcttt

SEQ ID NO: 13408 - DNA, 201 bp, Homo sapiens
gcagtactgccagactcagggacccagttcatcgagaggggcagtgtttctcttatgctgccttaaaggcattggatgccttttggaaagccagtggacarctcctgcatccacccaagattaatgttaacagcttaaagaatcattgcaatcaagggaaattttgcaacactttgttgggatatttttaaataaatgtgt

SEQ ID NO: 13409 - DNA, 201 bp, Homo sapiens
agctcctaggctcaagtaatcctccacctcagcctcctgagtagctgggactactggtatgcgccaccatgcctggctaagttttttctttttcttttagrggcaggatcttgctgtgttgcccaggctggtctcaaactcatgacctcaagtgatcctcccaccttcacctcccaaagtgctggcattgcaggcgtgagc

SEQ ID NO: 13410 - DNA, 201 bp, Homo sapiens
tttatggaaaagcatctctttagccagaattttaaaataaagaggataacttcctggtgagaacagacgtggaaaggaaggcactttggtttcacgctcaygtaagagagggctgttggcggtcactcctcagaactatggccagccctggatggtagccagctgctttttgccccaaaagtctgtttagctgggtctctg

SEQ ID NO: 13411 - DNA, 201 bp, Homo sapiens
ccaaatacataaccattattatatgacttagcatttataaggcatttctatgcatcctgagagactagagcactctcaaatgaggtttcagagtaagattmatctttgcaaatgaagacaaattagcaaaatcttcctatttttaaagtgtgccttttgatttgatacctatttatttgtttggaaagaagcttttaaaat

SEQ ID NO: 13412 - DNA, 201 bp, Homo sapiens
ttcttaccttgatccatagagaaagcaaccctgaaagaagaaaaactcacccatttgagctttcttttgtttccactgagcaatacggaagaaattcaccrctggttataggtcttcagtgctttcttcagagtgggattgttttttgtttcaccataagtagtagtctattaaattaacagttgctagagaagaagctgc

SEQ ID NO: 13413 - DNA, 201 bp, Homo sapiens
agacgtacccaagactgtgaagaaaaagaggttttaattggacttacaattccacatggctggggaggcctcagaatcatggcaggaggcaaaaggtactkcttacatggtggcagcaagagaaaatgtggaagaagcaaaagtggaaaccctgataaacccatcagatctcgtcagacttattcactatcatgagaatag

SEQ ID NO: 13414 - DNA, 201 bp, Homo sapiens
aagtgtgtagggttgttgaggaacagtgtgctgcacagggaggaaagacgtggggcagcattgtgggaagagcaaccaagattctcataggcttgggagcrgaagccctgaggtctgttgctggactagatatgtgaggtgtgagaggagagaagaatcaggaatgactctttgattcttaacgtgagcaactcagagaat

SEQ ID NO: 13415 - DNA, 201 bp, Homo sapiens
ttctggcattgggaaagaaagaaaaatggcactagcagccttttttttttttttttttttttttccccaaaaaatttgctactcttgaggttctgtcaaaraatgtgctgtggcctctagaagcatttttaaaaagagactttcacaagtgattgtgcaaaattgtgaggtcactgaataggtgtgtatcctcctaaggag

SEQ ID NO: 13416 - DNA, 201 bp, Homo sapiens; identical to SEQ ID NO: 1696

SEQ ID NO: 13417 - DNA, 201 bp, Homo sapiens
ctgggacagatctgcttcttgatactgcagggctccagccttccttccagccagctcatttctcagggaagccttgttttcctttttcagaaaatttaaaygtatatttaacgcacaatttaactccctttcctgttgataatttttttcttcttcatattttgttattaataatagcttacagaatgggatcagtatcag

SEQ ID NO: 13418 - DNA, 201 bp, Homo sapiens
ctgcctgcccgcccaacacctacaggtttgagggctggcgctgtgtggaccgtgacttctgcgccaacatcctcagcgccgagagcagcgactccgagggrtttgtgatccacgacggcgagtgcatgcaggagtgcccctcgggcttcatccgcaacggcagccagaggtcagtcgcggccacacgtgtggtcactaccc

SEQ ID NO: 13419 - DNA, 201 bp, Homo sapiens
ctgggggtgtgtgggggtggttggttggggtttgcttgttagtttgttgtaaaagcccagcttttcattcttggaaagatttcagccaactcgagagggtkacctgccaggaatgctgcagaagcaagaactcagtgggtgagcacttccatttcttcaacaaatgcttctgagtccctgacctgtgccaggtgctcttct

SEQ ID NO: 13420 - DNA, 201 bp, Homo sapiens
tacaggcatgagccaccacacctggcctgggttgctttttaaattcatacctactgtcttatttgggtctcaaatgtgatcagtggttatacttttcttgstatgcatttaagttggagcaggctccggggcaccacttccctccctagagttgatgaacccctcatatcagtgacctccccatgtcacagtgtatctcgt

SEQ ID NO: 13421 - DNA, 201 bp, Homo sapiens
tagtaatctttgcgagaacattccaaagatgatagttttacatttgtatgtttttttccgaggcacttttgaatcatcagatagattaaatataagttccrtgtatttttgaaggtgggagtgttctttggtacagttcccccaaaaaactggttctcatgaggcttatgtggtaattctgttaacgagaatgtatgatta

SEQ ID NO: 13422 - DNA, 201 bp, Homo sapiens
atgcattgtttgtatgaataatagcttctaaaaagaaaatcagtaaggaagggagtcatcccagatgatggaattgatagaacaaggcaagaccactttcyccctctgtgagggtggactgtgactctacgagagaagctattctgctttgaaatgcggcactagaggttggtgtgtgtagcttttgactgtgaagtgtcc

SEQ ID NO: 13423 - DNA, 201 bp, Homo sapiens
aggcagcctgttgacccaacccatgcatgccggtctttgggactcctagatgtggaccctggagtgaatagggatcaggtgggaaatgagttcctttgatsaagatccttgtaccagtgaactgaccccactccccgtctggattcctgtggtgattaccctctgtattagtctgttttcatgctgctgataaagacgtac

SEQ ID NO: 13424 - DNA, 201 bp, Homo sapiens
gccccttgttttcaggttaggaaacccaggttcatgtccaagtccctgggcaagtagccagcgtaactgattgacctaaaacaaaggatggagcccttggrgctctgcatagtgaaatgtatgatttcttagtggaaaacgagaaagccactgaggaagcccagaagggaacttagcatatacagccagctttggggaagg

SEQ ID NO: 13425 - DNA, 201 bp, Homo sapiens
acagcaactgtctgttctcctatagtgttaataactaaatctcttattggcaaaggaaatgtattgtggagcaggtggcaaagaggacctgtgttacgtgrccagcaggctagaggggactgtggccaagggcaggtgcgctaacatcgatttctgtgcttctaggaattactccttctacgtcctcgacaaccagaactt

SEQ ID NO: 13426 - DNA, 201 bp, Homo sapiens
gagatactgtatgcaaagaattgtcatgaagacataaaatcaagtcttggtgtaaaacttttaataaatttaaaggcatgtctctgtttttctcctcctcyatggggattttcatgtggttagtaataaaactgtaggcagttgtatgtctagatttctatgtaatttgtttgtgttcgtatatgcacacctgtatacatg

SEQ ID NO: 13427 - DNA, 201 bp, Homo sapiens
tgctcttctgagttctcttctcaaatacctgttttcttgggtcacaggagattaggagattaaagccattctctctggtcctgcacctcccttgccaggcrtggctaagaggtttgtccttgtggaaggagctgagtgggttggtcgacctgtgcttttccgtgggtaccttaattctaccccatattccgtaatgctttc

SEQ ID NO: 13428 - DNA, 201 bp, Homo sapiens
acaaagagttttcttggtgtgtgtctgtgcttagaatttagaaaataagtcatccagtattgaggccattttatgaaaagcctttaaaatctgcaaatgcrttggcccagcacttccacttctagggatttatcctaagaaaatagtcttgggtatctgccaataatgttcactggagtgttgtttataatgtgcaaaaca

SEQ ID NO: 13429 - DNA, 201 bp, Homo sapiens
tgccgtctctgcctgctccatctggctgatcccaggcaggcagctcagctctcagcagacacagatccccagcacatatgaacgtgaaagaggcttctccrtgggagcgaagtggccagcaggtgtcacaggctgtgtgggcccagcatcgtgtgggcactgctgggggaatcccatcacagcatgtgctggcgttagtag

SEQ ID NO: 13430 - DNA, 201 bp, Homo sapiens
ttttagtttgttcaccacgcttgatggcagatttgcctctggatcctcaggccacgttcctatggtgggtagggatctctctctctctctctctctctgtstgtgtgtgtgtgtgtgtgtgtgtgtgtgtgtaaatagtgatttctctaagttaataaagaatgtggggtgacctcctacacatgcccgtatgctattgtg

SEQ ID NO: 13431 - DNA, 201 bp, Homo sapiens
tttttgagggggaaaaatacagcaaggggaaatgttttattaacaataaatatgcggcttaccatatctgtagggcacagatttggttagtagtattttgraggcaggataaaggaagatcctaaaatctctgtgctgtgtagcttccattcgagctgcacatgttaaaaacattctaggatccacacagtttaaacaagg

SEQ ID NO: 13432 - DNA, 201 bp, Homo sapiens
ttgggcttagtagtaaaaagggggaacaaaataaaagaagatcaggagacaaagagcctacagtacaaaaaaggaaagacgaaggttgatattattagaartacttcctgggcagccttactgtttgaattaggatcacccccacccccacctcccagaggtattagttgtaatgcagagacaaatggaaactagtcagat

SEQ ID NO: 13433 - DNA, 201 bp, Homo sapiens
tcaaagagaacaacaattcaccacaccccaacatggtaacagtctttttgttttagaagcatctgtgaattgccaagactcgtagaactaagatgtattcraagtcagtcgattttctggaaacgacccagtccctgaagatagtcttttggggagttgagtgttttgagagggacaccccctctacagggacttaaaatg

SEQ ID NO: 13434 - DNA, 201 bp, Homo sapiens
tcctgcatagaaatatttatttattcattcattcatttttttgagacaggttctcactctgttgcccaggctggagtgcagtggtgcagtctcagctcccwgtagcctcaacctcctgggctcaggcgattctcctgcctcagccccctgagtagctgggattccaggtgtgtgccatcacacctggctaattttttaata

SEQ ID NO: 13435 - DNA, 201 bp, Homo sapiens
ttagtatcctcaaattatcttgaaatcctcagagatctgaaatactagtactgactgtacagttttcttactcaaatctatagcatgtggaaagttgacakcaagccatgccatcgcctcctggtattctctgtgggtttaaggaagcagcatcttatattctttggcttagagttcccccaaagcacgttctgtctaagg

SEQ ID NO: 13436 - DNA, 201 bp, Homo sapiens
tgtgtgatcgcattggagctacttcaaagagcaaacacaccactttgatttatttctcttagtgatacagtatttagagagggagatactttttatcttcrtgggatacttacagtggtgctctagaagccatgtactgcttctggcttctccttcctttcctccaaggctcctcctgcctcctcccaaagctctgtgccc

SEQ ID NO: 13437 - DNA, 201 bp, Homo sapiens
aatgtttggccagagtaatccatccttactcatcctctccatgtgaggtttttgtttctttttaaagaaggctacaacacaacacatactactctgaagtygaattcaagagccccgcgccccacctgtggcaggcctgagggagccgccgcagtgagtgtgcacacagctgcatggccaggactccggcatgcaccacgt

SEQ ID NO: 13438 - DNA, 201 bp, Homo sapiens
gcgaagaaaagtggagagagaacaaccttcatgtcttgagccttttgtgacttctcctagactctgttgggagcttttcctgtgtgatcacatgacattcmcccatctaagcagccgaggcttattcctcccgactgcagccctctttgatctccctcttccttcctttgccttctatatccaggtggctaccccggtcta

SEQ ID NO: 13439 - DNA, 201 bp, Homo sapiens
tgcctcatctgccctttttggtgagaatgtcctttttgtgatgactttatgcactcccttttgcttttcggttgttccaagccccattcaaatccatgacraggactctgctctctgatgggcaggaccttgatgaggccacaggtgctcactgctgagtgggaggaagcctgggtgggctccagggacctgcagagtgta

SEQ ID NO: 13440 - DNA, 201 bp, Homo sapiens
ttttgtggttggtgtattctgaaccctccgctgtgtgagcagcccgctcaggggcagtgtacgtggctgatctccactgtcctgcccgcgtggatgggggsgttattctcagtgtacgtggctgatctccactgtcctgcccgtgtggatgggggggttattctcaggtcagcccagtgttggcctccctccctgggaacc

SEQ ID NO: 13441 - DNA, 201 bp, Homo sapiens
gaggaagtgacggggactaaagggcgccaaagcaaaggggacataaacaccaggaacaacggggagagagcctcctgtgagtgacagcatccaaaacaccrtgggcccaaccatcatgataacagcagaccctcctcccatgtgtgatggcagctttcctctgcggcccctcctggtttcacatgggggaccactagacca

SEQ ID NO: 13442 - DNA, 201 bp, Homo sapiens
agtccctgggcaagtagccagcgtaactgattgacctaaaacaaaggatggagcccttggggctctgcatagtgaaatgtatgatttcttagtggaaaacragaaagccactgaggaagcccagaagggaacttagcatatacagccagctttggggaagggggaagcagtgccaagcaagacaggtgcttttcagagaca

SEQ ID NO: 13443 - DNA, 201 bp, Homo sapiens
catatacagccagctttggggaagggggaagcagtgccaagcaagacaggtgcttttcagagacacatgaatctctgtcactcacggatgtactctttgcmccaggtgaaagtgacgtcctgcatttcacctccaccaccacgtcgaagaatcgcatcatcataacctggcaccggtaccggccccctgactacagggatc

SEQ ID NO: 13444 - DNA, 201 bp, Homo sapiens
gagcagatttggggagatgttagtcaaaggatacaaaatttcagttagataggaggaataagttcaatagatatattgtacatgatgacagtaataatgakgtattcttaaaaattgctgagacaatagattttaagtgttctcaccacacacaaaaaaatgtgatgtaatacatatgttaattaggctcattcagctgtt

SEQ ID NO: 13445 - DNA, 201 bp, Homo sapiens
gaaggaggccagttactagagcagagtggccgtagaggctgcaacacggtggccaaagcatgaagctgctgtatagtggcaaggtcacagtgatttccccrcagcctcggtttagagggagacggggtgtgctgagctgtgcctgcttctgtagaaggggccttctccaagtctgagtagccttaagccattaggactgct

SEQ ID NO: 13446 - DNA, 201 bp, Homo sapiens
cttcagtgcagtggcataatcttggcccacttcagccttgacctcccaggctcaagcagtcctcccacctcagcctccctggtagccgggaccacaggtgytttgccgccacacccggctaattttttattttttttgtagtttttgtagagatggggttttgccacgttgcgcaggctggtctagcattactgggctcaa

SEQ ID NO: 13447 - DNA, 201 bp, Homo sapiens
atgcatccttttttacttcagagtaagtcggccttggttaagtcttaatatttctcatgcctatttttttttcttcaaatgaaaacatacggagagaaaayagcatgtttatgccttttggttgtacccagcactgcccagaatggcttacagagtttatacccatggaggtttcgtaaaggtgacattaacttcgcagta

SEQ ID NO: 13448 - DNA, 201 bp, Homo sapiens
tgaaaggttagatctttgttctgagataaattaagtggaaaaaggtgtagagcattatatgtactctgattcttcagggcttaatttaaaaagagcatgtwtgctggtgaatgctggttcaatcattaagaagtttttgagaaggaatcccagaaagtaataagcacttatttttcatggaaaggaaccggaagtgcttgg

SEQ ID NO: 13449 - DNA, 201 bp, Homo sapiens
gggtttttagtttgttcaccacgcttgatggcagatttgcctctggatcctcaggccacgttcctatggtgggtagggatctctctctctctctctctctstgtgtgtgtgtgtgtgtgtgtgtgtgtgtgtgtgtaaatagtgatttctctaagttaataaagaatgtggggtgacctcctacacatgcccgtatgctat

SEQ ID NO: 13450 - DNA, 201 bp, Homo sapiens
cagtaactgttgaagtggctcttcctgaggcagaccattcaattctgtaatgcccgactggggaagcccagagtccagtcacttcatttcttcttctataraagtctaattgattatttgtttatttagacctcccattatagaaagtgtgacatgctgggcctctggggaagatttttgagggttttgatgtcagagccc

SEQ ID NO: 13451 - DNA, 201 bp, Homo sapiens
gaaccgtaagaaaagggggctcccacctcccgctctggggtcgccacttgcctcgcaggcaggaggaggctcccagagtagatacaacttgcccgtcaccyggatgggttggtagtgcacatatgcacggggcgcagtttaaaatgaaagtaaaagatgcaaatgtgtttgcaaaagaaaaattaacataggatacgtgcg

SEQ ID NO: 13452 - DNA, 201 bp, Homo sapiens
gtagaaagcaagaggattttccttgcagtcactgaaggtaccttgtgtacacagaaagaagacagagggagccccggatgcctcggtatccctcagagccrgatccttcagacctgtgcagtacctgtggatttggttagtcgatgatgcgctgccattaaaacaaaggcatcggccctggaatagagaagttcagtgaga

SEQ ID NO: 13453 - DNA, 201 bp, Homo sapiens
gaaaagcatctaacatgtttccaagcacataggtttttggtaaatggtggcagctgctgctattttttttttaaattaaactatctaagagttgcattctragaccatctaaaattctgagtcttaagctgtgttgactatatatgttcactaccataactaaatggtccttctgtattgcttttctaaattgtagaattt

SEQ ID NO: 13454 - DNA, 201 bp, Homo sapiens
gcagaagaacagaacagtccttggagcttggtaggaggtgtgagggcttatgggggacagttgtcttttcaagtcaaggaggaataagggcttctggggcsggtggaaagggtgagtcttaggcagggaagggtgaccatccaggttagatcacttcttctgcggggtcagcttggccgctgttaggttttcaggatgtca

SEQ ID NO: 13455 - DNA, 201 bp, Homo sapiens
cctaaggggtgtaaggaactccagaggtcatctggttcagcctgctacagggcaggaatctccacggtagcatcgcagaccctccactgtccttttaaagyccccacatgcattggaaatgtacggtgctcaccctttggtacagagactgaggaatgtgagtttatgctcaagtcattaacaagacagaattcttaggct

SEQ ID NO: 13456 - DNA, 201 bp, Homo sapiens
tggggaagggggaagcagtgccaagcaagacaggtgcttttcagagacacatgaatctctgtcactcacggatgtactctttgccccaggtgaaagtgacrtcctgcatttcacctccaccaccacgtcgaagaatcgcatcatcataacctggcaccggtaccggccccctgactacagggatctcatcagcttcaccgt

SEQ ID NO: 13457 - DNA, 201 bp, Homo sapiens
ttttaagtgttctcaccacacacaaaaaaatgtgatgtaatacatatgttaattaggctcattcagctgttctacaatgtatgcatatttcaaaacaataygttgtacatgataaatatacaatttttatttgtatattaaaattaattaattttaaaaaagatctccagtagtcacctggtcagcaccagatattctaat

SEQ ID NO: 13458 - DNA, 201 bp, Homo sapiens
attgattatttgtttatttagacctcccattatagaaagtgtgacatgctgggcctctggggaagatttttgagggttttgatgtcagagccccgaacttyctctgaacttaattgtctttcagaccctttaagaatgtcacagagtatgatgggcaggatgcctgcggctccaacagctggaacatggtggacgtggacc

SEQ ID NO: 13459 - DNA, 201 bp, Homo sapiens
tggtcttagacttgtagcaggactcaaatgtctgcagcggcattggaaaggggtgccgtccagtgtgtgcatgtgtgtgtgtgtttattttaaattgtctrtggaactatctcaaagattgaggccagcaggacttgacctatacatagatgtagactgtacatagatgtaagaatttctattcattttatgaaaatgaat

SEQ ID NO: 13460 - DNA, 201 bp, Homo sapiens
ggatctgggagcacggtgctaggactctctaagcgtgacctccttcagtttggcccagagtggtcagatagtttgccggggcataggatggatgacaggcytcatacgcatcacgtctgaagggaaagcccttgaattttccacgctactttttagtaacagtaggctttgtcataattggcttcatgttccagctttcct

SEQ ID NO: 13461 - DNA, 201 bp, Homo sapiens
agaaagaattcggggatgatttcagagtacactagaatattttttaaaagaatattttataaaaatacagtgatagtaaaagaagtagaaggccaaattcygcccccagccccttcttaatattggactttattcctttgcttttttcccttgctgccatctaaggaggctttctgtgctatagcatccagttcctctgcc

SEQ ID NO: 13462 - DNA, 201 bp, Homo sapiens
ttaagtgttctcaccacacacaaaaaaatgtgatgtaatacatatgttaattaggctcattcagctgttctacaatgtatgcatatttcaaaacaatatgytgtacatgataaatatacaatttttatttgtatattaaaattaattaattttaaaaaagatctccagtagtcacctggtcagcaccagatattctaatct

SEQ ID NO: 13463 - DNA, 201 bp, Homo sapiens
atataaccatatgtaagtgactgtgctatcaggagacagaacaacaagacccagaaagactcagtgacccacagagccagttccacccaaacaagtcttastaatgagattagataatgagagtgtattttcttcatcaattcatgtagctcagcaaggctggaaactgcttgcacacttctgcagagaaaaaaaaaagtt

SEQ ID NO: 13464 - DNA, 201 bp, Homo sapiens
ttttacagatgggaagagagaggatcaagatcacagaagctaatggtttgtcccagaccaaacaaggagttcctaggagagactgaactttaaagatatcractctctgcaggtctaagtggatgaaaggacagtggtgggggtgaggatttcgtagtgtgtttttgcattgtctcctcaatgagtgatctggtgctggtg

SEQ ID NO: 13465 - DNA, 201 bp, Homo sapiens
gtagccactgtactcactgaagatgcattgttttttttttttttttttttttaagcgagcagcagcaagatttattgtgaagagtgaaagaacaaagcttycacagcatggaaagggacccaagcgggttgccctgaagatgcattttttaacttgctttttaactaagtatttttgctctgagctttcctggatctgtaa

SEQ ID NO: 13466 - DNA, 201 bp, Homo sapiens
agctttgtgcacactgaacttggagaaccactgtgttggactccgagtcctcttgcctggatgagaggcccaagagcactgcatgttagtggctcttcctyctcccccacacctccagggactggagctggggctgctcagaatgaaagatgaatgggggagggagaaggcccagggttgaccccccacaagcttgtctcc

SEQ ID NO: 13467 - DNA, 201 bp, Homo sapiens
gagcactgcatgttagtggctcttcctcctcccccacacctccagggactggagctggggctgctcagaatgaaagatgaatgggggagggagaaggcccrgggttgaccccccacaagcttgtctccctgtctcatgctgtctcctatcccatcatgctgctgattgggcaggatttacttccatggataatgggagact

SEQ ID NO: 13468 - DNA, 201 bp, Homo sapiens
ggctaacatatggctttaagctggatgttacaatgagagctggagtttcgtctgattgcacatagccttgcttttctgtctttggaaaagtagctcactgyagagccctggtaaacgtttgaactgcattgcgggagtaggcagaagaacagaacagtccttggagcttggtaggaggtgtgagggcttatgggggacagt

SEQ ID NO: 13469 - DNA, 201 bp, Homo sapiens
tggaggtaggaaagttccttgaactctttcttgtgcccttccagctgtgagctgtgtcaccattgtattatttttacattgttgttgttcttgaaaaagcttttttttttttttcaaggcagagtcttactctgtcgcccaggctagagtacaatggtgcgatctcagttcactgcaatctccgcctcctggtttcaagca

SEQ ID NO: 13470 - DNA, 201 bp, Homo sapiens
gagcaggctgtttaaatcacattttaagtaaaaaccaaagtgcacagatgatctgcagaacttctgggggataagaagctgctttcctcgaagaagttcayctccaaaccagcgcccatggctcagcagccagcatggcagccccaggggtacatgggacttgggcatgtgaggctggtgagggacagggacagctgggtc

SEQ ID NO: 13471 - DNA, 201 bp, Homo sapiens
aagtgcagtggcgcaatctcagctcactgcaacctctgccttccgggttcaagcgattctcctgcctcagcctcctgagtagctgggattacatgcgcacrccaccacacccggctaatttttgtatttttagtagagatggggtttcaccatgttggttaggctggtctcaaactcctgacgtcatgatccacctgcctc

SEQ ID NO: 13472 - DNA, 201 bp, Homo sapiens
aagctttcagaaccactgacttgtggtgatttttgcatgccaagtatttggaaaatatctggagccccttcagctctcaccagttaaacctatttgtacawttgttctggtttcttcctgtgcttgaaaagcctctttctttgttgcgttaatacctctgtcttgctttcctcatgtgtatgccagtgtgacattctcggc

SEQ ID NO: 13473 - DNA, 201 bp, Homo sapiens
ttgctgtggaggctttctggtatttcatttcaggtgcagatgccttcactttcccacaaaaaaaaccccaacaaaacctaagaccttactgcaactaagtytccaagtactttttaacccaatgggatgaacagcctgtggtctgctcagatcaccctgagtgcgtgtgagaaggcctgggctttgccaggaaatccagga

SEQ ID NO: 13474 - DNA, 201 bp, Homo sapiens
tctgggggataagaagctgctttcctcgaagaagttcacctccaaaccagcgcccatggctcagcagccagcatggcagccccaggggtacatgggacttsggcatgtgaggctggtgagggacagggacagctgggtccagcagtgcctttcctagggacggttgccacgtcacctgtctgccctgtacttccatttcct

SEQ ID NO: 13475 - DNA, 201 bp, Homo sapiens
tgaacctgggaggaggaggttgcagtgagccaagattgtgtcattgcactccagcgagtgcagtgtaaatcccttaaggaaacagtgtgttgtggtaatcrtgatatcatagtaaataggttttgttcgttatttttttcttttacttccttttctaccagtgactagtcctaatgtgttctaacttttgaaaataaagta

SEQ ID NO: 13476 - DNA, 201 bp, Homo sapiens
cttacagtggtgctctagaagccatgtactgcttctggcttctccttcctttcctccaaggctcctcctgcctcctcccaaagctctgtgccctgaaagakccttgagccattgctcagatgtcaaaattgtattaagcagacacatcaaattaaaacttttgggatcactcaccaatatggtttcctgtacagtactgcc

SEQ ID NO: 13477 - DNA, 201 bp, Homo sapiens
gtgagctggccctgacttctctccagtatcatcattttctaggaaagccatttccccacaacccccaaggaaagcatatcataaacaagttttcccttggrgaggttccctcgactcccttctctcctctcccttcctctctgaattgttgccatatgtgaagtccacttttctagttgtcatgctacctgttgacactaa

SEQ ID NO: 13478 - DNA, 201 bp, Homo sapiens
ccggcattgttggcggtccttgtctttgccactgggaatctggtttcctcagactctacgtccacgtttcaggattgatccagagtcagtgtcctgcttaygcttttgaatgaatgatcccacctcagctgcaggatttctgcttagtttcctaaaaatttcactttgggttatgagcttccaattctaaacctgctaaag

SEQ ID NO: 13479 - DNA, 201 bp, Homo sapiens
tgggagataaatgctgagacataaagccagcaagaactgagttttcatttggttgcctccgtgggtctgaagtctttgacccttactttgctgcttactgrgtaagcagtgtgtctgcttttattccttagaagcagtgacttccccttctcggcccctttggaaattcttttgctgttcttcatttgggcttaatttttt

SEQ ID NO: 13480 - DNA, 201 bp, Homo sapiens
gcctgagtcatgaaaccggaccacattaagggcgacacatggtccaatcactgtttgtaaaagtccacgtatttcaaactcctctctcctgccactgctgrgctgtttccctctttgaggacctggtctccgcagcatttattcattagatggcagtcctaggggagtctcgctttggggaaacctctcctcctgcacatt

SEQ ID NO: 13481 - DNA, 201 bp, Homo sapiens
ctgccactgctgggctgtttccctctttgaggacctggtctccgcagcatttattcattagatggcagtcctaggggagtctcgctttggggaaacctctsctcctgcacattcaagaaaacaaccgcggagacttagggtcggtactggtttccagtcacttacgtagcaaacgaagcaagaggaacgtgcctgggagga

SEQ ID NO: 13482 - DNA, 201 bp, Homo sapiens
tatttgtctagcatcattgaaagagttttttgcttgagttgatttcccaggtaattgaagcttacttctcaaagcacaagatattttttctcatatattarcggtcttaagtgagtgagacccctaagaattcttaattcctttatcttacttttcctacaggaaacttattatgttttcctagataggaattgtgctacc

SEQ ID NO: 13483 - DNA, 201 bp, Homo sapiens
gaaaagcttgatgaaataggtgactggagatctggcagagtatttcttgccagcatcgattgaggcacctctgaaaagtccaaaactcactcccttcctcyccagtttcaggcacagaataaaaattcagaacacatggccttggtcctggctctgtggctggctgcctgtggtcctcagacagctgctgcaggttcctgg

SEQ ID NO: 13484 - DNA, 201 bp, Homo sapiens
acatgccgtttgaatgtataccatgaagaccccttagctcagggagctttgctctatttaagtaatgtttatattcttaatgaaccaaagaggaagtggtyatgggaaaagagccaggactagatttcattctaatgcttataaggagagttctaggaaaccctcagacttggtaaaccaaggcatttggagatactatga

SEQ ID NO: 13485 - DNA, 201 bp, Homo sapiens
ggcgccacacccaggtgatgcagggggaagccaggctgtattccggggtcaaagcaacactaactcacctctctgctcatttcagacagcttgcctttttytgagatgtcctgttttgtgttgctttttttgttttgttttctatcttggtttccaccaaggtgttagatttctcctcctcctagccaggtggccctgtga

SEQ ID NO: 13486 - DNA, 201 bp, Homo sapiens; identical to SEQ ID NO: 2827

SEQ ID NO: 13487 - DNA, 201 bp, Homo sapiens
agtctcgctctgtcgcccaggctggagtgcagtggtgcagtctcggctcactgcaacctccacctcccaagttcacgccattctcctgcctcagcctcccragtagctgggactacaggcgcctgccaccacgcctggctaattttttgtatttttagtggagacagcgttgcaccgtgttagccaggatggtctcaatct

SEQ ID NO: 13488 - DNA, 201 bp, Homo sapiens
ctgggtttgtgcccttcgtgctgcactgacaggtcaaagccgactcaggcctttgatgtctgctctaggagcaaaagtgattcctggtcccgcagccgttyccactgccttgtgtatgaaggtctgctgctctgaggtggatggtggctctaggcaggctgtttccgctgggtgcggttgttgctgcaggtttttctatat

SEQ ID NO: 13489 - DNA, 201 bp, Homo sapiens
gtatcctccactgtatgctgtcaccccaagggcaagcactgcatctgcttagtgaaggatttattgttcggaagatacattttccccttgagcagagagtrgcgtatcctggcagtcttcggtgagccagttgtaccaggattatgaaatgcagatgtttactgtgtcattgttgctgtcattgctactgaggagtactga

SEQ ID NO: 13490 - DNA, 201 bp, Homo sapiens
ccaccatgttggccaggctggtctcaaactcctgacctcagatgatccgcccgcctcagcctcccaaagtgttaggattacaggtgtgagccaccatgccygactctttttaattcttaatgtggctacttgaaaatttaaaattacagatgtggcttgcattctgtgttggtaagctgctttagagcatttcttttaaca

SEQ ID NO: 13491 - DNA, 201 bp, Homo sapiens
gcgaaggtgagtctgggagagacgccatggagtcagtgtgagttctgcagcctcccaagttccgctggcgtgagaggcttgcctggtgccagggctctggrcattgggaacattgcctggtctaccgggcaagaaacgtgaaccaccgcagtgaactggcagcgcgttggcatttttccctccatgtttttataaaaccgc

SEQ ID NO: 13492 - DNA, 201 bp, Homo sapiens
gtcttgtccctgttccaggagaagggctgggtatgtgtcccccaaaggggagagcattcgagaaggatggcgccagcctccccagaactgacctgtggttwaaaaaaaaaaaaaaaattgtgctttttaaaagatgagttttatcagctcacacatccttctagagtctaatggagattttttgtgtgtgtggaaatagta

SEQ ID NO: 13493 - DNA, 201 bp, Homo sapiens
aggcgtcacatggcttgtttgtgctgatgtcactgcctcgctgctctcctgtggcacctcctcggtccctggccacagggcacagagccaagcacatctcrtgctcttggcccagttacgcttctgcccaggggtaagtcagctggagaggaattcacagcccaggcatttcatgtcgttatggcctattttaattttttt

SEQ ID NO: 13494 - DNA, 201 bp, Homo sapiens
ctcgacaattcacaactcttttattagctatcttaaaaaaatttattactggcatcaattagcctgagtcatgaaaccggaccacattaagggcgacacayggtccaatcactgtttgtaaaagtccacgtatttcaaactcctctctcctgccactgctgggctgtttccctctttgaggacctggtctccgcagcattt

SEQ ID NO: 13495 - DNA, 201 bp, Homo sapiens
cctgtctttggaaccagaacatcccaagggaactccttcgcactggcgttgagtgggaccccgggatccaggctggcccagggcggcaccctcagggctgkgcccgctggagtgctaggtggaggcagcacagacgccacggtggcccaagagcccctttgcttcttgctgggggaccagggctgtggtgctggcccactt

SEQ ID NO: 13496 - DNA, 201 bp, Homo sapiens; identical to SEQ ID NO: 2824

SEQ ID NO: 13497 - DNA, 201 bp, Homo sapiens
ttaaatttcacctgcctgtttcctttttattcttttttttttttttttgaggcggagtttcgctctcatcacccaggctggagtgcagcggcgcgatctcrgctcactgcaacctccgtctcctgggttcaagcgattctcttgcctcagcctcccaagtagctggaattacaagcatgtgccaccatgcccgtctaattt

SEQ ID NO: 13498 - DNA, 201 bp, Homo sapiens
tttccgggaaattgacttcccttccccttgtcctgaaaactcaggcatgggcatatttcttggagattttctagttgaatcagaacttcctcttggtttgygtagattccatttagacctgcattgtccagtgtggtagccgcttattgagtaagccacgtggcttattgagtacttgaactgtggcttgtccgaattggg

SEQ ID NO: 13499 - DNA, 201 bp, Homo sapiens
atagagcagtcccttgattctgctttgtccccattaatgacagatctgagggcatccagaaggaatctccacaagcccagcctccacagtggctgcttccyctacatggtagagtggtgctcacctccactcctccatagatgccaagtcatctgtggtatagatgtggatgtctttgttcaaatggtccttgagtctttg

SEQ ID NO: 13500 - DNA, 201 bp, Homo sapiens
tttggccagtcacagtggctcatacctatctcagcaccttgggaggctgaggcaggcagattgcttgaggtcaggaggccaacatggtgaaaccccatctytactaaaaatacaaaaattagccgggcctggtgatgggtgcctgtatttccagctactcaggaggctgaggcaggagaatcacttgaacccaggaggtgg

SEQ ID NO: 13501 - DNA, 201 bp, Homo sapiens
ctccttgtaaatggccggccagcggagggcatggggtggggaagactggatacacacccctgtgctctgggagtacgttggctgggcggcatgctcattarctgctgcttccgaacataggttcagctgaagtgtatcccaggcagtggacacttcgtgtggaattcagaaaggtggcgcaggaaggataccagggaaagc

SEQ ID NO: 13502 - DNA, 201 bp, Homo sapiens
cgtcctcagttttgtgaagcaacagcctctgtgcctctttctctgcatgctctgttgacggtctagtcttgagagagaacctgctgctgtcccgtctgtcrtagccttcctagcaactcttaggcctgcatgctgtgttttcatgatctcccccaaagcggcactttgatgttttttcagagtcaaagtatcactgtggat

SEQ ID NO: 13503 - DNA, 201 bp, Homo sapiens
ctgctgcgggataagggccagggcagaggtgtgaacgcagccgtggaagacttgggccaggaagccatttgttctgctgctaacacttccacagctccacrtgtccagactgttgccagagacgtctttggtctacaggattcaggagggaatctgaactttagcctggagcattatcaactcatagatgagtctgaaaca

SEQ ID NO: 13504 - DNA, 201 bp, Homo sapiens
cgctgggcaccaccgggtctctccctcagtctcagagctcagttgcttctgcacctcatcagggatccagccatcaaagccaaggctgggggacacttggrctagagtaatcctaccaataatgcagttcagctttgtaaccgcaaattttctagtagccgtattttttaaaagtaaaaagaaacagatcaaatgcatttt

SEQ ID NO: 13505 - DNA, 201 bp, Homo sapiens; identical to SEQ ID NO: 2833

SEQ ID NO: 13506 - DNA, 201 bp, Homo sapiens
catgcctgcacccccatccccgagggtctggaaaagaattgatttgttctgaggaaggaacatatatttggaatataaaatggttagtaaacaaaggatctttaaaacaagttagattgttatctcaagagaagcatacttcctcggcatgatgttttcttttgttaaattgctttggttttatttgactcaaagtattaa

SEQ ID NO: 13507 - DNA, 201 bp, Homo sapiens
gcctgcacccccatccccgagggtctggaaaagaattgatttgttctgaggaaggaacatatatttggaatataaaatggttagtaaacaaaggatctttwaaacaagttagattgttatctcaagagaagcatacttcctcggcatgatgttttcttttgttaaattgctttggttttatttgactcaaagtattaacaa

SEQ ID NO: 13508 - DNA, 201 bp, Homo sapiens
ttgcttttgggcgtacgatttggaaatgtagttgtttaccaaaaaaaatgatgtatgggccattgtgcttcccctgttcctgccttccagataatgttctstgtcacctccctccccttgtcactgccttgatgtcatcagcattgagagctgtgcagtccctaaaagtgtgatgttgataaacaagtaaactactgagta

SEQ ID NO: 13509 - DNA, 201 bp, Homo sapiens
cgtacgatttggaaatgtagttgtttaccaaaaaaaatgatgtatgggccattgtgcttcccctgttcctgccttccagataatgttctgtgtcacctccstccccttgtcactgccttgatgtcatcagcattgagagctgtgcagtccctaaaagtgtgatgttgataaacaagtaaactactgagtatacttcatgaa

SEQ ID NO: 13510 - DNA, 201 bp, Homo sapiens; identical to SEQ ID NO: 2828

SEQ ID NO: 13511 - DNA, 201 bp, Homo sapiens
tgttggctttgaagaagaatgatgctgtgcttgcctttgcagtcctgtcaccatacttcctggaaagtgggtggacacgctggatggtagatgttgagttstttagatgcctggatgcttacatgctttgtgtgggttcttactggggctgtaacttactagaggacagactccaacttctgcttacttagtctggggagg

SEQ ID NO: 13512 - DNA, 201 bp, Homo sapiens; identical to SEQ ID NO: 2831

SEQ ID NO: 13513 - DNA, 201 bp, Homo sapiens
cccaaatctctacccattggtcaaggtccctgagttcacagagcccaggccagagccctggaaacgcctctgcccgtccgctgcctaattgcctgtccacrctgggcaccaccgggtctctccctcagtctcagagctcagttgcttctgcacctcatcagggatccagccatcaaagccaaggctgggggacacttggac

SEQ ID NO: 13514 - DNA, 201 bp, Homo sapiens
aactcctggactcaagcagtcctctccctccagcctcccaaagttctgggattacaggcatgagccaccatgcccggctggaactgttggctttgaagaaraatgatgctgtgcttgcctttgcagtcctgtcaccatacttcctggaaagtgggtggacacgctggatggtagatgttgagttctttagatgcctggatg

SEQ ID NO: 13515 - DNA, 201 bp, Homo sapiens
tcaaactcctggactcaagcagtcctctccctccagcctcccaaagttctgggattacaggcatgagccaccatgcccggctggaactgttggctttgaaraagaatgatgctgtgcttgcctttgcagtcctgtcaccatacttcctggaaagtgggtggacacgctggatggtagatgttgagttctttagatgcctgg

SEQ ID NO: 13516 - DNA, 201 bp, Homo sapiens
ggtggtggacgggctgtgtggtctcccctcagctgtccacttgcacttgtgttaaaatgcggcagaactttccctctatacttaaattgtggtgaaatacrtatgacataaaacttaccatcttaacttttttttattgagacaggatctcattctgtcacccaggctggagtgcggtggcgcgatctctgctcactgcaa

SEQ ID NO: 13517 - DNA, 201 bp, Homo sapiens
ctacaggttttcaagtcatctcgtgtggtgcacagtcctcgccctacctcgaaggcccgggcgaagttttcctgagtgtgtatactcatctctttgtgttrtctctggcagggagcaagtgagtacaggattggagtaataggcatttttaggcttgagatggctttgtgtgtttggttaatgtcactacatttcctaggg

SEQ ID NO: 13518 - DNA, 201 bp, Homo sapiens
gcttgcctgccttttgggtcgtctccacctcccagggatgtttttgttccctgatcgaatgacctcctgttttgtttgttttttgagacggagttttgctytgtcacccaggctggagtgcaatggcatgatctcggctaactgcaacctctgcctcccgggttcaagtgattcttgtgcttcagccttctgagtagctgg

SEQ ID NO: 13519 - DNA, 201 bp, Homo sapiens
tgtcgttatggcctattttaatttttttaaccccaatcatttttcttaggaagtgatggggagtttggaaaggcaggcttatttgtcatcaagctgccagyttttatcaatgcaaaccacatccctgtgacatctgtgactgttccttggacagttaggtgagggagggtctcctggtggccccagggttactcttattta

SEQ ID NO: 13520 - DNA, 201 bp, Homo sapiens
tcagaccctttaagaatgtcacagagtatgatgggcaggatgcctgcggctccaacagctggaacatggtggacgtggacctcccgcccaacaaggacgtrgagcccggcatcttactacatgggctgaagccctggactcagtacgccgtttacgtcaaggctgtgaccctcaccatggtggagaacgaccatatccgtg

SEQ ID NO: 13521 - DNA, 201 bp, Homo sapiens
gcaagtccctataggataggcatgtggtacagtgtgaagctcctgagtggtcaacagctaccccgtgacaacatgccacactccatgtgccactccctccygcctgcctgctgtgtccttggccccagtggtgctctcccgtgctgaccagccggcacggctcacctggccgaactctagccttgccttttcctctcaagg

SEQ ID NO: 13522 - DNA, 201 bp, Homo sapiens
ccattggtcaaggtccctgagttcacagagcccaggccagagccctggaaacgcctctgcccgtccgctgcctaattgcctgtccacgctgggcaccaccrggtctctccctcagtctcagagctcagttgcttctgcacctcatcagggatccagccatcaaagccaaggctgggggacacttggactagagtaatccta

SEQ ID NO: 13523 - DNA, 201 bp, Homo sapiens
tactgggtaagcagtgtgtctgcttttattccttagaagcagtgacttccccttctcggcccctttggaaattcttttgctgttcttcatttgggcttaatttttttttttttttaatgttctttgaatcggcaacttaatcatctcccaagtgacagtttcttaattttagttccaaacacctgttcacatatgacttca

SEQ ID NO: 13524 - DNA, 201 bp, Homo sapiens
gtgttgtcaataaacaagtccattttaaaagcatctttgaaggtgtgtaatgaaaatggaggccttaggttgtatcagggtttatgaggagccagcttatmtgtaatcagatgttcctgttactgttatcactgtagtatagggcttagttctgccctttaagtcacagactcaagttactcctgattttaccagcagtca

SEQ ID NO: 13525 - DNA, 201 bp, Homo sapiens
cttagcattggttacagaaataattaagacaatgtcttcaggagattttgacttgggaataaaactcactgtccaaccttgcattcatccctccaattttyctagcttttaaggagcattgctccccttccagggacccacattggtttctaagaggcaagctgccctaatgacgaagcctctgcacggagcaggagcagt

SEQ ID NO: 13526 - DNA, 201 bp, Homo sapiens
agttggaatgcagtggcatggtcatggcttactgcagcctcaacgtcccaggctcaagggatcctcctgcctcagcctcctgagtagctggggtcacagakgtgtgccatcacgcctggctaatttttaacattttttgtagagatgggagtctcactatgttgcccaggctgcactcaaactcctggactcaagcagtcc

SEQ ID NO: 13527 - DNA, 201 bp, Homo sapiens
gacttgggaataaaactcactgtccaaccttgcattcatccctccaattttcctagcttttaaggagcattgctccccttccagggacccacattggtttmtaagaggcaagctgccctaatgacgaagcctctgcacggagcaggagcagtggcaggagctggcatggcagtcccttaggtgagggacgatcactgctca

SEQ ID NO: 13528 - DNA, 201 bp, Homo sapiens
ggaaaaaaaaatgtattcagccagtactctttccaggttatagctaaacgtcagttggcaacctctatgctgtggtttattgagtaacacttaatacttarcacagccctcagtgaagatcttttatggccttttctgaatgttatacaaacataactaaagcttatccagatgaggacagggacctttctttccttcctt

SEQ ID NO: 13529 - DNA, 201 bp, Homo sapiens
agtgagagtctgttgtttaccacctgatacattggtaagagctgcttgatggtatggggacatcagtagggaggatatagacgtagccacccccgccctasatagtaggggcctcagggtggggtaagcctgggtgggggaggtatgagtggtggaacagtgggagaccctggatccttagtctccagcgtgattgcattt

SEQ ID NO: 13530 - DNA, 201 bp, Homo sapiens
ggccagttctgccgctaatgggtgagagacttgggccaggtgccttacatccgggagcctcagtttcctcacctcggaaatagggtgataatgtaacagaccccatggggttatgagaaggacttggtgcaggaaagcagcagcacgtgcctggcacagggcagggcctctccagatggcagttcctgtctgtgtcttatt

SEQ ID NO: 13531 - DNA, 201 bp, Homo sapiens
tccagaagcagtgtctgtcatccatactccaccagaattgaacactaaattgagctttgcaattttagcatttaaaaagttgtatcatttaatatagaatrgcagtctcttcattatgatcttcccttgcctagtaagtttatactcaagtcaaaatcggttaatcatgcatattgattccttgtttatctttttctttta

SEQ ID NO: 13532 - DNA, 201 bp, Homo sapiens
gcgtaaaaggtttttcatttgtccttgaccacgtggtccaaacctcaatttccctagcagaacgcggtttcgatcactggtggatccgtctcacagcaccrgtcatgctgcctcgctgggaagtggagggctcaggattcccgtggttcacgatccattttatgttggaaggaaatcattttgaactatctcagtacacac

SEQ ID NO: 13533 - DNA, 201 bp, Homo sapiens
agtcagatggaatgggtctgttttctatatcaagagacagtattgcagataatttttttctttcaaggaaagcaagtcaggagtcaaactctcatgccacygtagtcacaaatgaaatttattgctaatcagccatgtgacgtgtaattgctttttcattttcttatttttccagaagagagatttgtttagatgtttgat

SEQ ID NO: 13534 - DNA, 201 bp, Homo sapiens
ctgcaagagacttcctgggagggtggtatcatttggcctgtgggcttttgtaacactttcctgctattaggagagtgaattctgaattttcaatcacgttsacctgttggagcaagtagagtttcagacggtctccgcttttctcgactagaaagcaggccttctcccttttccccccagtcttgtttcatgacaccattc

SEQ ID NO: 13535 - DNA, 201 bp, Homo sapiens
ccactgtaactgttttcacttgacaaataacattaaaaaacacagttctgcaagagacttcctgggagggtggtatcatttggcctgtgggcttttgtaayactttcctgctattaggagagtgaattctgaattttcaatcacgttcacctgttggagcaagtagagtttcagacggtctccgcttttctcgactagaaa

SEQ ID NO: 13536 - DNA, 201 bp, Homo sapiens
ggggtgcagtggcatgatctcagctcactgcaacctccaccacctgggttcaagcgattctcctgcctcagtctcccaagtagctgggattacaggtgtgyaccaccatgcccacctaatttttgtatttttagtagagacggggtttcaccatgttggccaggctggtcttgaactcctgacctcaggtgatccacccac

SEQ ID NO: 13537 - DNA, 201 bp, Homo sapiens
gtggcatgatctcagctcactgcaacctccaccacctgggttcaagcgattctcctgcctcagtctcccaagtagctgggattacaggtgtgcaccaccaygcccacctaatttttgtatttttagtagagacggggtttcaccatgttggccaggctggtcttgaactcctgacctcaggtgatccacccacctcagcct

SEQ ID NO: 13538 - DNA, 201 bp, Homo sapiens
ttttcacctttggcttttaataagggaagggtattagaaaaaaagtaatttgtatgatgaagggtgatttgtgcgtgtgtgcagacagacacacatgcagrgaggcaaatcagaaccgatgcgtgtttggctttggcttgtttcgctggtgtctggatttacctggcgacacttgttgctctgggggatcttagagggaag

SEQ ID NO: 13539 - DNA, 201 bp, Homo sapiens
ctgaacctaagaaaggtttgtaaaaaataaacatgaaggaagacttcattcaagaggtcacttaaaaattattattattattattattattattattattrttattattattattgttattttaagaattaggtctctgttggccaggctggagcacagtggcacaatcatagctcactgaagcctcgaactcctgggctc

SEQ ID NO: 13540 - DNA, 201 bp, Homo sapiens; identical to SEQ ID NO: 1687

SEQ ID NO: 13541 - DNA, 201 bp, Homo sapiens
accataattctgtgctaagtcagaattaatgttattttgttaattcaggttattgtgaaaatctccacaggaggttatttaagcaagtcacaaattgatgwttctgtttgtagaaaaactccagctcatccagccagccacattattccagggctgcatggtgtcagcgtagggaccaggctcggtgtagagaccaagggt

SEQ ID NO: 13542 - DNA, 201 bp, Homo sapiens
ctgtggaatcatttgaaaatttctgaaaacatgaaacaggtgtttataaggagttttctgacttaacaaaattggtgaaataccaactttactaaaaactrctaattcataattttttgattaataatttctagtctggaaaagaggaattttttgaaaatcactgatatttttgatatactgttgttttcaaattgagtt

SEQ ID NO: 13543 - DNA, 201 bp, Homo sapiens
ctaagaaggtgggactccagcggcaatgccttgtccatgtgctaagccagccgagggcgcacgaagtgctgtgtggtgtccaagctgacttgggagggacmagtttggggccagccccccagcctcacttgtcatgtcccacctctgctggcatctgtgggcttaaagtgccttcactcccatccttttcaactatttctt

SEQ ID NO: 13544 - DNA, 201 bp, Homo sapiens
gaggggcagcagggctgtgttcagtgctcccgccgtacgcttgtatgcgggaaaccactgcaggcggcccatgaagcctcctggccatgtgcgccctcccrgtttggaccccctcccgtgtgtcttggctgcaggtttgaactgatgcgcatgtgctggcagtataaccccaagatgaggccttccttcctggagatcatc

SEQ ID NO: 13545 - DNA, 201 bp, Homo sapiens
tgccttgtccatgtgctaagccagccgagggcgcacgaagtgctgtgtggtgtccaagctgacttgggagggaccagtttggggccagccccccagcctcmcttgtcatgtcccacctctgctggcatctgtgggcttaaagtgccttcactcccatccttttcaactatttcttgattaaaaaaaaaaaacaaaaaactg

SEQ ID NO: 13546 - DNA, 201 bp, Homo sapiens
accatagataacagctgtcacgatggacagtgtggacctggattagtccttcttgggaaaggagagtttgggttttgtaccgtggtggttctgggttctgrgggaagagaatggaaccgtacgaggtaaaacaggagactctgaaggccacttggccatccaggcagaaagccagggatggagaggggcagcagggctgtg

SEQ ID NO: 13547 - DNA, 201 bp, Homo sapiens
tagcactgccaccatagataacagctgtcacgatggacagtgtggacctggattagtccttcttgggaaaggagagtttgggttttgtaccgtggtggttytgggttctgggggaagagaatggaaccgtacgaggtaaaacaggagactctgaaggccacttggccatccaggcagaaagccagggatggagaggggcag

SEQ ID NO: 13548 - DNA, 201 bp, Homo sapiens
aaggaggcaacttggtttcatagggagtgtcatgttgtccttctgagtttactgatgagcttacctgagaaaggagggttctagcatgggagttctgttgytacaagacatgaaagaatggcctccgtttatcccggagaggagagtccctgagcccttgggagttgccttgaaacctctgccgggtcccaggtgagaaag

SEQ ID NO: 13549 - DNA, 201 bp, Homo sapiens
tttgtttcttagcactgccaccatagataacagctgtcacgatggacagtgtggacctggattagtccttcttgggaaaggagagtttgggttttgtaccrtggtggttctgggttctgggggaagagaatggaaccgtacgaggtaaaacaggagactctgaaggccacttggccatccaggcagaaagccagggatgga

SEQ ID NO: 13550 - DNA, 201 bp, Homo sapiens
gcccactgatccaggaagagattcctttgacctgggaagtcataatggcagatatttagacccagctctcaagcaagcctccaagttgttccggtgaaccygtaactttgagtaacctctgattgaaccagagagtaggaactaggtgcagaaccttgttgaatagaattgtttagcatcgtccatttgttagagcatttc

SEQ ID NO: 13551 - DNA, 201 bp, Homo sapiens
ggagccccggccacagccggcaggactccctttgctccatgtgactctgagggcctcacaggtatttgcagcccaggtgctgtcggagcccagccgatgckaccgacacacagcacaagcgtcatcctgttctgcctgtcccttgcgtgtggaggggactcgtgcccagggctctccttgctggcttgttggaatctggct

SEQ ID NO: 13552 - DNA, 201 bp, Homo sapiens
gttagggtattctccttgaggagctcagaataaccaaaggtaaagcatttggtggtataagatatattcatcttaaaaataagttgaaaataataagataytgggagatgttagccaccgaagtaaataactacagtgaaatagctctttattaattttgaaacctaaagttgaaagagttccgtattatttgtcagtatc

SEQ ID NO: 13553 - DNA, 201 bp, Homo sapiens
aggagagtccctgagcccttgggagttgccttgaaacctctgccgggtcccaggtgagaaagtgtgtgagttgtgtggttctgagatctgaacaggcaccrtctggtgacactaggggctgaaggagctcggtggctgcaggtggactggagctcaccatcaggaagtagccagattctcacccctcagtgtcaccgagtg

SEQ ID NO: 13554 - DNA, 201 bp, Homo sapiens
cctggctttcaggaaacgtagtgacgtaaaaggtcccggctgctgcgggataagggccagggcagaggtgtgaacgcagccgtggaagacttgggccaggragccatttgttctgctgctaacacttccacagctccacgtgtccagactgttgccagagacgtctttggtctacaggattcaggagggaatctgaacttt

SEQ ID NO: 13555 - DNA, 201 bp, Homo sapiens
gaaaaagataatccagcctcaccaacagccacagaattgaaatgagatacctgtttctgcttctggcattgggaaagaaagaaaaatggcactagcagccttttttttttttttttttttttttccccaaaaaatttgctactcttgaggttctgtcaaagaatgtgctgtggcctctagaagcatttttaaaaagagact

SEQ ID NO: 13556 - DNA, 201 bp, Homo sapiens
agaaatgattggggataaaattgtttgcattatgaaatattgtatggccaggtggcccctctttcatgttttgttccttgtgaagaggttgagtctcctattttttttttttttttggagatagagttttgttcttgtccctcaggctggagtaaaatggtgcaatcttggctcactgcaacctccgcctcctgggttcaa

SEQ ID NO: 13557 - DNA, 201 bp, Homo sapiens
tatcataatatgccacctactctggttgtgtcttacaactgtagctctgtggggttttttttgtttgttttatgcttgctaatgggggaggtggggggtgkgggcggatgaatataaatgatacctagaaattgaaattggaaaaaaaaatgtattcagccagtactctttccaggttatagctaaacgtcagttggcaac

SEQ ID NO: 13558 - DNA, 201 bp, Homo sapiens
tgggatcctcctggaggcttagtagggctgccctgagcagtattgtcttctccagctgggcctctgagctgtaccatgtgcccgtgctcagcctcagtccmtccctcagccagttgttaaatcactttggacgtgtgacagcctcaacatgtcacagctttaaaagttcagattttaaaaaggtaaggaaatgatctccta

SEQ ID NO: 13559 - DNA, 201 bp, Homo sapiens
tggtcctgaacactaataatatttatatacattgagatgagacaaaatttacagcgggctctggggctggctccaggactctctaatcccacacttgctcrcgttctcttgcttgcctcctagaatcctttcaggttgtgcttcagtgaggggagcatggtgtccgtctctgcagcaatgcttatttatgcagttcgtcct

SEQ ID NO: 13560 - DNA, 201 bp, Homo sapiens
tctgaagagcagcctcggtgctccaagatgggtgtatgcttaatactgctggcacacgcctgacgagcgggaatgtgagcgttgtttctgtaaccagtttyactgaacctcacagatccattatacgacgtgaattttgtgggaataacataggctgggagtctgctctcttccagcctggtccctctcttctttcagccc

SEQ ID NO: 13561 - DNA, 201 bp, Homo sapiens
aataatccaccccttgtttagcgtgtcataaaaatgggcaaccagcagccttccaggctgctctgtgtatggagtagccattcttctgttcctttactttyctaatcagcttgctttcagtttacagactcaccctgaattattcttgcgtaagatctaagaaccctctcttggggtctggatcaggactcctttcctgta

SEQ ID NO: 13562 - DNA, 201 bp, Homo sapiens; identical to SEQ ID NO: 1680

SEQ ID NO: 13563 - DNA, 201 bp, Homo sapiens
tatatatatttttttaattcttgggtacaacagcagtgttaaccgcagacactaggcatttggattactatttttcttaatggctatttaatccttccatyccacgaaaaacagctgctgagtccaagggagcagcagagcgtggtccggcagggcctgttgtggccctcgccacccccctcaccggaccgactgacctgt

SEQ ID NO: 13564 - DNA, 201 bp, Homo sapiens; identical to SEQ ID NO: 2840

SEQ ID NO: 13565 - DNA, 201 bp, Homo sapiens
ggtttgactatcgagtttagattttaaagttgaggattgtttctttaagaagaaatatagaatattattcagtcctaaaaaggaaggacattctgacacawgcaacagcgtgaatgaaccttgaggacattatgccaggtgaaatcagccagtcacaaaaggacaaatactctatgtgatttcatttagatgaggttccct

SEQ ID NO: 13566 - DNA, 201 bp, Homo sapiens
acattttaggaactcataaaatgcatacttttttggtgtgatcagagatgggtaactccttattacttgtgggttagattagtttttggaaatagcctggwgtcattgagagccaatccttatcaacaaaatggcataaatggacaggaatgggtttcttcttcactttagagatagctctgaagacatgtctcagttggg

SEQ ID NO: 13567 - DNA, 201 bp, Homo sapiens
gcccagccagattttatttctttaaaaaagaaacttactagttatcaggacacttgtgttcttggtacttgattttgtcagcattatttttaagagcctcktccctccttccccctacctccctgttgagcccaggctctgaaataacataggtgcatgtgaagttcccctacctgccattaccagacattggtgctgggc

SEQ ID NO: 13568 - DNA, 201 bp, Homo sapiens
tgtaacatgggggtatattatagtcagtagcacctgcttcacaaactcgtgaggacttcagcagttcacacacataactgcctcgctgcctggcacctagygtgcacatggcattctaccgtggggtagacttttaaaattctggctacagagatacttttccataaaagtggccacatggaactctccaaatctaagaag

SEQ ID NO: 13569 - DNA, 201 bp, Homo sapiens
tgcctggtcatgcagagacggagctgggagcagctgcatgacttttcagagaagtggcacacgtttactgtaagggtcccaaatgtagaccactgcagatsgtaaggtctagatggagggaccaatagtagggaagtaggggagaagaaagtaaaaccttacagtataaagacccatagatgctcttttgtttttgatgtg

SEQ ID NO: 13570 - DNA, 201 bp, Homo sapiens
gagggaccaatagtagggaagtaggggagaagaaagtaaaaccttacagtataaagacccatagatgctcttttgtttttgatgtgtgtacgggggttagrtatttattgagcacctactgcatgacagagtgttcagcaatgacaatgcagagcttaataagaacaggttctagactaatcttttagggggtgaggatag

SEQ ID NO: 13571 - DNA, 201 bp, Homo sapiens; identical to SEQ ID NO: 2830

SEQ ID NO: 13572 - DNA, 201 bp, Homo sapiens
aaggatacaagtgtgtgtcattgtgtacataaagtttcggtctcacccctgtacaatgacctttatttgcaatagatggcattcctggtaagttgcttctragttggatttgtgcaaaggatttcccactgacttagcctatgatctcttcacttctttggttttttgtgtgtttgttttttggttttgttttgagacagg

SEQ ID NO: 13573 - DNA, 201 bp, Homo sapiens
cagcaagggcataggtacctgccattgtgcaccaaagtccctttcctcatggccctggctgttctcctgcatggggtcatgtgtgtcccgttaccaagttrtggccccttttcaaccttgagtgccacatctgggctgttgtaggcatgggtagtacaagctgggtttgttactctaaaaatgaaagggaggatcagttgt

SEQ ID NO: 13574 - DNA, 201 bp, Homo sapiens; identical to SEQ ID NO: 2834

SEQ ID NO: 13575 - DNA, 201 bp, Homo sapiens; identical to SEQ ID NO: 1677

SEQ ID NO: 13576 - DNA, 201 bp, Homo sapiens; identical to SEQ ID NO: 2838

SEQ ID NO: 13577 - DNA, 201 bp, Homo sapiens
tagattttaagtgttctcaccacacacaaaaaaatgtgatgtaatacatatgttaattaggctcattcagctgttctacaatgtatgcatatttcaaaacaatatgttgtacatgataaatatacaatttttatttgtatattaaaattaattaattttaaaaaagatctccagtagtcacctggtcagcaccagatattc

SEQ ID NO: 13578 - DNA, 201 bp, Homo sapiens; identical to SEQ ID NO: 1679

SEQ ID NO: 13579 - DNA, 201 bp, Homo sapiens
tttctagactaagcaaatgatagacatagaggtgaatgctgagaggagagtttaattaatttccattaggaattattatgtggttaccttttcatggagtsttaactaagtattgtgcacttaaatgtagttagaaattaaagcctgatttttatttgcaagaatatttatgatgtctttctcattatctgaaacttgcat

SEQ ID NO: 13580 - DNA, 201 bp, Homo sapiens
taacctagtctcaccagttagtctatgccacctttgcagcacccagaagcttcataatattcctgcagccttgtccagggtagtggcttgcttgctttctrtctttccccagcctccttccctcctctttttcctcccctccatctcctagaaacagatcctagtttgggggtctgtgatctgtgaaacagcaaccttggc

SEQ ID NO: 13581 - DNA, 201 bp, Homo sapiens
agatcctagtttgggggtctgtgatctgtgaaacagcaaccttggcttctggggttgagtgaactcagcttgttttggtgacatgacatgttcctgtctgsctttgctgctccatttttaaccttgtaagtgccaggatgccagtgggaaatcgggagtccttctgatagaatttttccagcagatgttatcacgtactgc

SEQ ID NO: 13582 - DNA, 201 bp, Homo sapiens
ttaaagcctgatttttatttgcaagaatatttatgatgtctttctcattatctgaaacttgcataaaacctgaagcatcagcaaaatctttttaaggttgygtgctcaggtgtttgggaggctttccaggtaagcccgggcccctggcctgctcttaccattttagatgcaggggagggcaagtgggccttgggttttccc

SEQ ID NO: 13583 - DNA, 201 bp, Homo sapiens; identical to SEQ ID NO: 2825

SEQ ID NO: 13584 - DNA, 201 bp, Homo sapiens
agtggccacagtcatgtcactgggtaaagtgcttattgaaacaaaattggcacaggcttctgatcctgcgtgtgggttggtgtagcagaggttcagtgcarcagaagaagtttttcatcttaaaatttggaagtaacccctggccagcaattcactgtagtgtttgggaaacataggaatatctgcttattgtgacagatt

SEQ ID NO: 13585 - DNA, 201 bp, Homo sapiens
catgatacaaactcaggtcagaaaaacaaaggttaaatatttcacacgtctttgttcagtgtttccactcaccgtggttgagaagcctcaccctctctttyccttgcctttgcttaggttgtgacacacatatatatatatttttttaattcttgggtacaacagcagtgttaaccgcagacactaggcatttggattact

SEQ ID NO: 13586 - DNA, 201 bp, Homo sapiens; identical to SEQ ID NO: 1689

SEQ ID NO: 13587 - DNA, 201 bp, Homo sapiens
aggagaagccgatgtgtgagaagaccaccatcaacaatgagtacaactaccgctgctggaccacaaaccgctgccagaaaagtaagaatgatgctgactgytgctttctctctgcctctctctctcctctcctcctccttgacctcccttctcttctgagtgcacgagttccgctgggcagggtgcagtcgtgttgcattt

SEQ ID NO: 13588 - DNA, 201 bp, Homo sapiens
tttgcctatccttccacttcacagatgagaagactgagacccagagagggtcatggttttcattagccaaatggtgcagaaacccagtggtcacagtggcyctctagctctttgtcacccacagggcccttgataagagtacggtctttctccaggggagcagggttgaggagtgggggcagccctggcctgggtggccat

SEQ ID NO: 13589 - DNA, 201 bp, Homo sapiens
ggacattccgtctgcggggagccgagtccgaggctggagcaactctggaaccacagccctccagtagagggcacacgagagcaggctatctgtggagatakcctgttggcacaggggtgaagatgacagaggcgaacccaagcaaagagagttaattagcagagtttgccctccaggctcggagggcaagtcagcctgggg

SEQ ID NO: 13590 - DNA, 201 bp, Homo sapiens
atccttagtctccagcgtgattgcattttgccaaggctttgtcccatgtccctttgtcccgtgttccatttgcccgtggtgttgcctagagagcatggagrggctggtggagcatgctctgtggttccctaacccagggctgtgtggggagagcttgcagcacccccctgaccccatatgaacgtccttgctatttcctgc

SEQ ID NO: 13591 - DNA, 201 bp, Homo sapiens
tccatcagcataattccttatagattcattcaggttgctgtgtttatcaatagtttgtttctttttattgctgaatggtattctgtggtgtaaatgtactrcattccatgagcatggcatgtccctccatttatttagtttttctttgatttacttcattagcattttgtagtttttgtagtcctgtgtatgttttggtag

SEQ ID NO: 13592 - DNA, 201 bp, Homo sapiens
tgagactttgggttttgttttcctttacaccttgagctttgttctacagcaggtccctgggaagactggtccacaaagctgctgaatggggctgctgtccwtcagccctgcctcctgctgcagaatgcagaggacgctgtagacttgcttggtgggtgcctggggttttctgcctccctggtgcactgggcacagcggctt

SEQ ID NO: 13593 - DNA, 201 bp, Homo sapiens
taaacagcagaatattccaggaaaccttaagtgataactgagttgaaagagtcatattttttaagcaatacaatttaaataatttttaaaggaaacatttmtaaaggacgttttacattgcttgcattaaaaagaatataatgaacataatccaactttttctcaatactcagggtcatcactgtgaaagtaacttcattc

SEQ ID NO: 13594 - DNA, 201 bp, Homo sapiens
gagactttgggttttgttttcctttacaccttgagctttgttctacagcaggtccctgggaagactggtccacaaagctgctgaatggggctgctgtcctkcagccctgcctcctgctgcagaatgcagaggacgctgtagacttgcttggtgggtgcctggggttttctgcctccctggtgcactgggcacagcggcttg

SEQ ID NO: 13595 - DNA, 201 bp, Homo sapiens
ggctgatgatgggattggccttcatggggctgctgtctggctgggctggtgggcagaggttcctgtgggtgtggatggagaaatcctaaatgccgagggtrcctggtcttagtagaaatcgtaggatgcctcagtgaagaagtcagggatgcggattgtcctccggatgcttggatgagcgtgcagtggaaaaagtactcc

SEQ ID NO: 13596 - DNA, 201 bp, Homo sapiens
aagtctgtgcttgcattatgtatcaaaacttagtgctatctcctcaggtgcagggttctctggaactctgtctaggttggtctcttggatggcattcttgsagacttgccggaaaaccaaacaaaaggtgtgagtgcatgcctcctggatagatgtctttttagtgtaacttagcacaccttgtacactgtcagggcgcct

SEQ ID NO: 13597 - DNA, 201 bp, Homo sapiens
gcttctatgacttataatattcacttgtagaactcactggcctttgtcagctttcagagtatgtgaacactttttgccatgtaagtagttagtccattggyaatggatatatgtaagttggtatcttcactgcaaacatttagttaattgcgtttattcttgagccattcttgctctacccttaggacttgattttcagta

SEQ ID NO: 13598 - DNA, 201 bp, Homo sapiens
tatcgtataacctggagcaccctcaagctgtccgcccttttcaagttttaaaaatggcttaggcaaacatattgcttaagtgatatccagtgaaggtgtcycctgtgctttgaaaaaccatcaacattgatgcttttttgtgacccaataaggacaagatttcagtggttctgggatgcatttgatctttatgcacacttc

SEQ ID NO: 13599 - DNA, 201 bp, Homo sapiens
gttttaccagttgtcgaaattgccggagtgcagcactgtggagaatggcagttgtaataaatgagaaataccaggtgtttgaattagctgtagattttcayattgtctcttctaaccctgcttgtgcccccgcagcctttttccatttacaactcagtaatgtttgttttcacagagattaccggaggaaatagattataa

SEQ ID NO: 13600 - DNA, 201 bp, Homo sapiens
gtgtgaccgttcattcctgtggttgtaatgtgcctgagccctaatattacacgtatcagacaacagtgtagttctccattggaaaccagctatcttctggttttttttttttttttttgagacagagtctcactctgttgcccaggctggagtgcagtggcacgatcatggctcactgcaatttctgcctcccaggttcaa

SEQ ID NO: 13601 - DNA, 201 bp, Homo sapiens
attattacaatttgatttgaaatgtctagagaaagtgagagattatggaaattaccataaatgctccctttttcatagatttagatctgttaattgcaagmaatctttttttaagtgaatcaatgggaactttttatttcttccctaagattcatttagccttgaaaaggccaaaagttgaatgaagcttctaaatgccaa

SEQ ID NO: 13602 - DNA, 201 bp, Homo sapiens
taatgtgttctacaaaatgaagccagtgagaggacaggggacacagggccgacttttatttaggacatttgcctggttctgagaagaaagttgaaagtcaygagagagagggaaaggaaggcagaaggaacttggtttttgcaggtgcctgctcagcatgggccttgccccagcttggctgtacctcacagcaccatccac

SEQ ID NO: 13603 - DNA, 201 bp, Homo sapiens
cggtttatgtgaaatgtctagaataaacaaatccatagaggcagaaggtagatgagtggttgccaggggctgggggcggatggaatggggagtgactgctrgtgggcacagggtttctttttggggtgatgaaaattgttctaaaattagtttgtggcgatggctgcatagctctaaatatacttaaaaccattggattat

SEQ ID NO: 13604 - DNA, 201 bp, Homo sapiens
tttgctgaagtcttgactgactcagtacctgcccctccctccatctctgaaatgtggagaattaaaagctatgcctgtgaacgggcgttcagtttttagcsgggaaggtgctagaccacttaactctgatagaaataagctgctgagccctatcagggagggcgttctttcagctgttgtctggtggagaaataaagacag

SEQ ID NO: 13605 - DNA, 201 bp, Homo sapiens
tcagaaacgtgagggtgctgattgaagctttttataacttttcttattgagaattgttctctggagttgtctccaagaacaaaggaattccagacgttctycttctctccttgtctcttctgtcctccagtcaaagaaaaactctgcatatgatctttggcctggagaaatattaaatctatgttaagtatgcagacatga

SEQ ID NO: 13606 - DNA, 201 bp, Homo sapiens
tctgaaattcaaaacagcagggatggccttcgccgacgcaggagtcgggcattttaaaataggctgtttttcttttggagcgttcttcttgaaggatattstttgtgcaagacggcgatttttgagaacacaggcaggagggagggggtgttttaatgtatgtttttactccatgataccaaagcttccccccaggatccc

SEQ ID NO: 13607 - DNA, 201 bp, Homo sapiens
gggctagggttaaaacccgtggagtaatacgccctcctattgtgttcctctcctctaaaaatgaaggtgaaactgtttcaggtgagcgctgttgttgttcrtttgctggggcactgctttctgatttttagaggagtccaggctggagactgacccctgcctttttctgagttgggccggctgggcccgaggctggttctg

SEQ ID NO: 13608 - DNA, 201 bp, Homo sapiens
caaattttgtgagttccctggtaactgactgtatggaagacagaaataaaaatcagaataaacttttattttctgaatcagaaagcagttgctccagcttytggtggtcacattgctaagatgtaaaaaacagaagttaggtgaaataaattaagaataattattttggagaaagagagggtagtgtttgactaaattaga

SEQ ID NO: 13609 - DNA, 201 bp, Homo sapiens
tcacaggtgtgagccaccacgcccaccggcctcccatcttaacattttaaagtgttcagtttaagtacctttacactgctgtccaatcaatctctagaacrcttttcatcttgaaaaacggaaactctgtacccattaataactcccattctctcctaccacagccacgggcagccactttctgctgtctccgtgagtctg

SEQ ID NO: 13610 - DNA, 201 bp, Homo sapiens
tctttgtttacagggaaaatgctcttgagaaaatggaggtcattaaacactccagcttcagcaatatcatcagagctttccgtcacgtgagttatctcacmaaagggtcagattctggtaaaaactcttgccttcacacttacttctgttttattttgccttatttgacatttcaccagaattgatccataggttcaataa

SEQ ID NO: 13611 - DNA, 201 bp, Homo sapiens
tcaatctctagaacacttttcatcttgaaaaacggaaactctgtacccattaataactcccattctctcctaccacagccacgggcagccactttctgctktctccgtgagtctgactactttgagtacctatgagcagaatccgcaggatttctccttttgtgactgccttatttcacttagcataatgtcctcaagctc

SEQ ID NO: 13612 - DNA, 201 bp, Homo sapiens
gcttaaggaacatcatcctctgttgggcagaattcttccatggccaccccagcattatgccccacaccatttgacttactcatttgtgaatgccaactcaraatgtattgctttgattcttgattaggatctcaacctctatttattgttaagactatcaccctttgattcccccccatcccattgtgtccttctaaaggc

SEQ ID NO: 13613 - DNA, 201 bp, Homo sapiens
gtgttgggacagggacggaccgtgaggaggctggatcatggggaatgtgttgctttaggccaagctggagttgatagtggctcagatcagagctaaagtartggagacacacagacattgaaagaatgatgaaattcactcattctgcgtgtgtcccatgtcatgtgtccgctgcacaccaagtactgttttaggcactgg

SEQ ID NO: 13614 - DNA, 201 bp, Homo sapiens
aggaaagacgtggggcagcattgtgggaagagcaaccaagattctcataggcttgggagcggaagccctgaggtctgttgctggactagatatgtgaggtktgagaggagagaagaatcaggaatgactctttgattcttaacgtgagcaactcagagaatgagagtgctgcagtttacaagcttggaaggtggattatgt

SEQ ID NO: 13615 - DNA, 201 bp, Homo sapiens
ccagtgggacttttcttctctccctcgtctgttcacttattccgtcctgcactgggccaccagattaatcctgcaaaaggcctcacatgggcttctctccygctcaggagccttgtgggggctttattcctctgagatgaaagttcttatccccacatgtgatcctttatgacttgggtgctatcaaattcatttcctcaa

SEQ ID NO: 13616 - DNA, 201 bp, Homo sapiens
atttcatttcaggtgcagatgccttcactttcccacaaaaaaaaccccaacaaaacctaagaccttactgcaactaagtctccaagtactttttaacccawtgggatgaacagcctgtggtctgctcagatcaccctgagtgcgtgtgagaaggcctgggctttgccaggaaatccaggaaggcagggccgggctgtgttg

SEQ ID NO: 13617 - DNA, 201 bp, Homo sapiens
ggtgaagttggaagcatcacttagaaacacgcctcctttgggcatatggtgtgaatcagggactctggctataaaaggtggggtctctgagcaccatcctrgttggaatgttcccctgacttggaggtagcgagagacagccaaggtgtttgttccagggaggctggtgggtgggagatgggatttttctgtctgtggcac

SEQ ID NO: 13618 - DNA, 201 bp, Homo sapiens
tctcaccgtggccattacgggctgctgtttacaaaaatcctgcaggcctttgacaccccgtcctcccttcccccggcatccctgcccttattctggctttyttctcttccatctcctggtgagcacagcatactgttctcaggcttgttttccttttattgctctccatgtgggacaggtcatgctttatcaacatgtacc

SEQ ID NO: 13619 - DNA, 201 bp, Homo sapiens
cttcctgggccctccgtgctcttctgagttctcttctcaaatacctgttttcttgggtcacaggagattaggagattaaagccattctctctggtcctgcrcctcccttgccaggcgtggctaagaggtttgtccttgtggaaggagctgagtgggttggtcgacctgtgcttttccgtgggtaccttaattctaccccat

SEQ ID NO: 13620 - DNA, 201 bp, Homo sapiens
tgctgtcctctgcaaagaggaatgcttatccctgttacttattcctggtttcctccaagactagtttcagctggacttcagttgccaaggacttgtcttcygtaatgcccacagaaaataataatgccacattgtaaggtgaaaacagtaatcctggtatttttgtattttagaagaaggttgaagggaaagaaaaggatt

SEQ ID NO: 13621 - DNA, 201 bp, Homo sapiens
attatttgtttatttagacctcccattatagaaagtgtgacatgctgggcctctggggaagatttttgagggttttgatgtcagagccccgaactttctcygaacttaattgtctttcagaccctttaagaatgtcacagagtatgatgggcaggatgcctgcggctccaacagctggaacatggtggacgtggacctccc

SEQ ID NO: 13622 - DNA, 201 bp, Homo sapiens
aggggagagcacacctgcagtgaggcaattcacatagcaaagttctccggaaactgcagtgttcaacttttttaaagaatagctggatgttagaaaagtgraggaactgtcacctttattaggggcatcatggatacctggtagcatcaagggctagggttaaaacccgtggagtaatacgccctcctattgtgttcctct

SEQ ID NO: 13623 - DNA, 201 bp, Homo sapiens
tgcacatgttaaaaacattctaggatccacacagtttaaacaaggtggctggcttaggaaatgcttctccccattccttggcatccccacaaccctattcycctactttctcttatgtatctggactggcttttaaaagatatttagtgaaatttaattttctagggaaactccactttgtcaaaagtgtagtattcctca

SEQ ID NO: 13624 - DNA, 201 bp, Homo sapiens
ctgatgccgaatccacttggcagcactgagttacaagaaggttaagtagatgaactagaagatggataaacgaagatagataaaatgaagaaaaacaaaartcaaggagaactcaggcgtccaagagtgtgtaaacaacttctggtgtgagacgcgctacattgcgctaaatggcctgtgcgcttctggtttttcccttcc

SEQ ID NO: 13625 - DNA, 201 bp, Homo sapiens
atccagtatgactgctcttccatagatgatgaaaccaaggcagagaaataagatgtaactctcttaccttgattagtgatgagaatgggacagctttattyatgaaacccggaaaccactagcccattcttgggatgattgatatctgcaaggatcttcaggaatagagtacctggggctcaggagccaagactagaagtg

SEQ ID NO: 13626 - DNA, 201 bp, Homo sapiens
aaaacagcctgcgtatgttcttgcttgcaactcagatatccagcccactgatccaggaagagattcctttgacctgggaagtcataatggcagatatttaracccagctctcaagcaagcctccaagttgttccggtgaacccgtaactttgagtaacctctgattgaaccagagagtaggaactaggtgcagaaccttgt

SEQ ID NO: 13627 - DNA, 201 bp, Homo sapiens
ccatggatctgtggttattagatactgatttcactttagcacacgaagaggcttagcggaggtggcttctaatatcctatggttctgtgggctcggagatrctactcacccacttgtcagaggcattgaaaccagagcaactgcatcttgaataggagctaggtaaaatgaggccgaattcccagacagttaagacattct

SEQ ID NO: 13628 - DNA, 201 bp, Homo sapiens
ctgtgagcttgcaaaacgcatttttaaggagtctcaacttttctgatttgtgttaaagtttaggtgtgggtcccagaaatgagtttcatggaggggagagsttgtctctctgggtgggtaatacaggggccactgggggctcactgtggctttctggcacagacagttatgaagcaggggttactaaagtgggagagagca

SEQ ID NO: 13629 - DNA, 201 bp, Homo sapiens
gtgggtcccagaaatgagtttcatggaggggagagcttgtctctctgggtgggtaatacaggggccactgggggctcactgtggctttctggcacagacakttatgaagcaggggttactaaagtgggagagagcagccagttctccagcagccccagtgagagctctcatggatctgcctattgcactggggtaggagcc

SEQ ID NO: 13630 - DNA, 201 bp, Homo sapiens
agtttcatggaggggagagcttgtctctctgggtgggtaatacaggggccactgggggctcactgtggctttctggcacagacagttatgaagcaggggtkactaaagtgggagagagcagccagttctccagcagccccagtgagagctctcatggatctgcctattgcactggggtaggagccatcaccgtcagctttt

SEQ ID NO: 13631 - DNA, 201 bp, Homo sapiens
tgtgcgtttttgatatttgtatatttttactcagtgtgtttcaaagatctgcccatgttgtgtggggctgtagtttattcacttttgctgctaacattccyttctgcgaatacatcacaatatactgtattacttgatacttgtcaattgttgtgctgtttctcacgtttgcacttgatgtatatgatatacattacattt

SEQ ID NO: 13632 - DNA, 201 bp, Homo sapiens
gaaataatttcacctgccctgtgtaattctctggaagaatcacagtgagttggaaggaaacttaagacttggaaaaggattgagaggttagcccagaccayaccagggctctgaaggcccagctggggttagaacctgggacaccctccagcccactgtctcctgttccctggccatttactgccccactcccctttctac

SEQ ID NO: 13633 - DNA, 201 bp, Homo sapiens
acatggtggcagcaagagaaaatgtggaagaagcaaaagtggaaaccctgataaacccatcagatctcgtcagacttattcactatcatgagaatagcacrggaaagaccagccctcatgattcaattacctcacctgggtccttcccataacacatgaaaattctgggagacacaattcaagttgagatttgggcgggga

SEQ ID NO: 13634 - DNA, 201 bp, Homo sapiens
atcagtgacatatgtaaatgttttagggagctgtttactgtaacattacctactttagctctgtgcagttgtctggcaaccaatgtgataaagacagaggraagtgctgtattttgttgctgacaagtatatcttaaaagtgcaggtgcacctgaataggcaataaagtattaagagctgctcctggagcagtttgctctc

SEQ ID NO: 13635 - DNA, 201 bp, Homo sapiens
aaaccctgataaacccatcagatctcgtcagacttattcactatcatgagaatagcacaggaaagaccagccctcatgattcaattacctcacctgggtcyttcccataacacatgaaaattctgggagacacaattcaagttgagatttgggcggggacacagccaaatcatatcaccctcttagcaaggactgtgttcg

SEQ ID NO: 13636 - DNA, 201 bp, Homo sapiens
gctcctggagcagtttgctctctgtgacgtgtgaaaagtctacggggtttataattggtctggccatacggctgcctaggattagactcttttcatatccyactaaacactctccttagaagcaagcacaaggagatagtttattttaaaatgtaattgctatgttactaagatttgaatttgagtaccgagaataaacca

SEQ ID NO: 13637 - DNA, 201 bp, Homo sapiens
tacttcattccatcctgggagacagagtctcactctgtctccaaaaaaaaaaaaaaaaaagagaagttcgttataacaaatgccatatgcccttttgtacrtgtcaactggacttctataaatttgtcattggtttatgcttttgaaaataagatgttagcattgtttaaaaatgtgataactataactttgaaagcaaaa

SEQ ID NO: 13638 - DNA, 201 bp, Homo sapiens
ctcagcttccttctaaggtcgttgtgagaggtaaagaaaaggggttagtccagggccagacatggcacaatgcctcaatgaaatattagctgatactatcrtaatttttaaattcccataggactcactgttaaaggattacaaggctgacacaaaaaatactgcattttgaatttgtgtctgatttatacatttccaaag

SEQ ID NO: 13639 - DNA, 201 bp, Homo sapiens
gaatcccagaaagtaataagcacttatttttcatggaaaggaaccggaagtgcttggtgacctccacaggtaatcttgtattatttttgcactgtttggarttttttaaccatgtgcttttatttcttctattcttttcaaaggtcagtaggtgttatctggacaatagggttctggtctgttttctgttttcttcattgt

SEQ ID NO: 13640 - DNA, 201 bp, Homo sapiens
gtgcagttgtctggcaaccaatgtgataaagacagagggaagtgctgtattttgttgctgacaagtatatcttaaaagtgcaggtgcacctgaataggcartaaagtattaagagctgctcctggagcagtttgctctctgtgacgtgtgaaaagtctacggggtttataattggtctggccatacggctgcctaggatta

SEQ ID NO: 13641 - DNA, 201 bp, Homo sapiens
acagttcttgattttttgggttttttttcccccaaacatttatctacctcactcttattttttatatgtgtatatagacaaaagaatacatctcacctttytcagcacctgacaataggccgttgatactggtaacctcatccacgccacaggcgccacacccaggtgatgcagggggaagccaggctgtattccggggtc

SEQ ID NO: 13642 - DNA, 201 bp, Homo sapiens
tcttctgaattcgttgatatcccttgttgctgttcacaatacacccactcccagccctccgtgatggagataactctgttccccacaactagggcttgccsactctcatggtacttctgatgtttaattcttttggctgtgtctgcatttcctcatttacttttaatttgcttatccctagaacataccttttgagtgcct

SEQ ID NO: 13643 - DNA, 201 bp, Homo sapiens
tcaatcacgttcacctgttggagcaagtagagtttcagacggtctccgcttttctcgactagaaagcaggccttctcccttttccccccagtcttgtttcmtgacaccattcccctctgagatgagggttggagaattagaagtctactgatgcattgtaccggggcacgttattgaccctctctgctctcctttcctcat

SEQ ID NO: 13644 - DNA, 201 bp, Homo sapiens
ctgttcacaatacacccactcccagccctccgtgatggagataactctgttccccacaactagggcttgcccactctcatggtacttctgatgtttaattmttttggctgtgtctgcatttcctcatttacttttaatttgcttatccctagaacataccttttgagtgcctaaacttttttatcttcctgtcctgaagac

SEQ ID NO: 13645 - DNA, 201 bp, Homo sapiens
ccctccgtgatggagataactctgttccccacaactagggcttgcccactctcatggtacttctgatgtttaattcttttggctgtgtctgcatttcctcrtttacttttaatttgcttatccctagaacataccttttgagtgcctaaacttttttatcttcctgtcctgaagacaaaaatttaatctgtgaattaaacc

SEQ ID NO: 13646 - DNA, 201 bp, Homo sapiens
ggtggggctgagggcagccagtgtgactgaggctcgctggcccaccctgagctgcttgtgcccatggggcccctggggaggagggcccagctgcagtgcgsatacatctgcccttggcagcagatctgtgaacccaggctgccattctggatttccggatagatgcaaagtgcttggacgtgttttagcagctgctgagac

SEQ ID NO: 13647 - DNA, 201 bp, Homo sapiens
aacttaaaaaagcaacaactaacttatttgtatcttttcctctaatatttagtttttacttcacttgtaacttattacatgtattaaggagtttatttttwtatgacattttactcataaaaggatgaaaccaagattggtgatctgttcacatagattaaaatcctgtttgtgaccacttaggtgtgtaatgtgtgactt

SEQ ID NO: 13648 - DNA, 201 bp, Homo sapiens
caccctcaaacagttacccagtgagtctcctcaaagcaagtggcactgagatacaaccttcctacaggttttcaagtcatctcgtgtggtgcacagtcctsgccctacctcgaaggcccgggcgaagttttcctgagtgtgtatactcatctctttgtgttgtctctggcagggagcaagtgagtacaggattggagtaat

SEQ ID NO: 13649 - DNA, 201 bp, Homo sapiens
agaatttaaaataaaatacattttgacccattgtattgagagctggtataatttaatatagtgagcccctcggcttctggttggttgggttataaagcttsttattcattcgctcatccattaatgcatttctcctatgaggaagctttttcctttgagctgaacacacaaaattaatcgtgctcgaactctccaaatttt

SEQ ID NO: 13650 - DNA, 201 bp, Homo sapiens
ttttgagaatgtgttttccttaatatttgttaaatgagtagactgtattcttaaggtttagaaaggacagaaacaagtttgtgcttagttcttctgaattmgttgatatcccttgttgctgttcacaatacacccactcccagccctccgtgatggagataactctgttccccacaactagggcttgcccactctcatggt

SEQ ID NO: 13651 - DNA, 201 bp, Homo sapiens
gccttcacaggaatagaggcctaggattcgccttcatcctcttgaagagccctaacagtaggtcctggctggggtctggcatagaatgcccttggcacgaygtgtgtgagtgtgtctttccttagtaaatggccttgaaaatgccatgtgcttctggcaggcctggataaggtttgccctgcataacccttggaaagcaca

SEQ ID NO: 13652 - DNA, 201 bp, Homo sapiens
gaagagccctaacagtaggtcctggctggggtctggcatagaatgcccttggcacgatgtgtgtgagtgtgtctttccttagtaaatggccttgaaaatgycatgtgcttctggcaggcctggataaggtttgccctgcataacccttggaaagcacagttctcacttgtaacaccctgtctgcaggtccatgatattgta

SEQ ID NO: 13653 - DNA, 201 bp, Homo sapiens
caagatttcagtggttctgggatgcatttgatctttatgcacacttcagctctgggtttcagttcaggggtcagcataagtaaagcttgatcagataactrtgctttgcctataatcggcattcattctgctggtgacagagtcctttgctcaaaatgaggcttccatgcgtttgcagttctaaactgcttttcagagtca

SEQ ID NO: 13654 - DNA, 201 bp, Homo sapiens
gcttagttagacatggaggatgcatcttaacaagttagtacctttttgcaaagcatgaagactaattcaaagtctattttctggttttgctctaccagtayggccaaaaccatttctttttaagtgagaagtggggatatggtcaggtttgattccagttgaagttgtgagctgcacagggctggtctgagcccagtggca

SEQ ID NO: 13655 - DNA, 201 bp, Homo sapiens
ccagcctgggcaacagagtgagactctgccccaaagcaagataaaattatcccacaggattttagtcctgacttgtgtattactatgcagttgtgtctgtstgaggctcagattcccccccatttaggatttgtgtggctaaatctcagatctcattttcaggtgaatttctctattaaggttataaaagaccaaaataac

SEQ ID NO: 13656 - DNA, 201 bp, Homo sapiens
gaaaataaaccccacataactagtgctgctattgatcattcatatagccagcaggagtggtgagaggcttggtctgcctgaggtgtggagatgcttgtggyggggggcaaggtggacgagggctggggctgctcctggagcatctttacgcgggtggaggagctctgacacagtggcagtgtttgtaacactttccaaagg

SEQ ID NO: 13657 - DNA, 201 bp, Homo sapiens
gaacgaccatatccgtggggccaagagtgagatcttgtacattcgcaccaatgcttcaggtatccatgcctagacaagcccccagcatccacacttcttcrcaagctcactggccttgcttgtaccaggtgtcattgtagggttagcagtgagctatgcctgttgtctttcttgtcaataggtaatactgtgtcatattca

SEQ ID NO: 13658 - DNA, 201 bp, Homo sapiens
cacagcccggattcaggccacatctctctctgggaatgggtcgtggacagatcctgtgttcttctatgtccaggccaaaagtaaggcttgtggagggagamgaaacgtggtaaaactgaaagcagggtggtccaggatcaggacagcccgagtgttcatggctgtcttattttctgttaaaatggagttggccagcttcca

SEQ ID NO: 13659 - DNA, 201 bp, Homo sapiens
gtagaaacacacacgagataattctggggatggagcttaaagggacgtcagcgttcaagggccaggtagaggatcatgagctgtaaagggacccaggtggytccagcacagcgaggaaagcatgcgagtgtgatggccaggcttccagggagagaggagggttttaaggagaacaacgtgctaaaagccactaagaagcca

SEQ ID NO: 13660 - DNA, 201 bp, Homo sapiens
aaatttctctttgtccctgcagggactgttgcagagcattagagccaccctcaaacagttacccagtgagtctcctcaaagcaagtggcactgagatacarccttcctacaggttttcaagtcatctcgtgtggtgcacagtcctcgccctacctcgaaggcccgggcgaagttttcctgagtgtgtatactcatctcttt

SEQ ID NO: 13661 - DNA, 201 bp, Homo sapiens
tcagggctctcaggaaagagccgcccgcgtccctggctgggcttccttggtgcacccagctcatttctccttccctctctgtagaactcacattgtccccrtggaaatgccagccagctcccctttcccagtgcaggggggagccaggtgggcctgaggtgggccagttctgccgctaatgggtgagagacttgggccagg

SEQ ID NO: 13662 - DNA, 201 bp, Homo sapiens
tagtggattagaaggagatttggagatttttaaaaaagcctctggacagtgagttaaatggtgggttgacactctgtggtcgggactttttggagagtctrtaaagttctgctgtatttctcaagagctagagagagatgatactatgaccaaatttggtttgaatgtattataatgtactgagtatcactaatttgttgg

SEQ ID NO: 13663 - DNA, 201 bp, Homo sapiens
ttgcctaagagattcgatttggctgctgctaggctgcttaggcaggtgacagcatggtgggacacttctcatttttctggttagactacttaaccataacrttcatggtgccacctgaaaaaataattttatcgttttagacttttaaaatatttttaggctttttttttttttggcttaaaaaaagaatctgttctactt

SEQ ID NO: 13664 - DNA, 201 bp, Homo sapiens
tttttttttttttaatgttctttgaatcggcaacttaatcatctcccaagtgacagtttcttaattttagttccaaacacctgttcacatatgacttcatktatttgcagcacatggtgtttggggccaagtgtggactggggcttcaagcaggatggtttacaaaactcccaccctctgttctgccaagcattggtcccc

SEQ ID NO: 13665 - DNA, 201 bp, Homo sapiens
cgatctcaaaagttatctccggtctctgaggccagaaatggaggtcagttttcatttccaccggtattgcatgttgcctggcctgctctcttttcctttayaatctccctgcaaggaaatgctgtgtctttaaatcagtttactttccagcatccagtgtttcttactgcatgctcagttgtaggtcatttatgcaaagga

SEQ ID NO: 13666 - DNA, 201 bp, Homo sapiens; identical to SEQ ID NO: 1678

SEQ ID NO: 13667 - DNA, 201 bp, Homo sapiens
ttcttctcaagggctcaagatgttttcccaatgcccagcgtctcatggatgacaaatatgacaagtaattttaccagaggcagtttgagggctcttagcayagcacaagtaaattatgttggttcaagtccaaggaactttgttctctttgtgtttgcttttgtagccttacctctttggggcatgagttagagacataca

SEQ ID NO: 13668 - DNA, 201 bp, Homo sapiens
agtgatccacccacctcggcctcccaaagtcctgggattacaggcgtgagccatcatgcccggccttcttctagatgtttaaaacaaacacattttagtgyagttgagcctctgatcgttacatgtttatttcctagcatttaaaagcctttcagcgacatacactccttattagcttaattttttcttttaagagccgtg

SEQ ID NO: 13669 - DNA, 201 bp, Homo sapiens
tgctggttgagcttctgctaagaggtttccttccagggactccatgttcactgcctcacaaaggcaggccagcctcatgctttagacatccttgctcttarcaaatctttcgtgttctgctacgtcagcctctgtgtgacacccattggaccttctctctgtagcacaattgcataccttgctctgttcttgataagatag

SEQ ID NO: 13670 - DNA, 201 bp, Homo sapiens
gtgtagttgagcctctgatcgttacatgtttatttcctagcatttaaaagcctttcagcgacatacactccttattagcttaattttttcttttaagagcygtgttcttgctctgtcacccaggctggggtgcagtggtaccatcgtaactcactgaagccttgagctcctggcttaagtgctcttcccaccttaaccttc

SEQ ID NO: 13671 - DNA, 201 bp, Homo sapiens
caaactaacggtaggactttcctcagggatttaacgtttgctgtagaagactgaatgatagaatatataagctgtatttttcttgtgattctacacattgyccatgttgcaacttaaatatttttggaatgcaatgtaaaagtgatttactgtcctataattgttttcctgaaagcaaaatgatatttaagtgaactgcaa

SEQ ID NO: 13672 - DNA, 201 bp, Homo sapiens
ggttaggtgataccgccttgccagataaatggccgggactaggtagatgctgaacccagtatgctctgcgttcaaagcacagatcaggggcttcctgaccrtgcaagggatgccggaagcgccctcaccaccttccttagctccaccaccggggctgaatttagtttacggggaacattagcagcaacagagggaggatga

SEQ ID NO: 13673 - DNA, 201 bp, Homo sapiens
tttctgagcccacaccaggtcatttttctataaaatcagaactgtgagagctcagggcatgtggccatcctggataatgggtcctgctgtctggggagtcrttttcatcaaaattcacttttaaagaatagagtgtttattaacgaaaatatgtgagccttggctgggcactgtggctcctgcctgtaatcccagcacttt

SEQ ID NO: 13674 - DNA, 201 bp, Homo sapiens
tataaatctagacttcctttggaatttgtttcctttttctcagccaggtgtatgaagattttaagttcttaggcctcagtgggaagaagatttaaggttcyaagagtacatttgtatctcttttaaattttctattgtttatcagtgacatatgtaaatgttttagggagctgtttactgtaacattacctactttagctc

SEQ ID NO: 13675 - DNA, 201 bp, Homo sapiens
gtcctgctgtctggggagtcgttttcatcaaaattcacttttaaagaatagagtgtttattaacgaaaatatgtgagccttggctgggcactgtggctccygcctgtaatcccagcactttgggaggccgaggcgggtggatcacaaggccaggagatcgagaccatcctaacgcggtgaaaccccgtctctactaaaaat

SEQ ID NO: 13676 - DNA, 201 bp, Homo sapiens
aggagcttggaggtcagcttgtagtataataaaatagaaaactatacagccggggagaacagaagcagaatagaaggataaagtgttgttcatatctctcrggcaaattttacccaaattctgacgagcagttactgcacaagcaacaacaaagggacctagagtgtgttcattgccaattctgtccatttggctacataa

SEQ ID NO: 13677 - DNA, 201 bp, Homo sapiens
caccctctggtccagcgtgcctgttacagtgatcactccatagtggttttgcatgaacaagactgcccagtttgcttaggaagaaaacaaaggacataagktagttctcatgtcttcccagcaccctaaatactcgggctaaacttccacagtcagaccgtcagcttcaggaagggctgctgttgggaactttttttttag

SEQ ID NO: 13678 - DNA, 201 bp, Homo sapiens
tctgacattacttagaagtatgtctgtccttgaatttttcttttgcttaccttttgatattgtttatatgatttatgaatgcagctctgaggtatctgagrggatttattaacgtttacttgcgtccaagtacatgattaagttttaattgctttgtggacattaaaaaattatgcccttggtaaaatgcaaaggttttat

SEQ ID NO: 13679 - DNA, 201 bp, Homo sapiens
ggctcagtggaggtcagagctgctggagcagggaggccttgttgtccttcctggaatgagtttgaggagggggtgaaggtgttccagttcagtcatcaggygcacaacaggtacaggttgggagcagtggccttgcttttgacatgcactttaaggcaggcttcagagattgatctggatctccatagctgaacaggaagg

SEQ ID NO: 13680 - DNA, 201 bp, Homo sapiens
gagacagtctcgctgtgttgcccaggctggggtgcagtcttggttcactgcaacctctgcctcccaggttcaagtgattcttgtgcctcagcctcccaagyagctggggccacaggtgtgagccaccacacctggctaatttttttttcttttctcttttttgtttttgtagagatggagtgttgccatgttggccaggct

SEQ ID NO: 13681 - DNA, 201 bp, Homo sapiens; identical to SEQ ID NO: 1702

SEQ ID NO: 13682 - DNA, 201 bp, Homo sapiens
gaacttaaatattaacgtgtatataagttaatagtaagtagaccgtgaatttagaagagtaaaacagaatcatgagtacgtagtcactgtggccccttttytgctggatttcaagttcgtaagcatttttggaagagagtcgaaggggaaggggtggcttgccagtcagttgagtgatgcgtgagggaggcgttaaatgtg

SEQ ID NO: 13683 - DNA, 201 bp, Homo sapiens
ggtcagtgttgtcctgctagtgatgagtatcccatggtgggcatgctgatgccacgcaagggagagggtgtctggttctgtgcagtggcagtggtgcaacyccttaccaaggtaccgtggggacctgggttagggcaggaggaggaaggtgttctctacagactgcagggcttggaggcagcctgtcatggggaagggtgt

SEQ ID NO: 13684 - DNA, 201 bp, Homo sapiens
ttagaatttaaaataaaatacattttgacccattgtattgagagctggtataatttaatatagtgagcccctcggcttctggttggttgggttataaagcytcttattcattcgctcatccattaatgcatttctcctatgaggaagctttttcctttgagctgaacacacaaaattaatcgtgctcgaactctccaaatt

SEQ ID NO: 13685 - DNA, 201 bp, Homo sapiens
accccttaccaaggtaccgtggggacctgggttagggcaggaggaggaaggtgttctctacagactgcagggcttggaggcagcctgtcatggggaagggygtggatgaagggtgagccgggaccccaggcaggtacggagcagttcaaggccgtcaagtgtgcttcattcttcagtcattagggtgtctctgaaaggttt

SEQ ID NO: 13686 - DNA, 201 bp, Homo sapiens
ttgacccattgtattgagagctggtataatttaatatagtgagcccctcggcttctggttggttgggttataaagcttcttattcattcgctcatccattmatgcatttctcctatgaggaagctttttcctttgagctgaacacacaaaattaatcgtgctcgaactctccaaattttgtgagttccctggtaactgact

SEQ ID NO: 13687 - DNA, 201 bp, Homo sapiens
tttctgtaagaactcataaagctgtatgcatcagctgctcccaggggccttctaaggcctcagtccaacaacagtgctacaggtgaggaaaggaaagaagrcactatgtcatcatgtcattcttttagacttggtaagaagtatattcaagcagatcagatgctctcagaatcacagcgtgttgtactgctagtaattaaa

SEQ ID NO: 13688 - DNA, 201 bp, Homo sapiens
ctgctcccacagaagggaagcacaggcctgtggggtggagggggctctgccctaagcgcagcccctgtgggccacgggtttcctgtcccttacactcggcygccttgtttctcccaccccaacatgaaaaagatggagtgagcctgcagccctgagttgatattgctttttaaattgagaacaatataattacagccttgt

SEQ ID NO: 13689 - DNA, 201 bp, Homo sapiens
acctggcaagctgaggccctaccagtttaaggtgatgattattgtttcttgtattaaattttaaaatgaatttttctccgctttttttttttctaagtagrtttgtgtttctggaatctcgggtgtctgtgagcatttcttcttcagcagagcagtagctgtcaaattttcttgttgcttaatgatatacttttttgtttc

SEQ ID NO: 13690 - DNA, 201 bp, Homo sapiens
gcataaagctggaatgatggacatgatttctttaatcactccaaattagtcatttagttgtttccagttttttagtattacaaataactctgcaataaacrtgtcttgggtatgcattcttttagtttaaaatagtcttgttccttcagaaagttgctcaataatagacttagaaattcttttgtgctaattactgtaatt

SEQ ID NO: 13691 - DNA, 201 bp, Homo sapiens
tgtttctcccaccccaacatgaaaaagatggagtgagcctgcagccctgagttgatattgctttttaaattgagaacaatataattacagccttgtactgkttataaaactttaaggtctcatatcagagatacagcagtgcctttctcatctaaccctgtgtagaatacggctgttgagaatggcgtggctctctggctg

SEQ ID NO: 13692 - DNA, 201 bp, Homo sapiens
taaatgtagggaaggtgaagtgttcaccttcagatggtagctatttatctcagcaagaagagcagatgactaacacccaaatacataaccattattatatracttagcatttataaggcatttctatgcatcctgagagactagagcactctcaaatgaggtttcagagtaagattcatctttgcaaatgaagacaaatta

SEQ ID NO: 13693 - DNA, 201 bp, Homo sapiens
tcttttcacctttggcttttaataagggaagggtattagaaaaaaagtaatttgtatgatgaagggtgatttgtgcgtgtgtgcagacagacacacatgcrgggaggcaaatcagaaccgatgcgtgtttggctttggcttgtttcgctggtgtctggatttacctggcgacacttgttgctctgggggatcttagaggga

SEQ ID NO: 13694 - DNA, 201 bp, Homo sapiens
caactggataaagttactgcataagggtttctttacagcctccctgtttttctcagactaactcttggtcagtcttaaattcttaaaattccatcatctgwtagagctaacgagagcgggcagctcttcattccatccttgaaaagcacagtgtcctccccactggggaacaccaatccttaaaaaacttctttctcattg

SEQ ID NO: 13695 - DNA, 201 bp, Homo sapiens
ggtccacttaatggaagagtctaagagtggcttcaggaagtccactgggggctccccgtgactctgcccacctgcatattgtcttcattctaaggatccakgtggtagcaaaagggttgttacaactttaaccctgcatccccaccttcaggttcagtacccaagggtgagcaatctgttccagtggcacagacctgtttc

SEQ ID NO: 13696 - DNA, 201 bp, Homo sapiens
agtaatttgaaacacccgtgtaaactacctttggcaaataggatagctaaatcaccgctaagatttataatttactttttggatatctgaaacatcaacartatagccatccatggcgtgttcctctggagtgtggtccgtgccgtctctgcctgctccatctggctgatcccaggcaggcagctcagctctcagcagaca

SEQ ID NO: 13697 - DNA, 201 bp, Homo sapiens
ccctctcgggctgtccctgtgatgtcagtcacagccagtgacagccatgattgggaaagtgttagctcgaggcctgtcattctttagtgagtgattagagrtgtttgaataaaataaacccaaaatggggaaagcttgctttttccagaattaggtcagtccagactcatgaacgatgatgggggacttcactgaaatatc

SEQ ID NO: 13698 - DNA, 201 bp, Homo sapiens
tgacagccatgattgggaaagtgttagctcgaggcctgtcattctttagtgagtgattagagatgtttgaataaaataaacccaaaatggggaaagcttgytttttccagaattaggtcagtccagactcatgaacgatgatgggggacttcactgaaatatcgtttcagcctccttacctactaggcctactccaggaac

SEQ ID NO: 13699 - DNA, 201 bp, Homo sapiens
atgtcattcttttagacttggtaagaagtatattcaagcagatcagatgctctcagaatcacagcgtgttgtactgctagtaattaaaactgaagtccacrttgaataagaaataattttttattgattgctggcatttgtgagaaagggtttaattagaccaggatatggaggggacttatcgacagttccgttgtacat

SEQ ID NO: 13700 - DNA, 201 bp, Homo sapiens
ttctgtggatgaaacttcgaatgaggattgttggtgagagttggattgttgttgtatgaggaagtgcaccttggaatctaatggggtcttcacggaggggragtcagttgtggcactgtttgtgtattccattcatcattcatccctccatccaagcacccacgtggagctcagaaagatgactaacacataccccctgct

SEQ ID NO: 13701 - DNA, 201 bp, Homo sapiens; identical to SEQ ID NO: 2837

SEQ ID NO: 13702 - DNA, 201 bp, Homo sapiens; identical to SEQ ID NO: 2839

SEQ ID NO: 13703 - DNA, 201 bp, Homo sapiens
caactacttaggatttttgttgttgttgttgttttcctgtacattgtcttcctatctcccttctggtacccattccaccctctctccccttcctcactgcygtttcataggggttctcagattcctgtgaataaagcaaaccgatgtgcagatatgtgtgcttacacatgtggacgtatttgaggaggtaagagggacctg

SEQ ID NO: 13704 - DNA, 201 bp, Homo sapiens
ttgctccctgttcagatcatagtaaaatcggatgtatccgagtatttcagagtgcttgtctccttagagtcagccagtctgacctgtcagatcataatacrtagtagccgtttattttcttttgaaagcaaaatcatggtttcctctctaaataacacttcagcaggaactgtgacatttcccaatctcagttgcgcacat

SEQ ID NO: 13705 - DNA, 201 bp, Homo sapiens
acaaggcattttaccaagtccggctgaaagagcttcttaccacatctggcatgtagaatggcagaagactatttttgctagattccttgttgctgcagccrtttctgatgtccttttccccttcacacctttcgtgttacacatgtctgagatgacatgatgctaagtaaccaaagtactgctgcgatggaattgctctga

SEQ ID NO: 13706 - DNA, 201 bp, Homo sapiens
agtgttgggggctgtgtaaacctcgaggctcagagtggctgccattttcctaaaagagaagtatggctgctgttggcctcaatgttcagctttacaaaaaytcccgtaattaatgaaggtcaaggcatctgcaaacattaatggggtcacaagggacaaatcagttccttgaggggaagttaaaatgctagattgcttacc

SEQ ID NO: 13707 - DNA, 201 bp, Homo sapiens
tgttttggtgaaacctgataaccttgcttttctccgtgtaccttgtttttcattgtaaaactatttaattatgaaaatgagagtgtgaaaggcaaagtatrattgaatttagggggcagttccatatagttgtaacaaactgattatcaaatgtccaccattagtatgttaaaatacggttttctaatactgagacaacag

SEQ ID NO: 13708 - DNA, 201 bp, Homo sapiens
aaggtcaaggcatctgcaaacattaatggggtcacaagggacaaatcagttccttgaggggaagttaaaatgctagattgcttaccgctccagacaaggcrttctcaagaagtatgtgcagtttcagcacaaggattaacacggagcattacttgagccatggggtgccttgggggacatggatcagcaaccatttccttt

SEQ ID NO: 13709 - DNA, 201 bp, Homo sapiens
tcattttgggttgaggtatcccctggtaccctctcctgaacttcaatagaataacatgatgtggtgaatgaaccatattagaaaaaccagccaatcagccragattcttgtattgactcttctgatctccctctacctctcctttccccatctgccaaacaaagggtttggaacagttaaattctaaagtggtgtcattga

SEQ ID NO: 13710 - DNA, 201 bp, Homo sapiens
gtttgaatcaattatttttatctctttgggattggtttttggttaatctcagcaattcagaaatagctgaagaactatgctgtgggtttagacatcatgcygtgacaaaaagaagaggatcttagaagcgggggacattcactgaagctttatgagcctttcctgaatcccttcaaatcagatcaagttctctctctcctg

SEQ ID NO: 13711 - DNA, 201 bp, Homo sapiens
tggcacagagatttgctgtctggctagcagtacttcagggtactgggtggcttgaggacctcctgttagaagcttggattcacttttcccaaggcaaccasgattggattctattagttctgggtcttgagagcctgcaagggcttccttctgcgaaggtgagtctgggagagacgccatggagtcagtgtgagttctgca

SEQ ID NO: 13712 - DNA, 201 bp, Homo sapiens
gtcaagccactgttgtttcagagctggacacaggtgcttaggaaaattcctcactgaagggttttcaggatttacaagttcttgctgtttttgtgaccttstgtggtttctggtttcacagaaggctttgtttcttggttcttgttgctgctttcagccttggcctgtaatcactgggcgccagggagggctgcggtctgt

SEQ ID NO: 13713 - DNA, 201 bp, Homo sapiens
tttcttatactcagtcatttgtgaatgatgtggttcaaacaaaactgaaacaaaaatagtttttctcattaaaaatatgtttgtcgcatagccagcactcrgaactagggagggtaacatggaagtattgtcattctcggggctgactggttgacagcagcctatacaggagtggagaatattgacagggctgcccgttct

SEQ ID NO: 13714 - DNA, 201 bp, Homo sapiens
agaatgggagttggaaagaaatgttttctcccacacctgtcccgctcctgtctactgaaagctgattaatcagtcagatagtgagttcctattggtagtamgcctccaaaatttggaagaggggaggtggcgtgatgtgaaaaagcaaggctttagggagagattcccgctgggggcattcaccctctggtccagcgtgcc

SEQ ID NO: 13715 - DNA, 201 bp, Homo sapiens
aggaatgatgaccgaagaggaacctcaagggtgcaggcggctctgggatctcagcacatctcagtgatggaatgagctgccggggaatgacccctgtgggkgctgtccaaagtcagagcagacacaaacgtagctctccaggccccataccttggtgggcaagagggcagcaagtgcatcctcacagttgatggggagagc

SEQ ID NO: 13716 - DNA, 201 bp, Homo sapiens
gatgttcagaaccttgtgtgtatcgtataacctggagcaccctcaagctgtccgcccttttcaagttttaaaaatggcttaggcaaacatattgcttaagygatatccagtgaaggtgtctcctgtgctttgaaaaaccatcaacattgatgcttttttgtgacccaataaggacaagatttcagtggttctgggatgcat

SEQ ID NO: 13717 - DNA, 201 bp, Homo sapiens
ttactagttacgtagctcaggaacctggaaccagactccttctccagctgggcagtcccaggtttgagtcctggctccactggaggttgtctgacttggakgttaataataacctgccttagtcccagagtccttagagggaaaataggttataatacctgagtccatgtgtatcaagccattgctggttccaggcccctg

SEQ ID NO: 13718 - DNA, 201 bp, Homo sapiens; identical to SEQ ID NO: 2842

SEQ ID NO: 13719 - DNA, 201 bp, Homo sapiens
gcaggagtcgggcattttaaaataggctgtttttcttttggagcgttcttcttgaaggatattctttgtgcaagacggcgatttttgagaacacaggcagragggagggggtgttttaatgtatgtttttactccatgataccaaagcttccccccaggatccctttacagtggttagttcctggaaacctgatgggtggt

SEQ ID NO: 13720 - DNA, 201 bp, Homo sapiens
ctctcttaagaagtttcagggcagcctaaaggctcaccttcaccctaccaggccccctttcatagccaggatcttagggatggagaagaaagataagttcrcctcgttcactgaagtcgccccttgttttcaggttaggaaacccaggttcatgtccaagtccctgggcaagtagccagcgtaactgattgacctaaaaca

SEQ ID NO: 13721 - DNA, 201 bp, Homo sapiens
agaaatcactgggctacagttttggattaaggttactctactgtgtcagtgcgagctgtcctgagagaattagggtcttcctaagtgatgcagacaggcgyactgcaactccatggcagagctgttaacacctagtgtgtcttttacagttagagttttaagataattttacaggactttaataaatttaaagctccaaaa

SEQ ID NO: 13722 - DNA, 201 bp, Homo sapiens
cctgtggatggagactttgttccataagttccctatagataagatgtaatgaataattcattggcaccgatttatgtctgtagtgtgcttttaaaccctcytggagctgggttcctgaggaggaagcatctgcaggctggactcggctgcctggtggtctccggagtggcctggtgcagagggccagggtggcatctcaga

SEQ ID NO: 13723 - DNA, 201 bp, Homo sapiens
ttttgcattgttttcttggtgaggccagtaagcttttgcctcactcctgggagggacagtagcaaggtcttacaggtctctctatcattgaagcaccctcyccaaccctgccggttttggttgctggtgaaggcctttgacagtgtcctggtagggcgacggtgaggccagctcccgacctctggacagaagaaagcttac

SEQ ID NO: 13724 - DNA, 201 bp, Homo sapiens
atgcatctttgcaggaacttgcccctttccactgaggtttgaggcagactccaaccacatttccatccagtggcttagtggtcttacccgtgagcttgaastgttgtccctgccaggacagtctttgcctctgtaagtatctccatattcctccatcctttcaggtcccattcagtccctaggtcctccatgatggaatat

SEQ ID NO: 13725 - DNA, 201 bp, Homo sapiens
caagaccagcctgacaaacatggagaaacctcatctctactaaaaatacaaaattagccacagtggtggcgcatgcctgtaatcccagctactcaggaggmtgaggcaggagaatcgcttgaacccgggaggtggaggttgtggagagccaagattgcatcattgcactccagcttgggcaaaaagaatgaaactctgtct

SEQ ID NO: 13726 - DNA, 201 bp, Homo sapiens
cctacttccaaatgagtgggttgtccaggtgtgcttgtagatgtcacatacttctaacaaggctctgcagctgcgatgtcaccttgcccagcgtgacctcmttagcatgtatgtggctttcagtggccatgtactttgcttctagagctttctttcccattctgggttcttaggagggggctgtgctttgtgtgtggccag

SEQ ID NO: 13727 - DNA, 201 bp, Homo sapiens
gagatttaaatgaagcgaaatgccattttctctaggtgagaaactggaatattatcaatgtcacttcttcccaaattgatttataatttaaaaacaatttyagtacttctgcagcttgtttggagcttgataaaatgattgtagagtttgtcttgaagctttaatagtgaggcaggtttaaaattgggggcaaaaaagaaa

SEQ ID NO: 13728 - DNA, 201 bp, Homo sapiens
acccagaaaatatttcttattgttgataatctgcagtttgcaagtgcagcgaatcttgtaggtagatttaccttgagttttttgaaacggtagaattaatrtattaaaacatatggtttttagttaaaataggatgttaaaggaatagagcgcacgaacaaagaactttccacttgaacccatgttgtttcatctgacagt

SEQ ID NO: 13729 - DNA, 201 bp, Homo sapiens
ttagccctagctgtttgtcttgcttatttaaacttgtacatggcacatgctcaaagatttttccaggcaaaatttctttaaagcaggatttgagattttcyatccccttccgtctgctggattattccggtgagtgttaatctcccgcctttgtcttagcctctctgtggtcttcggttgcttccttgttctctgtagatc

SEQ ID NO: 13730 - DNA, 201 bp, Homo sapiens
gtaaaatgaagcctctgcatccttcagtaacttacttaaaattttgttagggctgcattttcttcaaagccaagttctgaataagaagtatttgttttggrctctagccagattactgaagtattgttgagggagatttgctgtggaaggtgttgggggtacagggattgtgaagataatgtaaaatatttaacattttaa

SEQ ID NO: 13731 - DNA, 201 bp, Homo sapiens
ttttcagcaaaactgtgtacattacatttttttctttaccatttctccgtagttatttctagcatttttttttcagctgatgaaagcaaatgaagaatttktatgctccatagtcagtcaaacattgatttctctgacttttaacttagaaagtcattttgcagtggcttgcgtgtgtgtatttagactgtgcttctacaa

SEQ ID NO: 13732 - DNA, 201 bp, Homo sapiens
tagggcttagttctgccctttaagtcacagactcaagttactcctgattttaccagcagtcagaatacatttttctttaaaaggaaaagagacgatatccyagtgcttctctatactaaaacaggaagagaagcttccttgttgaagtgacagtttagatgttgttattttgacagaaatattagtaaatatgtcacatta

SEQ ID NO: 13733 - DNA, 201 bp, Homo sapiens
caaatacttttctttagcccttctcatattaacatttagttcttagggatttattttcaaaatatatatagcttgtatatgccattcacctaagttgttaragcagacattctgcctcttgatctttagaaaatacctaagagtattttgttaacagtactcatttcagctgaaagactttattttaaaatttaatttaat

SEQ ID NO: 13734 - DNA, 201 bp, Homo sapiens
ctaatacagtcagcccagccaagatagtgccatcctccgcaagcatccactaaggcatggagtcagcttccgtcattgttagatcagtacttgtttctttsccttgcttatttttcctaacctctctgaacctgctgtgttggaagcttaaggaacatcatcctctgttgggcagaattcttccatggccaccccagcatt

SEQ ID NO: 13735 - DNA, 201 bp, Homo sapiens
tttgtttatttagacctcccattatagaaagtgtgacatgctgggcctctggggaagatttttgagggttttgatgtcagagccccgaactttctctgaayttaattgtctttcagaccctttaagaatgtcacagagtatgatgggcaggatgcctgcggctccaacagctggaacatggtggacgtggacctcccgccc

SEQ ID NO: 13736 - DNA, 201 bp, Homo sapiens
tgctgggattataggcgtgagccactgcacctggcttatttaaatttttatgggtatgaattcacttaaaagctgaaggttttgagaggagagggagcatrtgaaaaaacctaaaggttttgggaggaggaggagaaggaagagagggagcatgtgaacaagagcaactgattacttccttgtcattcatttgcccagtgt

SEQ ID NO: 13737 - DNA, 201 bp, Homo sapiens
cccaaagtgctgggattataggcgtgagccactgcacctggcttatttaaatttttatgggtatgaattcacttaaaagctgaaggttttgagaggagagrgagcatatgaaaaaacctaaaggttttgggaggaggaggagaaggaagagagggagcatgtgaacaagagcaactgattacttccttgtcattcatttgc

SEQ ID NO: 13738 - DNA, 201 bp, Homo sapiens
ccaccatgtcactctgacttccagatgataatgagtgtgaccatgggctgaatgaatgtctctctgctgggattaaaagttagaggaaggcaaaaacagayattgcgtgttctcacgtatacgtgggagcaaaaaaagttgatctcttggaggtagagagtagagtgatggttaccagagactgggaaagggggcgatgaa

SEQ ID NO: 13739 - DNA, 201 bp, Homo sapiens
ttcactcccatgacccaatcacctcccaaaggccatgcctcctaattccatccccttaggggttaggattttgacatgtgagttttggtaggggacacagrcattcactctatagcactgataaacattctttgataatagccattattttagtgggtaaggtgtttttaaatacccataagcgagcacaaaatcagttta

SEQ ID NO: 13740 - DNA, 201 bp, Homo sapiens
acggttaagtttggattgtttgcttattggtttggttattggcaattgctacaaagtccagggtgttctttatcagcagcatgcttatcaagttactgacrttcaagctgagtttccttccctccctccttccttcttctccactgacattttttttttttaaataggtagggaggcatttaatcttgtagcagcatgaga

SEQ ID NO: 13741 - DNA, 201 bp, Homo sapiens
tggtggacttccgtgttctttgcattgcctctcccccatccctcttacacacagctgtgacatgggcatgcacactccttcacacacacagactctccagscccctttccacttcctctttccatttggcttcatgacatttttatcagagattcaaaatctcagatgaaatccaagtcagcctgttttaccagttgtcga

SEQ ID NO: 13742 - DNA, 201 bp, Homo sapiens
ccattagagctacccatagctggtgaagactctgcttatagtggaacctagtttctcagttttccatttatatttatttacctgagctttttgtaaagtartaagtacttgactgaatttctgctatttatcaaatgctttttgaatagaaataatgagttaataacatttagccttttttggtaaatagtataaacaaga

SEQ ID NO: 13743 - DNA, 201 bp, Homo sapiens
gaccccagccgaaggcctcagccctgttttctcaccattcgtccatggctgacctgagggttgccctttctccatctgggtgctcctctcgtattctgttygtttttgttggttcctgtaaacattagaattctgttttaaggtttctagggggagccacaaagcccatttcttcatatttgaccaaagcagcaattagag

SEQ ID NO: 13744 - DNA, 201 bp, Homo sapiens
cctgagctttttgtaaagtagtaagtacttgactgaatttctgctatttatcaaatgctttttgaatagaaataatgagttaataacatttagcctttttyggtaaatagtataaacaagatagggcaaatatgtaaactacttagaactttatctaccttgcatattttgtacctcttatttgcatatgcatgtcacatg

SEQ ID NO: 13745 - DNA, 201 bp, Homo sapiens
ggctgcattttcttcaaagccaagttctgaataagaagtatttgttttgggctctagccagattactgaagtattgttgagggagatttgctgtggaaggkgttgggggtacagggattgtgaagataatgtaaaatatttaacattttaaaaattttcagtaagttctctttccccaatgtcagcatgacttcttcattc

SEQ ID NO: 13746 - DNA, 201 bp, Homo sapiens
attccttacctctctcacccacttgaggattgctcagagcctgggtttcggattgaaatagcactatttctggttgatgacgacattctgtgagccagcartgtagtttaaatatccacaagagcgccctggttccatcagcgccccttcgtaattggtcatgagacttggacctccttcggggctgggactcgggcaagg

SEQ ID NO: 13747 - DNA, 201 bp, Homo sapiens
tgtatgcatcttctgcaattaggaatctgctcaccagcacgagtgctgtggtttctgtagttctgggattcagaggagcattttaaagatgtaggatgttrgaggaggaggtgcagggatctccccttgggtaaagagtgggagacagtctctgagtcataatctgggaccagtggaaggtcaaagggaagaactgtcctg

SEQ ID NO: 13748 - DNA, 201 bp, Homo sapiens
aaattacttaacctctctatgcctcaatgttctcatctctaaagtatggaaaataattgcatctgtgtgaaaactgagttactatacgtaaagtttttagratagtacctgacatacagtaagtgctgaataagtatcagctagagagagagagagttagtttccagcagcctgtttctgtttggggtcacatgtggtctc

SEQ ID NO: 13749 - DNA, 201 bp, Homo sapiens
gttctctgtgtgtaagtagttatattattcctaggttatggcatcttgatttatctttgaaagaagaaaaccctcactgagttgacagggacacattgttytaggcttctacaattgtgctgatgacgctttttcccattggaatgacagggatgataaggtcggctggctagcctttttttaaaatgtagaaaaccacaa

SEQ ID NO: 13750 - DNA, 201 bp, Homo sapiens
ccaccctcaaacaatgatttccccaaattggacagcctgggtttgtatccttgagcacagttttgggaagagcattctgcatgaggcattgtagctatgtrtatggagtataattctgttttcaggttgctctgccacagaggttaagaactccctcttccaaggtagacattgagaacagagacgaccacactgggtttt

SEQ ID NO: 13751 - DNA, 201 bp, Homo sapiens
aactatctcaaggtaattacccttttgaatacttgaggacatcttttctgtgccctctgaatatttccttccccagataaaatatttctagttcttttacytgttctttgtttcagagttttaagtctccatttgataaagtatagtttaatagccttcgaaaccacatcgttgagatttaaaaagccctccttgagagac

SEQ ID NO: 13752 - DNA, 201 bp, Homo sapiens
tcttcagcagctgtgagtttacaagatgtcgcacattgagtatttttctctagcttatttagaaacgccagtctagacttccgcagttttggattcgtggscatagttttggcctttattagatggccctcaaaggtacttttcaggtggacattgatttcatgccagctgtcagagatgattttccctagaaatggctgg

SEQ ID NO: 13753 - DNA, 201 bp, Homo sapiens
ttacccttttgaatacttgaggacatcttttctgtgccctctgaatatttccttccccagataaaatatttctagttcttttacttgttctttgtttcagrgttttaagtctccatttgataaagtatagtttaatagccttcgaaaccacatcgttgagatttaaaaagccctccttgagagacatgaccagtagaaatc

SEQ ID NO: 13754 - DNA, 201 bp, Homo sapiens
tggctgggtatatggagacattctgtattagaatggaggtatacacccatctcttctgtattagagagcaggtgttgccccccgtggtgctcagattgctkagtgtgagaaggaaaagaccagtgataagaggaggaaaactgcgccttccatgtagctcagttaacagcatcatgattctccaggatggccccatttctg

SEQ ID NO: 13755 - DNA, 201 bp, Homo sapiens
ggttttgccatattggccaggctggtctcaaactgctgacctcaggtgatcctcccacctcagcctcccaaagtgctgggattacaggcgtgaaccaccgkgcccggccaaaaaagcttttgaaaacttcgtcgtataatattatggccatccttccaaacgtgacctttttatgttgtattttatctaactaatttgccc

SEQ ID NO: 13756 - DNA, 201 bp, Homo sapiens
gcacacaggatgcacgtgggatgtccagtgaggaggatgagatgaggttgggtggctggagcctggtgagtgacaggcagagagggctattagatcacatkggccctggagccatggtgaagaatttggattttgttctctgtgttggaaagttagcagagagcttatatggggggtgagatggcatagggacaatgttaa

SEQ ID NO: 13757 - DNA, 201 bp, Homo sapiens
tcctaggtagtgaatgagtacaatgctcatatgcaaaataaccaatccaaaggccacgcccctcactcatatgcaaaataaccaatccaaaggccaggccycttaccacctttattgggatttcatactccaggccaatattgccctaccttaatcaccctagggccagataccaggcaagagacagcccctacaccccag

SEQ ID NO: 13758 - DNA, 201 bp, Homo sapiens
cagagagcttattagtgtcttggccatttggaattccatttcacttaaattagaagagtgaaagagaaatgaatggaagaccaaaaatggggagaagaaaytgtatctgatataagcgtggctctacctgggagaatggccattccgaattactggaaacaggaagaagacttgctatgatgcttccttatatctgtgggg

SEQ ID NO: 13759 - DNA, 201 bp, Homo sapiens
acaatggctgtctttttaatgggagttgctcctattcctggtggtaacaacctcttcctgttgctcctttccgaatggaattgcctcagtgaagttgttgaagaagtgaggagggcgaaatatgcccatccttctacagtggggagaggcctggcgcatgaaagcaggcctttgtgtatgccgggctgggcccatgcaaac

SEQ ID NO: 13760 - DNA, 201 bp, Homo sapiens
cttaattgtctccttaacagccctaccttcaacagagtcacatgaggggttagggttcctacatatgaattggcagggtggaggtgggaggtggccggggrtgagacacaattgatttcatagcgtcgagttataagatgggtcacagtattagatgggaccagagcagagagggtctgtaggccatggcaagagtgagaa

SEQ ID NO: 13761 - DNA, 201 bp, Homo sapiens
gaccgcttaggaagctgctgggaccgtgcatatgagagatgttggtggcttgaaccagtgctgggtttctcagcattggcagtattgacgttttgggtgarataattagttggggagtggcagggcggggggtaggggtgcagtcctgaaccagtgccaggtttctcagcattggcactgttggcattttgggtgagataa

SEQ ID NO: 13762 - DNA, 201 bp, Homo sapiens
ggtttacaaaactcccaccctctgttctgccaagcattggtccccagcacccctgggtgttagtgcctcttcctggttcactcactcactttctctggccstctctgtgtctctctcactctctttctttcgagatggagttttgctctgttgcccaggctggggtgcagtggcatgatctcagctcactgcaacctccac

SEQ ID NO: 13763 - DNA, 201 bp, Homo sapiens
gaaataattagttggggagtggcagggcggggggtaggggtgcagtcctgaaccagtgccaggtttctcagcattggcactgttggcattttgggtgagawaattagttgtggggggctgtcctgtgtattgcaaaatgttcagcagcttcactagtctctacctgctagatgccagaagcccacccaccccgccccctag

SEQ ID NO: 13764 - DNA, 201 bp, Homo sapiens
aggctgatctaatcagggtattaaccttgccccactcatcttgatttattcctagatcccagttcccagagcatccctttagagcctcagaaatggaacamaagacagctgaaataagcccgtggccaaaaggcactctgagcatgagggaagtaagcaggcttccctgtcactgctgaggctctgtcatccagccccagc

SEQ ID NO: 13765 - DNA, 201 bp, Homo sapiens
atgtgttagttattaagcatacttataaaatggaaatttgtaaatccgtcactcaatccaagagtgaactcatttccaaattacaatggaaacccatgtgsctatgggcttctcatcctctccaaaggaattcacatccttcattaattcttttgctaaaacaaaagcaaaacaaaggaaaaatattattttattatttaa

SEQ ID NO: 13766 - DNA, 201 bp, Homo sapiens
ccctgcctttttctgagttgggccggctgggcccgaggctggttctgggctgggccaggctgatgcagtggccttgggcttcccgaggctgggagagggcrgtggcccccgctaccctgaagagctggccaacgcggcagggctctttccagtccttaccatgcaagtgaagaggaacagtttgtttaaagaggggtgcca

SEQ ID NO: 13767 - DNA, 201 bp, Homo sapiens
tgtgactcagcagatgggaattcctttaataacacgctgggtgttagcgttagaaccgccactgaacagctctgcaggatgccctcccagccctccctccrcctatttggattagaccaggagactgcagcaaacttctcaaggggaggcgaacttggtgttggtatctgagcgattgtctgtttcaattgtttccctctg

SEQ ID NO: 13768 - DNA, 201 bp, Homo sapiens
ccttggcctcccaaagtgctgggattacaggcatgagccgccactcccggccgctgcagagaatttttaaaataaatgatagattctcacagataagaagwacaggataattatttgccaaagtttgaaactgccattatattcaaaggcattctcttttgggagtggttttatatttaaggtttgaatttagatgacctc

SEQ ID NO: 13769 - DNA, 201 bp, Homo sapiens
tgacacttgcagagtagagaaagcaagataatgaggaaggacatccctgtgttattcatgagttcttacctaagggggctcaatagctccttctattccayggttaagattcttctgttactcttactcaagtcatagaaaagacaaaagaggtaaaagtacttaaaagccacatttctctcctccttgcagacctgaaag

SEQ ID NO: 13770 - DNA, 201 bp, Homo sapiens
gggaggtggggcccagggtgtccagctttgtagaaaggcatggtgtgggggtggctggcggagggggtggtgggtggttttcctcttgaatctctgagaamcttgactggtgtactgctctctgctttcctaaggggtccgtagctgtgctggtggtttgcttggtatctgtattacatccactctgtgcttcagcctgtt

SEQ ID NO: 13771 - DNA, 201 bp, Homo sapiens
aagtggcttctccgatagtgctggtgaattggaagcttctcgtcatcccccttggctggggcgaggcttacttcctggggccttggcagttttgatctaaytgacttatgttacctttctgtattaatcaagcctttttattttccatacttctgatgctttgacatcttggggccttgctgaccctgaagagaccagccc

SEQ ID NO: 13772 - DNA, 201 bp, Homo sapiens
ggaggttaccaggggctgagggtgagggagcagatttggggagatgttagtcaaaggatacaaaatttcagttagataggaggaataagttcaatagatayattgtacatgatgacagtaataatgatgtattcttaaaaattgctgagacaatagattttaagtgttctcaccacacacaaaaaaatgtgatgtaataca

SEQ ID NO: 13773 - DNA, 201 bp, Homo sapiens
aaaagcagggagaccgcttaggaagctgctgggaccgtgcatatgagagatgttggtggcttgaaccagtgctgggtttctcagcattggcagtattgacrttttgggtgaaataattagttggggagtggcagggcggggggtaggggtgcagtcctgaaccagtgccaggtttctcagcattggcactgttggcatttt

SEQ ID NO: 13774 - DNA, 201 bp, Homo sapiens
gccagctttccgttggtaatgatcacctctgagtgtttttaggaattgcaaaatgctggagcctgcatccattttgagagctacaatatcaataaaaatayttctttcttcgattaaaatacttctaattttaaaaattaaaatagctgtagtagtctttaaagagtaaccatgatcacagttttccatggcaaaataatc

SEQ ID NO: 13775 - DNA, 201 bp, Homo sapiens
tgccagaaataacatacaaatttatcatcatacaactgtacaatatgcaaataacttgctagatgatattactgaagattctacatccaattaaaataaaragagaaaacaccttaagataaccatactattaaaagatacagaagacaactggaataaatggaaagacataccacatttattagacaggaataatcatca

SEQ ID NO: 13776 - DNA, 201 bp, Homo sapiens
cagaccagcctggccaacatggtgaaaccccgtctctactgaaaatacaaaagttagctgggcgtggtggcacgtgcctgtaatcccagttactcgggagrctgaggcaggagaattgcttgaacccgggaggtggaggttgcagtgaaccgagattgcatcattatgctccagcctgggcagtgagtgaaactctgtctc

SEQ ID NO: 13777 - DNA, 201 bp, Homo sapiens
tgggagagtgaaagatacctctgagacattttggcttggacagaacagggggtggaggcttccattcctgagctgcaaaggagtggggagggaggagcagygtagtttgggaagtgtgtggtggagaaggcagatggggcaggagctctgtcttgcatctctcaggtcagaaatgcctcagacatccagggggggcaagct

SEQ ID NO: 13778 - DNA, 201 bp, Homo sapiens
aagatgcggagcggagtttgcgtggcccggagcagctccagtgtctgaggcttctctgtgtcacaggctccaagcaggaagcgcaggcaaaatggcaaaayacagcatgtggcattcagttcaaaaatgcccttttttagaagtcggtattctaaatgacatccagtcttgcttagttttttaagagaaaggaaaaataat

SEQ ID NO: 13779 - DNA, 201 bp, Homo sapiens
ctgcagcatgctgctttcttcccattgcatgtgggaagcttcaggttctcttcggtttattttctcatcacctttattaaaatgcagtaaagcaaggagtrtattaatgcgggcctctgcaaatagagggaatttattgaaaagcagaatggcttgaaagattgaacttcatcttaaaaatcagaaacagactcttgttat

SEQ ID NO: 13780 - DNA, 201 bp, Homo sapiens
aagtccacgttgaataagaaataattttttattgattgctggcatttgtgagaaagggtttaattagaccaggatatggaggggacttatcgacagttccrttgtacattgttgacatggttattttctgtatctcattttgcctgggaatttgtcattctcttctattttcttatcagtagcactgcttttacacttatt

SEQ ID NO: 13781 - DNA, 201 bp, Homo sapiens
gacagaacagggggtggaggcttccattcctgagctgcaaaggagtggggagggaggagcagtgtagtttgggaagtgtgtggtggagaaggcagatgggrcaggagctctgtcttgcatctctcaggtcagaaatgcctcagacatccagggggggcaagctaagatggagttgaacacagcagtgtagggctcagggga

SEQ ID NO: 13782 - DNA, 201 bp, Homo sapiens
caaagggagctttgaggcccggaagaggcctttccttgatgatcgagctgtgcacagggagcaaaccccaagccgactgcttgtctgtgccaccctcaaamaatgatttccccaaattggacagcctgggtttgtatccttgagcacagttttgggaagagcattctgcatgaggcattgtagctatgtatatggagtata

SEQ ID NO: 13783 - DNA, 201 bp, Homo sapiens
tacttaaatacctacagccttataaggcctaggtgtcaattttttacgcttgcagatcttttacaactgtaagttaaatgattttacacattaagtgcatmtaaaacaaaaagattcaaacccaaatattaatttaatgacatgggtaatattttgctaaaagtaaaccactgctcagaatgtgaataaactgacctcgaa

SEQ ID NO: 13784 - DNA, 201 bp, Homo sapiens
caaggagtctacttctaagaatgcatttgcaagccaaaagagtggtgaaccacttcagagtgcgggtctgtgggggatgatgtctgctttgcttcgttttktggaataatttttaacatttctatttagcattcatgatactctaaatagaagcaggagaacactgtggctctcggatccaggagaggcaggccacgaggg

SEQ ID NO: 13785 - DNA, 201 bp, Homo sapiens
cagttacccagtgagtctcctcaaagcaagtggcactgagatacaaccttcctacaggttttcaagtcatctcgtgtggtgcacagtcctcgccctacctsgaaggcccgggcgaagttttcctgagtgtgtatactcatctctttgtgttgtctctggcagggagcaagtgagtacaggattggagtaataggcattttt

SEQ ID NO: 13786 - DNA, 201 bp, Homo sapiens
gaaaagagggttagcttttttttttccggctcatggttcttcaggctgttcaagcatggttccaacatctgatcatcatctttttttttttttttttagayggagtctcattctgtcacccaggctggagtacagtggcgccatcttggctcactgcaacctcccacttctgggttcaagcaattctcctgcgtcagcctc

SEQ ID NO: 13787 - DNA, 201 bp, Homo sapiens
ccttcctacaggttttcaagtcatctcgtgtggtgcacagtcctcgccctacctcgaaggcccgggcgaagttttcctgagtgtgtatactcatctctttrtgttgtctctggcagggagcaagtgagtacaggattggagtaataggcatttttaggcttgagatggctttgtgtgtttggttaatgtcactacatttcc

SEQ ID NO: 13788 - DNA, 201 bp, Homo sapiens
gaggtggccgagcttgtctggcttccagaggagctttctctgtcccgcccgggggagtggctcaccttggtctgagaccaatgggaggaagcctgctgcgrgcaactggtctgtgcctggaagttggacttgcattttctctggacctccaaagcaaacccgaatgaccactctcatcctccccttttgcttgtttgtgta

SEQ ID NO: 13789 - DNA, 201 bp, Homo sapiens
ccaacatccttcattgtgtttacttactatatctagtcttctccagtctgtaaaaatgtgtctatctttgcttgtttttcatgaccttgatatttttgaakagtatggacaggttgttgcatagaatgctccaaattggttctaatgtttctcatcattaaactcatttttatacattttggggaagactactacaagatt

SEQ ID NO: 13790 - DNA, 201 bp, Homo sapiens
gcacgggcaggaggagctgtgggttgcttttcttccttggaacatggagcaccactctcccctgtgctgatacacttacaaagaagttcacctactccttggaaagttctggaaaaggggcttctacactgttggcctctcgaggagaacggtttttgtttctgtcttcctggaaaagaggtgactgctggcatcatcttt

SEQ ID NO: 13791 - DNA, 201 bp, Homo sapiens
aaagtgccagtctctctatgggttttagagctgatttagatacatgcattgctaatacagtcagcccagccaagatagtgccatcctccgcaagcatccahtaaggcatggagtcagcttccgtcattgttagatcagtacttgtttctttcccttgcttatttttcctaacctctctgaacctgctgtgttggaagctta

SEQ ID NO: 13792 - DNA, 201 bp, Homo sapiens
tttatcaacatgtaccattttctacaaatgccgcccttcctctttaaattgcttggatgggcagatcgattttgattagcaacactgcagcagaaacaagktgcatctctggaaggactgggtggttttctcgttattgttgctggtttgggtcacatcggatgctattttaaattctgtgttttattccacgatgggtct

SEQ ID NO: 13793 - DNA, 201 bp, Homo sapiens
ccactgtactatttccttgtttgtttttcctgtcaatcttgccttccgcgctaatgggacactgatgctgtatggtgatgtgttctcccacagtcatcttytcctcctgtggttggggtggggagctttctctgtgtccccccatgagagtgaggacagtctcatttaatggcaccatggtctgtggagccaggcaggcct

SEQ ID NO: 13794 - DNA, 201 bp, Homo sapiens
ttttattttcaagacaggttctcactctgtcacccaagctggagtgcagtgttgtgatcatggctcactgcagcctcaacctccagggctcaagtgattcytccaccttagcctcccaagtacctaggaacacaggcgcacaccaccactcacaactgactaatttttaaaattttttatacagacagggtcttgctgtgt

SEQ ID NO: 13795 - DNA, 201 bp, Homo sapiens
attaactgtgcctggccctgaattcgtgccttgcaggtacttaggaagtgagttattacaagcagtgctttttatcatccatagatggagatgttatctaygctataggactgcagaaagaattacagagaattatgtagaatcactagggacttgattaatatttgtttacctttcccccacatggattgatgtccttta

SEQ ID NO: 13796 - DNA, 201 bp, Homo sapiens
acccaagctggagtgcagtgttgtgatcatggctcactgcagcctcaacctccagggctcaagtgattcttccaccttagcctcccaagtacctaggaacrcaggcgcacaccaccactcacaactgactaatttttaaaattttttatacagacagggtcttgctgtgttgcccaggctgatcttgaattcctgggcaca

SEQ ID NO: 13797 - DNA, 201 bp, Homo sapiens
aggttaaatatttcacacgtctttgttcagtgtttccactcaccgtggttgagaagcctcaccctctctttcccttgcctttgcttaggttgtgacacacwtatatatatatttttttaattcttgggtacaacagcagtgttaaccgcagacactaggcatttggattactatttttcttaatggctatttaatccttcc

SEQ ID NO: 13798 - DNA, 201 bp, Homo sapiens; identical to SEQ ID NO: 2836

SEQ ID NO: 13799 - DNA, 201 bp, Homo sapiens
acacttctcatttttctggttagactacttaaccataacattcatggtgccacctgaaaaaataattttatcgttttagacttttaaaatatttttaggctttttttttttttggcttaaaaaaagaatctgttctacttgggtattttgttctccttatttcttagtgaacaaagatatttgctcgacttctatcccaga

SEQ ID NO: 13800 - DNA, 201 bp, Homo sapiens
gtaaacgttcatagcaggactgttcatagtagccaaatctggaaacccagtgtacatcaacaggtgagtggctcaataaaatgggctcgaaccttacagtrgaatattattcagccataaaaagggaggaaattttgatccatgtcacaacacagatgaaccttgaagacaccatgccaagtgaaacaaggccagacacaa

SEQ ID NO: 13801 - DNA, 201 bp, Homo sapiens
accaccataaacacggtgggggaagaggctgcaatcaacagtcaggaggatctgggttccaagcccaggtttgcagtgtaacagctgtgtgctcttggtgygaacatttggtcatgtacaaatgaggataatgatactgcccccttgtgatcattagggggattaaattaaatgcagaaatatatgtgagatgcttaatgt

SEQ ID NO: 13802 - DNA, 201 bp, Homo sapiens
agcaaatactctgcatgttgagtgctttcaaaatacagaaacaaacaacttgtggaggcattggaaaagtgtgtttgagaaacaagcagcctcaccatgartgggagtttgtttccctttctcgtctttctggtcatctgctgcacgggcaggaggagctgtgggttgcttttcttccttggaacatggagcaccactctc

SEQ ID NO: 13803 - DNA, 201 bp, Homo sapiens
aatgttctcatctctaaagtatggaaaataattgcatctgtgtgaaaactgagttactatacgtaaagtttttagaatagtacctgacatacagtaagtgytgaataagtatcagctagagagagagagagttagtttccagcagcctgtttctgtttggggtcacatgtggtctctgtccacctggctttttaggcctct

SEQ ID NO: 13804 - DNA, 201 bp, Homo sapiens
tgccccagggaggagtttgagttggtacatcctgactgggtactctgcctgtggttagcaaatactctgcatgttgagtgctttcaaaatacagaaacaarcaacttgtggaggcattggaaaagtgtgtttgagaaacaagcagcctcaccatgaatgggagtttgtttccctttctcgtctttctggtcatctgctgca

SEQ ID NO: 13805 - DNA, 201 bp, Homo sapiens
gtgctgggattaaggtatgagccaccttgcccggctaccggacagtccactctttacaggggggcgtcttggtataagtatggaaagctccgtagatgccrtgtcagtccataccctcaccaccttcttgaccctgtgccgataaactaagagatgtgggcagtgtaccatctggaaaggaaaaggctttggagccaggta

SEQ ID NO: 13806 - DNA, 201 bp, Homo sapiens
ccaggttcaagtgattcttgtgcctcagcctcccaagcagctggggccacaggtgtgagccaccacacctggctaatttttttttcttttctcttttttgkttttgtagagatggagtgttgccatgttggccaggctcgtctcgaactcctggcatcaagtgatctgcccgcttcagcctcccaaagtgctgggattaca

SEQ ID NO: 13807 - DNA, 201 bp, Homo sapiens
tcatggggaagggtgtggatgaagggtgagccgggaccccaggcaggtacggagcagttcaaggccgtcaagtgtgcttcattcttcagtcattagggtgtctctgaaaggtttttcattgaatcagaattcccctaattcacgaattctaaagcttaagtaaattcagtaataataaactgtcaattatccaagcgatga

SEQ ID NO: 13808 - DNA, 201 bp, Homo sapiens
catggggaagggtgtggatgaagggtgagccgggaccccaggcaggtacggagcagttcaaggccgtcaagtgtgcttcattcttcagtcattagggtgtctctgaaaggtttttcattgaatcagaattcccctaattcacgaattctaaagcttaagtaaattcagtaataataaactgtcaattatccaagcgatgaa

SEQ ID NO: 13809 - DNA, 201 bp, Homo sapiens
ctttaaccagagagttggaggttgcagggagccgagatcgcaccactgcactccagcctgggtgacaaagcgagactccatctcaaaaaaaaaaaaaaatrcccacaactgggcatggtggctcatgcctgtaatcccagcactttgggaggctgaggcgggcagatcacgaggtcaggagatcgagaccatcctggctaa

SEQ ID NO: 13810 - DNA, 201 bp, Homo sapiens
tctccagtgtacatttatggaggggcaagatttcaccattctgtgaagaactctgcgtgttgacgactgctcacgcctagggaataaatttcagagcatgygtagatagtgccattttctacttaaaatactataatccattatttacttcggaaaataaaagcattaaggctgaaagttttgggttagtaatcttgatgt

SEQ ID NO: 13811 - DNA, 201 bp, Homo sapiens
acaactgttcgactaactgtcggagacaccctaatcaccccagccacaaacaaatagaacattgtatgtgtgctgaatcccacaaaggccagacatgatgscatgagaccaagaaggaaaagaaataatgtggaaagggtttggggtggaaaggtggggaacctggaggcgggccacatggggccccagaagccatgttga

SEQ ID NO: 13812 - DNA, 201 bp, Homo sapiens
tcatgcttctcaagtaaagcaacagtatctgtgtatccatttacttgattgagctttctactgaattacaggagttaaattatactttgttacactcttgrtattacaaaatgatggccatgcctttattataaaatgacaccagttattctttcctggaggatgtgccttgtgtcactagccgcactaagcacttcccca

SEQ ID NO: 13813 - DNA, 201 bp, Homo sapiens
ggcacctggctgtgctcccttgttggggggtcccttggcctgggcagttttgcgcttctccctgtttccctgtgccctgagactttgtgggtcacaggcargggggctggcctccctgatcaagggcccttggcctaggagggcccctggatttatctagtccagcttctcgtcgtccaggtgcaaaactgatgctctgag

SEQ ID NO: 13814 - DNA, 201 bp, Homo sapiens
tggcagggagcaagtgagtacaggattggagtaataggcatttttaggcttgagatggctttgtgtgtttggttaatgtcactacatttcctaggggatartaaaagtctagcatgataaaagatctcgtcttacaaggtcccgatgtaaagtttggagcctaacttagaatttaaaataaaatacattttgacccattgt

SEQ ID NO: 13815 - DNA, 201 bp, Homo sapiens
gagggtaacatggaagtattgtcattctcggggctgactggttgacagcagcctatacaggagtggagaatattgacagggctgcccgttctccccaggtygaagagagcaaatgcacatccctgtgtgcacggccacctggttcctctcctcacttgctggtgagtattgaacggctcacataattaggcagaactcagg

SEQ ID NO: 13816 - DNA, 201 bp, Homo sapiens
agctaaatcaccgctaagatttataatttactttttggatatctgaaacatcaacaatatagccatccatggcgtgttcctctggagtgtggtccgtgccrtctctgcctgctccatctggctgatcccaggcaggcagctcagctctcagcagacacagatccccagcacatatgaacgtgaaagaggcttctccgtggg

SEQ ID NO: 13817 - DNA, 201 bp, Homo sapiens
cagtcccagtgccttttctctggtgcagcctcatggttcggtctcaccttcagcttttccttccctccaatacatcctgtaaattattgtcagacttcttyttatctaaataactcgtttaggtaaggtactcatatgttcaaaataccatggtggctccctgttctctgtgatgtgaagtcctaaccattagactcagct

SEQ ID NO: 13818 - DNA, 201 bp, Homo sapiens
ctcggcattctttcccatgctttttccttgatcatcacttactagctaacatctattttttcctaaacactctgttgcagttgtagtctgcagtcactctyctaagacttgatcatctattacgctgtttcgttctttattttttaacttttcttcttcttttttttttttgaaacggattctcgctctgtcacccatgct

SEQ ID NO: 13819 - DNA, 201 bp, Homo sapiens
tggtgacagcaggttaaggagagtgtcagagctggtgcagagttttgccccggggccatgaggttctgggcatcatgactctcttatgaagttacaaaackgggcaagtgattgaaggcagaaagacactgtaataaagtgtgctccagtgatgtgtgctccggcttctctcccttactcatctgggccaggtgctttcgc

SEQ ID NO: 13820 - DNA, 201 bp, Homo sapiens
cactcgccttggggggatggtatgagctgtcatactgtatgagcctcatcctggggccatgacttaccaagccagatcatctctgtgagtctgcctggtgkaaagacaaggatcagtgacttctttgtaggtctgaactgggtaatgcagagcatgccctggagacatggcatgtccccccaattctccaagacatgacag

SEQ ID NO: 13821 - DNA, 201 bp, Homo sapiens
cgattgaggcacctctgaaaagtccaaaactcactcccttcctctccagtttcaggcacagaataaaaattcagaacacatggccttggtcctggctctgyggctggctgcctgtggtcctcagacagctgctgcaggttcctgggcctcagtgtcctcaatataaaataagagggtgggacaagattactgaagtccctt

SEQ ID NO: 13822 - DNA, 201 bp, Homo sapiens
catgctttttccttgatcatcacttactagctaacatctattttttcctaaacactctgttgcagttgtagtctgcagtcactctcctaagacttgatcayctattacgctgtttcgttctttattttttaacttttcttcttcttttttttttttgaaacggattctcgctctgtcacccatgctggagtgtactggcac

SEQ ID NO: 13823 - DNA, 201 bp, Homo sapiens
ctcactcccttcctctccagtttcaggcacagaataaaaattcagaacacatggccttggtcctggctctgtggctggctgcctgtggtcctcagacagcygctgcaggttcctgggcctcagtgtcctcaatataaaataagagggtgggacaagattactgaagtccctttcagaactaaaattcacctttagattggt

SEQ ID NO: 13824 - DNA, 201 bp, Homo sapiens
tgaaatcagggggattcccaaatttctaccccaaatctggatgactgcatattgcgggagttcagtaaatatttgttgcactaatacttatgtgcatacgytgaaataatctaaatatttaaaaaccaaactaacggtaggactttcctcagggatttaacgtttgctgtagaagactgaatgatagaatatataagctgt

SEQ ID NO: 13825 - DNA, 201 bp, Homo sapiens
ttctctaggaatcatctgtaaaaagtagaggtttgtcatatctctaaactagggattcaccttatttattaagctatcagtgactttatcttgaggtgcayggcttttagtaactctggttcaagtgcaaggaatgcaaagttaagtgtatcattggaggtgggatttttgagtttgtcagtcatttattgatttgcatgt

SEQ ID NO: 13826 - DNA, 201 bp, Homo sapiens
ctccacaaaaatatgtgggaggcctgcagggcaggtgctcaactaagctctggggctgcaaagatccagagccatgcccctccttggaggcaggtccttgyagacgaggacaatcgtagccttcctgattaaagcaggaattgtccaatcaggctatatgacgggcatcgtccatagtcttcaccaggggagcttttctga

SEQ ID NO: 13827 - DNA, 201 bp, Homo sapiens
agagcaaatgacttggaaaacaggcaaatccactgacataggcatttttagccaccttggaatccgaggagggattctgcactatgccctgtaacctcgtycacatgccgtttgaatgtataccatgaagaccccttagctcagggagctttgctctatttaagtaatgtttatattcttaatgaaccaaagaggaagtgg

SEQ ID NO: 13828 - DNA, 201 bp, Homo sapiens
taatacggttatcaaaacagtgttcactccatactccagtgctgttaatctccagactgaattcggatttcactattttcccactgatgtccctttttttkgttccagatccaagagacgatcctacctggcatttattgtgttcagtttttctaattctgggacgttttcctgggttttctttagtcattcacgaagttc

SEQ ID NO: 13829 - DNA, 201 bp, Homo sapiens
caaacccttgtacagaccatcctagtagaaatgtggatcttgagtatctcagcttcttagtagattttgaactccgtgaaagcaggagccaggcctctcamagcaagtctctccaatatgctcagtaaatatttgtcagatcgagcaatgaccagatgatgaaatacattaaagccttagggagaactgagactactgcac

SEQ ID NO: 13830 - DNA, 201 bp, Homo sapiens
attatgtgtaggggactagatggaaagagtgcagataggactacctaccattcacccctaccagcgaagtggaagcactcatcttctttcccttcttaccytttcaaagcaagttgttgagggatgaagaggagagtgactttaatcgtggctttaagtagagattttctttaggagtaattgtttctctcgacagagtgg

SEQ ID NO: 13831 - DNA, 201 bp, Homo sapiens
tccaaactcacctatttttgctctaaggggtataaggtgttaaaaaatgaatggaagttaactcattctcaccttgtctgctaacttccttttgttctttktctgtaagaactcataaagctgtatgcatcagctgctcccaggggccttctaaggcctcagtccaacaacagtgctacaggtgaggaaaggaaagaaggc

SEQ ID NO: 13832 - DNA, 201 bp, Homo sapiens
ttgttattccccaatgaggatcatttcatttggggctggtctccggaaaaaagtagatcaagcttttcagatgagatttgggtgaaaccctgacaaactcttttttattgccttccctaccacatagtggtggatcaggaaactgtagggcttatgatgctgggaaatttctgctaatgcaataaagatttttgctgttga

SEQ ID NO: 13833 - DNA, 201 bp, Homo sapiens
cccccaaattccatcactgagggaataagtaagttagggtgatagctcccaagcttattttctcttcagaatcacctcatgaagaaaatgaaggtctgtgkgatagtagctggcaggtgggcatggtggtgagggtggtgtttgagcggagacctgaatgaaggttgagaaggagccagccactcacagacacagaggagg

SEQ ID NO: 13834 - DNA, 201 bp, Homo sapiens; identical to SEQ ID NO: 1684

SEQ ID NO: 13835 - DNA, 201 bp, Homo sapiens
ggttttctttagtcattcacgaagttcgcacttttggagaacatggggccagttattttgtagaatatctttctgttagagtttgtggatgtttcctcctkattaaatttggggggtacatttttaacttggagatcacagaggtgctgctgtttgtgtctttgcgcatcctgtcaggagatgcgtgatgtttcctttcct

SEQ ID NO: 13836 - DNA, 201 bp, Homo sapiens
caggaacacagcggctgaggaacggatgcttggagaggagggggtgctttacatgccaggcgggcagggccggggtggggccagatgctggaggagagggytggccaaggggtggcagagaggccccccaggtggcaagtttgcaccctgttgcttcctgcaaggagcttttgtttacgttttcagcttggacagtctggc

SEQ ID NO: 13837 - DNA, 201 bp, Homo sapiens
ttaacagtgagggacataaactttttaactagcagtggcaagtccacttttatttgggaggacaattactagtcacatgaagaagaaaaaatatgcagaascttaagaaatcccacatatgaatgttatttgaaatgttcttgccctttctccctacaaaggaggtgaagaagatgacaggagatgttaattgccaaaata

SEQ ID NO: 13838 - DNA, 201 bp, Homo sapiens
aagaggaacgtgcctgggaggacccgagacaggtgcgggtgggtttccgcagtagccgctgatcccgagtgcatgcggcgtgttcccgggtcgggaccgcrgccaagggaggcttcccggccccagcctccaccccctcctcggcgccccgggacccggacacgccccccgagcttcggagacccgcagcgtgcacgcgcc

SEQ ID NO: 13839 - DNA, 201 bp, Homo sapiens
actacataagatgtgctgttcctctctctttctgtttgaaagtgacttggcagggtgaagttgagaaccccttggaaaggaggaagccgaaatgcaaacamagttgaatcatgaagtgatgtcactctgaaccaattggagcagtggtgtcatgtgcctggcagctacttcaaatgcccacaaaacaggagtaatggttta

SEQ ID NO: 13840 - DNA, 201 bp, Homo sapiens
ttttagaggcaggatcttgctgtgttgcccaggctggtctcaaactcatgacctcaagtgatcctcccaccttcacctcccaaagtgctggcattgcaggygtgagccaccatgcctgaccttccttgtttcttttaggtgattattggttgtgtgtgaggaaagctctggtattttctgtacttatcttgtacctaccca

SEQ ID NO: 13841 - DNA, 201 bp, Homo sapiens
aagtaatcctccacctcagcctcctgagtagctgggactactggtatgcgccaccatgcctggctaagttttttctttttcttttagaggcaggatcttgytgtgttgcccaggctggtctcaaactcatgacctcaagtgatcctcccaccttcacctcccaaagtgctggcattgcaggcgtgagccaccatgcctgac

SEQ ID NO: 13842 - DNA, 201 bp, Homo sapiens
tgttctatggaattaatattgaacaagctgttctgaacctaagaaaggtttgtaaaaaataaacatgaaggaagacttcattcaagaggtcacttaaaaattattattattattattattattattattattattattattattattgttattttaagaattaggtctctgttggccaggctggagcacagtggcacaatc

SEQ ID NO: 13843 - DNA, 201 bp, Homo sapiens
gttctatggaattaatattgaacaagctgttctgaacctaagaaaggtttgtaaaaaataaacatgaaggaagacttcattcaagaggtcacttaaaaattattattattattattattattattattattattattattattattgttattttaagaattaggtctctgttggccaggctggagcacagtggcacaatca

SEQ ID NO: 13844 - DNA, 201 bp, Homo sapiens
tctatggaattaatattgaacaagctgttctgaacctaagaaaggtttgtaaaaaataaacatgaaggaagacttcattcaagaggtcacttaaaaattattattattattattattattattattattattattattattattgttattttaagaattaggtctctgttggccaggctggagcacagtggcacaatcata

SEQ ID NO: 13845 - DNA, 201 bp, Homo sapiens
tcacagctccaggaacttgcaaggaaagggactaacggggcatctgattcacccgtgtgcccttaatggcgtattgtgtgaataaagcaacaatttttagyacagggatttaaaacaacttctgcaaagacagaactaaaaattaatcttaaaaggtggagggttggggtggagggcaggaaagaggaggaactaaattgc

SEQ ID NO: 13846 - DNA, 201 bp, Homo sapiens
tgttttggttcatttgtagtttccccccgcttcgttgtttcctcagatatggagaataaagcctggctggtcagtttcagtttttatttaaattcattttrtcttcattccttttaatctagcacagtcctgtgatgtattgggatcacagtgctctggggaaacattgaaatataaaaacattttcctgaaaacatttcc

SEQ ID NO: 13847 - DNA, 201 bp, Homo sapiens
ctatggaattaatattgaacaagctgttctgaacctaagaaaggtttgtaaaaaataaacatgaaggaagacttcattcaagaggtcacttaaaaattattattattattattattattattattattattattattattattgttattttaagaattaggtctctgttggccaggctggagcacagtggcacaatcatag

SEQ ID NO: 13848 - DNA, 201 bp, Homo sapiens
atggaattaatattgaacaagctgttctgaacctaagaaaggtttgtaaaaaataaacatgaaggaagacttcattcaagaggtcacttaaaaattattattattattattattattattattattattattattattattgttattttaagaattaggtctctgttggccaggctggagcacagtggcacaatcatagct

SEQ ID NO: 13849 - DNA, 201 bp, Homo sapiens
tggaattaatattgaacaagctgttctgaacctaagaaaggtttgtaaaaaataaacatgaaggaagacttcattcaagaggtcacttaaaaattattattattattattattattattattattattattattattattgttattttaagaattaggtctctgttggccaggctggagcacagtggcacaatcatagctc

SEQ ID NO: 13850 - DNA, 201 bp, Homo sapiens
gaattaatattgaacaagctgttctgaacctaagaaaggtttgtaaaaaataaacatgaaggaagacttcattcaagaggtcacttaaaaattattattattattattattattattattattattattattattattgttattttaagaattaggtctctgttggccaggctggagcacagtggcacaatcatagctcac

SEQ ID NO: 13851 - DNA, 201 bp, Homo sapiens
aattaatattgaacaagctgttctgaacctaagaaaggtttgtaaaaaataaacatgaaggaagacttcattcaagaggtcacttaaaaattattattattattattattattattattattattattattattattgttattttaagaattaggtctctgttggccaggctggagcacagtggcacaatcatagctcact

SEQ ID NO: 13852 - DNA, 201 bp, Homo sapiens
ttgcatacttctcttagtggcggactagcggttgtacagtaaatagatgatcattctcgctctgttttacctttcctcagctgctcttctagtaggaaaataacagccctcttagctgtagtcttctggaggctctctcaataatagaagtggaaagaaaagactcaaatccctgggcagtgactttttagttgtttcatt

SEQ ID NO: 13853 - DNA, 201 bp, Homo sapiens
tgcatacttctcttagtggcggactagcggttgtacagtaaatagatgatcattctcgctctgttttacctttcctcagctgctcttctagtaggaaaataacagccctcttagctgtagtcttctggaggctctctcaataatagaagtggaaagaaaagactcaaatccctgggcagtgactttttagttgtttcattt

SEQ ID NO: 13854 - DNA, 201 bp, Homo sapiens
gtcaagtgggcatcccgcaaggatgcagcaggagtattagggaggcgatcaccagagcagaggaggagtaaccttccccataaacaagatgtgttcccccsactaagaaagcgggtggagggtggaggagccaaaacacatcccagccccggggccccaccggagcgaagcgggccgagcgcagagtgcagagtcggggaa

SEQ ID NO: 13855 - DNA, 201 bp, Homo sapiens
ctgggtgtcccctgcctgagatgagcacagtgatgtctatgcgaggttgtaggactcagtgaagtgccttagggattttgcctggcactctcctgggctcmtgaggtgcctagggctgagacttccccttctctgtctggtaaatcatctctcccattctttcttctgcggcccttcatatgagctttgtaatttactcag

SEQ ID NO: 13856 - DNA, 201 bp, Homo sapiens
gtgatttccccgcagcctcggtttagagggagacggggtgtgctgagctgtgcctgcttctgtagaaggggccttctccaagtctgagtagccttaagccwttaggactgctgagtctttctccacaaaaatatgtgggaggcctgcagggcaggtgctcaactaagctctggggctgcaaagatccagagccatgcccct

SEQ ID NO: 13857 - DNA, 201 bp, Homo sapiens
attatgcataatacagtgataccctcaaggctgagtgggaggcagtttgccctctgctgaaggtttcttgtgcttattgtgttcttatggtttggttttaycatttttatgtctccatttctgtttaatagacttatttcagtaagaagagaaagccgtctccatcagcccctctgtaggtgattatttgccacttccttt

SEQ ID NO: 13858 - DNA, 201 bp, Homo sapiens
taaaataagagggtgggacaagattactgaagtccctttcagaactaaaattcacctttagattggtcagatttaaactttttctttctagctcatgtcargtattaaaatgtgtgcacttaccctgcagtttcattatattcaacctgctcccccgaccaagtttcacttacgtatctcactacgagtaggtgtatatgt

SEQ ID NO: 13859 - DNA, 201 bp, Homo sapiens
gtgcttattgtgttcttatggtttggttttaccatttttatgtctccatttctgtttaatagacttatttcagtaagaagagaaagccgtctccatcagcmcctctgtaggtgattatttgccacttcctttttgctgtgagtgctttgaaaacagatttctaagcttgttagagttatgtgttaagagtaaataggcagt

SEQ ID NO: 13860 - DNA, 201 bp, Homo sapiens
ctgcaaagaggaatgcttatccctgttacttattcctggtttcctccaagactagtttcagctggacttcagttgccaaggacttgtcttctgtaatgccsacagaaaataataatgccacattgtaaggtgaaaacagtaatcctggtatttttgtattttagaagaaggttgaagggaaagaaaaggattaaataattt

SEQ ID NO: 13861 - DNA, 201 bp, Homo sapiens
ctgggaaatttctgctaatgcaataaagatttttgctgttgaaagaatttgatctgttttatgtataacatgcagagagcagaagcatatattatctgtarcagatgatagagcagggtatatgggcaagttagaaaaacacagttctcactacatttgaagaaaaaggacaaggagttgtcacaaggatccaggagagtc

SEQ ID NO: 13862 - DNA, 201 bp, Homo sapiens
taatgccacattgtaaggtgaaaacagtaatcctggtatttttgtattttagaagaaggttgaagggaaagaaaaggattaaataatttataacgatgctyttatgggaaataaaatataccatgtccatttggaaacacatttgcttacttccacacagcctttgtaacgtgctctccttcctcttacctgtacttcggt

SEQ ID NO: 13863 - DNA, 201 bp, Homo sapiens
aattaacacctgtctctatctgtgtgtaaggctctctgggaggagctgtgaggcaaataaaaataaggaatggtgtcccgcaaggagcttacaatgtgtgyattacaagtatatactgagcatggccctgggaacacagtgaaaaaacaggattcctgccctagtacagtgtacactagtggaagagagagaggcagtaaa

SEQ ID NO: 13864 - DNA, 201 bp, Homo sapiens
acgcctctgtctctgtcccccgccgccaccacacagatgcacgtactctcttcacttccgtgtacccagtaaatgcagatcctgatttaaatctgcagcaygctgctttcttcccattgcatgtgggaagcttcaggttctcttcggtttattttctcatcacctttattaaaatgcagtaaagcaaggagtatattaatg

SEQ ID NO: 13865 - DNA, 201 bp, Homo sapiens
tgagaaaagcaggtgggcaatgtactcctgacatactcccttccgttgcaatggccttgagtgatggagcaagagtgaaggaatgttcccatggcactggyaccaggatgactttttgtgaagcagagcagttggtcttagatagtggaggtgcgggaggcatgagaactgggcagtctgacggctgcaccagccagttgg

SEQ ID NO: 13866 - DNA, 201 bp, Homo sapiens
tctgtgttctgaacctggagtacaggcagacacagccgcatcccagaagctcaagagtgcccataccaggaaattacagaaatctttgccaaatggatgartgaatgcaacttccttgatacagggtcagagaggggaaatctgagaaaagcaggtgggcaatgtactcctgacatactcccttccgttgcaatggccttg

SEQ ID NO: 13867 - DNA, 201 bp, Homo sapiens
gtttttacattttccttaggcacagagaaactagtatctttctctgggttgcctttttttttggagacagaatcttactctgtcatccaggctggagtgcrgtggcctgatctcggctcactgcagcctctgccttccgagttccagcaattctcctgcctcagccttccaggtagctgggattacaggcacgtgccacca

SEQ ID NO: 13868 - DNA, 201 bp, Homo sapiens
ctgccatccccatgctctgcctcctaagcagaggatgaacttaagcatcttaaaattttaaacattgactttccctaaaaccaattaaaaaaaaaaacaaracagacagacagacatgacttgtgcccttaaaaatgcagccaggctggcatataaatgggcgtaggctgtttctaaattttttgctttaaattttgccag

SEQ ID NO: 13869 - DNA, 201 bp, Homo sapiens
catcgaaaaaacaaaacattctgcagagggcagtcatgtgtccgctgtgcctctgctcctgtgtgcaccataaaacttgaaagtgagccagaatttgaaartatcggattgggatgtgatttctttaagcctctggctaatttaatataaagtgtttacacttcatttttctggcagtggattttctatgtaggtggtgga

SEQ ID NO: 13870 - DNA, 201 bp, Homo sapiens
catggattctgcctcttaaatgtctctggaatccagccctctgtcaccaccagcaccgccacagctcagactccaggtcactcgccttggggggatggtakgagctgtcatactgtatgagcctcatcctggggccatgacttaccaagccagatcatctctgtgagtctgcctggtgtaaagacaaggatcagtgacttc

SEQ ID NO: 13871 - DNA, 201 bp, Homo sapiens
tatagtggtggcattctgcctaagtcatcttgaaaactgaatgcaaaatctttttaatagctccataatggtctcttgaagtgttacagatttttataacratagctgtaatacaagtgcctttatttactgtgagacttgaacattttgaccatttacatgggtacttgtgtgtctccagctgagctgagtgcatgtcgc

SEQ ID NO: 13872 - DNA, 201 bp, Homo sapiens
ctctgagtgtttttaggaattgcaaaatgctggagcctgcatccattttgagagctacaatatcaataaaaatacttctttcttcgattaaaatacttctmattttaaaaattaaaatagctgtagtagtctttaaagagtaaccatgatcacagttttccatggcaaaataatcattgataggggacttacgattaatgt

SEQ ID NO: 13873 - DNA, 201 bp, Homo sapiens
cccgtccccacaatatcttagggcgaagaaaagcaggtttgagaaaagctttttttcatcatgtatttgtaatagctggagcctgctgagatgatgaggtrgagtggagggagaaagagaccttgaggaggtgtggagggggaaggggtggaaagttctgtcgtcttctgtgcctctctctctctcttgctcagggtctcc

SEQ ID NO: 13874 - DNA, 201 bp, Homo sapiens
gcatacttctcttagtggcggactagcggttgtacagtaaatagatgatcattctcgctctgttttacctttcctcagctgctcttctagtaggaaaataacagccctcttagctgtagtcttctggaggctctctcaataatagaagtggaaagaaaagactcaaatccctgggcagtgactttttagttgtttcatttg

SEQ ID NO: 13875 - DNA, 201 bp, Homo sapiens
catacttctcttagtggcggactagcggttgtacagtaaatagatgatcattctcgctctgttttacctttcctcagctgctcttctagtaggaaaataacagccctcttagctgtagtcttctggaggctctctcaataatagaagtggaaagaaaagactcaaatccctgggcagtgactttttagttgtttcatttgc

SEQ ID NO: 13876 - DNA, 201 bp, Homo sapiens
agtctcctcaaagcaagtggcactgagatacaaccttcctacaggttttcaagtcatctcgtgtggtgcacagtcctcgccctacctcgaaggcccgggcraagttttcctgagtgtgtatactcatctctttgtgttgtctctggcagggagcaagtgagtacaggattggagtaataggcatttttaggcttgagatgg

SEQ ID NO: 13877 - DNA, 201 bp, Homo sapiens
aaatagagttatagtgctacaatgagataaatttcacaggtaaatgtgacgtagctaatgcataatcattctttgtgttgcatggcaattctgtacaaatrgaaggtagcatgtttaacgttcctgttatttcacataaatacagactgagagtttcagtggtctggtttgaaagggaagaaatagaagaaggaaggagag

SEQ ID NO: 13878 - DNA, 201 bp, Homo sapiens
ctttcctgggtcagggcagccggctttccttgtccacgtgtggccggctgttttcttggggagccccggccacagccggcaggactccctttgctccatgygactctgagggcctcacaggtatttgcagcccaggtgctgtcggagcccagccgatgcgaccgacacacagcacaagcgtcatcctgttctgcctgtccc

SEQ ID NO: 13879 - DNA, 201 bp, Homo sapiens
cctgggggtgtgtgggggtggttggttggggtttgcttgttagtttgttgtaaaagcccagcttttcattcttggaaagatttcagccaactcgagagggttacctgccaggaatgctgcagaagcaagaactcagtgggtgagcacttccatttcttcaacaaatgcttctgagtccctgacctgtgccaggtgctcttc

SEQ ID NO: 13880 - DNA, 201 bp, Homo sapiens
aatttgaaacacccgtgtaaactacctttggcaaataggatagctaaatcaccgctaagatttataatttactttttggatatctgaaacatcaacaatayagccatccatggcgtgttcctctggagtgtggtccgtgccgtctctgcctgctccatctggctgatcccaggcaggcagctcagctctcagcagacacag

SEQ ID NO: 13881 - DNA, 201 bp, Homo sapiens
atttacttaataattgtgtctattgaatgtattcttatacatacacacaggcatgcacacacggacacgaatataagctttacaaggacagaaaccttatyttttatttatttcttccttgtgtatcctgagcactgagaacagcctggcacaaagcagggctcaggaaatgtttgctgaatgcatgttcacactggatgt

SEQ ID NO: 13882 - DNA, 201 bp, Homo sapiens
gcttgttgagttgcacaaaccagcctccttggcccttctaggtgataaaagatgctgggctgggagggcagctgtggaaaagggtgtgggcgagggagacagtgcttcatcctgcctggatgaagcatgttggttgttggtttattcataaattagaaaaatatattaagaattgaagttgttccttatctcataagattt

SEQ ID NO: 13883 - DNA, 201 bp, Homo sapiens
cttgttgagttgcacaaaccagcctccttggcccttctaggtgataaaagatgctgggctgggagggcagctgtggaaaagggtgtgggcgagggagacagtgcttcatcctgcctggatgaagcatgttggttgttggtttattcataaattagaaaaatatattaagaattgaagttgttccttatctcataagatttc

SEQ ID NO: 13884 - DNA, 201 bp, Homo sapiens
agaagttgctctgggtgagtcagtgagtcagtggtgagtaattgtgaaggcctggataaatactgtacacttaggctacacttagtgaatattacattttatttatttatttatttatttatttatttatttatttatttatgagatagggtcttgctctgtcccccaggctggagtgcagtggtgcaatcacagctcact

SEQ ID NO: 13885 - DNA, 201 bp, Homo sapiens
gaagttgctctgggtgagtcagtgagtcagtggtgagtaattgtgaaggcctggataaatactgtacacttaggctacacttagtgaatattacattttatttatttatttatttatttatttatttatttatttatttatgagatagggtcttgctctgtcccccaggctggagtgcagtggtgcaatcacagctcactg

SEQ ID NO: 13886 - DNA, 201 bp, Homo sapiens
tgcactgcttcctgctgggggcagaacaaagagagcgggcattgtctctggcataaatgaacctctatcaaaacaaacacccagagagaggggcagcctgrttacagctgcctgtgtgagcctcgacagtgggcctcattcctcacaaagggagctttgaggcccggaagaggcctttccttgatgatcgagctgtgcaca

SEQ ID NO: 13887 - DNA, 201 bp, Homo sapiens
aagttgctctgggtgagtcagtgagtcagtggtgagtaattgtgaaggcctggataaatactgtacacttaggctacacttagtgaatattacattttatttatttatttatttatttatttatttatttatttatttatgagatagggtcttgctctgtcccccaggctggagtgcagtggtgcaatcacagctcactgc

SEQ ID NO: 13888 - DNA, 201 bp, Homo sapiens
ggtttagaaatttcaaaggatgggggttgagggagggaggagttatgggcatgtgatgtggacagggcgggcaggaggatggaagtaacaggtccaaaatrtatctttggtggcccggcagagctcttgcatggggtgagaatggtaatttaggaagagcaagtcttcccatctgtgaagcagaagaaaaaagtggactta

SEQ ID NO: 13889 - DNA, 201 bp, Homo sapiens
gtgtacctgtgattttatcactgcacattcatagaaaggttacagggctaatcttcccgtgatatgaatcatgaaagtcaaaatttatgaatgaaaataaraaggaatgaagtactgatatatgccacaccagagataaatattgaaaacattacctatgctaagtaaaagaagccagtcacaaaagacactacctattgt

SEQ ID NO: 13890 - DNA, 201 bp, Homo sapiens
acacgcctgacgagcgggaatgtgagcgttgtttctgtaaccagttttactgaacctcacagatccattatacgacgtgaattttgtgggaataacatagrctgggagtctgctctcttccagcctggtccctctcttctttcagccctaccctctctgatcatcatgtcccttgcactgcggccaggtaacctttctgat

SEQ ID NO: 13891 - DNA, 201 bp, Homo sapiens
gtcacagctttaaaagttcagattttaaaaaggtaaggaaatgatctcctagtgagacaacttctgcctaaaaaataaaagcttctaagacataaattctrtgttatgaacaacttgcaattttcatagttttcagttttagctctggcagcctctgatagatcttaaatatgtttatcacagctggaaaaatgttttatt

SEQ ID NO: 13892 - DNA, 201 bp, Homo sapiens
aattcacaatcttttatgccaaaagaaagctttcagaatggcttgtcttttttgtagatacttgtatttatatgtccatgcacatacataagaaaggaccrgggaaggtctgcttgaagatattaataaaggggtcacttgtgggtaggtggacttacttgttctctatattctctttacttgtttgtgatctctggtttt

SEQ ID NO: 13893 - DNA, 201 bp, Homo sapiens
tattctacaaatataaaaatatcgttagaaaagtaggtgttaattttaaatataatttttgctgcagcttatgaagtacattgaggaagtgtttataaagrggattctttttctagtgtattatttggagacgcagcttctactgtaggcttaccttcaaatcaaagataatacattcttttatagtattagatgtagagc

SEQ ID NO: 13894 - DNA, 201 bp, Homo sapiens
cagcctttaggtttgtgtttttacttcggtcttttaatctgcctaataaaaacacacataacatcagggctgctcaggaaaccacctgcttttaccaggaytctcatcttcccactatgatacaatgatagtttagaaaaataccaaatatttatcctgagaaactgcaggggagatttaacacccaaaagaagctatttc

SEQ ID NO: 13895 - DNA, 201 bp, Homo sapiens
cagcttaccatcctattacacacacatcgcataagttcgtattatttgtcttgtttggaaatcagtccaactttctgacccttgttctatatataactatrgatcccaaaggttcagctgctgggctagcattttgtctgctatttcctaaataatggtaggtaagcaggaaaagtgccagtcttacttgtccctgactct

SEQ ID NO: 13896 - DNA, 201 bp, Homo sapiens
atgagaaggacttggtgcaggaaagcagcagcacgtgcctggcacagggcagggcctctccagatggcagttcctgtctgtgtcttattcccaccctccgrgcacatggggggaactcagtttctccccactgcgcgtcaccctgggagaggtgttttttgtgccaattgccattttaaatccaaatcagcagggatcatg

SEQ ID NO: 13897 - DNA, 201 bp, Homo sapiens
gatccttcaactctgacaaccttggctttccaaaatgtcactgagatccccctcaaaaagtctcctgagccatccagaacagaaaattcaagcattttacmtagagtagagctcttattcctcactcagagcctgttgacttttatatcgcactcggcgtgagctgattttgtaacccagttacaaaagccatagccatgg

SEQ ID NO: 13898 - DNA, 201 bp, Homo sapiens
ttgcttgcaactcagatatccagcccactgatccaggaagagattcctttgacctgggaagtcataatggcagatatttagacccagctctcaagcaagcmtccaagttgttccggtgaacccgtaactttgagtaacctctgattgaaccagagagtaggaactaggtgcagaaccttgttgaatagaattgtttagcat

SEQ ID NO: 13899 - DNA, 201 bp, Homo sapiens
agcccttactgaaaggaaagaactgttgacttacaagtttttgctaccggtttggtggtcactaatgtgtccagaggcctgaagatgggcgtgtgaggagsctgacttagcttcagaggctctgtctttcgactcacttgtgtgctcactgcacccctgtgctggcaggactccaacctccacccccagcacttgtgtgga

SEQ ID NO: 13900 - DNA, 201 bp, Homo sapiens; identical to SEQ ID NO: 2832

SEQ ID NO: 13901 - DNA, 201 bp, Homo sapiens
agtcctcttgcctggatgagaggcccaagagcactgcatgttagtggctcttcctcctcccccacacctccagggactggagctggggctgctcagaatgmaagatgaatgggggagggagaaggcccagggttgaccccccacaagcttgtctccctgtctcatgctgtctcctatcccatcatgctgctgattgggcag

SEQ ID NO: 13902 - DNA, 201 bp, Homo sapiens
agttgctctgggtgagtcagtgagtcagtggtgagtaattgtgaaggcctggataaatactgtacacttaggctacacttagtgaatattacattttatttatttatttatttatttatttatttatttatttatttatgagatagggtcttgctctgtcccccaggctggagtgcagtggtgcaatcacagctcactgca

SEQ ID NO: 13903 - DNA, 201 bp, Homo sapiens
agctgctcgggaggctgaggcaggagaatggcttgaacccaggaggcagagcttgcagtgagccgagatcacgccactgcactccagcctgggtgacagascgaaactccatctcaaaaaaaaaaaaaaagttatttctctatgtaaacaaagaaaactctccttccttataacttgtatgtgttgggtctatttgtattc

SEQ ID NO: 13904 - DNA, 201 bp, Homo sapiens
gagaccatggcacgcatgctgtgtgtcgaaggccaggtccgcctgtctgcctctccagcagatactctctggggctatttttttctgcttggttgtcatcytttggtttaaccaggcgccagggctcaggcctggacctgctggattccaaagaagacttcgaggtggccgagcttgtctggcttccagaggagctttctc

SEQ ID NO: 13905 - DNA, 201 bp, Homo sapiens
tgaggcaggagaatggcttgaacccaggaggcagagcttgcagtgagccgagatcacgccactgcactccagcctgggtgacagagcgaaactccatctcaaaaaaaaaaaaaaagttatttctctatgtaaacaaagaaaactctccttccttataacttgtatgtgttgggtctatttgtattctgtgaaccataagaa

SEQ ID NO: 13906 - DNA, 201 bp, Homo sapiens
gttacacatgtctgagatgacatgatgctaagtaaccaaagtactgctgcgatggaattgctctgatgtttttttccagagtgaaagctgctattactttaaaaaaaaaaaaacttgaggtttggtttctttccccctctatccgggtgttatacaaatatgtaattaagatgtttgggggttcagatgacaaacaaggag

SEQ ID NO: 13907 - DNA, 201 bp, Homo sapiens
ccttcaccaatttttaaattttttgtagaaactcactatgttgcccagtctggtctcgaactcctggcctcccacctcagcctcccaaccacaactggccraggtcctgtttctcatcacattgtcactcactgatcttgtcatgctttggtggagcttatctacaataattattactgccatgctttaatggcaattttc

SEQ ID NO: 13908 - DNA, 201 bp, Homo sapiens; identical to SEQ ID NO: 2829

SEQ ID NO: 13909 - DNA, 201 bp, Homo sapiens
taaaaaaaaaaataccctttgggtgtgtattgattctgatgttttgctcctagctacatttgccgtttttttttgactgcagaattaggaaccagcttcatttttttttttttttttggatggaatctcgctctgtcgtccaggctggagtgtggtggcgcaatcttggctcactgcaagctccacctcccgggttcacgc

SEQ ID NO: 13910 - DNA, 201 bp, Homo sapiens
gtcagagtgcagtagcatgatctcggctcactgcaacctctacctcctgggttcaagtgattctcatccctcagtttcccaagtagctgggatttcaggcrcgtaccaccatgcctggctattatttgcatttttagtaaagacagggttttaccatgttggctaggctggtctcgaactcctgacctcaagtgatccttc

SEQ ID NO: 13911 - DNA, 201 bp, Homo sapiens
aaaaaaaaaaataccctttgggtgtgtattgattctgatgttttgctcctagctacatttgccgtttttttttgactgcagaattaggaaccagcttcatttttttttttttttttggatggaatctcgctctgtcgtccaggctggagtgtggtggcgcaatcttggctcactgcaagctccacctcccgggttcacgcc

SEQ ID NO: 13912 - DNA, 201 bp, Homo sapiens
aaaaaaagttgtgcttaagctaagtttaatttattattgaagaaagaaatttttaaataaatttagtgaggcctaggtatacagtatttataaagtctacrgtagtgtacagtaatgtcctcagccttcacattcactcaccactcactgactcacccgagggagcaacttccagtcctgcaagctttattcgtggtggta

SEQ ID NO: 13913 - DNA, 201 bp, Homo sapiens
agccttcacattcactcaccactcactgactcacccgagggagcaacttccagtcctgcaagctttattcgtggtggtactcccatatacgtatgtatacttttttttttttttgagacagagtctcgctctgtcgcccaggctggagtgcagtggtgcagtctcggctcactgcaacctccacctcccaagttcacgcca

SEQ ID NO: 13914 - DNA, 201 bp, Homo sapiens
ctattttcccactgatgtccctttttttggttccagatccaagagacgatcctacctggcatttattgtgttcagtttttctaattctgggacgttttcckgggttttctttagtcattcacgaagttcgcacttttggagaacatggggccagttattttgtagaatatctttctgttagagtttgtggatgtttcctcc

SEQ ID NO: 13915 - DNA, 201 bp, Homo sapiens
tatggtcaaattggcaacgaccacaccacatgagaaggaagattattcttcctggaacctggctcccttgagattcttttttttttttttttttagacggmgtttcgcccttgttgcccaggctggagtgcaatggcacgatctccggctcaccgcaacctccacctctcgggttcaagcgattctcctgcctcagcctcc

SEQ ID NO: 13916 - DNA, 201 bp, Homo sapiens
aaaaccttttgctgtgcacgcctgctccttcctccactcctaccccatctccatgaccctgtaagtggccacagtcatgtcactgggtaaagtgcttattraaacaaaattggcacaggcttctgatcctgcgtgtgggttggtgtagcagaggttcagtgcaacagaagaagtttttcatcttaaaatttggaagtaacc

SEQ ID NO: 13917 - DNA, 201 bp, Homo sapiens
tggggtcctgtggcggtgaaggggcgagtctgcacccaggcgagtgttaaaggcctggcctagagaagatgggtgttttgatggaaggagctgctgggaascatgtgtactcggtgtcttggagtttagaaacctcagttggctccatgtctcgtccttagtaaaggaatatcgggagctgagactggatgtattgacaca

SEQ ID NO: 13918 - DNA, 201 bp, Homo sapiens
cttggcagcaggctttttttgttgagggactggggagaaaggaggatcttgtggcatcttgagacgtgcaagttttgtggttggtgtattctgaaccctcygctgtgtgagcagcccgctcaggggcagtgtacgtggctgatctccactgtcctgcccgcgtggatgggggggttattctcagtgtacgtggctgatctc

SEQ ID NO: 13919 - DNA, 201 bp, Homo sapiens
cattcccttccgactagggtcatacgctcgtggctcattcacattccccttggtaataactaatgagggccattcagttaagtggctgggaaggtctgacrtggaagttgggtgatcctcaatggttatttccttttttgctctttctagcatttttatatccagaccttttgagtgagtcggattagggtgaggggttgg

SEQ ID NO: 13920 - DNA, 201 bp, Homo sapiens
aacaaacttattgccacccaggtcgacaggtgggaacagtgtcaccttatttgaacttaatttattcggcctttgagaagcacttatagccagtttcctcraggggcaacaaaatgacattgcagttcaaaagtgctttaaaaacttctttttcccaaagctataatctgcatgtcaccattctccagagtacattgaaaa

SEQ ID NO: 13921 - DNA, 201 bp, Homo sapiens
tatcttctccagtcggcctcccaaagggctgtgattacaggcgggagccacagcgctcagcctaaaaataactctttagccaaaagaaagttttaaaaaaytgtctgttgtattctttgattttactctatgtggtcttttctattatttttaaaataaaaaagatttatactcctcaagtgtaacattttatcaaatctc

SEQ ID NO: 13922 - DNA, 201 bp, Homo sapiens
agtggctcttcctgaggcagaccattcaattctgtaatgcccgactggggaagcccagagtccagtcacttcatttcttcttctataaaagtctaattgaktatttgtttatttagacctcccattatagaaagtgtgacatgctgggcctctggggaagatttttgagggttttgatgtcagagccccgaactttctctg

SEQ ID NO: 13923 - DNA, 201 bp, Homo sapiens
ctgtggagacgcaggcccccgggctctagaacgctgaattctagtgaattctggatggctctccctcacacccaggcccaccctccctcaaggttgcaccwtctccacctgaaggaagctgccaggtggccataggagcccttctcttggcaggccagcttccaggcccagtggcttctcttacatcaggggcctcccctt

SEQ ID NO: 13924 - DNA, 201 bp, Homo sapiens
acttactctcctctgacaagcacccgcctcttcttcaggggtgcaagccacctatgccagctggagggcagagttccattcgtgaaacccttgaaacataygtactatgaaatacaaaaatgtgtaggaaagaaaacaagattattaatgaagttcatattggacacccctcagaggtctaaaatgatggtgcccctcctg

SEQ ID NO: 13925 - DNA, 201 bp, Homo sapiens
aacccacggtgcccagattgaacaaagatgatatgcaaacctcgaaagaaattggcatggaaaaaaaaaatccaaaattctcatgtgaatttttttaaatstccaacagaataatccagtcctagcacctccaagcctgagcaagatgattcagatggccggagagattgcagacggcatggcatacctcaacgccaataa

SEQ ID NO: 13926 - DNA, 201 bp, Homo sapiens
ccttgaaaagaagaaggaaaaagtagatggagggtggtgagttaaaagaattgaaattcgcggataggcatttctatgcttttgttcctaccactcgactstgcaacacgcagtgctttgtaataccttcttggagctcaaaggtcaggctgaaacatggccgctttttcacatttccctgggacttttggaaaatataca

SEQ ID NO: 13927 - DNA, 201 bp, Homo sapiens
actgggcacggtccctgaggctggctctccagacgtttgaggcatttcttggtagaacacctcttagcattggttacagaaataattaagacaatgtcttyaggagattttgacttgggaataaaactcactgtccaaccttgcattcatccctccaattttcctagcttttaaggagcattgctccccttccagggaccc

SEQ ID NO: 13928 - DNA, 201 bp, Homo sapiens
gtgacctagcaattccgggatccacccaagagaaatgaaaacatgcccacacaagacttgtgtatgaatgctggtagcagtattactcataatagcctccygggattcccccgacccccagcccaaaagaaagacccactggaaaccattcagatgttcatcagcagatgagtggatagaaagataaatggataaatgaaa

SEQ ID NO: 13929 - DNA, 201 bp, Homo sapiens
tctccagacgtttgaggcatttcttggtagaacacctcttagcattggttacagaaataattaagacaatgtcttcaggagattttgacttgggaataaarctcactgtccaaccttgcattcatccctccaattttcctagcttttaaggagcattgctccccttccagggacccacattggtttctaagaggcaagctg

SEQ ID NO: 13930 - DNA, 201 bp, Homo sapiens
acgggcattgcagggggactcacagccgccggtcttccccctggggaaacaacgtcaaggttcctaattagaaagggctttacacagagacatgtatctamtgtttgaagattaaatctgtccatgaaatggaagacttgattttatatgaagtcatgaagagccaacaccacatagtaaaataccggctttgaaaaacac

SEQ ID NO: 13931 - DNA, 201 bp, Homo sapiens
atcaacaaggagattttgtcctgtaactaactcaggtacctggaagcagcccgacatttgggggtgcatcgctgcagtctcctttggagctggagaaaccyatgagcaagaatgggcttatgacacatccatttccactccatccctccttccgttgtatgactgcatggagcccctctgacctccagcagtgtcacctgc

SEQ ID NO: 13932 - DNA, 201 bp, Homo sapiens
cttttaaaaatcagctctaaatttttgtcttacaagtatgtattaaaaattctgaaatcaagtataatgaaattatatatcaatattcctttgcatttaaytccagagtggatctgcaggaatcaagaccaacctcatgcagagaacttaagaaatatttaaaaattagtagactggactttaattcttcatgtgtagtgc

SEQ ID NO: 13933 - DNA, 201 bp, Homo sapiens
tcctgtaactaactcaggtacctggaagcagcccgacatttgggggtgcatcgctgcagtctcctttggagctggagaaacctatgagcaagaatgggctwatgacacatccatttccactccatccctccttccgttgtatgactgcatggagcccctctgacctccagcagtgtcacctgcagcctggtagtgagaaac

SEQ ID NO: 13934 - DNA, 201 bp, Homo sapiens
agccgtgtttcccggctaggcgcgaggactcggtagggaagttggtgccggggcgggctccgcggttcccgggccccgcgacccgcacctcgccccttccrtgcgcacgagcctctccgcacacagcgctgatccccctgcggcgcgcaggcagcagcgacagcaccctgggccgcaccgcgtctccgctgctggggctga

SEQ ID NO: 13935 - DNA, 201 bp, Homo sapiens
tttcccggctaggcgcgaggactcggtagggaagttggtgccggggcgggctccgcggttcccgggccccgcgacccgcacctcgccccttccgtgcgcamgagcctctccgcacacagcgctgatccccctgcggcgcgcaggcagcagcgacagcaccctgggccgcaccgcgtctccgctgctggggctgaccgggca

SEQ ID NO: 13936 - DNA, 201 bp, Homo sapiens; identical to SEQ ID NO: 2843

SEQ ID NO: 13937 - DNA, 201 bp, Homo sapiens; identical to SEQ ID NO: 1675

SEQ ID NO: 13938 - DNA, 201 bp, Homo sapiens
gtttgtaaaaaataaacatgaaggaagacttcattcaagaggtcacttaaaaattattattattattattattattattattattattattattattattrttattttaagaattaggtctctgttggccaggctggagcacagtggcacaatcatagctcactgaagcctcgaactcctgggctcaaacagtcctcctcc

SEQ ID NO: 13939 - DNA, 201 bp, Homo sapiens; identical to SEQ ID NO: 1676

SEQ ID NO: 13940 - DNA, 201 bp, Homo sapiens
tccacttgcacttgtgttaaaatgcggcagaactttccctctatacttaaattgtggtgaaatacgtatgacataaaacttaccatcttaacttttttttmttgagacaggatctcattctgtcacccaggctggagtgcggtggcgcgatctctgctcactgcaacctctgcctcctgggttcaggcgattctcatgcct

SEQ ID NO: 13941 - DNA, 201 bp, Homo sapiens
aagaatggagccaggtggctattttttttttttaaatttatgtaataacaaacattcgcatttattgaaaacttaaagtataataaaaaaataaataaaakaaaaaaagaaaaaagaaaacttattcctgtgtcaggcacttttctaagtgctttgcagtgtattgtctcatttaatagttgtttaaattaacagagtagg

SEQ ID NO: 13942 - DNA, 201 bp, Homo sapiens
tgtgcctctttctctgcatgctctgttgacggtctagtcttgagagagaacctgctgctgtcccgtctgtcgtagccttcctagcaactcttaggcctgcrtgctgtgttttcatgatctcccccaaagcggcactttgatgttttttcagagtcaaagtatcactgtggatatttatcccaaacaaaattgcaaactgat

SEQ ID NO: 13943 - DNA, 201 bp, Homo sapiens
tctatacttaaattgtggtgaaatacgtatgacataaaacttaccatcttaacttttttttattgagacaggatctcattctgtcacccaggctggagtgyggtggcgcgatctctgctcactgcaacctctgcctcctgggttcaggcgattctcatgcctcagccacccgagtagctggaattacacgcgcccgccacc

SEQ ID NO: 13944 - DNA, 201 bp, Homo sapiens
ttttttttttttttttttttttttttttgagatggagtctccctctgttgcccaggctagagtgcaatggcgcagtctcagctcactgcagcctctgcctyccgggttcaagcgattctcctgcctcagcctcccaagtagctgggattgcaggcacccgcaaccacacccgggtaatttttgtatttgtagtggagacag

SEQ ID NO: 13945 - DNA, 201 bp, Homo sapiens
tgccatatgaaacgtcattaagtggagagttgttcacgaactaggtaggtagttactttggtcttgccataggtttttggctgtttctgatgagctactgwttgaagacccctggggtaggggtgaggcctgcattctgggtccaagtctaagagtggcgactagaaatgagcaagttatttaaattgcctgggccttggt

SEQ ID NO: 13946 - DNA, 201 bp, Homo sapiens
cagcctctgcctcccgggttcaagcgattctcctgcctcagcctcccaagtagctgggattgcaggcacccgcaaccacacccgggtaatttttgtatttktagtggagacagagtttcaccgtgttgaccaggctggtttcaaagtgctgggattacaggcgtgagccaccgtgcccggcccctgaatcctatttttaag

SEQ ID NO: 13947 - DNA, 201 bp, Homo sapiens
ggctggagtgcggtggcgcgatctctgctcactgcaacctctgcctcctgggttcaggcgattctcatgcctcagccacccgagtagctggaattacacgygcccgccaccatgcctggctaacttttgtattgttagagatggggtttcgccatgttggccaggccggtcttgaattcctggcctcaagtgatccccctg

SEQ ID NO: 13948 - DNA, 201 bp, Homo sapiens
cctttggtggtgaaggaatgtttccaatttctgctgatggtgtagtgctcttgggagctgggtgctctgaatgagcagatgggcatctgcttttttaagcstgctgttcattctgcaaaatagttattgtgcaaatacctgataagcaccaggtctgtgccaggcgctgtattttgtattttgcatgtctgaggccagcat

SEQ ID NO: 13949 - DNA, 201 bp, Homo sapiens
tggccaggccggtcttgaattcctggcctcaagtgatccccctgcttcggcctcccgaagtgctgagattacaggcgtgagccgccgcgcctggccttccttttttttttttttttaagagatggagtcttgctctgtcgcccaggctggagtgccgtggtgcgatcttggctcactgcaacctctgcctcccaggttgaa

SEQ ID NO: 13950 - DNA, 201 bp, Homo sapiens
ttggtcagggtggtctcgaactcccatcctcaggtgatccacgcgcctcaccctcccaaagtgctgggattacaggcatgaaccaccgcactcccttgagrttcttgtaagccaaggcagaagaagagacatcttaaagtctgtatgtgcacacctgcctccccccattttatatacaattcaagggctttgcttttggaa

SEQ ID NO: 13951 - DNA, 201 bp, Homo sapiens
gtcatggagaattgatccttagacattccttacctctctcacccacttgaggattgctcagagcctgggtttcggattgaaatagcactatttctggttgrtgacgacattctgtgagccagcaatgtagtttaaatatccacaagagcgccctggttccatcagcgccccttcgtaattggtcatgagacttggacctcc

SEQ ID NO: 13952 - DNA, 201 bp, Homo sapiens
gaaaatagtcttgggtatctgccaataatgttcactggagtgttgtttataatgtgcaaaacaggagctaacctaaatgtccaacaataagggattggttaaaaaaaaaaaacaaccctcatggtgtgtattaatactctggaactactgtccccttaaaatggtgatgtagaaggacatgtattgacctagtaaaatatt

SEQ ID NO: 13953 - DNA, 201 bp, Homo sapiens
ctttttagtaacagtaggctttgtcataattggcttcatgttccagctttcctaaaactgtaagtgatgttgggtgggccagcagcaaaataattcacttwacaatttgcatgatagtctggaatgaaccgaatacctaaaaccaggaaataatagtagatatttaatggtttggggatcaaataagaatttactcccaga

SEQ ID NO: 13954 - DNA, 201 bp, Homo sapiens
atactactatacaggaaatctgattgttgcattgaaacaggatttgttatcacatcacggttagacatacccaaaaggcaaaaactacagtggtcatgatkgctttacataagattttggaggagaaactgttagctccatgaaagcaggaactgtgttcactcttgaatgcctgctacctgcacatggtgaatgttctat

SEQ ID NO: 13955 - DNA, 201 bp, Homo sapiens
cttctactgtaggcttaccttcaaatcaaagataatacattcttttatagtattagatgtagagcaactttctccctcttataatctgtataaccattagsatactaacaacaagaagaaaattactctgaatactttaaaatgataaataggccaaggacttcaatgagctgtagaggatacatattacatccaaaatca

SEQ ID NO: 13956 - DNA, 201 bp, Homo sapiens
tgatttcacttaccttcatttatagagagtggataattggcatagatagtgttaacattgtttatcgtggaatgttgagatcgttgatgatttttactggtttttttttttttggttattacctctaaactctgtaggaagcatgctttcttgatcaataaaacttaaagttggagtttatgctgcttttattcataaaaa

SEQ ID NO: 13957 - DNA, 201 bp, Homo sapiens
attcactcttcaactaggattttactcatgggatgcctgtgttcttcatttgaacccaattttacctatcatctacaaaaaaagaaaactattaagagttaaaaaaaaaaaaagagagagagagtcttgaactttgaaatccttcatccacgttttataaagtgtggggtcagattttttccctagttgaaattgaggaaa

SEQ ID NO: 13958 - DNA, 201 bp, Homo sapiens
tcattttccttatgtatgtagtatgtttcaaaaataatccaatgtcagattcttgcttctgtgatcaaggtcttgtttttgccctttctttgctcaccacytccctgcccctgacgccgagtcctcgccttagaggaggtggtcagcttatattgcaacattgaaaatgttataccttacaaagaaggtgatatgccattt

SEQ ID NO: 13959 - DNA, 201 bp, Homo sapiens
ctttttttctcctcctcatggtgggtggccctggtgggctctctctggggcctccagtcctccttccccacaacactggggaattgctgccagttgaatarggccctttttttttttttttttttttgagacagtcttgctctgttgcccaggctggagtgcagtggtgcaatctccgctcactgcaacctctgccttact

SEQ ID NO: 13960 - DNA, 201 bp, Homo sapiens
aaaaagataatccagcctcaccaacagccacagaattgaaatgagatacctgtttctgcttctggcattgggaaagaaagaaaaatggcactagcagccttttttttttttttttttttttttccccaaaaaatttgctactcttgaggttctgtcaaagaatgtgctgtggcctctagaagcatttttaaaaagagactt

SEQ ID NO: 13961 - DNA, 201 bp, Homo sapiens
ttggatgatgctcttatagtttaataaagaaacaagcaaacaaaataggctatacagggcatgtgttcttaaactctgtgacagtggaggtgaacccaggsccctttcatggccttgggagggtcctcagctttgggggcgagttatctgggtggaaaagcaccatgggaggaagaagtcagagaggcgggttgctggagc

SEQ ID NO: 13962 - DNA, 201 bp, Homo sapiens
acagccacagaattgaaatgagatacctgtttctgcttctggcattgggaaagaaagaaaaatggcactagcagccttttttttttttttttttttttttycccaaaaaatttgctactcttgaggttctgtcaaagaatgtgctgtggcctctagaagcatttttaaaaagagactttcacaagtgattgtgcaaaattg

SEQ ID NO: 13963 - DNA, 201 bp, Homo sapiens
agagatcatttatatggaagaaggaaccccaagtagaaacccaaaatctagaccattctgggttctaatctgtacctgccactggctaacatatggctttaagctggatgttacaatgagagctggagtttcgtctgattgcacatagccttgcttttctgtctttggaaaagtagctcactgcagagccctggtaaacgt

SEQ ID NO: 13964 - DNA, 201 bp, Homo sapiens
gtttctttagatcttggaccttgaggtgacctctgtaatggatatatttgaaattattaactgtcttcaagtgggggtttgatgagagagagagagagagwgtgtgtgtgtgtgtgtgtgtgtgtgtgtgtgtgtttacagaaaatatgctaggtttgtacattcaaatttgtgttatcctcttcaagaaagtcaccttgg

SEQ ID NO: 13965 - DNA, 201 bp, Homo sapiens
tcaccttccttcagtgagacaggaataggacagtatttgaaaagcatctaacatgtttccaagcacataggtttttggtaaatggtggcagctgctgctattttttttttaaattaaactatctaagagttgcattctgagaccatctaaaattctgagtcttaagctgtgttgactatatatgttcactaccataactaa

SEQ ID NO: 13966 - DNA, 201 bp, Homo sapiens
gatctcggctcactgcaagctccgcctcctgggttcatgccattctcctgcctcagcctcccgagcagctgggactgcaggcacccgcaaccacccctggytaattttttttgtatttttagtagagacagggtttcactgtgttagccaggatggtcttgatctcctgacctcgtgatccacctgtctcggcctcccaac

SEQ ID NO: 13967 - DNA, 201 bp, Homo sapiens
ggtaatcttgtattatttttgcactgtttggaattttttaaccatgtgcttttatttcttctattcttttcaaaggtcagtaggtgttatctggacaatagggttctggtctgttttctgttttcttcattgtactgtgcattaagaaaaaccctaatgtgcttttttttttttttaagtgaacctttccacatctcattg

SEQ ID NO: 13968 - DNA, 201 bp, Homo sapiens
tttctttagatcttggaccttgaggtgacctctgtaatggatatatttgaaattattaactgtcttcaagtgggggtttgatgagagagagagagagagaktgtgtgtgtgtgtgtgtgtgtgtgtgtgtgtgtttacagaaaatatgctaggtttgtacattcaaatttgtgttatcctcttcaagaaagtcaccttggt

SEQ ID NO: 13969 - DNA, 201 bp, Homo sapiens
cgagagggaatgagttgaggattcgatcactgtttatagccagtctcggatcctgattgtgaagtcattctttctggataataactactatatccagcatmttgagagtataaaataaaggcacatgttgtacgtcatctctgagatgtagcgatggcttggactttggaggctgatgagagaaaactcatggtggtgagc

SEQ ID NO: 13970 - DNA, 201 bp, Homo sapiens
gacaacttctgcctaaaaaataaaagcttctaagacataaattctgtgttatgaacaacttgcaattttcatagttttcagttttagctctggcagcctcwgatagatcttaaatatgtttatcacagctggaaaaatgttttattgtcatctttgtttatcataatatgccacctactctggttgtgtcttacaactgta

SEQ ID NO: 13971 - DNA, 201 bp, Homo sapiens
ggtgcaatcacagctcactgcagcctcgaccgccaaggctcaagcgatcctcttacctcagcctcctgagtagccgggactagacgcacacaccaccatgsctgactaatttttgtgtttgtagtagggatgaggtttcaccatgttgcccaggctgatctcaaactcctgaccttaagtgatccacccgcctcggcctcc

SEQ ID NO: 13972 - DNA, 201 bp, Homo sapiens
ggccaaggtgggcagatcccttgaggccatgggttcaagaccagcctgggcaacatgcaaaccccatctgtacaaaagattaaaaaaaaattagtttggcktggtggcacacacctgtagtctcagctccttgggagttgcaagtgggaggatcacctgagcccttgaggtcaaggccgaaataagccaaaatcgcctcac

SEQ ID NO: 13973 - DNA, 201 bp, Homo sapiens
acattggaggaagttggatgaaggctatgtgggatctctctgtaactttctcgtaaatctttgcagctttttgtgactctataattattttaaaataaaatttttttttttaaatggaaagtttatagggtatgtagataaattagaaacaacagaaggccaagtaaaaaagtgctgaaggaagcctctacccaggctgga

SEQ ID NO: 13974 - DNA, 201 bp, Homo sapiens
gactccgaggaggccaagggcatgggtgacagcaggcagactgctcgggtggaatgggcatcagctgcagggaagccgggggaagaacagggcacaaatcrgagttcagtgtgagacgcagtgagtttgtgggtagcccagtaactgggaacttggaatggagcagttgggccgggagggccagggtgggagccgtgccgt

SEQ ID NO: 13975 - DNA, 201 bp, Homo sapiens
caccaccggggctgaatttagtttacggggaacattagcagcaacagagggaggatgatatcccgcacttagcccagggcctggctcgctgtctgacaagyactgtcaccatagtaaggacagtttatctgctcgggatgtaagaagtgctggaaaggagggggcagcattgttcagtccatccctttccaagctcctcac

SEQ ID NO: 13976 - DNA, 201 bp, Homo sapiens
tccaagaaaagagtagaatgaaaggaggcaacttggtttcatagggagtgtcatgttgtccttctgagtttactgatgagcttacctgagaaaggagggtyctagcatgggagttctgttgctacaagacatgaaagaatggcctccgtttatcccggagaggagagtccctgagcccttgggagttgccttgaaacctct

SEQ ID NO: 13977 - DNA, 201 bp, Homo sapiens
ttaatatgtgaatgtatgtttcttatggaaattagaacaatacacagttacagagtagaaggtgataggtgatatagctcaccctctcctcttcctgctaytctccccagtctgcttcactccccggaaggaactactggcccatcagcatgtctccttccaggcattttttccatgtggttatgtccacctgcataagaa

SEQ ID NO: 13978 - DNA, 201 bp, Homo sapiens
acacggggcctctcgtttggtccagaacagcctggctcatcggctggggcttgcttgtgcagggctggagcgagcacgtgctagatggagacagcagactyggagtgtgcatttcttcgtgttgcaagcctggcctcacagtgccttcttcctttggttgtctgccaggggtagccctgcaccaggaggaagcttagaaat

SEQ ID NO: 13979 - DNA, 201 bp, Homo sapiens
aatccagagttaaaaataatgttcataaggaagggtagcaaaatttagattttaatacttataggaggtgtgttaattggccccagggccgcaggctttakcgttcagaggactttagccccaaaggttttgtggaacttttccagagtcctcaccagtacattgggaataaatggaatgcctttggaagtactttgaaga

SEQ ID NO: 13980 - DNA, 201 bp, Homo sapiens
tggggttttctgcctccctggtgcactgggcacagcggcttgcctgccttttgggtcgtctccacctcccagggatgtttttgttccctgatcgaatgacytcctgttttgtttgttttttgagacggagttttgctttgtcacccaggctggagtgcaatggcatgatctcggctaactgcaacctctgcctcccgggtt

SEQ ID NO: 13981 - DNA, 201 bp, Homo sapiens
atgagataaatttcacaggtaaatgtgacgtagctaatgcataatcattctttgtgttgcatggcaattctgtacaaatagaaggtagcatgtttaacgtycctgttatttcacataaatacagactgagagtttcagtggtctggtttgaaagggaagaaatagaagaaggaaggagagaagttggcagaggagcaatct

SEQ ID NO: 13982 - DNA, 201 bp, Homo sapiens
tgttggcatttctcgtggtatcatacatgttgggtgcttcccaaattaattacatcagtcagaaaacttcactctatctgagaagctttaatagtgtactkgggattattaaatcctaaaaaaggttatcacaaagagttttcttggtgtgtgtctgtgcttagaatttagaaaataagtcatccagtattgaggccattt

SEQ ID NO: 13983 - DNA, 201 bp, Homo sapiens
tgtacaacaaatttattttcatctgatcattgcacctctgctagccaaaacattttatcacaccagttactgctgcatggaacttgaaagcaataaaattwtctttaaaatcattgtttgattaggctttttgcacattgaggtgaataaaaaaaattagaactcctggaagggtaatttgtgagtctggccttgtgtcaa

SEQ ID NO: 13984 - DNA, 201 bp, Homo sapiens
agtaatttagcttactgacaaaaagaaaagcaaaggaaattccagagaaagaacaggataccaagtctaaataaatttggaagacaaagagaatatcatartttagttcaatcttttaaacaaattgtcacaatttatacgttgggataagagaaccatgagaaaaggtatattctaagtcctgaacatctttctataccc

SEQ ID NO: 13985 - DNA, 201 bp, Homo sapiens
cattaagatggccattcgaaaacattaagcacagaagaatcccattcaggtaatcttctgttggctggctgtagaactacggagaacatctggagaaacaygtcaagggtgtgtgtgaaatcgttgagcctactcgattttgtcgtgctgttgcgcggttttcacttggcactgtcctttaaactccttctgtgccgtgac

SEQ ID NO: 13986 - DNA, 201 bp, Homo sapiens
ttttttttgagatggagtcttactctgtcgcccaggctggagtgcagtggtgtgatctcaggtcactgcaacctccgcctcccgggttccagcaattctcytgcctcggccttctgagtaacagggtctatgggcatgtgccaccatgccgggctaattttttgtattggtagtggagatggggttttgccatgttggcca

SEQ ID NO: 13987 - DNA, 201 bp, Homo sapiens
ttctgttggctggctgtagaactacggagaacatctggagaaacacgtcaagggtgtgtgtgaaatcgttgagcctactcgattttgtcgtgctgttgcgyggttttcacttggcactgtcctttaaactccttctgtgccgtgactctgcagtgtctggcagcgtagtagactctactccctctatggacgtgatccctc

SEQ ID NO: 13988 - DNA, 201 bp, Homo sapiens
agaaaaatggcactagcagccttttttttttttttttttttttttccccaaaaaatttgctactcttgaggttctgtcaaagaatgtgctgtggcctctaraagcatttttaaaaagagactttcacaagtgattgtgcaaaattgtgaggtcactgaataggtgtgtatcctcctaaggaggtagcgttggaggagctgt

SEQ ID NO: 13989 - DNA, 201 bp, Homo sapiens
aaaatggtttctctgcactaatgattatttaaaaaaaaaactctggcaagaacaaaaacaaatggttttttaaaaactctagaaataatttgatacattcraggactctggagagggagagagttaaaggctgatgtgtgtgactctttttcctctccccccaaggaaaaaaaatgaagagaaggagcttttaagtgcagt

SEQ ID NO: 13990 - DNA, 201 bp, Homo sapiens
tggaattcacaatcttttatgccaaaagaaagctttcagaatggcttgtcttttttgtagatacttgtatttatatgtccatgcacatacataagaaaggmccagggaaggtctgcttgaagatattaataaaggggtcacttgtgggtaggtggacttacttgttctctatattctctttacttgtttgtgatctctggt

SEQ ID NO: 13991 - DNA, 201 bp, Homo sapiens; identical to SEQ ID NO: 2826

SEQ ID NO: 13992 - DNA, 201 bp, Homo sapiens
gagcatagttcactgcagcctcaacctcctaggctcatgtgatgctcccacctacgcttcctcaatagatgggactatgttcctgcgccatcactcctggkgaatttttaaatttttgtagagatgcggtcttggtacattttctaggctggtctggaagtcctggcctcaagcagttcttccacctgaacctcccaaagt

SEQ ID NO: 13993 - DNA, 201 bp, Homo sapiens; identical to SEQ ID NO: 1692

SEQ ID NO: 13994 - DNA, 201 bp, Homo sapiens
attcttttcaaaggtcagtaggtgttatctggacaatagggttctggtctgttttctgttttcttcattgtactgtgcattaagaaaaaccctaatgtgcttttttttttttttaagtgaacctttccacatctcattgtccttcagtgagagcaggctgtgtgtgtggtcttggtgaactgtcccgttccctggagacag

SEQ ID NO: 13995 - DNA, 201 bp, Homo sapiens
ttattgcttttgtaaacgcacataaaggactctgaactgttgctactcataacatttctgacgccaaatgtgtggggttttgccataccaacaaccagttstctaactctccagacaccaactgggggccttacaattcagtgcagttctgacactcaccacctggagttagcacagactccacagggatgagggttcagt

SEQ ID NO: 13996 - DNA, 201 bp, Homo sapiens
gcacatgttttctcaccctgagtggctacacttgtacagtcataccctccaaactctaagatgtatactcttacataccaaaacacaaagaaacaacaggaagtaagaacaaaactcaagaggtctgagtgacatcttgccttgcttcacaacttcagagtttgcattgctttaaaaacattggttataagtgagtgtgga

SEQ ID NO: 13997 - DNA, 201 bp, Homo sapiens
tatttttaattttttgaggaaccactgtactgttttccatgtagactgcataagaattccaatttttccacatcttgccaacgtttatttttatttatttytttaaattttttatagtagctatccattctaatggatgtgaggtggtatctcattatggttttgatgggacttttgagttttagcaaatatcaatgaagt

SEQ ID NO: 13998 - DNA, 201 bp, Homo sapiens
gtggtgtgggtggcagtgtgcactgatggagtggagagggtgtcagaatccggtgtttgtgtggtgggaaggaattgactgctggctagagaatgaggagygctgaaacctttgcaccattgcagtggacccgctgagaagggtgttctggggaggctgctctggtctctcgatggagtcaggattgggggacagatagac

SEQ ID NO: 13999 - DNA, 201 bp, Homo sapiens
ctcctgctctttgttttctaaactttcagcggactcgattgggcgaaagccttccggctccctttactaagtcgtttaggtggtggctggggggacaaagragggtttttatctttaaaagataagtacggtttagaagacacgggagaaataatccattttgttatgttatgcagttgaactgtatagcttctctagttt

SEQ ID NO: 14000 - DNA, 201 bp, Homo sapiens
cacatgttttctcaccctgagtggctacacttgtacagtcataccctccaaactctaagatgtatactcttacataccaaaacacaaagaaacaacaggaagtaagaacaaaactcaagaggtctgagtgacatcttgccttgcttcacaacttcagagtttgcattgctttaaaaacattggttataagtgagtgtggaa

SEQ ID NO: 14001 - DNA, 201 bp, Homo sapiens
cttactatatttttattgtaccttttctatgtttaggtatgtttaaatacacacatacttaccatggtgttacaactgcctgcagtattcagtgcagtaaygcactacaggtttgcaggttggtagcctaggagtaataggctatactgtatagcctaggtgtgtagtaggctataccattgaggtgtaagtatactctga

SEQ ID NO: 14002 - DNA, 201 bp, Homo sapiens
gtgattttgcattgaactgtgatataagaatgatcatcagccccttgagattactgtgtgtacctgtgtcaccagtggcatataggggcttaaaagcaagyaagtttaatatatacattcattgagaacacactgtagactgttaggattttcggtgctggagccatagtgatgaatatgacaaggccctcacccttgagg

SEQ ID NO: 14003 - DNA, 201 bp, Homo sapiens
acatgttttctcaccctgagtggctacacttgtacagtcataccctccaaactctaagatgtatactcttacataccaaaacacaaagaaacaacaggaagtaagaacaaaactcaagaggtctgagtgacatcttgccttgcttcacaacttcagagtttgcattgctttaaaaacattggttataagtgagtgtggaaa

SEQ ID NO: 14004 - DNA, 201 bp, Homo sapiens
cagaatgtttgaaactttgtgaggagtctgaccccacactgtaggctccctccatgtatatatttcttcttccttttcctttttttttttttttttttttwaatttttgagatagtgtctcgctctgtaaccccagttggaatgcagtggcatggtcatggcttactgcagcctcaacgtcccaggctcaagggatcctcc

SEQ ID NO: 14005 - DNA, 201 bp, Homo sapiens
aagagccaggattttcaggctggccatttcaggatcagccatttcccacttcctgattcatagcttccaggatttgtaatgcctgtagacttttttctctyttgcttaaaagtggccattgaaagaaaaaataaatagcaaaatccccatcccagaagttctacttcctgttgttgtactattgagctctgaaaaacagct

SEQ ID NO: 14006 - DNA, 201 bp, Homo sapiens
gctcaagaaatcgtcctgtctcagcctcccgagtagctaggactacaggtgtgcaccaccatgtctggctaatttttatttgtattttatttttatagagwcagagtcttactctattgcccaggctgatcttgaactcctatctcaagtgatcctcctgcctcagcctcccaaagtgctgggattacaggcatgagccac

SEQ ID NO: 14007 - DNA, 201 bp, Homo sapiens
cctagggttgtagaaattctcccccatgattgcacaacccactccttctcagccagtgtgcacctggagtcagctgtgtttggccttaaggtgtccatggkccagcagggagagggcagatgggtcagtgttgtcctgctagtgatgagtatcccatggtgggcatgctgatgccacgcaagggagagggtgtctggttct

SEQ ID NO: 14008 - DNA, 201 bp, Homo sapiens
catgttttctcaccctgagtggctacacttgtacagtcataccctccaaactctaagatgtatactcttacataccaaaacacaaagaaacaacaggaagtaagaacaaaactcaagaggtctgagtgacatcttgccttgcttcacaacttcagagtttgcattgctttaaaaacattggttataagtgagtgtggaaac

SEQ ID NO: 14009 - DNA, 201 bp, Homo sapiens
acttggtcaaggtactgatagttttataagctagaataaatatcgtaaaatggctttgaagttgaaaggaattttggggggggaatccttttatgaagaatttttttttttttttacagtttgagaggaaaaataatgtattttgagaatgtgttttccttaatatttgttaaatgagtagactgtattcttaaggtttag

SEQ ID NO: 14010 - DNA, 201 bp, Homo sapiens
tactctattgcccaggctgatcttgaactcctatctcaagtgatcctcctgcctcagcctcccaaagtgctgggattacaggcatgagccactgtgccctmtgtaaaagattcttatcaacagttaaaataagaagctgctcaagacatttacctatcctgaatgtttcaggccctcaaggtgccaggtagctgcaatata

SEQ ID NO: 14011 - DNA, 201 bp, Homo sapiens
aagactaattgattaatttattaagcacttattgtccagtttgcctttaattttcatttttctaagtttccattagctatcatggcctcacttgttatttmataatgaatggttacaaattgtttgtgtgtttttgtaattagaatgtaatagcaatcgtctaccagatgagctgacattgtaatgacatgaagtcagtaa

SEQ ID NO: 14012 - DNA, 201 bp, Homo sapiens
ttgagaaatcctgatgtccaagttgcacccccaccccaattcaataggagcgtttggggttaggatccaggaatcagtgcttgtctaaagatccctaggcwcttcagcaggcagcaaagattggaaaccactgctttatcccttcatttcttcccatgtgcatatcacaaagcactttgacggttttttttcctaaatatt

SEQ ID NO: 14013 - DNA, 201 bp, Homo sapiens
tccaacgtaaagtgctgcacaaggactgtgctgtgagatccaggagtgtcttttcagccctcagtgagtgcctgcaggggacacagctgctttggaggaaygtggttccggagggtttcccactctccatcctagttgctaaagtcacgttccacgtattgtgttctgatgatagaatgaaagcccactccccgcaccctg

SEQ ID NO: 14014 - DNA, 201 bp, Homo sapiens; identical to SEQ ID NO: 2835

SEQ ID NO: 14015 - DNA, 201 bp, Homo sapiens
ccgcctgagccccccaaatagctgggaccacaagtatgcaccaccatacctggcttttttttttttttttttttttttgtattttttgtagagacggggtmattctatgttgcccaggcttgtctcgaactcctggcctcaagcgatccacctgccttggcttctcaaagtgctaggattacagatgtgagccactatgcc

SEQ ID NO: 14016 - DNA, 201 bp, Homo sapiens
ctgtcactcacggatgtactctttgccccaggtgaaagtgacgtcctgcatttcacctccaccaccacgtcgaagaatcgcatcatcataacctggcaccrgtaccggccccctgactacagggatctcatcagcttcaccgtttactacaaggaagcgtgagtttctgctttgggtgatgccattctgttgacagggcta

SEQ ID NO: 14017 - DNA, 201 bp, Homo sapiens
gcctgagccccccaaatagctgggaccacaagtatgcaccaccatacctggcttttttttttttttttttttttttgtattttttgtagagacggggtaaytctatgttgcccaggcttgtctcgaactcctggcctcaagcgatccacctgccttggcttctcaaagtgctaggattacagatgtgagccactatgcctg

SEQ ID NO: 14018 - DNA, 201 bp, Homo sapiens
gtgcagtggcacgatcatggctcactgcaatttctgcctcccaggttcaagcatttctcattccccagcattccgagtagctgggattacaggcatgcacyaccatgcccagctaatttttgtatttttagtagagacggggtttcaccatgttgcccaggctggtctgaaactcctaacctcaggtgatttgcccgcctc

SEQ ID NO: 14019 - DNA, 201 bp, Homo sapiens
ctgggactacaggcatgtgccaccatgcccggctaatttttgtatttttagtagaaatggggtttcactatgttggccaggctggtcttgaaatcctgacyttgcgatccgcctgcctcgacctcccaaagtgctaggattacaggcgtgagccaccgctcctggccgagactctattttaaagctgtcttctcccactga

SEQ ID NO: 14020 - DNA, 201 bp, Homo sapiens
gttttccctttcgtttttcttttctgcttttaatgagccttaattaatccagggagctaggctgcagtatctgtggctctccctgatgttttctttctgcmtttctgtcttggaggggaacctgaggatttggaagtagagggctctactagtgcttcctttttgtccttttctcattgtccaaaagagtcttaagcgatc

SEQ ID NO: 14021 - DNA, 201 bp, Homo sapiens
tggcaggaagggagaggatccgagcctctcctttgaggttgtgtaaccactggagagccagaggagacagttgctttcaacctggcttacattcaaagacttttttttttttttaaacaaaagacattttataaagcattgaattgaccattccacctcctacttggtcagtaaagctagatagggctcggattcagggct

SEQ ID NO: 14022 - DNA, 201 bp, Homo sapiens
gaggctgaggcaggagaatcacttgaacccaggagttggaggttgcggtgagccatggctcatgcatgtaatccttgcactttgggaggctgagacgggcrgatcacaaggtcaggagatcgagaccatcctggctaacacggtgaaaccccgtctccactaaaaatacaaaaaaaaaaaaaaaattagccaggcgtggtt

SEQ ID NO: 14023 - DNA, 201 bp, Homo sapiens
gagccactgcctttgctgccacattttgcttggttattgtgtgagaacaccatttttctctttttaaatgaattgtgtttctctttttaaattgagcatcygactgggcgcggtggctcacgcctgtaatcccagcactttgggaggccacggtgagtggatcacctgaggtcaggaatttgagaccatcctggccaacat

SEQ ID NO: 14024 - DNA, 201 bp, Homo sapiens
ggcaggaagggagaggatccgagcctctcctttgaggttgtgtaaccactggagagccagaggagacagttgctttcaacctggcttacattcaaagacttttttttttttttaaacaaaagacattttataaagcattgaattgaccattccacctcctacttggtcagtaaagctagatagggctcggattcagggctt

SEQ ID NO: 14025 - DNA, 201 bp, Homo sapiens
atttgaagcaccattatttcaggtgaactttgtgtgtgtgtatgttgttttgtttttgcaattcttctccgctactcttccaaaaaagaaaacacaaattyattaggttttgattgttaataaatcagtttgggagaaaacatttccagatatttgaattactcattcaaggacatttcgtgtttctccatttactcaact

SEQ ID NO: 14026 - DNA, 201 bp, Homo sapiens
tcccaacactttgggaggccaaggtgggtggatctcttgaggtcaggagtttgagactagcctggccaacatgggtgaaaccccgtctctactaaaaatamaaaaattagttgggggtggtggtacacgcctgtaatcccagctacttgggaggttgaggcaagagaatctcttgaacctgggaggcagaggttgcagtga

SEQ ID NO: 14027 - DNA, 201 bp, Homo sapiens
aggaaagagactgggcttacctcttgtcccattcactccaaatctctcagtgcgtaggatagggtccatctggtccaaaggagagttttgtgtgactctgygtgttggagtgttttcgaaatgcagagaaattcagagcttctctagctttggctagagaaggaacaatggaagtgagtcttattctacctaagtttgatg

SEQ ID NO: 14028 - DNA, 201 bp, Homo sapiens
aatagttttttagttccaataatacgtttcgtgtaacccagtatatccaaaatatccattttaacatggagtcagtattaaagttacctaaatatttcactttttttttttttttgtctaatctttgaaatcccatgtgcatgtctcaaattggactggccacatggaatgctcaggagtcccatgtagggaccagctgcc

SEQ ID NO: 14029 - DNA, 201 bp, Homo sapiens
ccaccctctgttctgccaagcattggtccccagcacccctgggtgttagtgcctcttcctggttcactcactcactttctctggccctctctgtgtctctstcactctctttctttcgagatggagttttgctctgttgcccaggctggggtgcagtggcatgatctcagctcactgcaacctccaccacctgggttcaag

SEQ ID NO: 14030 - DNA, 201 bp, Homo sapiens
aaatatatggaatgggcaaatgtatggtgacagaaagtagatttgaatttaccaggggatggggatagagtgtggaggggaatgggaattattccataatygataggttttctatttggagtgatgaaaatttttggaaatagataatgatgatagctgtaccattctgtgaatgcaattaatgccactgaattgtaccct

SEQ ID NO: 14031 - DNA, 201 bp, Homo sapiens
agaatgctttcatgatacgtcttggtacttcattacaacaaaaacaaacttattgccacccaggtcgacaggtgggaacagtgtcaccttatttgaacttratttattcggcctttgagaagcacttatagccagtttcctcgaggggcaacaaaatgacattgcagttcaaaagtgctttaaaaacttctttttcccaaa

SEQ ID NO: 14032 - DNA, 201 bp, Homo sapiens
gtatttcatttcaggtgcagatgccttcactttcccacaaaaaaaaccccaacaaaacctaagaccttactgcaactaagtctccaagtactttttaaccyaatgggatgaacagcctgtggtctgctcagatcaccctgagtgcgtgtgagaaggcctgggctttgccaggaaatccaggaaggcagggccgggctgtgt

SEQ ID NO: 14033 - DNA, 201 bp, Homo sapiens
attgatagaacaaggcaagaccactttccccctctgtgagggtggactgtgactctacgagagaagctattctgctttgaaatgcggcactagaggttggygtgtgtagcttttgactgtgaagtgtccaggaagagaaagcatcaatacaacaaattcagattctcagggctctcatggtgacttgaattcacattttgt

SEQ ID NO: 14034 - DNA, 201 bp, Homo sapiens
taagcaatacaatttaaataatttttaaaggaaacatttctaaaggacgttttacattgcttgcattaaaaagaatataatgaacataatccaactttttstcaatactcagggtcatcactgtgaaagtaacttcattctatgataagataatgatgctcccaggtgggcaaggcagtttttcatctaaggtaattgaga

SEQ ID NO: 14035 - DNA, 201 bp, Homo sapiens
acatatgtctatatcggggtgccagtggagtcaccctagtcatatgtaaactctatttatttggttccgaaactgaatttattttgtttgcaagtttggtrtttgggagcatttaagaaatatccatagattcttgtatgatactgacattaaatcattaaataccatattttttaaatgcctctgtctgtttgcatggat

SEQ ID NO: 14036 - DNA, 201 bp, Homo sapiens
gaacccggagtacttcagcgctgctgatggtaagagtccgggccaccagcactgccagcgtgcagggcaggtagatcgggagctttcaggagggttgctartttgggaaaggaaggaggtttgcattattttgagctacctttggccttggatctgtcttcattaatatttctttctttctttttttttttaatcaaagtt

SEQ ID NO: 14037 - DNA, 201 bp, Homo sapiens
gaacttgaaatgattggattattttgtaatacgtcgatactacttttagaagcttttgaataactgtgtcaaagaagctttagaagaggttttaagcaggrttgcagagaatgtactgagtgtgtttttccactcacaaggaaagacagcagctgaatgcagaagtgtgtgtctggttctaactctttatcacttcaggga

SEQ ID NO: 14038 - DNA, 201 bp, Homo sapiens
atgcaatgtaaaagtgatttactgtcctataattgttttcctgaaagcaaaatgatatttaagtgaactgcaatgaaaaatgcaacgactgtaatttatcrttgaagggcattttcaaagtgtatagaatgactaaagcttaagtgtattaaatattctagaggaagacatatttaggctataaatctagacttcctttgg

SEQ ID NO: 14039 - DNA, 201 bp, Homo sapiens
ctgacaccatttaccttcaggaattcttactgtatgatggggagtaaacgaatatacaggtatttttttcatacttccaactgaatgtgaagaaatgaaaygagcaaattgttcacctggtgatattttatcatttcctcctctttgctgcagcaggatatgaaaacttcatccatctgatcatcgctctgcccgtcgctg

SEQ ID NO: 14040 - DNA, 201 bp, Homo sapiens
aaagaagctttagaagaggttttaagcaggattgcagagaatgtactgagtgtgtttttccactcacaaggaaagacagcagctgaatgcagaagtgtgtrtctggttctaactctttatcacttcagggactgtccaggcagcaccatccgttgggtctcctgcccttcctcctcccacccctgccttacccctggccat

SEQ ID NO: 14041 - DNA, 201 bp, Homo sapiens; identical to SEQ ID NO: 1686

SEQ ID NO: 14042 - DNA, 201 bp, Homo sapiens
tttgcgttttaatctgttggtgaagatgggtaaaatcctgcttgaccatttcattcagtttctcaatcccctgtggttaatttgtttttttcaaaaatgtrtttttatgtgatgaaaagaaatttttaaaaaccaactgctttctttcctatactagacttccttgctttgttctggtccttctatctgttagtatcctca

SEQ ID NO: 14043 - DNA, 201 bp, Homo sapiens
tttccactcacaaggaaagacagcagctgaatgcagaagtgtgtgtctggttctaactctttatcacttcagggactgtccaggcagcaccatccgttggrtctcctgcccttcctcctcccacccctgccttacccctggccattcttttgtgaccagtagtcctttatgaatggaattctgagaatgtataattttctc

SEQ ID NO: 14044 - DNA, 201 bp, Homo sapiens
agacagcagctgaatgcagaagtgtgtgtctggttctaactctttatcacttcagggactgtccaggcagcaccatccgttgggtctcctgcccttcctcytcccacccctgccttacccctggccattcttttgtgaccagtagtcctttatgaatggaattctgagaatgtataattttctcagaagaatgcttcttta

SEQ ID NO: 14045 - DNA, 201 bp, Homo sapiens; identical to SEQ ID NO: 2841

SEQ ID NO: 14046 - DNA, 201 bp, Homo sapiens
agaagtgtgtgtctggttctaactctttatcacttcagggactgtccaggcagcaccatccgttgggtctcctgcccttcctcctcccacccctgccttayccctggccattcttttgtgaccagtagtcctttatgaatggaattctgagaatgtataattttctcagaagaatgcttctttagctcaccaaatatttct

SEQ ID NO: 14047 - DNA, 201 bp, Homo sapiens
cacttcagggactgtccaggcagcaccatccgttgggtctcctgcccttcctcctcccacccctgccttacccctggccattcttttgtgaccagtagtcstttatgaatggaattctgagaatgtataattttctcagaagaatgcttctttagctcaccaaatatttcttgtttgctgaggggggaaaaagatcctcct

SEQ ID NO: 14048 - DNA, 201 bp, Homo sapiens
ctcagaagaatgcttctttagctcaccaaatatttcttgtttgctgaggggggaaaaagatcctccttggaaaagtcactgggtgccaaaggtgggtgatkaggagagatgaacttctgggtgtgcctagcaaagctgtttctgttgataggcgattaacaaaacagccaaacttgacctaacagactgccattttgagag

SEQ ID NO: 14049 - DNA, 201 bp, Homo sapiens
cacctgtctgccctgtacttccatttcctttctttgaactcggggggcttgcatcggactacctgtgccgtttcctcaaactctaaaattgagtaagttaytgagggtttccgtggtctgctctgagaagatttcttgcttcctgatctgcctgtgtgttcgtgttgcttggtctctctctctgtctctctctctctcctc

SEQ ID NO: 14050 - DNA, 201 bp, Homo sapiens
tatagctcagttgtatgtagtattttctgtgtggtgttatgccctctgtatctgttttctcagatgttttagttgcttttctctcttaatcttgattagayctgccagagctgtgcttattttgtgtccccatccaaatccagaattaattgccgtgctccacatgttttggtcaatggtggacctcatctgtaacagtag

SEQ ID NO: 14051 - DNA, 201 bp, Homo sapiens
gtttgaggcagactccaaccacatttccatccagtggcttagtggtcttacccgtgagcttgaactgttgtccctgccaggacagtctttgcctctgtaartatctccatattcctccatcctttcaggtcccattcagtccctaggtcctccatgatggaatattggttgatgcacttattccacaaacatttgttggcc

SEQ ID NO: 14052 - DNA, 201 bp, Homo sapiens
aaaaagatcctccttggaaaagtcactgggtgccaaaggtgggtgatgaggagagatgaacttctgggtgtgcctagcaaagctgtttctgttgataggcrattaacaaaacagccaaacttgacctaacagactgccattttgagaggaatttgttttgcaggattaattggcttcgaggtgtactggtggctgtgcagt

SEQ ID NO: 14053 - DNA, 201 bp, Homo sapiens
gcctttgtttttattgttggtcactgtaagaattccaaggaatagaaggatctcatgggcaaaatcagtttgcttttttctctgtatatttgttagtttayagcagcttctattttcctcctatttttaaaagctgaaatgcctttaatcgcactcagtgtgtttattcatggaagccagagaagagggtcccttcctttc

SEQ ID NO: 14054 - DNA, 201 bp, Homo sapiens
aaaaggggcttctacactgttggcctctcgaggagaacggtttttgtttctgtcttcctggaaaagaggtgactgctggcatcatctttctagataaactscttgctatgatgccattagaagcagtgttcttttgtgttttgcttttgtttttccctgtagacaggaataacattttgactagaaacttccctgatgtaa

SEQ ID NO: 14055 - DNA, 201 bp, Homo sapiens
catcctttcaggtcccattcagtccctaggtcctccatgatggaatattggttgatgcacttattccacaaacatttgttggccacctttcaagtgccagwcaacccttctaggtatggaggggtacagtgatgagcaagccactgtttctggctgcagagggctcactgtttagtgggagaaacagacaaatcatacatc

SEQ ID NO: 14056 - DNA, 201 bp, Homo sapiens
aaggaccgtgttttcctcaggggaatccatgggctgagaagactggggagcctcagaggccctttcccaaagccctctgctctccccttccaggttctgasctaaggaccagccagaagcctgccgagcgtcagccgaacctgcaagtggcttctgggctgttccgttccctgcgtgagctttccctctctgctgctgctg

SEQ ID NO: 14057 - DNA, 201 bp, Homo sapiens
atttggaagtaacccctggccagcaattcactgtagtgtttgggaaacataggaatatctgcttattgtgacagattctcaagaaacctgtttcctttccrcaaagatggaaaccaggcactgtaccaatgagtcagttcactacgttttgtcctctgtccttacacgcagcggagacagacgagaacttggtcctctgcc

SEQ ID NO: 14058 - DNA, 201 bp, Homo sapiens
tcggtaggacccccgtgtgccactacacaaagaaggaccgtgttttcctcaggggaatccatgggctgagaagactggggagcctcagaggccctttcccraagccctctgctctccccttccaggttctgacctaaggaccagccagaagcctgccgagcgtcagccgaacctgcaagtggcttctgggctgttccgttc

SEQ ID NO: 14059 - DNA, 201 bp, Homo sapiens
gagaaccacctgggtagaggtttccaaaattgtctgattgtaaaaatcacctgaggagcttggtaaagcttgactgtcccaggcctcatttgaggctactragtcaatgtccaggctggggcttggacaagaatgtcattctttttgggtcaaagccaggttaggtgataccgccttgccagataaatggccgggactagg

SEQ ID NO: 14060 - DNA, 201 bp, Homo sapiens
gagctgcggtgagagagaccatgaaaagaagggccagagcggtgtcctgcagagggtggtgtaccttgggagggaagtgtgtagggttgttgaggaacagygtgctgcacagggaggaaagacgtggggcagcattgtgggaagagcaaccaagattctcataggcttgggagcggaagccctgaggtctgttgctggact

SEQ ID NO: 14061 - DNA, 201 bp, Homo sapiens
gtgctttagggtggggggacttgagacccttgacttgactcggtcccactggaaagcttctgttgcttatttgggtaaccccaactctatcttattgggcrgtagtgttatcctaattcttggaaatactcagtgtagaataaagagctgatgaaaatgtgtaagaagggagtaagtggtcattagagagaaatggtaatt

SEQ ID NO: 14062 - DNA, 201 bp, Homo sapiens
ttttaaaagggttccattttcccctcatatgactttggttcattctcctccttgtttctgtctctcagtgaactttccaaaagatgggttatgatgaaagrtgaatcgtcgttgataactgctcttacttatctgtgtatcgaaactgcaggtagtgctcttcagctctgtggctggatttagtgcctcttctagggaggg

SEQ ID NO: 14063 - DNA, 201 bp, Homo sapiens
ctgtaatcccagcactttgggaggccacggtgagtggatcacctgaggtcaggaatttgagaccatcctggccaacatggtgaaactcctgtctctacttaaaaaaaaaaaaaatgcaaaaactagctgggcatggtggtgcacatctgtaatcccagccacttgggaggctgagggcaggagaatggcttgaacctggga

SEQ ID NO: 14064 - DNA, 201 bp, Homo sapiens
tgtgtgttggagtgttttcgaaatgcagagaaattcagagcttctctagctttggctagagaaggaacaatggaagtgagtcttattctacctaagtttgrtgtggggcagcctgttctgtagttgccttccaagcccttcttctttctgatgctttcttggtaccattgcccacatgctgcctccaccctggatgaggtc

SEQ ID NO: 14065 - DNA, 201 bp, Homo sapiens
ttgggaggccacggtgagtggatcacctgaggtcaggaatttgagaccatcctggccaacatggtgaaactcctgtctctacttaaaaaaaaaaaaaatgsaaaaactagctgggcatggtggtgcacatctgtaatcccagccacttgggaggctgagggcaggagaatggcttgaacctgggatgcggaggtcatagtg

SEQ ID NO: 14066 - DNA, 201 bp, Homo sapiens
tcttggtaccattgcccacatgctgcctccaccctggatgaggtctagacctgttacattgattctcaactaattaaaagtcaatatggtaaaatatttgyagcattccttctccttccctgtgttcatttctgaagctcaacagtcttccatactcaagctgtggggaggtccctttctcctttgacaccagccattttg

SEQ ID NO: 14067 - DNA, 201 bp, Homo sapiens
taaaaaaaaaaaaaatgcaaaaactagctgggcatggtggtgcacatctgtaatcccagccacttgggaggctgagggcaggagaatggcttgaacctggsatgcggaggtcatagtgagccaagactgtgtcattgcactccagcctgagcaacagagagagactgcctcaaaaaaaaaaaaatccgtttacatagtgat

SEQ ID NO: 14068 - DNA, 201 bp, Homo sapiens
tctggatgctgaaagtccaaggtcaggtgtcaacaaggtctggttctagtgagggctctcttcctggtttgcaaacagctaccttctcactgtatcctcayatagtggtgggagagagcaagctgtggtgtctcttcactgattaaggacattaatccaattgtatcagggtctcacccttatgacctcatttgatcttaa

SEQ ID NO: 14069 - DNA, 201 bp, Homo sapiens
tctcatttttatgctgttcagagtgtggttgaagttcagccatcactagtccttcacggatagttcataccccaagttgatggccttgtggaattgctgaygctattttcatatatatatatatataattctagcctttttctctggtcttataagagtcacatacgtaggtaatttcatatcctacaaatatgttctaaa

SEQ ID NO: 14070 - DNA, 201 bp, Homo sapiens
gtttcaccatgttggccaggctggtcttgaactcctgacctcaggtgatccacccacctcagcctcccaaagtgctgggattacaggtgtgagccgctgcrcctggcccttggttcactttaatacacaaaacagcatgaaggagaaaagcttgatgaaataggtgactggagatctggcagagtatttcttgccagcatc

SEQ ID NO: 14071 - DNA, 201 bp, Homo sapiens
tccccccaccctggcttcccaaagtgctgggattacaggtgtgaaccaccacgcccggccaggatctgatcattttctaggaggcctcagggagcttttaytcatggcagaaggtgaagggggagcagttgtatcatggcaagaagagaaagagagacgccagatctcctggtagataactaacagagtgagaactcactc

SEQ ID NO: 14072 - DNA, 201 bp, Homo sapiens
tgttattcaaattcctgacctcaagccatctgcctgccttggcctcccaaagtgctgggattacaggcgtgagtcactgtgctcagccagttgcactacattttttttttagatgccattgttgaggatccaggggtttgtcatagattgattaatcagaaagtattaatctaaagtattagaatatattgattgcaggca

SEQ ID NO: 14073 - DNA, 201 bp, Homo sapiens
gagtctcgctctgtcgcccaggctggagtgcagtggtgcagtctcggctcactgcaacctccacctcccaagttcacgccattctcctgcctcagcctccygagtagctgggactacaggcgcctgccaccacgcctggctaattttttgtatttttagtggagacagcgttgcaccgtgttagccaggatggtctcaatc

SEQ ID NO: 14074 - DNA, 201 bp, Homo sapiens
agcttcatccgctgaccaatgtggacctggagcgtgtgtgagctgacatccctgcggacagaaggatgccagtgctggtgaatttgtcttctcactgcacttttttttttttttttttgagatggagtctcgctctgtcgcccaggctggagtgcattggcgtgatcttggctcactgcaacctctgcctcccgggttcaa

SEQ ID NO: 14075 - DNA, 201 bp, Homo sapiens
aggttacaccatgtgagagtcaatcacgtggggatgtgagctccaggacacaggggagaggaccactggggatccgggagcctggctaccccccagtaccccaccaacacacacacacacacacacacacacacacacacacactgcccctcacaggtgaccatctgctccacactttgagcagcgcagccactgttttct

SEQ ID NO: 14076 - DNA, 201 bp, Homo sapiens
ttcgtttttaagagacagggtctagctctgtcacccaagctggagtgcagtggcgtgattatagctcattgcagccttgaactcctgggctcaactgattstgttgtgtcaccctccccaagtagctagaactacaggctcatgccaccacacttggctaatttttgttttttaattttttgtagaaatggaatctcacta

SEQ ID NO: 14077 - DNA, 201 bp, Homo sapiens
ggttacaccatgtgagagtcaatcacgtggggatgtgagctccaggacacaggggagaggaccactggggatccgggagcctggctaccccccagtaccccaccaacacacacacacacacacacacacacacacacacacactgcccctcacaggtgaccatctgctccacactttgagcagcgcagccactgttttctt

SEQ ID NO: 14078 - DNA, 201 bp, Homo sapiens
cagtacgagtaccctggcctggctttgggttctacacggtctgactttagcctgccttggtctttgttcccctctcactccctccacccctgccccccccmacacatgtggagtaccttaccctgccttcctagttctggaatggctgcccctgtgccaggccaccccattttctagaaccaccttcatacagcccctgcg

SEQ ID NO: 14079 - DNA, 201 bp, Homo sapiens
gttacaccatgtgagagtcaatcacgtggggatgtgagctccaggacacaggggagaggaccactggggatccgggagcctggctaccccccagtaccccaccaacacacacacacacacacacacacacacacacacacactgcccctcacaggtgaccatctgctccacactttgagcagcgcagccactgttttcttg

SEQ ID NO: 14080 - DNA, 201 bp, Homo sapiens
agtacttgtaatgacctaagaactataagacaagcaagtcgtcttctgtaactgagtatcagcggattcaagcgttaaggaaaatgattaagagaaaacamccaaaaaagtcttaatggttctgtcaatcaagtggctatcaattcatggctattcaaaagcttttgtggctatgaaaataaactagattgaaaaaattct

SEQ ID NO: 14081 - DNA, 201 bp, Homo sapiens
caccatgtgagagtcaatcacgtggggatgtgagctccaggacacaggggagaggaccactggggatccgggagcctggctaccccccagtaccccaccaacacacacacacacacacacacacacacacacacacactgcccctcacaggtgaccatctgctccacactttgagcagcgcagccactgttttcttgccag

SEQ ID NO: 14082 - DNA, 201 bp, Homo sapiens
acatttcatttagttttgcaacagccgatgaggtagattctaccaacattgttttacggaagaacaaatggaagcctggaaaaataaattgtctacctcayacacttcgcaggtggtaaacacaggatttgaactaagacatacttgattttaaagtgtttgcttttcctttgcactactgcatctgcgatgtttgcactc

SEQ ID NO: 14083 - DNA, 201 bp, Homo sapiens
ccatgtgagagtcaatcacgtggggatgtgagctccaggacacaggggagaggaccactggggatccgggagcctggctaccccccagtaccccaccaacacacacacacacacacacacacacacacacacacactgcccctcacaggtgaccatctgctccacactttgagcagcgcagccactgttttcttgccagcc

SEQ ID NO: 14084 - DNA, 201 bp, Homo sapiens
agtaactctggttcaagtgcaaggaatgcaaagttaagtgtatcattggaggtgggatttttgagtttgtcagtcatttattgatttgcatgtatccttayagttcaaaggtctttttctcaacttagttgatgatcatgctgtaagttgttttcttttgctttatcaacttttaaaaacgtttattaacttttaaatttg

SEQ ID NO: 14085 - DNA, 201 bp, Homo sapiens
tgtgagagtcaatcacgtggggatgtgagctccaggacacaggggagaggaccactggggatccgggagcctggctaccccccagtaccccaccaacacacacacacacacacacacacacacacacacacactgcccctcacaggtgaccatctgctccacactttgagcagcgcagccactgttttcttgccagccatt

SEQ ID NO: 14086 - DNA, 201 bp, Homo sapiens
acacgtctttgttcagtgtttccactcaccgtggttgagaagcctcaccctctctttcccttgcctttgcttaggttgtgacacacatatatatatatttktttaattcttgggtacaacagcagtgttaaccgcagacactaggcatttggattactatttttcttaatggctatttaatccttccatcccacgaaaaac

SEQ ID NO: 14087 - DNA, 201 bp, Homo sapiens
tcttgtccctgttccaggagaagggctgggtatgtgtcccccaaaggggagagcattcgagaaggatggcgccagcctccccagaactgacctgtggttaaaaaaaaaaaaaaaaattgtgctttttaaaagatgagttttatcagctcacacatccttctagagtctaatggagattttttgtgtgtgtggaaatagtaa

SEQ ID NO: 14088 - DNA, 201 bp, Homo sapiens
ttgggatggtctatgaaggagttgccaagggtgtggtgaaagatgaacctgaaaccagagtggccattaaaacagtgaacgaggccgcaagcatgcgtgaraggattgagtttctcaacgaagcttctgtgatgaaggagttcaattgtcaccatgtggtaagagaaagttcctgaaaagccaaaatgcagcacagggaga

SEQ ID NO: 14089 - DNA, 201 bp, Homo sapiens
ctttctcccaggtgcgccccttccgccacgttcgggctttccagtacgcagcgaaaaaaatgccgcatgcacgcatttatttattttgcaacagctgcaakaaacaatgaagcttttcaagaaccggggaaacgcgctttccagccgcgctgttgttgttttcaatgaacctctcccagccccgcactccccgcccacccc

SEQ ID NO: 14090 - DNA, 201 bp, Homo sapiens
aggcactctgtcaataaatgtatgttacagttcaaggttaagctgcctggattcttgcccttgcatctgggaagttgctgggtgatttcccacccagctcygtgcgcaagatgtgcactcattcataaaccccctccccacacacagtccccttccccggcattgttggcggtccttgtctttgccactgggaatctggtt

SEQ ID NO: 14091 - DNA, 201 bp, Homo sapiens
aagtccctgggcaagtagccagcgtaactgattgacctaaaacaaaggatggagcccttggggctctgcatagtgaaatgtatgatttcttagtggaaaaygagaaagccactgaggaagcccagaagggaacttagcatatacagccagctttggggaagggggaagcagtgccaagcaagacaggtgcttttcagagac

SEQ ID NO: 14092 - DNA, 201 bp, Homo sapiens
atcctccttggaaaagtcactgggtgccaaaggtgggtgatgaggagagatgaacttctgggtgtgcctagcaaagctgtttctgttgataggcgattaayaaaacagccaaacttgacctaacagactgccattttgagaggaatttgttttgcaggattaattggcttcgaggtgtactggtggctgtgcagtgatgac

SEQ ID NO: 14093 - DNA, 201 bp, Homo sapiens
ttagagagaaatggtaattgggatgatgctctgaccccttcagcaaaaaataaaaggtgaatggtttattatgagctagttcagattctgtttttggaaaygagcttggttatacatagtgcatttgaaaagcgtgaagcatggactttcagatgccagctcctcagcctcctgtaactccagtcgcaaaatccctccagt

SEQ ID NO: 14094 - DNA, 201 bp, Homo sapiens
gtgtgcttggtacgaagtagtaacatcaattcagtgttcagtacatccactttgttccagaacaatgtattcaaggtcggtgtattttggctgtgccacakagttctggaaattcccaagagaataagttttcacctgttatataatccagcacaagtgactgtgtagcagcaacctcatgtttcatgatgactttaaaat

SEQ ID NO: 14095 - DNA, 201 bp, Homo sapiens
tgtgaagcgaggacttggggtcccaagtctaggttttaggttccctgctgtaacccgtggccaccgagagagagttttatgataaaatgtcagcaaagtayctgacaacgtctcacgctagaatgagtttcgtacatgtttagttccctctctttttattccacgctcccccaccccaactttaaatcagaaacgtgaggg

SEQ ID NO: 14096 - DNA, 201 bp, Homo sapiens
cccgtggccaccgagagagagttttatgataaaatgtcagcaaagtacctgacaacgtctcacgctagaatgagtttcgtacatgtttagttccctctctytttattccacgctcccccaccccaactttaaatcagaaacgtgagggtgctgattgaagctttttataacttttcttattgagaattgttctctggagtt

SEQ ID NO: 14097 - DNA, 201 bp, Homo sapiens
agagagagttttatgataaaatgtcagcaaagtacctgacaacgtctcacgctagaatgagtttcgtacatgtttagttccctctctttttattccacgcycccccaccccaactttaaatcagaaacgtgagggtgctgattgaagctttttataacttttcttattgagaattgttctctggagttgtctccaagaaca

SEQ ID NO: 14098 - DNA, 201 bp, Homo sapiens
ctccttctctccttgtctcttctgtcctccagtcaaagaaaaactctgcatatgatctttggcctggagaaatattaaatctatgttaagtatgcagacaygaatgggcaaatgaaggatttgtggcaaagaagatctgccgaaacaaataagtcatgtaaatgggcagagggaaatattaaattgattgcatctttcagc

SEQ ID NO: 14099 - DNA, 201 bp, Homo sapiens
tgcctggaagatgcggagcggagtttgcgtggcccggagcagctccagtgtctgaggcttctctgtgtcacaggctccaagcaggaagcgcaggcaaaatrgcaaaatacagcatgtggcattcagttcaaaaatgcccttttttagaagtcggtattctaaatgacatccagtcttgcttagttttttaagagaaaggaa

SEQ ID NO: 14100 - DNA, 201 bp, Homo sapiens
ccttgtctcttctgtcctccagtcaaagaaaaactctgcatatgatctttggcctggagaaatattaaatctatgttaagtatgcagacatgaatgggcaratgaaggatttgtggcaaagaagatctgccgaaacaaataagtcatgtaaatgggcagagggaaatattaaattgattgcatctttcagctcctggtact

SEQ ID NO: 14101 - DNA, 201 bp, Homo sapiens
attaaatctatgttaagtatgcagacatgaatgggcaaatgaaggatttgtggcaaagaagatctgccgaaacaaataagtcatgtaaatgggcagagggmaatattaaattgattgcatctttcagctcctggtacttaatgcaaagataaagtagtgggaaaaggttgtcatttgaaataatggaaagatgagggagtt

SEQ ID NO: 14102 - DNA, 201 bp, Homo sapiens
gatactggatactagctcattaaactcttgtgagaagccttcattagcattatgggaagacttgctgtatctatattatgaaggcatttagattttttttwaaatgcatgttcttaacattttttgtttattaagtggggcagtagattaggactgaatggatttgattctctcatcctacatagtgtgcccagaagccag

SEQ ID NO: 14103 - DNA, 201 bp, Homo sapiens
cagtagtggtggttggtgctgcgtgttgactggagttgcttgcattgggagagcctgacttggccaagtgtgtagcttgagaccagttggattcctctcasagagacagtcttcacccccaagctctgggtgttgggcgtgcagcattcgtattcagcaaacatttgctgatttccgcctctgcaactactgagctcagct

SEQ ID NO: 14104 - DNA, 201 bp, Homo sapiens
atggagtataattctgttttcaggttgctctgccacagaggttaagaactccctcttccaaggtagacattgagaacagagacgaccacactgggttttcmctgcagcttttaaacaggatgactcccagcccccatccccgtggctagcagcaagcagggactctgaaacactgcaagccaatggactgagcatcttact

SEQ ID NO: 14105 - DNA, 201 bp, Homo sapiens
aaggcaaaactatagagacagaaagcagaccagggatggctgcaaggaagaggtggagattgaccaccaatgggaatgagggaactcttggatgatggaartgttctggaactgagtagtggtgatggttggacagttgtgtaaatttacggaagctcatggaatgatgggtgaattttttttttttttttttttgagatg

SEQ ID NO: 14106 - DNA, 201 bp, Homo sapiens
gtttttagtttgttcaccacgcttgatggcagatttgcctctggatcctcaggccacgttcctatggtgggtagggatctctctctctctctctctctctstgtgtgtgtgtgtgtgtgtgtgtgtgtgtgtgtaaatagtgatttctctaagttaataaagaatgtggggtgacctcctacacatgcccgtatgctattg

SEQ ID NO: 14107 - DNA, 201 bp, Homo sapiens
tggaggttgcagtgagccaagatcgcgccactgcactccagcctgggcgagagtgagactccatgtcaaaaaaaaaaaaaaaaagtgtcacccatcttggrggatcgttaccaatacttcatgagtgaatacatacacatttcttagaacctagggtttataaacactaggagttagctgatactattgttgctaaggata

SEQ ID NO: 14108 - DNA, 201 bp, Homo sapiens
tatgattggatttgtactgccaagatggggttttagcacttctaatgcattctggcaaggctggtatacttgtatcaagtgcacagccccactaccaccasctctaccacccacaaaaataaaaactagcaaaataaaatatgagccaacagaattctgtgggaatggcaagtgttttgtttttgtttttagtagtaatct

SEQ ID NO: 14109 - DNA, 201 bp, Homo sapiens
gaaaagggtgctgtatttcttcctgatggatacatgcttaaatggaaaagtagcatgagatgaactcccatagccccttccttttattatttttaaaatawtcattcatttatttatttatttttgagatggagtctcactctgtcacccaggctggagcgcagtggcgcgatctcagctcactgcaacctccgcctcccg

SEQ ID NO: 14110 - DNA, 201 bp, Homo sapiens
ggacttctgttcggcctggggcaggacgctgcatgtcagttcacctagagcccctcgcttgccctcacccctctccctttccttctcctccccgtgttgtstcatggtcagttcctctcctggcaaggcaagagaatcataaaatctctttggaccatgtgtctctctgatgcactttggaggttgaagctcactttcgtg

SEQ ID NO: 14111 - DNA, 201 bp, Homo sapiens
cggaagctcgggcgtccggccgcctcccgcgcggccagggccgggcttgtttttcctcgcctaggcagatttgggctttgccccctttctttgcagttttycccccttcctgcctctccgggtttgaaaatggaggccgacgacgccgacagtccgccccggcgcgcctcgggttcccgactccgccgagccctgggccgc

SEQ ID NO: 14112 - DNA, 201 bp, Homo sapiens
cagtgtttctttagatcttggaccttgaggtgacctctgtaatggatatatttgaaattattaactgtcttcaagtgggggtttgatgagagagagagagwgagagtgtgtgtgtgtgtgtgtgtgtgtgtgtgtgtgtttacagaaaatatgctaggtttgtacattcaaatttgtgttatcctcttcaagaaagtcacc

SEQ ID NO: 14113 - DNA, 201 bp, Homo sapiens
agcaccctgggccgcaccgcgtctccgctgctggggctgaccgggcagtggggagcgggcagccgcccggcccgcggggtgcgagttgccctcgagggggsaggtgccctgcggagaggccccgaagccccaggacacgtctccaagcgcccgtcgctgcctcccgtcgcccaacgtgcttttgcccctcgggctcctcgg

SEQ ID NO: 14114 - DNA, 201 bp, Homo sapiens
gtgtttctttagatcttggaccttgaggtgacctctgtaatggatatatttgaaattattaactgtcttcaagtgggggtttgatgagagagagagagagwgagtgtgtgtgtgtgtgtgtgtgtgtgtgtgtgtgtttacagaaaatatgctaggtttgtacattcaaatttgtgttatcctcttcaagaaagtcacctt

SEQ ID NO: 14115 - DNA, 201 bp, Homo sapiens
gaccctcatagtaaccctgctgcattttacaaaggaagaactgtgttggggtacagatgtgccaaacactcaaagttagaaaatcaacgcagtcggttgtrgcttctgcccttgaaacatcagatagtgagaacctgccactgttcagtttgcagagtggttggttgcatacagtgttttagctcttgcccactcaataca

SEQ ID NO: 14116 - DNA, 201 bp, Homo sapiens
ccgtcgcccaacgtgcttttgcccctcgggctcctcgggttcctggccttgcccgtcactttggcccgctcctcgttgggttacctgcccccggcgtcccrgggctgggcggtggggtgaggggaagcgctctctgggcagccccccgggaagtgcgaggccgggagtcttcctcagcttgtctcttccggggagcgccac

SEQ ID NO: 14117 - DNA, 201 bp, Homo sapiens
atcttggaccttgaggtgacctctgtaatggatatatttgaaattattaactgtcttcaagtgggggtttgatgagagagagagagagagagtgtgtgtgwgtgtgtgtgtgtgtgtgtgtgtgtttacagaaaatatgctaggtttgtacattcaaatttgtgttatcctcttcaagaaagtcaccttggtagacagcat

SEQ ID NO: 14118 - DNA, 201 bp, Homo sapiens
ttgtgttaaaatgcggcagaactttccctctatacttaaattgtggtgaaatacgtatgacataaaacttaccatcttaacttttttttattgagacaggwtctcattctgtcacccaggctggagtgcggtggcgcgatctctgctcactgcaacctctgcctcctgggttcaggcgattctcatgcctcagccacccga

SEQ ID NO: 14119 - DNA, 201 bp, Homo sapiens; identical to SEQ ID NO: 11101

SEQ ID NO: 14120 - DNA, 201 bp, Homo sapiens; identical to SEQ ID NO: 11025

SEQ ID NO: 14121 - DNA, 201 bp, Homo sapiens; identical to SEQ ID NO: 11026

SEQ ID NO: 14122 - DNA, 201 bp, Homo sapiens; identical to SEQ ID NO: 11027

SEQ ID NO: 14123 - DNA, 201 bp, Homo sapiens; identical to SEQ ID NO: 11103

SEQ ID NO: 14124 - DNA, 201 bp, Homo sapiens; identical to SEQ ID NO: 11028

SEQ ID NO: 14125 - DNA, 201 bp, Homo sapiens; identical to SEQ ID NO: 11029

SEQ ID NO: 14126 - DNA, 201 bp, Homo sapiens; identical to SEQ ID NO: 11104

SEQ ID NO: 14127 - DNA, 201 bp, Homo sapiens; identical to SEQ ID NO: 11030

SEQ ID NO: 14128 - DNA, 201 bp, Homo sapiens; identical to SEQ ID NO: 11105

SEQ ID NO: 14129 - DNA, 201 bp, Homo sapiens; identical to SEQ ID NO: 11108

SEQ ID NO: 14130 - DNA, 201 bp, Homo sapiens; identical to SEQ ID NO: 11032

SEQ ID NO: 14131 - DNA, 201 bp, Homo sapiens; identical to SEQ ID NO: 11109

SEQ ID NO: 14132 - DNA, 201 bp, Homo sapiens; identical to SEQ ID NO: 11110

SEQ ID NO: 14133 - DNA, 201 bp, Homo sapiens; identical to SEQ ID NO: 11035

SEQ ID NO: 14134 - DNA, 201 bp, Homo sapiens; identical to SEQ ID NO: 11036

SEQ ID NO: 14135 - DNA, 201 bp, Homo sapiens; identical to SEQ ID NO: 11111

SEQ ID NO: 14136 - DNA, 201 bp, Homo sapiens; identical to SEQ ID NO: 11037

SEQ ID NO: 14137 - DNA, 201 bp, Homo sapiens; identical to SEQ ID NO: 11114

SEQ ID NO: 14138 - DNA, 201 bp, Homo sapiens; identical to SEQ ID NO: 11039

SEQ ID NO: 14139 - DNA, 201 bp, Homo sapiens; identical to SEQ ID NO: 11040

SEQ ID NO: 14140 - DNA, 201 bp, Homo sapiens; identical to SEQ ID NO: 11042

SEQ ID NO: 14141 - DNA, 201 bp, Homo sapiens; identical to SEQ ID NO: 11044

SEQ ID NO: 14142 - DNA, 201 bp, Homo sapiens; identical to SEQ ID NO: 11043

SEQ ID NO: 14143 - DNA, 201 bp, Homo sapiens; identical to SEQ ID NO: 11045

SEQ ID NO: 14144 - DNA, 201 bp, Homo sapiens; identical to SEQ ID NO: 11047

SEQ ID NO: 14145 - DNA, 201 bp, Homo sapiens; identical to SEQ ID NO: 11046

SEQ ID NO: 14146 - DNA, 201 bp, Homo sapiens; identical to SEQ ID NO: 11116

SEQ ID NO: 14147 - DNA, 201 bp, Homo sapiens; identical to SEQ ID NO: 11048

SEQ ID NO: 14148 - DNA, 201 bp, Homo sapiens; identical to SEQ ID NO: 11118

SEQ ID NO: 14149 - DNA, 201 bp, Homo sapiens; identical to SEQ ID NO: 11049

SEQ ID NO: 14150 - DNA, 201 bp, Homo sapiens; identical to SEQ ID NO: 11120

SEQ ID NO: 14151 - DNA, 201 bp, Homo sapiens; identical to SEQ ID NO: 11050

SEQ ID NO: 14152 - DNA, 201 bp, Homo sapiens; identical to SEQ ID NO: 11051

SEQ ID NO: 14153 - DNA, 201 bp, Homo sapiens; identical to SEQ ID NO: 11052

SEQ ID NO: 14154 - DNA, 201 bp, Homo sapiens; identical to SEQ ID NO: 11053

SEQ ID NO: 14155 - DNA, 201 bp, Homo sapiens; identical to SEQ ID NO: 11054

SEQ ID NO: 14156 - DNA, 201 bp, Homo sapiens; identical to SEQ ID NO: 11055

SEQ ID NO: 14157 - DNA, 201 bp, Homo sapiens; identical to SEQ ID NO: 11123

SEQ ID NO: 14158 - DNA, 201 bp, Homo sapiens; identical to SEQ ID NO: 11056

SEQ ID NO: 14159 - DNA, 201 bp, Homo sapiens; identical to SEQ ID NO: 11057

SEQ ID NO: 14160 - DNA, 201 bp, Homo sapiens; identical to SEQ ID NO: 11125

SEQ ID NO: 14161 - DNA, 201 bp, Homo sapiens; identical to SEQ ID NO: 11126

SEQ ID NO: 14162 - DNA, 201 bp, Homo sapiens
aatcaccacacggagggcagccaccggcccaccagaacacctctattggattcatatgtgagtgagaaataaacttgtatttggcttgtcactgaaatgtragagtttatttattacaggagctagtgtcgtcctatcactcaccctgacttttcttcataagtccagtcctaagctgctaggatgggcgtaggaggagac

SEQ ID NO: 14163 - DNA, 201 bp, Homo sapiens; identical to SEQ ID NO: 11058

SEQ ID NO: 14164 - DNA, 201 bp, Homo sapiens
gatggtgaggagtgagagaatggatctgaaacctgatgtccctgagattccacactgctgtgcaatcagaggccccgaacccaagcccctcagcctatgcygaggctttttcttgggaggggtttaaaaaatatgttagggaagaaaaaaaaatcaaagtgcccaattcctattattttgggatcatccagaaggctgttg

SEQ ID NO: 14165 - DNA, 201 bp, Homo sapiens; identical to SEQ ID NO: 11059

SEQ ID NO: 14166 - DNA, 201 bp, Homo sapiens
tgggcagctccctttgctgccaaatgtctattctcaggtgtcacaatcgttgaaattcttccattagggcttcattcctttggattactttttgtttctayacaaaaatgcaagcaatgataatccccaatatgtgttcagggctttagacttgttccaataatcctaaaagacacagacagacagtgaggcccagatacc

SEQ ID NO: 14167 - DNA, 201 bp, Homo sapiens
tacttgggagctgaggtaggaggattgcttgaggctgggaggtcaaggctgcagtgagccatgatcacaccactgtactccagcctgggcggcagattgargccctgtctcaaaataaataagtaaataacatagaaaccggaaaacgattgaatcatgtttaagttacgcattgctgcctaaaaaatcatgttaaaacac

SEQ ID NO: 14168 - DNA, 201 bp, Homo sapiens; identical to SEQ ID NO: 11128

SEQ ID NO: 14169 - DNA, 201 bp, Homo sapiens; identical to SEQ ID NO: 11060

SEQ ID NO: 14170 - DNA, 201 bp, Homo sapiens; identical to SEQ ID NO: 11061

SEQ ID NO: 14171 - DNA, 201 bp, Homo sapiens; identical to SEQ ID NO: 11062

SEQ ID NO: 14172 - DNA, 201 bp, Homo sapiens; identical to SEQ ID NO: 11063

SEQ ID NO: 14173 - DNA, 201 bp, Homo sapiens; identical to SEQ ID NO: 11066

SEQ ID NO: 14174 - DNA, 201 bp, Homo sapiens; identical to SEQ ID NO: 11064

SEQ ID NO: 14175 - DNA, 201 bp, Homo sapiens; identical to SEQ ID NO: 11065

SEQ ID NO: 14176 - DNA, 201 bp, Homo sapiens; identical to SEQ ID NO: 11067

SEQ ID NO: 14177 - DNA, 201 bp, Homo sapiens; identical to SEQ ID NO: 11068

SEQ ID NO: 14178 - DNA, 201 bp, Homo sapiens; identical to SEQ ID NO: 11070

SEQ ID NO: 14179 - DNA, 201 bp, Homo sapiens; identical to SEQ ID NO: 11130

SEQ ID NO: 14180 - DNA, 201 bp, Homo sapiens; identical to SEQ ID NO: 11071

SEQ ID NO: 14181 - DNA, 201 bp, Homo sapiens; identical to SEQ ID NO: 11073

SEQ ID NO: 14182 - DNA, 201 bp, Homo sapiens; identical to SEQ ID NO: 11074

SEQ ID NO: 14183 - DNA, 201 bp, Homo sapiens; identical to SEQ ID NO: 11131

SEQ ID NO: 14184 - DNA, 201 bp, Homo sapiens; identical to SEQ ID NO: 11134

SEQ ID NO: 14185 - DNA, 201 bp, Homo sapiens; identical to SEQ ID NO: 11075

SEQ ID NO: 14186 - DNA, 201 bp, Homo sapiens; identical to SEQ ID NO: 11133

SEQ ID NO: 14187 - DNA, 201 bp, Homo sapiens; identical to SEQ ID NO: 11135

SEQ ID NO: 14188 - DNA, 201 bp, Homo sapiens; identical to SEQ ID NO: 11136

SEQ ID NO: 14189 - DNA, 201 bp, Homo sapiens; identical to SEQ ID NO: 11137

SEQ ID NO: 14190 - DNA, 201 bp, Homo sapiens; identical to SEQ ID NO: 11138

SEQ ID NO: 14191 - DNA, 201 bp, Homo sapiens; identical to SEQ ID NO: 11139

SEQ ID NO: 14192 - DNA, 201 bp, Homo sapiens; identical to SEQ ID NO: 11143

SEQ ID NO: 14193 - DNA, 201 bp, Homo sapiens; identical to SEQ ID NO: 11079

SEQ ID NO: 14194 - DNA, 201 bp, Homo sapiens; identical to SEQ ID NO: 11145

SEQ ID NO: 14195 - DNA, 201 bp, Homo sapiens; identical to SEQ ID NO: 11080

SEQ ID NO: 14196 - DNA, 201 bp, Homo sapiens; identical to SEQ ID NO: 11144

SEQ ID NO: 14197 - DNA, 201 bp, Homo sapiens; identical to SEQ ID NO: 1729

SEQ ID NO: 14198 - DNA, 201 bp, Homo sapiens; identical to SEQ ID NO: 11083

SEQ ID NO: 14199 - DNA, 201 bp, Homo sapiens; identical to SEQ ID NO: 11151

SEQ ID NO: 14200 - DNA, 201 bp, Homo sapiens; identical to SEQ ID NO: 11153

SEQ ID NO: 14201 - DNA, 201 bp, Homo sapiens; identical to SEQ ID NO: 11154

SEQ ID NO: 14202 - DNA, 201 bp, Homo sapiens; identical to SEQ ID NO: 11155

SEQ ID NO: 14203 - DNA, 201 bp, Homo sapiens; identical to SEQ ID NO: 11157

SEQ ID NO: 14204 - DNA, 201 bp, Homo sapiens; identical to SEQ ID NO: 11158

SEQ ID NO: 14205 - DNA, 201 bp, Homo sapiens; identical to SEQ ID NO: 11090

SEQ ID NO: 14206 - DNA, 201 bp, Homo sapiens; identical to SEQ ID NO: 11092

SEQ ID NO: 14207 - DNA, 201 bp, Homo sapiens; identical to SEQ ID NO: 11094

SEQ ID NO: 14208 - DNA, 201 bp, Homo sapiens; identical to SEQ ID NO: 11095

SEQ ID NO: 14209 - DNA, 201 bp, Homo sapiens; identical to SEQ ID NO: 1725

SEQ ID NO: 14210 - DNA, 201 bp, Homo sapiens; identical to SEQ ID NO: 1726

SEQ ID NO: 14211 - DNA, 201 bp, Homo sapiens; identical to SEQ ID NO: 1727

SEQ ID NO: 14212 - DNA, 201 bp, Homo sapiens; identical to SEQ ID NO: 11096

SEQ ID NO: 14213 - DNA, 201 bp, Homo sapiens; identical to SEQ ID NO: 1728

SEQ ID NO: 14214 - DNA, 201 bp, Homo sapiens; identical to SEQ ID NO: 11097

SEQ ID NO: 14215 - DNA, 201 bp, Homo sapiens; identical to SEQ ID NO: 11171

SEQ ID NO: 14216 - DNA, 201 bp, Homo sapiens
gttttttaaccacagtaacaaaatgacataacaaaaagtttgcattgcagaaagcacaattttaaaaaggaaaattatttacagtgcataccacataagckaatatttgcaaatttttttgtaataatagagatgggtctccctatgttgcccaggccagtctcaaactcctgggctcaagtgatccacctgcctcagcct

SEQ ID NO: 14217 - DNA, 201 bp, Homo sapiens
gaactggagcaaaggtgacttttgtgttttagcaaagaaactggtggcattttgcccctgcgttagagatttgtggaactttgaacttgtgagagaggatytagggtatctggctgaagaaacttctttttttttttttttttcgatagagtcttgctctgtcgcccaggctggagtgcagtggcacgatctcagctcact

SEQ ID NO: 14218 - DNA, 201 bp, Homo sapiens
gtcttgaactcctgacctcaagtgatccacttgccttggcctcccaaagtgctgggattacaggcgtgagccactgcacccggcctggctgaataaatttsttttttcctttttcttttttttttttgtgagacggagtctcactctattgcccaggctggagtgcagtggcgcgatctcggctcactgcaacctctgcct

SEQ ID NO: 14219 - DNA, 201 bp, Homo sapiens
aggctgaggtgggaggatagcttgagcctgggagggaggtagacgttgcaatgagccgagattatgctattgcactctaacctgggcgacagagccagaayctgtctcaaaaaaaaaattaaaattaaaaaacccaataaatgttcagtgctgttctggcatttggaaattagttaataattagtccctcttgcttttttt

SEQ ID NO: 14220 - DNA, 201 bp, Homo sapiens
aatttctgaatactaacatcctagcattctaaaagtatttaaaactattgttttttaaaataggaaaacggacgatgtattactaagctggaaaacatggsgtttcgagtgggacaaggattgatagaaaggtgagcaggttggatttgaaaattttcttgcaggtaggttataaacaaaggtgatctatttcaaaagatt

SEQ ID NO: 14221 - DNA, 201 bp, Homo sapiens
caatttctgaatactaacatcctagcattctaaaagtatttaaaactattgttttttaaaataggaaaacggacgatgtattactaagctggaaaacatgsggtttcgagtgggacaaggattgatagaaaggtgagcaggttggatttgaaaattttcttgcaggtaggttataaacaaaggtgatctatttcaaaagat

SEQ ID NO: 14222 - DNA, 201 bp, Homo sapiens
accttataattcactttttcttaaactgtttcagggaaaaaagtataaatgtttacattaatatttttaaccaatcttgtaaaacaatttctgaatactawcatcctagcattctaaaagtatttaaaactattgttttttaaaataggaaaacggacgatgtattactaagctggaaaacatggggtttcgagtgggaca

SEQ ID NO: 14223 - DNA, 201 bp, Homo sapiens
aaaaattaaccaggcatggtggtgggtgcttataattccagctacttaggaacctgaggcaggagaatcacttgaaccctgtagatggaggttgcagtgarccgagatggccccactgtactgcagcctggatgacagagcgagactccatctcaaaataaatttaaaaaatgtatccttctattgaagtttttaggttaa

SEQ ID NO: 14224 - DNA, 201 bp, Homo sapiens
gagccgagattatgctattgcactctaacctgggcgacagagccagaacctgtctcaaaaaaaaaattaaaattaaaaaacccaataaatgttcagtgctrttctggcatttggaaattagttaataattagtccctcttgctttttttggaggagaaatactgtattacttctagttgatctttttaggtttacaaaaga

SEQ ID NO: 14225 - DNA, 201 bp, Homo sapiens
aaaatgttatgtgtattacaccttgcataagtcctcattctactacgtgttaactaaccctctagatgataatgcagatgctaactgtgggattttatttrtaagaactctagaataaataccagttattcctaccaacatcggctgttactaatattctgaagtagttagtgcaacttttcattgtgttgtggttggtct

SEQ ID NO: 14226 - DNA, 201 bp, Homo sapiens
tgtctctactaaaaatacaaaattagccgggcgtggtggcgcatgcctgtaatcccagctatcgggaggctgaagcaggagaatcacatgaacctgggagsgggaggttgcaatgagccaagattgtgccatcgcactccagcctgggcatcaagagcgaaacgccgtcccaaaaaaaaaaaaaattatgatgctaacatt

SEQ ID NO: 14227 - DNA, 201 bp, Homo sapiens
aatacgcagaagggatgggtgacattttttcattctcatgacgcatgtttctgtaagttaatgacttgttaggtagctattaaggaactagagttgataartaaatgtgtataggttccttttgcaatataactggttattacttgatccaagtgtttaacatttggagctaagtctgaccatacattactgtgatagaat

SEQ ID NO: 14228 - DNA, 201 bp, Homo sapiens
ttaataaaatgaatatcatttgaatatgcatacttcgaaggtcctgtgggaccactagatgtctatgcccaataaagtctgtactagaaacgcagatttartagtcacagcaccataagcagagtgcatggttccttagaagaaagtttagcaaataataagccctatggtttccttagtgggagacaaacagccttcaga

SEQ ID NO: 14229 - DNA, 201 bp, Homo sapiens
aactcctaagctcaagcaatccttggcctcccaatgtactgggatttacaggcatgagtcactacatcaggcctggactttattttgaagaaaggggagcrggtgctgaaattccagtagagaataacatgattttttttttagacagagtttcactgttattgcccaggctggaatgcaatggggtgaccttggctcact

SEQ ID NO: 14230 - DNA, 201 bp, Homo sapiens
gctgccctcgaactcctaagctcaagcaatccttggcctcccaatgtactgggatttacaggcatgagtcactacatcaggcctggactttattttgaagraaggggagcaggtgctgaaattccagtagagaataacatgattttttttttagacagagtttcactgttattgcccaggctggaatgcaatggggtgacc

SEQ ID NO: 14231 - DNA, 201 bp, Homo sapiens
cccactgcccaggtagagctgatctatcaagacaggagaattgcaataaggagtttatgtagagctgctaaatgggagagcagagttttattattgctcawatcagcctccccaaacatgcagagtctagggtttatcaaggatagtttggtaggctgggggctggggaatgggtgctcctggttggttggggatgcagtt

SEQ ID NO: 14232 - DNA, 201 bp, Homo sapiens
tttttgtattttctctactaaaaatacaaaaattaaccaggcatggtggtgggtgcttataattccagctacttaggaacctgaggcaggagaatcacttraaccctgtagatggaggttgcagtgagccgagatggccccactgtactgcagcctggatgacagagcgagactccatctcaaaataaatttaaaaaatgt

SEQ ID NO: 14233 - DNA, 201 bp, Homo sapiens
accagacctaagggagcggccctgttgttagtggtgtctgtgtgtgttgtcccgcttctggttctgccctacctgcactgccaatgtaggaactagttttrttctataaatatatatacaaattgaagctcagaaaacattttttcacaggccaggcacagtggctcacgcccgtaatcccagcacttagggaggctgagg

SEQ ID NO: 14234 - DNA, 201 bp, Homo sapiens
acatctggttactatcctgggaaaatcacttctatagagatggccttccaagtggttttaaaatgtatctttctgtctgggcgcggtggctcacgcctgtwatccctgcactttgggaggccaaggcaggtggattgcttgaggtcaggagtttgagaccagcatggccaacattttgtatttttgtattttctctactaa

SEQ ID NO: 14235 - DNA, 201 bp, Homo sapiens
ccctcccctcccctcccctcttcttttcttttctttctcttctcttctcttttctttctttcatggggtcccttgctcaacctgttgcccaggctggagtkcaatgacatgatcatggctcagtgcagcctcaacttcctggactcaagcaatccacctgcatcagcctccaaaatggcacatgctaccatgcccagctat

SEQ ID NO: 14236 - DNA, 201 bp, Homo sapiens
tcccaagtagctgggactataggtgcatgccaccatgttcacctaatttttgtaatttttttaaagatgaggtttcactatgttgcccaggctgccctcgwactcctaagctcaagcaatccttggcctcccaatgtactgggatttacaggcatgagtcactacatcaggcctggactttattttgaagaaaggggagca

SEQ ID NO: 14237 - DNA, 201 bp, Homo sapiens
gaaaagtgactgttcatagacctcagtgacgtaagcactgttgctcaggagtgacaagttgctaatacgcagaagggatgggtgacattttttcattctcrtgacgcatgtttctgtaagttaatgacttgttaggtagctattaaggaactagagttgataaataaatgtgtataggttccttttgcaatataactggtt

SEQ ID NO: 14238 - DNA, 201 bp, Homo sapiens
agctaattaaaaaaatttttttttgtagaaacagagtcttgctatgttgctcaggctggtctcagactcctagtctcaagtgaccctcctgcctcagcctmctacggtgctgggattataggcatgagcactgcgcctggcctcatcctaagcatgtttgagaagtgtggagaatagcagaaaaactgaagatagtgatac

SEQ ID NO: 14239 - DNA, 201 bp, Homo sapiens
gccagggatatagtagtgaatgaaacaatggccccatccttgtagagatttttttttaatctaatttaatccgaaatgtgatagtatgtagcggttacttmtaatatgtgggagtccttattcaatcattgtgggcctgtcactgctgacactgctagataaattaaataaaataatactcctgcctcacagtatttaggg

SEQ ID NO: 14240 - DNA, 201 bp, Homo sapiens
gatttctaggtgccagggatatagtagtgaatgaaacaatggccccatccttgtagagatttttttttaatctaatttaatccgaaatgtgatagtatgtrgcggttacttctaatatgtgggagtccttattcaatcattgtgggcctgtcactgctgacactgctagataaattaaataaaataatactcctgcctcac

SEQ ID NO: 14241 - DNA, 201 bp, Homo sapiens
aaatttggtgcctactcaaaagtgcatgaacaagtagcaaaattaagtagtagggcttaattcaaaagctcatgtgatcataggatttgaaagtgtctgcrtataagcatattgtaactgcccagtgggttcttcttccccactgcccaggtagagctgatctatcaagacaggagaattgcaataaggagtttatgtaga

SEQ ID NO: 14242 - DNA, 201 bp, Homo sapiens
ggctaatggataaaatgttctcaagttgaatttttcttaaaaatttggtgcctactcaaaagtgcatgaacaagtagcaaaattaagtagtagggcttaaktcaaaagctcatgtgatcataggatttgaaagtgtctgcatataagcatattgtaactgcccagtgggttcttcttccccactgcccaggtagagctgat

SEQ ID NO: 14243 - DNA, 201 bp, Homo sapiens
tagaaagtggaattctgtaggccttgtttaaggatgggagtgggagttgaaaattatcgtcaggttttcagcttgagcagctgggttggatggtggtactrttaatcagaaaaggaaataaaggagaagaaaaaaataaggaggtaagataatgagttatttcggggcaggttgaacttttgaggtgcctgtatgacatcc

SEQ ID NO: 14244 - DNA, 201 bp, Homo sapiens
ttgtagagatttttttttaatctaatttaatccgaaatgtgatagtatgtagcggttacttctaatatgtgggagtccttattcaatcattgtgggcctgycactgctgacactgctagataaattaaataaaataatactcctgcctcacagtatttagggaatagtgatttaatgaatagttaacactgagtattggct

SEQ ID NO: 14245 - DNA, 201 bp, Homo sapiens
aggataattagggaacataatttaaattaattatttcagaaagtatttatttagtgcccttatgtcagagcgatttctaggtgccagggatatagtagtgmatgaaacaatggccccatccttgtagagatttttttttaatctaatttaatccgaaatgtgatagtatgtagcggttacttctaatatgtgggagtcctt

SEQ ID NO: 14246 - DNA, 201 bp, Homo sapiens
gctcgcgagtctgcagttctggcaaggggagcgcggagttttctaggccttttaacctatgatgtaatgtgccttacaccgttttaacgtgatcacatcasagtgggacttagccaagcctccttttcttccttaccctcaccttggttaatgatttaattaggaaagggcgcggctattctgttggtgcgcatgctcaga

SEQ ID NO: 14247 - DNA, 201 bp, Homo sapiens
caacattaaacaaaacaaagacgacaaacactgggttattgattttatcacaggttttgttcaaaccaacatatttagtaaagtaccagtagtttcagcaygagtaaagtccaaaggaaatcttacctcagtaataaactaccacgtcctctacctccaccaggaccagaaagggccagcaatctggcttggatgggcctg

SEQ ID NO: 14248 - DNA, 201 bp, Homo sapiens
ctgaaatttaaaatgttcaacataaaacacttgaaatacaagataaatggtatttccatttgacaagagaatatggttaaactttcaaaaatctttccaastaaagtagccttaaacgggcattcattccaaaatgcttttatagtgttactttataagaattaagttcactcaaaattggtaaacttaatatattcttca

SEQ ID NO: 14249 - DNA, 201 bp, Homo sapiens
aggaaatcttacctcagtaataaactaccacgtcctctacctccaccaggaccagaaagggccagcaatctggcttggatgggcctgtaaaagatttacawatcagtgcaaaatcatatgtagacacacacagtcgcacccaaatactttcagagatgtggatcataaggagaaaaaatcacaaaagttccaaaaagatag

SEQ ID NO: 14250 - DNA, 201 bp, Homo sapiens; identical to SEQ ID NO: 1734

SEQ ID NO: 14251 - DNA, 201 bp, Homo sapiens
accagaaagggccagcaatctggcttggatgggcctgtaaaagatttacaaatcagtgcaaaatcatatgtagacacacacagtcgcacccaaatactttyagagatgtggatcataaggagaaaaaatcacaaaagttccaaaaagatagtttcaaataaatctaaatgtctgaaacaggacaggaagtactatttcatt

SEQ ID NO: 14252 - DNA, 201 bp, Homo sapiens
gccagcaatctggcttggatgggcctgtaaaagatttacaaatcagtgcaaaatcatatgtagacacacacagtcgcacccaaatactttcagagatgtgratcataaggagaaaaaatcacaaaagttccaaaaagatagtttcaaataaatctaaatgtctgaaacaggacaggaagtactatttcatttaacttcctc

SEQ ID NO: 14253 - DNA, 201 bp, Homo sapiens
ttcaaaaatctttccaactaaagtagccttaaacgggcattcattccaaaatgcttttatagtgttactttataagaattaagttcactcaaaattggtamacttaatatattcttcaacctccagtttttcaggataactatatttatacagaaatctagtctattacaacattaaacaaaacaaagacgacaaacactg

SEQ ID NO: 14254 - DNA, 201 bp, Homo sapiens; identical to SEQ ID NO: 1738

SEQ ID NO: 14255 - DNA, 201 bp, Homo sapiens
ttaaacaaaacaaagacgacaaacactgggttattgattttatcacaggttttgttcaaaccaacatatttagtaaagtaccagtagtttcagcatgagtwaagtccaaaggaaatcttacctcagtaataaactaccacgtcctctacctccaccaggaccagaaagggccagcaatctggcttggatgggcctgtaaaa

SEQ ID NO: 14256 - DNA, 201 bp, Homo sapiens
gttcaagcgattctcctgcctcagcctcctgagtacctgggactacaggcgcgcgccaacacgcctggctaatttttgtattattagagaccggattccascatgttgggcaggctggtctcgaactcctgacctcaggtgattcgcctgcctcgacctcccagggtgctgggattacaggcgtgagccaccacgcccagc

SEQ ID NO: 14257 - DNA, 201 bp, Homo sapiens
ttcaagcgattctcctgcctcagcctcctgagtacctgggactacaggcgcgcgccaacacgcctggctaatttttgtattattagagaccggattccacsatgttgggcaggctggtctcgaactcctgacctcaggtgattcgcctgcctcgacctcccagggtgctgggattacaggcgtgagccaccacgcccagcc

SEQ ID NO: 14258 - DNA, 201 bp, Homo sapiens
tcccagctacccaggaggctgaggcaggagaattacttgaaccgtggaggtggaggttgcagtgagccgagatcatgccactgcactccagcctgggtgasagagtaagactccatgtccaaaaaacaaaaagaaaaccaaagacaatataaaacacattttaaaactacagtatgacaatgatttacgtagcatttacag

SEQ ID NO: 14259 - DNA, 201 bp, Homo sapiens
agacacaaactacctttactgcctccagaactaattctgatcagtttctggcttgtttttgtcactgagtctagattcacagtcctggactggagtacttmattggctgagcttaagtcttaagtcctacgtccatgctttagtttccagggagctgggaaatctatcaatatttttcagtaatttgaacagttcttcaaa

SEQ ID NO: 14260 - DNA, 201 bp, Homo sapiens
agtgctgggattacaggcgtgagccactgtgcctggcctatttgggattttaaaataatcattcccccaatacagatttttttatctggagtgggaaaacrtgataaaacaaccagtgatttttagacttttttggagtcctgggattccacagggtgcctgatatggtttggctgtgtccccacccaaatctcaacttga

SEQ ID NO: 14261 - DNA, 201 bp, Homo sapiens
agtccagtggattgtgcctgtaatcccagatacttgggagactgaggtgggagaatcgctacagcccaggagttaagaccagcctgggcaacatagcaacratcctgtctctaaaaataaaaattttaaaaattgtactggagaggctgaggcgggatgattgtttgagtccaggagtttgagactgcagtgagctgtcat

SEQ ID NO: 14262 - DNA, 201 bp, Homo sapiens
tctgtggggtttgtaggcttccaaaggagcaatgatcattcattagttcaacaaatactgagggcccactatgtgccaggtgctattctaggcacttgggyatatcagtgtacaataaagatctctgagcaagtccagtggattgtgcctgtaatcccagatacttgggagactgaggtgggagaatcgctacagcccagg

SEQ ID NO: 14263 - DNA, 201 bp, Homo sapiens
tgtgcgacagagtgagactccgtcccaaacaaacaaaaaaacaaaacactttcccacagaaacaatgctttaaataatctcagccaggcatctatcttccktgtacaaagaattagtgggcccagtgtattaattaactcaagctaccactttaatccagcaatcttttagagcttccattgtgtatcagcagtaagctag

SEQ ID NO: 14264 - DNA, 201 bp, Homo sapiens
acctcacgtcattcggatcccgcccggtgagcttgcgaatgttctcatccacgttcttaagactctctttggccttttccagctgttcctgcaaagttctyacggcgaccgccatcttctccctgcggcaggcttgagactgctttacaggccgagccgggctatgccgcgccgccgaggcgcgaaaggactgacagccgg

SEQ ID NO: 14265 - DNA, 201 bp, Homo sapiens
caaaattggtaaacttaatatattcttcaacctccagtttttcaggataactatatttatacagaaatctagtctattacaacattaaacaaaacaaagaygacaaacactgggttattgattttatcacaggttttgttcaaaccaacatatttagtaaagtaccagtagtttcagcatgagtaaagtccaaaggaaatc

SEQ ID NO: 14266 - DNA, 201 bp, Homo sapiens
agctgttcctgcaaagttctcacggcgaccgccatcttctccctgcggcaggcttgagactgctttacaggccgagccgggctatgccgcgccgccgaggygcgaaaggactgacagccgggctcagccaatgacgatgagcgttgtcttccggcctcaaccactcagcgaccggaagggggaagaacctgcagcctttgt

SEQ ID NO: 14267 - DNA, 201 bp, Homo sapiens
gcgaaacgccgtcccaaaaaaaaaaaaaattatgatgctaacattcaaggaaattctgtgcagctgttaaaaaggatgaaatagatttacatgaatttacmtggaaagatgttaactggtatattaagagaaaaagttttgctacaggatactgcaaatgtaatatttaagtatatataatgaatatatacatagtgtcaa

SEQ ID NO: 14268 - DNA, 201 bp, Homo sapiens
gcgggaatcagcagtccgggtcttctcacaggccaagaaagcatgccggcgcacccaggcctcgctctccttcctcagggacctgagaccagcgctctacsgaggggacctggggcctctccacctcggcgacaacagggttttacccgccgccccgcgaacaggcctcgaggttccagtcttcttaaggctggccgccct

SEQ ID NO: 14269 - DNA, 201 bp, Homo sapiens
ggcggggttgcagtgagctgagatagtgccattgcactccagcctgggcaacaagagcaaaactctgtctcaaaacacacacacacacacacacacacacacacactcactgtccttgcttccataggatctattcctaggagccttggcaatttaactttatggagaaggataagtaggatgctgtgttcaatagttagt

SEQ ID NO: 14270 - DNA, 201 bp, Homo sapiens
gcggggttgcagtgagctgagatagtgccattgcactccagcctgggcaacaagagcaaaactctgtctcaaaacacacacacacacacacacacacacacacactcactgtccttgcttccataggatctattcctaggagccttggcaatttaactttatggagaaggataagtaggatgctgtgttcaatagttagta

SEQ ID NO: 14271 - DNA, 201 bp, Homo sapiens
atttgaagaacatatggcaggaagtggatgcttttgatgaagccaaaagaatttttttaacttctattgctaattaacaaggaggtggccgcgggagctctttttttttttttttttttgagacggagtttcactcttgttgcccaggctggagtgcagtggcgcgatctcagctcaccgcaacctccgcctcccgagttc

SEQ ID NO: 14272 - DNA, 201 bp, Homo sapiens
attgctaattaacaaggaggtggccgcgggagctctttttttttttttttttttgagacggagtttcactcttgttgcccaggctggagtgcagtggcgcsatctcagctcaccgcaacctccgcctcccgagttcaagcgattctcctgcctcagactcccgagtagctgggattacaggcatgcaccaccaggccccgc

SEQ ID NO: 14273 - DNA, 201 bp, Homo sapiens
tttacttttttgtcataacccccgatccccccaaaccacttgcgtattcagttctcttcattctcccctcccttcttacctttcctcttctctctctctctttttttttttttttagatggagttttgttcttgtctcccaggctggagtgcagtggtgtgatctcagctcactgcagcctccgcctcttgggttcaagcg

SEQ ID NO: 14274 - DNA, 201 bp, Homo sapiens
ttacttttttgtcataacccccgatccccccaaaccacttgcgtattcagttctcttcattctcccctcccttcttacctttcctcttctctctctctctttttttttttttttagatggagttttgttcttgtctcccaggctggagtgcagtggtgtgatctcagctcactgcagcctccgcctcttgggttcaagcga

SEQ ID NO: 14275 - DNA, 201 bp, Homo sapiens
cctggtgggttggtttgaagatgctaatttgtgtgccatctacggtaagagagttggctctcatgcccaaagacatccagttggctcgccagacacggagwgagcgagcttaagtgaaggcagattttaaggcattttatatgaattctgtaaaatactttggtttaatttgtgactttttggggagaaattatttataat

SEQ ID NO: 14276 - DNA, 201 bp, Homo sapiens; identical to SEQ ID NO: 1733

SEQ ID NO: 14277 - DNA, 201 bp, Homo sapiens
acccccgatccccccaaaccacttgcgtattcagttctcttcattctcccctcccttcttacctttcctcttctctctctctctttttttttttttttagwtggagttttgttcttgtctcccaggctggagtgcagtggtgtgatctcagctcactgcagcctccgcctcttgggttcaagcgattctcctgcttcagcc

SEQ ID NO: 14278 - DNA, 201 bp, Homo sapiens
ttttattattgctcaaatcagcctccccaaacatgcagagtctagggtttatcaaggatagtttggtaggctgggggctggggaatgggtgctcctggttggttggggatgcagttacagaggtgggggccagaggaccagttggagtcatccgaaatgcaaaagtctgaaaagacatctcaaaaggccttttttaggttc

SEQ ID NO: 14279 - DNA, 201 bp, Homo sapiens
ctgtcatgcaggctgaaatgcagtgttgggactttggctcactgcagccttgacctcctgggcttaagtgatcctcccacatcagcctctcgaatagctaggctatgggcatgctaccatgtccagctaattaaaaaaatttttttttgtagaaacagagtcttgctatgttgctcaggctggtctcagactcctagtctc

SEQ ID NO: 14280 - DNA, 201 bp, Homo sapiens
ttttaatttaactgagaggaaatttaaaatgctgaaactttcattttagttttatcaatgtaacactttagtgtagtaatatgtagcatactacattcatwttcagtaatttttgaataatggactaaaatccaaatttataagacaatttaagggatgatttttaacttttctaaagttattcaaactgtaactttttta

SEQ ID NO: 14281 - DNA, 201 bp, Homo sapiens
gtcctttggtcacgccagttgagaatcagtctctgattagacgctgagcatctatactagagaaaagaaagcaatggcgagacagacacgcagtcatggtygagttagcctcttcacctggcctagagctggttaagaccagacctaagggagcggccctgttgttagtggtgtctgtgtgtgttgtcccgcttctggttc

SEQ ID NO: 14282 - DNA, 201 bp, Homo sapiens
tgtcctttggtcacgccagttgagaatcagtctctgattagacgctgagcatctatactagagaaaagaaagcaatggcgagacagacacgcagtcatggytgagttagcctcttcacctggcctagagctggttaagaccagacctaagggagcggccctgttgttagtggtgtctgtgtgtgttgtcccgcttctggtt

SEQ ID NO: 14283 - DNA, 201 bp, Homo sapiens
acctgaggtcaggagttcgagaccagcctggccaacgtggtgaaaccctgtctctactaaaaatacaaaaattagccaggcatagtggcgcacgcttatartcccagccactcaggaggctgaggaaggagaattgcttgaacccgggaggcagaggttgcagtgagcctagatcacaccactgcactccagcctgggcga

SEQ ID NO: 14284 - DNA, 201 bp, Homo sapiens
taaagctgggcgcggtggctcacccctgtaatcccagcactttgggaggccgaggtgggcagatcacctgaggtcaggagttcgagaccagcctggccaaygtggtgaaaccctgtctctactaaaaatacaaaaattagccaggcatagtggcgcacgcttatagtcccagccactcaggaggctgaggaaggagaattg

SEQ ID NO: 14285 - DNA, 201 bp, Homo sapiens
acaaagtgagtgaggtccatattgggtggatgtcctgtccaatgccagaattcttaggccttttctcaaacaggggattcaccactttctttctttctttytttttttttttttttgagatggagtcttgctgtgttgcccaggctagagtgcaatggtgcgatctcggctcaccacaacctccgcctcctgggttcaagc

SEQ ID NO: 14286 - DNA, 201 bp, Homo sapiens
tttctctttcgtatcttcttctatttgattctcttttgtctattcccgtacgtttgtcttgcacgccacagattttggtacttttagtgttgtccctgccrttatttacgagagggttaactgcagagcctacttagttttgctggcacttccagcacttgagccatgcactggacagacctgtgccaacctgagaagcct

SEQ ID NO: 14287 - DNA, 201 bp, Homo sapiens
gtgcgacagagtgagactccgtcccaaacaaacaaaaaaacaaaacactttcccacagaaacaatgctttaaataatctcagccaggcatctatcttcctygtacaaagaattagtgggcccagtgtattaattaactcaagctaccactttaatccagcaatcttttagagcttccattgtgtatcagcagtaagctagg

SEQ ID NO: 14288 - DNA, 201 bp, Homo sapiens; identical to SEQ ID NO: 1737

SEQ ID NO: 14289 - DNA, 201 bp, Homo sapiens
aatgtactgggatttacaggcatgagtcactacatcaggcctggactttattttgaagaaaggggagcaggtgctgaaattccagtagagaataacatgattttttttttagacagagtttcactgttattgcccaggctggaatgcaatggggtgaccttggctcactgcaacctccgcctcctgggttcaagcaattct

SEQ ID NO: 14290 - DNA, 201 bp, Homo sapiens
atgagtcactacatcaggcctggactttattttgaagaaaggggagcaggtgctgaaattccagtagagaataacatgattttttttttagacagagtttyactgttattgcccaggctggaatgcaatggggtgaccttggctcactgcaacctccgcctcctgggttcaagcaattctcctgcctcagcctcccgagta

SEQ ID NO: 14291 - DNA, 201 bp, Homo sapiens
tgcccaggctggaatgcaatggggtgaccttggctcactgcaacctccgcctcctgggttcaagcaattctcctgcctcagcctcccgagtagctgggatwacaggcatgcgccaccatgcccagctaatgttttatgtttttagtagagatggggtttttccgtgtcggtaaagctggtctcgaactcctgacctcaggt

SEQ ID NO: 14292 - DNA, 201 bp, Homo sapiens
aagctgattagcggccccatacccagagtttctgattaagtaaattgggagtgggactagagaatttgcaagttcccatgtgatgctgatgttgctggtcttttttttttttttttttctggtgacgaagtctcgccctgtcacccagactggagtgcagtggcatgatctcggctcgctgcaatctctgcctcctgggtt

SEQ ID NO: 14293 - DNA, 201 bp, Homo sapiens
atagcggggccatttcacaaagtgagtgaggtccatattgggtggatgtcctgtccaatgccagaattcttaggccttttctcaaacaggggattcaccactttctttctttctttttttttttttttttttgagatggagtcttgctgtgttgcccaggctagagtgcaatggtgcgatctcggctcaccacaacctccg

SEQ ID NO: 14294 - DNA, 201 bp, Homo sapiens
tagcggggccatttcacaaagtgagtgaggtccatattgggtggatgtcctgtccaatgccagaattcttaggccttttctcaaacaggggattcaccactttctttctttctttttttttttttttttttgagatggagtcttgctgtgttgcccaggctagagtgcaatggtgcgatctcggctcaccacaacctccgc

SEQ ID NO: 14295 - DNA, 201 bp, Homo sapiens
gcggggccatttcacaaagtgagtgaggtccatattgggtggatgtcctgtccaatgccagaattcttaggccttttctcaaacaggggattcaccactttctttctttctttttttttttttttttttgagatggagtcttgctgtgttgcccaggctagagtgcaatggtgcgatctcggctcaccacaacctccgcct

SEQ ID NO: 14296 - DNA, 201 bp, Homo sapiens
agcctagatcacaccactgcactccagcctgggcgacagagcaagactctgtctcaaataaacaaataaatccgggtgcggtggctcacgcctataatccsagcacttcaggaggccaaggcgggtggatcacctgaggttgggagttcaagaccagccctgccaacatggagaaaccccgtctctactaaaaatacaaaa

SEQ ID NO: 14297 - DNA, 201 bp, Homo sapiens
aaaaagaaaacttggccaatgggaaggagacttttaataactttaaaaaacacttaaattgtttcataagaataaaataattttaaggactgctaggtacrttgactttggattttttttctatttttggaacagggcatctatgtacttcaggacaacaaatttcgcctgcttactcagatgtctgcaggaaaacagtat

SEQ ID NO: 14298 - DNA, 201 bp, Homo sapiens
tcacagaaattatattcacctcgatgcccccacacattaacaagcctggatcaggtccccatcccgccatccccgaggaggctgcacgtggacaggaagcyggggtaaggcggcttgttgcgtcccggcagggtctcggggccagcaacgggccgggtgtccgccggagcgggaaggggctttgtgctgcagttccgggcc

SEQ ID NO: 14299 - DNA, 201 bp, Homo sapiens
gtcacagaaattatattcacctcgatgcccccacacattaacaagcctggatcaggtccccatcccgccatccccgaggaggctgcacgtggacaggaagytggggtaaggcggcttgttgcgtcccggcagggtctcggggccagcaacgggccgggtgtccgccggagcgggaaggggctttgtgctgcagttccgggc

SEQ ID NO: 14300 - DNA, 201 bp, Homo sapiens
gagtttctgattaagtaaattgggagtgggactagagaatttgcaagttcccatgtgatgctgatgttgctggtcttttttttttttttttttctggtgaygaagtctcgccctgtcacccagactggagtgcagtggcatgatctcggctcgctgcaatctctgcctcctgggttcaagcgtttctcctgcctcagcctc

SEQ ID NO: 14301 - DNA, 201 bp, Homo sapiens
ccgggtgtccgccggagcgggaaggggctttgtgctgcagttccgggcctgcagggccgagagcgggaatcagcagtccgggtcttctcacaggccaagamagcatgccggcgcacccaggcctcgctctccttcctcagggacctgagaccagcgctctacggaggggacctggggcctctccacctcggcgacaacagg

SEQ ID NO: 14302 - DNA, 201 bp, Homo sapiens
gctgcacgtggacaggaagctggggtaaggcggcttgttgcgtcccggcagggtctcggggccagcaacgggccgggtgtccgccggagcgggaaggggcwttgtgctgcagttccgggcctgcagggccgagagcgggaatcagcagtccgggtcttctcacaggccaagaaagcatgccggcgcacccaggcctcgctc

SEQ ID NO: 14303 - DNA, 201 bp, Homo sapiens
tcagcctgaccaacatggagaaaccccgtctctactaaaaatacaaaatgagctgggcttggtggtgcatgcctgtaatcccacctactcgggaagctgargcaggagaatcacttgaacccgggaggcggggttgcagtgagctgagatagtgccattgcactccagcctgggcaacaagagcaaaactctgtctcaaaa

SEQ ID NO: 14304 - DNA, 201 bp, Homo sapiens
tactttaaaagcctcatgttattgtggttggagaagtcaactttgataaattggccatttacttactttttgacttgtgtggtggacttggactccttttkcttgatggtagtgatgagggcaagaatgtcatctagacataaaggacctgatttcgcataactgaaaatttagtgctggaaaaattaagattaccatggc

SEQ ID NO: 14305 - DNA, 201 bp, Homo sapiens
ctttattattgacctcaaggtttactgtttgtgcaaagctagccttccttttccctctagaacagttaacacaccccttttacttttttgtcataaccccygatccccccaaaccacttgcgtattcagttctcttcattctcccctcccttcttacctttcctcttctctctctctctttttttttttttttagatggag

SEQ ID NO: 14306 - DNA, 201 bp, Homo sapiens
tcctgcctcagcctcctacggtgctgggattataggcatgagcactgcgcctggcctcatcctaagcatgtttgagaagtgtggagaatagcagaaaaacygaagatagtgatacgtacagtaatagatgtatgtacagaattttacgacagcatagggcctaaggaagtttcagggaagccatctgggagaatgtaatac

SEQ ID NO: 14307 - DNA, 201 bp, Homo sapiens
tgtgccaccatgcccggctaattttttgtatttttagtagagatgaggtttcactgtgttagccaggatgatctcgatctcctgacttcgtgatccgcccrcctcagccttccaaatgctgggattacagatgtgagccaccacacccagccaacacatttttaaaatcactaggatagagagttgccaaaggggtatgat

SEQ ID NO: 14308 - DNA, 201 bp, Homo sapiens
caaattttattttaatgtttaaagaaaatatatattttatatattttagactttcttcctgaagctattttagactttattcctgaagctattgaagcaaytatctaaaatcttactgcattttcaacttaagatctgctaggttctttaacctgcatagaatttttaagtacataggtttgaaataactatagtctatgt

SEQ ID NO: 14309 - DNA, 201 bp, Homo sapiens
ttttatataacaatgtcatgataatgctcagctctttgttcttttgtggttttttgatgtgctagaatgcattgcacctgaaattttggctataatgttasactaatttgaggcctcataatttatataacataatgtgaatccattgagataggatcatgttacctggtgcttatgactttattagtgttaataaatgtt

SEQ ID NO: 14310 - DNA, 201 bp, Homo sapiens
catttacgtgtggcttaatcagaggtggcttatcaaacttgggaataaaaagtattgtaacagctgaagtgtcttcaatgcctgcttgtaagttgaattcrcctttcttacaaatgttttagtaatttgttttcaggtctgtttttttttttaatttaactgagaggaaatttaaaatgctgaaactttcattttagtttt

SEQ ID NO: 14311 - DNA, 201 bp, Homo sapiens
aggggtcacaaattccccgattaagaactcttgggatgaacaatctctaaggcctcttccagcttaaaatttcatgactcagatctagttacttattagtrcccatttatgtatattatttataagataatattttatattattcgtagataatgtagtatgttgaacatcatgcagtatagatgtgggtaatcaaaaatt

SEQ ID NO: 14312 - DNA, 201 bp, Homo sapiens
ttgctttgggtatatgtatattgttacttgtagccaaaaagaaacctctcttagtagaaacaaagggagagttaggttattcaaaaattagtatgggacarttgaatatgcctttttctgcgggagtaggtggggagaaacttaaaggttcacttgtaaaacaataaagtactaaagaaaatgtgataatactttcgtgat

SEQ ID NO: 14313 - DNA, 201 bp, Homo sapiens; identical to SEQ ID NO: 1740

SEQ ID NO: 14314 - DNA, 201 bp, Homo sapiens; identical to SEQ ID NO: 1730

SEQ ID NO: 14315 - DNA, 201 bp, Homo sapiens
ggatttttctcctcttctaagagaaaacaatagtgaaattattttctttctcttttctctctgtttctgtctctttctctctctctttctcccttcccttyccttccctcccctcccctcccctcttcttttcttttctttctcttctcttctcttttctttctttcatggggtcccttgctcaacctgttgcccaggctg

SEQ ID NO: 14316 - DNA, 201 bp, Homo sapiens; identical to SEQ ID NO: 1732

SEQ ID NO: 14317 - DNA, 201 bp, Homo sapiens
cttagggatggaagaaaatatttgtaagccatatacactcggccctttctatcttgacggttcaaccaagaattcaaccatccttggtttgaaatatttgaaaaaaaaaaaacaaagacaaggcctggctcacacctgtaatcccaacactttggaaggccagagtgggcggatgacccgagatcaggagttcaagacgag

SEQ ID NO: 14318 - DNA, 201 bp, Homo sapiens
ttagggatggaagaaaatatttgtaagccatatacactcggccctttctatcttgacggttcaaccaagaattcaaccatccttggtttgaaatatttgaaaaaaaaaaaacaaagacaaggcctggctcacacctgtaatcccaacactttggaaggccagagtgggcggatgacccgagatcaggagttcaagacgagc

SEQ ID NO: 14319 - DNA, 201 bp, Homo sapiens
tagggatggaagaaaatatttgtaagccatatacactcggccctttctatcttgacggttcaaccaagaattcaaccatccttggtttgaaatatttgaaaaaaaaaaaacaaagacaaggcctggctcacacctgtaatcccaacactttggaaggccagagtgggcggatgacccgagatcaggagttcaagacgagcc

SEQ ID NO: 14320 - DNA, 201 bp, Homo sapiens
ttccaaaatgcttttatagtgttactttataagaattaagttcactcaaaattggtaaacttaatatattcttcaacctccagtttttcaggataactatwtttatacagaaatctagtctattacaacattaaacaaaacaaagacgacaaacactgggttattgattttatcacaggttttgttcaaaccaacatattt

SEQ ID NO: 14321 - DNA, 201 bp, Homo sapiens
agggatggaagaaaatatttgtaagccatatacactcggccctttctatcttgacggttcaaccaagaattcaaccatccttggtttgaaatatttgaaaaaaaaaaaacaaagacaaggcctggctcacacctgtaatcccaacactttggaaggccagagtgggcggatgacccgagatcaggagttcaagacgagcct

SEQ ID NO: 14322 - DNA, 201 bp, Homo sapiens
attccaaaatgcttttatagtgttactttataagaattaagttcactcaaaattggtaaacttaatatattcttcaacctccagtttttcaggataactayatttatacagaaatctagtctattacaacattaaacaaaacaaagacgacaaacactgggttattgattttatcacaggttttgttcaaaccaacatatt

SEQ ID NO: 14323 - DNA, 201 bp, Homo sapiens
tgggaggctgaggcaggagaatcagctggacctgggaggtgggggttgaagtgagccgagatctcaccactgcactccagcctgggtgacaagagtgagactctgtctcaatcagtcaatcaatcaatcaatcaatcaagtatacaagatggcagagcaggccaagcaggctgggtgcagtgattcacacttgttagccaa

SEQ ID NO: 14324 - DNA, 201 bp, Homo sapiens
gggaggctgaggcaggagaatcagctggacctgggaggtgggggttgaagtgagccgagatctcaccactgcactccagcctgggtgacaagagtgagactctgtctcaatcagtcaatcaatcaatcaatcaatcaagtatacaagatggcagagcaggccaagcaggctgggtgcagtgattcacacttgttagccaag

SEQ ID NO: 14325 - DNA, 201 bp, Homo sapiens
ggcattttgcccctgcgttagagatttgtggaactttgaacttgtgagagaggatttagggtatctggctgaagaaacttctttttttttttttttttcgatagagtcttgctctgtcgcccaggctggagtgcagtggcacgatctcagctcactgcagcctccgcctcccaggttcaagcaattctcctgactcagcct

SEQ ID NO: 14326 - DNA, 201 bp, Homo sapiens
actgagtctagattcacagtcctggactggagtacttaattggctgagcttaagtcttaagtcctacgtccatgctttagtttccagggagctgggaaatmtatcaatatttttcagtaatttgaacagttcttcaaaatcctttttttaaacaggaatgacttactgatgataaatcatgtaatgttgtatttatcaata

SEQ ID NO: 14327 - DNA, 201 bp, Homo sapiens
gcattttgcccctgcgttagagatttgtggaactttgaacttgtgagagaggatttagggtatctggctgaagaaacttctttttttttttttttttcgatagagtcttgctctgtcgcccaggctggagtgcagtggcacgatctcagctcactgcagcctccgcctcccaggttcaagcaattctcctgactcagcctc

SEQ ID NO: 14328 - DNA, 201 bp, Homo sapiens
ggaggttgcatgcagtgagccaagatcatgccactgcactctggcctgggcaacagtgagactctgtctcaaacaaaacaaaacacacacagctgggcacmgtggctcaagtctgtaatcccagcactttgggaggccgaggcaggcggatcacctgaggtcacgagttcgagatcagcctgaccaacatggagaaacccc

SEQ ID NO: 14329 - DNA, 201 bp, Homo sapiens
ttctgattgtgagcatacttagcctcattgatcttattacaggtctgtgtacaaccttaggcagtacctgaggcatgagagtgtgataatagtagagcgtrttcagcaagtgtaagaatgtttgcatgtatggtcggcccggtaatcccaggattttgggaggccttggtgggcggatcacttgagattgggagttcaaga

SEQ ID NO: 14330 - DNA, 201 bp, Homo sapiens
tcaacttaaaatggattgaagatttaaaagtaaaatctgaaactatacaattctagcagaaaacataggggaaaagcttcgtaacattggtcttggcaatkatctcttgggtaagacaccaaaagcaggcaacaaatgcagagatagacaagtgggactacatcaaactaataagatgcacagaaaggacagtgaaaaggc

SEQ ID NO: 14331 - DNA, 201 bp, Homo sapiens
ccatcatgccctgctaattttgtatttttagtagagacggggtttcttcatgttggtcaggctggtctcaaactcccaacctcaggtgatctgtccgcctyggcctcccaaagtgcagggattacaggcgtgaactaccatgcctggccaattctctggaatttttgacattaagtttctatattatttgggatttttatt

SEQ ID NO: 14332 - DNA, 201 bp, Homo sapiens
cttggcctcccaaagtgctgggattacaggcgtgagccactgcacccggcctggctgaataaatttcttttttcctttttcttttttttttttgtgagacrgagtctcactctattgcccaggctggagtgcagtggcgcgatctcggctcactgcaacctctgcctcctgggttcatgccattctcctgcctcagcctcc

SEQ ID NO: 14333 - DNA, 201 bp, Homo sapiens
ccgaggtgggcagatcacctgaggtcaggagttcgagaccagcctggccaacgtggtgaaaccctgtctctactaaaaatacaaaaattagccaggcataktggcgcacgcttatagtcccagccactcaggaggctgaggaaggagaattgcttgaacccgggaggcagaggttgcagtgagcctagatcacaccactgc

SEQ ID NO: 14334 - DNA, 201 bp, Homo sapiens
gctgagatcgtgctatcattgcactccagcctggggtataagagcaaaactccatctcaaaaaaaaaaaaaaagaaaaaaaagaaacactataactaaatracagtgaaatgtagatgtatggtagatcactttttttttttttttaagacaaggtcttgctctgtcatctaggctggagtgtagtggtacaatcatggcc

SEQ ID NO: 14335 - DNA, 201 bp, Homo sapiens
ggcttgagactgctttacaggccgagccgggctatgccgcgccgccgaggcgcgaaaggactgacagccgggctcagccaatgacgatgagcgttgtcttycggcctcaaccactcagcgaccggaagggggaagaacctgcagcctttgtgactctgagccaatgaaaagtcagccaggcagtcatctccctccccagtt

SEQ ID NO: 14336 - DNA, 201 bp, Homo sapiens
atgagcgttgtcttccggcctcaaccactcagcgaccggaagggggaagaacctgcagcctttgtgactctgagccaatgaaaagtcagccaggcagtcayctccctccccagttagctgcgggtgcctggatcccgctgctagcgcagagtcggggcgggtttcacaatccctgagttctcggagacttaggctcgcgag

SEQ ID NO: 14337 - DNA, 201 bp, Homo sapiens
attttgcccctgcgttagagatttgtggaactttgaacttgtgagagaggatttagggtatctggctgaagaaacttctttttttttttttttttcgatasagtcttgctctgtcgcccaggctggagtgcagtggcacgatctcagctcactgcagcctccgcctcccaggttcaagcaattctcctgactcagcctcct

SEQ ID NO: 14338 - DNA, 201 bp, Homo sapiens
cactgcacccggcctggctgaataaatttcttttttcctttttcttttttttttttgtgagacggagtctcactctattgcccaggctggagtgcagtggygcgatctcggctcactgcaacctctgcctcctgggttcatgccattctcctgcctcagcctcccgagtagctgggactacaggcacccaccaccatgtcc

SEQ ID NO: 14339 - DNA, 201 bp, Homo sapiens
agacggggtttcactgtgtttgccaggaaggtctcgatctcctgacctcatgatctgcctgcctcagcctcccaaaatgctgggattacaggcgtgagccwccacgcccagccagctgaagaaatttctaagcagcaaagcattcaagaggtgacttgggtactgctaaagtcgttcagttttaaagggggaacagagcat

SEQ ID NO: 14340 - DNA, 201 bp, Homo sapiens; identical to SEQ ID NO: 1743

SEQ ID NO: 14341 - DNA, 201 bp, Homo sapiens
agtttggactttattttttgtttgtttgttggtttgttttgagacaggatctcactctgttgcccggtctagagtgcagtggctagatattggctcactgmaacctctgcctcctgcactcaagccatcctcctacctcagcctcccaagtagctgggactataggtgcatgccaccatgttcacctaatttttgtaattt

SEQ ID NO: 14342 - DNA, 201 bp, Homo sapiens
catcaggtaattaaattaattaaggcctatattttaaagtcctttaacttgatataaatatcgtattttagtgacttatttaaaacctaaaataatttctrgttaactttggaatatgtttatgttattaatgagttattagtttttttcttctaatagtgtgaactgagtaaagacaaagggacagttatcagtaatgat

SEQ ID NO: 14343 - DNA, 201 bp, Homo sapiens
atcaggtccccatcccgccatccccgaggaggctgcacgtggacaggaagctggggtaaggcggcttgttgcgtcccggcagggtctcggggccagcaacrggccgggtgtccgccggagcgggaaggggctttgtgctgcagttccgggcctgcagggccgagagcgggaatcagcagtccgggtcttctcacaggccaa

SEQ ID NO: 14344 - DNA, 201 bp, Homo sapiens
ctaattctgatcagtttctggcttgtttttgtcactgagtctagattcacagtcctggactggagtacttaattggctgagcttaagtcttaagtcctacrtccatgctttagtttccagggagctgggaaatctatcaatatttttcagtaatttgaacagttcttcaaaatcctttttttaaacaggaatgacttactg

SEQ ID NO: 14345 - DNA, 201 bp, Homo sapiens
atcctttttttaaacaggaatgacttactgatgataaatcatgtaatgttgtatttatcaatagctttactattttagtaaatccttactatttttaatgrttttttttccttttagtatttagcatttacgtgtggcttaatcagaggtggcttatcaaacttgggaataaaaagtattgtaacagctgaagtgtcttca

SEQ ID NO: 14346 - DNA, 201 bp, Homo sapiens; identical to SEQ ID NO: 1731

SEQ ID NO: 14347 - DNA, 201 bp, Homo sapiens
agttagctgcgggtgcctggatcccgctgctagcgcagagtcggggcgggtttcacaatccctgagttctcggagacttaggctcgcgagtctgcagttcyggcaaggggagcgcggagttttctaggccttttaacctatgatgtaatgtgccttacaccgttttaacgtgatcacatcagagtgggacttagccaagcc

SEQ ID NO: 14348 - DNA, 201 bp, Homo sapiens
aggcgggagctttaggtcttattttatcttgctctgcccccgacatcgtggtgagaggggaaccttcctcatatctgggcgctggcctctccgggcttggragagaggaactcagtgatcatagagctggccgaatgccggggtagaggggaccggaagttgtttttttcgcccccgcccagcggccggatcgcatctcag

SEQ ID NO: 14349 - DNA, 201 bp, Homo sapiens
gaatcacttgaaccctgtagatggaggttgcagtgagccgagatggccccactgtactgcagcctggatgacagagcgagactccatctcaaaataaattwaaaaaatgtatccttctattgaagtttttaggttaatcatgtatatgttgactaaattatgaattaacttgtttatcaaaaaaaaagtaaaaagtaaagt

SEQ ID NO: 14350 - DNA, 201 bp, Homo sapiens
ttgtctttggtctgtacttgtgggccagcttaagcagctaagtagctatttggcggtgcagggcctgggtgaactggttaattgtaggaggcactttcagytgcttacagaggatggctttgtgccactgcaacctgatatagcggggccatttcacaaagtgagtgaggtccatattgggtggatgtcctgtccaatgcc

SEQ ID NO: 14351 - DNA, 201 bp, Homo sapiens
gttattaatgagttattagtttttttcttctaatagtgtgaactgagtaaagacaaagggacagttatcagtaatgatagctgttcctttcacccaattawatgctatgttaagttttttaaagtagcataagtcaggatgagaatagcttttactatttggttccttagttactgttaattagtggtaataatatgcaga

SEQ ID NO: 14352 - DNA, 201 bp, Homo sapiens
agtgacttatttaaaacctaaaataatttctggttaactttggaatatgtttatgttattaatgagttattagtttttttcttctaatagtgtgaactgaktaaagacaaagggacagttatcagtaatgatagctgttcctttcacccaattatatgctatgttaagttttttaaagtagcataagtcaggatgagaata

SEQ ID NO: 14353 - DNA, 201 bp, Homo sapiens
acggtattcaagaaacaaatcgacaatctaaggacaaatcatcaggtaattaaattaattaaggcctatattttaaagtcctttaacttgatataaatatygtattttagtgacttatttaaaacctaaaataatttctggttaactttggaatatgtttatgttattaatgagttattagtttttttcttctaatagtgt

SEQ ID NO: 14354 - DNA, 201 bp, Homo sapiens; identical to SEQ ID NO: 1742

SEQ ID NO: 14355 - DNA, 201 bp, Homo sapiens
aaaggaaaactataaaacaaagaaatgtagtaaaatctcttcaacaaatagtgttgggaaaactggacatccacatacaaaagaatgaaattggattgttrccttaatgccatacatagaaatcaacttaaggccgggtgtggtggctcaagcctgtaatcccagcactttgggaggccgaggtggggcagatcatgaggt

SEQ ID NO: 14356 - DNA, 201 bp, Homo sapiens
gccagagtgggcggatgacccgagatcaggagttcaagacgagcctggccaacatggcaaaaccctgtctctactaaaaatacaaaaattagttgggtgtkgtggcacatgcctgtagtcccagctacccaggaggctgaggcaggagaattacttgaaccgtggaggtggaggttgcagtgagccgagatcatgccactg

SEQ ID NO: 14357 - DNA, 201 bp, Homo sapiens
aggcgggtggatcacctgaggtcaggagttcaagaccagcctgactaacatggagaaaccctgtctctactaaaaatacaaaattagccgggcgtggtggygcatgcctgtaatcccagctatcgggaggctgaagcaggagaatcacatgaacctgggagggggaggttgcaatgagccaagattgtgccatcgcactcc

SEQ ID NO: 14358 - DNA, 201 bp, Homo sapiens
ggtatgttcaacctgtgaatgtacacaatgacgaggtcagggtgtagagtttatatgagggcttcagaaatttggcttagggccagatttcatgttttttwaccacagtaacaaaatgacataacaaaaagtttgcattgcagaaagcacaattttaaaaaggaaaattatttacagtgcataccacataagcgaatattt

SEQ ID NO: 14359 - DNA, 201 bp, Homo sapiens
atgccacggtggaaggattgcttgaggtcaggaatttgagaccagcctaggcaacagagtgagacccccatctctacaaaaataatactactactaataamtttaaaaataaaaaatttacaatggcaaatttgaagttatgtgtattttaccatagtttttaaaaattaaaagtacaagaaaaaattgccaaaaaaatac

SEQ ID NO: 14360 - DNA, 201 bp, Homo sapiens
attttggtggtgattactgcccttgctgggggtcacacagatgcatctgggaggatctggaaggggcctgcacctcttgagcttggagctccctcatatgrgttcaccagtgaggacacagtcattgttggttagagactgggactcaagttgtaggctcctttcagtctttgcgtcactgtagaagagttatttgagagc

SEQ ID NO: 14361 - DNA, 201 bp, Homo sapiens
atataccaccatgcctagctaatttatatgtgtgtgtgtgtgtgtgtgtgtgtgtgtgtgtgtgtgtgtgtataatatatcatatatattattatatatawtattatatatacatcaatattaatatattaatatataatatattatatatattatataatatattatatatattatataatatattatattatatagaat

SEQ ID NO: 14362 - DNA, 201 bp, Homo sapiens
tattatataatatattatattatatagaatatattatataatatatattatattatatagaatatatattatattatatattctatataataattatattmtaaatatatttatatttatttatatttatatttatatttataatatatatattataatatatattatattatatatatatttatatatatataaaaataa

SEQ ID NO: 14363 - DNA, 201 bp, Homo sapiens
ccttggacagtcttccaatttcaggctcttttgctcccctcaccgtggccaagtcttagacggaaattggagcacagatggcttctcaggggtggccagamttgtgttcccaagacgcctggctccctggtcttatcctctcctttcaggtcgggtctcagatcaggattctttaagggccaacttcgcattctgggcaag

SEQ ID NO: 14364 - DNA, 201 bp, Homo sapiens
atctgaggattttttaagcccttctctcatctgtctcttaccaccttccccttcccctccccttcatttcctccaggcctctctgcttgtgggctcatggycacagcataacaactcttccttcatggaaggagcttccccacccccatgacaagccaagacaccctcactgtgcagcactctctcatgtcattttccatt

SEQ ID NO: 14365 - DNA, 201 bp, Homo sapiens
gagtttctttactaggcgtttgcattcatcctgttgtacacctattgcaaatgaagattttggtggtgattactgcccttgctgggggtcacacagatgcrtctgggaggatctggaaggggcctgcacctcttgagcttggagctccctcatatgggttcaccagtgaggacacagtcattgttggttagagactgggac

SEQ ID NO: 14366 - DNA, 201 bp, Homo sapiens
ggagaatctcttgaacctgggaggcggaggttacagtgagctgagattgtgccattgcactccatcctgggcgacaacagcgaaactccatctcaaaaaawaaaaaaataataaaaacaaaaataaagtatctaaagagttaccaaatacatatatgtctccaaaaggcatttattgctaatattctgctaatattagaac

SEQ ID NO: 14367 - DNA, 201 bp, Homo sapiens
gggcatggtggtacacacctgtagtcccagctcgtcaggaggctgaggtgggaggaacatttgagcttgggaggctgaggctgcagtgagctgtgatctcrccgctgcactccagcctgggcaagagtgagaccctacctctctatatatatatgcaaacatatatatcttgtttatcacatatatcatatatgatatata

SEQ ID NO: 14368 - DNA, 201 bp, Homo sapiens
caaatctctttctccagttactccagcataacgtgcattgacagtaaacaaagtcctcgatgatgtcatgttgccacacttcatttcacaggatttagcawccagagagccacaccgggggcggccctccctccaaacagagaacattatctcttcttcctcagtgaaaattcatgagaaagttcctaagcttgtaatgct

SEQ ID NO: 14369 - DNA, 201 bp, Homo sapiens
tatctaaagagttaccaaatacatatatgtctccaaaaggcatttattgctaatattctgctaatattagaacacactgggatcaaataaaaaattacccmaagaggggaggaaaaagtcacttgttttctaaactaggttgattttatttcatgggtaaacttgagtggtgttgggaaattgtgacctcagtgtgctact

SEQ ID NO: 14370 - DNA, 201 bp, Homo sapiens
gggaaggaggaagcagagcgttcgtaaaatcaagcacaaagtcagaagggttggccacggcgggcacccaggctgatggctgccatgagaatcctgaggatttttttttttttttttttttgagacagagtcttgctccatcacccaggctggagtgcagtgtcgtgatcttggctcactataacctccgcctctcaggtt

SEQ ID NO: 14371 - DNA, 201 bp, Homo sapiens
ctgttttccttcaccaagaattcttttttgaaaaaatgaaccactgaggacatgttgacatgttactcacatgttgttgacatgttgcccacagtgctccktatgccaggcaggtctgttttttttcttttttctttttttgagacagggtcttgtctgttgcccaggctggagtgcagtagcatgaacatggctcactac

SEQ ID NO: 14372 - DNA, 201 bp, Homo sapiens
atatcatatatattattatatataatattatatatacatcaatattaatatattaatatataatatattatatatattatataatatattatatatattayataatatattatattatatagaatatattatataatatatattatattatatagaatatatattatattatatattctatataataattatattataaat

SEQ ID NO: 14373 - DNA, 201 bp, Homo sapiens
cttcattaaaacaaattctaaaggactgattgacattttattctattgtattttgttatactgattgttttttaaccagaaataattgggccacagtagaycttttttaaactgagttttgtgtgtgatgtgtgatgtaatttgttttgcaatatccaaggaaattttcatgctccatttgccttcggccacaaactaaca

SEQ ID NO: 14374 - DNA, 201 bp, Homo sapiens
atttaatgttgaatacgttcaagcattcacttaataaaacaactgttaaacactgttacactgtcatacacttgaaaggtgcaatgtcttttaggtagttstaattttttactttaaaaaaattttttgtttttatttttttgagatggtgtctcgctctgtctcccaggctgaagtgcagtggcgtgatctcggcttact

SEQ ID NO: 14375 - DNA, 201 bp, Homo sapiens
tattatattatatagaatatattatataatatatattatattatatagaatatatattatattatatattctatataataattatattataaatatatttwtatttatttatatttatatttatatttataatatatatattataatatatattatattatatatatatttatatatatataaaaataaatatattatata

SEQ ID NO: 14376 - DNA, 201 bp, Homo sapiens
agcctgggcaagagtgagaccctacctctctatatatatatgcaaacatatatatcttgtttatcacatatatcatatatgatatatatcttgtgtatcayatatatatcttatcggactcttaggagtttgttagtgcaggcacttaagaaatgactaatgactttggtgcccacagagccagggagtaacgggccagac

SEQ ID NO: 14377 - DNA, 201 bp, Homo sapiens
aaccttcccattgagcgccttgcaggggctgatatcaaagacaagactgaacttccttcattggcatggtgaccaccgtgggaggtgcagccctcagcctrctcctcggctgtgccatccaggatgtgtttaaaggagaatggagaaaacttgtaaccatccccgacatagaacttgttctggaactcaaccctgttgttg

SEQ ID NO: 14378 - DNA, 201 bp, Homo sapiens
attatattatatagaatatattatataatatatattatattatatagaatatatattatattatatattctatataataattatattataaatatatttatatttatttatatttatatttatatttataatatatatattataatatatattatattatatatatatttatatatatataaaaataaatatattatatat

SEQ ID NO: 14379 - DNA, 201 bp, Homo sapiens
gaggtgggaggaacatttgagcttgggaggctgaggctgcagtgagctgtgatctcaccgctgcactccagcctgggcaagagtgagaccctacctctctmtatatatatgcaaacatatatatcttgtttatcacatatatcatatatgatatatatcttgtgtatcatatatatatcttatcggactcttaggagtttg

SEQ ID NO: 14380 - DNA, 201 bp, Homo sapiens
tatattatatagaatatattatataatatatattatattatatagaatatatattatattatatattctatataataattatattataaatatatttatatttatttatatttatatttatatttataatatatatattataatatatattatattatatatatatttatatatatataaaaataaatatattatatatat

SEQ ID NO: 14381 - DNA, 201 bp, Homo sapiens
atttatatttatttatatttatatttatatttataatatatatattataatatatattatattatatatatatttatatatatataaaaataaatatattatatatatatattttttgagacagagttttgctcttgtggtccaggctggagtgcaatagtgcgatctcagctcactgcaacctctgcctcccaggctcaa

SEQ ID NO: 14382 - DNA, 201 bp, Homo sapiens
aggaaaaagtgaatgactcagatgtttattttctcaaatacaatatttaaaatattgcaagaagacatctgtttagcattctcccctcatttgtcaattaytttattatttgagaattaataccccacatgaagacaatatcacttgccaaagtccttcctctgacgtggttaagtcgtatcaaatccacaggctgacgtc

SEQ ID NO: 14383 - DNA, 201 bp, Homo sapiens
ttctaaaatgtgggactcacatattatagaacgcaaagacccttgacctgtatttttgtaactcacataactgataccatgtcggatgatttatgttttattttatttatttatttatttatttatttatttatttatttatttatttattttgagacggagtctcgctctgttgcccaggctggagtgcagtggctccat

SEQ ID NO: 14384 - DNA, 201 bp, Homo sapiens
aaaatgtgggactcacatattatagaacgcaaagacccttgacctgtatttttgtaactcacataactgataccatgtcggatgatttatgttttattttatttatttatttatttatttatttatttatttatttatttatttattttgagacggagtctcgctctgttgcccaggctggagtgcagtggctccatctca

SEQ ID NO: 14385 - DNA, 201 bp, Homo sapiens
aaaaattagccctgtgtggtggcacgtgcctgtggtcccagctacttgggaggctgaggtgggagaatcacttgagcctgaaaggtgggggctccagtgamccgtgatcatgccacccactgcactccagcctgggcaacagaggcagaccctgcctcaaaaaaaaaaaaaaaaaaaagaagaagaagtggaagaggaaga

SEQ ID NO: 14386 - DNA, 201 bp, Homo sapiens
atgaggcaggagaagtgcttgaacctgggaggcggaggttgcagtgagccaagatcgcgccactgcacactccagcctgggagagagagtgagactctgtytgaaaaaaaaaaaaaaagataaaaaaggagtaaagaatgagtgcaatgcctatcagggtaacccattcgagtttctttactaggcgtttgcattcatcct

SEQ ID NO: 14387 - DNA, 201 bp, Homo sapiens
tcacatgttgttgacatgttgcccacagtgctccctatgccaggcaggtctgttttttttcttttttctttttttgagacagggtcttgtctgttgcccargctggagtgcagtagcatgaacatggctcactacagcctcaacctcctcctcctgggctcaactgatcctctggcttcagtctcccaaatagctggaacc

SEQ ID NO: 14388 - DNA, 201 bp, Homo sapiens
gggagattgaaacacatcagttagaggctggaaggtggagggaaggaggaagcagagcgttcgtaaaatcaagcacaaagtcagaagggttggccacggcrggcacccaggctgatggctgccatgagaatcctgaggatttttttttttttttttttttgagacagagtcttgctccatcacccaggctggagtgcagtg

SEQ ID NO: 14389 - DNA, 201 bp, Homo sapiens
atcctgttgtacacctattgcaaatgaagattttggtggtgattactgcccttgctgggggtcacacagatgcatctgggaggatctggaaggggcctgcmcctcttgagcttggagctccctcatatgggttcaccagtgaggacacagtcattgttggttagagactgggactcaagttgtaggctcctttcagtcttt

SEQ ID NO: 14390 - DNA, 201 bp, Homo sapiens
gaggaagatgaaagaagataatcccaatagattcacaggcaaattgtaggaacaaacaattcacaagaggacatgtaaattataattttgaaatctttacrtataattttatgccaactaaattaacaaacatggaaaagaaagaaggaagaaaggacagaggaagggaggaaagaggaaaggagggaaggaagaagtaat

SEQ ID NO: 14391 - DNA, 201 bp, Homo sapiens
caagagtgagaccctacctctctatatatatatgcaaacatatatatcttgtttatcacatatatcatatatgatatatatcttgtgtatcatatatatawcttatcggactcttaggagtttgttagtgcaggcacttaagaaatgactaatgactttggtgcccacagagccagggagtaacgggccagacctcttggt

SEQ ID NO: 14392 - DNA, 201 bp, Homo sapiens
aatatttaagaagtgataatgtatttgcaaacattactgtgaagtaaattgaatttaatgttgaatacgttcaagcattcacttaataaaacaactgttamacactgttacactgtcatacacttgaaaggtgcaatgtcttttaggtagttctaattttttactttaaaaaaattttttgtttttatttttttgagatgg

SEQ ID NO: 14393 - DNA, 201 bp, Homo sapiens
acaagactgaacttccttcattggcatggtgaccaccgtgggaggtgcagccctcagcctactcctcggctgtgccatccaggatgtgtttaaaggagaayggagaaaacttgtaaccatccccgacatagaacttgttctggaactcaaccctgttgttgaggggaggccgtggggtaagaaatgggagattgaaacaca

SEQ ID NO: 14394 - DNA, 201 bp, Homo sapiens
gcatttcctcatctgggaataaaaataattctacctgccggtgggagaaattgctattgcctacccaacatcagggtttcccttgtaccttgctggtggcagtggccactgagatgcaggtgaaggttgttggggcttcagggaaaaccttcttctgccccttgtctcttcctcacaccccctcgctagactagaggcagg

SEQ ID NO: 14395 - DNA, 201 bp, Homo sapiens
aacagtcaatgccccaccccaccctctacagcagcaggaaaaaataagtccagatcaatgttgcccacaaatttctcacctctgtatattccttggacagycttccaatttcaggctcttttgctcccctcaccgtggccaagtcttagacggaaattggagcacagatggcttctcaggggtggccagacttgtgttccc

SEQ ID NO: 14396 - DNA, 201 bp, Homo sapiens
agatcaatgttgcccacaaatttctcacctctgtatattccttggacagtcttccaatttcaggctcttttgctcccctcaccgtggccaagtcttagacrgaaattggagcacagatggcttctcaggggtggccagacttgtgttcccaagacgcctggctccctggtcttatcctctcctttcaggtcgggtctcaga

SEQ ID NO: 14397 - DNA, 201 bp, Homo sapiens
ttaagggccaacttcgcattctgggcaagtgaatgacacctagggcacaccctcttctcagcagcctgcacttgatctccttttaaaggggaaattacatytcttgttaagactgaaagaggctgccgaactttggaggaaattactatgttgttctcaggacagctggaagaatttctgaaagagaagacctaggcaagg

SEQ ID NO: 14398 - DNA, 201 bp, Homo sapiens
ctatgccaggcaggtctgttttttttcttttttctttttttgagacagggtcttgtctgttgcccaggctggagtgcagtagcatgaacatggctcactayagcctcaacctcctcctcctgggctcaactgatcctctggcttcagtctcccaaatagctggaaccacaggtgcacactcccatgcctggctaattttgt

SEQ ID NO: 14399 - DNA, 201 bp, Homo sapiens
gctactcaggaggctgaggctggagattgcttgaacctgggaggccggaggtcacagcgagctaagattgcaccactaaactccagcaagtccctgagacmgagtgaggccctgtctcaaaaaaaaaaaaaaaagaagaagaaagaaaaagaaaatttaaaattaaataagatactattattttgtaaattttaaaagcac

SEQ ID NO: 14400 - DNA, 201 bp, Homo sapiens
tgaggaacattattgagagatagagcttgcaatcttaactcagcaatggaatgctggaaaggctgaattgacatactctgttctttggttccgtatgtcttttttttttttttttttttttgagacagagtcttactctgttgcccaggctggagtgccgtggtgtgatcttggctcactgcaacctctgcctcccgggtt

SEQ ID NO: 14401 - DNA, 201 bp, Homo sapiens
atccacccacctcagcctcccaaagtgctgggattacaggcgtgagccaccgcacccggctggtttcctgtgtcattctaaatcctttctaacccagtaaraggatggatggatggatggatggatggatggatggatggatggcagatggatgatcagttagaccaactcaggaaaatagggaataacatggaaaagaat

SEQ ID NO: 14402 - DNA, 201 bp, Homo sapiens
cacaaactaacagtcaatgccccaccccaccctctacagcagcaggaaaaaataagtccagatcaatgttgcccacaaatttctcacctctgtatattccktggacagtcttccaatttcaggctcttttgctcccctcaccgtggccaagtcttagacggaaattggagcacagatggcttctcaggggtggccagactt

SEQ ID NO: 14403 - DNA, 201 bp, Homo sapiens
aggggaacaactccatttctttcctgagggcactcatgataaagcatcaaagttgggactcaaacatgtacaccttctgaccttagctatcattcttttgytcaatctcattaagtgaatattgagcatctaatatgtgccttccactgtgctggaaaagtcatgatactgacatggaaggtgacacagaagcttcctttt

SEQ ID NO: 14404 - DNA, 201 bp, Homo sapiens
agtctcactctgcctcacccaggctggagtacagtggcgtgatctcggctcactgagcctctgcctcctgggttcaagcgattttcctgtctcagcctccygagtagctgcgactacaggtgtgtgccaccacgcctgggcaattttgtatttttagtagagacagggtttcaccatgttggctaggcttgtcttgaaccc

SEQ ID NO: 14405 - DNA, 201 bp, Homo sapiens
ccaccctgaagctgcctgtgctgtacaaggagcagcctttgctatgccaggagtcactgagtggccaggccatgagcctgtcttgggtcaactctgtgggyctcaatgtccctgcttctgttcgttattcccatacagacatcaatgtgcctgacttccctgattactgttgcattgagatttttgatgggacaaagtctt

SEQ ID NO: 14406 - DNA, 201 bp, Homo sapiens
tatgccaggagtcactgagtggccaggccatgagcctgtcttgggtcaactctgtgggcctcaatgtccctgcttctgttcgttattcccatacagacatyaatgtgcctgacttccctgattactgttgcattgagatttttgatgggacaaagtcttcaaaagaggatggcgaggctaggaaagggttctcctatttgg

SEQ ID NO: 14407 - DNA, 201 bp, Homo sapiens
gttagaagagtgatattttagaataaaatttagaagaaaaaggtggaatccaaattttatattgtgtgtgtgtaatcagtgatggaatctctgaatttaaygaacagtccccttctctttgtttttgtttgtttgtttgttttttgagatggagtctcgctctgtcgcccagagtgcagtggcacgatctcagctcactgc

SEQ ID NO: 14408 - DNA, 201 bp, Homo sapiens
atcatgaactgtagcccagtgggatccatatattttgatttcattctcagaaaagggaaggggggaaaaaggttttgttttgtcttgctctgtcacccagkctggaatgcagtgaaatgctttttatggaggcaaaaatagcctagcatggctgttcatacagcaaaagaagataaaatagcaatgtagaacttaatccat

SEQ ID NO: 14409 - DNA, 201 bp, Homo sapiens; identical to SEQ ID NO: 1749

SEQ ID NO: 14410 - DNA, 201 bp, Homo sapiens
gggtgtgactaaggaatgaaacagaagaaaagtaattttattgaactatataccatatgtatgtatatgtacactgtcaaaacccctccaaaacaaagaamaacccccaaccccaaaacgtagttcatttatctgatccccacagacttggagataagcaactgttctttggccatgtcattcttgtcaccactaaagtaa

SEQ ID NO: 14411 - DNA, 201 bp, Homo sapiens
agttcccggccataattgcaagaatttatcgaaaagctttacatgttttcttggtttggttttgttttgagacagagcctcaccctttcgcccaccctggrgtgcagtgtgcgatcatagctcactgcagcatcgacctcccgggttcaagcgatcctcgcttcattctcctgaattgctgggaccacaggcgcgcgccat

SEQ ID NO: 14412 - DNA, 201 bp, Homo sapiens
cagccaaggataattagacaaggaaagttttctaaatgaaagagaatgctttcagcatactttcttccccccagattttgtttttactacccatggccgaygacggcttggaatgtaagcctggagagaattcattccaatgctgggattataaatatctgggaggaagaagtgtgtcctgacagtggtatcctcactaat

SEQ ID NO: 14413 - DNA, 201 bp, Homo sapiens; identical to SEQ ID NO: 1750

SEQ ID NO: 14414 - DNA, 201 bp, Homo sapiens
aatttggggcaagttcatagagtcaagtgaaagcaagtttattagagaagtaaagaagcaaaagaatggctactccataggcacagcagtggcctgggcgrcttgactaaggatacttacagttttttattgaatgtaagctaaacaaggggtggattattcatgaggtttctgggaaaggggtccaaagttaccggaact

SEQ ID NO: 14415 - DNA, 201 bp, Homo sapiens
gcatttctccagctctgcaggaaagcagtagcacatctccagggctaaggattcccacagtgccctactcccctccttgccccccaggaaagtgaggagcrtgggcagatcgctgagggttttctgatcaaaagcagtcactgtctctcatgtagcaaccctcagatcgtttcgttaccggacaggggtcccgatccagac

SEQ ID NO: 14416 - DNA, 201 bp, Homo sapiens; identical to SEQ ID NO: 1751

SEQ ID NO: 14417 - DNA, 201 bp, Homo sapiens
actcacaccatttacaatgtattgtattgaactgtggctattcagacactaatggtatctggtttctgacttcaaggatctgacagtctagatgtttgttytacagttagaagagtgatattttagaataaaatttagaagaaaaaggtggaatccaaattttatattgtgtgtgtgtaatcagtgatggaatctctgaat

SEQ ID NO: 14418 - DNA, 201 bp, Homo sapiens
tatcagccccccaaacccagaattgaccatattttgtgaagataggtatgaatgattacttaggatcactctctctttttttctttttttttggagacagmgtctcactctgtcgcccaggctggagtgctgtggcatgatcttggctcactgcaacctctgcctgcctggttcaagcgattctcctgcctcagcctcccg

SEQ ID NO: 14419 - DNA, 201 bp, Homo sapiens
cagtgtctcatccccacataacataaaaaggagcctgggaaaaaaattcaagctgcaggcactgataaggaactagcacagggtgttgtgcctggagacakgcccacagctgcacagatagaaaaacctccggcccatttggataaaaacttgcatagacctccggcccactcagataagggaacaaggcctggcatagaa

SEQ ID NO: 14420 - DNA, 201 bp, Homo sapiens; identical to SEQ ID NO: 1752

SEQ ID NO: 14421 - DNA, 201 bp, Homo sapiens
aagcaactgttctttggccatgtcattcttgtcaccactaaagtaagccccatcattctgtgttgctccaagaccaccagcagggtctctttcagtatcargttttcttaagcagcctctaaagctgaaaagaagcaggctaccagtcttaataatagtctgtaccatgtgggtttattatttgacagaatgtaattcctg

SEQ ID NO: 14422 - DNA, 201 bp, Homo sapiens; identical to SEQ ID NO: 1753

SEQ ID NO: 14423 - DNA, 201 bp, Homo sapiens; identical to SEQ ID NO: 1754

SEQ ID NO: 14424 - DNA, 201 bp, Homo sapiens
atttttgctcaagaccagaaagtatccctctgtccagggcctgcacttccaacttgagcagctccttaactttaaaatccctgttttcaaagtctataatyctctacgctctctgatctctctagattcatgtgaaataggccagacatctctgagattcatttattcatgtgaaataggccagaagtcttccctgagatt

SEQ ID NO: 14425 - DNA, 201 bp, Homo sapiens
ttcatctgtatccttttgtaatattttttatagtaaaccagtaaacgtgtttccctgagtcctgtgagcagctctagtgaattaaacccaaagaggggccrtagcaacctcaacatgaagctggtctgttagaagttctggagccccggacttaacgactagtgtctgaggtgggagtggggtggggtgcagtcttggata

SEQ ID NO: 14426 - DNA, 201 bp, Homo sapiens
gattggaaaacacccagctggtgtctgctgtagaactgattgcttgcttggtgtgtggggagaaaccccgacccatttggtcacagaagtctgctgtgttkattgttgtggtgtgagcagacgcaaaacatcttgagtgcatttttccactcacagaaacagtgcttaaagactggcaatatgtgtgcatcatgaactgta

SEQ ID NO: 14427 - DNA, 201 bp, Homo sapiens
tcatatatatatatatatgagaaaaagtatatatatatatatactttttttttttgagatgcagtctcactcttgttgcccaggctggagtgcagtggcaygatcttggctcactgcaacctccgcctcctgggttcaagtgattcttctacctcagcctcccaagtagctgggactacaggtgcacgccaccacacccgg

SEQ ID NO: 14428 - DNA, 201 bp, Homo sapiens
gtgggatccatatattttgatttcattctcagaaaagggaaggggggaaaaaggttttgttttgtcttgctctgtcacccaggctggaatgcagtgaaatkctttttatggaggcaaaaatagcctagcatggctgttcatacagcaaaagaagataaaatagcaatgtagaacttaatccatttatttgcaatgaaagat

SEQ ID NO: 14429 - DNA, 201 bp, Homo sapiens
ctgggaatgcagtccagtaggtctcggccttattttactcagtccctagtcaagatggagttgctgtggttccagcgcctctgacagtttgtcttctctastttattttttgtagggggtaaggggtgtctcattttgctgcccaagctagccttgaactcctaggctcaaatgagcctccctccgcagcctctccaagtg

SEQ ID NO: 14430 - DNA, 201 bp, Homo sapiens
aagtatatatatatatatactttttttttttgagatgcagtctcactcttgttgcccaggctggagtgcagtggcacgatcttggctcactgcaacctccscctcctgggttcaagtgattcttctacctcagcctcccaagtagctgggactacaggtgcacgccaccacacccggctaacttttgtgtttttagtagag

SEQ ID NO: 14431 - DNA, 201 bp, Homo sapiens
tttattatttgacagaatgtaattcctgtgggaaactttgtttccttaagctttttgctatctatgaaatctctgtggtaactctagccttagtgtcagargcaagatggtcagggaaatgagatactgaccagtaagggttgctgcggacatttaggggaggggaggctcagtgtcaggcctggtgtgccccagagctat

SEQ ID NO: 14432 - DNA, 201 bp, Homo sapiens
caaggtcccgggcaaacctttctggttgatgtcaggtcaagctgagtcacatgttctccagacagcccagggactaagcacattccttcctcttcccagcycctgaaaaccctggaccccagcctcacacggggcaccctgtttaggcccgcctctctgctgacagagaactttcttgtttcgcttattaaactttcgctc

SEQ ID NO: 14433 - DNA, 201 bp, Homo sapiens
aggccagaagtcttccctgagattcattttagaaagcaaattatttcagtgttgaaactgaaaggagttagttagcttgccttaggtagagagcaaggcargggtccctggagagcccccagcccatgggtcagtgtctcatccccacataacataaaaaggagcctgggaaaaaaattcaagctgcaggcactgataagg

SEQ ID NO: 14434 - DNA, 201 bp, Homo sapiens
tctgcatgtgaaaataatgtccccagaaagggcattattatttcttccactgggaagccagataattatgtatatagcgagtatttctactgcagcctgargaagtttcactgggtccttctcaacaacctggtctctcagcagacgtgaactagggcatctctctacatatcttctttaatcattgatttacaaacagat

SEQ ID NO: 14435 - DNA, 201 bp, Homo sapiens
tgaggtgagaggatcgcctgaggccaggagattggggctgcagtgagccaggatcgcgccactgaactccagcttaggcggccgagtgagaccctaagtcaaaaaaaaaaaaaagagagaaaagaaaagaagcagggctgactgattaggacagcatttcttttgccgccagctgaactgcggcgtctagagttcccggcc

SEQ ID NO: 14436 - DNA, 201 bp, Homo sapiens
cccggccaggatctcttttaaagtctgcttaacatgcgcactacattaggcggttcaagttttgaaacatcttcatgtggtgcttgataccaaaatactcytctctctctctctctctcatatatatatatatatgagaaaaagtatatatatatatatactttttttttttgagatgcagtctcactcttgttgcccagg

SEQ ID NO: 14437 - DNA, 201 bp, Homo sapiens
tggtctcgaactcctgacctcaagtgattcacccacctcggcctcccaaagtgctgggattgtccccttctcttaattgtgtttttgtattgtggcttttygtattctttaaattagtgccatggtatttgtttctaagatttaaattgatcaaatcatttttctgatgcctagccttattttaaaattttcttcacttcc

SEQ ID NO: 14438 - DNA, 201 bp, Homo sapiens
caaggcaagggtccctggagagcccccagcccatgggtcagtgtctcatccccacataacataaaaaggagcctgggaaaaaaattcaagctgcaggcacygataaggaactagcacagggtgttgtgcctggagacaggcccacagctgcacagatagaaaaacctccggcccatttggataaaaacttgcatagacctc

SEQ ID NO: 14439 - DNA, 201 bp, Homo sapiens
ataggccagaagtcttccctgagattcattttagaaagcaaattatttcagtgttgaaactgaaaggagttagttagcttgccttaggtagagagcaaggsaagggtccctggagagcccccagcccatgggtcagtgtctcatccccacataacataaaaaggagcctgggaaaaaaattcaagctgcaggcactgataa

SEQ ID NO: 14440 - DNA, 201 bp, Homo sapiens
gggtgcagggatggcggctccaggctggaggcggctgggggcccggccagtgcgccaggagccgcaggaacgctagtgagccgcgcgctgggccggcagcwgggggttattttagtgcgcggggagggggcggcccgcggcggagcgtagggttgagcggcttcccccgcactggggtgagagcccagaacaggcggtaga

SEQ ID NO: 14441 - DNA, 201 bp, Homo sapiens
atagtgggattgctgggttgaatgggtgttctatttttagttctttgagaaatctccatactgctttccataggggttgaactattttacattcccaccarcagtgtacaaacgacaaatttctacttctgcatgaggctgtgtgggtcctcaaagagaatctcaaaacttagaaagcatagtgctgagccacccagctct

SEQ ID NO: 14442 - DNA, 201 bp, Homo sapiens
ctgggctcaagcaattctcctgccttagcctccctagtagctgggattacaggcctgtgccaccgcacctggctaatttttgtatttttagtagagatggsggtttcaccatgttggccaggctggtctcgaactcctgacctcaagtgattcacccacctcggcctcccaaagtgctgggattgtccccttctcttaatt

SEQ ID NO: 14443 - DNA, 201 bp, Homo sapiens
tgaatttaatgaacagtccccttctctttgtttttgtttgtttgtttgttttttgagatggagtctcgctctgtcgcccagagtgcagtggcacgatctcrgctcactgcaacctctacctcctgggctcaagcaattctcctgccttagcctccctagtagctgggattacaggcctgtgccaccgcacctggctaattt

SEQ ID NO: 14444 - DNA, 201 bp, Homo sapiens
aacgcacaagaactctttttacgtctgagagatgcccctaaaagtcagaggaagaatcttctgtatgctacctggacttcaaagctcccattagaacaggyaagttataatcatgtgatagatagaaggcagcattgtactgagtaatgaatattgactctctattttgtacattttaacatgggaatattcagatatata

SEQ ID NO: 14445 - DNA, 201 bp, Homo sapiens; identical to SEQ ID NO: 1797

SEQ ID NO: 14446 - DNA, 201 bp, Homo sapiens
taaaggggatatcaccactgatcccacagaaatacaaactaccatcagagaatactacaaacacctctacgcaaataaactagaaaatctagaagaaatgkataaattcctcgacaaatacactctcccaagactagaccaggaagaagttgaatctctgaatagactaataacaggatctgaaattgtggcaataatcaa

SEQ ID NO: 14447 - DNA, 201 bp, Homo sapiens
aagaaaattacagaaaggacagagttaaggaaaaattattataatatgaaagttgcctcagaagaggctacagaaagttgcctgagaataggctacatttrccacggctttaaatactgtgtgtgcttatatatgtctactctttttagttacgtggaattgtagccaaagattatttctgtactggatgcagcccctggg

SEQ ID NO: 14448 - DNA, 201 bp, Homo sapiens
gtagcactattcacagtaacaaagacatggaatcaacctaaatgcacatcactgacagactgaataaagaaaatgtgatacatatacaccatggaatactrtgcagccataaaaaagaacaagatcatgtcttttgcaggaacatgtatggagctagaggccattcttcttagcaaactaacgcaggcacaaaaaccaaat

SEQ ID NO: 14449 - DNA, 201 bp, Homo sapiens
tccaagtcaaaaaaatatttagtgagaagaatgtcattgttttaaatgtttagcaattttctctaaagtcttaatggaaaacagtgggattcccatatccrtctctgcgttcagtttgttgagatagcatttcatgtagccactggaaaaagtcaccatacatttgtgaaagaatgagagtggaaaaggcaaacagtatct

SEQ ID NO: 14450 - DNA, 201 bp, Homo sapiens
tactgtttgcttttcctagttcgaaaaagaaaaacagcatgatattcgatcattttttgtaccacaacctaaaaaaagacagttgatgacctcctgtgacraatcaaagagattccgggaggaaaatactgtagtgtcatcagaccctacaaaaacagctgcaagagatatcatcgattatgaaagtgatgttgaacctga

SEQ ID NO: 14451 - DNA, 201 bp, Homo sapiens
agacaatccattgtatttgccaaatctggtttggtgtgccaacagctacacaattctatcagaattttacaagcagttcagttttccatagttacaagaartaaattatattctttgtttcaaattcattgttaattgcttcaattgtaatttatccagcttgactgcagacttcaaaaagcagcttttcatttcagagtg

SEQ ID NO: 14452 - DNA, 201 bp, Homo sapiens
ccaatagataataatttagaagtggagtaagtagtatggagaattttattttacattttaaaatatgaattatttatctaaaacccaatagtatattttakttctaagttcctttatggtatatttttaaagtaaatgtaaaatacgtatacttttaaagatatatgtagtatatctactttatatataccttaaacatat

SEQ ID NO: 14453 - DNA, 201 bp, Homo sapiens
taagtacatggattttcttttctaggagaatgtcgaccagtaaagtgacagttctgggttatggtctcttaaccgcagatgcaaagactttgatagatgcmctgaataatcagaacttcaaagtagttatagtggatgaatcacactacatgaaatccagaaatgcaactcgcagcaggattttattgccaatagtacaga

SEQ ID NO: 14454 - DNA, 201 bp, Homo sapiens
tcaaaaagtatgctgtgagaagacatattggtcgtccctaatattatgtttttgtttttgttgttttgttttgttttgttttgttttgtttgagacagagwcttgctcttttgcctgggttggagtgcagtggtgcaatctctgctcactgcaacctccgcttccctggttcaagagattgtcctgcctcagcctcgcaaa

SEQ ID NO: 14455 - DNA, 201 bp, Homo sapiens
catattggccaggctggtctcaaactcctgacctcgtgatccacccgcctcagcttcccaaagtgctgggattacaagcatgagccaccatgcctggccckctctttctttaatttccctcacgcattgttttaaaaatcgtgtcttgtggttaatgatttcattctctatatttatctgaattctgtatatttcacaact

SEQ ID NO: 14456 - DNA, 201 bp, Homo sapiens
tgctaataatcaaaatgatgctcattcggtctcaaatctactctagcaaaaggaatagattagtctaaattttttcaagaccaatagcagctcttattggwggaaattcttccttatgcctaccaacttgtattttttcagctaattctgaatctgtttgtttcttgttagatcattagcaaaaatgtaaaacaattggtt

SEQ ID NO: 14457 - DNA, 201 bp, Homo sapiens
tagttcgaaaaagaaaaacagcatgatattcgatcattttttgtaccacaacctaaaaaaagacagttgatgacctcctgtgacgaatcaaagagattccrggaggaaaatactgtagtgtcatcagaccctacaaaaacagctgcaagagatatcatcgattatgaaagtgatgttgaacctgaaacgaaaagattgaaa

SEQ ID NO: 14458 - DNA, 201 bp, Homo sapiens
tatcttcagaagtttagttttgaattgtaatcagtcataactgtaactatagtgatcattccttggatttatgtgacatctttattttttataatttaatwctttaacgtgtatggttccattgtagttgtcactcctactgtatgcaaatagtaggttgaaggagataattcttgataattttctcagtgttggataata

SEQ ID NO: 14459 - DNA, 201 bp, Homo sapiens
ctgaagctcaattgcttcagtttaaatgccgggtcttctactactagctgtttgaccttggatacgttacttaacctctctgagcctcagtttcctaatcyataatagaaacataaaattttttagtatcatagggtgtttttgaggattaatagagttaatgcatatgaagtgcttcaaatattgcctgttatataagct

SEQ ID NO: 14460 - DNA, 201 bp, Homo sapiens
ctcgtggaaagtgtacaggaggccaaggcccagttaaccaccccagcctttcctgtagagggctggcaatgtagtctctgcacctatatcaataattcagwgttaccttattgtgaaatgtgtgagactcctcaaggcagtgctggtgagtatatagaaggtgaccatggaggtaagggctgttagtggtgtcttcagata

SEQ ID NO: 14461 - DNA, 201 bp, Homo sapiens
cagtgtggtttcatattagtagttaagtagaggtcaggcacctgattttgttcaaataaatcctgccaagggtgtttttgcttttttttttttttttaaartatttgtgaattatgaccactaatcacaattaactataaaacacgttgtgtttctagaccagtacaatccaacagaaatataatacaagccatatatgta

SEQ ID NO: 14462 - DNA, 201 bp, Homo sapiens
attatgcagcagtgtaagtttcccatgctgatagagccgtccttccggccttaaatttgccatctccttaggtcctcctttcttgccactctcttgtccayttcctttaagttcttcagtatcacttaggcattcaaaaaattcttcttcgctgtcactccaggaatcccaagattttcctacctctcccttttccttatc

SEQ ID NO: 14463 - DNA, 201 bp, Homo sapiens
gttttagtaattttaatgatcatttttagtttaattttaaaaaagcactttgtggcatgttgtagagtcaaatcactggttgcattttcatcattctaggyggtgcctattaattacccagtgctaagaatatatgtgaaatctgtttccttggcaaatgatcacacctacagttgctgtttctgtggatagaatcatcct

SEQ ID NO: 14464 - DNA, 201 bp, Homo sapiens
tggaatgcagtggctcaatcttaggtcactgcaaccgccacctcccaggttcaagcaattcttgggcctcagcctcccaggtagctgggactacagggccrcaccaccacacccagataattttttttaaagtatttatttatttatttatttatttttattatactttaagttttagggtacatgtgcacattgtgcagg

SEQ ID NO: 14465 - DNA, 201 bp, Homo sapiens
ggccatctctagggcagaaatctctcaacagctcaagcccatcctcgctgccccctccacgaaacgacacagctcaagcttggtgctgggaagtctttccsatgctggtttgattcctgatcacccaactggacagggccctctccaggacctcccaggttctccctggtaccttccctccctcaggaggaggcagcactg

SEQ ID NO: 14466 - DNA, 201 bp, Homo sapiens
ttatatgaagcaattactatttagcctaatcattcattagttacctattcagtgtttttatcaattgtagaaaacttcttgaagatggagcctgtgtcccrtttctaaatccatacacagtccaggcagatctcactgtgaagccctctacatccaaaggctatttgcaagctgtggataatgaaggaaatccactttgcc

SEQ ID NO: 14467 - DNA, 201 bp, Homo sapiens
gctggttcctgtgaagcacaaaaggacaaggctcataaacagccctttttagaaaaagaagtaccataaaaatagaataaagacaacagtcatttcagctrtagcagtcacaagatgagtatttttaaaaattcagagaaatgcataagttttttagaacttacataaaaaagaattaagaaaaataaataccactttcag

SEQ ID NO: 14468 - DNA, 201 bp, Homo sapiens
agaggtcaggcatggtggctcacgcctgtaattccaccactttggggggccaagacaggtgaattacttgaactcaacagttcaagaccagcctgggcaayatgttgaaactcaatctctgcaaaaaaatacaaaaattagccaggcatggtggcatgctcctgcagtcccagctacttgggaagctgaggtgggaggatc

SEQ ID NO: 14469 - DNA, 201 bp, Homo sapiens
cagcaaggaagaaacaccaaaaattgagaaagaagacggacttacatcccagccaggtaatggtaagtcttgtttccatttctagcatccaagtaataacyatatactttcacacataatactgttattagattagtaattactaccttgttccaggttccttttactctcttttatattaaaaataccaaccatttgtaa

SEQ ID NO: 14470 - DNA, 201 bp, Homo sapiens
agcttaaattttgacagaacttaaaaatccaaagaggccacaactttattggtgtgttagttcattctcatgctgctgtaaagaaatacctgagactgggyaatgtataaaagaggtttaattgactcacagttccacatggctggagaggcctcaagaagcttaaggttatggcagaaggcacctcttcacagggtggca

SEQ ID NO: 14471 - DNA, 201 bp, Homo sapiens
gctgagccaggagaatcacttgaacctgggaggcagaggttgtggtgagccgagattgcaccattgcactccagcctgggcaacaagagtgaaactccatstcaaaaaaaaaaaaaaaaaaaaaagcccaacatcatttcaacttttagcctccaaattgagttaaagaaagcactcttgtgctacctgaatctagcaagt

SEQ ID NO: 14472 - DNA, 201 bp, Homo sapiens
gtgttgctgtaaagaagggattcttgactttgcaacacagctattcctcctactttggaactgtgtttggctgttatgttatgttatgttatgttatgttwtgttttgttttgttttgttttgttttgttttgttttgtttgttttgttttgtttctctgagatgtatagcctgaagtgttctttctaggtatactccctc

SEQ ID NO: 14473 - DNA, 201 bp, Homo sapiens
tgggattacaggcatgcaccaccacacccagctaatttttgtatttttagtagagacgggttttaccacattggtgaagctgttctcgaactcctgacctsaggtgttccgcccaccctggcctcccaaagtgctgggattacaggcatgagccaccacacctggcaattaaaaaatttttttttgtagatacggggtgtc

SEQ ID NO: 14474 - DNA, 201 bp, Homo sapiens
tcacttaacattatatcctctctgttcatctatgttgtcgcaaatcacaggacttcattcttttttttaatcactgaatagtattccattgtgtatgtgcmccatatatatatatatatatatatatattttttttttttttttttttttttttttttgagacagagtctgcctctgtcacccaggcatggagtgctgtgg

SEQ ID NO: 14475 - DNA, 201 bp, Homo sapiens
atctatgttgtcgcaaatcacaggacttcattcttttttttaatcactgaatagtattccattgtgtatgtgcaccatatatatatatatatatatatatwttttttttttttttttttttttttttttttgagacagagtctgcctctgtcacccaggcatggagtgctgtggtgcaatctcggctcactgcaacctctg

SEQ ID NO: 14476 - DNA, 201 bp, Homo sapiens
ataaaggctgggaggtcatcccccagggcctcccctacttcacatacacagagacgtgtgcatatgtcacacacacacacatattatatatagatatgtatttttttttttttttacaaaaataacagggtttgcacagctctattaattttttaaaattacacaggcaaggtttatgcttcagtataaccatttttactt

SEQ ID NO: 14477 - DNA, 201 bp, Homo sapiens
taaaggctgggaggtcatcccccagggcctcccctacttcacatacacagagacgtgtgcatatgtcacacacacacacatattatatatagatatgtatttttttttttttttacaaaaataacagggtttgcacagctctattaattttttaaaattacacaggcaaggtttatgcttcagtataaccatttttacttt

SEQ ID NO: 14478 - DNA, 201 bp, Homo sapiens
aatgaaaagggacagagttttgaatgacttgaaattagggcggagaacgagttgtcgcgaggctgtacagagcccttttcgcaaccctaacgggagagaartgatggaagaagggtagccggaagagtttcctcaaaataccataggggttttaaattattagtacgtatttaaactcatctactttcacgttgtcccgtt

SEQ ID NO: 14479 - DNA, 201 bp, Homo sapiens
tctcttacccgttttcagcaataagagaaatacagttctgtcctgcctggctcccaagcagtcagacctaatggttatctcccttgttccctgaacatcgstgttaccctgttcttttttcaaggtgcccagatttcatattgttcaaacacacatgctctacaaacaatttgtgcagataatgcaatcatcacaggatcc

SEQ ID NO: 14480 - DNA, 201 bp, Homo sapiens
agcactaccacatgaaacactaaaatccagaaaaggatgttcactattaccacagcttacctgtactctggagaactgataattcaattactcaaaagaamaataagaggatatgaggctaattttgtcaggaaaaaatttttttacttaaaaaaaaagaaaaaagacgggcacagtgactcacacctgtaatcccagcac

SEQ ID NO: 14481 - DNA, 201 bp, Homo sapiens
cagcaatgaatatctttgcacatgttgagaggtagtattttatagttctgaagagcatggaaatttagagctagaccacctgtgttttattttcacgtctrctattgccgaacgcttcattttagaaaagtaactttatctcctcatacctcagtttcttcagctcaaaaaaaatggcaaattattatgcctgccttggag

SEQ ID NO: 14482 - DNA, 201 bp, Homo sapiens
aaatagtctaatgaatcacagttttgctgaagtgcagtgttagaggaactatatagaactttaccaagaaggagtagtatgtttccatggggaaaaacttycgtagttcctatttggaatgtcctcccgtgcatgcctctgcaaagacactgcagcaggacagggaaagatgactctgaaggcagctagaggtcagatgga

SEQ ID NO: 14483 - DNA, 201 bp, Homo sapiens
cggctaatttttgttatttttactagagatggggtttcaccatgttggccaggctggtctcaaactcctgacctcaggtgatttgcctgccttgacctccygaagtgctgggattacaggcttgagccaccacgcccagcctgttattcattttaaatgctgtatctattctactgtttagaatttatttatgcagtctac

SEQ ID NO: 14484 - DNA, 201 bp, Homo sapiens
ttgtcactcaggctggagtgcagtggtgcaatctcgctcactgcagcctccgcctcccgggttcaagtgattctcctgcctcagcctcctgagtagctggkattacaggcacctgcaccatgcctggctaatttttgtacttttagtagagacggggtttagccatgttggccaggctggtcttttacttctgacctcagc

SEQ ID NO: 14485 - DNA, 201 bp, Homo sapiens
tcaggaaatgtgagacctctgatttctttacaagattgttttggctatttggggtcccttgagattccatataaattttaggatggacttttctatttctrcagacatatcagtaagattttgataggtgtgttaggccattcttgtgtcactataaagaaatacccggcctgggtgtggtgactcacgcctgtaatccca

SEQ ID NO: 14486 - DNA, 201 bp, Homo sapiens
tacaaccaggatattgacacagtcaaaatagagaacatttccatcccaggaggatccctcatgttgccttcttatagccacaaccacttctatcccacccyaacctaaccactaatctattatccatttctaaaattttgtcctttcaagtaggtcgtgtaaatggaataaaataataaatggaattaaaaataataaatg

SEQ ID NO: 14487 - DNA, 201 bp, Homo sapiens
tgcagccctttctgtaattatttttttagattctcatgaaaaatgttatttgtgggattagcagaagaatccagttctggtctatgtcattttattttctrcaccagctcatctgttgagttggaaatggcctctgggatcagagaataggaagtgggtagattttcttcgctgggtaatcccaagttgccttaagaactc

SEQ ID NO: 14488 - DNA, 201 bp, Homo sapiens
ccctcagccactgtgtgcccactaaaatattggatgaattcctgccagtttgacaaattatatatttttatttacctaggacagtgttgctgaattatgaragaatgaattaatcggcatttctgcaaagatgaattagcatgtctctgagagatagggaaatacactatttctctaatgatatccagagttcctgaaaga

SEQ ID NO: 14489 - DNA, 201 bp, Homo sapiens
ttcaccatattggactgtggtaaaatagacatatttatttcttatctcaagagagatggtcagaaagttcaggaaaacaaaataactagataagaaagttwgtgtccaaaaacattatgtagattaaaagtaatatgattttgaggaatttttgaagtataagaaacttctcctggccttgatgtagatagtagggaagaa

SEQ ID NO: 14490 - DNA, 201 bp, Homo sapiens
gatggtcagaaagttcaggaaaacaaaataactagataagaaagttagtgtccaaaaacattatgtagattaaaagtaatatgattttgaggaatttttgragtataagaaacttctcctggccttgatgtagatagtagggaagaaatataacctgagagcacagcttggttctgctctgaacaatacataaatcctgag

SEQ ID NO: 14491 - DNA, 201 bp, Homo sapiens
acaagagaaaaataaccccattaaaaagtgggcaaaggacatgaacagacacttctcaaaagaagacatacgtacggccaacaagcatataaaaactcagkatcactgataattagagaaatgcaaatcaaagccacagtgagataccatctcacaccagtcagaatggctattactgaaaagtcaaaaaaataacagatg

SEQ ID NO: 14492 - DNA, 201 bp, Homo sapiens
tttttttattttagtagagacagggtttcaccaggttggccaagatggtctcgatctcctgacctcgtgatccgctcgcctcggcctcccaaagtgccggkattacaggcgtgagccactgtgcccagccacacctggctaatttctgtatttttagtagagacggggttttgccatgttggccagactggtctcgaattc

SEQ ID NO: 14493 - DNA, 201 bp, Homo sapiens
aggtgaagattagtgtatatgctatgctattatttatttctaaaaataaaaggtataatgaaaaatgagtgctagtgggtacgggtttctttttgttttgkttttgtttgagacagggtctcaatctgttgctcaggttgcagtgcagtggcgggatctcagctcactgcaacctctgcctcccggattcaagtgattctc

SEQ ID NO: 14494 - DNA, 201 bp, Homo sapiens
caccaggttggccaagatggtctcgatctcctgacctcgtgatccgctcgcctcggcctcccaaagtgccggtattacaggcgtgagccactgtgcccagycacacctggctaatttctgtatttttagtagagacggggttttgccatgttggccagactggtctcgaattcctgacctcaggtaatctgcctgcctcgg

SEQ ID NO: 14495 - DNA, 201 bp, Homo sapiens
gttcttcatttcattatcaactttacttttgttttttatcagagttttacatgaatatagtttaaagggtcagtaactatatagttttcattgttaaaatrgctgcctcctacgctcccttaatctttctctctaccgtttcccgtatctctaaataatgtatgtatgttgaagtttttgtttttccagttttaggcattc

SEQ ID NO: 14496 - DNA, 201 bp, Homo sapiens
ttaaaatggctgcctcctacgctcccttaatctttctctctaccgtttcccgtatctctaaataatgtatgtatgttgaagtttttgtttttccagttttrggcattctctgttaactctccaatatggaagatgaaaaattgcctctctttgactctgcttcccacatcacacactacttctcattcttaccttctcggt

SEQ ID NO: 14497 - DNA, 201 bp, Homo sapiens
ttgcaattacttttggaatcttcattatgaatttttttttttttttttttttttggaaacaaagtctcactctgtcacccaggctggagtgtaatgacgcratcttggctcccaggttcaagtgattctcctgcctcagcctccaagtagttgagactacaggtgcacactaccaagcccggctaatttttgtatttttta

SEQ ID NO: 14498 - DNA, 201 bp, Homo sapiens
attacttttggaatcttcattatgaatttttttttttttttttttttttggaaacaaagtctcactctgtcacccaggctggagtgtaatgacgcgatctyggctcccaggttcaagtgattctcctgcctcagcctccaagtagttgagactacaggtgcacactaccaagcccggctaatttttgtattttttagtata

SEQ ID NO: 14499 - DNA, 201 bp, Homo sapiens
aaaactgaatcaattctgcatttcgtgaaccctgttacttatctttagtagccatggaaataattccccagtaaatatatagttgcaaaatcactgcctarttacctttctttacatacaaaatgactaatatttgataaaatatgaagtttttaaaaatagttacgatattttgttacagtgaagcaatttatatatttt

SEQ ID NO: 14500 - DNA, 201 bp, Homo sapiens
aaccttttcttagtcagtggaaacttaatttgatcagcagggtcttcagaagtttagttttgaattgtatcttcagaagtttagttttgaattgtaatcartcataactgtaactatagtgatcattccttggatttatgtgacatctttattttttataatttaatactttaacgtgtatggttccattgtagttgtcac

SEQ ID NO: 14501 - DNA, 201 bp, Homo sapiens
gttctgggggctgggaagtctaagatcaaggcgccaacggattcagtatctgatggtttatagacatccatcttcttgatgtgtcacatggcagaaggggygagattgctttctgaagtcttaagtttctctgtgtctctttttttttttttttttgagacagagtcttgctctgtcacccaggctggcacagtggcacca

SEQ ID NO: 14502 - DNA, 201 bp, Homo sapiens
ctgcatcttactagatggtttaaaaaaggtatacctcagctgttttgagagaatttattattttcaggatgtataataattcccactgagccattatttcrcacattagcttttacacaattatttattcttattcataaaactgcagatcaaaaaacttgattatgcctgcaggaactagtagaaaatttttagggctta

SEQ ID NO: 14503 - DNA, 201 bp, Homo sapiens
tttttttcccttgtggtaaaaaaacacaatgtaaaatttactaccttaaccattttaattttacagtgtagtagtgttaactatatcttattatgtaaggkataggtaacaactttttcatctagtaaatctgaaactctatacccagttaacatctcctcttttcctcctcccttgtctctatactcttccttcctaggt

SEQ ID NO: 14504 - DNA, 201 bp, Homo sapiens
ttgatgctaacgtctcattaggtacaagcaaatgtgtttaattatataacttccttatttgagaagcaaagttaacttgacaaaattttgtttaattataygatttaattctttgcacatgtccgtattactaaacattatgggaagtctcggggattaagtggaagatgatttaattttttttaaagtttacaattatac

SEQ ID NO: 14505 - DNA, 201 bp, Homo sapiens
aaaaaatagctgggtgtggtggcatacacctgtagtcccagctactttggaggctgaggtggtaggatcattagaggtcaaggctgcagtgagccgtgatygtgccactgccctctagcctgagtgacaaagggagactgtctcagaaaaaaaaaaaccaaaaaacatatttattgggtaagctgacatctttttgaacaa

SEQ ID NO: 14506 - DNA, 201 bp, Homo sapiens
actaacatcttctctagtttaaagcagtgtcaaatcttattcattactgtttttcaggctgagctttttgaaactaatattcattcagaaatatcaatgaraacagtgtcatggctccttatcattaaaaggaagagcacattggataaattattttcttaactccagcattcaattttgctacatgttttgtcttcattt

SEQ ID NO: 14507 - DNA, 201 bp, Homo sapiens
attttgatacaggcatacaatgcataataagcagatgtatcacctcaagcatttattcattatgttacaaacaatccaattatattgttttaattattttwaaatgtacaatttaattattattgactatagtcaccccgttgtgctattgaatactagatattattcattctatttttatttacccattaaccatcccga

SEQ ID NO: 14508 - DNA, 201 bp, Homo sapiens
caccttaaatctatggaattcaccatggattcagataaacacttgatctgcaccataacccttctgatatggtttggctatgtccccacccaaatctcatmttgaatcgtagctaccataattcccacatgtgatgggaggggtgacccagtgggggatagttgaatcatgggggtgggtctctcccatgctgttctcatg

SEQ ID NO: 14509 - DNA, 201 bp, Homo sapiens
ccaatgcccagacttacactcaggtgacatgagtgtgatcagccacgtgtgggaactaaaacagcctcttcccaagtagaggtttggagagattatgatgkagtcaataatgactctcacataccctctgggcattcacaaacagcttgtgaatgatcctgccagcatgtcctcttcctgcaccggtgactaacacttcag

SEQ ID NO: 14510 - DNA, 201 bp, Homo sapiens
tggctttagtattagggcaatgctggcttcatagaatgagttaaaaattgtttccttgaccagcctggtcaacatggtgaaacctcatctctactaaaaawaaaaaaattagccgggtgtggtagtgcgcacttataatcccaactactcaggaggcgaggcaggagaatcgcttgaacctgggaggcagagattgcagtg

SEQ ID NO: 14511 - DNA, 201 bp, Homo sapiens
gggcaatgctggcttcatagaatgagttaaaaattgtttccttgaccagcctggtcaacatggtgaaacctcatctctactaaaaataaaaaaattagccrggtgtggtagtgcgcacttataatcccaactactcaggaggcgaggcaggagaatcgcttgaacctgggaggcagagattgcagtgagctgagattgcac

SEQ ID NO: 14512 - DNA, 201 bp, Homo sapiens
gaccagcctggtcaacatggtgaaacctcatctctactaaaaataaaaaaattagccgggtgtggtagtgcgcacttataatcccaactactcaggaggcraggcaggagaatcgcttgaacctgggaggcagagattgcagtgagctgagattgcaccactgcactccagcctggacaacagagcgagactctgtctcaa

SEQ ID NO: 14513 - DNA, 201 bp, Homo sapiens
tctctactgaaaatacaaaaattagccaggcatgctggcaaccacctgtaatcccagctactcagaaggctgaggcaggagaattgcctgaacctgggagyggaggttgcagtgagctgagatcacaccactgcacttcaacctatgcaacagagcaagactcctcttatattgaaaaaaaaaaaaaagacttcagtggag

SEQ ID NO: 14514 - DNA, 201 bp, Homo sapiens
gtcttaaactcctgacctcaggtgatctgcctgcctcagtctcccaaagtgctgggattacaggcgtgaatcaccgtgcccaacctagaatatttctttcyttttttttttttttgaggtaagagtctcgctctgtcacccaggctggagtgcagtggtgtgatctcagctcactgcaagctccacctcccgggttcacgc

SEQ ID NO: 14515 - DNA, 201 bp, Homo sapiens
aagattatttctgtactggatgcagcccctgggaagaagctttcaaagtgacccctagggtttcatttatagggaaggaggagcttggagtacttacaatyaactgaagtagaaaaggcttttaagctgatagatttgttgtggaaagtgtccatcagtgcctttatgtttttacctggtccttaaagtttttatttgtgg

SEQ ID NO: 14516 - DNA, 201 bp, Homo sapiens
ttctcaagaatgggaaaaacaaaactgctaccaattttcactactttatttctgagaaattaaaacttaatactaactcaaatggatgtaattaggtataytaaagtaccagttcaaaaaagaagaaaaaaaaccctattacttgcaaggcatggcaatgcacatcttctgcataatatttgacaaagcttatttcaagtt

SEQ ID NO: 14517 - DNA, 201 bp, Homo sapiens
ggcagggactcggaaacctttcccctgcctcctccgctaggcctcgaggggtttgcttttcacatggcccccgggtgggggcggtgggcacaaggcagtgsctgcagctgcagccggagccgcagccgcgggccaggcgagcctggctcactcggaacccgacctaacggcgggctggcagcagcgggacgtcagaaggcc

SEQ ID NO: 14518 - DNA, 201 bp, Homo sapiens
tgtttgaaggattgataatcaagagtggccccatcaccactctttgagtaacgaccatttattaaacgagtggcagacaggcgcggtggctcagacctgtmatcctagcactttgggaggccgaggcgggaggattacttgaggtcaggagttcgagaccagcctgggcaacatggtgaaatcttgtgtctgctaaaaact

SEQ ID NO: 14519 - DNA, 201 bp, Homo sapiens
gtccatcataattacttaattacttctctcttttcaccagcatttttgaagacccattattttacacctatttgacttgacagggtttatgatgttatatyctatttataatgttgattaagaaaaaatcttcaactttatacatgaatacaagaatcaggccatagaaataaacagaatgacatacaagacgtaagatca

SEQ ID NO: 14520 - DNA, 201 bp, Homo sapiens
gagatgccactgtttacacatatctctgtctttagttacaggtatggacacatgttttaatgatataatgctttgctttttttaaattgaaaaaacttgcmacagtgggctatggttgtggctgaatagataccagtattatcatttgtgatagctactttattgtatagctctagcataaccaattccctgctgatggat

SEQ ID NO: 14521 - DNA, 201 bp, Homo sapiens
ctatacttatcaaacaacaactgcaactcccctgtatcctttgcaccacagccaccattccactttctgtttctgaatttgactacatactttagatacckcatgtaagtggaatcatgtagtacactatttcactttttgtggctaatttatttcactttctataatgtcttcaaggttcatctgtgcagagcatgatag

SEQ ID NO: 14522 - DNA, 201 bp, Homo sapiens
aatctcggctcactgcaagctccgcctcccaggttcacgccattttcctgcctcagcctcccaagtagctgggactactggtgcccgccaccatgcccggstagttttttgtatttttagtagagacggggtttcaccatgttagccaggatggtcttaatctcctgagctcgtgatctgcccgccttggcctcccaaagt

SEQ ID NO: 14523 - DNA, 201 bp, Homo sapiens
gttctacactctcaaattttttctatttttctttgaaaatatacaaggtttcagtgactagccaattttagaaattagaatttttttcttaaaagtaatcrcttgattctgtaagctgaaaggtgcaaaagcaaaatctcatcactgtgacttcatgctcacccaaggccattacatttttttagtgttactactatctaa

SEQ ID NO: 14524 - DNA, 201 bp, Homo sapiens
gctcctgacctcaggtgatccgcccgcctcagcctcccacagtgctgggattacaggcgtgagccattgtgcccggcccaatcctgttttcagttctttcrgatatatacccagaagtacgattgctgaatagactaggttttataggtaatgctgtcatgtgcactctctttgtatgcttccctgattatcccttgaatc

SEQ ID NO: 14525 - DNA, 201 bp, Homo sapiens
gatattggagactattaattctgagtgaagtaactcaagaatggaaaaccaaacatcatatgttctcactcataactgagagctaagctatgaggatgcartggcataagaatgacacaatggactttggggactcggggaaagggtgggaagcgggtgaaggataaaagactaaaactgggtgcagagtatactgcttgg

SEQ ID NO: 14526 - DNA, 201 bp, Homo sapiens
ttatagaattctacaggatggtcgcggtggcttaagcctgtaatcccagcactttgggaggccgaggcgggtggatcacctgaggtcgggagttcgagacyagcctgactaaaatggtgaaaccccgtctctactaaaatacaaaaaagtagccagctgtggtggtgcatgcctgtagttccagctactcaggaggctgag

SEQ ID NO: 14527 - DNA, 201 bp, Homo sapiens
tatttaaaaataaagttgtcttacgaatgtggaaggaggaaacacaaaatgtatggagggccttttcactttcaaccttgaaatgctaattcagtagcatrtatctttatgggcccaagaaaatctggactctatttacatggttaaaatggaaaaactgctatcttatcctaattattataaataaatctcctctccaat

SEQ ID NO: 14528 - DNA, 201 bp, Homo sapiens
atgaattgtattacctggactatttgtggtagccttctaaaaggttattcctgcccccacattcatttttctaaacttgacaaggtaatctttgtaaaatmgcaatctgattacactttaaaaattgcttccaattccttacagaaaaaagtccaaactcttagcatggcacctctttgacttggcctgtttttacttctt

SEQ ID NO: 14529 - DNA, 201 bp, Homo sapiens
gggcacagccattcaacaagtatctaggaagttctaaactttcccacattttcctgtctttttctaagcccttcaaactgttccagtctctgcctgttacycagttccaaagtcgcttccacattttcaggtatcttgtcagcaacgccccactctactggtaccagtttactgtattagtccattttcatgctgcagata

SEQ ID NO: 14530 - DNA, 201 bp, Homo sapiens
aaagttgtcttacgaatgtggaaggaggaaacacaaaatgtatggagggccttttcactttcaaccttgaaatgctaattcagtagcatgtatctttatgrgcccaagaaaatctggactctatttacatggttaaaatggaaaaactgctatcttatcctaattattataaataaatctcctctccaataaaactgaatg

SEQ ID NO: 14531 - DNA, 201 bp, Homo sapiens
tgaggttgcagtgagctaatattgcacccctgtactccaggcagagtgacagagcaagactttgtctcaaaaaaaaaaaaaaaaagaaatccttttttctytttgaggtggagtcttactctgtcacccaggctggagtgcagtggcatgaacttggctcactgtaacctccgtctcctgggttcaaccgatctcctgcct

SEQ ID NO: 14532 - DNA, 201 bp, Homo sapiens
attgacagcaagatacagaatattacagatgtatgaattatagaaatctaaagatcagggatcattttagcttaatggttcttgatgtgaggtggtacccrcttcttctaaccacacttcacattttatcatctcaggtccaggaagctttttgttgtcacaaaagcttcggactccactgtcctttaataggtaggacca

SEQ ID NO: 14533 - DNA, 201 bp, Homo sapiens
atgggttttcgctatgtttgccaggctggtcttgaactccttacctcaaattatccacccgcctcggcctcccaaagtgctgggattacaggcatgagccmccgtgcctgaccaaaacaaaaaaaaaaaaaagaatttaagtggaaaaaaaagatttaatgaagagggagtgattactgataggtccggtaagatgaagac

SEQ ID NO: 14534 - DNA, 201 bp, Homo sapiens
attcttcctacccatgagcatggaatgttcttcgatttgtttgtatccttttttatttcattgagcagtggtttgtagttctccttgaagaggtccttcaygtcccttgtaagttggattcctaggtattttattcttattgaagcaattgtgaatgggagttcactcatgatttggctctctgtttgtctgttattggtg

SEQ ID NO: 14535 - DNA, 201 bp, Homo sapiens
tcttattattttgagatacatcccatcaatacctaatttattgagagtgtttagcatgaagggttgttgaattttgtcaaaggccttttctgcatctattragataatcatgtggtttttgtctttggttctgtttatatgctggattacattcattgattttcgtatgttgaaccaaccttgcatcccagggatgaagcc

SEQ ID NO: 14536 - DNA, 201 bp, Homo sapiens
tcctggtgtgccatttgctaagaccgttagaaaagcacagtattagggtgggagggacctgatgttccaggtgccatctgtcacccctttgtttgactagwaaagggaattccctgactccttgcggttcccgtgtgaggcaatgcctcacccagcttcggctcctgctgggtgcactgcacctactgtcctgcacccact

SEQ ID NO: 14537 - DNA, 201 bp, Homo sapiens
agctggacgtggtggcccgcacctgtaattccagctactcaggaggctgagcaggagaatcgcttgaacccaggaggtggaggttgcagtgagctaagatygcaccattgcactccagcctgggtgacaagagcgaaactgtcttaaaaaaaaaaaagtctgggtgcagtggctaagccctgtaatcccagcacattggga

SEQ ID NO: 14538 - DNA, 201 bp, Homo sapiens
ttgtaaattcacgggaaattgtaagaaataatgcggagagatactgtggacctttccctagtttcctccagtggtaacatcttagaaaactacagtacaaycaggatattgacacagtcaaaatagagaacatttccatcccaggaggatccctcatgttgccttcttatagccacaaccacttctatcccaccccaacct

SEQ ID NO: 14539 - DNA, 201 bp, Homo sapiens
gaataactctagagcagtcctcgtatgtgattaatcactgaagtcatttcaaaggaaaaatattttccaaaagcctcattgtttacttaaaatttttgtaktatgttaaatatgtacacaccaaaactaggttaaaaaatttcatatacttatagcttttaggaaatattttcaaaatatgaaaaattttcaaaattaaat

SEQ ID NO: 14540 - DNA, 201 bp, Homo sapiens
agtgccaaaagttatgactttagtttgatacataagacctttctattaagactagatgaagccaaggtggacagatcatgaggtcaggagttcgagaccakcctggccaacatggtgaaaccccatcttgcctgtatttccagctacttgggaggctgaggcaggagaaccacttgaacccaggaggcggaggttgcagtg

SEQ ID NO: 14541 - DNA, 201 bp, Homo sapiens
gaaaaaacaggggttgcaatcctagtgtctggtaaaacagactttaaaccaacaaagatcaaaagagataagggcattacataatggcaaagggatcagtrcaacaagaagagctaactgttttaaatatatatgcacccaatacaggagcacctagattcataaagcaaattcttagagacctacaaagagacttagact

SEQ ID NO: 14542 - DNA, 201 bp, Homo sapiens
cacttctaaaacctgtttttacagtgggtttggaaaatttgacaattttgattctcactggtatgtttaaaatttggaaaatttgacaattttgattcttsctggtatgtttaaaaacaataaaaggaatagaacttttcttttgatataggatcacaaaacaattctaaaacctaccgtttttaccattgaaatttatat

SEQ ID NO: 14543 - DNA, 201 bp, Homo sapiens
aaagttatgactttagtttgatacataagacctttctattaagactagatgaagccaaggtggacagatcatgaggtcaggagttcgagaccagcctggcyaacatggtgaaaccccatcttgcctgtatttccagctacttgggaggctgaggcaggagaaccacttgaacccaggaggcggaggttgcagtgaaccgag

SEQ ID NO: 14544 - DNA, 201 bp, Homo sapiens
atgactttagtttgatacataagacctttctattaagactagatgaagccaaggtggacagatcatgaggtcaggagttcgagaccagcctggccaacatrgtgaaaccccatcttgcctgtatttccagctacttgggaggctgaggcaggagaaccacttgaacccaggaggcggaggttgcagtgaaccgagatcatg

SEQ ID NO: 14545 - DNA, 201 bp, Homo sapiens
tgcaaatcagttctatgttcacaatgatatcttcagatagcaagatgaggtctttggtgggtttgtcactgagcctcaggaggagtctgaagaagtagtakaggaacgtgaagaaaagacagcaaacacctcaggtggtacctgatgattctggaactttctgtgatcaggcagttgtcagtaatgacgtggaagaacatt

SEQ ID NO: 14546 - DNA, 201 bp, Homo sapiens
aacccaggaggcggaggttgcagtgaaccgagatcatgccattgtactccagcctgggcaacagagcacgtctccatttagagaaaaaaaaagactagacraagaaacaaaatatggatttatcagaagagtgaacacacagagtccatgccaatagggtgttatttatttatttatttatttatttttattattactatt

SEQ ID NO: 14547 - DNA, 201 bp, Homo sapiens
aggagcccgcttccacgctcggctaatttttgtactctcagtagagatgggttttcaccatgttggccaggctggtctcaaactcttgacctcttaatccrcctgccttggccttccaaattgctgggattacaggtgtgagccaccatacccagccaggatgtaatttaataggaataaattcaaagtcctaagttcaga

SEQ ID NO: 14548 - DNA, 201 bp, Homo sapiens
aagaacatttagaggagccagttgctgaactggagcctgatcctgagccagaaccagaacaagaatgtgtatctgaaatccaagaggaaaagtctgagctrgtattagaagaaactgctcctgaggatgctcagaagagttcttctccagcacctgcagacatatctcagacagtatgggaagacttgaggacattttctt

SEQ ID NO: 14549 - DNA, 201 bp, Homo sapiens
ttctttattacaccttttttactttagatcctataaatagaaaagaatattttaaaaattatttttaggattaacaaaaacattcatgttctattcattasattgtaccactacatatttttaagttctttatttatccaaatatctgtttaaatcatcaatgaaccacactataatcttaaattcaactgaaattttttt

SEQ ID NO: 14550 - DNA, 201 bp, Homo sapiens
aagtaaaatgtaaaggagtcgttttgttttgttattctctctctctcttttctttccctttccttcttttcttttctttcttttcttgatagagtctcgckctgtcatccatgctggagtgcagtgacaagatcatagctcaaattcctgggctcaagcagtcctctgaagcctcccaagtagttgggactacaggcatgc

SEQ ID NO: 14551 - DNA, 201 bp, Homo sapiens
taattagttgggcatcatggtgttcacctgtagtcctagctactagggaaactgggccaggagaatcacttgagcctaggagtttgagggctatctttctrttgttcaagtgtgtttttgaggagcgttttgttttcttcattaagatttcaaatattttctgttaagtattttactttccccttataatgaaaattatat

SEQ ID NO: 14552 - DNA, 201 bp, Homo sapiens
ggaggctgaggcaggagaattgcttgaactagggaggcaggggttgcagtgagccgagatctcgccactgcactccaggtgggcaacagagtgaggttccrtctccaaaacaaaaccaaaccataaaatgatactattttacaatcatcaaatttttggtaaaagaaaaaaaatattgtctttgtcaacaacacccaagag

SEQ ID NO: 14553 - DNA, 201 bp, Homo sapiens
ttaaaaatcactttgaagttttgttctgccagtgaaatttgctttgccctcattcactccagacaatgccagcatttaccccttacctagtcgtgcttccstcttttgacttttcagatcactgggctgagaattccacataagaggtatgcttcacatctttccactaacatggatttccatgaaaaacaaacagaaaac

SEQ ID NO: 14554 - DNA, 201 bp, Homo sapiens
gaggttgcagtgagccgagatcgtgccgttgcactccagccaggaaaacagagtgagactccatctaaaaaaaaaaggttaataacttctgctgcttttcrtttcagttagtttagatcctgttgcattttattctagcttctagagttgatgattagaccagtaccagtcctagttttctctttatggataattgttctt

SEQ ID NO: 14555 - DNA, 201 bp, Homo sapiens
gacacagagatcaccagttacagaaatggtagtctcgaattgatagaatcttgtgttttgccccttccccgtgaccatgtaccaagatctttctcattcaraagcatgttattggcattccttacaaacagcactcaaacaacaactcagttataagtgaaaaacatagaatactaagcaatactaaatatttttagtaac

SEQ ID NO: 14556 - DNA, 201 bp, Homo sapiens
agcactttgggaggccgaggtgggcggatcacaaggtcaggagatcgagaccatcctggctaacacggtgaaaccccatctctactaaaaatacaaaaaamaaaaaaaaaaaaattagccgggcgtggtggtgggcacctgtagtcccagctactcgggaggctgaggcaggagaatggcatgaacccgggaggcggagct

SEQ ID NO: 14557 - DNA, 201 bp, Homo sapiens
gcttataaattcatagacttctagaaggatacataagaaagcaggtccagaggttgcttctcggaaggggcctggggagctgggagaccaggtgacagggkgaagagaaacatttcactgtatattctattgtgcctttttactgttggtccatgtacatgtatggccgttcaagtaaatcaatgaaatatcttttaaaac

SEQ ID NO: 14558 - DNA, 201 bp, Homo sapiens
ccttcaggagctcttttagggcaggtctggtggtgacaaaatctctcagcatttgcttgtctgtaaaggattttatttctccttcacttatgaagcttagtttggctggatatgaaattctaggttgaaaattcttttctttgagaatgttgaatattggcccccactgtcttctggcttgtagagtttctgccaagagat

SEQ ID NO: 14559 - DNA, 201 bp, Homo sapiens
cgctatgttgcccacgttggtctcagattggtacgctaaagtgatcctcccacctcagcttaccaaagtgctggggttataatcatgagccaccttgtccrgtctcttggttttgtttgtttttgtttgtttgtttagatgcagtctcactctgttgcccaggctggagcacagtagcatgataataatagctcactacag

SEQ ID NO: 14560 - DNA, 201 bp, Homo sapiens
gctgagatcgcaccactgcactccagcctggtgacagagcgagactccatctcaaaaaaaaaaggaaaaaggttcactctgataattaatttttttttttwtttttttccaggtgtatggtggctgatgaagtaagtgtttcaatggtttttatgtcttttataagattacacagcttgtttttagtgtctgctattttcc

SEQ ID NO: 14561 - DNA, 201 bp, Homo sapiens
gccttgcttcccagggatgaagcccacttgatcatggtggataagctttttgatgtgctgctggattcggtttgccagtattttattgaggatttttgcakcaatgttcatcagggatattggtctaaaattctctttttttgttgtgtctctgccaggctttggtatcaggatgatgctggcctcataaagtgagttagg

SEQ ID NO: 14562 - DNA, 201 bp, Homo sapiens
gacaaggtcttgctatgttgtccaggctgatctcaaagtcctgcgttcaagcaatcctgcctcagcctcccaaagcacttcgggattatggacataagccmctacacccagcttagtatcttttacataactagacattccttctcattctcttttgctggattcttcccctctcttgacttctcattgttgtagtgctcc

SEQ ID NO: 14563 - DNA, 201 bp, Homo sapiens
cttttcttttctttcttttcttgatagagtctcgctctgtcatccatgctggagtgcagtgacaagatcatagctcaaattcctgggctcaagcagtcctytgaagcctcccaagtagttgggactacaggcatgcacccccacaaccagctaattttatgatcttttgtaagcaacaagatctcgctgtttgccctggct

SEQ ID NO: 14564 - DNA, 201 bp, Homo sapiens
ctgagatcgcaccactgcactccagcctggtgacagagcgagactccatctcaaaaaaaaaaggaaaaaggttcactctgataattaattttttttttttwttttttccaggtgtatggtggctgatgaagtaagtgtttcaatggtttttatgtcttttataagattacacagcttgtttttagtgtctgctattttcca

SEQ ID NO: 14565 - DNA, 201 bp, Homo sapiens
taactatatcttattatgtaaggtataggtaacaactttttcatctagtaaatctgaaactctatacccagttaacatctcctcttttcctcctcccttgkctctatactcttccttcctaggtgatcacatctagtctcttgactaaaatatcatctgttttgctttagtttaatttcagcttcccatctccttacctcc

SEQ ID NO: 14566 - DNA, 201 bp, Homo sapiens
tcctttgagttttgactttctaaagtccacaatagtatatctgattagtagctctaaggcaggctgggaaagtgtctgatatttcttgtgtgtatccattstctatctctccctataggaacttcagactcatatattttcaagcatacccaacatttccacttcttatcttatagccatctcaaagaaaatctgtggatt

SEQ ID NO: 14567 - DNA, 201 bp, Homo sapiens
cattttttaagaaattacagtatttattaacccaaatgaaactcaaattgaagtccaactcaagtgaaaagaaaaaattccaccaccacaaggaaagatacttttgcacagcccagttggctgtcccataagtaagcagtcttgccttggagtccatcaccagggtcactgcctaagatgtggtcagtccaatttccactg

SEQ ID NO: 14568 - DNA, 201 bp, Homo sapiens
actaaatggtatgtgtataattttatcatacagtagattccattcattcactatacttatgtaattgactctacatgcaagtatatatatatatatatatwtttttttttttttttctcgagacggaatctcgctctgtcaccaggctggagtgcagtggcacgatctcggctcactgcaacctctgcttcccgggttcaa

SEQ ID NO: 14569 - DNA, 201 bp, Homo sapiens
ccttctgtttctagtctttatttagagtgtatatggtccattaaattatcacatatcaagcttcattgcttaccagattcccttttccttttttcctatcytgaatctatgttaaggtgtttttattgtttggttattttctcaggtatttttactgaaatggtttgctttagtggtgtaattttggtaatcttgaatagc

SEQ ID NO: 14570 - DNA, 201 bp, Homo sapiens
ttaaatgtagctttacctcactcttagaaaatctggtgtgatatgaaaatgtggatccataaaaggatgaattattaaaggattcatctttctctagcagrttcatcccttattttaaaaattattcgatttgtgaaaaatctagtttatttataattttttagtaataaatttgtggtgttaaactggtgtatagtatat

SEQ ID NO: 14571 - DNA, 201 bp, Homo sapiens
cagtaccagtcctagttttctctttatggataattgttctttctttctggacacttagaagattttttctttatttgtaaaattaatgaattttacaaggrtataatagatatttgtcttttgtctttaatccatcctgaaacttggtttcccttttcacttatccaccaaaagccagcccagagaaatttccctttatta

SEQ ID NO: 14572 - DNA, 201 bp, Homo sapiens
ctattaccagaaggatttttttttttaatagactctgccctttcacccaggctggagtgtagtggtacgatcttggctcactgcaacctctgtctcttggktttaagcaatcttgccacatcagcctcctgaatagctgggactacagggtgcacgccaccacacccgggtaatttttgtttttgttgtgtttttttaagg

SEQ ID NO: 14573 - DNA, 201 bp, Homo sapiens
aggaatgttatggctataccatctgttttgggttttttttgagacagggtcttgctttgtcacccaggttggagtgcagtggcacaatcatggctcagtgyagcctcaactgccttggctcaggtgatcctcccacctcagtctccctagtagctgggactacagggatgcactaccatgtctggctaattctttgttttt

SEQ ID NO: 14574 - DNA, 201 bp, Homo sapiens
tcactgtgttagccagaatggtctcaatctcctgacctcaggtgatccgtccgcctctgcctcccaaagtgctgggattacaggtgtgaaccatcgtgccyggcctaaaacaggatgagctctaaatggctcttcataaattaattaatttgagagtccaaatgactgaaagaggcttacgtttttagtccttgaatatgt

SEQ ID NO: 14575 - DNA, 201 bp, Homo sapiens
gggctcaagtgatccttctgccccgcctcccaaagtgctgggattacaggcatgagccactgcacccatccattgtattcttattctttttattttccacyttagatttagcaacttctgggtgtgttttatgagtaccttatactactgtctgtatttctttacttttttcaaactttgtgatagttatatgatctcttc

SEQ ID NO: 14576 - DNA, 201 bp, Homo sapiens
gactacaggtgcacaccaccatgcccagctaatttttgtatttttagtagagacaaggttttaccatgttggcctggctcatctcgaactcctgacctccrttgatctgtccgccttggcctcccaaagtactgggatgataagtgtgagccaccgcgctcagcctcacttacttatttttaaatttatttttacatatga

SEQ ID NO: 14577 - DNA, 201 bp, Homo sapiens
aatttttgtatttttagtacagacagggtttcgtcatggtggccaggctcgtcttggactcctgacctcaggtgatccacctgcctcggcctctcagagtrctaggattacaggcgtgagcgacctcacccagccctaaacaactttttagaagtagaatcaacatacaataatttaaaggcacatttgataaattttcgt

SEQ ID NO: 14578 - DNA, 201 bp, Homo sapiens; identical to SEQ ID NO: 1769

SEQ ID NO: 14579 - DNA, 201 bp, Homo sapiens
ccagctaattttttgtatttttagtagagacggggtttcaccatgttggccaggatggtctcgatctcctgacctcgtgatccgcccaccttggcctcccraagtgctgggattacaggcgtgagccaccgcgcccggccacaaacacacttctaaagtcagcttggaaggaaaagagtcacagaaaagggcttttctgtt

SEQ ID NO: 14580 - DNA, 201 bp, Homo sapiens
tgcccggccacatctgtgagttttaaacaggtcatatctaatttgaatacactataagatagaaattattcatatactatgaggttatctatgacagtatkttttgttttaaattagtttcccatcagatataaagttggtgcttttctttataatgccatgagcctctcaagtctctcagggaagaatttcattcttaca

SEQ ID NO: 14581 - DNA, 201 bp, Homo sapiens
gaagtctcggggattaagtggaagatgatttaattttttttaaagtttacaattatactgagaaaaaactgacttccttctcttcacaacagccatctcatatttatttatttatttatttatttatttatttatttatttatttttgagacaaagtcttgctctgtcgccaggctggagtgcagtggtgcaatctcagct

SEQ ID NO: 14582 - DNA, 201 bp, Homo sapiens
tcactctattgcccaggattgttcagtggagaggtcatagttcactgcagcctcgaaatcctggtccagtgatccccctgcctcagcctcccaagtagccaggactatcatcatgccaccatgccaggttaattttttattttttgtagagatgggggtctccttatgttgctcaggctggtctcaaattcctcagctcaa

SEQ ID NO: 14583 - DNA, 201 bp, Homo sapiens
attttcttgggcatctgtgaccagtaacaaccttcaacccagtggagctgttccagttactgggatacctccttatgttggtaaagtactagcttcacagycctgtacagagtctaagcctgaatctcagattccaccacagaaacctcaaagggatcaaaggatgtgagaacaacgaagaaatattcctccccaaagggg

SEQ ID NO: 14584 - DNA, 201 bp, Homo sapiens
aagtctcggggattaagtggaagatgatttaattttttttaaagtttacaattatactgagaaaaaactgacttccttctcttcacaacagccatctcatatttatttatttatttatttatttatttatttatttatttatttttgagacaaagtcttgctctgtcgccaggctggagtgcagtggtgcaatctcagctc

SEQ ID NO: 14585 - DNA, 201 bp, Homo sapiens
tccattttcatgctgcagataaaggcatacttgagactgggtagaaaaagagatttaatttgacttaaagttccacatggctggggaggcctcagaatcarcagcaggcagcgaaagacactttctttatatggcagcggcaagagaaaatgagaaggaagcaaaagcggaaacccgtgataaacccatcagatctcatga

SEQ ID NO: 14586 - DNA, 201 bp, Homo sapiens
aagagcatctcttgagcccagaaggctaaggctgcagtgagctgtgatcacaccattgcactccagccttggtgacaaagaaagaacctgcttcagaaagaaaaaaaaagtttttttaagtacaggaagagaggtggttgagggtatggttaaggcattaaattgaaaacaagcagattaagaaagattccttaattaatg

SEQ ID NO: 14587 - DNA, 201 bp, Homo sapiens
ctcccagggcttttatacttttgggcctggaggctctgtacagggagttgccgagcagctactggctcaatagctctggtggcggatggctagagccccakgcttggaggacctacccaatgagcagatatgggaatgggcacccatgtaacagtctggccagttttctgtagggctactaaagtagctgagggcccctcc

SEQ ID NO: 14588 - DNA, 201 bp, Homo sapiens
acaaatgacgtccttcactagtattattcccccttctttcggtatcttttcactgttatctttttctttttcttttccttttttttttttaattctttaakatctagggtacctgcgcaaaacgtgcaggtttgttacataggtatacatgtgccatgttggtttgctgcacccatcaactcatcatttacattaggtatt

SEQ ID NO: 14589 - DNA, 201 bp, Homo sapiens
agcaagattgaaatggtaatttaaaaattgccaacaaaagaaagttcaggaccagatggattcacaactgaattggtaccaattctattgaaactgttccraaagataaagtgggaatcctccctaaatcattatatgaaggcagtatcaccctaacaccaaaaccaggaaaggatataacaaaaaatgaaaactacagac

SEQ ID NO: 14590 - DNA, 201 bp, Homo sapiens
tttcctgctgtcccttgtgggcatttagtggtataaatttccctctacacactgctttaaatgtgtcccaaagattctggtatgttgtgtctttgttctcrttggtttcaaagaacatctttatttctgccttcatttcattatgtacccagtaattcaggagcaggttgttcagtttccacgtagtcgtgtggttttgag

SEQ ID NO: 14591 - DNA, 201 bp, Homo sapiens
tatccttgttaactttctgtctcgttgatctgtctaatgttgacagtggggtgttaaagtctctcattattattgtataggagtctaagtctcattttacrtctctaaggtcttgttttatgaatctgtgtgctcctgtatttggtgcatgtatatttgggatagttagctcttcttgttgaatttgtccctttaccatta

SEQ ID NO: 14592 - DNA, 201 bp, Homo sapiens
gtagtggagcaggggagagagctttttccctatgataacatgttttaattttacaaatatgggaacagcctaaattttccttccttattttttcgcttcctttttttttttgattttttatactgtggtaaataaaatttgtcattttaaccatttttaagtgtacagttagtgtcattacattcacagtgtgttgtgcac

SEQ ID NO: 14593 - DNA, 201 bp, Homo sapiens
ccctctacacactgctttaaatgtgtcccagagattctggtacgttgtgtcttttttctcattggtttcaaataacatctttatttctgcctttatttcaytatttaaccagtagtcattcaggagcaggttgttcagtttccatgtagttgtgaagttttgagtgagtgtcttaatcctgaattctaatttgattgcact

SEQ ID NO: 14594 - DNA, 201 bp, Homo sapiens
ctgtttgccatctttgtgtcagtaccatacttcttcatacttcttagcgtagctttataataaatattctggtatcaggcagtataaatctttcagccttrctctttttcaaaattgtctcagctattattgactctgcattacatataaattgtagaagtcatttatcaattttcacaaaagtgctggatttgtgaatgg

SEQ ID NO: 14595 - DNA, 201 bp, Homo sapiens
aattttgccttttattgttttatgtgatggtttatttcccagtgtatttgcagatgtcttaaattttgttttaataaataatcttaatctgcggatttcgktttttttttttttttttttttttttttaagatggagttttgctcttgttgcccaggctggagtacagtggtgccatcttggctcactgcaacctctgcct

SEQ ID NO: 14596 - DNA, 201 bp, Homo sapiens
catttcaactttggtgaatctgagaattgtgtgtcttggagttgctcttctcgaggagtatctttgtagcattctctgtatttcctgaatttgaatgttgscctgacttgctagtttggggaagttctcctggataatatcctgcagagtgttttccaacttggttccattctccctgtcactttgaggtacaccaatcag

SEQ ID NO: 14597 - DNA, 201 bp, Homo sapiens
atcctgaattctaatttgattgcactgtggtctgagagacagtttattgtgatttctgttcttttacatttgctgaggagtgctttacttccaattatgtrgtcaattttagaataagtgcgatgtgatgctgagaagaatgtatattctgttgatttggggtggagagttctgtagatgtctattaggtccgcttggtgc

SEQ ID NO: 14598 - DNA, 201 bp, Homo sapiens
cctttattttccttccttccttccttcttttttcttttcttttttttttttttttgagacggagtcttgctctgtcacccaggctggagtgcagtggcgcratctcagctcactgcaagctccgcctctcgggttcatgccattctcctgatacaggcgtgagccaccgcgccctccctccctccctccctccctcccttc

SEQ ID NO: 14599 - DNA, 201 bp, Homo sapiens
gattgcactgtggtctgagagacagtttattgtgatttctgttcttttacatttgctgaggagtgctttacttccaattatgtagtcaattttagaataartgcgatgtgatgctgagaagaatgtatattctgttgatttggggtggagagttctgtagatgtctattaggtccgcttggtgcagagctgtcttcaagtc

SEQ ID NO: 14600 - DNA, 201 bp, Homo sapiens
acgttaggtattatttcttctatctaactgtatatttgtacccattaatcaacctcttcatcctcccctccccactacccttcccaaccactagtagccamtaaggtactctgtacctttgtgagattcactttttgagctcccacatatgagtgcgaacatgtgatatttgtctttctgtgcttggcttatttcacttaa

SEQ ID NO: 14601 - DNA, 201 bp, Homo sapiens
tgcactgtggtctgagagacagtttattgtgatttctgttcttttacatttgctgaggagtgctttacttccaattatgtagtcaattttagaataagtgygatgtgatgctgagaagaatgtatattctgttgatttggggtggagagttctgtagatgtctattaggtccgcttggtgcagagctgtcttcaagtcctg

SEQ ID NO: 14602 - DNA, 201 bp, Homo sapiens
ttcccaaccactagtagccactaaggtactctgtacctttgtgagattcactttttgagctcccacatatgagtgcgaacatgtgatatttgtctttctgkgcttggcttatttcacttaacatcatgacctccagttccatccatgttgctgcagatgagaggattttattcttgtttatggctgaataatattcattgt

SEQ ID NO: 14603 - DNA, 201 bp, Homo sapiens
tggtctgagagacagtttattgtgatttctgttcttttacatttgctgaggagtgctttacttccaattatgtagtcaattttagaataagtgcgatgtgrtgctgagaagaatgtatattctgttgatttggggtggagagttctgtagatgtctattaggtccgcttggtgcagagctgtcttcaagtcctggatatcc

SEQ ID NO: 14604 - DNA, 201 bp, Homo sapiens
tttttacaaattgtgctttgcatatattgtgctttgcataaattgtggtttttacaaattgtgctttgcatatattgtggtttttacaaattatgctatayagtatattcaaatatagtatgctatatagtataatcaaatatatatgctatacagtataatcaaatatagtatgctatatttgattatatagcatacttt

SEQ ID NO: 14605 - DNA, 201 bp, Homo sapiens
attgtgatttctgttcttttacatttgctgaggagtgctttacttccaattatgtagtcaattttagaataagtgcgatgtgatgctgagaagaatgtatrttctgttgatttggggtggagagttctgtagatgtctattaggtccgcttggtgcagagctgtcttcaagtcctggatatccttgttaaccttctgtctt

SEQ ID NO: 14606 - DNA, 201 bp, Homo sapiens
gtttactattataattgttttggggtaccatgaatgataccaattcatataagatggtgaacctaatggataaatattatgtgtgttctaactgctccacygactggctcttcctctctttccctctccacaggcctctgtattccctaagacaaaacaatattgaaattaggtcagttaataaccctacagtgggctgta

SEQ ID NO: 14607 - DNA, 201 bp, Homo sapiens
ttctgttcttttacatttgctgaggagtgctttacttccaattatgtagtcaattttagaataagtgcgatgtgatgctgagaagaatgtatattctgttsatttggggtggagagttctgtagatgtctattaggtccgcttggtgcagagctgtcttcaagtcctggatatccttgttaaccttctgtcttgctgatct

SEQ ID NO: 14608 - DNA, 201 bp, Homo sapiens
caaaaaaccaaacaccgcatattctcactcataggtgggaattgaacaatgagatcacatggacacaggaaggggaatatcacactctggggactgttgtsgggtggggggaggggggagggatagcactgggagatatacctaatgctagatgacgagttagtgggtgcagcacaacagcatggcacatgtatacatatg

SEQ ID NO: 14609 - DNA, 201 bp, Homo sapiens
gcatattctcactcataggtgggaattgaacaatgagatcacatggacacaggaaggggaatatcacactctggggactgttgtcgggtggggggaggggkgagggatagcactgggagatatacctaatgctagatgacgagttagtgggtgcagcacaacagcatggcacatgtatacatatgtaactaacctgcacaa

SEQ ID NO: 14610 - DNA, 201 bp, Homo sapiens
tatatataaatatataatataaatatatatttataataatatataataaaacatataatatatattattgtatatatttttatattttatatatatatatrtatatatatatattttttttttttgagattgggtctgggatctcactgtgtttcccaggatgatcttgaactcctggctcctgggccaagtgatcctcct

SEQ ID NO: 14611 - DNA, 201 bp, Homo sapiens
agtctcggggattaagtggaagatgatttaattttttttaaagtttacaattatactgagaaaaaactgacttccttctcttcacaacagccatctcatatttatttatttatttatttatttatttatttatttatttatttttgagacaaagtcttgctctgtcgccaggctggagtgcagtggtgcaatctcagctca

SEQ ID NO: 14612 - DNA, 201 bp, Homo sapiens
gtctcggggattaagtggaagatgatttaattttttttaaagtttacaattatactgagaaaaaactgacttccttctcttcacaacagccatctcatatttatttatttatttatttatttatttatttatttatttatttttgagacaaagtcttgctctgtcgccaggctggagtgcagtggtgcaatctcagctcac

SEQ ID NO: 14613 - DNA, 201 bp, Homo sapiens
aatgtttattaaaatatttctggaagaaaatttttttttaaattatgtattcctggtttcattttgataggctccccccgccttgctataagtaaattagwatatatatattgaataaaaccttttaagttaaacctttgaactgaataaagtattcattattaaaaaggtatgcacattattgtaactgttaatttcttg

SEQ ID NO: 14614 - DNA, 201 bp, Homo sapiens
cccaaagtgttgggattacagcgatgagccactgcacccagcaaagaaaaaaaaaaaaaggagtcttgaataaagatgatagacagcaacatttttttttwaaattttttacttaacttcttgccagtgttccaccctaaaacattacatcctttatcccattgaccctaaaaagtgcttctgaaactcctgttacttctg

SEQ ID NO: 14615 - DNA, 201 bp, Homo sapiens
ccaaagtgttgggattacagcgatgagccactgcacccagcaaagaaaaaaaaaaaaaggagtcttgaataaagatgatagacagcaacatttttttttawaattttttacttaacttcttgccagtgttccaccctaaaacattacatcctttatcccattgaccctaaaaagtgcttctgaaactcctgttacttctgg

SEQ ID NO: 14616 - DNA, 201 bp, Homo sapiens
ggggctgcagcgttcggtcccttttgctcttctgagtgccctgcttcttgtcctgaccctggaacccaaccctgtgctcctggaacttacataccattctyttcctgtcaaacgtgagccttctgtgaaaaacaatgcctggttgaagtttccctgagaaacctgcttgtttcagacacagatctgctaacagcccagatg

SEQ ID NO: 14617 - DNA, 201 bp, Homo sapiens
ttttttgttgtgtgtacccacacacataaagatatacataagacatacacaataaaactgcactattataaaggttctcataaattggaaattggcttccrtcctccactcaggccctggctaaagctcttatcctactgggagaagaggagacatggaggggccggcgaggtcaggtggcaaaagagaaggccccactga

SEQ ID NO: 14618 - DNA, 201 bp, Homo sapiens
atctcactgcagcctcaggatctcaagtagctgggactgcaggcacatgccaccaagcctggctaatttttcctttttttttttttttttttttttttgaratgggtttcactctgtcaccgcagctggagtgcagcggcatgatcacgtctcactgagcctcaacctcccgggctgagcctcccaagtagctgggactat

SEQ ID NO: 14619 - DNA, 201 bp, Homo sapiens
ttttttttttttttttttttgagatgggtttcactctgtcaccgcagctggagtgcagcggcatgatcacgtctcactgagcctcaacctcccgggctgarcctcccaagtagctgggactataagcatgcatcaccacatccagctaattttgtattttttgtagagacagggttttgccatgttgcctagactggactc

SEQ ID NO: 14620 - DNA, 201 bp, Homo sapiens
ttaggtaaaatatagcatttaccctccctgtttttttttttttttttttggagacagagtctcactctgttgcccagtctggagtgcagtggcacagtcayggctcaccgcaacctctgcctcccgggttcaagcagttctcctgcctcagcctccaagtagctgggactacagccgtgtgctgccatgccctgctaatgt

SEQ ID NO: 14621 - DNA, 201 bp, Homo sapiens
gtctgccagcaacaaattctctcagtttttgtttttctgagaatgtctttgtttcaccttcagttttgaagggcagttttgctggatgtgggagtcttggktggcagtattttttctttctacaccatgaatgtcattcggttgccctcttgcctctgttggtctgatgaaaagtcagcccctagtagtatcattgcttcc

SEQ ID NO: 14622 - DNA, 201 bp, Homo sapiens
ccgggctgagcctcccaagtagctgggactataagcatgcatcaccacatccagctaattttgtattttttgtagagacagggttttgccatgttgcctaractggactcaaactcctgggctcaggaaatctacctgcttcggcctcccaaagtgctagggttacagacgtgagccactgtacccagccatttttactat

SEQ ID NO: 14623 - DNA, 201 bp, Homo sapiens
ctcctgggctcaggaaatctacctgcttcggcctcccaaagtgctagggttacagacgtgagccactgtacccagccatttttactattttctttttataragatggggtctcgctatgttgcccaggctggtcttgaactcctgggctcaagtgattctcctacctcagccttccaaagtgctgggattataggtgtgaa

SEQ ID NO: 14624 - DNA, 201 bp, Homo sapiens
tacctcagcctcctgagtagctgggattacaggcatgtgccaacacgctgagctaatttttgtatttttaggagaggcgaggtttcactatgttggccaaratggtctcgaactcttgacctcaagtgatccacccaccttggcctccgaaagtgctgggattacaggtatgagccactgcgccgggccatgcaccacatt

SEQ ID NO: 14625 - DNA, 201 bp, Homo sapiens
ccacccaccttggcctccgaaagtgctgggattacaggtatgagccactgcgccgggccatgcaccacatttttaatccattcatctgccaatggacactytggttgattccacatcttggctgttgtgaacagtgctgcaatcaacatgggagtgcagatatctctttgatatgctgatttcctttcctttggttagaca

SEQ ID NO: 14626 - DNA, 201 bp, Homo sapiens
caattatgtagtcaattttagaataagtgcgatgtgatgctgagaagaatgtatattctgttgatttggggtggagagttctgtagatgtctattaggtcygcttggtgcagagctgtcttcaagtcctggatatccttgttaaccttctgtcttgctgatctgtctaatattgtgagtggggttttaaaagtctcccatt

SEQ ID NO: 14627 - DNA, 201 bp, Homo sapiens
aaccaataatacatctaaaagagtttcacaattgctgtacccgtatcattacaaaaaccaagcttagataataatagggttcaagattgtttttgtttttkttttttttttttgagatggattctcactctgtcacccaggctggagtgcagtgacacgatctcggctcactgcaacctctgcctcccaggttcaagcaat

SEQ ID NO: 14628 - DNA, 201 bp, Homo sapiens
tgcagagctgtcttcaagtcctggatatccttgttaaccttctgtcttgctgatctgtctaatattgtgagtggggttttaaaagtctcccattattattktgtgggagtctaagtctctttgtaggtctctgagaacttgctttgtgaatctgggtgctcctatattgggtgcatgtatatttaggatagttaagtcttc

SEQ ID NO: 14629 - DNA, 201 bp, Homo sapiens
cttgatatttagttgaatttccctgtgaaaccatctgggcctggttctttttaatgtggcagttccttgataattgtctctatgaaaatttgtctgtttayactttctgtttttactgggggtagttttgatatacattatatttttggtaggaatttccctaggaaattgtctaattcaacttgattttcaaatttacat

SEQ ID NO: 14630 - DNA, 201 bp, Homo sapiens
tgtgttttacgtttttgttttgtttttttttttgagatggagtctcactctgtcacccaggatggaatgcaatggcgtgatctcggccactgcaacctctktctcccgggttcaagcaattctcctgcctcagcctcctgagtagttgggattacaggcacccaccactacacctggctaatctttgtatttttagtagag

SEQ ID NO: 14631 - DNA, 201 bp, Homo sapiens
cacttgatgacaacctaatttctttcattgttttgttttctctcctaaaattgaaaagttttctgttacattacccatttaggtgtgctgtttttgttgtyttataatccttattatttggctgactagattgaatttttgcatcagtgaacaaacattttcttcaaaaaatacctggtggttttactataagaagattct

SEQ ID NO: 14632 - DNA, 201 bp, Homo sapiens
tggctaatctttgtatttttagtagagaccggctttcgccatgttggtcagtctggtcttgaactcctgacctcaagtgatccgcctgcttcagcctcccraagtgctgggattacaggtgtcagccactgtgcctggatgtattttactttcttaaacttgagttagtcagggttctctagagggacagaactaatagga

SEQ ID NO: 14633 - DNA, 201 bp, Homo sapiens
tggaatgccactacatacatatccaccagaatgactgcattaaaaaaaaaaaagacaataccagcaaggatgtgaaacagtgttaactgtcttatactatygttagaaggggaaattggcacaactactttggaaaactgtttggcagtgtctacgtatgtgtgttctgagagctagtaatccttcctgtaggtatatcag

SEQ ID NO: 14634 - DNA, 201 bp, Homo sapiens
aagtgatccgcctgcttcagcctcccaaagtgctgggattacaggtgtcagccactgtgcctggatgtattttactttcttaaacttgagttagtcagggktctctagagggacagaactaataggatagatacatatataaaggggagtttattaagtattaactcacatgatcacaaggtcccacaatgggccatcagc

SEQ ID NO: 14635 - DNA, 201 bp, Homo sapiens
acttggctactggtgagacctcacaaagcttttactcatggtggaaggttaggagcaggcatgtcatatggtgagagagggagcaagagagagaggaggcrccagcttcttttgaatgatcagatttcatggtaactaaacgtgtgagaactcacttctaactgtggggagggcaccacacccccatgagccagattcctc

SEQ ID NO: 14636 - DNA, 201 bp, Homo sapiens
gtctgcctctgtcttcacacgccattctcccagagtgtctatgcctcttcccttatagggacactggtcagattgaattaaggttactctaatatgacctyattttagctatttatgtctgcagcaaacctatttttaaataaataatttcatatcctgaaatactagaggttagaacttcaatatatcttttgggagaga

SEQ ID NO: 14637 - DNA, 201 bp, Homo sapiens
gagaaatacacattaagccatcggaagaggaattggaccaagagagacatagttcctacagctcatctaccttaaaggtaatgaaaacctaccatgtaaartaatagaatagcatcacacttaaagaatctaaccttttttctaagtgcttttatatgcaataacttttcagatcacaaatcataaagccaggcgcggtag

SEQ ID NO: 14638 - DNA, 201 bp, Homo sapiens
agacaatatttttttttttttgagatggagtttcgctcttgttgcccaggctggcgtgcagtggcataatcttggctgaccacaacctccgtctcccgggkttcaagcgattctcctgcctcagactcccaagtagctgggattacaggcatgctccaccaccccggccaactttgtgggtttttttttttttgagatgga

SEQ ID NO: 14639 - DNA, 201 bp, Homo sapiens
gttcttttcactccctgaaattaggagagtagtacatatttgtgtcttccacagacgatacagactttaagatgtagaagctcatggttttatagatgaakggatttggaactcttcccttcagggtcaatgtacttgattgtctgaattaaacttggttcccaagttaataactcccaagctaataagtcaatttttgtg

SEQ ID NO: 14640 - DNA, 201 bp, Homo sapiens
tcctcccacctcagcttccccattagttggactgtaggcacatgccaccacacctggggattactaaatttttctatagagacagagtctctctctgttgyccaaactggtcttgaactcctggcctcaagcagtcctgctgcctcggcctcccaaaatgttgggattacagatgtgatctactgtacccaaccaagaaat

SEQ ID NO: 14641 - DNA, 201 bp, Homo sapiens
atactatattttccattttgctagtgaagaaactagattcaatgaatttaaggtttctcagacaaagtggcagaacctatatttgaatcatttttttgacytcagaactagtatcatctccagtgcctacgatgctacgtagagctgtctagtccaggtacagtgttttctgcttataagctcatgattttagattcatag

SEQ ID NO: 14642 - DNA, 201 bp, Homo sapiens
tgccactacatttcacccttggtgacagagtgacactgtctcaaatataaaacaacaacatcatcaagaaaatcagcaaaaaggtggacaaaaagacgttwcaaaggagaatgtaatctattaaaaagaatgtaatagattgtaaaaaatgtaattaatagaatgtaatctattaggccgggcatggtggccctcacctat

SEQ ID NO: 14643 - DNA, 201 bp, Homo sapiens
cttccacttgtagatgtattgtacccaagaaaattgagaatatatggtgacaaaaacatgtatacatttggtctttcactatttttcatgttatcctaaargtagaatgaagccaaatagtcatggacaaacaaatgtgctgaatccataaaatggactagtatccatgaaatggaatactaatacactgtatcacatgta

SEQ ID NO: 14644 - DNA, 201 bp, Homo sapiens
tccagccacagcaagaccctatctaaaaaacaaacacacaaaaaaaccccaagaatttttaacatgttagaacaaaaacaacaacaaaaacagattctaawggacattttagaactgaaaaataacatctggagttaattctagtagatttaatagattagatacaagaatacagaattagagaactagaagacaaaaata

SEQ ID NO: 14645 - DNA, 201 bp, Homo sapiens
agattcttaaatgagaatgagatccagaggcagtcagtagagtgataatttgaggttctttaggaatagactgttccccaatcctgtactttgtatccacrtaaaaaattctttgggcaggcatctagtaatgtaacaatctaacttcagatgaatcagtaagtgtggctttctggttcctttggaaagatcaccacagct

SEQ ID NO: 14646 - DNA, 201 bp, Homo sapiens
gaacctgggaggcggaacttgcagtgagccgagatcgcgccactgcactccggcctaggggacagagtgagactccgtctcaaaaaaaaaaaaaaaaaaargaaaaaaatcaatagttggcctcagtagtagtatggagtcatttggagggtgaactagaaggttgaaaaagaaactcttgtagttagaaagtgtaagaag

SEQ ID NO: 14647 - DNA, 201 bp, Homo sapiens
tggcctttgttgtctcatgtccagtgtcttaaaacccattgtttattttgcatttttttttgtttctttgttttcagatttagatagagggttaaatccastctgttactctcttggctagaactctttctatagttttaagagtctcgtaaaagcagtatgagaaggctctgaagctcaattgcttcagtttaaatgccg

SEQ ID NO: 14648 - DNA, 201 bp, Homo sapiens
ggagtacaaacgcatgatctcagctcactgcaacctccgcctcccctgttcaagcaattctcctgcctcagcctcccgagtagctgggactacaggtgtgygccactatgccgggctaatttttttgtatttttcatagagacggggtttcatcattttggccaggctagtctcgaactcctgacctcaggtgacccaccc

SEQ ID NO: 14649 - DNA, 201 bp, Homo sapiens
tgtggtttttgtttttagttccgttgatgtggtgaatcatatttattgatttgcacatatatatatatatatatatatatatatatatatatatatatatwtttttttttttttttttttttttttttttttttgagacagagtctctctctgtcacgcaggctggagtgcagtggcaccatcttggctcgctgcaagctc

SEQ ID NO: 14650 - DNA, 201 bp, Homo sapiens
ctgttaaggcgcttttcaagtgttcatctcctttccaccttctggaatttacttgcttttttctccttctgtcctgtgggtttatgcccccgccgcccccytgccccccgccttttttaaagaaagataccagaagaatatggcattctagaagccaagtaaaaatattttcaaccagcagacaatgaacaactgtagcaa

SEQ ID NO: 14651 - DNA, 201 bp, Homo sapiens
tggtggctaggttcccaaggcaagtgtcccaagagagaaagaaagggagagacagagggccagccaagttgaagccatattaccttcaatgacctagcctyagaagtcacacagcattggccaggcacggtggctcacgcctgtaatcccatcgctttgtgggggccggggcgggtggatcacctcaggtcaggagttcaa

SEQ ID NO: 14652 - DNA, 201 bp, Homo sapiens
ctttccatgtttagtgcttccttcaggagctcttttagggcaggcctggtggtgacaaaatctctcagtatttgcttgtctgtaaagtattttatttctcyttcacttatgaagcctagtttggctggatatgaaattctgggttgaaaattcttttctttaagaatgttgaatattggcccccactctcttctggcttgt

SEQ ID NO: 14653 - DNA, 201 bp, Homo sapiens
aaaatctctcagtatttgcttgtctgtaaagtattttatttctccttcacttatgaagcctagtttggctggatatgaaattctgggttgaaaattctttyctttaagaatgttgaatattggcccccactctcttctggcttgtagagttggttggtttaatccacagatacaaaacctgtggaaatagagggctgagtt

SEQ ID NO: 14654 - DNA, 201 bp, Homo sapiens
acccaggttggtgtgcagtggcatgatagggcttaccacagtctcaacctctggggctcaagcagtcttcccacctcagcccccaagtagctgtgactacwggtgtgcaccatcacgcccagataattttttgtaattttaatagagttggggtttcaccatgttacctaggctggtcttgaactcttagactcaagcagt

SEQ ID NO: 14655 - DNA, 201 bp, Homo sapiens
ctccttataggtttggtaggcttaaagcaaacgaaataaaaactacataaaattagaataattactagaggttaagaagtgtgtgtgtgtgtgtgtgtgtrtatgtgtgtgtgtgttggtgaggggtggtatgaagagaggttagctaatggatacaaacagatagaaggaataagttctaatgttcaatagtaaagtagg

SEQ ID NO: 14656 - DNA, 201 bp, Homo sapiens
tctgtttgttttctgagacttttattattcatatattttcatatattgccctcatgacctgatcccctacctaattattttacattttatatttgtttttyttttttgttttttttttgagacagagtctcactgttgcccaggctggagagcagtggtgtaatctcggctcactgcaacctccacctcccaggttcaagc

SEQ ID NO: 14657 - DNA, 201 bp, Homo sapiens
ttcgtcaaatgatagtgatgttgagcattttttcatgttttttggcaacttgtatgtcttttgagaagtgtctgttcatgccctttgcccacttttcaatggggttgttttctccttgttgattcgttccagttccttatagagtctagatattagtcctttttcagttgcatagtttgcaaatattttctcccattctgt

SEQ ID NO: 14658 - DNA, 201 bp, Homo sapiens
ccttataggtttggtaggcttaaagcaaacgaaataaaaactacataaaattagaataattactagaggttaagaagtgtgtgtgtgtgtgtgtgtgtgtrtgtgtgtgtgtgttggtgaggggtggtatgaagagaggttagctaatggatacaaacagatagaaggaataagttctaatgttcaatagtaaagtagggt

SEQ ID NO: 14659 - DNA, 201 bp, Homo sapiens; identical to SEQ ID NO: 1762

SEQ ID NO: 14660 - DNA, 201 bp, Homo sapiens
tcaaatgatagtgatgttgagcattttttcatgttttttggcaacttgtatgtcttttgagaagtgtctgttcatgccctttgcccacttttcaatggggttgttttctccttgttgattcgttccagttccttatagagtctagatattagtcctttttcagttgcatagtttgcaaatattttctcccattctgtaggt

SEQ ID NO: 14661 - DNA, 201 bp, Homo sapiens
tatacaggaaaacatttgataaaatgcaatacctgttcatgattaaaaaaaaaacaaaaaacaaaactctaagcaaactaggaatggaacttccttaataygataagtgatatctacatcaggtgccttcaatgactatcatatgctttctttctgaggttgggaacaagagaataatgtccagtattcaacactgtactg

SEQ ID NO: 14662 - DNA, 201 bp, Homo sapiens
caaatgatagtgatgttgagcattttttcatgttttttggcaacttgtatgtcttttgagaagtgtctgttcatgccctttgcccacttttcaatggggttgttttctccttgttgattcgttccagttccttatagagtctagatattagtcctttttcagttgcatagtttgcaaatattttctcccattctgtaggtc

SEQ ID NO: 14663 - DNA, 201 bp, Homo sapiens
aaaaacaaggatagatgagactgtattaaaattaagaacacctcttcaacccaaggcatcattaagaaagtgaacaggccaggcgcggtggctcacacctrtaatcccagcactttgggaggcccagacaggcagatcacgaggtcaggagttcgagaccagcctggccaacatagtgaaaccccatctctactaaaaata

SEQ ID NO: 14664 - DNA, 201 bp, Homo sapiens
tgttgagcattttttcatgttttttggcaacttgtatgtcttttgagaagtgtctgttcatgccctttgcccacttttcaatggggttgttttctccttgttgattcgttccagttccttatagagtctagatattagtcctttttcagttgcatagtttgcaaatattttctcccattctgtaggtcatctgtttactct

SEQ ID NO: 14665 - DNA, 201 bp, Homo sapiens
cttgagtacagctgcatgaatcacacaaggtaacaggtgccgagcaaggtctgcaggtttctggattgccagatagtgcagcacctgaaggaggtgcagcrcacacaaatgatcagcgcaggtgtcaaaggatgaagcagccacttacagaagtgcaaatcctcagccactcatcttaatccttaacaagacagcactcca

SEQ ID NO: 14666 - DNA, 201 bp, Homo sapiens
aacctcatctctttcaaacttcatcccatgtgccttttctctttgctgatcttcttgtaataaattatagccacgagcatgattatgggctaagtcttatragtcttcctagaaaatcactaaacctgggagtggtcttgagaacacatcaaatggggaggattctgtagaataactatactactataaattgttggtgag

SEQ ID NO: 14667 - DNA, 201 bp, Homo sapiens
aggctggagtgcaatggtgcaatcatagttcactgcaacctctgcctcccggacccaagccatcctcccacctgagcctcccaagtagctgggtctacagycatacaccaccacgctcggctaatttctgtattttttgtagagacggggttttgtcatgttcctcaggctggtcttgaacttttgagcttaagcaatctg

SEQ ID NO: 14668 - DNA, 201 bp, Homo sapiens
caaaaatttatatggttggtaataccaattgtttataagaaattgaggctgggcacagtggctcatgcctataatcccagcactttgggaggccgaaacaraggattgcttgaggtcaggagtttaggaccagcttgggcaacatagcaagactccatctttacaaaaattttaaaagtgaaaaaatcagcctggcatggt

SEQ ID NO: 14669 - DNA, 201 bp, Homo sapiens
gacacaatcatagctcactgcagccttaacctcccgggctcaattgattcttctacctcagcctcccgagtagctgggactacaggtgtacgctaccccastcggctaatttttttttttttttttttggtagaaatagggtttaccatgttgcccaggctggtcttgaattcctgggctcaagcaatccaaccccacctc

SEQ ID NO: 14670 - DNA, 201 bp, Homo sapiens
aaaaaaaaaaagatctgtgattgttaaagttctgctgtattggaaccaagttgttcccagaatccagtgatgtttgagtggcttcgggtgtgaaaattggrgggctttgaagacacggaaacatactaattattatccaacgaatgtgtaaatataactttgcatgaattctaagattgcttttttgttgttaacaggagc

SEQ ID NO: 14671 - DNA, 201 bp, Homo sapiens
tagctgggactacaggtgtacgctaccccagtcggctaatttttttttttttttttttggtagaaatagggtttaccatgttgcccaggctggtcttgaaytcctgggctcaagcaatccaaccccacctcggcctcccaaagtgttgggattacaggcgttgagcctctttcatttttactagattacaattttcacaat

SEQ ID NO: 14672 - DNA, 201 bp, Homo sapiens
tgtgtaaatataactttgcatgaattctaagattgcttttttgttgttaacaggagcagttaaaagaaaaatacataaacaaaataataaagttttctcawtggaaacttgcttaaagtccaaaatctgctcttttctcatttctttagttttgctcagcatttaaaattcatttttaaactctttgttttcagtttctgc

SEQ ID NO: 14673 - DNA, 201 bp, Homo sapiens
accaagaatctttgggatctaacttcttcaaccaatttactttagggtcctttttactgtaggtggtggatctgcctggttctcaatttgacaccctaagmgatcatactcaagaatagtacagatgtgtggaatacgccaatacctttaactacagacatcatgttctcaagataaaagcctttaaaacaaaaagccatc

SEQ ID NO: 14674 - DNA, 201 bp, Homo sapiens
ttggttatttctgaatatgttgtcatattaaatggatataaagcactgaagtcactttagaaaaatttaggagttacttaaaatgttactgtatgacccarcgattttattcttaggtatatacccaagagaactgaaaacaggccgggagcaatggctcacgcctgtgatcccagcactttgggaggctgaggcgggcag

SEQ ID NO: 14675 - DNA, 201 bp, Homo sapiens
ctgtctaatctttttttggggggttcctatttttttccagtcaccagctctctggcaaactgtgtaatcttttgtgtctggcttttctttccaggttcatscttgttgtataaatcagtagtttgttccttcttattgccgagtattttgttgtatgggtaaactacattttgtttataaatttactaattgatggagatt

SEQ ID NO: 14676 - DNA, 201 bp, Homo sapiens
cacggctcaccgcaacctctgcctcccgggttcaagcagttctcctgcctcagcctccaagtagctgggactacagccgtgtgctgccatgccctgctaawgtttttttttttttttttttttttttggatttttagtagagacagggtttcgccatattggccaggctggtcttgaattcctgacctcaggtgatccacc

SEQ ID NO: 14677 - DNA, 201 bp, Homo sapiens
tagggtcctttttactgtaggtggtggatctgcctggttctcaatttgacaccctaagcgatcatactcaagaatagtacagatgtgtggaatacgccaayacctttaactacagacatcatgttctcaagataaaagcctttaaaacaaaaagccatcgtaggtatcaagtcaacatgaaattggaatgcaaaattaata

SEQ ID NO: 14678 - DNA, 201 bp, Homo sapiens
ttgttacataggtatatatgtgccatgttgttttgctgcacccatcaactcatcatttacattaggtatttctcctaatgctatccctcccccagcccccmaccccctgacaggccccactgtgtgatgtgtcccccccgacactcccattgtccgtgtattctcattgttcaactgccacttatgagtgagaacatgcag

SEQ ID NO: 14679 - DNA, 201 bp, Homo sapiens
atataagactcaagaatattactaaaggacatataaaaagataaataaaaagacatactcctgtttgatgaaaagacttggtattataaagattttactgktttttttgagacggaatctcactctgttgaccagcctggggtgcaatggtgcggtcttggctcattgcaacctccacctcctaggttcaagcaattctcc

SEQ ID NO: 14680 - DNA, 201 bp, Homo sapiens
cataggtatatatgtgccatgttgttttgctgcacccatcaactcatcatttacattaggtatttctcctaatgctatccctcccccagccccccaccccytgacaggccccactgtgtgatgtgtcccccccgacactcccattgtccgtgtattctcattgttcaactgccacttatgagtgagaacatgcagtgtttg

SEQ ID NO: 14681 - DNA, 201 bp, Homo sapiens
ctagagtattaaaaaaagggggttgggcgcagtagctaacgcctgtaatcctagcactttgagaggccaagccaggtagatcacctgaggtcaggagttcragaccagtttggccaacatggtgaaaccccatctctaataaaaatacaaaaattagctgggcgtggtggcgggcacctgtaatcccagctactcaggagg

SEQ ID NO: 14682 - DNA, 201 bp, Homo sapiens
ctacacgaaccaaaacagcatggtgctgctacaaaacaggcacatagaccaatggaacagaatagtgagctcataaataaggctgtacatctatgactatstgacaaaaatcaagcgatgggggaaaaactccctgttcaataaatggtgctgggataactggctagacatatgtagaagattgaaactggacctgttcct

SEQ ID NO: 14683 - DNA, 201 bp, Homo sapiens
ttgggcgcagtagctaacgcctgtaatcctagcactttgagaggccaagccaggtagatcacctgaggtcaggagttcgagaccagtttggccaacatggkgaaaccccatctctaataaaaatacaaaaattagctgggcgtggtggcgggcacctgtaatcccagctactcaggaggctgaggcaggagaatcactaga

SEQ ID NO: 14684 - DNA, 201 bp, Homo sapiens
gtgctgggattacaggcatgagccaccacggccagccttttttttaaacaatttttaagcctttacctcggctcacggtatgcagttcagtgttatatacmttcataatgtcgtacaactatttaaatttggtatatatttttcatttccaccagcaaatacatgaggttctagtgactttgcatccttgccagcatttgg

SEQ ID NO: 14685 - DNA, 201 bp, Homo sapiens
ttttgttgttttttttttcagatggagtcttgctgtgtcacccaggctggagtgcagtggcacgctcactgcaacctctgcctcccgggttcaagcgattmtcctgcctcagcctcccaagtagctgggattacaggcatgcaccaccacacccagctaatttttgtatttttagtagagacgggttttaccacattggtg

SEQ ID NO: 14686 - DNA, 201 bp, Homo sapiens
atatatatttacatatacacattgagacagggtttcactgtatcattcagtctggaatgcagtggtgcgatcatggatcactgcagcctcgactctctgakctcaagtgatcctcccacttgagcctcccgagtagctgggattataggtatgtgccaccacactcagctcatttttattttatttatttatttttttttt

SEQ ID NO: 14687 - DNA, 201 bp, Homo sapiens
acagcaaaccacatggcactcatttacctgtgtaacaaactgcacatcctgcatatgtatcctggaacttaaaattaaattaaattatttttatttttatktttaaaatatatttatttttgagatggagtcttgctctgtcgcccaggctggagtgcagtggtgcgatctcagcacactgcaacctccgcctcccaggtt

SEQ ID NO: 14688 - DNA, 201 bp, Homo sapiens
taatgtcctctttgtcacttctgattgtgtttatttggatcttctctttttttctttatcagcctagctagtggtctatctatttattctttcaaaaaacyaatccctggattcattgatcttttgtatggtttttttttcgtatctcaatttccttcaattcagctctgactttggttatttcttgtcttctgctatcct

SEQ ID NO: 14689 - DNA, 201 bp, Homo sapiens
tcaaatccattgactttatatgctccatatttttctaagctttcttgttctgatacctcatcatttgtatgcagtcttttgtataattggtaccttttgtrtgaaacctttttctggaagcttttaggatctcctgttttcctcattgttctgaaattttgtaggagtggctttagggttagagttattttcagactttgt

SEQ ID NO: 14690 - DNA, 201 bp, Homo sapiens
tctcctgttttcctcattgttctgaaattttgtaggagtggctttagggttagagttattttcagactttgtgctgggcactggttcgacccattgaatawagaaactaatttcctttcatttggggattttatgtatttattcatttattttgagatagagtcttgcactgtcacccaggctggagtgcagtggcacaat

SEQ ID NO: 14691 - DNA, 201 bp, Homo sapiens
ttgagcattttttcatgttttttggcaacttgtatgtcttttgagaagtgtctgttcatgccctttgcccacttttcaatggggttgttttctccttgttgattcgttccagttccttatagagtctagatattagtcctttttcagttgcatagtttgcaaatattttctcccattctgtaggtcatctgtttactctgt

SEQ ID NO: 14692 - DNA, 201 bp, Homo sapiens
tgagcattttttcatgttttttggcaacttgtatgtcttttgagaagtgtctgttcatgccctttgcccacttttcaatggggttgttttctccttgttgattcgttccagttccttatagagtctagatattagtcctttttcagttgcatagtttgcaaatattttctcccattctgtaggtcatctgtttactctgtt

SEQ ID NO: 14693 - DNA, 201 bp, Homo sapiens
acacagcacacccagctgtcaactacagcagacatctactactactcatgcatccatggctcaacaggtgacatatgatgtcatttaatgggagaaatgamcaacaaaaacctagctcttttactgggaattatgatgcaaaaaaaaaaaaaagtgttcatggcttgaaaaatagaatttaggaataggtgcctaacagtt

SEQ ID NO: 14694 - DNA, 201 bp, Homo sapiens
ctggtgtgttgtgtctttgttgtcgttggtttcaaagaacatcttgatctctgccttcattttgttatgtacccagtagtcattcaggagcaggttgttcmgtttccatgtagttgagcggatttgagtgaatttcttaatcctgagttctagtttgattgcagtgtggtctgagagagagtttgttataatttctgttct

SEQ ID NO: 14695 - DNA, 201 bp, Homo sapiens
tgcgtgctgggataaccactgctctcttcaaagctgtcagacaagaacatttaagtctgcagaggattctgctgccttttgtttggcaatgccctgccccsgaggtggagtctacaaaggcaggcaggcctccttgagctgcagtgggctccacacagttggagcttccaggctggtttgtttacctactcaagcctccgc

SEQ ID NO: 14696 - DNA, 201 bp, Homo sapiens
caagcctccgcaatggcgggcgcctctcccccagccttgctgccgccttccagttggatctcagactgctgtgctagcaatgagcgaggctctgtgggcgkaggaccctccgagccaggtgcgggatataatctcctggtgtgccatttgctaagaccgttagaaaagcacagtattagggtgggagggacctgatgttcc

SEQ ID NO: 14697 - DNA, 201 bp, Homo sapiens
catggtggcgggcgcctgtttacccagctactcgagaggctgaggcaggagaatcgcttgagcctggaaagcagaggttgcagtgagccgagatcgtgccrttgcactccagccaggaaaacagagtgagactccatctaaaaaaaaaaggttaataacttctgctgcttttcgtttcagttagtttagatcctgttgcat

SEQ ID NO: 14698 - DNA, 201 bp, Homo sapiens
tagagacagggtccatcatgttggccaggctggtcttgaactcctgacctcaagtgatccacccaccttggctttccaaactgctgggattacaggtgtargccaccgtgcccgaactatattcatctttattattagtattcccatggttttactacattattactgcaaataatctttttttatttgtcagtcatcttc

SEQ ID NO: 14699 - DNA, 201 bp, Homo sapiens
tttatttctttctcctgccttattgccctggccagaacttccaacactatgttgaataggagtggtgagaaagtgcatccgtgtcttgtgccagctttcawagggaatgcttccagtttttgcccattcagtatgatattggctgtgagtttgtcataaatagctcttattattttgagatacatcccatcaatacccaat

SEQ ID NO: 14700 - DNA, 201 bp, Homo sapiens
cgccaccatgcccggctagttttttgtatttttagtagagacggggtttcaccatgttagccaggatggtcttaatctcctgagctcgtgatctgcccgcyttggcctcccaaagtggtgggattacaggagtgagccaccgtgcccggccactttgtgtttttagtagagatggggtttccccatgttggtcaggctggt

SEQ ID NO: 14701 - DNA, 201 bp, Homo sapiens
gaatatgtattctgcattgagacttagaaagtcagctttgtgtggaagggatttgagaaaccctcacctatttatcaatagttcagttctaaaagatttgkggttttgaataaccttaggctaaattggagtaaggggtgcttctactccattcattgattagactgcatttagagtacagtttaattttgaatttatcca

SEQ ID NO: 14702 - DNA, 201 bp, Homo sapiens
tatgtattctgcattgagacttagaaagtcagctttgtgtggaagggatttgagaaaccctcacctatttatcaatagttcagttctaaaagatttgtggktttgaataaccttaggctaaattggagtaaggggtgcttctactccattcattgattagactgcatttagagtacagtttaattttgaatttatccattc

SEQ ID NO: 14703 - DNA, 201 bp, Homo sapiens; identical to SEQ ID NO: 1758

SEQ ID NO: 14704 - DNA, 201 bp, Homo sapiens
tgtgtggaagggatttgagaaaccctcacctatttatcaatagttcagttctaaaagatttgtggttttgaataaccttaggctaaattggagtaaggggkgcttctactccattcattgattagactgcatttagagtacagtttaattttgaatttatccattcattctgaaagtattttaggatgcctcttacatgct

SEQ ID NO: 14705 - DNA, 201 bp, Homo sapiens
cacaatactggctcattgcaacctctgcatcccagtttcaagtgatacacttgcctcagcctccccaggagctgggattacaggtgccttccaccatgctyggctaatttttgtatttttagtagagatagggtttcaccatatcggccagtctggtattgaatgcctgacctcaagtggtctgcccacctcggcatccca

SEQ ID NO: 14706 - DNA, 201 bp, Homo sapiens
ctcacctatttatcaatagttcagttctaaaagatttgtggttttgaataaccttaggctaaattggagtaaggggtgcttctactccattcattgattaractgcatttagagtacagtttaattttgaatttatccattcattctgaaagtattttaggatgcctcttacatgctaagccatgtagtagccatcagata

SEQ ID NO: 14707 - DNA, 201 bp, Homo sapiens
tttattttttatttttttgagacagggtctcactttgtcgccaggctagagtgcagtggcacgatcttggctcactgcaacctccgcctgggttcaagcarttctcctgtgttagcctccctagtagcagggattacaggcacctgccagcacatccggctaatttttgtatttttagtagaagacagggtttcaccatgt

SEQ ID NO: 14708 - DNA, 201 bp, Homo sapiens
ggagtaaggggtgcttctactccattcattgattagactgcatttagagtacagtttaattttgaatttatccattcattctgaaagtattttaggatgcytcttacatgctaagccatgtagtagccatcagatatgcattagagaacaagacccacatagtccagccttcactgagttttcaagtcaaatactaaccta

SEQ ID NO: 14709 - DNA, 201 bp, Homo sapiens
gtgcttctactccattcattgattagactgcatttagagtacagtttaattttgaatttatccattcattctgaaagtattttaggatgcctcttacatgytaagccatgtagtagccatcagatatgcattagagaacaagacccacatagtccagccttcactgagttttcaagtcaaatactaacctagttgaatatt

SEQ ID NO: 14710 - DNA, 201 bp, Homo sapiens
ctaatccctattcctcaggagtgccccagatactggcaactctggaggcagaaagttactaatttgttgtgtagccttctagaaatatcctctataagttwtatatatatatatatatatatatatatatataaatctaagatatatatatgtatcttacgtaaaatctaaaatgtacacaaaaggtacatatatatggag

SEQ ID NO: 14711 - DNA, 201 bp, Homo sapiens
tactatcttaggacattttttgatatcagtaactaaaatacataatttttattggctatatgattatattttatatatgatactatgccatgtgttttagwtgtattatctttaattcctttaacaatcctacaaggcagatgatagtatgtccattttatagatgaggaagctgtatttggaaaggttaagctgtatttg

SEQ ID NO: 14712 - DNA, 201 bp, Homo sapiens
tggaattatagttgcccgccaccacacctggctaacttttatatttgtatttttatttttcatttatttattatttatttttatttcattttatttatttwtttttttgagacagagtctctgttgcccaggctggagtgcagtggcaccatctctgttcactgcaacctctgccttccaggttcaagcgattcttctgcc

SEQ ID NO: 14713 - DNA, 201 bp, Homo sapiens
tgccccagatactggcaactctggaggcagaaagttactaatttgttgtgtagccttctagaaatatcctctataagttatatatatatatatatatatayatatatatataaatctaagatatatatatgtatcttacgtaaaatctaaaatgtacacaaaaggtacatatatatggagagttaaaggtacatatatatg

SEQ ID NO: 14714 - DNA, 201 bp, Homo sapiens
tgattatattttatatatgatactatgccatgtgttttagatgtattatctttaattcctttaacaatcctacaaggcagatgatagtatgtccattttayagatgaggaagctgtatttggaaaggttaagctgtatttggaacggttaagtaacttgtcaaatcacataactaaacagtgaaaaaacaagaatataaac

SEQ ID NO: 14715 - DNA, 201 bp, Homo sapiens
ttgtgtagccttctagaaatatcctctataagttatatatatatatatatatatatatatatatataaatctaagatatatatatgtatcttacgtaaaayctaaaatgtacacaaaaggtacatatatatggagagttaaaggtacatatatatgtatatggcgagagagcgagttaaagtttccaaaatcaaaacaaat

SEQ ID NO: 14716 - DNA, 201 bp, Homo sapiens
tcctaatcttatgtaaaatccaaaatgtacacaaaatagtattgtaacatcatgaaaactaagaaaaggaaaactttggttgaaaataagaaaaaaaaagsctaggtgcggtggctcaggcctgtaatcccagcattttgggaggttgaggcgggtggatcacgaggtcaggagatcgagaacatcctggctaacatggtg

SEQ ID NO: 14717 - DNA, 201 bp, Homo sapiens
agctactcgggaggctgagacaggagaatggcgtgaacccgggaggcagagattgcagcgagccgagatcgcaccactgcactccagcctgggtgacagarcgagactccgtctcaaaaaaaaaaaaaaaaaaaaaaaaaaaaaagagagaatccttatttttcattactttggcaagtgacaggtatatatagttaggaa

SEQ ID NO: 14718 - DNA, 201 bp, Homo sapiens
gtattagggtgggagtgacccaattttccaggtgccatttgtacccccttcccttggctaggaaagggaattccctgatcccttacgcttccaggtgaggygatgccttaccctgcttaggctcacgctcaatgcactgcatcctctgtcctgcacccactgtcccacaatccccagtgagatgaacccagtacctcagtt

SEQ ID NO: 14719 - DNA, 201 bp, Homo sapiens
gcagagattgcagcgagccgagatcgcaccactgcactccagcctgggtgacagaacgagactccgtctcaaaaaaaaaaaaaaaaaaaaaaaaaaaaaaragagaatccttatttttcattactttggcaagtgacaggtatatatagttaggaaaaccttcattgtcaactctcatctatctcagcctctttgtagtgt

SEQ ID NO: 14720 - DNA, 201 bp, Homo sapiens
taatagctccttttggacttttttcctgtatattctgaggctattatgacatacaatgcatgttgatatttgaaactaaagctaattaagccctagatttwaaaaaaaaacctctaaatgcattaaacatttgagtctgtgattcttattcttgggccagaagtttgtttaaaataaaaactacaaaacaatagtatagtc

SEQ ID NO: 14721 - DNA, 201 bp, Homo sapiens
tgatcctgtcattataatgttagctggttattttgctcattagttgatgcagtttcttcctagcctcgatggtctttacattttggcatgattttgcagcktagtttggctggatatgaaattctgggttgaaaattcttttctttaagaatgttgaatattggcccccactctcttctggcttgtagagtttctgccgag

SEQ ID NO: 14722 - DNA, 201 bp, Homo sapiens
aaagagagaaattttaaagctgggtgtccgggggagacatcacatgttggcaggttctgtgatgccccctgagccgtaaaaccagcaagtttttattagcrattttcaaaaggtagggagtgtacgaataggctgtgggtcacagagatcacatgcttcaagggcaataaaatatcacaaggcaaatgggtagggcaaggt

SEQ ID NO: 14723 - DNA, 201 bp, Homo sapiens
ttggaaaatttgacaattttgattctcactggtatgtttaaaatttggaaaatttgacaattttgattcttgctggtatgtttaaaaacaataaaaggaayagaacttttcttttgatataggatcacaaaacaattctaaaacctaccgtttttaccattgaaatttatattgtggtataggttttaaatgtctagaatg

SEQ ID NO: 14724 - DNA, 201 bp, Homo sapiens
tgctcattgctagcacagcagtctgagatcaaactgcaaggtggcagcgaggctgggggagggtgccccccattgccaaggcttcagtaggtaaacaaagyggccgggaagctcgaactcggtggagcccaccacagctcaaggaggcctgcctgcctctgtaggctccacctctgagggcagggctaagacaaacaaaag

SEQ ID NO: 14725 - DNA, 201 bp, Homo sapiens
agatctaaaatcgacaccctaatatcacagttaaaagaactagagaagcaagagcaaacacattcaaaagctagcagaaggcaggaaatagtttaactaakatcagagcagaactgaaggagatagagacacaaaaaaccaaaatcaatgattcaaaaaatcaatgaatccaggagctggttttttgaaaagatcaacaaa

SEQ ID NO: 14726 - DNA, 201 bp, Homo sapiens
tccaggagaacttccccaatctagcaaggcaggccaacattcaaattcaggaaatacagagaacgccacaaagatgctcctcgagaacagcaactccaagrtacacaattgtcagattcaccaaagttgaaatgaaggaaaaaatgttaagggcagccagagagaaaggtcgggttactcacaaagggaagcccatcagac

SEQ ID NO: 14727 - DNA, 201 bp, Homo sapiens
atcgcatattctcactcataggtgggaattgaacagtgagaacacttggacacaggaaaggggacatcacacaccggggcctgttgtggggtgaggggagkggggagggatagcattaggagatatacctaatgttaaatgatgagttaatgggtgcagcacaccaacatggcacatgtatacatatgtaacaaacctcca

SEQ ID NO: 14728 - DNA, 201 bp, Homo sapiens
gagcccaggagatcgaggctgcagtgcactatggttgtgcctgtgaatggccactgtattctagcctgggcaacatagtgagaacccatctcttggggggaaaaaaaagaatcactcactttttaggccatttcaagaccctaggagggagttttggcacttttcacaggatcatatgtccctgtcaaatttatagaagta

SEQ ID NO: 14729 - DNA, 201 bp, Homo sapiens
ctcagctcactgcaacctccacctcctgggttcaagcaattctccttcctcagcctcccaagtagctgggattccaggcacgtgcctccatgcctggcaawtttttttttaatacttttagtagagacagggtccatcatgttggccaggctggtcttgaactcctgacctcaagtgatccacccaccttggctttccaaa

SEQ ID NO: 14730 - DNA, 201 bp, Homo sapiens; identical to SEQ ID NO: 1766

SEQ ID NO: 14731 - DNA, 201 bp, Homo sapiens
tggacaacagagtaagtgagaccctgtctcaaaaattaaaaaataaataaagtaaaataaaataaaattcattaattaaaacatttgactggcacagtggstcatgcctgtaatgccagcagtttgagaggttgaggtgggaggattacttgaggccaggagttagagaccagtctggccaacatggtgaaaccccatctc

SEQ ID NO: 14732 - DNA, 201 bp, Homo sapiens
attctagtttattgagtatttgagagtttttaactcatgttttttttgaatcaattttatttataatccttattgatcatcaaattgtccctcttttgacmgatgggatgatctccaattactttgtaatttacattctactcttttcatgatgatacctttattccactttcagagcactttgatagttcagtatttagg

SEQ ID NO: 14733 - DNA, 201 bp, Homo sapiens
aatcttgtctagtctataatattcttcttggatgataaaccagaactaaacattctgttacatttgcaaggcactattatttgatataagaacagagtgtygtaaattttcccccaattctatcatgtgtcaaactgtttcattgttaaacttatgtggttggaaagcaaaatactacaaccattttggaaaacagtttga

SEQ ID NO: 14734 - DNA, 201 bp, Homo sapiens
ctgagactttgctgaagttgcttatcagcttaaggagattttgggctgagacgatggggttttctagatatacaatcatgtcatctgcaaacagggacaayttgacttcctcttttcctaattgaatgccctttatttccttctcctgcctcattgccctggccagaacttccaacactatgttgaataggagtgatgagc

SEQ ID NO: 14735 - DNA, 201 bp, Homo sapiens
gtaaattttcccccaattctatcatgtgtcaaactgtttcattgttaaacttatgtggttggaaagcaaaatactacaaccattttggaaaacagtttgawaatttgtttataattgtttataaagttaaacttacaagacctgcaaaacactaatgaaaaataaaagaagacctaaatgaatggagtggtataccatgtt

SEQ ID NO: 14736 - DNA, 201 bp, Homo sapiens
cgatggggttttctagatatacaatcatgtcatctgcaaacagggacaacttgacttcctcttttcctaattgaatgccctttatttccttctcctgcctsattgccctggccagaacttccaacactatgttgaataggagtgatgagcgagggcatccctgtcttgtgccagttttcaaagggaatgcttccagttttt

SEQ ID NO: 14737 - DNA, 201 bp, Homo sapiens
tttatttgcgtagaggtgtttgtagtattctctgatggtagtttgtatttctgtgggatcggtggtgatatcccctttatcattttttattgcgtctattwgattcttctctctttttttctttattagagttgctagtggtctatcaattttgttgatccgttcaaaaaaccagctcctggattcattaattttttgaag

SEQ ID NO: 14738 - DNA, 201 bp, Homo sapiens
aattgtgttccttgctctagaatttctttttaaagtatgaataactctcttctagaaaaacttcatgcagccctattcttgaaattctaaaactctgtgaycatgttgtaagacgtgaaattcagtatatcagaaaaccagtttactaatccttacctaatcctcatccatgtttacttttggagactgcagtgcttatat

SEQ ID NO: 14739 - DNA, 201 bp, Homo sapiens
atattgtgtcataatgtaattattttcatttaaaatagttactagtgcctatacaaaaatggattattagtgtcttcctaatctatcatcaggatggaaarcagatgagctgtaatttcattcctctggatataaaattagacctttgggaagatttaccagcaagctttcagctgaaacaatatcgctcactggtaagaa

SEQ ID NO: 14740 - DNA, 201 bp, Homo sapiens
cttctctctttttttctttattagagttgctagtggtctatcaattttgttgatccgttcaaaaaaccagctcctggattcattaattttttgaagggttytttttttgtctctatttccttccgttctgctctgattttagttatttcttgccttctgctagcttttgaatgtgtttgctcttgcttttctagttctttt

SEQ ID NO: 14741 - DNA, 201 bp, Homo sapiens
tctttttttctttattagagttgctagtggtctatcaattttgttgatccgttcaaaaaaccagctcctggattcattaattttttgaagggttttttttytgtctctatttccttccgttctgctctgattttagttatttcttgccttctgctagcttttgaatgtgtttgctcttgcttttctagttcttttaattgt

SEQ ID NO: 14742 - DNA, 201 bp, Homo sapiens
atatctttgtgagcactaggtattgccatctttttcattttagccgttattgtcggtatgtagtggcatctcatcgtgcttttaatttttcttttcccgaygactgatggtgttgagcatgttttttggtgccttttgtctattcattttcttttgtgaagtatctgttcatattgagtccatatttatatggggtaataa

SEQ ID NO: 14743 - DNA, 201 bp, Homo sapiens
aattttgttgatccgttcaaaaaaccagctcctggattcattaattttttgaagggttttttttttgtctctatttccttccgttctgctctgattttagytatttcttgccttctgctagcttttgaatgtgtttgctcttgcttttctagttcttttaattgtgatgttagggtgtcaattttgggtctttcctgcttt

SEQ ID NO: 14744 - DNA, 201 bp, Homo sapiens
tcatgcctgtaatcccagcactttgggaggccgaggcaggtggatcacttgaggtcaggagtttgagaccagcctgaccaacatggcaaaaccccatctcyactaaaaatacaaaaattagctgggcgtggtgttgcacacctgtaatcccagctactcgggaggctgagacaggagaatcacttgaacccaggaggtgga

SEQ ID NO: 14745 - DNA, 201 bp, Homo sapiens
attgaactacctctatgtggcatgacatccacttttatgattttatccacctgcatgtccatgattgttctctgatacctaaatccaattgtctctctctytttttttttggagacagagtctcactctgtcacccaggctggagttcagaggcaaaagttggctcgctacaacctctgcttcctgagttcaagcgattct

SEQ ID NO: 14746 - DNA, 201 bp, Homo sapiens
tgaaatcttcagagtttcagtagtagtaccatctccttttatttttcctctattcttctttcttctcctctgtattttttcccaagagagttgtattgttyatgataacgtcattactgagatattttttaagtacatggattttcttttctaggagaatgtcgaccagtaaagtgacagttctgggttatggtctcttaa

SEQ ID NO: 14747 - DNA, 201 bp, Homo sapiens
ctggattcattaattttttgaagggttttttttttgtctctatttccttccgttctgctctgattttagttatttcttgccttctgctagcttttgaatgkgtttgctcttgcttttctagttcttttaattgtgatgttagggtgtcaattttgggtctttcctgctttctcttgtgggcatttagtgctataaatttcc

SEQ ID NO: 14748 - DNA, 201 bp, Homo sapiens
aatcttagggggaaggcatttagtctttcaccattaaatatgatgttattgcggctgggtgcggtggctcacacctgtaatcccagcactttgggaagccraggcaggcagatcacgaggtcaggagatcaagaccatcctggctaacacggtgaaaccccgtctctactaaaaaatacaaaaaattagccaggcatggtg

SEQ ID NO: 14749 - DNA, 201 bp, Homo sapiens
catacttattgtactgcctgcagaaccatgagccaactaaactgcttttctttataaattactgagcctcaggcatttctttttcttttttttttatactytaagttctagggtacatctgccaacgtgcaggttagttacatatgtatacatgtgccatgttggcgtgctgcacccactaatttgtcatttaacattaga

SEQ ID NO: 14750 - DNA, 201 bp, Homo sapiens
atgtactctaaccattcataacttatatcatctaaaatgactgcataatacagtattctattgagcagatctctactgtagtttacttaaccattcccatrctgattaatatttatctaaatttttttgcttttatatatcatgccaccaagcacattttttgtaaacaaacctgttttctacattttgaggtcattcctt

SEQ ID NO: 14751 - DNA, 201 bp, Homo sapiens
gccccagtgtgtgatgttccccttcctgtctccatgtgttctcattgttcagttcccacctatgagtgagaacatgcagtgttcagttttttgtccttgcratagtttgctgagaatgatggtttccagtttcatccatgtccctacaaaggacatgaactcatcactttttatggctgcatagtattccatggtgtatat

SEQ ID NO: 14752 - DNA, 201 bp, Homo sapiens
tttggagatactgtcctatttctccactttccttgcaatgcagaagcactctatagagaaacacttaaaaatcatgcaagatgatgctcttcaattttccmcctagacttaatattcatgattcttggtgaaccaatccttactatgaacatggttgcaaaatgaagacttccaactccaacatatcctctacatttacca

SEQ ID NO: 14753 - DNA, 201 bp, Homo sapiens
aggtttgctttactgatgggacagcattaaccctgctaacacctgtgttggggaagccttcttaccatgtccctcggtggcagggagggagcctacacacytattcagggtaatttgctcacctggactaacccccaatggggatttcagcctcctacttgagtccctaagaggacaggccattgcttgtgtttttttccc

SEQ ID NO: 14754 - DNA, 201 bp, Homo sapiens
ccactatctatttcttttaggtctagggccttattcttgttgctctgcatggttcttcagtcctaaggttctttgttggtggcttctgtagacaccttcartgtagcatgtgtttttatcactcatcactgtatgtttgactttctctttgtaaattttcattgaacattgtaaattacctttactttttcttcagactgg

SEQ ID NO: 14755 - DNA, 201 bp, Homo sapiens
ggaaaagaaaggactcaaatgttactactacagaaagccaccaaaccacaatgataaaaaataagagagaaagaaaggaacaaatgatacagaaaacaacrataaaacaattaacaaaatggcaatcctcacatgtaaaacataacgttaaatgttaatggattgaattattcactttaaagatacagactggctgaatgg

SEQ ID NO: 14756 - DNA, 201 bp, Homo sapiens
gaggcaggagaatcgcttgagctcaggaggtggaggttgtagtgagctaagatggtgccactgcactccaacctgggtgacagagcgagactcccatctcaaaaaaaaaaaaaacaaaccctggtttgaagtcagaagcgttgacaataaataggaatctggcatctaattcctaggattcttgaaggaaaagaaaagaga

SEQ ID NO: 14757 - DNA, 201 bp, Homo sapiens
agctgggcatggtggtgcgtgcctataatcccagctactcgggaagctggggcaggagaattgcttgaacccaggaggcagaggttgcggtggggtgagayggtaccactgcactccaacctgggcaacaagagtgaaactctgtctcaaaaaaaaaaaaaaaaataaacatattaattgggcatggtggcatgtgcctgt

SEQ ID NO: 14758 - DNA, 201 bp, Homo sapiens
ttgcttgaacccaggaggcagaggttgcggtggggtgagacggtaccactgcactccaacctgggcaacaagagtgaaactctgtctcaaaaaaaaaaaawaaaataaacatattaattgggcatggtggcatgtgcctgtactcccagctacttgagaggctgaggtggaaggatcacttgagcccagaaggtcaaggct

SEQ ID NO: 14759 - DNA, 201 bp, Homo sapiens
gacaagcaaatgctgagagattttgtcaccaccagacctgccctaccagagctcctgaaggaagcactaaacatggaaaggaaaaaccagtacaagccactgcaaaaacatgccaaattgtaaagaccatcgaggctaggaagaaactgcatcaactaatgagcaaaataaccagctaacatcataatgacaggatcaaat

SEQ ID NO: 14760 - DNA, 201 bp, Homo sapiens
ggaaaaaccagtacaagccactgcaaaaacatgccaaattgtaaagaccatcgaggctaggaagaaactgcatcaactaatgagcaaaataaccagctaasatcataatgacaggatcaaattcacacataacaatattaaccttaaatgtaaatgggctaaatgctccaattaaaagacacagactggcaaattggataa

SEQ ID NO: 14761 - DNA, 201 bp, Homo sapiens
aaaactgctcaactacgtggaaactgaacaacctgctcctgaatgagtattgggtacataatgaaatgaaggcagaagtaaaggtgttctttgaaaccaaygagaacaaagacacaacataccaaagtctctgggacacattcaaagcagtgtgtagagggaaatttatagcactaaatgcccacaagagaaagcaggaaa

SEQ ID NO: 14762 - DNA, 201 bp, Homo sapiens
ctcttttcttctttattagtcttgctagcggtctatcaattttgttgttcttctcaaaaaaccagctcctgtattcactgatttttttgaagggttttttktgtgtctatgtccttcagttctactctgatcttagttatttcttgccttctgctagatttggaatgtgtttgctcttgcttctctacttcttttaattgt

SEQ ID NO: 14763 - DNA, 201 bp, Homo sapiens
caagagagttgtattgttcatgataacgtcattactgagatattttttaagtacatggattttcttttctaggagaatgtcgaccagtaaagtgacagttstgggttatggtctcttaaccgcagatgcaaagactttgatagatgcactgaataatcagaacttcaaagtagttatagtggatgaatcacactacatgaa

SEQ ID NO: 14764 - DNA, 201 bp, Homo sapiens
tgttttttgcttgtttgcttacttagctttctttgtatataatactgaatacagaatgcttgcttaaggaaaaagaacatatatgagaaccttttagatcrtttcttgtctgtggttaaaaaaccctagttggggccgggcgcagtggctcctgcctgtaatcccagcactttgggaggccaaggtgggcagatcacgagg

SEQ ID NO: 14765 - DNA, 201 bp, Homo sapiens
ggaaacttccagctgaactctaataatttcgacctagtgcaaattttcctggacaaaaacctggggagggggatggtgctcaaggagaatgggaagtgcakatacaagcacagaagaagctataggcagagcaggggaggcttgtagcctggggcaagagctgcctggatgtaaactcagtgctttccgtggagcacagtg

SEQ ID NO: 14766 - DNA, 201 bp, Homo sapiens
taattgaacaagtagaataaagaacttcagagatcgaagacaaggctttcaaattaatgcaatctgacaaagacaaagaaaaaagaatttttaggatggcygaataggaacagctccagtctacagctcccagcgtgagcgatgcagacgacgggtgatttctgcatttccaactgaggtaccgggttcatctcactgggt

SEQ ID NO: 14767 - DNA, 201 bp, Homo sapiens
ccctaactcatcttatgaggccagcatcatcctgataccaaagcctggcagagacacaaaagaaatgagaattttaaaccaatatgcttgatgaacactgmtgcaaaaatcctcaataaaatactggcaaaccgaatccagcagcacatcaaaaagcttatccaccatgatcaagtgggcttcatccctgggaagcaaggc

SEQ ID NO: 14768 - DNA, 201 bp, Homo sapiens
gagagtgtttagcatgaagggttgttgaattttgtcaaaggccttttctgcatctattgagataatcatgtggtttttgtctttggttctgtttatatgcyggattacgtttattgattttcgtatgttgaaccagccttgcttcccagggatgaagcccacttgatcatggtggataagctttttgatgtgctgctggat

SEQ ID NO: 14769 - DNA, 201 bp, Homo sapiens
gaaatatacttctctatagactcatgtgcatgctcaattaattagtcatatattgtatatcatttaagtgggttaaagagcagtgtaaataaaacatggcycctgcccctcaagaatgttccatctagcagattcagaggcttgcccatccgtggcacaatgtatcctgacagtcacagctggcctcctctgggcaggcat

SEQ ID NO: 14770 - DNA, 201 bp, Homo sapiens
ttgtggaatgatattttaggagtaacggatttttcaagaagaagaagaaagaaagactgaatttccttgcttattttgcatgtacagactggatttttttyctaacagccatttccccaaaggaatgtgtcttgcgtattactgacatttggtacgtttcattcattggaatatttcttactttctgtgtgtttcaaaagc

SEQ ID NO: 14771 - DNA, 201 bp, Homo sapiens
ccatgttggccaggctggtctcgaactcctgggctcaagcgatccacctgcatcagcctcccaaagtgctgggattacagtcatgagccatcacacccagstaataatactcttaaataaaatgtttgataaatattttcttttaaaatattttaggctctattattaacatttatttattttttaatttagatgggtcta

SEQ ID NO: 14772 - DNA, 201 bp, Homo sapiens
atgccagtgtggtttcatattagtagttaagtagaggtcaggcacctgattttgttcaaataaatcctgccaagggtgtttttgctttttttttttttttwaaagtatttgtgaattatgaccactaatcacaattaactataaaacacgttgtgtttctagaccagtacaatccaacagaaatataatacaagccatata

SEQ ID NO: 14773 - DNA, 201 bp, Homo sapiens
gaggcgggcggatcagctgaggtcgagagttcaagaccagcctgaccaatatggagaaaccccatctctactaaaaatacaaaattagccgggcgtggtgrcacatgcctgtaatcccagctactcaggaggctgaggcaggagaatcgcttgaacccgggaggcggaggttgtgctgagctgaaattgattgcatctttg

SEQ ID NO: 14774 - DNA, 201 bp, Homo sapiens
taaatatataatataaatatatatttataataatatataataaaacatataatatatattattgtatatatttttatattttatatatatatatgtatatrtatatattttttttttttgagattgggtctgggatctcactgtgtttcccaggatgatcttgaactcctggctcctgggccaagtgatcctcctgcctca

SEQ ID NO: 14775 - DNA, 201 bp, Homo sapiens
caggcctgcagtcacttgacttcatcttggggacaatgagagaaggatccccaggccaaacttgagggcttctgtcctcagcacataaaagcagtctgttytgtagacaggctgatcagagagaaagggggcaggcgttttcatcctccatgacttctcctaaatttgccaatgggataagtcactctgcttcctttaggg

SEQ ID NO: 14776 - DNA, 201 bp, Homo sapiens
tcctgatgtatttttccccatgattttcctgtataaacatacatgattgcacaatgcaaaaccaacaaacacttcttgcagtatatgttgaaaattgctgwtcttgtattcttattgcagctaaatgaaatgataagaaacccaggggaaggacatttctggcaggtggatcacatcaagccagtgtatgggggaggagga

SEQ ID NO: 14777 - DNA, 201 bp, Homo sapiens
tcttgactctttatccaatttgccagtctgtgtcttttaaatggagcatttagtccatttacatgtaaggttaatattgttatgtgtgaatttgatcctgycattatgatgttagctggttattttgctcattagttgatgcagtttcttcctagtctcgatggtctttacattttggcatgattttgccacggttggtac

SEQ ID NO: 14778 - DNA, 201 bp, Homo sapiens
ctccctcaaatcattgactagggtctttccagcagtagcttctagctattttctggaaactggcctctggtacaccttaaaaatattgttaattattccayatttgctaaagtgtttatatttcatggtctctctgctctaacacatctgccttccctgcaactagatgtcatcattagattggagagccgccaaacacct

SEQ ID NO: 14779 - DNA, 201 bp, Homo sapiens
gacagacaaaaaagtcaatgctcttgagctctttacagtaaataggttgtgtttactcataggatacagaatcatggatatcaaacatcaaaaataaattrtaaaaataatgtctcattttctgttgcatattattagcctgtctctcattccaccatttgttcttttgaactggaaaattgtgggctcctagtcactgca

SEQ ID NO: 14780 - DNA, 201 bp, Homo sapiens
tcaaaatacactttgtcttctggttctcattttctgtttttaaaaccctgtgttattaaaggtatgtttctggtacttattttaaaaagagtgatgatgayaaaacactttataataaggcataatcagatggttatatgcatttaaatatacaataataacattaaaatgtaattgacataaaataagagtgacgatgaa

SEQ ID NO: 14781 - DNA, 201 bp, Homo sapiens
ttctcctctgtattttttcccaagagagttgtattgttcatgataacgtcattactgagatattttttaagtacatggattttcttttctaggagaatgtygaccagtaaagtgacagttctgggttatggtctcttaaccgcagatgcaaagactttgatagatgcactgaataatcagaacttcaaagtagttatagtg

SEQ ID NO: 14782 - DNA, 201 bp, Homo sapiens
tatcccattgcccctcaaagctaggaagcttttgagttcatttagaattcacagaaatactttcccaaagtgcatttttcaagggaataaaatggttgaaraaattgttggaggtggggccagagaaggaggaaatttgggaactaaaagggcaagtaaaagaactctaaaacaatttactgtgctttaactacgactact

SEQ ID NO: 14783 - DNA, 201 bp, Homo sapiens
agctactcaggaggctgaggcaggagaatcacttggacctgggagacagaggttgcagtgagctgagatcgcaccactgcactccagcctggtgacagagygagactccatctcaaaaaaaaaaggaaaaaggttcactctgataattaatttttttttttttttttttccaggtgtatggtggctgatgaagtaagtgtt

SEQ ID NO: 14784 - DNA, 201 bp, Homo sapiens
ccctaactcatccctatacaaaaagtaaaggcaaccatatctattttagaataactacatatttccttaaatgtattatctgatttctacatatgggtgtrtatgtaagttgactatttaaattactgtctattttctggttaaaacaatgtcatgtaagatttgcaggtacccaggttagcccaaaatagtctaatgaat

SEQ ID NO: 14785 - DNA, 201 bp, Homo sapiens
tagaccccagagctctgcaagtgtgacccaccttaaaagactccatatctgagagcagacaggcactctgcatgcgtgctcgaaggtgagccccctctgcygatgtacctaatttagctaaaacttcagactgctcttctagcagatcttctgtcataggtgctggttcctgtgaagcacaaaaggacaaggctcataaac

SEQ ID NO: 14786 - DNA, 201 bp, Homo sapiens
ttattttttctctacaatgaacatgcatcacttttaattatcctgcaagtaccaagcaagaatctcacactgagatttagggttgaataacaacctgtaaygtagtattgtataatggttaagagcttgggctccagaaactatatgctatgtgcttgaatcccagctttgtgaccttgggcaatcactcaaccctcattg

SEQ ID NO: 14787 - DNA, 201 bp, Homo sapiens
gtttctttaaacagtctatatctttatctttaaacataaacactttttttttcttttgagacaagagtcttgctctgttgcccaggctggagtgcagtggygcaatctcggctcactgcaacctcccactgctgggttcaaatgattctcctgcctcagcctccccagtagctggaactacaggtgtgcgccactgtgccc

SEQ ID NO: 14788 - DNA, 201 bp, Homo sapiens
agtggaaaccacgatctgccatccaaaattcccaaggtgatttttaaaataaaaatatagtaagctattaaactagaaatatatagaacctctagaaattyagtgcatttaaaacattttaacattgaactccacatcaacttacatagtcttcactctctgatggaggattattattatctgttgaagtagttccatcta

SEQ ID NO: 14789 - DNA, 201 bp, Homo sapiens
gaatatgttatattttcactgtgttcattacgtatagaaattttagtgatgcaagttattgttcttccaatttgttaaacagttaaggttgatcattgagscttatatatagcactttaattgattacctgagatatataatcaaagcaaggtgcaaattagataccctttcagtgcctttattaaacttctgaaattagt

SEQ ID NO: 14790 - DNA, 201 bp, Homo sapiens
tttgggtggggacacagagccaaatcacatcaatgggcctcttcccacatctgtattgggaattggacaactgagaatatacataaaggctcccaactttycatgtagagtagctagggatggttatcaatacaagtcttaactctttgtactgaaacattttaaagccatttttttcctgtatccattgattaatctaac

SEQ ID NO: 14791 - DNA, 201 bp, Homo sapiens
aacgcatcttaaaaattatttttgccaactgaggagaacacttggcaagattctgacactacatcaaacttacttccaatttcttgtcttctggattgggraagtgcaaaactttactggaatgggatattatctgctttatgatcttcttaactgaagaaatgttttcgagactttctattttagaaaagattgaagcca

SEQ ID NO: 14792 - DNA, 201 bp, Homo sapiens
aggctatgtatgtgtatatacactcacacacatatatgtgttcattgcattgaaaaatgtaattttaatacaacaaattatgacaaattattatttatagmacactatcatcaatattcactttcatttccaaaattcaactggatttctaatcttgctatctgaacaattctaaatttcaaactaggccaggcgttggct

SEQ ID NO: 14793 - DNA, 201 bp, Homo sapiens
attctgattttgaaatgttagcacctaatgtgaatttcccaagcactctgaggccaaagcagatccttctgtaaaccagactgtgagtttgcaacttccaccctaaggcgaacagtgtgacatggatccctgtgcctccacattgcttcacctgccaccactaccagtattagccagctctgaaaacattgagggctctgg

SEQ ID NO: 14794 - DNA, 201 bp, Homo sapiens
cctaagacaatgccaagtagttttctaaagtggctatactattttacattccctatggcaacatatgacggttccagtttctcctcattcttatcagcgcttttttttttgtctttttgattatagccattctaataatgtgtattacattgtggctttaatttgcatttccatgtaagtaatgatgttgaacagcttttc

SEQ ID NO: 14795 - DNA, 201 bp, Homo sapiens
ggttggctgagataggaggattgcttgagtccagaaggtcaaggctgcagtgagctgtgatggtgccactgcactccagcctgggcaacagagcgagaccstatctctaaataaaatgtaattttgtaatgtgcttaatttaaaaagaatcacccctcagccactgtgtgcccactaaaatattggatgaattcctgccag

SEQ ID NO: 14796 - DNA, 201 bp, Homo sapiens
tgcattgccgtggtgtgagttggttttactacctcaggtaaaatgataaaatacatcccattttaatgtaggttatcattgattaaatataaaatgtgtayatatggactggcctaaataaaggctactttaaatggtcatctttaattattccaaatatgcaagttacagatatttgttctagaaatttcattccagttc

SEQ ID NO: 14797 - DNA, 201 bp, Homo sapiens
tggtctcaaactcctgagatcaattgatctgcctgcttcagcctcccaaagtgctggaattacaagcatgagcctctgtgtgtgtcctacattagtttttrtaagtgtgtctatcaggcaaggtaagtttcttctataaaaagtgatatttttatattgggtaggatggaagctttgcagctgagaaagtgacttctgccc

SEQ ID NO: 14798 - DNA, 201 bp, Homo sapiens
taaaaatgtgattcaggaatttagaaatcaatccaagacaatgaataaaaataagaagctatgcatgaagataatgataaatgtagaaataaatagggttytcatgtgtaaattgtagagagatgaaggaaattttgcatggccagaaccttgggaaacattcttttagaaagcaaaaaaaaaaaaaaaggaaaaaaaaaa

SEQ ID NO: 14799 - DNA, 201 bp, Homo sapiens
ttcctagtctcatgtgtttttgtgaaaatcactaagccaattaaaccaagctgtgatcaaatgaggagagatagtactttgtaaatggaaaagtatcttawaacctttgttgctgttgtcagtaaataaatactcacaacagatataaggaagttacagaggatggtagcttcaaatgtagccattataaactgaaggaaa

SEQ ID NO: 14800 - DNA, 201 bp, Homo sapiens
gccaccgtgcccggccacatctgtgagttttaaacaggtcatatctaatttgaatacactataagatagaaattattcatatactatgaggttatctatgmcagtatgttttgttttaaattagtttcccatcagatataaagttggtgcttttctttataatgccatgagcctctcaagtctctcagggaagaatttcat

SEQ ID NO: 14801 - DNA, 201 bp, Homo sapiens
ctttttttggttggtaaactattaattattgcctcaatttcagagcctgtttttggtctattcagagattcaacttcttcctggtttagtcttgggagggygtatgtgtcaaggaatttatccatttcttctagattttctagtttatttgtgtagaggtgtttgtagtattctcctatggtagtttgtgtttctgtggga

SEQ ID NO: 14802 - DNA, 201 bp, Homo sapiens
tataatcctttgggtatatacccagtaatgggatggctgggtcaaacgttatttctagttgtagatcccttaggaatcgccacgctgatttccacaatggytgaactagtttacagtcccaccaacagtgtaaaagtgttcctatttctccacatcctctccagcacctgttgtttcctgactttttaatgatcgccattc

SEQ ID NO: 14803 - DNA, 201 bp, Homo sapiens
gcataaatagagatacaattttctacttaaatctattaaggaagcaaattatataaacagacttctaaataatcatcctcatatttgatcaacatgtattrttttcttaaaatgatattagagtctgtttacttccgattttgcattaaatttcttaagtattactggtctgctatttttaaaaatatgctatctttacca

SEQ ID NO: 14804 - DNA, 201 bp, Homo sapiens
agatacaattttctacttaaatctattaaggaagcaaattatataaacagacttctaaataatcatcctcatatttgatcaacatgtattgttttcttaaratgatattagagtctgtttacttccgattttgcattaaatttcttaagtattactggtctgctatttttaaaaatatgctatctttaccaggtttaggta

SEQ ID NO: 14805 - DNA, 201 bp, Homo sapiens
gaattgtgtgtcttggagttgctcttctcgaggagtatctttgtagcattctctgtatttcctgaatttgaatgttggcctgacttgctagtttggggaarttctcctggataatatcctgcagagtgttttccaacttggttccattctccctgtcactttgaggtacaccaatcagatgtagatttggtcttttcacat

SEQ ID NO: 14806 - DNA, 201 bp, Homo sapiens
aggagcttctcaaaacgtatcctctttgttaagccatagggactgtattagttctgtcttagtattctgatttttctccttaaaggaaactaatgaattgmatattctgacttttcttatctttcatttatactactttctcttcaattccttttactcctatatctcattttcattttctgggctcttttcccacttttc

SEQ ID NO: 14807 - DNA, 201 bp, Homo sapiens
aaatgattctgattatatacaataaatttaacactgataaaaataattgtaatctaacctactatctttattgcagttttgtcaactgatcccatatgtgkcttttttttttttttttttttttttttgagacagggtctttctctgttggcccagactggagtgcagtggtgcgatcttggctccccacaacctccgcct

SEQ ID NO: 14808 - DNA, 201 bp, Homo sapiens
atttttagtacagacagggtttcgtcatggtggccaggctcgtcttggactcctgacctcaggtgatccacctgcctcggcctctcagagtgctaggattwcaggcgtgagcgacctcacccagccctaaacaactttttagaagtagaatcaacatacaataatttaaaggcacatttgataaattttcgtgtgtgtgtg

SEQ ID NO: 14809 - DNA, 201 bp, Homo sapiens
cgtctatgacagtgagttcctaaatcataagaacagtaatttgcattctagtattagagactcaaacctcaattaccttttctgcttcccgtgtatcatcraagagtctcctttgccttctagcaggaattggcttagctgtttcccaggcttctacccacatattgcttggaatcttcatccgggcactcagttctcctt

SEQ ID NO: 14810 - DNA, 201 bp, Homo sapiens
gattttcatcttgactctgggtaagaattttttaatcgattctttttaaggttcacttgccaaattaaaagtgggggcattggtcttgcttgctgggcagytaatgtgatgccgaagtgatagaggcccatatagcaatgaccacaaaagagaagttcgcaatattaaaggcatctattttttcattgaaatgacataaaa

SEQ ID NO: 14811 - DNA, 201 bp, Homo sapiens
atttaccctccctgtttttttttttttttttttggagacagagtctcactctgttgcccagtctggagtgcagtggcacagtcacggctcaccgcaacctytgcctcccgggttcaagcagttctcctgcctcagcctccaagtagctgggactacagccgtgtgctgccatgccctgctaatgttttttttttttttttt

SEQ ID NO: 14812 - DNA, 201 bp, Homo sapiens
ttcagatatgattattttctatactaccataatttttagctatattgataagaaatcaaaactagatttccacaggtaaggtaagtgaattccagaggggragcacatagaattaaaagatgaaaatttattttatactccttgtccacaaatcaccaatagcaaatataatagatatttcaaaacataacagcaaattag

SEQ ID NO: 14813 - DNA, 201 bp, Homo sapiens
gaggtcaggcacctgattttgttcaaataaatcctgccaagggtgtttttgcttttttttttttttttaaagtatttgtgaattatgaccactaatcacarttaactataaaacacgttgtgtttctagaccagtacaatccaacagaaatataatacaagccatatatgtaatttttgtggtaaaatttatcattttaat

SEQ ID NO: 14814 - DNA, 201 bp, Homo sapiens
ctgctgagatcatcatagaaatattcaatatgcaactttgtattcaactttttttcacttacagcaagatctaagcatttctcatgtactctaaccattcrtaacttatatcatctaaaatgactgcataatacagtattctattgagcagatctctactgtagtttacttaaccattcccatactgattaatatttatct

SEQ ID NO: 14815 - DNA, 201 bp, Homo sapiens
ctgtgatggttagcaaatactagcctgtatgtcatatttcactatcgtttatgggctagctggcaagagactgagtacttttgggttattttccttgttaytcatttagtgaccatagtaacatacagattgatattcttattcagataaacccaatagttgggatgagactgttgaagcttttcttctaagttagttgct

SEQ ID NO: 14816 - DNA, 201 bp, Homo sapiens
ctttctcatttttgtaaccagtctttgttgaccttctctttctcacatgatcataattcttttcataactgaatttctagctatttctggacatgtcctaytatttcttctccatcggacatggatgaccacttaaagtaccaactgagaaaggtgactgatcagatttaaaagcaaaagtcaattcataaaaccaaagtc

SEQ ID NO: 14817 - DNA, 201 bp, Homo sapiens
agctttttgatgtgctgctggattcggtttgccagtattttattgaggattcttgcatcaatgttcatcaaggatattggtctaaaattctcttttttggytgtgtctctgcccagctttggtatcaggatgatgctgacctcataaaatgagttagggaggattccctctttttttattgattggaatagtttcagaagg

SEQ ID NO: 14818 - DNA, 201 bp, Homo sapiens
gggtgcgtcatcacacctggctaattttttacttttagtacagacagggtttcaccatgttggccaggctggtctcgtactcctgacctcaggtgatccastcacctcggcttcccaaagtgctgggattacaggcgttagccaccgtgcccggccatgatttgtattttatatatagaaataaatcttataagattatat

SEQ ID NO: 14819 - DNA, 201 bp, Homo sapiens
aggggtttctatattaagatcatgttctctgcaaacagataattttacttcatcctttccaatttcagtgccttttctttttttttcttgcctaattgctstggctagaacttctgttagtgttgaatggaaatggtgaaagcaggcatgtcttgttcctgatcttagaagaaaggcttttagtctgtaatcattaaatat

SEQ ID NO: 14820 - DNA, 201 bp, Homo sapiens
atttcagtgccttttctttttttttcttgcctaattgctctggctagaacttctgttagtgttgaatggaaatggtgaaagcaggcatgtcttgttcctgwtcttagaagaaaggcttttagtctgtaatcattaaatatgatgttaattatgtttttttaatatattgcctttattatgttgaggtagtttccattccta

SEQ ID NO: 14821 - DNA, 201 bp, Homo sapiens
atctgctaaattcacagatgttgtcaaactaatggggttactcagatataacttaaaattgctctgaaaattgacatagtattaaaaaatacgcagcacartcatcttggagaagcatttcttatactttagatttggagcttctggaataaaatggctgaactaagtgatttggataatctttcccagctcaaagttttg

SEQ ID NO: 14822 - DNA, 201 bp, Homo sapiens
agtcatcttggagaagcatttcttatactttagatttggagcttctggaataaaatggctgaactaagtgatttggataatctttcccagctcaaagtttkgtttcttcatattgactttaaaaatcatgagcaaaacagggattcttcttatattaagtgaaatactaagaggagtacttacgtaactgacactgttaca

SEQ ID NO: 14823 - DNA, 201 bp, Homo sapiens
taaaattaaattaaattatttttatttttatttttaaaatatatttatttttgagatggagtcttgctctgtcgcccaggctggagtgcagtggtgcgatstcagcacactgcaacctccgcctcccaggttcaaccgattctcttgcctcagcctcctaagtagctgggactacaggcgcgcgccaccatgcctggctaa

SEQ ID NO: 14824 - DNA, 201 bp, Homo sapiens
aaatgtctctcatggaattgcactgtccctcctttgtcctcagcattgttgcatttaatgttctcacccatggctgaatagaggttgtgtctattccattkgcaaatggttcgaatctgagagaaatagttaatatagtggatggcagagatatgtttgaaaaataattagataaatattaatagaatatgtattctgcat

SEQ ID NO: 14825 - DNA, 201 bp, Homo sapiens
agttatcagtattgtagttttttaattgcagtaaaatatgcataacaaaatttaccatttaagtatttttaaatgtacagttcagtagatacagttgcctktatatgttttaggtttttcaattgcagtaaaatatgtacaacaaaatttaccatttaaacatttttaaatgtgcaattcagtgactttcaatacattcta

SEQ ID NO: 14826 - DNA, 201 bp, Homo sapiens
agcaaaactagtatcaagcagtggaacttaatagggaggtagattttggcttaatatgagtaagaagttttaaaatatatgtacttatgtattaagcactrtaacaataaaaatggaaaggaaaaataccataattctactatactaataagtaaactgttttcattttttatttctactcttgtctatagatctaattat

SEQ ID NO: 14827 - DNA, 201 bp, Homo sapiens
aacacaaaacacaaatggcaaatggaataaacaaaagttgtcaaaagattctcccataatgctactgacagtggcagcaaaaagtcaaatgcctaggcagrtaagaggcaggtcctcagtgaaatctgaccttcaaacaaagatagttgaaagcctgaaagccatggtacaagttctgggtaaatccacagactggattga

SEQ ID NO: 14828 - DNA, 201 bp, Homo sapiens
tcaggaggctgaggcaagagcatctcttgagcccagaaggctaaggctgcagtgagctgtgatcacaccattgcactccagccttggtgacaaagaaagamcctgcttcagaaagaaaaaaaaagtttttttaagtacaggaagagaggtggttgagggtatggttaaggcattaaattgaaaacaagcagattaagaaag

SEQ ID NO: 14829 - DNA, 201 bp, Homo sapiens
tgatttcctttctatcctttcccttgttttctggattttatgtactaaagcctcaattttattacccaagtggaatgttctgttttagaacatcacctatrctgattactcccatgccactgttcataaactaccataatggcagaagtaagcatcagtttctcattactgtcagtcactgctaaccttacctctcaacct

SEQ ID NO: 14830 - DNA, 201 bp, Homo sapiens
tcacttaaaaaaagcagtctggccacattttggtagatcagctgtgctgtgctgggggatcccttccaccctccacactccctttcgcttggactctccaragctggaagactggaacagctaaggtgcccaaacagcaaacatggtgactagcccctcccctcaggacctcctttcctagggaggtgcaatgacacttct

SEQ ID NO: 14831 - DNA, 201 bp, Homo sapiens
aaaggcacctgaaggaggtagctggtgatctggttgggaggttctgtccagtgaggaggaatgggatcggggactcacttaaaaaaagcagtctggccacrttttggtagatcagctgtgctgtgctgggggatcccttccaccctccacactccctttcgcttggactctccaaagctggaagactggaacagctaaggt

SEQ ID NO: 14832 - DNA, 201 bp, Homo sapiens
gctgcagataaaggcatacttgagactgggtagaaaaagagatttaatttgacttaaagttccacatggctggggaggcctcagaatcaacagcaggcagygaaagacactttctttatatggcagcggcaagagaaaatgagaaggaagcaaaagcggaaacccgtgataaacccatcagatctcatgagacttacttgc

SEQ ID NO: 14833 - DNA, 201 bp, Homo sapiens
agttcaaggtaggtgagttactgttcccccaggaggcatgcctctcctttgctttctgcttccactgtgagcacagcaaacaagcctgcgttggcaggccytaccaccacctctgccgctagatctgtgctgacaagttaggaagtctacttttgaccttgggttctagctgggttcttcaatatagcttttaccagaatt

SEQ ID NO: 14834 - DNA, 201 bp, Homo sapiens
atgtaagccaggctctgggaacacaggacagaataaataactacctggagcatttgagaaagtttctgttaggaaatatctgagctggattttgaaggatraattcagaggcagtaggtccaatttcaggcagagggaacaccaaaagcatgcctaaaagcccagagatatgaacaaatattaattgttctgagaatgcaa

SEQ ID NO: 14835 - DNA, 201 bp, Homo sapiens
gcaagccatttcccatacgccccccatgctttccccagtgcctactcagcttctggtctcaatcccaaaatcacaccctctggggtaattttcctgatccycaaagcctgggtgaagaaactcctacaacactttatgacattgctgcatttattactccgtactgccaatgaatacatgaatgtaggattacattcaatt

SEQ ID NO: 14836 - DNA, 201 bp, Homo sapiens
aaaacgaaacaaagttctcaaaattcaaaaagaaaacacgtttttaaattaaatgccaacattgtatgaaatgtttgctttgttgtggtaaaaagtgcaarttaaaaatgtctcgtatatacaaaaaataaactttttttcctgcatattgtccagttgaatacatggtaacagcaaaaagaaagttgaccacaggagctg

SEQ ID NO: 14837 - DNA, 201 bp, Homo sapiens
cccccatgctttccccagtgcctactcagcttctggtctcaatcccaaaatcacaccctctggggtaattttcctgatcctcaaagcctgggtgaagaaamtcctacaacactttatgacattgctgcatttattactccgtactgccaatgaatacatgaatgtaggattacattcaattatttgtaggataaatgcagg

SEQ ID NO: 14838 - DNA, 201 bp, Homo sapiens
ggatttttgttgttgttgttcctctgggctatcgttgcttctaggctcttttcaatatacagaatatattctcacacatatgtaaggatacatgcacaaakatctttactgcgtcattttttagaatgcaaaaaaatggaaacaaccaaaatgcccatcaatagaagaatggatatgtagattgtcatatcttataaaatg

SEQ ID NO: 14839 - DNA, 201 bp, Homo sapiens
aatagacaactaatttgttttcaagtccttcagtgttctccatttaacatgttcagaaatactttattatatattggctgtatgttacattctcaatttayttgctttatttcacttagggattaacatttactgcagcaagtcatgttgtatttgctgagttgtactgggaccctggacatataaaacaagcagaagacc

SEQ ID NO: 14840 - DNA, 201 bp, Homo sapiens
tgtctggcaattggtgctgtctgtcacctgggagcttttctggggctgtcaactggaacaccgcaggatttctccatgtggcctgggtttcctcataccartggtggctaggttcccaaggcaagtgtcccaagagagaaagaaagggagagacagagggccagccaagttgaagccatattaccttcaatgacctagcct

SEQ ID NO: 14841 - DNA, 201 bp, Homo sapiens
tgttactttattttgttaatccaatacaggatattacattgcatttaattattgtgtctttttagtctcttcattctgtggtagtttcttaatctttcctwatccttcatgaccttgatactttttgaaaagtactgatcagtattttgttgaatgtccctcacgtcggatttgtctgatgttctttcactttagactgag

SEQ ID NO: 14842 - DNA, 201 bp, Homo sapiens
tgttatatgtattacacagtctaccaattccctaaaaacattcactacaaggtctgaaaactttaaaatcttttcttaaatgacataatgtagatggatgyacaatttcagtagccattaagggggttagctatacaatgaggctactgaaagatgatatactatgttcctgtatttagtgattttgaaagatatcttaag

SEQ ID NO: 14843 - DNA, 201 bp, Homo sapiens
tttgtatatctgattttctccaaggctccatttctagccctgtttacattcaagtcccttccctgtggcaagtgctgtgaactagcaaaccctacctgtgytcagtgttttggcatgtagtgttaggctctctctttctggggtgactttgtgtttcatctaagtcttctgtatctcttggctctttttcttttcctgccc

SEQ ID NO: 14844 - DNA, 201 bp, Homo sapiens
cctttactgtggagtgatatttagaaattaggatttttgttgttgttgttcctctgggctatcgttgcttctaggctcttttcaatatacagaatatattytcacacatatgtaaggatacatgcacaaatatctttactgcgtcattttttagaatgcaaaaaaatggaaacaaccaaaatgcccatcaatagaagaatg

SEQ ID NO: 14845 - DNA, 201 bp, Homo sapiens
ctgaataaaattcagagttcaaaagaaaatataggaggctatctttatgacactgagaatagggaaaggtatattaaatgtgccttaaaatgtgcaaatartaaagaaaaagattcagatatttgagtatatcgaaatcacaggttttgttatacaaaatgtcctgtatataaatcacagactcagtaaagatatttgcat

SEQ ID NO: 14846 - DNA, 201 bp, Homo sapiens
aggctggggcaggagaatcgcttgaacctaggaggaggcagaggttgcagtgagctgagatcccgccattgcactccagcctaggcaataagagcaaaacktcgtctcaaaaaaaaaaaaatgtagatattcatggggttggaggtgaatttttccccaacttttcctaccctgacaatgtattttctttagaaagaccct

SEQ ID NO: 14847 - DNA, 201 bp, Homo sapiens
gactagaagctctgcgcatgtatacaatttatagactgtggccttcaataaatggtgatctgaatgggatgtctccctgggaaacccctgatagcagtatmtttagttttttctcttggctggtcagattccttagaaaagaatcactttatatgattctgctctcttgcctgaaggacataagcctgtttctgttttggg

SEQ ID NO: 14848 - DNA, 201 bp, Homo sapiens
caggatggacactgaaggccaaggtgagggcttagttgcaaagagggctcaggggagcctaactaaagttaggtcaaaggagagtctttgtcatagctcargtttgaagtttttgtctttcttttttttctttcttattatttgtttaaaagccaacaatttgaaatcaaataacttttaacaggtctttagtgcaataca

SEQ ID NO: 14849 - DNA, 201 bp, Homo sapiens
cagccttggcgacagagtgagactccgtcttaaaaacaaaaaaagaaatcaactacaaaagaaccctcaaaaccatgcaaatacatgaaaattaaatagtstgttcctgaatgatcactgagtcaacaataaaatcaagattgaaatttatagattctttgaactgaatgataatagtgacacagcccatcaaaacctcta

SEQ ID NO: 14850 - DNA, 201 bp, Homo sapiens
gagcgatgcagacgacgggtgatttctgcatttccaactgaggtaccgggttcatctcactgggtagtgctggagagtgggtgcaggacagtgggtgcagygcacggtgcatgagccaaagcagggcgaggcatcgcctcacccgtgaagcgcaaggggtcagggaattccctttcctagtcaaaggaacgggtgacagac

SEQ ID NO: 14851 - DNA, 201 bp, Homo sapiens
aaatacaaggtgtacatatcaaaaagcagtaagtaaaattgtccatattcacaggcaggattatccacatagaaaatcgaagagtgattttatcaaggtcmcagaattcatgttcaacatataaaaatcgtttctcgttctgtatactggcaataaaaattggaaactgaaattttaaaaatacgatttgaaatagcatcc

SEQ ID NO: 14852 - DNA, 201 bp, Homo sapiens
ccctccatccctcctaagactaaccatcaacatgtgggtgagtggttatgtcttctaggccgtaagtttccagcagggatggaagcgtgcacagccatgtygtgctcgtcttctgttctggaagcagcaacgctttcattctcagtccagcatagggcctgccacttgtgataagagcagtgctggcagcagcttcagctt

SEQ ID NO: 14853 - DNA, 201 bp, Homo sapiens
tctgagaaataaagggaaagagtacaaaagagagaaattttaaagctgggtgtccgggggagacatcacatgttggcaggttctgtgatgccccctgagcygtaaaaccagcaagtttttattagcgattttcaaaaggtagggagtgtacgaataggctgtgggtcacagagatcacatgcttcaagggcaataaaatat

SEQ ID NO: 14854 - DNA, 201 bp, Homo sapiens
cccttctagaaaatatctataaagtaaaaaatttctaattaaggaaaaattatttatgtgttgcgaattaaagagaaggctaatttcagcgactgagaaaratgtgcaaaaaatgtaaacaaataattgatagaaaaggaaatacaaataggttttaactgcataaatctaattgataagaggaatttaaattgaaactac

SEQ ID NO: 14855 - DNA, 201 bp, Homo sapiens
agctttttaatggcacagtgacaaggtgcaaggaatacaagagttgaccaatccaggagccttcctggactctgaattccttttattcatgttgtaaaacrtttctttttttattaaacaatcttgattcagagtttcagttccttatagccaaaaaccatggttcctggcatgtcatttctaaatattcattttgttcct

SEQ ID NO: 14856 - DNA, 201 bp, Homo sapiens
tgatagactactagcaagactaatgaagaaaagagagaagaatcaaatagacgcaataaaaaatgataaaagggatatcatcactcatcccacggaaatayaaactaccgtcagagaatactataaacacctctatacaaataaactagaaaatctagaagaaatggaaaaattcctggacacatacaccctcccaagact

SEQ ID NO: 14857 - DNA, 201 bp, Homo sapiens
cattttgggagtacaactgttggtactctgcaggaggcaagtgtggcctatgtggttagcctgtttgaagacaattgtgtgttgtctttgccagcatgtarcagtcataccaaaaggcctccagctagcatactgcacacctgtacaatgtctcatgtaagtggagagtgtgcttaagaatccattttaatggcaaacact

SEQ ID NO: 14858 - DNA, 201 bp, Homo sapiens
tttgggagtacaactgttggtactctgcaggaggcaagtgtggcctatgtggttagcctgtttgaagacaattgtgtgttgtctttgccagcatgtagcartcataccaaaaggcctccagctagcatactgcacacctgtacaatgtctcatgtaagtggagagtgtgcttaagaatccattttaatggcaaacactgca

SEQ ID NO: 14859 - DNA, 201 bp, Homo sapiens
tataattttgaaaatgtgactgacctacctctgcattgatgtttttaaatgaacatgttggaatctttggggattttctttttatatctttctatagagawaaggaaaaaaagtaggacatgattcatgattgcattaatttgttctgttcgttatgctatattcataaacagtgttattttttcccacataggaattgaa

SEQ ID NO: 14860 - DNA, 201 bp, Homo sapiens
aaacctggggagggggatggtgctcaaggagaatgggaagtgcagatacaagcacagaagaagctataggcagagcaggggaggcttgtagcctggggcargagctgcctggatgtaaactcagtgctttccgtggagcacagtgggagtgagactggccttgctggctgcctgggagctggataaggcctgtcactgcag

SEQ ID NO: 14861 - DNA, 201 bp, Homo sapiens
catcgcccgagaaagtggaatacttgtccagggactttagacaagcttgtatgccccctatactgctgcagctgatgttctcttgaaagcaccccctcctrgctggaggccagccaactcaagccattacagcgactcagaacaaccgtgctccaaaaaaggaggaaacaacaggtaatcccactgcctgtaacatcctgg

SEQ ID NO: 14862 - DNA, 201 bp, Homo sapiens
gaattagttacagaaaaataaaaatctacctactgcttgaatatttaattttcactctccacttctcaggaccttgtgaattgcagtgactactgactatrggcaacctacagcagcaccatgagaacagcatgtaacccattattacatttagtattagaataatctgattaaatcaagaccacatttatccatgtcatt

SEQ ID NO: 14863 - DNA, 201 bp, Homo sapiens
agacactaacatcttctctagtttaaagcagtgtcaaatcttattcattactgtttttcaggctgagctttttgaaactaatattcattcagaaatatcartgaaaacagtgtcatggctccttatcattaaaaggaagagcacattggataaattattttcttaactccagcattcaattttgctacatgttttgtcttc

SEQ ID NO: 14864 - DNA, 201 bp, Homo sapiens
ctgcagcgagccgagatcatgccattgcactccagcctggtcaacagagtgaaatctctgtctcaaaaaaaacaaaaacaaaaaaacctcaacttgatagygtattgtttgggaatacattcctatgtggtgaaactacgaagagaagcaaggcagcctgcttgtagtggctcacacctgtaatcccaacactttgggagg

SEQ ID NO: 14865 - DNA, 201 bp, Homo sapiens
aagaatgggtaggttggaatcacaaatagaggagtttaccatagaaaaagaagaaataacctctttgccaggcgcggtggctcatgcctgtaatcccagcwctttgggaggccaaggcgggtggatcacctgaggccgggagttcgagaccagcctgaccaacatggagaaaccccgtttctactaaaaatacaaaattag

SEQ ID NO: 14866 - DNA, 201 bp, Homo sapiens
cccattttggggcacatgctgaagaggaggggccattccagagcacaggtcacacagcgctcctgtcatggggcttgtggtgggctggtggcagggccccmaccctgaggggctgggccatgtcgccaccctctccggatggggtcccaagttgggggtcttctggttcagctgcatccttggctgctaagctaaggccaa

SEQ ID NO: 14867 - DNA, 201 bp, Homo sapiens
taaagcctatctctgtcaaagtgtaagaaaaaatattcagtctatttttttcagactagaagcttagaaaatgctacagttaataaaagatgaaaaaaaawttgtataatataaaccaagttatatttatccaataaaagcaatgatccatatttgtttttgttttttttaaggggtatgtgtctgtgtgtgcacgcacac

SEQ ID NO: 14868 - DNA, 201 bp, Homo sapiens
caaattcccatctctactaaaaatacaataattggccaagcatggtggtgcgtgctcgtaatcccagctacgggaggctgaggcatgagaatagcttgaaycagaaggcggaggttgcaatgagctgagatagtgtcattgcactccagcctgggcaacagagtgagaccctgtctcaaaaaataaaataaaataaaataa

SEQ ID NO: 14869 - DNA, 201 bp, Homo sapiens
atttctgcaaagatgaattagcatgtctctgagagatagggaaatacactatttctctaatgatatccagggttcctaaaagatcttttggtctaattggygagggacgtattgtacacatcccagggatgtcagtcagactccagttactgctgtctcagtgtgatggcttccagaagacatgcaataaaatgactcaag

SEQ ID NO: 14870 - DNA, 201 bp, Homo sapiens
gctgggaagttcgaactgggtgcggaacccaccgcagcacgcaaagccactctagccagaatgcctctctatattcctcctctctgagcagggcatctccraaagaaaggagccccagtcaggggcttatagataaaattcccatcttcctgggacagagcacctgggggaaggggcagctgtgctcacagctttagcaga

SEQ ID NO: 14871 - DNA, 201 bp, Homo sapiens
tgttttgttttaaattagtttcccatcagatataaagttggtgcttttctttataatgccatgagcctctcaagtctctcagggaagaatttcattcttayatttatttgctgtttcactttgcattccttcctttctattttgctttcttcctttgggagccttcatccttccagtgaaagaagactgaagttgtctctt

SEQ ID NO: 14872 - DNA, 201 bp, Homo sapiens
aatctcttcacctcgtgatctgctcgccttggcgtcccaaagtgctgggattacgggcgtgagccaccgtgcccggctacaagtatatctttttaatattrtgtgtattgtttatgtttaatatttattttttaaaaagctaatgttaacgagttccacatttctcaaattgacacctatttgtgctaaaatacacccagt

SEQ ID NO: 14873 - DNA, 201 bp, Homo sapiens
agttatctaagtggaaaccacgatctgccatccaaaattcccaaggtgatttttaaaataaaaatatagtaagctattaaactagaaatatatagaacctstagaaattcagtgcatttaaaacattttaacattgaactccacatcaacttacatagtcttcactctctgatggaggattattattatctgttgaagtag

SEQ ID NO: 14874 - DNA, 201 bp, Homo sapiens
ttatcagtagctctctaccacgtctgatagagttcgaatttgaaaacctaggattcaaatttgaaaacctatctcctaattgaaaatgtatcccctaaatyagctctatggccactttgccaagttctgtcctgagaagtgacccaacatagcttttgtcttttctctccgtctgaacacacagaagaaaggaaaagttaa

SEQ ID NO: 14875 - DNA, 201 bp, Homo sapiens
agatttttatttacctgtgagaaaatgatctgctctaagagcatatacaatttggatatttgcagaggtctcagatgaaatcttcagtgatgaggccacayctatcccggctcgctcaaggattgttggttgcattgtttccattacaacccagctggatccttgctgggttcctgccagcagcttccacacacctggagt

SEQ ID NO: 14876 - DNA, 201 bp, Homo sapiens
tagtagagacagggtttcgccatattggccaggctggtcttgaattcctgacctcaggtgatccacctgcctcagcctcccaaagtgctgggattacaggygtgagctaccatgcccagccaacatttacccttgattacagtttttaataaatttagggtatatatgtatatgtgtgtctttacatatatataagtgtat

SEQ ID NO: 14877 - DNA, 201 bp, Homo sapiens
tcatacactatagattatattgaagaaaggcatttcataccaaaattcttctttctggttgtccttactatactaggctgaacatagctaccaagagaagrccaaggttcacttgagcttatcttctctttactgttaaaggtatgtaccacaagggcatgctccagaatccaccctctccttctggaactctgaggtgta

SEQ ID NO: 14878 - DNA, 201 bp, Homo sapiens
aagcaaatggaaaacaaaaaaaggcaggggttgcaatcctagtctctgataaaacagactttaaaccaacaaagatcaaaagagacaaagaaggccattaygtaatggtaaagggatcaattcaacaagaagagctaactatcctaaatatatatgcatccaatacaggagcacccagattcataaagcaagtccttagtg

SEQ ID NO: 14879 - DNA, 201 bp, Homo sapiens
aaaagattataaaagaatactatgaaataatttatgccagtaaatataaaatttagaaaaataaaaaattacttgaaaaacactatttgccaaagttgatmcaagaaataaaaaataagaatagttttttatctattaaagaaatctaatttaaaagtaagtctatatttgaaaatatttctacaaacaaaacttcagatt

SEQ ID NO: 14880 - DNA, 201 bp, Homo sapiens
gaaatttgagaaaactaatttggaacaaagagatgtatttctcacataatggacaccaagataaagggtaaaaattccattttctaacttgagtttcagcmcagttaatagaattgtgcttgctttttcttctattgcttttgcaaggaacaatgtaaacatgcaatagagacatttttatatgagatagagggaatctat

SEQ ID NO: 14881 - DNA, 201 bp, Homo sapiens
tcttgtaaatttgtttaagttcttcgtagattctggatattggccctttgttagatggatagattgcgaaaattttctcccattctgtaggttgcctgttsactctgctgatagtttctttcgctgtgcagaagctctttagtttaattagatcccatttgtcaattttggcttctgttgccattgcttttggtgttttag

SEQ ID NO: 14882 - DNA, 201 bp, Homo sapiens
acataataatagctaaaatatattggactattttctcctgcagttaacaggagtttagagccacacctttccaatcttcttgtccttttctgcctagtagrtcacaaagcagctattacggttccagatttggcatcattgcgtgatgcaggaagaaaggaagaagacaaaacgacatgtgctaactgagtcaaccctatt

SEQ ID NO: 14883 - DNA, 201 bp, Homo sapiens
aatatctcatgtatcccataaatatataaacctactgtgtacccttaaaaattaaaaattgttaaaataataaaaaataaaatgcagacaggatttgttayaaagataaaacaagctgagtcctgtaaagcacttagcacagtgcctggcctatatgaactctccataaatgttaattcctgcaatgatcacttgcagcag

SEQ ID NO: 14884 - DNA, 201 bp, Homo sapiens
gttagctcttcttgttgaattgatccctttaccattatgtaatggccttctttgtctcttttgatctttgttggtttaaagtctgttttatccgagactargattgcaacgcctgcctttttttgttttccatttgcttggtagatcttcctccatccctttattttgagcctatgcgtgtctctgcacatgagatgggtt

SEQ ID NO: 14885 - DNA, 201 bp, Homo sapiens
aatacagcacactgatgggtcttgactctttatccaatttgccagtctgtgtcttttaattggagcatttagcccatttacatttaaggttattactgttwtgtgtgaatttgatcctgtcattatgatgttagctggttattttgctcgttagttgatgcagtttcttcctagcctcgatggtctttacaatttggcatg

SEQ ID NO: 14886 - DNA, 201 bp, Homo sapiens
gtcagtctgcccctactgggggctgcctcccagttaggctactcggggttcagggacccacttaaggaggcagtctgtccattctcagatctccagctgcrtgctgggagaaccactactctcttcaaagctgtcagacagggacatttaagtctgcagaggtttctgctgccttttgtttggctgtgccctgcccccaga

SEQ ID NO: 14887 - DNA, 201 bp, Homo sapiens
gagcaaggctccatgggtgtaggaccctctgagccaggcgcgggatataatctcctggtgtggcatttgctaagaccgttggaaaagcgcagtattagggkgggagtgacccgattttccaggtgccatctgtcacctctttctttgactaggaaagggaattccctgaccccttgcgcttcccgggtgagtcgatgcctc

SEQ ID NO: 14888 - DNA, 201 bp, Homo sapiens
tttgtgtttttttgtagtgacggggtttcaccgtgttgcccaagctagtcttgaactcctgggctcaggcagtcctgccatatcagcctcccaaagtgctrggattatcggcatgagccaccgcacccagcctaattaacagcttcctggtcaagaaaacattttcatatgaataacattatgtgtgagcattgtgtttat

SEQ ID NO: 14889 - DNA, 201 bp, Homo sapiens
ctgttgtctgtgaactaaattggaatcacatgcttattccatgtaatatctctgtcacaattagcatgattgcatgcaattcccaactgctacaggcaatraaaataagctctattgtgactataaaataatgttagttcacattaaatgtataagttgaatgatttagcaacaaaagtcataatttaatatgggttttat

SEQ ID NO: 14890 - DNA, 201 bp, Homo sapiens
gggaaaaaatccgccctggtaaatctgtggtcagaccggttctctgctcttgaaccctgttttctgttatttaagatgtttatcaagacaatacgtgcacygctgaacacagacccttatcagtagttctgcttttgccctctgtcttgtgatctttgttagacccttattagtaggtctgctttttgcccttggaagcat

SEQ ID NO: 14891 - DNA, 201 bp, Homo sapiens
cctaattacctttctttacatacaaaatgactaatatttgataaaatatgaagtttttaaaaatagttacgatattttgttacagtgaagcaatttatatrttttcttaacatctccccaaaactctgaaacacagtgaatgcttctttggaagccaaggagcttgttgctgacatagtaataatttggttgtttgcacat

SEQ ID NO: 14892 - DNA, 201 bp, Homo sapiens
atatacttgaaatgagaaaccactcaatttctttcttgataagcaagggagaactgtgcttcttagccatgacattctaaacaaagcgaagagttggtatygcattgggctttggaagcctgaagactttcaaaaacaggagtgtttaaggactgtctgaaatttctgtgtatagtttagggattagctgactaccagaga

SEQ ID NO: 14893 - DNA, 201 bp, Homo sapiens
ggtacaccttaaaaatattgttaattattccatatttgctaaagtgtttatatttcatggtctctctgctctaacacatctgccttccctgcaactagatrtcatcattagattggagagccgccaaacacctaaactatatgaagctaaagtctgtttaagaaagagcccatccaggctgggtgtggtggctcatgcctg

SEQ ID NO: 14894 - DNA, 201 bp, Homo sapiens
gtctcaaactcctagcctaagcaatcctgccttggcctcccaaagtgctaggattatccgtgtgatccactgcacctggcttttttttttttttttttgaratggagtctcgctctgtcgcccaggctggagtgcagtggcgcaatcttggcttactgcaagctccgcctcccgggttcacaccattctcctgcctcagcc

SEQ ID NO: 14895 - DNA, 201 bp, Homo sapiens
acatttagaatatttagaccaagaatataggcccgagtccaagcttcctagagccatgaacagctctcagctcaaatgggactcctctcagagcttggtcytcatgacttttgctatagtagtgctctccaaaaccttcttactgaaaaaaaaaaaaaaacaaaacttagttgtgttctctttatctgaaaatatactatt

SEQ ID NO: 14896 - DNA, 201 bp, Homo sapiens
aatgtttttttcatttattcacttaaatgtgaataattaacaattacatttttctatttctgttttgtattttttgttttttttaggacagtctcgctccrttgcccaggctagagtgcagtggtgcaatctcggctcactgcaacctctgcctcctgggttcaaacgattctcctgcctcagcctccaggtagctgggac

SEQ ID NO: 14897 - DNA, 201 bp, Homo sapiens
agatggctcacacctgtaatgccaacactttgggggctgaggcaggaggatcactttggcccaggagtttaagacgagcctgggcaacatagtgagaccctgtcactacagaaaatagaaaaactagccaggtatggtggcatgtgcctgtagtcccagctactcaggagactaaggcagcaggaggactgctggagccca

SEQ ID NO: 14898 - DNA, 201 bp, Homo sapiens
ttctgacttaattctggtaaaatatagccgtttcattccagtatcactctatttctttccctttgtggtattgtattatacaagtatatattatatgtaaraatatagtgttataattattcattttaaatcttttttaaataaagagaaaaaagaaaaatatgtgtatgcatgtgtgtattcagtcatttatatttatat

SEQ ID NO: 14899 - DNA, 201 bp, Homo sapiens
gtttggtgtttgacagtttattagaatgtgtctcaatgtgggtttctttgcgtttatattcatccaagaatataaacactaaattgcattaaatttgggatttttttttttgccattattttttcaaataatgtctctgctacttgtctctctcttcttcttctgtaactcccatactgcatatgtttgtcagctttatgg

SEQ ID NO: 14900 - DNA, 201 bp, Homo sapiens
agactgcctcctgggacaccatcccattttggggcacatgctgaagaggaggggccattccagagcacaggtcacacagcgctcctgtcatggggcttgtggtgggctggtggcagggccccaaccctgaggggctgggccatgtcgccaccctctccggatggggtcccaagttgggggtcttctggttcagctgcatcc

SEQ ID NO: 14901 - DNA, 201 bp, Homo sapiens
cccaaggtccctcctgaggctgcagttacctgcaggccaggaggatccacttccaagcttactcatgtggctgttggcagggaccttccattccgcaccaygtgggcctctctttacgaaccaaaatagaagttgcaatggctcctataaccaaccttgggagtgacataccaacacttcctccatgttctgttgttcaga

SEQ ID NO: 14902 - DNA, 201 bp, Homo sapiens
ttattgctttcaaacttctaacagagggttttttctactcacaataaaagctataaaaagctctcctgatgtatttttccccatgattttcctgtataaayatacatgattgcacaatgcaaaaccaacaaacacttcttgcagtatatgttgaaaattgctgatcttgtattcttattgcagctaaatgaaatgataaga

SEQ ID NO: 14903 - DNA, 201 bp, Homo sapiens
ggattgctggatcagatggaagctctatttttagtttttgtgaggaacctccaaattgttccccatagtggctatactaatttacattcccaccagcagtrtacaagtgttcccttttctccatatccttgtcagcatttgttgttgcctgtctttcattttaactggggtgagatgatatctcattatagttttgatttg

SEQ ID NO: 14904 - DNA, 201 bp, Homo sapiens
tcaaatgaatgaaatgaagcaagaagaaaagtttagagaaaaaagaataaaaagaaatgaacaaagcctccaacaaatatgggactatgtgaaaagaccamatctacgtctgattggtatacctgaaagtgacggggagaatggaaccaagttggaaaacactctgcaggatattatccaggagaacttccccaatctagc

SEQ ID NO: 14905 - DNA, 201 bp, Homo sapiens
ttatgttatgttttgttttgttttgttttgttttgttttgttttgttttgtttgttttgttttgtttctctgagatgtatagcctgaagtgttctttctargtatactccctcagttattggggttttaaaaatatatttatttttatttattcatatttctttgagacagtctcactctgttgcccaggctggagtgcag

SEQ ID NO: 14906 - DNA, 201 bp, Homo sapiens
cagtaagtctcacgagatctgatggttttataaatgggagttcccctgcacacgctctcttgcatgctgcagtgtaaaagatgtgaccttactcctctttygccttccaccatgattgtggagcctccctagccatgtggaactgtgaattaaacccctttcctttataaattacccagactcgggtatgtctttattggc

SEQ ID NO: 14907 - DNA, 201 bp, Homo sapiens
agggactacaggtgactactacatgactggcaattttcatttttttaatagataccacaaatttcctccaggacctgaatgtatctatgtcaattctgtawctaggtgtactagttatggaatacagaagatcattaagccaccatagtcttctcaaaccctgaagaaatgatcaaaactcagatgtttcctcagaaccca

SEQ ID NO: 14908 - DNA, 201 bp, Homo sapiens
aattttaaataatcatttttatgacactaataaggtttaccttttaatatttaggcaggtgctgtaaaggattatattaagatgatgcttcagaatgattygcttaaatttctggtttttgctcaccatttaagcatgctccaagcttgcacagaagcagtcatcgaaaataaggtatgttgccattttttaactaaatac

SEQ ID NO: 14909 - DNA, 201 bp, Homo sapiens
ttgtgttcataattaccattgagaaatgtcactgttattaaaatacattctgtgttccaactacctgcctctctgccctagcagtttctctcttacctccstcaaatcattgactagggtctttccagcagtagcttctagctattttctggaaactggcctctggtacaccttaaaaatattgttaattattccatattt

SEQ ID NO: 14910 - DNA, 201 bp, Homo sapiens
gatcttcgactaacaggcttattactaacagatcaattctagtaaaataaaatagagttttgaatacatgcattttctgcaacttctgtgaaacctgaacygacactaccaagatgctgattattatgaggacctgctattccacatactatgtacttaagatcgtttggaagcaaattcctgttcagataatttaaaatc

SEQ ID NO: 14911 - DNA, 201 bp, Homo sapiens
tatgtttgctgtctcaaaggaacacccgatgatcctgaccatgcctgctattctttccctttgccccttgtttttctgctacttaatacttgagtttatgyccccatcctcaattatcattgcatagaatttatttatacaggttaataagaaagaactgagaaaagaaagtttagcaaagtaatagaaataaaaactcag

SEQ ID NO: 14912 - DNA, 201 bp, Homo sapiens
gccttcatccttccagtgaaagaagactgaagttgtctcttcatgataaataattcaatggaaaatgtcagaatataataatttccaaagactagtcatgkaatgactgatttttggtaatgctaaaggcaaaataactttagcctataccataaaaaagatctagatattccctttgtatttgtggtaacttgattttag

SEQ ID NO: 14913 - DNA, 201 bp, Homo sapiens
tctgaaacgaacacctggtttctccagcttcagtggcggagggcggggtgattgctcttttcggcctggagcggactacgattcccaacatgcttttcccytactcataacttctcctccgttcacttgtcgcggtgcttggctggaattgtagttcctgagaggtacccatgccgccgcttcagccaatgaaaagggaca

SEQ ID NO: 14914 - DNA, 201 bp, Homo sapiens
ttttcggcctggagcggactacgattcccaacatgcttttcccctactcataacttctcctccgttcacttgtcgcggtgcttggctggaattgtagttcytgagaggtacccatgccgccgcttcagccaatgaaaagggacagagttttgaatgacttgaaattagggcggagaacgagttgtcgcgaggctgtacaga

SEQ ID NO: 14915 - DNA, 201 bp, Homo sapiens
atttttatcagtttttgccttgtatatttattaagatatattttgaggctaaatttttctaataaatcttttatcattataaaatgcttttctttattttmataatttttttttgcctgaaacctatgttatcttataatgtaaagcaatactagctatactttggcatgtataatatgtcttttttaattcttttacttt

SEQ ID NO: 14916 - DNA, 201 bp, Homo sapiens
gaccacgaatgcagccgctagcctagaggctggtcacagaagagaatgcgatgaacaccgtcctgccagtgtgaggacggagtgtctgatgtgtttgtgtccccccaccacccccccatatacaaaggccatctctagggcagaaatctctcaacagctcaagcccatcctcgctgccccctccacgaaacgacacagctc

SEQ ID NO: 14917 - DNA, 201 bp, Homo sapiens
aattatctccccaaagtttatatagttgtcctgacccgccatttacttgttgtttctgaaataagtctctaggtagtgtattttaacaatatctgattctyctcagtacagttctactatttacttaaatgagtcagtgaattccagttgaatttgccttgttctcaattgagtacaaaaacactatcttgacctaaaaag

SEQ ID NO: 14918 - DNA, 201 bp, Homo sapiens
cacccaaccaataatacatctaaaagagtttcacaattgctgtacccgtatcattacaaaaaccaagcttagataataatagggttcaagattgtttttgttttttttttttttttttgagatggattctcactctgtcacccaggctggagtgcagtgacacgatctcggctcactgcaacctctgcctcccaggttcaa

SEQ ID NO: 14919 - DNA, 201 bp, Homo sapiens
attttaactggggtgagatgatatctcattgtggttttgatttgcatttctctgatgattagtgatgtggagcatttttaatatacctgttggcagtttayatatcttccttgagaattgtctgttgagatcttttgtccattttttaattggaatatttctctttttttgctatagagttttcttatatattctggctat

SEQ ID NO: 14920 - DNA, 201 bp, Homo sapiens
accaataatacatctaaaagagtttcacaattgctgtacccgtatcattacaaaaaccaagcttagataataatagggttcaagattgtttttgttttttktttttttttttgagatggattctcactctgtcacccaggctggagtgcagtgacacgatctcggctcactgcaacctctgcctcccaggttcaagcaatt

SEQ ID NO: 14921 - DNA, 201 bp, Homo sapiens
accaagcttagataataatagggttcaagattgtttttgttttttttttttttttttgagatggattctcactctgtcacccaggctggagtgcagtgacrcgatctcggctcactgcaacctctgcctcccaggttcaagcaattctcctgcctcagcctcttgagtagctgggattacagacgtgtgctaccaccccca

SEQ ID NO: 14922 - DNA, 201 bp, Homo sapiens
ccgaggtggacggatcatttgaggtcaggagttcgagcccagcctggccaacatggcgaaaccccatctctacttaaaaaaaaaaaaaaaaaaaaaagatmcaaaaattagccaagcatggtgtacacctgtaatctcagctactcaggaggctgaggcaggagaatcgcttgaacccagaaggcagaggttgcagtaagc

SEQ ID NO: 14923 - DNA, 201 bp, Homo sapiens
ctaactggtgtgagatggtatctcattgtggttttgatctgcatttctctgatgagcagtgatgatgagcattttttcatgtgtcttttggctgcataaaygtcttcttttgagaagtgtctgttcatatcctttgcccactttttgatggggttgtttgtttttttcttgtaaatttgtttgagttcattgtagattctg

SEQ ID NO: 14924 - DNA, 201 bp, Homo sapiens
ggcagaagttgcagtgagacaagatcatgatcgcaccactgcactccagccctgggtgacagagcaagaccttgtctcaaaaaaaaaaaaaaaaaaaaaargaacaaatatgcacttatacacttggtttctagcattaaaagattctgttctaatactaaaatttaatcatgagaaacctaaactctgacttacttttaa

SEQ ID NO: 14925 - DNA, 201 bp, Homo sapiens
atacagaatattacagatgtatgaattatagaaatctaaagatcagggatcattttagcttaatggttcttgatgtgaggtggtacccgcttcttctaacyacacttcacattttatcatctcaggtccaggaagctttttgttgtcacaaaagcttcggactccactgtcctttaataggtaggaccaggaaatgaagct

SEQ ID NO: 14926 - DNA, 201 bp, Homo sapiens
tggataaagagtcaagacccattagtgtgctgtattcaggaaacccatctcatgtgcagagacacacacaggctcaaaataaaaggatggaggaagatctmccaagcaaatggaaaacaaaaaaaggcaggggttgcaatcctagtctctgataaaacagactttaaaccaacaaagatcaaaagagacaaagaaggccat

SEQ ID NO: 14927 - DNA, 201 bp, Homo sapiens
gtgtgttaatgttatgtttgaattactgttgaattactatgttaatgtaatgttatgtttgaattactgttaagatattctagacactattctgtgtcacmcagaatagtgtctagaatatcttgacaataattcatcaatttttaaaatgttatttgtcattgatattttgtaccatttccacctctaaggagaattcgt

SEQ ID NO: 14928 - DNA, 201 bp, Homo sapiens
aaactaggccaggcgttggctcatacctgtaatcccagtacttggagaggccaaggcgggaggattgcttgagccaagagttaccagcctgagcaatataktggaaccccatttctacaaaagaaaaaaaccagaacaattagccgggtatggtagcatgcacctgtagtcccagctagtggaaccccatttctacaaaag

SEQ ID NO: 14929 - DNA, 201 bp, Homo sapiens
tcataggaagagttataataaagtgctatacattaaaaggtactttctcattggttatcatatagtttctgaaaaacaccctctaagagttaattaacctwaatattttttaaatgattgggcaagaaattagattcgtaatatttttcttattctgattccattataccttaaaactactgggatcgattccaagtataa

SEQ ID NO: 14930 - DNA, 201 bp, Homo sapiens
actgcactccagcctgggtgccagaataattggtgttccctaggaagaagaaaagtctaaaagtttggaaaacttatttcggggaataatcaaggaaaccmtccctggccttgctagagatctagacatccaaatacaagaagctcaaagaacacccaggaaattcatcgcaaaaagatcatgaaactagatcttgaaaca

SEQ ID NO: 14931 - DNA, 201 bp, Homo sapiens
ttctcccataatgctactgacagtggcagcaaaaagtcaaatgcctaggcaggtaagaggcaggtcctcagtgaaatctgaccttcaaacaaagatagttkaaagcctgaaagccatggtacaagttctgggtaaatccacagactggattgagaaactctcttcctacttggcatgctttcctctgagtaatcctcaccc

SEQ ID NO: 14932 - DNA, 201 bp, Homo sapiens
atttctcatacttctggaggctagaagtctgagattaggatgccagtatggttgagttctggtgagggccctcttccaagttgctgactactgctttctcwttgtggaaagagggcaagaaagctctttggggtctcttttataggggactaagcccattcatgagggctccaccctcatgacccaatcacctcccaaaag

SEQ ID NO: 14933 - DNA, 201 bp, Homo sapiens
ctcgaactcctgaccttgtgatccgcccacctcagcctcccaaagtgctgggattacaggcatgagccaccgctcctggcctcttattagactttaaaagstgccagactccttagttaattctttcctggatcaggataaagacctggaatggaagggggattctctacagaatgtaaatttttcccacaaaagacagct

SEQ ID NO: 14934 - DNA, 201 bp, Homo sapiens
ttaacttatttttcttctgaacattgccagaatttcagcatttccaacgggaattttcctatgaatttgatttattttttatccatttacaaagccttttwaaggacatttccagcatctccatttttagaaaactttcaactttcaattaaactttcctagattaaccaaacttgccatttgacatcaaaaacttctttg

SEQ ID NO: 14935 - DNA, 201 bp, Homo sapiens; identical to SEQ ID NO: 1767

SEQ ID NO: 14936 - DNA, 201 bp, Homo sapiens
agtgttgtaggaaaacccgggttcttgtcacacgaccaagataatttaggcatgcggatacattgtagggtgagaagggcagcatttattgtgtgaaaagraataaaagggaaacagggactctcagcaaaggtgagagtcctgctagcaggctttgcgcttcacagattgaatccccttttaccacccaggaacaggaga

SEQ ID NO: 14937 - DNA, 201 bp, Homo sapiens
ccatctctactaaaaatacaaaaaaattagctaggtgtggcggtgtgtgcctgtagtcccagctgctcgggaggctgaggcaggagaatggtgtaaacccrggaggtggaggttgcagtgagctgagatcgcgccactgtactccagcctgggcgacagagcaagactctgtctcaaagaaaaaaaaaagaaaatgttcta

SEQ ID NO: 14938 - DNA, 201 bp, Homo sapiens
ctactaaaaatacaaaaaaattagctaggtgtggcggtgtgtgcctgtagtcccagctgctcgggaggctgaggcaggagaatggtgtaaacccgggaggyggaggttgcagtgagctgagatcgcgccactgtactccagcctgggcgacagagcaagactctgtctcaaagaaaaaaaaaagaaaatgttctacaatta

SEQ ID NO: 14939 - DNA, 201 bp, Homo sapiens
aaaatacaaaaaaattagctaggtgtggcggtgtgtgcctgtagtcccagctgctcgggaggctgaggcaggagaatggtgtaaacccgggaggtggaggytgcagtgagctgagatcgcgccactgtactccagcctgggcgacagagcaagactctgtctcaaagaaaaaaaaaagaaaatgttctacaattaaacagg

SEQ ID NO: 14940 - DNA, 201 bp, Homo sapiens
acaaaaaaattagctaggtgtggcggtgtgtgcctgtagtcccagctgctcgggaggctgaggcaggagaatggtgtaaacccgggaggtggaggttgcaktgagctgagatcgcgccactgtactccagcctgggcgacagagcaagactctgtctcaaagaaaaaaaaaagaaaatgttctacaattaaacaggggtga

SEQ ID NO: 14941 - DNA, 201 bp, Homo sapiens
agttcaatggcctgatctcggctcaccgctgcctcccaggttcaagcgattctcctgtctcagcctcccgagtagctgagattacaggtgcccgccaccaygagcgactaattttttgtattttcagtagagacggggtttctccatgttggtcaggctggtctccaactcccgacctcaggtgatccgcccgcccagcct

SEQ ID NO: 14942 - DNA, 201 bp, Homo sapiens
gaggaaaccaacaaatgaagtgcaaggtagaacagcccttttgtctgcagaacaagcatgccatggttcttaccagttcatgaaggcagaggcagatggcyagtatcatcctgaaagtcagtgtgtgaatgggagtgcaagggtggtgtgtttttggattaaggtaatgcccttttgagttgcatctcaattctcggttta

SEQ ID NO: 14943 - DNA, 201 bp, Homo sapiens
aaatgaaccacattgagcttaaagtggttcatttatacaaatttattaacagcctcctgtttgttcaactctcaatgtaatttgtctgaggtataagactkataagccaataacagaggtggctgatatttcaacctatttttgctttactctttctgttccaccactctgccttccatgagaatattgcagattcttgtt

SEQ ID NO: 14944 - DNA, 201 bp, Homo sapiens
agcttgttgctgacatagtaataatttggttgtttgcacattttataaaatactaaaatgttgcaagttaccatattccttaaataacttatggtaagatsttattgctgaagtgttggcttgtgtgtaggagggaaattatgtgttacagtgttatataaaactgactcatatgagtaggtgaaagatcccaagaatacc

SEQ ID NO: 14945 - DNA, 201 bp, Homo sapiens
ttataaaatactaaaatgttgcaagttaccatattccttaaataacttatggtaagatcttattgctgaagtgttggcttgtgtgtaggagggaaattatrtgttacagtgttatataaaactgactcatatgagtaggtgaaagatcccaagaataccaggacacccacactagaaaaagccaatatgtacactttctct

SEQ ID NO: 14946 - DNA, 201 bp, Homo sapiens
ccatttcatttctcaacttcttcgattttgttctccatttgctctcctatagactgaaatgccttctaccgccccatttttagtttctcttggtgatagcwtgccctccaggctgaggctattttttagttcatcctgcctgcccagactaacaaagcttctaactatatggcattcgagtggtttgtgtaattctctttt

SEQ ID NO: 14947 - DNA, 201 bp, Homo sapiens
tggcagtattttttctttctacaccatgaatgtcattcggttgccctcttgcctctgttggtctgatgaaaagtcagcccctagtagtatcattgcttccrgtacataataaattgtttttctctttctgcttttaatatttcttctttgtctctatctttaaacagtttgaccctgatgtatctatgtgggcttcttttg

SEQ ID NO: 14948 - DNA, 201 bp, Homo sapiens
ttcattcatttttcttaaaccttttattctctgtgtacctcagattggataatttctattgctctatcaaattcactaattatttgttctcataagtttgkgatcccagtgttagtttccgtttgctgcatacaaattaccacaaacttagtagcttaaaatgatacccatttgtcactcacagtttgtaggttagaagtc

SEQ ID NO: 14949 - DNA, 201 bp, Homo sapiens
cttcatcaaactgcattataccagttaaataaaaatctttgctggcagggaaagctaggtatctgtttgttgttttcagtttgccaggtgattccagtgtstagtcaaatttgagaaccataaagctaaatttcacagaaatagtcctagaatcttaaatatattttctaaaatcacgaatgtgatgagtggtagagtcat

SEQ ID NO: 14950 - DNA, 201 bp, Homo sapiens
gcggtgtgtgcctgtagtcccagctgctcgggaggctgaggcaggagaatggtgtaaacccgggaggtggaggttgcagtgagctgagatcgcgccactgyactccagcctgggcgacagagcaagactctgtctcaaagaaaaaaaaaagaaaatgttctacaattaaacaggggtgatggttgccaaagtctgaatata

SEQ ID NO: 14951 - DNA, 201 bp, Homo sapiens
atagtgacacagcccatcaaaacctctaggatacagcaaaaacagtgctaagaggaaagatcatagcattaaatgccggcatcaaaaactgtgaaagagcrctaataagacaatctaaggtcatacctcaagaaactagagaaacaagaacaaaccagacccaaacccagcagaagaaaagaaataacaaaagtcagagca

SEQ ID NO: 14952 - DNA, 201 bp, Homo sapiens
tttgtttgtttgtttcttttgtttttttgagacggaatcctgctctgtcgccaggctggagtgcagtggcacgatccaggctcaatgcagcctccgcctcmtgggttcaagcaattctcctgcctcagcctcccgagtagctgggactacaggcacacaccaccacacccagctaatttttgtatttttagtagagacgag

SEQ ID NO: 14953 - DNA, 201 bp, Homo sapiens
agcatggtacaggctgtcagtggatctaccattctggggtctggaggacaggtggccctcttttcacagctccactaggcagtgccctagtagggactctrtgtgaggactccaaccccacatttcccttctgcactgccctagcagaggctctccatgagggccccaaccctgcagcaaacttgcctaggcatccagtca

SEQ ID NO: 14954 - DNA, 201 bp, Homo sapiens
gtgttagccaggattgtctcgatctcctgacctagtgatccgcctgccctggcctcccaaagtgctgggattacaggcatgagccactgtgcctggctgaraagttttaaatttctaatctattcttattcttttcttagatttggtttagtgaatatataaactaacttacaggtgtagaaaaaccagtttttcccaatc

SEQ ID NO: 14955 - DNA, 201 bp, Homo sapiens
tcaacaccacatggaagctgccaaggcttggggcttccaccctctgaagccacagcccaagctgtacgtcggcccctttcagccatggctggagcagctgrgatgcagggaaccaagtccctaggctgaacgcagcacagggaccctggacctggcccacaaaaccactttttcctcctgggcctcctggcctgtgacggg

SEQ ID NO: 14956 - DNA, 201 bp, Homo sapiens
taggttgtctgtttaccctgttgatagtttattttgctgtgcagaagctcttaagtttaattagatcccacttgtcaactgttgcttttgttaagactgcytttggtgttgtcatgagaactttgctcattcgtttgtccagaatggtattgcctatgttgtctcccagggcttttatacttttgggcctggaggctctgt

SEQ ID NO: 14957 - DNA, 201 bp, Homo sapiens
gaaaccccgtcactaccaaaaatacaaaaattagccgggtgtagtggtgtgtgcctgtagtcccagatacctgggaggttgaggaaggagaattgcgtgarcctgggatgtggaggttgttgtgagccgagattgtaccactgcactccagcctgggtggcaaagccagactccctctcaaaaagaaaaagaaaatggaaa

SEQ ID NO: 14958 - DNA, 201 bp, Homo sapiens
ctcatgcctgtaatcccagcactttgggaggccaaggcgggtggatcacctgaggccgggagttcgagaccagcctgaccaacatggagaaaccccgtttytactaaaaatacaaaattagccaggcgtggtgttgcatgcctgtaatcccagctgctcaggtggctgaggcaggagaattgcttgaacccaggaggcaga

SEQ ID NO: 14959 - DNA, 201 bp, Homo sapiens
agccaggcgtggtgttgcatgcctgtaatcccagctgctcaggtggctgaggcaggagaattgcttgaacccaggaggcagagattgcagcgagccaagaktgcaccgtggcactccagcctaggcaacaagagcaaaactctgtctcaaaaaaaaaaagaaaagaaaagaaaaaaagaagaaataacctctcttgttaca

SEQ ID NO: 14960 - DNA, 201 bp, Homo sapiens; identical to SEQ ID NO: 1810

SEQ ID NO: 14961 - DNA, 201 bp, Homo sapiens
ttggtataccttatttatttaatttaattaattaattttttttttttttggagacggagtgtcactctatcgcccaggctggaatgcagtggcaccatgtyggctcactgcaacctctgcatcctgggttcaagggattctcctacctcagcctcccgagtagctgggattacaggcaccaccaccacacctggctgactt

SEQ ID NO: 14962 - DNA, 201 bp, Homo sapiens
tagttttgttacaaactgagtgcctctcagaatataacgtgacaccattttgtctactaatcagctgtaggtgaagcagcccatgtctagcccatatttartctagttgttttgatttattgaattatatgctaaaaaacctgagcatttctgttatagtctctatattgtggacatgtagaggttacagcaagtatatat

SEQ ID NO: 14963 - DNA, 201 bp, Homo sapiens
aagctaaactttaaagattctgttctaaaggttattgtttattgtttcctatgagtttgaaacatagttctgaaatggtattttattatcactcaacaatytgatagatttaaatggcatgtgcttatatgtatccctattcgtgttttctctctgaaatggaggctcttgttacatgaactatgatattctttgtgtaca

SEQ ID NO: 14964 - DNA, 201 bp, Homo sapiens
tttttttttattctttcacctattaatggacatttggaatatttctgttttagactattgtaagtcaaagtggtataatcattcatgtacaggcctttgtrtagtcatatattttcattttccttgagcaaatacttggaaatagaactggtgagtcataaaagtatagatttaacttgataaaaaaaactgccaaattgt

SEQ ID NO: 14965 - DNA, 201 bp, Homo sapiens
ggcttcctgaatacagcacactgatgggtcttgtctctttatccaatttgccagtttgtctgtgtcttttaattggagcatttagcccatttacatttaargttaatattgttatgtgtgaatttgatcctgtaattatgatgttagctgattattttgctcgttagttgatgcactttcttcctagcctcgatggtcttt

SEQ ID NO: 14966 - DNA, 201 bp, Homo sapiens
tcaggagctcttttagggcagacctggtggtgacaaaatctctcagcatttgcttgtctgtaaaggattttatttctccttcacttatgaagcttagtttsgctgcatatgaaattctgggttgaaaattcttttctttaggaatgttgaatattggcccccagtctcttctggcttgtagagtttctgccgagagatccg

SEQ ID NO: 14967 - DNA, 201 bp, Homo sapiens
aatattgttatgtgtgcatttgatcctgtcattatgatgttagctggttgttttgcctgttaattgatgtagtttcttcatagcattgatggtctttacamtttggtgtgtttttgcagtgactggtaccggttgattctttccatgtttagtgcttccttcagtaggtgttgtaaggcaggcctggtggtgacaaaatct

SEQ ID NO: 14968 - DNA, 201 bp, Homo sapiens
agtttctgtataatattttatttgtaaaaaacttgcattgctttaaaaaaacaagtgtaagattgacttttcttgattcttagcttcgtgtcctcttcttrtatattatagtgaggcaaagtgtgtctctttctcttaacctttatctaattttactcatcagtggttcagaagttttcagtagaatgatttaatctttga

SEQ ID NO: 14969 - DNA, 201 bp, Homo sapiens
ttcctttttcattttatgtaacgatttagtaaccattaggtaagttaatttgtacttttcttaaaaaaaaaactttcacaaaggcgtcctttctttctccytctttttaatatatacgagacccatcttaaaagggtgtacgttctgaatctgagtagggaatctccatcattgtttaattaacatttccaaaaattacct

SEQ ID NO: 14970 - DNA, 201 bp, Homo sapiens
gactttaatcatcttttcatttaaaagtttttgtcatcaatgatatttaagctaaaaaaggtttcttacagttacaattaggtaaactataaccatgaagwtatatatatatatatttagaaaattttattagaaaaaccatttgctgttcactaatcctaatttggaaagcacctcttcttcaccttttacttaactatc

SEQ ID NO: 14971 - DNA, 201 bp, Homo sapiens
ttctataataaatagcaggcgctgggaataagggcaacaatgagtaaacttgccctttaaaagcgtaaaaccaagtcttaaaaggaatgaggtatttgccrttactcaatttgccttccctaagaaaacttaacctaacccctcttgggagaagatactactacccaaagcttctgtgaattttttactcaagatatctgg

SEQ ID NO: 14972 - DNA, 201 bp, Homo sapiens
atagatagtgatgataaaatgcttaattttaccttttatagtttttactcttggatgcccactgacagtgctgtagctccacgtaattgacattatgtccrcaaattatgtcaatgaataataggggtgatgatatacttaaaaaaaatcatgaaacgtatccttcaagatactcagtcctactgagtccagagagtcggc

SEQ ID NO: 14973 - DNA, 201 bp, Homo sapiens
tgagaataaggaacacaataggctcgaattgggtaggactagagagtgattttatatgtatatataatgtatatatataagtatatataatatatatatawatatataatataaatatatatttataataatatataataaaacatataatatatattattgtatatatttttatattttatatatatatatgtatatata

SEQ ID NO: 14974 - DNA, 201 bp, Homo sapiens
tgaggcaggagaatggcatgaacccaggaggtggagcttgcagtgagccgcgattgcaccactgcactccagcctgggcgacagagcaagactctgcctcaaaaaaaaaaagaaaagaaaagaaaagaaagaaagaacccatcccagcactttgggaggccgaggcgggtggattacctgaggtcagggattcaagaccag

SEQ ID NO: 14975 - DNA, 201 bp, Homo sapiens
gctttcctccaccctttttttttttttgacatggagtcttgctccattgcccaggctggagtgcagtggtgtggtcttggatcatgcaacctccacctccyaggtttgagcggttcttctgcctcagtctcccaagtagctgggactacaggtgcatgccaccacgcccagctaatttttgtattagtagagacacggttt

SEQ ID NO: 14976 - DNA, 201 bp, Homo sapiens
tgaggcagcgcttcatgcctagagcttcaaagtactgagactctccaagcagaaaggaggatgccagccagtgctatcctcatgtcccctatcacctatarggagtgtctctatctccctatcaccttccctcatagggaaagtcaaaacatgctcacacagttcttgttttgacatgtcagtttcaccaacccttcattt

SEQ ID NO: 14977 - DNA, 201 bp, Homo sapiens
atttttttccaagaggcttactttgcaagatactatgcttaatatcttctcttgcacttgcgccaagcccactctctaccagccagacctggaagagtagrtgaggcagcgcttcatgcctagagcttcaaagtactgagactctccaagcagaaaggaggatgccagccagtgctatcctcatgtcccctatcacctata

SEQ ID NO: 14978 - DNA, 201 bp, Homo sapiens
atgagaaaaaatgctggtaggaaatatacccaaatttaatagtaactgcctttgggtggggatattatagggatttctttttctactctttctaaaattcycaatttttctattgtgaacatttattatttctataattatagaagactaacataatttttttccaagaggcttactttgcaagatactatgcttaatatc

SEQ ID NO: 14979 - DNA, 201 bp, Homo sapiens
tgtgggcaagaactgtgtcttacatttttagtgcaccacaagctaaaaagaaaaatcatgggtttgggagacacagatatccgggttcaaataatggctcygtcagttagtggccctaaccaagtcattcccattttctgagccttagttgtctcatagcgaatggaatcatatctatactttaaagggttattgtgagga

SEQ ID NO: 14980 - DNA, 201 bp, Homo sapiens
ccttccaaggaattagccactggatactcagtataaaacaagcctaccaacacacacacacacacacacacacacacacacacacacacacacacacacasagcaatcgagcttgctggccaattatccctttgtaaatgtaatttttttttttgtaaatgcctatatacatgggtattctgaagtgtttcaacacaagaa

SEQ ID NO: 14981 - DNA, 201 bp, Homo sapiens
ggacctgctgatactggcccagagcaccagcaagagttggagagtaaacttctgctgaaagcagacaggaatatgttatctaatttcaaatgcgaagattmtaaatttgaaaccatcgaaaaaccccagtcctgaagaaataaagtaaaaattaatctggtaatttgtcatgaatttgttgcacaactaatcagaagtatc

SEQ ID NO: 14982 - DNA, 201 bp, Homo sapiens
aaagtcccttccaaggaattagccactggatactcagtataaaacaagcctaccaacacacacacacacacacacacacacacacacacacacacacacasacacagagcaatcgagcttgctggccaattatccctttgtaaatgtaatttttttttttgtaaatgcctatatacatgggtattctgaagtgtttcaaca

SEQ ID NO: 14983 - DNA, 201 bp, Homo sapiens
acttcaaagtccaacaaatgaccctgtgacagcaaattacagtcacttgattcttaatgttcaaaaataattaacttttaaaggtttaatcatctcataarttgaagtggttaggaaattctttcaacactttttccccccaaagtttgcctatttcccacagatctgtgatctcactggtgataatcattgaaaatctgt

SEQ ID NO: 14984 - DNA, 201 bp, Homo sapiens
cagatcacttgaggtcaggagtttgaaggcgaaaccccgactctactaaaaatacaaaaattacctgggcatggtgatgggtgcctgtaatcccagctacycggcaggctgaggcaggggaattgcttgaacccaggaggcagaagttgcagtgagccaagatggcgccactgcatgccagcctggctaacagagcaaaac

SEQ ID NO: 14985 - DNA, 201 bp, Homo sapiens
gaaatatcaaactaagggagtctttaggaatggaatacatgaaatctgcttagtcactaagctggtttatttggggtcaaggatcttattttggagaaggraaatttagagttcagagaaagtactgccatttttccctcccttgttacacttcagaaagttgtaaaatgaaagaaaaaggtaatttagaatgtactaaag

SEQ ID NO: 14986 - DNA, 201 bp, Homo sapiens
  misc_feature (101)..(101): n is a, c, g, or t
ttgtagtttcttttgcctttattcttatagactccactcatttgcaaagttaatagatctgcacctctctccaccacacccaaaattccctttggtaaggntatttcttacatttttaatacagctagattgttttgtcacattctgcatcccatccccaacctcaaggttttcttaaatttgcatacattaaggtttact

SEQ ID NO: 14987 - DNA, 201 bp, Homo sapiens
cgattcctcagtcacatgtcacatgctcaatagacgtaggtggccacaggctactacactggatagaacagctataaaatgtgtccatcagcacagagggygccactggaacagcacttgtgtcactgatgaggccacatccacaccacacaattctgaataatacaagtcagcaaagacttacatatctatttatcagca

SEQ ID NO: 14988 - DNA, 201 bp, Homo sapiens
gattgtttgtaaactcaaaagatacatacttgaagggatggatactccattccccatgatgtgcttatttcatattgcatgcctgtaccaaaacatctcaygtaccctaaaaatatatacatctccaatgtaccacaacaacttaaaaaaaatagaaaacaataaatgcataaaacacttctagaaggagaaagaaaacac

SEQ ID NO: 14989 - DNA, 201 bp, Homo sapiens
ttctggggcaccggcttggatgagcttgccagttgttactcacccaagacatttctccaaccatcattttcagcttataaactaatggtaagtgttaattmttgatgccctgaaaggtcaataaaacattacaaaggatgggtacaaaaaaaaatggaaagaatgaataagacctactatttgatagcacaatagagtgac

SEQ ID NO: 14990 - DNA, 201 bp, Homo sapiens
cattgtcctgcctcagccccccaagtagcaggactgcaggcatgcgccaccacgcctggctaatttggtatttttagtagaaacagggtttcaccatgttsgccagcctggtctcaaactcctgacctcaagtgttccacccaccttggcctcccaaagtgctgggattccatgcatgagccaccacgcctggccagatcc

SEQ ID NO: 14991 - DNA, 201 bp, Homo sapiens
aaatatgattaagaaataggatcaaaactttaagcagttcctatttgtttttgagatggagtctcgctctgttgctcaggctggagtgcaatgaacggtgmgatcttggctcactgcaacctctgcctcccaggttcaagccattgtcctgcctcagccccccaagtagcaggactgcaggcatgcgccaccacgcctggc

SEQ ID NO: 14992 - DNA, 201 bp, Homo sapiens
aaactcctgacctcaagtgttccacccaccttggcctcccaaagtgctgggattccatgcatgagccaccacgcctggccagatcctatttcttaatcacrtttagtgccatttacttgagccaagtagaccctttttttcttatttttggtattgacccatttcatttcatctaccttcttttcttctgtttccttcaaa

SEQ ID NO: 14993 - DNA, 201 bp, Homo sapiens
cccacagatctgtgatctcactggtgataatcattgaaaatctgtgaacctaatacaaatggactttcattaataccttttgtaatcagttgagataaaartagaactccatttctctaattcccaaaactactgaaaacctagtacgttaggggtgatttcagcattgctgagctccctcagggatctctgaccgtgatt

SEQ ID NO: 14994 - DNA, 201 bp, Homo sapiens
ctgtgaacctaatacaaatggactttcattaataccttttgtaatcagttgagataaaagtagaactccatttctctaattcccaaaactactgaaaaccyagtacgttaggggtgatttcagcattgctgagctccctcagggatctctgaccgtgattctcaaccttggttttgaaacctcaacaaccacagtaagaaa

SEQ ID NO: 14995 - DNA, 201 bp, Homo sapiens
ttccactcacaggggtcacagcttctaagatgccatgcttaagatcctcttcatttattttttatttttttattttttttattttttgagatggagtctcrctctgttgcccaggctggagtgcagtggtgcgatctcggctcactgcaagctctgcctcccgggttcacgccattctcctgcctcagcctcccaagtagc

SEQ ID NO: 14996 - DNA, 201 bp, Homo sapiens
cacaagaaaaggggaagaaatcccttagtggtattattttaactttttataaaacaaactttatagataccatttccagaatatatttcatatttttcacytgtttcatgttttgtacatttgttgtcactttcttaagagtttctatttgtttgaagtttataatctaatcattttattgaaatatcaaactaagggagt

SEQ ID NO: 14997 - DNA, 201 bp, Homo sapiens
ttccaaggaattagccactggatactcagtataaaacaagcctaccaacacacacacacacacacacacacacacacacacacacacacacacacacagagcaatcgagcttgctggccaattatccctttgtaaatgtaatttttttttttgtaaatgcctatatacatgggtattctgaagtgtttcaacacaagaaaa

SEQ ID NO: 14998 - DNA, 201 bp, Homo sapiens
cttccaaggaattagccactggatactcagtataaaacaagcctaccaacacacacacacacacacacacacacacacacacacacacacacacacacagagcaatcgagcttgctggccaattatccctttgtaaatgtaatttttttttttgtaaatgcctatatacatgggtattctgaagtgtttcaacacaagaaa

SEQ ID NO: 14999 - DNA, 201 bp, Homo sapiens
cccttccaaggaattagccactggatactcagtataaaacaagcctaccaacacacacacacacacacacacacacacacacacacacacacacacacacmgagcaatcgagcttgctggccaattatccctttgtaaatgtaatttttttttttgtaaatgcctatatacatgggtattctgaagtgtttcaacacaaga

SEQ ID NO: 15000 - DNA, 201 bp, Homo sapiens
tcccttccaaggaattagccactggatactcagtataaaacaagcctaccaacacacacacacacacacacacacacacacacacacacacacacacacacagagcaatcgagcttgctggccaattatccctttgtaaatgtaatttttttttttgtaaatgcctatatacatgggtattctgaagtgtttcaacacaag

SEQ ID NO: 15001 - DNA, 201 bp, Homo sapiens
ttgtagagacagggtctcactatgttgcccaggttggtcttgaacttgtgagctcaggtgatcctcccaccttggcctcccaaagtgctgggattacaggygtgaggcactgcacccagcccaacttaactctttattctgattttctgttattttaaatattatgaagaatcaacagactgcttcctagtgggcctccta

SEQ ID NO: 15002 - DNA, 201 bp, Homo sapiens
agattctgacagcagtggcagaggtggtggctcaggcacatagagtccccatgattcttcagaggctcttcaagttctcctctgtcattcggtcagtagtstcactccctttgcagaagaacgttggtgtcacacagtggcatttaacaagaaacttggtcccatacagaaactcttcgtggacaacattagggactacaa

SEQ ID NO: 15003 - DNA, 201 bp, Homo sapiens
aacttaacagaagtaaattttcaacaagctttaaatgttgaatgtaaataaaatttccctttcatatattattcttctgttatagacactgaaacagtttyttgtgttttgttttttttttgagacagagtcttgctctatcacccaggctggagtgcagtcacatgatcttggctcactactacttccgccatccaggct

SEQ ID NO: 15004 - DNA, 201 bp, Homo sapiens
gcttataaactaatggtaagtgttaattcttgatgccctgaaaggtcaataaaacattacaaaggatgggtacaaaaaaaaatggaaagaatgaataagasctactatttgatagcacaatagagtgactatactcaacctaatctgtacattttaaaataacttaaagagtgtaactggattgtttgtaaactcaaaaga

SEQ ID NO: 15005 - DNA, 201 bp, Homo sapiens
ggtggtggctcaggcacatagagtccccatgattcttcagaggctcttcaagttctcctctgtcattcggtcagtagtctcactccctttgcagaagaacrttggtgtcacacagtggcatttaacaagaaacttggtcccatacagaaactcttcgtggacaacattagggactacaaatctaagccacaggcatctgga

SEQ ID NO: 15006 - DNA, 201 bp, Homo sapiens
gaagtaacccgaagtattaaagaatagctgtgatttgagcccctacatgtactgatcaggtcactctataaaatcaacaatacatattataaaaagggggkttggagggaaataaatacttgtgcataggatctacattttccctttcgtcttatagaagtaatccacatgctttattaaaacataaacaaacaaaaacaa

SEQ ID NO: 15007 - DNA, 201 bp, Homo sapiens
gccatggttcccagccactgaaatagtctcactttgaccctgaggagtaatcatttgatttttaaaactgagacatggcaatgtgcaaggaagttccaagraaactataccaagacagaaacagcaggaggaggagaagaaggaggaagaagaagggaaggagctcaaagaggaagatttgctttgcttctctactccact

SEQ ID NO: 15008 - DNA, 201 bp, Homo sapiens
atctggaggacctgctgatactggcccagagcaccagcaagagttggagagtaaacttctgctgaaagcagacaggaatatgttatctaatttcaaatgcraagattctaaatttgaaaccatcgaaaaaccccagtcctgaagaaataaagtaaaaattaatctggtaatttgtcatgaatttgttgcacaactaatcag

SEQ ID NO: 15009 - DNA, 201 bp, Homo sapiens
ttgatagtatgtaccttttatatggtgtgatgaaaacagcactttacctttgggtcttcttcccaaaacccataattctcagtgtaatgatgaaaaaaaaatcagaaaaaacccaattaagggacattctacaaaattcctgactagtatttattaacggcagcttgatcctaatgggatcctggaatagaaaacggaaat

SEQ ID NO: 15010 - DNA, 201 bp, Homo sapiens
attgttttgtcacattctgcatcccatccccaacctcaaggttttcttaaatttgcatacattaaggtttactcggtgcactctaatgttctgtggatttkgataaaggcatagtgttgtgtacctacaattcaagaatcaaagaacacctttaccaccctaaaaaaaagatatatacaatgttgatgatatgtaaaaagg

SEQ ID NO: 15011 - DNA, 201 bp, Homo sapiens
gatagtatatctacatagtatatatatactctatagagtatatatatactatatatactatactatatatactatctatgtatatatatctatatatactmtatatcgatatatagtatatattgatatgtactatatatcgatatatagtacatatcgatatatactatatacaggtattgctatccacatgtaaataag

SEQ ID NO: 15012 - DNA, 201 bp, Homo sapiens
atacaatatatagatgtatagtatatatcgatatataccatatatacgatatatcgtatatatggcacatatagatgtatacgatatatcatatatatggyacatatagatgtatacgatatatcgtatatatggtacatatagatgtatacgatatatcgtatatatggtacatatagatgtatacgatatatcgtatat

SEQ ID NO: 15013 - DNA, 201 bp, Homo sapiens
caagtcctgcattaagctccattgattttgcttaagttcttactttgtgaagttgccatgtaactctgaggacactagttaaagtatattgaaaataattytgattcacaggaaaaaaaacagtgtctccatggggttaataagatctcaagagtgaactccctgagaggtttccatttggcacctgtgtggcagatgaat

SEQ ID NO: 15014 - DNA, 201 bp, Homo sapiens
ccacagtttttaatactactagacattgttcctggaaagtcataaaatatccagataaaaggaggcaaggcctctgaggctaggataagcctttcctggayaagctgagccagtgcagtgacaacttaaatatatgcttcatcatatgcagccttaacttctagcataaggtgaaaatcagggatggataaagccttcctc

SEQ ID NO: 15015 - DNA, 201 bp, Homo sapiens
agaaatccctcctattaggaagaacccacggacttcaggagagcagcatccgataatgttacattccaattttcccaaaccttcaaaaaaaaaaaaaaaaacctcttacatgccatagacttgttcacagacttaataattttaaaatgcaaagtttaactgactatattttatatagatttaatattgtatatataaaga

SEQ ID NO: 15016 - DNA, 201 bp, Homo sapiens
tgcagtgtcccactcactcacggactttattctctcaaaatgaaatgatgggtacagccaccccgaggtgtgaattctgattttcctccctacctcccccmacccccagcactttttattttttacagagcccataaaattgaattcacataaaatagacatgaatcgggagcatggtacaaccactgttgtcaaaaattg

SEQ ID NO: 15017 - DNA, 201 bp, Homo sapiens
tcctgaagccaatggaagaagaggggataataaaggcctttgaacaggactgagacaagattagatttttggagggtgaattggaagaaaaagactggagrcaggaagaccaaggggacgctgatgtaataaaccagggaagagaagatggcagtgtgaacttaggcaaaggtcgtggagaactgaaagagatgatggact

SEQ ID NO: 15018 - DNA, 201 bp, Homo sapiens
gaaactctatggagaggctgggcagttgtgttttaacaagccccatgatgtacgctaaagttatctaagaactctgatcccaagaaacaacttaaaatacrcacacacacaggagtcagctctggaaaagaggaaatattgtgtcattagcatatcagaaaatttgaagaagccctgaaagagcaaagctgatgtgttcac

SEQ ID NO: 15019 - DNA, 201 bp, Homo sapiens
tgtagaaaaaaaatatattagtaagggaatgagaatgttttaggaggaactccagaataggagaatactaaaaatggcaggggcaaaaaaagaaaaaaaaatcaaagaaataatataagaaaaattcccagcggaagccacagacgccaggagccctgtactctcagccatggtgaatcccaccgtgttcttccacattcc

SEQ ID NO: 15020 - DNA, 201 bp, Homo sapiens
gtcaaggagcactgcctatcctaactctaagtctggagttagagcccgttgagtctgtggtagttccttttgcttttgatatttagttagcaggaaaactragaggatattgaatttcattaacacttccttagaagcacatttccttagaagcatgaatattgcttggattctgaacactctgaatcttcaccaagagaa

SEQ ID NO: 15021 - DNA, 201 bp, Homo sapiens
ttagtcagtctgtctcacttagtgaggactttctgtgtgtcagaacttgctgttctgaacacgtcttttaaaaagggaggtaagtccctcaatggggaatktattggctagcagaggcagatgggtggtaaacatgtaaggacattagccataaagataactttagatatgggagattgccatgaagaggataaagtaagt

SEQ ID NO: 15022 - DNA, 201 bp, Homo sapiens
cacttggaattttgggttttacatgcacagcaagtgtggctagtactgcatcccttgtcctcccttccatggcaagggcaaagggcaaaaaacagatggasttccctaaagattcatcattgtcaccagaagaatagctgggtttcctataagagactagatgccgtcttccttcatttatgcaactgggggacaggaaag

SEQ ID NO: 15023 - DNA, 201 bp, Homo sapiens
tagccgagatcgcaccattgcattccagcctgggcaaaaagagtgaaactctgtctcaaaaaaaaaaaaaaaaaatggagataccatatccttgatatttrtaagaccaacatgtccttgctggctacaaaaaagttcaatcaaataaattctttcttccatctggttaaatacaacttgattacatgaagagaaacttaa

SEQ ID NO: 15024 - DNA, 201 bp, Homo sapiens
tgggcggatcacttgaggtcaggagttcgacaccagcctggccaacatggtgaatccccatctctactaaaaatacaaaaattagctgggtgtggtggtaygcacctgtaatcccagctactcgggaggctgagtcatgagaatcacttgaacctgggaggtggaggttgtagttagccgagatcgcaccattgcattcca

SEQ ID NO: 15025 - DNA, 201 bp, Homo sapiens
atttttggggggcagtactagtctataatgttctacccacagtctcatcctggttttccagaaatgtgactgtggcactttaaggcctgtgtaggaacttkaatttatataagaattctgtatttccccccttctcactactgcacttgactattaaaaaaatgttttaaaataattctgtagatatttgctacaaagctt

SEQ ID NO: 15026 - DNA, 201 bp, Homo sapiens
cattgtgcagacagagcaatattttagcaaagacaaggccacatggatcatttgatctttgttgagctgggaaactgcagttaaaatggagatactggccrggcgtggtggttcacgcctgtaatcccagcactttgggagggcgaggtgggcggatcacttgaggtcaggagttcgacaccagcctggccaacatggtga

SEQ ID NO: 15027 - DNA, 201 bp, Homo sapiens
tgtgtggataaaagagaatggagtggagaatgaaaccccagaggcattttgaaaaagttgcttatggagatcagagggtaaggaggaaaatttgaaaattrggattgaggtaaagttacgctaagggaagcatcaagaaatatgttcattgactgtactgtccatgacgtagccactaacccatgtggttcagtgagcact

SEQ ID NO: 15028 - DNA, 201 bp, Homo sapiens
ctcatgcctgtaatcccagcactttgggaagccaaggtgggtgcatcacctgaggtcaggagtttgagaccagcttggccaacatcgtgaaaccctgtctytactaaaaatacaaaaattagctggcgtggtggtgcatgcctttaattccagctactcaggaggcagaggcaggagaattacttgaacctgggaggcgga

SEQ ID NO: 15029 - DNA, 201 bp, Homo sapiens
tttcttaaatactaaatcacattaattggctgtttcccattgcaaatatttgaattaataaggatctttttatcacatgtaattttaaatgatcttttagwttttcagctttgctgcaacacagatggaactaaaacaaaattgtataatgctgaagtgacccaaggagaaaacctctcacataattttgtgcagagagtg

SEQ ID NO: 15030 - DNA, 201 bp, Homo sapiens
gctcacctgagcccaggaggtcaaggctgcagtaatctgtgattgtgccattgcactccagccttggtgacagagcgagaccctgtctcaaaaaaaaaaaraaaaaaaaaaagaaaaaagtgaaaaaaaagagtgttagaaaatattattaatctgtcatattgatccaggtttccaggtggtcatttctataaggctaga

SEQ ID NO: 15031 - DNA, 201 bp, Homo sapiens
tctaagtgtaatgagaagttttgtttatttgttttcttaaacatctttactaaggtatatttttacatcataaaattcaactgttttgagtgtgcaattcratgatttttataattgaattaattaatttataattataattatatattaattataattcaggagagcaaccatcaacataaatcagttttagaacattct

SEQ ID NO: 15032 - DNA, 201 bp, Homo sapiens
ctcctgtatcttccacctcttcccctcttcagttatattcctaccacccagagatttgtgctgttaacatattgatataatcctttcaggtttttaaaaartatgtgtaagagtacattttattatacctcattggaatttttatcaattaaagttcaaaatgaagtagggggagcagagttactatgttataggacttat

SEQ ID NO: 15033 - DNA, 201 bp, Homo sapiens
acaccttgccgttagcccagagaaactgatttcagacatctggactccagaactgtaagaaaataagtttgcattgttttaagccactaagtttgtggtawttttttgtaagaggcctaggaaacaaatgcacatatccagacacaaagggagaccaccaagggagcatctctggagaagtctgttgaaagctgctgcctc

SEQ ID NO: 15034 - DNA, 201 bp, Homo sapiens
ctctgaatcttcaccaagagaagaaacaaaatgccgtggcaaaacggtaggagttgtctttggttctcctttagctccagtccatttcttgacataaactycctccatccttgcagacctaccccccatttggtatctgttgaccttcattgtgccctaagctgccttcccctccccttttcttgagaattttacatattt

SEQ ID NO: 15035 - DNA, 201 bp, Homo sapiens
gaatctttgtgctcttgctgcagttccctttgggttccatgttttccttgttcccttccatgactagctggattgcagagttgaattaagtttatgattakgaaataaaaactaaataacaaaaagaaagaaaaattcccagagctgaacaatgacacgttttcagattaacagttcccacaaaatgctaagcaggttgga

SEQ ID NO: 15036 - DNA, 201 bp, Homo sapiens
aaacagaaggatggtccaaaggaatcacgaagtaatcctctcataaaagtagtaatagctagctttgtgtacagacagatttcacataattctgatgcaarcttcacaaacagtcccatgaggtgagaaagaaatataatcattatatatttttttacagaagagtaattttaggctcagaggattaaataaaacattcaa

SEQ ID NO: 15037 - DNA, 201 bp, Homo sapiens
tcaagaacatgcagcaagttagtcagtctgtctcacttagtgaggactttctgtgtgtcagaacttgctgttctgaacacgtcttttaaaaagggaggtargtccctcaatggggaatgtattggctagcagaggcagatgggtggtaaacatgtaaggacattagccataaagataactttagatatgggagattgccat

SEQ ID NO: 15038 - DNA, 201 bp, Homo sapiens
gatagaaatttgagtcatcagcatatagagggaatttaaagctttaggacccagggagagtgtgtggataaaagagaatggagtggagaatgaaaccccaraggcattttgaaaaagttgcttatggagatcagagggtaaggaggaaaatttgaaaattaggattgaggtaaagttacgctaagggaagcatcaagaaat

SEQ ID NO: 15039 - DNA, 201 bp, Homo sapiens
gccctcctcctgtcagcaacctctctcctgcattaccaaatgctcttctttctcctcaaatgtcaggcccagccattcctcctgcatcttaacatgtgaayttacctttcaacctacagtgaaagtagaagccacaacaggaaatcccttaacttcctaccacacacctgcaaatgcaccagcttccatacctgtcctttc

SEQ ID NO: 15040 - DNA, 201 bp, Homo sapiens
aggaaagcacaatttttggcttatttcttaaatactaaatcacattaattggctgtttcccattgcaaatatttgaattaataaggatctttttatcacaygtaattttaaatgatcttttagtttttcagctttgctgcaacacagatggaactaaaacaaaattgtataatgctgaagtgacccaaggagaaaacctct

SEQ ID NO: 15041 - DNA, 201 bp, Homo sapiens
gtgttatataaacacagttaacataaggaggagagagttcaaatttctatcacttaatttttgaagatcttgaaaagagatggttcttttatttagttcargactgaaggtagggggtttttaaaaacatgctgctgggctcctgagagtaagccttatgtcagcaacccctttatatgttcgatacattttaaggggaag

SEQ ID NO: 15042 - DNA, 201 bp, Homo sapiens
agaattctgtatttccccccttctcactactgcacttgactattaaaaaaatgttttaaaataattctgtagatatttgctacaaagctttcttaaggtgytactaggcatagatgacatccacaacctaaaagaagagtgtcagtgccttgggtattttgagtatgtgtttacattgtgcagacagagcaatattttagc

SEQ ID NO: 15043 - DNA, 201 bp, Homo sapiens
atcaaagaaataatataagaaaaattcccagcggaagccacagacgccaggagccctgtactctcagccatggtgaatcccaccgtgttcttccacattcyagtggacagcgagcccttgggccgcgtctccttcaagctgtttgcagacaagtttccaaagacagcagaaaactttcgtgctctgagcactggagagaaa

SEQ ID NO: 15044 - DNA, 201 bp, Homo sapiens
agctggaacgcagtgaacaaagacaaggctggtaggagacagggtccaagaggtaggaagaagccaatcatgtagaactttgtgagctataaggagtttcrgttcgggttttattctaagtgtaatgagaagttttgtttatttgttttcttaaacatctttactaaggtatatttttacatcataaaattcaactgtttt

SEQ ID NO: 15045 - DNA, 201 bp, Homo sapiens
aggcacagtggctcacacctataatctcaccactttgggaggccaaggcagaaggattgcttgagccctcgagttcaagaccagattgggcaacatagtgrgaccctgtttctacaagaaatatttaaaaattagctggttatggtggcacacacctgtagtctcagctacatgggaggctgaagcaggaagctcacctga

SEQ ID NO: 15046 - DNA, 201 bp, Homo sapiens
aacggtaggagttgtctttggttctcctttagctccagtccatttcttgacataaacttcctccatccttgcagacctaccccccatttggtatctgttgrccttcattgtgccctaagctgccttcccctccccttttcttgagaattttacatattttgcctttccacgttgaactatgtatatccccttcctcgtcgg

SEQ ID NO: 15047 - DNA, 201 bp, Homo sapiens
gtatttcatccataagacagacactctgccctattccagctcttaaaccctagtgtgcttcagaatcactggagatgcttattaaactcctgggccactcstcctgtatctctgaatcaggaaagctgggccagggcctaggaatctgcattttaacagaaggtaccctcccctgctccaggtgattctgacttggtaagg

SEQ ID NO: 15048 - DNA, 201 bp, Homo sapiens
agacgagaaaattggaggaagagagcagtcattttcagtcatctgagaagccaagtgtttcctcctggattatccaggtgggtccaatgtgacaacaagcrtccttataagagggaggcagaaggatgtgactacagtagtaggaaatatgatgacaactggagccacgcgagggtggggacctgagcaacacatgcaggt

SEQ ID NO: 15049 - DNA, 201 bp, Homo sapiens
gcaaaacggtaggagttgtctttggttctcctttagctccagtccatttcttgacataaacttcctccatccttgcagacctaccccccatttggtatctrttgaccttcattgtgccctaagctgccttcccctccccttttcttgagaattttacatattttgcctttccacgttgaactatgtatatccccttcctcg

SEQ ID NO: 15050 - DNA, 201 bp, Homo sapiens
atccataagacagacactctgccctattccagctcttaaaccctagtgtgcttcagaatcactggagatgcttattaaactcctgggccactcgtcctgtrtctctgaatcaggaaagctgggccagggcctaggaatctgcattttaacagaaggtaccctcccctgctccaggtgattctgacttggtaaggagaccac

SEQ ID NO: 15051 - DNA, 201 bp, Homo sapiens
atttccttagaagcatgaatattgcttggattctgaacactctgaatcttcaccaagagaagaaacaaaatgccgtggcaaaacggtaggagttgtctttsgttctcctttagctccagtccatttcttgacataaacttcctccatccttgcagacctaccccccatttggtatctgttgaccttcattgtgccctaagc

SEQ ID NO: 15052 - DNA, 201 bp, Homo sapiens
ccttgccccatggccttcccttctttcctggctggaaaaccccaaatctggatggctctacactctgccttctctttcctgcacccaggctactaaatgtrctgagagaaagtcacaggcccaggccaatggtgctgctcagactagctttcaacatcatgcaaaggatcatggccctcctcctgtcagcaacctctctcc

SEQ ID NO: 15053 - DNA, 201 bp, Homo sapiens
ttatttttgaatcagttacagtctccctgccagctgagggcacataacgtttcattactggcaatactggagtcaaggagcactgcctatcctaactctargtctggagttagagcccgttgagtctgtggtagttccttttgcttttgatatttagttagcaggaaaactgagaggatattgaatttcattaacacttcc

SEQ ID NO: 15054 - DNA, 201 bp, Homo sapiens
agttcaagaccagcctggccaacatggtgaaaccccatctatattaaaaatacaaaaattagctgggcatggtggcaggcacctataatgccagctactcrggaggctgaggcaggagaatcgcttgaacccagaggcagaggctgcagtgagccgagattgcaccactccactccagcctgggtgacagattgagactct

SEQ ID NO: 15055 - DNA, 201 bp, Homo sapiens
tccactgatggcacatctcaatttgcgagttgaatgttatcagatgtacttgccccgtatttagattttcttttttttcttttcttttctttttttttttyttttttgagacagagtctcgcactgtcgcccaggctggagtgcagtggcgccatctcggctcactgcaagctccgcctcccaggttcacgccattctcct

SEQ ID NO: 15056 - DNA, 201 bp, Homo sapiens
aggtgtgagccaccgagcctggccaggtattttttttttttctcttgttctttttttgagacagagtcttgctctgtcactcaggctggagtgcagtggcrtgatcttggctcactgcaacctctgcttcctgggttcaagtgattctcctgtctcagcctcccaagtagctggcattacaggtgtggaccaccatgcctg

SEQ ID NO: 15057 - DNA, 201 bp, Homo sapiens
acttgggaggctgaggcaagataattgcttgaacccgggcagtggaggttgcagtgagcccagatcatcccactgtactccagtctgggctatagagcggractccgtctcaaaaaaaaaaaaaaaacaaaaacagatgatacaaaggttacattgcaatattggaagcataaaattaacaaaaaggaagaaggaatgagg

SEQ ID NO: 15058 - DNA, 201 bp, Homo sapiens
gaacaggatgggtgtgatggctggtataggagtcaagggtgggtgtgtactgagtgacaaaggtgggagaccttacactgaagtggaatgttgattttccmccatggcaatttcttttttctttttttgagatggagtcttgctctgtcgcccaggctggagtgcaatggcgcgatcttagctcactgcaacctccacctc

SEQ ID NO: 15059 - DNA, 201 bp, Homo sapiens
gctgggattacaggtttgagctactgtgcctggcccatagaaccatttctgacccgtttatgtcttcttggtctacttcccattgtagaggacccgtgagrtggataatatgccacccagggaacactaatctggaaattctggtgcatttgagtttcagagaatgaaatagtggaagagaaacttgcaactgccagggtt

SEQ ID NO: 15060 - DNA, 201 bp, Homo sapiens
tgttaaccagatgaatagtcaagtaatgcataagaatggcaggatttgggctgggcacggtcgcccatgcctgtaatcccagcactttgggaggtcgaggkggggtggatcacttgagttcaggagttccagaccagcctggacaatatggtgaaacctcgtctctacaaaaaccacaaacagccaggcatggtgatgcac

SEQ ID NO: 15061 - DNA, 201 bp, Homo sapiens
tttttttttagagatggggtctcactgtgttgcccagacttggagtgcagtggtgcaatcatactgcagcctcaacctcctgggctcaagggatcttcctkcctccgcctccctagtagctgggactataggtgtgtgccaccacatccagctatttttttcttttagtagagatgggggtctcattatgttgccaaggct

SEQ ID NO: 15062 - DNA, 201 bp, Homo sapiens
gagtagctgggatacaggtgtgtgccaccacacccacctgtattaatattatggctaatattttgtatttttagtagagatggggtttcactgtgttagcyaggatggtctcaatctcctgacctcatgatctgcccgcctcggcctcccaaagtgctgggattacaggtgtgagccaccgtgcctggccatatttagatt

SEQ ID NO: 15063 - DNA, 201 bp, Homo sapiens
tgggtgactcaaaccccttatgggacggggagcacacagacaggcaggtgcaggagccggggccagtgtccctgggctctggccccatggcagcatccacrggtgggagactgcaactcccaaagcccaagtggctgtgtgttacagtgtgctccttagccttgctgtctgtggatggctcaagtgttaaccagctcagtg

SEQ ID NO: 15064 - DNA, 201 bp, Homo sapiens
gacaataatttctttttgaggtgagagattgggtttcaggtgggcagggaaaggagattttttctttttcatgttatactctcatttttatttactatgtrtgtatgtatgtagtccaggctggagtgcggtggtgccatcatgactcactgcaggccaggtgcggtgcctcatgcctgtaatcccagcactttgggaggc

SEQ ID NO: 15065 - DNA, 201 bp, Homo sapiens
tctactaaaaatacaaaaattagctgggtatggtggcacccacctgtaatctcagctactcaggaggctgaggcaggagaatcgcttgaacctgggaggcrgtggttgcagtgagctgagatcgtgccattgcactccagcctgggcaacagagtgagactccatctcaaaacacaaaagaaaacaaaaccaaaaaaatcc

SEQ ID NO: 15066 - DNA, 201 bp, Homo sapiens
aggccaggtgcggtgcctcatgcctgtaatcccagcactttgggaggccgaggtgggtggattgcttgagatcaggagttcaagaccaacctggccaacayggtgaaacctgtctctacaaaaaatacaaaacttagctgggtgtggtgatgtatacctgtagtcccagctattcgggaggctgaggcaggggaatcgctt

SEQ ID NO: 15067 - DNA, 201 bp, Homo sapiens; identical to SEQ ID NO: 1832

SEQ ID NO: 15068 - DNA, 201 bp, Homo sapiens
tggggtgtgggattaaggctcaaagagcagagcagttgataatttcattattgacttacaagctgcaggaactgtgcaaaccaagaggtcaatgtgttaamcagatgaatagtcaagtaatgcataagaatggcaggatttgggctgggcacggtcgcccatgcctgtaatcccagcactttgggaggtcgagggggggtg

SEQ ID NO: 15069 - DNA, 201 bp, Homo sapiens
cagaccacagaatccaagagtgctaggaatcagaggagagagaggaaggtgaagatacggaggtccggagtaattcaaatacccaaatcacagatacttgytcctcaaggtatgttcatcaagaacaggtatctatggtatgggcatttgaattaaaaaacctggaaatcagaaatttatagtgggtgaataagttttccg

SEQ ID NO: 15070 - DNA, 201 bp, Homo sapiens
acctcggcctcccaaagtgctgagattacaggcgtggagccaccgtgcccggcctctaagggaaatattgaggtcgcagaccacagaatccaagagtgctrggaatcagaggagagagaggaaggtgaagatacggaggtccggagtaattcaaatacccaaatcacagatacttgctcctcaaggtatgttcatcaagaa

SEQ ID NO: 15071 - DNA, 201 bp, Homo sapiens
ctgcctaggcctcccatagtgctaggattacaggtgtgagccaccgagcctggccaggtattttttttttttctcttgttctttttttgagacagagtctygctctgtcactcaggctggagtgcagtggcatgatcttggctcactgcaacctctgcttcctgggttcaagtgattctcctgtctcagcctcccaagtag

SEQ ID NO: 15072 - DNA, 201 bp, Homo sapiens
ggctggagtgcagtggcatgatcttggctcactgcaacctctgcttcctgggttcaagtgattctcctgtctcagcctcccaagtagctggcattacaggygtggaccaccatgcctggctaattattgtatttttagtagagacagggtttcaccaagttggccaggctccggtcttgaactcctgacctcaagtgatcc

SEQ ID NO: 15073 - DNA, 201 bp, Homo sapiens
cgtactttccactgatggcacatctcaatttgcgagttgaatgttatcagatgtacttgccccgtatttagattttcttttttttcttttcttttcttttytttttttttttttgagacagagtctcgcactgtcgcccaggctggagtgcagtggcgccatctcggctcactgcaagctccgcctcccaggttcacgcca

SEQ ID NO: 15074 - DNA, 201 bp, Homo sapiens
ctccagcctgggtgacagattgagactctgtttcaaaaacaaaacaaaacaaaacaaaaaattacactcctttgtgtgacacaagggaataaagacaatartttctttttgaggtgagagattgggtttcaggtgggcagggaaaggagattttttctttttcatgttatactctcatttttatttactatgtatgtatgt

SEQ ID NO: 15075 - DNA, 201 bp, Homo sapiens
acaggaagggaaagtgaagacagtcagagagagactcgcaatagcactgattgcggatggactcgctaatgaggcagagaaagtgagagaccaagaaggcygtcctgaaaaacgctaagaaaaaaagggaagatagtgcagatgaaataaagtgtaatcctttattaacatctctttgcagtgtccccaatgaggtttttt

SEQ ID NO: 15076 - DNA, 201 bp, Homo sapiens
tggtagccatggcgtcacagagaacagggaccttccaagtttgaagttttacaaggcaggtgtgataagtggtaaggaattttggattaatctaaatgaatttttttttttttttttttagacagggtctcattctgttgctcaggctggagtgcaatgatgtgatctctgctcactgcaacctccacctcctgggttcaa

SEQ ID NO: 15077 - DNA, 201 bp, Homo sapiens
ggtagccatggcgtcacagagaacagggaccttccaagtttgaagttttacaaggcaggtgtgataagtggtaaggaattttggattaatctaaatgaatttttttttttttttttttagacagggtctcattctgttgctcaggctggagtgcaatgatgtgatctctgctcactgcaacctccacctcctgggttcaag

SEQ ID NO: 15078 - DNA, 201 bp, Homo sapiens
atggcgcgatcttagctcactgcaacctccacctctcagattcaagtgattctcctgcctcagcctcccgagtagctgggattacaggcacccaccactamacccagctaatttttttgtatttttagtggagttgggtttcattatgttggtcaggctgttcttgaactcctgacttcaggtgatccacctgtcttggtc

SEQ ID NO: 15079 - DNA, 201 bp, Homo sapiens
gtgagccaattaaacctcttttctttaaaaattacccagtctcaggtatttcttttttctttgtttttttttttttttttttttttttttgagacaggatstcactctgtcattcagggtggagtgcagtggtacaatcacagttcactgcagcctcaacctcccaggctcaggtgatactcccacctctgcctcctgggt

SEQ ID NO: 15080 - DNA, 201 bp, Homo sapiens
ggcaagttccagtcattgcagatcctccaggtctaggtgtgactggtagtagcctgggcactgttgctggacgttgtattctccttccttcttccgccggygggtggtcacctatgagggtgaggaggaggcgtgagaatggactggtcagccgtccagggagaggagaccacaggggtgagaatatggccaaagccagag

SEQ ID NO: 15081 - DNA, 201 bp, Homo sapiens
ttgtagagacagcattttgccatgtttcccaggctggtctcgagctcttggactcaagcaacctgcctgcctaggcctcccatagtgctaggattacaggygtgagccaccgagcctggccaggtattttttttttttctcttgttctttttttgagacagagtcttgctctgtcactcaggctggagtgcagtggcatga

SEQ ID NO: 15082 - DNA, 201 bp, Homo sapiens
gtctattttaacctgcgatggccaacatattctcatgtgtgcatgcaatcaatgtaaaaattattgagacgttttaggtgcgactggctggggctggcatwgttggtggtaaaataatttcccaagacagtcgtaggtaaagaaagacagatttattagagaagatatgaagataggttgcaaggatgcaacaggcagcac

SEQ ID NO: 15083 - DNA, 201 bp, Homo sapiens
gagggggtcccaggaagtttaggagaggagtgtctgtgtagctcggagaaacttgaacatgtttaaatgccgaagaagggattcagtagaaaaacagaagytaaagatatgggggcatctgtaatcccagcactttgggaggttgaggcgggcagatcatgaggtcaggagttcgaggccactctggccaacatggcgaaa

SEQ ID NO: 15084 - DNA, 201 bp, Homo sapiens
cagggagtctgtacttgtgagatctggttaagtgtgtggcacctttgctccccccaactctcccttgctcctgctctggccatgtgacatgctggccctcycttgtgacatgctggccctcccttggccttcaccatgattggaagcttcctgagacctctccagaagctgatcagatgctgacatcatgcttcctgtaca

SEQ ID NO: 15085 - DNA, 201 bp, Homo sapiens
atttttaaactttgtttttagtagagaagagatctcactgtattgcccaggctggtctcttgggattgagtttaatcgatcctcccacctcagcctcccaraatgctgggattacaggagtgagctattgcacctggccaacttctgtattttaatgcttaggtttgtttttcatttaacttttttttttttttttgaggt

SEQ ID NO: 15086 - DNA, 201 bp, Homo sapiens
ctgcctcagcttcctgagtagttgggactacaggcacatgccaccacaactggttttatgcttaggtttgatgaagagtggacagatacggacaagtatgrttgtggaacaagtaagtgtgagatctaatggtaataaactgggggaaacttagcaaggcctgtttgttcagattcttttctgcatccctgtgtcttcaga

SEQ ID NO: 15087 - DNA, 201 bp, Homo sapiens
aactcgttagaaatacaaattcttgggctttgcctactgagtcagaaactcaaaggatgaggcacagccatctgtgttctaacgggccctctgggggattstgatgcacgctacagtttgagaaccaaagatctatgtcattgtttctcaaagtctgagatgcgaatgcaacagtaggtgattccaagaggtatctgttca

SEQ ID NO: 15088 - DNA, 201 bp, Homo sapiens
ttctgaagagggtagagcttggaccacactttgagaaacactacttgaaaggaaacaataatataaaaaactttatgaaccttgtgatctgaatttggaartccctccattacctactggataaggttcgaatgtcaaatgacatttagggcccctcattgcctagtccctactgagcttttcaggtgcatctccagctcc

SEQ ID NO: 15089 - DNA, 201 bp, Homo sapiens
ggtcagtgctgcaaaaaaaaacccaaaaaccaaaaccaaaccaaaacaaaacaaaaaaaccggatggaaggaggcctccagtgagagtggggagtggagcygagagatgatcagaagggatttcatttgtttgtatttttcttccctcacataaggaatgtttattgatcacctattatatgtcaggcatagttgtaggca

SEQ ID NO: 15090 - DNA, 201 bp, Homo sapiens
gtcgtacatggggtcccgtaccacaggcaggcacagagcttggcagcagtgcgaccctggacagaattgtttgtgaaacgtctccccttccagacgaagtwattatagctcttgtgattttgtgtggtgcctagatttcccccgttgtacactcagttcaggagtacttactcaagtctcactcaagggcatggggacccc

SEQ ID NO: 15091 - DNA, 201 bp, Homo sapiens
ttaaggggacacaagcattcaatccattgcataccccatgctttagaattaaaaaaatataaggtgtaaattattttgtgttgggctttcataggggcaayatataacacctttctttcccatttaggttctgaactaactgaggaatagataaagaatgtagacagatggagattttaacagatgcttatgtggcactta

SEQ ID NO: 15092 - DNA, 201 bp, Homo sapiens
tccataatgttgaattacaattgcctgtttaccagtctcttccattaaactgaggtcttcacaacagtaggaactatctctgtccagttcatgattgtgcrtatctcaatgcctagactatatcgagtgcttaagatatattttgtttaggccaagtgtggtggcttatgcctataatcccagcactttgggagaccaagg

SEQ ID NO: 15093 - DNA, 201 bp, Homo sapiens
taccaggagctggggtaggaaggatgggaagtttaggggatccagagtttcagtttgggatgatgaaaaagttcctgagatggatggtggtgctggctgcrcaacaatgtgaatggcttaatgccaaagacctgtacacttaaaaatgattgagatggtagatcttgtgtgtattttaccacaagttttagaaatttaaaa

SEQ ID NO: 15094 - DNA, 201 bp, Homo sapiens
ggaatagcaccctgatcctcctttgggagctcctggggctcacctcttggggccatgtggattgttcgggactgactccatcccaaagtgccagggcaagyccactctacaggcctggccaagcagaacacccctggctccagcgattggttcagggatagccaggggccccagcaggggccagctgaccattccaaaact

SEQ ID NO: 15095 - DNA, 201 bp, Homo sapiens
tgttcaatggggaagctaattttcctaagttgggttccctggagaacagaccccaaagtggagatctgtgcacaggtttatgagacacctctcagcaacarcaactgtgagggagtgagggtggcaggcttggaagaggcctcagccaatcccatgggaagttctgaaaccgggagggtccttctgaattatccacaggga

SEQ ID NO: 15096 - DNA, 201 bp, Homo sapiens
tttgaagtctttacttctgttcttccagaattaggatctggggctcagctgtgaattgctgtcactgaagctgtccagtccttggacacacacgcagacakgtgggctgagtaatgggaatgttcttagaaagccagaggaccttggcagcattgcccagcagctccgtgacaggtcctgatggctgagagactgatttcc

SEQ ID NO: 15097 - DNA, 201 bp, Homo sapiens
tctgcttctcaaagtgtaagctttaagctagattgcaggacatggtttaggtgcatatccacagggccagctaactctccatcagggacctagactctccyaggcagttgcagagccagaggtctcctctacagtgggagatatttaaagcctttcctgtcatcactggaaatgagcaaactttgctagcaatgtagtcaa

SEQ ID NO: 15098 - DNA, 201 bp, Homo sapiens
cctctcaaataatgtccctaaagacctagtttgatccttctttcttctcagcagtcagctggttttcactctctggccctgcatgatgattccaggttctyttcttgaggtatcaactggttatagcagttccagaccttgtaaccttatatcacaccttagtgaagaggggaatgtctctttcactagctcatgcagaag

SEQ ID NO: 15099 - DNA, 201 bp, Homo sapiens
ttccaggcaccactggggtacgaaaaaaactcctgcagctagctcagtgtctgcccaaattgccacccatttttgtgcttgaaacccagggccctggtggygtaggcacccgagggaatctcctggtcggtgggttgcgaagacaatgggaaaagcatagtatctgggctggatagcactgtccctcacggcacagttcct

SEQ ID NO: 15100 - DNA, 201 bp, Homo sapiens
gagtccctctttttctattgtttggaatagtttcagaagaaatggtaccagctcctctttgtacctctggtagaattcagctgtgaatctctctggtcctrggctttttttgttggtaggttattaattatgcttcaatttcagaacttgttattggtctcttcagggattcaagtttttcctggttgaggcttgggaggg

SEQ ID NO: 15101 - DNA, 201 bp, Homo sapiens
gagaacacctggacacagggtggggaacatcacacactggggcctgtcggggggtgggagactgggggacggatagcattaggagaaatatctaatgtaamtgacaagttgatgggtgcagcaaaccaacatggcacatgtatacctatgtaccaaacctgcacattgtgcacatgtaccctagaacttaaagtataataa

SEQ ID NO: 15102 - DNA, 201 bp, Homo sapiens
ccagctaatttttgtatttttttttttttagtagagatggggacttgccatgttggccaagctggtctccaactcctgacctcaagtgatctgctcgcctyggcctcccaaactgctgggattacaggcgtaagccaccatgcccggcctggtatacaaatatttagaacatagcagtaaccgtgggcaaatcacttgctt

SEQ ID NO: 15103 - DNA, 201 bp, Homo sapiens
ggcatgagccaccacacctgccctggaacatcttctcaccctgttgtggtctgcctaacttccacaactggattagacatctctcctcagtattctcctayatgcctttacttaatgatcatcacatttcttgtcccgtatttttattcattcattcaatagctatttatcaagtgctattccaggcactggtggtacagc

SEQ ID NO: 15104 - DNA, 201 bp, Homo sapiens
ttgcctccaaatggagtgcagtggagggagtaattgactctgctgccctggcacctggtgtttctgccaaatgcctaaggtcagtgctgcaaaaaaaaacycaaaaaccaaaaccaaaccaaaacaaaacaaaaaaaccggatggaaggaggcctccagtgagagtggggagtggagccgagagatgatcagaagggattt

SEQ ID NO: 15105 - DNA, 201 bp, Homo sapiens
tggaaatgtttctgggtggagaggttcaattgtatctgggaagacttacaaataaaccttgtctcatttatagcaggtgaataagaactttgtccaggcarataacacagaaggctggcacttgtggttcccaaataagaattggtcttgaggagtctaggtgggtggacatggatgtgccagtttcaggggagacatcct

SEQ ID NO: 15106 - DNA, 201 bp, Homo sapiens
gggcagcacagcatacacatacatgctgtaccagtcttctgcttttgtcttcagcggttattggtaccagaggtaaggcatttccgggaaaggcagcacaraacagtaccagaagcataaacaggaattgacttaaaaaaaaaaatctcttgcttaaataataacagtaaaaatggaaaaaagaaggatgaaactcccacc

SEQ ID NO: 15107 - DNA, 201 bp, Homo sapiens
gtggaaactttcttttcttttagtagttattctttgttgaggtcaaattcacataacataaaatttaccattttaaagtgtacaattcagtggcatttagyccattcacaatgttgtacaactgtcacctctgtctagttccaaaatctacctttctttcttcctttctttctttctctttctttttccttccttccttcc

SEQ ID NO: 15108 - DNA, 201 bp, Homo sapiens
  misc_feature (101)..(101): n is a, c, g, or t
caaaacaaaaatcctctgcagggggatctgggcagcacagcatacacatacatgctgtaccagtcttctgcttttgtcttcagcggttattggtaccagangtaaggcatttccgggaaaggcagcacagaacagtaccagaagcataaacaggaattgacttaaaaaaaaaaatctcttgcttaaataataacagtaaaa

SEQ ID NO: 15109 - DNA, 201 bp, Homo sapiens
atttaccattttaaagtgtacaattcagtggcatttagtccattcacaatgttgtacaactgtcacctctgtctagttccaaaatctacctttctttcttyctttctttctttctctttctttttccttccttccttcccctttctttctttttctttttctttcccctttctttcttttctctttctttctttctttctt

SEQ ID NO: 15110 - DNA, 201 bp, Homo sapiens
ctgtgatttcttcacttcagagctgtgaatcttcacttcagagctggcaggcaggaacgtttaagtctgttgaagctgcgcccacagttgccccttccccmaggtgctctgtcccagggagatgggaattgtatctataagccgctgactggggctgctgcctttctttcagagatgccctgcccagagaggaggaatcta

SEQ ID NO: 15111 - DNA, 201 bp, Homo sapiens
ttgttcccttgcttgtgaggagttttgatcctttggaggagaagaggcattctggtttttggaattttcagcctttttgcttcggtttttcctcatcttcrtggctttatctacctttggcctttgatgttggtgacctttggatggagcttttgcgtggacgtcctttttgttgatgttgatgctattgctttctgtttg

SEQ ID NO: 15112 - DNA, 201 bp, Homo sapiens
ttcaggtacaccaatcaaacgtaggtttggtcttttcacatagtctcatatttcttgggggctttattcgttccttttcattcttttttctctaatcttgkcttcatgcttatttcattaagttcatcttcaatgtctgatatcctttcttctgcttgattgatttggctattgatacttgtgtatgcttcacgaagttct

SEQ ID NO: 15113 - DNA, 201 bp, Homo sapiens
tgcatttcaaccttggtgaatctgaggattatgtgtctttttttttttttttttttaaatatatgaggagtatctttgtggtgttctctgtatttcctgartttgaatgttgacctgtcttgctaggttggggaagttctcctggataatatcctgaagtgtgttttccagcttggttccattctccctgtcactttcagg

SEQ ID NO: 15114 - DNA, 201 bp, Homo sapiens
taggtaacccgacctttctctctggctgccctaaacattttttcctgcatttcaaccttggtgaatctgaggattatgtgtctttttttttttttttttttaaatatatgaggagtatctttgtggtgttctctgtatttcctgaatttgaatgttgacctgtcttgctaggttggggaagttctcctggataatatcctg

SEQ ID NO: 15115 - DNA, 201 bp, Homo sapiens
gcttgtagggtttctgcagagagatccactgttagtctgatgggcttccctttgtaggtaacccgacctttctctctggctgccctaaacattttttcctkcatttcaaccttggtgaatctgaggattatgtgtctttttttttttttttttttaaatatatgaggagtatctttgtggtgttctctgtatttcctgaat

SEQ ID NO: 15116 - DNA, 201 bp, Homo sapiens
cccccacacacctgtcctatgtaaccaaacaacatcagaccattcatcatttacatagcacatactttgatgtggactttcatttcttgcagtatggcagraaagataccttgacttatcctcctgttgtaaacaactaaaaattctggataacatttaaaaccattaaaaatatgttagtgagctagcaagttatgaaga

SEQ ID NO: 15117 - DNA, 201 bp, Homo sapiens
tatgtttttgcagtggctggtaccagtttttcctttccatatttagtgttttcttcaggaactcttgtaaggcagccctggtggtgacaaaatctctcagsatttgcttgtctgtaaaggattttatttctccttctcttatgaagcttagtttggctggatatgaaattctgggttgaaaattcttttctttaaaaatgt

SEQ ID NO: 15118 - DNA, 201 bp, Homo sapiens
atggtggttttttttttaagaccgagtcttgctctgtcgcccaggctggagtgcagtggcacaatctcagctcgctgcaacccctgcctcctgagttcaarcgattctcctgtctcagcctcctgagtagctgggactacagttgtttaccatgacacccggctaatttttgtatttttagtagagacagggtttcttcac

SEQ ID NO: 15119 - DNA, 201 bp, Homo sapiens
taatccatttacatttaaagttaatattgttatgtgtgaatttgatcctgtcattatgatgctagctggttattttgcgtattagttgatgcagtttcttmatagtgttgtggtctttacattttggtatgtttttgcagtggctggtaccagtttttcctttccatatttagtgttttcttcaggaactcttgtaaggca

SEQ ID NO: 15120 - DNA, 201 bp, Homo sapiens
tttagggggtacaagtgcaggtttcttgcatatatgtattgtataatgttgaagtctgggcttttagtgtacccatcactcgaatagtgaacattgtaccyaatacacagtttttcaacgcttactgcacctcaccctcctgccttttataggctccactgcctattatttcactctgtgagttcatgtgtggccattgtt

SEQ ID NO: 15121 - DNA, 201 bp, Homo sapiens
tgtttatgtgatggattatgtttattgatttgcttatgttgaaccagccttgcatcccaggaatgaagccatcttgattgtggtggataagctttagaacrtgctgctggattcggtttgccaatattttattgaggatttttgcatctatattcatcagggatattggcctgaaattttctctttttgttgtgtctctgc

SEQ ID NO: 15122 - DNA, 201 bp, Homo sapiens
ccatgctgttttggttactgtagccttgtagtataatttgaagtcaggtagcgtgatgcctccagctttgttctttttgcttaggattgtcttggctataycagctctttttttggtttcatatgaaatttaaagtagtttttttctaattctgtgaagaaagtcaatggtagcttgatgggaatagcactgaatctataa

SEQ ID NO: 15123 - DNA, 201 bp, Homo sapiens
tatataatatttgtattatgtgtatgtatataaaagtgatacttcttttgctgatcacagtgagtttttttaaatgagttaaatttgatagagagaaacakggatattaaatgcacaagtcgattagttttgataagcgtatgcacttgggtaactaccaccccagtcaaggtaaacatttccattactccagatggttcc

SEQ ID NO: 15124 - DNA, 201 bp, Homo sapiens
tgtgtgtgtgtgagtgatccagcgagtgtgtgtgcgtgtgagggtgtgtgtgtgtatgcctgtgtgcacagcacaactgtgtgcgtgtcccggtgagtgtrcctgtgcatgcgtgagtgtgtgtacgtgtgcatgtgtgtgtgagtgcgcttggttattactattattattatttttggaagaaaaatctttgaaaatctg

SEQ ID NO: 15125 - DNA, 201 bp, Homo sapiens
agggaggctatggcttctggtgagcatctgtgttttgacattgactaagtcttgatggtgataatcttgattcattcattcaatacatgtttataacccartggagatccttccttccttccttccgactttttttttgtacagacagggtcttgctatgttgcccaggcttgtctcaaactcctggctccaggtgatccc

SEQ ID NO: 15126 - DNA, 201 bp, Homo sapiens
agacctaacacaaaggaatgttttagaacagtattttttctattgtaaaatagaaggattcatgccttctcttgcctcatcagatacttgaagccttttgrttatgaagcagtagtaaaccatatgcttgcacatttctagtgatggggaactcactacctcccaagcccacgtagtctatcatctttggacagctctggc

SEQ ID NO: 15127 - DNA, 201 bp, Homo sapiens
gtacctcagttggaaatgcagaagtcacccgtcttctcggtctcgctgggagctgcagatcagagctgttcctgtttggccatcttgccagccccaccccyggcccccagctatttagatttaaactcattaaatgaagccaacctaaaaattgaattctgcagtcacacttgccacattttaagtgctcaatggccacct

SEQ ID NO: 15128 - DNA, 201 bp, Homo sapiens
ttcagggatagccaggggccccagcaggggccagctgaccattccaaaacttttgctggaactcctgggagagactttgccttccttgccaggattgccarcctgtgagaatgtaagcttgggggttttgggggccatctttgccatcttacagggagagcctgccaccatacagaggcagaatggagagcaggaggaaga

SEQ ID NO: 15129 - DNA, 201 bp, Homo sapiens
gtgtgaggcctgtgaggttcctgtgtgcattgcagggtctctcggtagagcctggtacctgggtggatgggagaacaaacaccagatgcagggtcaggtgwcttgatttcttgcccagctctcccatttgttgtgagccatgggatgctgggaaagtcattcagcctccctgtgccttcatttgctcaactgtaaaatggg

SEQ ID NO: 15130 - DNA, 201 bp, Homo sapiens
tttccagcttggttccattctccctgtcactttcaggtacaccaatcaaacgtaggtttggtcttttcacatagtctcatatttcttgggggctttattcrttccttttcattcttttttctctaatcttgtcttcatgcttatttcattaagttcatcttcaatgtctgatatcctttcttctgcttgattgatttggct

SEQ ID NO: 15131 - DNA, 201 bp, Homo sapiens
gggtgtttgaagtctttacttctgttcttccagaattaggatctggggctcagctgtgaattgctgtcactgaagctgtccagtccttggacacacacgcrgacatgtgggctgagtaatgggaatgttcttagaaagccagaggaccttggcagcattgcccagcagctccgtgacaggtcctgatggctgagagactga

SEQ ID NO: 15132 - DNA, 201 bp, Homo sapiens
tctgctcgcctcggcctcccaaactgctgggattacaggcgtaagccaccatgcccggcctggtatacaaatatttagaacatagcagtaaccgtgggcamatcacttgctttatctgaactcttatttcctcttctgtaaaacctatgagtcagagagaataatgtcttgcaaggtttttgtgagcattaaatgaagaca

SEQ ID NO: 15133 - DNA, 201 bp, Homo sapiens
ggacaatgtccaaacattgcaacagatttgtagcaactgaagttgtaaccggttttggacattcatctgttttggcaggtcatatgactttagtttgatcrttgtggtcttttgttattaagatagccatattccagaacgactataattccagaatggagcaggtctcagaccttccatgcacattatcttctgttgtga

SEQ ID NO: 15134 - DNA, 201 bp, Homo sapiens
cttggctcatgcagttcccttagctgggaatactttccctcccctacttgggtgggttctctccagctgtttgtctttctaagctcagcttagaaattttygcctccaagaaaccgcttctgtgtttccaagtctaggtcaagtgcccttacatgagatcccatgggaccctgtgcttctccataatgttgaattacaatt

SEQ ID NO: 15135 - DNA, 201 bp, Homo sapiens
gtcctcacatggtggaagggacaagacagcttgggcctcttttataaaggcactaatcccattcatgagggcttcacccccttgagctaatcttttccccmaaggtcctatctcctaatactatcatcttattaggagtgttgggatttcaacatacacattttggaggggacacaaatatttatttatttttatttttat

SEQ ID NO: 15136 - DNA, 201 bp, Homo sapiens
gggtaattaaagaaaaaagttttatttggttgggtgtggtggctcactctgcaatcccagtacttcgggaggctgaggtgggagaattgcttgagaccagsctgcccaacatggtgagacccccatcttgagaaaaaaaaaagttttatttggctcatggttctgcaggctataccagcataacaccagcatctgcttggc

SEQ ID NO: 15137 - DNA, 201 bp, Homo sapiens
aggtgggttgtattagtttgttttcatgctgctgataaagacatacctgaaactgggtaatttttaaagaaaaagaggttgaatggactcacagttccacrtgatggggtaggcctcacaatcatgacagagggcaaaaggcacatcttacatggcagcaggtaagagagaatgagagccaagtgaaaggggaaagaaacc

SEQ ID NO: 15138 - DNA, 201 bp, Homo sapiens
atgtggtagccatatgaaaaaaaagaaacagggaaatgtgctggagtagtcgtttggttagggtggtctgggtgggcctgtgtgagaaggcgacgcaggasccaggacccggggaggatctgaatgaatagcaagtgctgggagcactgcagaaatataagaaggccaagcatggcccggagtagggagcaagagggagag

SEQ ID NO: 15139 - DNA, 201 bp, Homo sapiens
gtcactttgtcatggacacctgtttatccccttttcaggtaatagcactttgtgttttggggatctgccccattctcagcttataggtgtttctagagggrcttatcccacccctcttcgatgactgatgcagggatgaacacataatgcaagccaggccaatgacaattaatcctggaacttttgctaggagaaagaagt

SEQ ID NO: 15140 - DNA, 201 bp, Homo sapiens
gaggctgaaaggggaggatcgcttgagcccaggaagtccaggctgcagaagtctgtgatcatgtcatttcactctagcctgggtgacagggcatgaccctstctctaaaaaaaaagaaaaaattacccactccccaccaaagtaggtaaataagataacttcaaatgtggtagccatatgaaaaaaaagaaacagggaaat

SEQ ID NO: 15141 - DNA, 201 bp, Homo sapiens
tgtttctcttggctcccatgactgtgtctctcccactatgcctactttaaatagtaatcttacgtttgtgacacatttcacaagacacaaagcactttctsgtgacatacaccaccacaacaaattctactgctttcattgtgtgcttccagcacagggctgttattattattactagacacacaatattatcaatctcat

SEQ ID NO: 15142 - DNA, 201 bp, Homo sapiens
gtgagcccagatcatgccactgctctccagcctgggcaacagagcaagaccctgtctcaaacaaacaaacaaacaaacaaaagtatctactaattggggcrcgtattgtgcgctaattacactacataaattactttgtttattcttacaccaacattaaaaggtttgccttttcataataatagtaataataataataat

SEQ ID NO: 15143 - DNA, 201 bp, Homo sapiens
ttgtctttctaagctcagcttagaaattttcgcctccaagaaaccgcttctgtgtttccaagtctaggtcaagtgcccttacatgagatcccatgggaccytgtgcttctccataatgttgaattacaattgcctgtttaccagtctcttccattaaactgaggtcttcacaacagtaggaactatctctgtccagttcat

SEQ ID NO: 15144 - DNA, 201 bp, Homo sapiens
actctcaagcagtgaaaagcagcttggccgtggccttgaaaaaaggggttatcagcatcctgctgaggacccaccgttactgcctcctgatggatggaaaygcagattgtcattgctggttgtgcagctaaagaaattgggcgaggcagctggttatttatgacggagcaacacagagctggtcagtagtttccccagttg

SEQ ID NO: 15145 - DNA, 201 bp, Homo sapiens
gaagcagaaatgagaataaagctctcctctattaagccagacattaaagagatttgcataaatgtaaaacaatgctatgcttcttattaaatatacatttycttaaattttggaagatacttatattttataaaatatgtaatgttcacatgtaatgagttaattgttatcttaaagtaaactaataagtagttttaaaag

SEQ ID NO: 15146 - DNA, 201 bp, Homo sapiens
gtgcacgtcactaagctgagctaatttttaaactttgtttttagtagagaagagatctcactgtattgcccaggctggtctcttgggattgagtttaatcratcctcccacctcagcctcccaaaatgctgggattacaggagtgagctattgcacctggccaacttctgtattttaatgcttaggtttgtttttcattta

SEQ ID NO: 15147 - DNA, 201 bp, Homo sapiens
aggcctctgttctgttccattggtctatatatctgttttgataccagtaccatgctgttttggttactgtagccttgtagtataatttgaagtcaggtagygtgatgcctccagctttgttctttttgcttaggattgtcttggctataccagctctttttttggtttcatatgaaatttaaagtagtttttttctaattc

SEQ ID NO: 15148 - DNA, 201 bp, Homo sapiens
gctagccagtttttccaacaccatttattaaatagggaatcctttccccatttcttgtttttgtcaggtttgtcaaagatcagatggttgtagatgtgtgrtgttatttctgaggcctctgttctgttccattggtctatatatctgttttgataccagtaccatgctgttttggttactgtagccttgtagtataatttg

SEQ ID NO: 15149 - DNA, 201 bp, Homo sapiens
tttaagtctttaatccatcttgagttaatttttgtataaggtgtaaggaaggggtccagtttccgttttctgcatatggctagccagtttttccaacaccrtttattaaatagggaatcctttccccatttcttgtttttgtcaggtttgtcaaagatcagatggttgtagatgtgtggtgttatttctgaggcctctgtt

SEQ ID NO: 15150 - DNA, 201 bp, Homo sapiens
atttgcatttctctaatgaccagtgatgatgagttttttttttcatatgtttgtaggccgcataaatgtcttcttttgagaagtgtctgttcatatccttygcccactttttgatggggtttttttttcttgtaaatttgcttaagttccttgtagattctggatattagccctttgtcagatgagtagattgcaaacatt

SEQ ID NO: 15151 - DNA, 201 bp, Homo sapiens
tttttttttttaattattatactttaagttctgggatacatgtgcagaacatgcaggtttgttatgtaggtacacatgtgccatggtggtttgctgcaccygtcaacctgtcatctacattaggtatttctcctaatgctatccctttccttgccccccatgccatgacaggccccagcatgtgatgttcctctccctgtg

SEQ ID NO: 15152 - DNA, 201 bp, Homo sapiens
tccttgcttcctgttggtctgaggccatccttgcttccttccacaggggtctccccagcatggcagatgatttaactcttctgaatcccttcaacccttttaacatgtaaaacagcaatagctgtagctatcttagagttgtcatagggattccctgagataatgtagaaaatggccttgcacagaaaacggcaccttgtt

SEQ ID NO: 15153 - DNA, 201 bp, Homo sapiens
cacaggggcagaatgcaggcggagctgaaaagagaagattaatgtgtgaacttagtctctctcaaattcaccaatcagctaagtcacttttcctcccctgrggaggagtggatgagggatggggagtggatggctggaaatgtgcatcagactaaggtctcatcaagggaacaagcattccctcaaacccagtggaagcca

SEQ ID NO: 15154 - DNA, 201 bp, Homo sapiens
aagttcctgagatggatggtggtgctggctgcacaacaatgtgaatggcttaatgccaaagacctgtacacttaaaaatgattgagatggtagatcttgtrtgtattttaccacaagttttagaaatttaaaaaactttaaaaagtgattactcacttaaaaatcacaccaccgtaacgactgacaacattttctactacg

SEQ ID NO: 15155 - DNA, 201 bp, Homo sapiens
gatttttaacaagggtgccaagaacattcagtggagacagaataatcttttaacaaatggttttggaaaaactggacatccacatgcaaaaaaaaaaaaaatgaagttgaacccttaccttacactatatacaaaaattaactccaaatagttcaaagacttcaatgtaagacctaaaacgataaagctcttagagaaaag

SEQ ID NO: 15156 - DNA, 201 bp, Homo sapiens
agccacggggggagggatctgttttttttccagtctcaccaacagtctttttgccttttagtcctggtcaaaagcccagcgtgctcatcacctctgggcakatcctagggcaagaggagcagaaaaccctgctcttccctggtctcctgtctttggtttttcagttcaatgtggaaaacagtgacttacgatgtctcagcc

SEQ ID NO: 15157 - DNA, 201 bp, Homo sapiens
tctgtgttttgacattgactaagtcttgatggtgataatcttgattcattcattcaatacatgtttataacccagtggagatccttccttccttccttccractttttttttgtacagacagggtcttgctatgttgcccaggcttgtctcaaactcctggctccaggtgatccccctgcctcagcctctggtagtgttgg

SEQ ID NO: 15158 - DNA, 201 bp, Homo sapiens
tcctgatggctgagagactgatttcccatcctttcctaaggaagcggggactggtgaacagagcatgtgtgaggcctgtgaggttcctgtgtgcattgcasggtctctcggtagagcctggtacctgggtggatgggagaacaaacaccagatgcagggtcaggtgacttgatttcttgcccagctctcccatttgttgtg

SEQ ID NO: 15159 - DNA, 201 bp, Homo sapiens
gcccaaggtcacacagcttatcagtggtggagccagggtttaaactcagctctagaatctattcttgttattctgtttcttaaagtgtaagctttaagctrgattgcaggacatggtaggtatgtgtccaccaggccagttaactctccatcaccgacttagactctcccaggcagttgcagaaccagaggtctcctccac

SEQ ID NO: 15160 - DNA, 201 bp, Homo sapiens
aaagctcactcgggttccagggttgatcgcaaataggagggaggcacgatcagagacagagggaccagcagggagctctaaagctgttcaggtgggagaarttgaggccttgggatcacggagaaagggcagtagctaaccctagagggaggcagtattcgtgttgtagctcaattctgcatccgaaaatacagggggcaa

SEQ ID NO: 15161 - DNA, 201 bp, Homo sapiens
atataagaaggccaagcatggcccggagtagggagcaagagggagagaagcaagagatgggcttaggagcgaggcggatgcccaatcccgtgggctcatgrggaggagcgtgcattcaactcttaagtgcgaggaggacatcgcaggctgcccacgggaaattattatgatctgattcacacgtgaaaagctcactcgggt

SEQ ID NO: 15162 - DNA, 201 bp, Homo sapiens
aattgtatctataagccgctgactggggctgctgcctttctttcagagatgccctgcccagagaggaggaatctagagaggcagtctggctacagtggcgwtgccacgccgcagtgggttccgcatcgtttgaacttcccagtggctttatttacattataaggggaaaacaacctactcaagcctccttaatggcggacg

SEQ ID NO: 15163 - DNA, 201 bp, Homo sapiens
atttcttcacttcagagctgtgaatcttcacttcagagctggcaggcaggaacgtttaagtctgttgaagctgcgcccacagttgccccttccccaaggtkctctgtcccagggagatgggaattgtatctataagccgctgactggggctgctgcctttctttcagagatgccctgcccagagaggaggaatctagagag

SEQ ID NO: 15164 - DNA, 201 bp, Homo sapiens
tgctctcttcagagagatttctctgtgatttcttcacttcagagctgtgaatcttcacttcagagctggcaggcaggaacgtttaagtctgttgaagctgygcccacagttgccccttccccaaggtgctctgtcccagggagatgggaattgtatctataagccgctgactggggctgctgcctttctttcagagatgcc

SEQ ID NO: 15165 - DNA, 201 bp, Homo sapiens
aaaaaaatctcttgcttaaataataacagtaaaaatggaaaaaagaaggatgaaactcccacctcccttctgaattacttgttttcacttgctgtgttatkgtctggtcaatatccatctgtactcatcaattttacacacttatgattataggtattgtgtatatgtgtgtatataatatttgtattatgtgtatgtata

SEQ ID NO: 15166 - DNA, 201 bp, Homo sapiens
ttttataataaatatagtttaagtaattcatctctgttttcccttccctaattttatgctgcagtttcttttaaaggtgtgtgttaatagcattgcattcytttttttaatcttgaaagcaaattttgtagaaaaatcattatcatcatttaggcgctcacattttcagtggtttaagcatattttgtacatctttaattt

SEQ ID NO: 15167 - DNA, 201 bp, Homo sapiens
catctgtactcatcaattttacacacttatgattataggtattgtgtatatgtgtgtatataatatttgtattatgtgtatgtatataaaagtgatacttyttttgctgatcacagtgagtttttttaaatgagttaaatttgatagagagaaacatggatattaaatgcacaagtcgattagttttgataagcgtatgca

SEQ ID NO: 15168 - DNA, 201 bp, Homo sapiens
agaaatgaagaccaagacacagataaatgtgtgtgtgtgtgtgtgtgtgtgtgtgtgtgtgtgtgtgtgtttgagatagggtctcgctttgtcacccaggytggagtgcagtggcatgatcacagctcactgcagccatgatctcccaggctcaggcagtctactcacttcagcctcccagcagctgggactacaggtgca

SEQ ID NO: 15169 - DNA, 201 bp, Homo sapiens
taggggcggtggctcacgcctgtaatcccagcactttgggaggctgaggcaggcagatcatgaggtcaggagatcgagaccatcctggctaacacagtgaraccccgtctctactaaaaatacgaaaaattagccgggtgtggtggcgggcgcctgtagtcccagctactcaggaggctgaggcaggagaatggcgggaac

SEQ ID NO: 15170 - DNA, 201 bp, Homo sapiens
caacatcagaccattcatcatttacatagcacatactttgatgtggactttcatttcttgcagtatggcagaaaagataccttgacttatcctcctgttgwaaacaactaaaaattctggataacatttaaaaccattaaaaatatgttagtgagctagcaagttatgaagaaatactcagaggccaaaaatgaagaaagg

SEQ ID NO: 15171 - DNA, 201 bp, Homo sapiens
cacaatgttaagtgctttacacatgttattctcacaataaatctatttggtagtattatgtttcctattttacatatggggaaactgaggcagggtggtgmgttaacctgcccaaattcattctgctgataagaagtggcagagccaagctgagcattcaggcaatctgaatccagaacctgtactcttaactattatgct

SEQ ID NO: 15172 - DNA, 201 bp, Homo sapiens
cgagagtaagaatttcaacccatgaattttaaggggacacaagcattcaatccattgcataccccatgctttagaattaaaaaaatataaggtgtaaattmttttgtgttgggctttcataggggcaatatataacacctttctttcccatttaggttctgaactaactgaggaatagataaagaatgtagacagatggag

SEQ ID NO: 15173 - DNA, 201 bp, Homo sapiens
tttttttttcattttcttttttctttctttctttctttcttttttttttcagctgctaaatctaaagccctgagcaaggtactgtacagtttacaaagaaragtcagatgcagccccattgtgctcttaagggacaacaatagaagaaatgacagaagacaatcagagattaatgaccagatgaatgatatataccaggtg

SEQ ID NO: 15174 - DNA, 201 bp, Homo sapiens
ggaaggaacactaacagattgatgatagataatagcttattttattggcatttggcatttggaagaagatgcctggcataagcaggtcatcaaataaagarattactgtgtaatagtcaagtctgtgtcacaggtggggggagctgtttctttggagaggagaaggatgccctcccaaacacacacacacacacacacaca

SEQ ID NO: 15175 - DNA, 201 bp, Homo sapiens
gtggctcaagctgccaggccttcttaatgcctaaacctgaaagtcccaggacatcatttcctctgcattgtactggtcaaatggttacaagatttatggaragggtacataggatccatttctggtagaaggaggggcatgtgcatacagggaggggtggaattgtttggccatctttggatactagctatcacagccaga

SEQ ID NO: 15176 - DNA, 201 bp, Homo sapiens
atttaacatgacttgttcttggtgaccccatgctggtgccaaatggacattacttcctgtcctaggtgctcataagtgtccttaacaaatctgtttaagawccttgccgggagtgatatcatattatctagtctggaactggcaaaccataacatttttccccttttgaaaatcagaacatttgccaggctccagcttttt

SEQ ID NO: 15177 - DNA, 201 bp, Homo sapiens
agaaagcaaaattttcagccccaccccagatctactaaatcagaaactctgggggtgtagactagccatgtggtttaagaagccctccagatgttcctgayacatcagtatttgagaaccgtttccttatgatttcctccctccctcccttcctccttccttccttccttccttttcccttcctccctctgtccctccctt

SEQ ID NO: 15178 - DNA, 201 bp, Homo sapiens
tgagcaggtggagaatggtatctgtcagatgtcagtttcattagctgttgcaacccagtggactgtccctgaatacctgtcccctgggagtttcttcaggrataagggactcaaaattggaaatgggaagccctgggaagatgcatcccaggccctcagggagtgagcatacgacctctggaagaaactcctggttttggg

SEQ ID NO: 15179 - DNA, 201 bp, Homo sapiens
agtaatgtgtaatagacttttaaaagcttgttttaatcttctctttaaatagagtatgcattttggttgactaaacattcacctgtatagctgggtcgtargttcatgggctgctctccctcccattgttcagtcacattgtgtgtaaccacggttaccaggcttggtgtcattacttccttaaggtgatttcatgccatc

SEQ ID NO: 15180 - DNA, 201 bp, Homo sapiens
gagcaagacttgaagaagctgagtgaacgtgccatgtgggtatctagggagggagaaagctttccaggtgaatgcaacagcaagtgcaaaggctcttaggygggggcttagtgtttgagcaaggaagccagtttgggaggagtggagtaagcacttgggagaggagtgtggctgggaacatgggtagattgcagatcaccc

SEQ ID NO: 15181 - DNA, 201 bp, Homo sapiens
aatcccagcactttgggaggccaaggcaggtggttctcttgaggccagcagttcaagaccagcctggacaacatggtgaaacccggtctccactgaaaatrcaaaaattagccaggtgtggtggtgtgtgcctgttatcccagcaacttggatggctgaggcataagaacctcttgaatccaagaggcggaggttgcaatg

SEQ ID NO: 15182 - DNA, 201 bp, Homo sapiens
ggtgacctttggatggagcttttgcgtggacgtcctttttgttgatgttgatgctattgctttctgtttgttagctttccttctaacaggcccctcttctrcaggtctgctggagtttgctggaggtccactccagatcctgtttgcctgggtatcaccagtggagactgcagaacagcaaagattgctgcctgcttcttc

SEQ ID NO: 15183 - DNA, 201 bp, Homo sapiens
cgagtgaaccttggaggcagaggttgcagtgagccgagattgcgccattgcacttcagcctgggcgacagtgggagactccatctcaaaaaaaaaaaaaaacaaacagtcaaaaatctatgtagatcagagatcaggaagacagtcagggtctggatgccaatgaaggagggtccagcaagacaggtgggctcaggaatta

SEQ ID NO: 15184 - DNA, 201 bp, Homo sapiens
aaaattagccaggtgtggtggtgtgtgcctataatcccagctactcaggaggctgaggcaggagaatcgagtgaaccttggaggcagaggttgcagtgagmcgagattgcgccattgcacttcagcctgggcgacagtgggagactccatctcaaaaaaaaaaaaaaacaaacagtcaaaaatctatgtagatcagagatc

SEQ ID NO: 15185 - DNA, 201 bp, Homo sapiens
aatgcaagggctcagtgactcaggccagtctatctgggatttgtcctctcttggcatgtgagagtctgtgcagcattgacatcttttggccatgaatgaarcaacaggaaccaacctacaaatgcagaatcccagaaagtcagggccggaagaggctgtaggaagttaaaaaacgaaacttcaccaagggaagggtcttga

SEQ ID NO: 15186 - DNA, 201 bp, Homo sapiens
aggatagaattgaagcagtggaactagtgttgaagagggccacatttgatggtacagattagagcagggctggaagcccaatcagggaggtaataatggtmaaaattcggctggatgcggtggcttacgcctgtaattctagcactttgggaggccaaggtgggcggatcacaaagtcaggagttcaagaccagtctggtc

SEQ ID NO: 15187 - DNA, 201 bp, Homo sapiens
tatgaaaagttcactgatatggtttcagattctacatgcaactagtctttaagaaactaccagcctggtgcggtggctcatgcctgtaatcccagcacttygggaggccgagggggggtggatcacctgaggtcaggggttcaagaccagcctgggcaacatggagaaaccccgtctctacaacaatagaaaaaactagcc

SEQ ID NO: 15188 - DNA, 201 bp, Homo sapiens
acccgggaggttgaggtggctgtgagccgagattgcgccactgcactccagcctgggcaacagagtgagactccatctcaaaaaaaaaaaaaaaaaaaaaatcagggtattcgttttgcttcccgttggactgacttcttagtagcttggattttgctcagacagagagccctgtctcctctgccatggtcataatgactt

SEQ ID NO: 15189 - DNA, 201 bp, Homo sapiens
tattgtgcgctaattacactacataaattactttgtttattcttacaccaacattaaaaggtttgccttttcataataatagtaataataataataataawaagtaagtacatctaggtccaaaataaacccagattcaaagaagttgagtgacttgcccagagtctaacaaccaagaggggatccttattttgttcttct

SEQ ID NO: 15190 - DNA, 201 bp, Homo sapiens
tccacagttaattagacaagttgagaagagaattagtaacctaggggagagttctggaacaatatctagagctctggaagatagaatgaaacaaggctggrtgtggtggctcatgcctgcaatcccagcactttgggaggctgaggtgggcagatcatccgagatcaggagtttgagactagactggctaacatggtgaaa

SEQ ID NO: 15191 - DNA, 201 bp, Homo sapiens
agaaaggtaagcagggccccaaactggcttgtgtttgcttcatagacacttgctgaactgggtgatggtggttttttttttaagaccgagtcttgctctgwcgcccaggctggagtgcagtggcacaatctcagctcgctgcaacccctgcctcctgagttcaagcgattctcctgtctcagcctcctgagtagctgggac

SEQ ID NO: 15192 - DNA, 201 bp, Homo sapiens
aaaacataataaagacactgagtgaatgaaatttgtgaaatatatttaagacaacaaatgtgtgtgcgtgtgtgtgtgtgtgtgtgtgtgtgtgtgtgtggtgttgatgcatgaatggatgcatttgtatttgtccttgcttattgattgttttttgggagaatagaccatagatatatacaccattgcagcaaatacaag

SEQ ID NO: 15193 - DNA, 201 bp, Homo sapiens
agagattctcccacctcagccttccgagtagctgggattacaggcacccaccaccacacccagctaatttttgtatttttagtagagatggggtttcactrtgttggccaggttggtcttaaactcctgacttcaagtgatctgcccacctcagcctcccaaagtgctgggattacaggtgtgagccacagcacctggccg

SEQ ID NO: 15194 - DNA, 201 bp, Homo sapiens
gaaaacataataaagacactgagtgaatgaaatttgtgaaatatatttaagacaacaaatgtgtgtgcgtgtgtgtgtgtgtgtgtgtgtgtgtgtgtgtggtgttgatgcatgaatggatgcatttgtatttgtccttgcttattgattgttttttgggagaatagaccatagatatatacaccattgcagcaaatacaa

SEQ ID NO: 15195 - DNA, 201 bp, Homo sapiens
tcttcctctggaagctttgtcccagaggggcacccgccagatgccagctggagcactcctgtataaggtgtctgtcaacccctgctgggaggtgtctcccygtcaggaggcacgggggtcagggatccgcttgaggatgcagtctgtcccttagcagagctcaagcactgtgctgggagaaccactgctctcttcagagag

SEQ ID NO: 15196 - DNA, 201 bp, Homo sapiens
ggaaaacataataaagacactgagtgaatgaaatttgtgaaatatatttaagacaacaaatgtgtgtgcgtgtgtgtgtgtgtgtgtgtgtgtgtgtgtgtggtgttgatgcatgaatggatgcatttgtatttgtccttgcttattgattgttttttgggagaatagaccatagatatatacaccattgcagcaaataca

SEQ ID NO: 15197 - DNA, 201 bp, Homo sapiens
tatttttttcaaacaaccattatttaggcttcctaacctgaatgtgttagcttagggtgccataaagaaataccatatacttgggggcttaaaaatcagamatgtattttctcacagttctggagggtggaaatctgagattagggtgccagcatggtcaggttctggagcagtctcttttcctggctttcagatgaccat

SEQ ID NO: 15198 - DNA, 201 bp, Homo sapiens
gactcagcttctcagagtaggccccagagtgttcttcacatccttgggaacaaacccaactgcaaccgctgcctgcggaacagcctcaactgcacccacarcatccagaacagaccccagctgcccccacggcatccagaacagaccccaactgaaaccactgcatgtggcacagcatgaactctctaggaagtttaactt

SEQ ID NO: 15199 - DNA, 201 bp, Homo sapiens
tattgtcccttcatgataaaaacaggactcagcttctcagagtaggccccagagtgttcttcacatccttgggaacaaacccaactgcaaccgctgcctgyggaacagcctcaactgcacccacaacatccagaacagaccccagctgcccccacggcatccagaacagaccccaactgaaaccactgcatgtggcacagc

SEQ ID NO: 15200 - DNA, 201 bp, Homo sapiens
atggatgtgccagtttcaggggagacatcctgaaggaaagatcactatgtggctctgcaggagacactgtctgggtccttggttgtggtagaacaaggacyccttctcttgcctcataatacagcactgccggggagcactgtgtccactagtggactccagactggcaggcctgactttggtcctccttgggaagtgcct

SEQ ID NO: 15201 - DNA, 201 bp, Homo sapiens
cacacctgtaatcccagcactttgggaggccaaggcaggtggttctcttgaggccagcagttcaagaccagcctggacaacatggtgaaacccggtctccrctgaaaatacaaaaattagccaggtgtggtggtgtgtgcctgttatcccagcaacttggatggctgaggcataagaacctcttgaatccaagaggcggag

SEQ ID NO: 15202 - DNA, 201 bp, Homo sapiens
cttgggaggctgagacaggaggattacttgagcccaggagttggaggctgcagtaagctctgatcacacactgtactccagcctgggtgacagagtgagamcttgtctaaaaaaaaaaaaaagacaaagtgaattttataaaaataacttctacaaatgaaaaattatagattccacagttaattagacaagttgagaaga

SEQ ID NO: 15203 - DNA, 201 bp, Homo sapiens
ttttttttaaccaagaaggctgagtgtggtggctcacacctgtaatcccagcactttgggaggccaaggcaggtggttctcttgaggccagcagttcaagmccagcctggacaacatggtgaaacccggtctccactgaaaatacaaaaattagccaggtgtggtggtgtgtgcctgttatcccagcaacttggatggctg

SEQ ID NO: 15204 - DNA, 201 bp, Homo sapiens
ctttctttctttctttcttttttttttcagctgctaaatctaaagccctgagcaaggtactgtacagtttacaaagaagagtcagatgcagccccattgtrctcttaagggacaacaatagaagaaatgacagaagacaatcagagattaatgaccagatgaatgatatataccaggtggtcccaacctgagctcccaggc

SEQ ID NO: 15205 - DNA, 201 bp, Homo sapiens
ttggaattaccactgaccctgtaaacaagaggaaatgagatttagtgaatcacatgggccctcagtgataattgctacctttgttaaatgctcataaaaakatctggcaggccctcttctctgaactgcagttctccttctagctctttattgtccttggccttgggagtcatttcagtgcccttctgattattttgtttt

SEQ ID NO: 15206 - DNA, 201 bp, Homo sapiens
ttgtttagctgttattgtaatttatgcctcactagtggtcacttgtgacatgttttccttatatttttaaccccaaattctttttttaaatggaaaacttyacgttgaactccgtattgaaacaatgtaattatagggaatgaaaaaatgggttattacttgatagcaattattcctatgctgattcctccgggatagaat

SEQ ID NO: 15207 - DNA, 201 bp, Homo sapiens
ttattacttgatagcaattattcctatgctgattcctccgggatagaatcgtgcactgtttaagtccttgggctccgctatgagccatacctgggcttcartgcaattaagttactagctagctttgtgatcttgggtaacttgcttcactgctcttggcctccgtttacccaacttcaaaacaaggatgatttacatcac

SEQ ID NO: 15208 - DNA, 201 bp, Homo sapiens
ccagaacggtgctagacctatagtaagcattcagtaaatatctgttgaaagaatgaataacatagcctccaaagagagctgattttactatctaggaaacygaggctcagtctgacttatgaatttgcccagagccccacaagccaatgacccacccagctgttctgcctccagtgtgcctgctctgcgtggctttgctaa

SEQ ID NO: 15209 - DNA, 201 bp, Homo sapiens
gggtgccagcatggtcaggttctggagcagtctcttttcctggctttcagatgaccatcttctcaatgtgtcctcatagggcagagagaaagagagagagytcgctttggtgtcttccttcaaagggcactaatcccatcataagggccccatcctcatgacctcatttaaccctaattacctcccacaaaaccatttcca

SEQ ID NO: 15210 - DNA, 201 bp, Homo sapiens
tgtcctgtgggcattgttagagcccgtgtttccagtcatgcctgacttgtgttcattatgagtgaggtgggctaacatttcatgtgtatttccctttctgkgagctgctgtttatatctatatctttaattgacttttctactgggtggttggcattattctcatagatttgtggaaactttcttttcttttagtagttat

SEQ ID NO: 15211 - DNA, 201 bp, Homo sapiens
gaaaaaattacccactccccaccaaagtaggtaaataagataacttcaaatgtggtagccatatgaaaaaaaagaaacagggaaatgtgctggagtagtcrtttggttagggtggtctgggtgggcctgtgtgagaaggcgacgcaggagccaggacccggggaggatctgaatgaatagcaagtgctgggagcactgcag

SEQ ID NO: 15212 - DNA, 201 bp, Homo sapiens
caaatacaagagcaaggaaaaaagtatccaaataaaatgtattccaggctacaacctgtgacccgttggtggaagcagtgctcagtataacgaaatcctgwacagcaaagggactcacatggtactttgtgccagttgtgccaggattttgtgataccttatctccttaaatacagggctgctgagatgtaatgagagcgg

SEQ ID NO: 15213 - DNA, 201 bp, Homo sapiens
tcttcttataagggcactaatcccatcctgaggctccaacctcatgacctcatctaaccctaattatctcccagaggccctatctccaaataccatcacaytgggggttatggcttcaacatgtgaatctggggaggacacagctctgtccatggcagatctgcttccaggctgactcacatggttggtggcaggattcag

SEQ ID NO: 15214 - DNA, 201 bp, Homo sapiens
ctcccaaactgctgggattacaggcgtaagccaccatgcccggcctggtatacaaatatttagaacatagcagtaaccgtgggcaaatcacttgctttatmtgaactcttatttcctcttctgtaaaacctatgagtcagagagaataatgtcttgcaaggtttttgtgagcattaaatgaagacaatgcatgtgagttgg

SEQ ID NO: 15215 - DNA, 201 bp, Homo sapiens
aataaaatgcttagaacaaggcttatcacatcacaaacactcaaaaagtgttagctaaatcaacaaggataaaatttcaggtatgcaagatgattaagttktagagatctctatataggtgtagtatatagttaatactgctgtattgtgtactggaaaatccattaagagggtaggtcttatgttaagtgttcttttttt

SEQ ID NO: 15216 - DNA, 201 bp, Homo sapiens
gaggatgctggaaatgtttctgggtggagaggttcaattgtatctgggaagacttacaaataaaccttgtctcatttatagcaggtgaataagaactttgwccaggcaaataacacagaaggctggcacttgtggttcccaaataagaattggtcttgaggagtctaggtgggtggacatggatgtgccagtttcagggga

SEQ ID NO: 15217 - DNA, 201 bp, Homo sapiens
tgtatgtatataaaagtgatacttcttttgctgatcacagtgagtttttttaaatgagttaaatttgatagagagaaacatggatattaaatgcacaagtmgattagttttgataagcgtatgcacttgggtaactaccaccccagtcaaggtaaacatttccattactccagatggttcccttgggaccctttctggtca

SEQ ID NO: 15218 - DNA, 201 bp, Homo sapiens
tatatcagaacttctggggaaaaggaaggaagagaacatgaaatgcagtgtgacgtagtgcaaaaatgagtgggttctggggccagtgtgacctgatttasaatcagagctgaggttcttacgggtcgtgtgatgtatcagttattgattgctgtgtaccaaattacccttaaacttagcagcttgaaaaaacccacacat

SEQ ID NO: 15219 - DNA, 201 bp, Homo sapiens
tttatgagacacctctcagcaacaacaactgtgagggagtgagggtggcaggcttggaagaggcctcagccaatcccatgggaagttctgaaaccgggagkgtccttctgaattatccacagggaggtaagggggtgggatcctctgccccatggtctcggacataggctgtcctggggagggagaatgatctggggtgag

SEQ ID NO: 15220 - DNA, 201 bp, Homo sapiens
atggaaaacataataaagacactgagtgaatgaaatttgtgaaatatatttaagacaacaaatgtgtgtgcgtgtgtgtgtgtgtgtgtgtgtgtgtgtgtgtggtgttgatgcatgaatggatgcatttgtatttgtccttgcttattgattgttttttgggagaatagaccatagatatatacaccattgcagcaaata

SEQ ID NO: 15221 - DNA, 201 bp, Homo sapiens
gtgcttgactcagtttttacagaatgaatcttattctaccttaattccacatgaaatgggtttggtctcccttgtagaatgcaggagactttgagcctggkttggaaggctggtgaccttgggtaagtcacttcccatatctgagcctctgctcctttgtctgtgaaagagtggtgcttatacctatgttgttaggttgtt

SEQ ID NO: 15222 - DNA, 201 bp, Homo sapiens
ctaaaaaaaaaataaacagaattattatatgatccagtaatttcacttctaggtatatacaaaaaataattaaaagcagagactccaacaaatagttatamcaatattcatagcagtattactcataatagccaaaaggtaaaagcaactcaagtgtccattgatgtatcaaattttgttttaaaacttgatacatatata

SEQ ID NO: 15223 - DNA, 201 bp, Homo sapiens
tacccagtctatcattgatgggcatttacgttgattccatgtctttgctattggaataatgctgcaacaaatgtatgtgtgcatgtgtatttataagagamtgatttatattcctttgggtatataaccggtaatgggattgttgggttgaatggtgtttctttctttaggtctttgaggaattgctacactgtcttctac

SEQ ID NO: 15224 - DNA, 201 bp, Homo sapiens
aaggctggtgaccttgggtaagtcacttcccatatctgagcctctgctcctttgtctgtgaaagagtggtgcttatacctatgttgttaggttgttggggratataaaagggtaataacagttgctactgtttattgagtgcttgctatgcaccagagactgtgctaagcttagctttgcatttttctttgatcttttcaa

SEQ ID NO: 15225 - DNA, 201 bp, Homo sapiens
ccccagtgtgtgctgtttccctctatgtgaccatgtgttctcatcatttagctcccacttgtaagtgagaacatgcagtatttggttttctgtttctgcastagtttgctaaggataatggcctccagctccatccatgtccctgcaaaggacatgatctcattctttttttggctgcatagtattctatggtgtgtatgg

SEQ ID NO: 15226 - DNA, 201 bp, Homo sapiens
tggattttgcagtgatttcttggctatgacaccaaaagcacagacagcaaaagaaaaaataaatcggactacatcaaaatttaaaacttttgtgcatcaarggacataatcagagtgaaaaggcaatcatggagtggggaagatatttgcaaatcttatgtctgagaggggttaatatctggcttatataaagaactccta

SEQ ID NO: 15227 - DNA, 201 bp, Homo sapiens
ccattctggagatggatggtagtgatagttgcacaatgatatgaatatacttaatgtcattgaactgtacacttaaaaatggttaaaatggtaaaatttatgttatgtgtattttaccacgatagaaaaaaagagctaaaaaatggaaatctcttgcccattgtgacattattttccattttccttgtctgtatgtctttt

SEQ ID NO: 15228 - DNA, 201 bp, Homo sapiens
gctcttagagaaaagtaggggaagccttcatgacattggattttgcagtgatttcttggctatgacaccaaaagcacagacagcaaaagaaaaaataaatyggactacatcaaaatttaaaacttttgtgcatcaaaggacataatcagagtgaaaaggcaatcatggagtggggaagatatttgcaaatcttatgtctga

SEQ ID NO: 15229 - DNA, 201 bp, Homo sapiens
tccattctggagatggatggtagtgatagttgcacaatgatatgaatatacttaatgtcattgaactgtacacttaaaaatggttaaaatggtaaaatttatgttatgtgtattttaccacgatagaaaaaaagagctaaaaaatggaaatctcttgcccattgtgacattattttccattttccttgtctgtatgtcttt

SEQ ID NO: 15230 - DNA, 201 bp, Homo sapiens
cctcctgggttctagcgattctcgtgcctcagcctcctgagtagctgggactacaggcacacgccacaatgcccagctaatttttgtatttttagtagagmtggggtttcaccacgttggccaggctggtctcgaactcctgacctcaagtgatccatctgcctcgggctcccaaagtgctgggattataggcgtgggtca

SEQ ID NO: 15231 - DNA, 201 bp, Homo sapiens
cactgcaacctctgcctcctgggttctagcgattctcgtgcctcagcctcctgagtagctgggactacaggcacacgccacaatgcccagctaatttttgyatttttagtagagatggggtttcaccacgttggccaggctggtctcgaactcctgacctcaagtgatccatctgcctcgggctcccaaagtgctgggatt

SEQ ID NO: 15232 - DNA, 201 bp, Homo sapiens
ccagtttatccagtgacgaatcccatttgcctcttacctccctgcggcatcctgacctagctccccacgcccacctgagccccttccttgcagacaccatstcatgcctggctgcagctgggcagagcgaagtgcttctctgccgagctgtcgcaaagctccactatctaggagtagagcgagtgtttgggagcagggcaa

SEQ ID NO: 15233 - DNA, 201 bp, Homo sapiens
tcgaggcagtgttacagcttgtcagagtgctcagaacaaatgctgtataacttctagaatttatcatctacattggtttataaccatttactatttcaaawgtggtgacaaaaggtggtggtgggagatattaggtactttaagtattatcttcgttgccattcttcggtgtcattttacccattcgaattctgaggttca

SEQ ID NO: 15234 - DNA, 201 bp, Homo sapiens
gattacagacatgagccaccgcgcctggcacgtgttcttgccacaattaaaaacaaacaaacaaacaaacaaacaaatgtaaaggaaaaaatataagtaagaaaaaatcgaggcagtgttacagcttgtcagagtgctcagaacaaatgctgtataacttctagaatttatcatctacattggtttataaccatttactat

SEQ ID NO: 15235 - DNA, 201 bp, Homo sapiens
tagactggtctcgaactcctgagctcaagcgatcctcctgcctttgccccacaaaatactgggattacaggcatgagccactgctcctgtcccaaaacatyttaatgatcaccaaagaaacttggtacttcctattaagcagctactgcctgtcctcgctctttctagcccctgacaaccactcttctgtgaccatagaga

SEQ ID NO: 15236 - DNA, 201 bp, Homo sapiens
tgcttctgcttgccctctgtgggctgtacccactgtctaaccaggcccaatgagatgaggtgggtacctcagttggaaatgcagaagtcacccgtcttctyggtctcgctgggagctgcagatcagagctgttcctgtttggccatcttgccagccccacccccggcccccagctatttagatttaaactcattaaatgaa

SEQ ID NO: 15237 - DNA, 201 bp, Homo sapiens
tttttacctttcatcttttattttaacaactaagcagcgagtaccctgagttttatcagaaatacaccaattaccaggcattcatcaggaaatgtgtccaratgatcttgtctcttccaaatactaaatttccttgcattctggctaaaggagttacatcttattcctttagaattgacacccacaaggtcaggtcaggat

SEQ ID NO: 15238 - DNA, 201 bp, Homo sapiens
tttaagtctgtttactctgttgatagtttcttttgttgtgcagaaggtctttagtttaattagatcaggacagcagttttaagcagagttttggaaaaagraagagtcacgtattctcgaggaagacagatatttctgagtcattaagatcttaccatcagtccacatcctcagtttgtccgtttgtgattaagttgtact

SEQ ID NO: 15239 - DNA, 201 bp, Homo sapiens
tgaggtatcaactggttatagcagttccagaccttgtaaccttatatcacaccttagtgaagaggggaatgtctctttcactagctcatgcagaagcaccwcttcccagaagcactggcaaacatctcctggagtgccattggccctgatcgggttgcaggcccacacctaagccagtctctgtggtcaaagatgggatac

SEQ ID NO: 15240 - DNA, 201 bp, Homo sapiens
tcacagtggacagggcagtaggaaaagggacagcgttggatgtctcagggagcaagaggcacctatatcagaacttctggggaaaaggaaggaagagaacrtgaaatgcagtgtgacgtagtgcaaaaatgagtgggttctggggccagtgtgacctgatttagaatcagagctgaggttcttacgggtcgtgtgatgtat

SEQ ID NO: 15241 - DNA, 201 bp, Homo sapiens
gaaatacttggtgtcattgcagtcttatttaaggtgctgtgcaaacatggcttcagcataagttcccaagctgaatatccaactagactgctgcctgtaakttccacctatatacacattttggaattaccactgaccctgtaaacaagaggaaatgagatttagtgaatcacatgggccctcagtgataattgctacctt

SEQ ID NO: 15242 - DNA, 201 bp, Homo sapiens
tacagcactgccggggagcactgtgtccactagtggactccagactggcaggcctgactttggtcctccttgggaagtgcctattgactcttcttgttttsagatgacatttgttaggctgaaagaggagaagggactttatccacaatcatccccagagtatagccttccacacaaaggctttctattcatcctgcaaga

SEQ ID NO: 15243 - DNA, 201 bp, Homo sapiens
aaatgtgtccaaatgatcttgtctcttccaaatactaaatttccttgcattctggctaaaggagttacatcttattcctttagaattgacacccacaaggwcaggtcaggatatggctgtccctgaaaccctctggaatcttttcttttaaaattctgtgtgttaatcaccatcataattattgatgtgtgtctagggccc

SEQ ID NO: 15244 - DNA, 201 bp, Homo sapiens
ggattacagacatgagccaccgcgcctggcacgtgttcttgccacaattaaaaacaaacaaacaaacaaacaaacaaatgtaaaggaaaaaatataagtaagaaaaaatcgaggcagtgttacagcttgtcagagtgctcagaacaaatgctgtataacttctagaatttatcatctacattggtttataaccatttacta

SEQ ID NO: 15245 - DNA, 201 bp, Homo sapiens
gggattacagacatgagccaccgcgcctggcacgtgttcttgccacaattaaaaacaaacaaacaaacaaacaaacaaatgtaaaggaaaaaatataagtaagaaaaaatcgaggcagtgttacagcttgtcagagtgctcagaacaaatgctgtataacttctagaatttatcatctacattggtttataaccatttact

SEQ ID NO: 15246 - DNA, 201 bp, Homo sapiens
agggcctcttgcctcgtacaactccagggggcaccattcacaatgctttctactccaggggtgctttttactaagaatattagcatgaatggtggaaactsctggagttgtgtgatgtggagccccgggagcttcagaaggtcagggatttttgtgtgtgccagttctgatcattgctgtatccctgtacccagaacggtg

SEQ ID NO: 15247 - DNA, 201 bp, Homo sapiens
tgggattacagacatgagccaccgcgcctggcacgtgttcttgccacaattaaaaacaaacaaacaaacaaacaaacaaatgtaaaggaaaaaatataagtaagaaaaaatcgaggcagtgttacagcttgtcagagtgctcagaacaaatgctgtataacttctagaatttatcatctacattggtttataaccatttac

SEQ ID NO: 15248 - DNA, 201 bp, Homo sapiens
aactctccatcaccgacttagactctcccaggcagttgcagaaccagaggtctcctccacaggggcagaatgcaggcggagctgaaaagagaagattaatrtgtgaacttagtctctctcaaattcaccaatcagctaagtcacttttcctcccctggggaggagtggatgagggatggggagtggatggctggaaatgtg

SEQ ID NO: 15249 - DNA, 201 bp, Homo sapiens
ctgcaacctccacctcccgggttcaagcaattctcctgcttcagcctcctcagtagctgggactacaggcatgcgccaccatgcccagctaatttgcgtayttttagtagagatggggttttaccatgttggccaggctggtcttgaactcctggcctcaagtaatctgcccgcctaggcctcccaaagtgctgggattac

SEQ ID NO: 15250 - DNA, 201 bp, Homo sapiens
atcaaccagatctcttgtgaacccattaccgtggggtggacaccaagccattcctgagggatccatccccatgatccaaacactgcccaccagatcccacytccaacgttgaagaacacatttccacagctctaaaaaagaaattatgtctgtgagacttctgctctatgccaggcactttaaatccatgatcgtgttgga

SEQ ID NO: 15251 - DNA, 201 bp, Homo sapiens
attcacaatagcaaagacttggaaccagcccaaatgtctatcaatgatagactggattaaggaaatgtggcacatatacaccatggaatactatgcagccmtaaaaacggatgagttcatgtcctttgcagggacatggatgaaactggaaaccatcattctcagcaaactatcacaaggacagaaaaccaaacactgcat

SEQ ID NO: 15252 - DNA, 201 bp, Homo sapiens
aaaaatcaaacaaccccatcaaaaagtgggcaaaggatatgaacagacgcttctcaaaagaagacatttatgcagccaaaaaacacatgaaaaaatgctcrtcatcactggtcatcagagaaatgcagatcaaaaccacaatgagatgccatctcacgccatttggaatggagatcattaaaaattcaagaaacaacagat

SEQ ID NO: 15253 - DNA, 201 bp, Homo sapiens
gacaaagggctaatatccagagtctacaaagaacttaaacaaatttacagaaaaaaatcaaacaaccccatcaaaaagtgggcaaaggatatgaacagacrcttctcaaaagaagacatttatgcagccaaaaaacacatgaaaaaatgctcgtcatcactggtcatcagagaaatgcagatcaaaaccacaatgagatgc

SEQ ID NO: 15254 - DNA, 201 bp, Homo sapiens
aggcatgggcaaggacttcaatgactaaaacaccaaaagcaagggcaacaaaagccaaaatagacaaatgggatctaattaaactaaagagcttctgcatrgcaaaagaaagtaccatcagagtgaacaggcaacctacagaatgggagaaaatttttgcaatctacccatctgacaaagggctaatatccagagtctaca

SEQ ID NO: 15255 - DNA, 201 bp, Homo sapiens
taggcatgggcaaggacttcaatgactaaaacaccaaaagcaagggcaacaaaagccaaaatagacaaatgggatctaattaaactaaagagcttctgcayggcaaaagaaagtaccatcagagtgaacaggcaacctacagaatgggagaaaatttttgcaatctacccatctgacaaagggctaatatccagagtctac

SEQ ID NO: 15256 - DNA, 201 bp, Homo sapiens
tcaggtcaggtttaagagaggacctcctcctcagaaatagcaccacacatctacaaccatctgatctttgacaaacctgacaaaaacaagaaatggggaarggatttcctatttaataaatggtgctgggaaaactggctagccataggtagaaagctgaaactggatcccttccttaacaccttatacaaaaattaattc

SEQ ID NO: 15257 - DNA, 201 bp, Homo sapiens
accttgaaatacttagtgggattggaatgaacacaaagtcacccaccaggattttgccacattgggtcacatatttttggggcacctcctatgtaccagayatgatgccaggtactgaggtgacaaagatagctaggacatggtctctgctctcaagaagtgtaaagtcttttgggagagcaggtgtggaaacagattaga

SEQ ID NO: 15258 - DNA, 201 bp, Homo sapiens
ttagtccactcagactgctataagaaaataccataaactgggtggctaataaacaacaaccatgtatttctcatagctccttaggctgggaagtccaagaycaagatgcctgcagattccgtgtctggtgagggtctgctttccggttcatagatggcatcttccagctgtgtcctcacatggtggaagggacaagacagc

SEQ ID NO: 15259 - DNA, 201 bp, Homo sapiens
tcatatggatatgccattttttgtttatccattcattcaaacaacatttgggttgtttctatcttttggttgttgtgaattgggctcctacgaatattcaygtatgagtatttgtttgaattgatattagaaaaattattctttggcctatgataggtgttgcaactattgtttctgagcttgccattggtctttgacttt

SEQ ID NO: 15260 - DNA, 201 bp, Homo sapiens
catccatcttcttagtagcaaaagtctagaggtttgaggaagaagggcaggtatggaggatgaccacagaggggcatgtatttattcattcatttctgcaytaattcaacaaaagttgattatctacattgtacctagtcttgtgctgagtgttgtgagagacacaaagtatatgatacattctttgctttctaagagttt

SEQ ID NO: 15261 - DNA, 201 bp, Homo sapiens
aaagaaaattagctgggtgtggtggtgggcacctgtaatcccaggtactcgggaggctgaggcaggagaattgcttgaacccgggaggttgaggtggctgygagccgagattgcgccactgcactccagcctgggcaacagagtgagactccatctcaaaaaaaaaaaaaaaaaaaaaatcagggtattcgttttgcttcc

SEQ ID NO: 15262 - DNA, 201 bp, Homo sapiens
cctgaatagtttgtattttatgagtgtgcactttttcctgaagtacgttaccttgcactttacgtgtattgaaatgtatcagcctcttttctgcatattcytgcctcttcgcgattatcttcctagagtttattacaattaactattaaccatctggaaattcaggtgtcctttgtaaacctggaagtgtcggtgtatgta

SEQ ID NO: 15263 - DNA, 201 bp, Homo sapiens
gagatagcaatccagtaatttatttattttgccactgaatcctagaggccgggaactagaaacctaagcataaagcctccactgctggaagactcccaccmcccccaacaattcaggaattgctttcagccaacattacctctgctttctgagcacaagccaggctattgtgctggaaataatcggtgttagtcttattgg

SEQ ID NO: 15264 - DNA, 201 bp, Homo sapiens
agcgaaaccctgtctctactaaaaatacaaaaactagccaggcgtggtggtgcatgcctgtagtcccaactacttgggagactgaggcatgagaatcgctkgaacccggatggtggaggttgcagtgagcccagatcatgccactgctctccagcctgggcaacagagcaagaccctgtctcaaacaaacaaacaaacaaa

SEQ ID NO: 15265 - DNA, 201 bp, Homo sapiens
agtcccagcactttgggaggttgaggtgggcgggtcacttgaggtttgagaccagcctggccaacatagcgaaaccctgtctctactaaaaatacaaaaaytagccaggcgtggtggtgcatgcctgtagtcccaactacttgggagactgaggcatgagaatcgcttgaacccggatggtggaggttgcagtgagcccag

SEQ ID NO: 15266 - DNA, 201 bp, Homo sapiens
cagtggagggagtaattgactctgctgccctggcacctggtgtttctgccaaatgcctaaggtcagtgctgcaaaaaaaaacccaaaaaccaaaaccaaamcaaaacaaaacaaaaaaaccggatggaaggaggcctccagtgagagtggggagtggagccgagagatgatcagaagggatttcatttgtttgtatttttc

SEQ ID NO: 15267 - DNA, 201 bp, Homo sapiens
tcacttccacattccataaagcccaaatgactgtataggaaacagctgcagtatttattggggcctggtaaggcctcattaccatcccacctcctcacagsgggtattgcctccaaatggagtgcagtggagggagtaattgactctgctgccctggcacctggtgtttctgccaaatgcctaaggtcagtgctgcaaaaa

SEQ ID NO: 15268 - DNA, 201 bp, Homo sapiens
atgagagctttatgtttttaaagagattttgccaaaaggacctccaaaagattatattatcagtatcctatttcaagagtggcactgagttctaaatgtgrttctctagatgtggccaaagacagaaaacaactatcacctcctttctgctgtctgcaatactactattaacatagcccaaggattgaattagcctttggt

SEQ ID NO: 15269 - DNA, 201 bp, Homo sapiens
tatgtcttttaattggggcatttaatccatttacatttaaagttaatattgttatgtgtgaatttgatcctgtcattatgatgctagctggttattttgcrtattagttgatgcagtttcttcatagtgttgtggtctttacattttggtatgtttttgcagtggctggtaccagtttttcctttccatatttagtgtttt

SEQ ID NO: 15270 - DNA, 201 bp, Homo sapiens
ggaatgtagtgatgtcatcttgactcactgcaatctccgcctcttgggttcaagagattctcctccctcagcctcccgagtagctggcattacaggcacgygccaccacatgtggccaatttttgtatttttagtagagacggggtttcaccatgttggccaggctgatctcaaactcctagcttcaagtgatccacccgc

SEQ ID NO: 15271 - DNA, 201 bp, Homo sapiens
gttgtgagctcaactaccagctttttttttttattaaacaccatttttttttaactcgggagaatgagtgacatacaactctaagagaagatttgtgcttygaaggaaaactgcattgtttgttgcacatccttagttgattctgattctatgggagctattttacaactctgttaagttgtagataactgatggcaatgc

SEQ ID NO: 15272 - DNA, 201 bp, Homo sapiens
gcttatgaacgtatttgaaaaacaaacatctctcttaagtctctaagttaaaaaaatactttatagaatgacatgtataataggttgtcatttttgtgacytttttttgtggcagccaggagattgtgctgctcaggtcaggtttaagagaggacctcctcctcagaaatagcaccacacatctacaaccatctgatcttt

SEQ ID NO: 15273 - DNA, 201 bp, Homo sapiens
agctgccacgcccagcctgtggcctaactttttaaaccccattttatgaatgtgcaaatttgttcaatcccacatttatggatacatgggttgtttctaayttttgcaattctgattaagtaatttttgattctctgattttaaatatgcccctgaggttttcctttctctgtctggaatctattcctattttgccaaaga

SEQ ID NO: 15274 - DNA, 201 bp, Homo sapiens
tcttgaaagcaaattttgtagaaaaatcattatcatcatttaggcgctcacattttcagtggtttaagcatattttgtacatctttaatttttatttcacygtaaaacatatgatttcactacatgtatttgaattttgtacagtgtggcagaagatggaaaacattcttccatcaaggactattattgaactgtttggct

SEQ ID NO: 15275 - DNA, 201 bp, Homo sapiens
agaagtcattggctttgccattaataataataacattatcaggttgagcacagtggctcatgcctgtagtcccagcactttgggaggttgaggtgggcggrtcacttgaggtttgagaccagcctggccaacatagcgaaaccctgtctctactaaaaatacaaaaactagccaggcgtggtggtgcatgcctgtagtccc

SEQ ID NO: 15276 - DNA, 201 bp, Homo sapiens
caatattttccaatatcatccaatgcatgatgttacaaaatcatgcataagaaaaaatccattcaaagtacatgataggccaatagattttaatgttaacrgagtatgaaaagttcactgatatggtttcagattctacatgcaactagtctttaagaaactaccagcctggtgcggtggctcatgcctgtaatcccagca

SEQ ID NO: 15277 - DNA, 201 bp, Homo sapiens
gatggttagttctgcatctattcagagttcctatttccattgcaacctgatagaaaattgaaatagaaatgcaatgattgactttggtgctttttttttttgttacatattcatccatcttcttagtagcaaaagtctagaggtttgaggaagaagggcaggtatggaggatgaccacagaggggcatgtatttattcatt

SEQ ID NO: 15278 - DNA, 201 bp, Homo sapiens
tcaaactcctggcctcaagtgatctgcctgcctcggcctcccaaaatgctgagattacaggcatgagccatgccacctggccttaatgttttttcatgtgrctgctatttctctctctatctaaatccttctaggtctttccctgtgaccactctctccagcagagtagcccgtccttggtggctcaagctgccaggcctt

SEQ ID NO: 15279 - DNA, 201 bp, Homo sapiens
ctattttatctttcagaaaactgaggtcaagtgtattagtgtgctaaggctgccataactgtaagtactactgactaggtggtgtaagcaacagacattarttttctcacaattctggatgctaaaagtccaagatcaaggtgtcagcagggttggtgtcttctgaggcttatctccttggcgtgtaggtggccttcttat

SEQ ID NO: 15280 - DNA, 201 bp, Homo sapiens
gaatgttgaccacattcctgttgactagcttcatcccttggtagagccaaggaatcaccgaggagactataattccccatcatttccatcagcctctgctyccttttatagaaatacttggtgtcattgcagtcttatttaaggtgctgtgcaaacatggcttcagcataagttcccaagctgaatatccaactagactgc

SEQ ID NO: 15281 - DNA, 201 bp, Homo sapiens
gggagcaatgggggcttttcaggagaggaggaagatgacgtttgttttttgttttatttatttatttttagagacaaagtctcgctctgtcacccaggccrtagtgcagtggcacaaacatagctcactgtaaccttgaactcccgggctcaagtgatccccctgcctcagtctccttaatagctaggactgcatgtgggc

SEQ ID NO: 15282 - DNA, 201 bp, Homo sapiens
tggatgctaaaagtccaagatcaaggtgtcagcagggttggtgtcttctgaggcttatctccttggcgtgtaggtggccttcttattccttggtcttcacrtagtcttccttcaatgcacatctatgtcctaattttcatactctctttctctttttttttttttgagactgagtctcactctgttgcccaggctagagtg

SEQ ID NO: 15283 - DNA, 201 bp, Homo sapiens
caccaaagtaggtaaataagataacttcaaatgtggtagccatatgaaaaaaaagaaacagggaaatgtgctggagtagtcgtttggttagggtggtctgsgtgggcctgtgtgagaaggcgacgcaggagccaggacccggggaggatctgaatgaatagcaagtgctgggagcactgcagaaatataagaaggccaagc

SEQ ID NO: 15284 - DNA, 201 bp, Homo sapiens
ccagcattccccccaactcagcctcccaaaaggctgggattacaggtgtgaatcactgcgcccagccttgtctattttaaaagaacctttggctactcagytgaggatggactgttaaataacctctctcccatgctcatcagttcatttcataacagcagagactctaattgtgtcgttcatgactgcttccagtgacct

SEQ ID NO: 15285 - DNA, 201 bp, Homo sapiens
gtgcagtggagggagtaattgactctgctgccctggcacctggtgtttctgccaaatgcctaaggtcagtgctgcaaaaaaaaacccaaaaaccaaaaccmaaccaaaacaaaacaaaaaaaccggatggaaggaggcctccagtgagagtggggagtggagccgagagatgatcagaagggatttcatttgtttgtattt

SEQ ID NO: 15286 - DNA, 201 bp, Homo sapiens
atcactaccaagaaagttatttccttttccaatctcttatgccttctgttaacatcatgggaaaacactcagtttgatcctagtagggctttaatgagaarcagccacatctctttttcttttggacaaagagaagaggctctatttagtttctgggctttggctggcaatagaacttaagttgagtgtgataatttggct

SEQ ID NO: 15287 - DNA, 201 bp, Homo sapiens
tgatcctcctgccttggcctcccaaagtgttgggattacagccctgagccaccacacctggctagcctgtggctttatcttgattcctttcaaatttaggwgaatgacattgatcctaatttcctggattctccctgaaagcgcagggttggaggctactctctaaagcagtgtaatgttaaggaggtgtcctgggtatgg

SEQ ID NO: 15288 - DNA, 201 bp, Homo sapiens
tgtccctaaagacctagtttgatccttctttcttctcagcagtcagctggttttcactctctggccctgcatgatgattccaggttcttttcttgaggtaycaactggttatagcagttccagaccttgtaaccttatatcacaccttagtgaagaggggaatgtctctttcactagctcatgcagaagcacctcttccca

SEQ ID NO: 15289 - DNA, 201 bp, Homo sapiens
tgtgtgtgtgtgtgtgtggtgttgatgcatgaatggatgcatttgtatttgtccttgcttattgattgttttttgggagaatagaccatagatatatacamcattgcagcaaatacaagagcaaggaaaaaagtatccaaataaaatgtattccaggctacaacctgtgacccgttggtggaagcagtgctcagtataacg

SEQ ID NO: 15290 - DNA, 201 bp, Homo sapiens
gcagactccttcctccttcccttcctggaacacatcttaagagcttggtatatgccatgctttgctggctcatgaatcaagccctggctctgtccttaaasaattcagagtctagctgaggagacaaggcccacacaggtggcaaagatgggaagcctctccacagagacaagggcgaggtgcccaaaggagcacaggggc

SEQ ID NO: 15291 - DNA, 201 bp, Homo sapiens
attcaactcttaagtgcgaggaggacatcgcaggctgcccacgggaaattattatgatctgattcacacgtgaaaagctcactcgggttccagggttgatsgcaaataggagggaggcacgatcagagacagagggaccagcagggagctctaaagctgttcaggtgggagaagttgaggccttgggatcacggagaaagg

SEQ ID NO: 15292 - DNA, 201 bp, Homo sapiens
gaggagaagaggcattctggtttttggaattttcagcctttttgcttcggtttttcctcatcttcatggctttatctacctttggcctttgatgttggtgrcctttggatggagcttttgcgtggacgtcctttttgttgatgttgatgctattgctttctgtttgttagctttccttctaacaggcccctcttctgcagg

SEQ ID NO: 15293 - DNA, 201 bp, Homo sapiens
gaattcagctgtgaatctctctggtcctgggctttttttgttggtaggttattaattatgcttcaatttcagaacttgttattggtctcttcagggattcmagtttttcctggttgaggcttgggagggtgtatgtgtccaggaatgtatccattacttctagattttctagtttatttgcatagaggtgtttatagtatt

SEQ ID NO: 15294 - DNA, 201 bp, Homo sapiens
gaggtcactaaagaatgaagagaatagatttgcagcaatatttaatatatttgctgtcatcttgtactacagtcctaagttgccatagcaacagaccagarcagaaacttcattagaggaagagctccttggattttaaccctgttattcaatcaggcatgagtgatggggaaggccatcagatggcacccataagatctt

SEQ ID NO: 15295 - DNA, 201 bp, Homo sapiens
tcacaaaataagacagatgtgtcttcccttggactgcccactgggtgtgtggagcctgggaatataacccctgacaatgattatcctcatataataggatkgttcgctaccacttaccatctccactctcctctgtctctactgcatcctgggttgcaaacctcagtgtcattgggtgcttggcagatagaataaatggat

SEQ ID NO: 15296 - DNA, 201 bp, Homo sapiens
agcctcaaaaggaaggaattctgataaatacagcaagttggatgaaccttgaagacatgatgttaattgaaataagccaggtacaaaagggtatatgtatrtgattcctcttacatgaagtgtctagattagtcaaatacatagagaaagtggaatagaggttaccagaggctggggaagaggagaatggggagttcgtgt

SEQ ID NO: 15297 - DNA, 201 bp, Homo sapiens
ttcttcatagtgttgtggtctttacattttggtatgtttttgcagtggctggtaccagtttttcctttccatatttagtgttttcttcaggaactcttgtraggcagccctggtggtgacaaaatctctcagcatttgcttgtctgtaaaggattttatttctccttctcttatgaagcttagtttggctggatatgaaat

SEQ ID NO: 15298 - DNA, 201 bp, Homo sapiens
ttcttgtgctgtgtttttcagttccatcaggtcatttatgttcttttctaaactggttattctagttagcagttcctgtaaccttttatcaaggttcttastttccttgcatttagttagaacatgcttctttagctcagaggagtttgttattacccaccttctgaagcctacttctgttaatttgtcaaactcattccc

SEQ ID NO: 15299 - DNA, 201 bp, Homo sapiens
tgggaatcatctggccagtgggatgcaaaaagtccacctagtcagacagattttgtgctttgtgaattttgtgaagggaacttttgatttttaaaaacagwgctgagttctttgttgacttgttcccttttatgtctttttcaagaatttatagacctaacacaaaggaatgttttagaacagtattttttctattgtaaa

SEQ ID NO: 15300 - DNA, 201 bp, Homo sapiens
ttctttctttttctttttctttcccctttctttcttttctctttctttctttctttctttttctttctctctctctttcccctcccttccttccttccttycttttctttctctctctctttctctctctctctttccttccctccctccctcccttcgttcctctctctctctctctttttctttctttctttttttcag

SEQ ID NO: 15301 - DNA, 201 bp, Homo sapiens
agtgtacaattcagtggcatttagtccattcacaatgttgtacaactgtcacctctgtctagttccaaaatctacctttctttcttcctttctttctttctctttctttttccttccttccttcccctttctttctttttctttttctttcccctttctttcttttctctttctttctttctttctttttctttctctctc

SEQ ID NO: 15302 - DNA, 201 bp, Homo sapiens
aagtgtacaattcagtggcatttagtccattcacaatgttgtacaactgtcacctctgtctagttccaaaatctacctttctttcttcctttctttctttctctttctttttccttccttccttcccctttctttctttttctttttctttcccctttctttcttttctctttctttctttctttctttttctttctctct

SEQ ID NO: 15303 - DNA, 201 bp, Homo sapiens
aaagtgtacaattcagtggcatttagtccattcacaatgttgtacaactgtcacctctgtctagttccaaaatctacctttctttcttcctttctttctttctctttctttttccttccttccttcccctttctttctttttctttttctttcccctttctttcttttctctttctttctttctttctttttctttctctc

SEQ ID NO: 15304 - DNA, 201 bp, Homo sapiens
taaagtgtacaattcagtggcatttagtccattcacaatgttgtacaactgtcacctctgtctagttccaaaatctacctttctttcttcctttctttctttctctttctttttccttccttccttcccctttctttctttttctttttctttcccctttctttcttttctctttctttctttctttctttttctttctct

SEQ ID NO: 15305 - DNA, 201 bp, Homo sapiens
ctgaggcaggagaattgcttgaacctaggaggcagaggttgcagtgagccaagatcatgctactgtgctccagcctggacgacagagtgagactgtctcaraaaaaaaaaaaaaaaaaaaaaaaaaaaaggagctattttgtttaatgagtgagtaaatgaattcgtaaaaatcatctatttatagcatttggtagaccac

SEQ ID NO: 15306 - DNA, 201 bp, Homo sapiens
aactaatcaggaggctgaggtaggaagattgcttgagcccaggaggtcgaggctgcagtgagccataaatgcagtactccaatccagcctgggtgacagarctagaccctgtcccaaaaaaaaaaaaaaaaaaaaaaaaagagtgtcagtgtgtggacaaggcaaacgagtattacctctagaagataataacgatgtcct

SEQ ID NO: 15307 - DNA, 201 bp, Homo sapiens
aggaggctgaggcaggagaattgcttgaacctaggaggcagaggttgcagtgagccaagatcatgctactgtgctccagcctggacgacagagtgagactstctcaaaaaaaaaaaaaaaaaaaaaaaaaaaaaaggagctattttgtttaatgagtgagtaaatgaattcgtaaaaatcatctatttatagcatttggta

SEQ ID NO: 15308 - DNA, 201 bp, Homo sapiens
acaaggtcaggagttcgagaccagcctcaccaagatggtgaaaccccgtctctactaaaaatacaaaaattagccaggcgcggtcgtgggtgcctgtaatyccagctactcaggaggctgaggcaggagaattgcttgaacctaggaggcagaggttgcagtgagccaagatcatgctactgtgctccagcctggacgaca

SEQ ID NO: 15309 - DNA, 201 bp, Homo sapiens
tcagcttagaaattttcgcctccaagaaaccgcttctgtgtttccaagtctaggtcaagtgcccttacatgagatcccatgggaccctgtgcttctccatmatgttgaattacaattgcctgtttaccagtctcttccattaaactgaggtcttcacaacagtaggaactatctctgtccagttcatgattgtgcatatct

SEQ ID NO: 15310 - DNA, 201 bp, Homo sapiens
tttttttttgagactgagtctcactctgttgcccaggctagagtgcagtagtgccatcttggctcactgcaacctctgcctcctgggttctagcgattctygtgcctcagcctcctgagtagctgggactacaggcacacgccacaatgcccagctaatttttgtatttttagtagagatggggtttcaccacgttggcca

SEQ ID NO: 15311 - DNA, 201 bp, Homo sapiens
gggtaaggtcctagctgcccagtaaaggcaggttgtagtggacaatgtccaaacattgcaacagatttgtagcaactgaagttgtaaccggttttggacaytcatctgttttggcaggtcatatgactttagtttgatcgttgtggtcttttgttattaagatagccatattccagaacgactataattccagaatggagc

SEQ ID NO: 15312 - DNA, 201 bp, Homo sapiens
gcatcgcaggtcgactttagagtgctgtgctggcagcgataatttcaagacagtgaatcttagcttgctggactccatgggggtggggtccacttagcacratcactcggctccctgtcttcagccccctttccatgggagtgaacggttctatctctctggcattccaggcaccactggggtacgaaaaaaactcctgca

SEQ ID NO: 15313 - DNA, 201 bp, Homo sapiens
taattttctcttttttttaaggaaacaggtcatgttggattagggtccacctgaatgaccttattttaattatcttgttaaaagactctgtctccaaattyagtcacattctgaggtactaggagttaggatttcaacatgtgcattttggagacacacaattcagcctataatattatgtaattagtttatcctcatgta

SEQ ID NO: 15314 - DNA, 201 bp, Homo sapiens
tagtattatgtttcctattttacatatggggaaactgaggcagggtggtgagttaacctgcccaaattcattctgctgataagaagtggcagagccaagcwgagcattcaggcaatctgaatccagaacctgtactcttaactattatgcttccacactgcctctggggacccagtgaagaatgaatatgtaccatttcta

SEQ ID NO: 15315 - DNA, 201 bp, Homo sapiens; identical to SEQ ID NO: 1839

SEQ ID NO: 15316 - DNA, 201 bp, Homo sapiens
aaatgggctcacagagtttaaataccttacacgggctcacatagctattgcatgccagagctggaattcaaaccctggtctttttgactctaaaacttgtygtcccaataggcatttgataaatgttagttgaatatatgaataacttaaaacccatcctttttttttttgagacggagttttgctcttgttgcccaggct

SEQ ID NO: 15317 - DNA, 201 bp, Homo sapiens
catatacctagactcaggatctttcactaaaaattgaagaaaattatctttctcttttcagacaaggaacttctgaaaagctaagatcattacctctcctrcacttcaccccattagagagtttcaggggatcatttctacttgcataggcaaaggtatttaaggttgaagagtttggggcactacttctataatacctcg

SEQ ID NO: 15318 - DNA, 201 bp, Homo sapiens
caaggaaagcaagatgcatccagcactggatacctacttggaacttatccttaattctgttggcagggactgtcttgtcagccctttctttaacttaagtytgacatatacctagactcaggatctttcactaaaaattgaagaaaattatctttctcttttcagacaaggaacttctgaaaagctaagatcattacctct

SEQ ID NO: 15319 - DNA, 201 bp, Homo sapiens; identical to SEQ ID NO: 1840

SEQ ID NO: 15320 - DNA, 201 bp, Homo sapiens; identical to SEQ ID NO: 1841

SEQ ID NO: 15321 - DNA, 201 bp, Homo sapiens; identical to SEQ ID NO: 1842

SEQ ID NO: 15322 - DNA, 201 bp, Homo sapiens; identical to SEQ ID NO: 1843

SEQ ID NO: 15323 - DNA, 201 bp, Homo sapiens; identical to SEQ ID NO: 1844

SEQ ID NO: 15324 - DNA, 201 bp, Homo sapiens
gaactcctgacctcaggtgatccatctgcctcagcctcccaaagtgttgggattacagatgtgagccacctcatctggccaagacaatatatttgaaggtrccaataggtaccatttactgaacacctttatgacaggcgctaaacatgtcatctcattaattatcaccacaaccctataatgtagactatcacctgcatt

SEQ ID NO: 15325 - DNA, 201 bp, Homo sapiens
aacagagcttgcacttatttaccctgttcttgatctcctgaagcatttcttggtttccttcatttcctaagttgagtatcttcattgtctggtacatttcyctgaaagataagaagggcttcttagattattctaccctgccctttaaaaaagtatgggggtagaaaatataggacttggaatcaggtaagaatcccaagt

SEQ ID NO: 15326 - DNA, 201 bp, Homo sapiens; identical to SEQ ID NO: 1845

SEQ ID NO: 15327 - DNA, 201 bp, Homo sapiens
gatctcgtctcggctcactgcaacctccacctcccaggttcaagcgattctcctgcctcagcctcctgagttgctgggactacaggcgcgtgccatcatgcccagctagtttttgtatttttagtagagatggggtttcaccatgttggccaggctggtctagaactcctgacctcaggtgatccacccgccttggcctcc

SEQ ID NO: 15328 - DNA, 201 bp, Homo sapiens; identical to SEQ ID NO: 1846

SEQ ID NO: 15329 - DNA, 201 bp, Homo sapiens; identical to SEQ ID NO: 1847

SEQ ID NO: 15330 - DNA, 201 bp, Homo sapiens; identical to SEQ ID NO: 1848

SEQ ID NO: 15331 - DNA, 201 bp, Homo sapiens; identical to SEQ ID NO: 1849

SEQ ID NO: 15332 - DNA, 201 bp, Homo sapiens
tttgatggctataaggccactcagatttcctattactgttgagtcagtgttgatacatcatcttcatgggaataggcttattttgaattttagggggatarcatcctcctatgttcttttgaaatagctataatagttagagttatgtctccctcttcttctttattttgagctttatgataattctttgaagtctggagt

SEQ ID NO: 15333 - DNA, 201 bp, Homo sapiens
cgcacttacttattaagtcagcatgcatctaaaaatatgttattcatattttagctagcattttacattgttttcagtatgagggtcagtctgattttgtrattttcaatagtcccagtaagagaactgggcatttgtttttaaaggcatttaaatttataataagtttatgtatttttcgtaacttctataaattaattc

SEQ ID NO: 15334 - DNA, 201 bp, Homo sapiens
gagaactgggcatttgtttttaaaggcatttaaatttataataagtttatgtatttttcgtaacttctataaattaattcgtctcattttgcttttgtgartttcctattcacatcctctgctttttttgctgttgttattttgttcttttaaactggaaaatagtaccacgagtactctaagaaacgtcctgatgacatt

SEQ ID NO: 15335 - DNA, 201 bp, Homo sapiens
tttcaacatatgaatttggcgggggcagaaacattcagaccatagcagatgccaaggacaaaaggattaatgaacagcattctgttttatagtcaccaagktaataataataataatacttatcaagcatttaccgtgacattttattaaatttaattgatttaatcctcaaaaatccaacgagttagctgtagcaaaaga

SEQ ID NO: 15336 - DNA, 201 bp, Homo sapiens
tttctagaagctcattgtaggatgattttaaaatattaattggatcgcaaccaatctgacctagtatgtcttacataagcagctggttagcaatcggtctraaatcttaaagactgtcaagagagcatctgcaatctgttattagtggggaaaatataaattattctgagccgtggagtatgtggttgccactgagtatac

SEQ ID NO: 15337 - DNA, 201 bp, Homo sapiens
attgattaataccttaccatttaaaaaataaggatttaatgtaattaagttacttcagatggttaaaaacagtgctagttaaagtgtggtccctaaacccrcaatgtcagctttacttgggtgcttgttgtaaatcagaatctcaggcctcacccagatgtactgattcagaatctctgctaggcaaggccctagaatctg

SEQ ID NO: 15338 - DNA, 201 bp, Homo sapiens
gccatgggtgacgcagcagctctgctggtctttgctgaattctccttcatgtttaagggttggcaggctgtagactagtctgggatgatctcagctgtgayaactggactctcttccatgtggtcactcatctcctcacaggttagcgcagactttcagttatggtggcagcaaagtttcaagggtgagaaagcagatatg

SEQ ID NO: 15339 - DNA, 201 bp, Homo sapiens
ttcactccagccccaaacgaagaagccatctttgatccttctttttctctttcaacaccctccatgtgctctccctcctccccacacatgattgcattagmaggtactgtcagctttctgtacaagaatgtgccaaatctgacaatggttcatgacatctgctgcagcaattctagtctaagccaataccattcctaggct

SEQ ID NO: 15340 - DNA, 201 bp, Homo sapiens
tcccatctcctttcccaatttcctttcttcctccctctctcctcccttttctttccttcttcctttcttcctctttccttccttctttcttttttcctttktttcttccctgttcttgttttttgttgttgtttttttttttcctggcttttctcactatcatgtaatctgcacataaacaccccaagacagcaacctagt

SEQ ID NO: 15341 - DNA, 201 bp, Homo sapiens
ctaattaagcctctgtaaccctgaaggatggattttggagagctatcaagttggtacaagagaccatatgccaggagggtggcatactccaattccatagkgacagaagctcctgctttcaagaccttttcagatcttgctctatggacttcttctggctgtttttctggatccttgagaatatctttcataacaaactgg

SEQ ID NO: 15342 - DNA, 201 bp, Homo sapiens
ggtattttgtcattgtccttcagtccgctgtgttatcagtagatattgtttcaagataagtttcaagtttcaagatattgtttctagagagtaaccacagmgattcccaagctgttgtaactactcttggatgaattttaaaatgaatgatgtgaactgtgtttaagtgcctttctcttctccatttaattttttcgcaca

SEQ ID NO: 15343 - DNA, 201 bp, Homo sapiens
acacaatcacaatgagcaacctgggagaatggaaaaaaaaaatgcctgcatgcaaagggcacaaagagtgcaaaagaaacttgactcataaggctattcaygtaataatttacagtatggtagctgaagtgacaactgcttcctgttcatttacccaagttggggaaagaaagtcgctttcaaaacctgaaatgctgataa

SEQ ID NO: 15344 - DNA, 201 bp, Homo sapiens
attataaccatcttctgtgagataaagttaatgctcttgaaagatagaagctctcagcaaagacataagtaaaaaactaccaaatggaaattcgagaactaaaaaaaaaaaatgatagagcttcaacatgcatttaaaaaaaacctgatagaactgcaagaaaaaaattggcaaatccacaactatagcctatattttagt

SEQ ID NO: 15345 - DNA, 201 bp, Homo sapiens
gataggaggaagttggcagggagttgggaaggcccagtgggaaaatgtagaagccttgtcattgaggaccagacagagaaacttggcaggatttttcaggsattgttgaggccgttttaaagttgacatctttgcctatataggaaaaccattgtgtgaactgtcatgaaactttcctgcttagcttggctcttagacatg

SEQ ID NO: 15346 - DNA, 201 bp, Homo sapiens
tacatggcagctggaaagttctgctgatctgggcctggcttggctgagctcagcttggctcactcacctatttggggatggactggcataggctggtctargatgacctcagctaagacaatgcatccctggtccactggtctctcctctttcagctaacccgtgctgaattacacgatggtatcagaattccaaaacagt

SEQ ID NO: 15347 - DNA, 201 bp, Homo sapiens
tctcttagatacagtagcacatcatggtgatattttgtttcaatttaattttaataattgaaacccaaatattttgacatcaccagcctgtaggttaaacmtttattttaacaccaaaacttgctgccccttgcccccacctacataaatgcagggcgctaacgcccactttaaagtcatgcaattattctgggttatcca

SEQ ID NO: 15348 - DNA, 201 bp, Homo sapiens
ggtagggtgggagtttgttagagttgagttccatgtgatattaggaacttatgagcaatgattaaaaattggtagcttgggccaggagcggtggctcacgyctgtaattccagcactttgggaggctgaggcttgtggatgatgaagtcaagagatcaagaccatcctggccaacatggtgaaaccctgtctctaccaaaa

SEQ ID NO: 15349 - DNA, 201 bp, Homo sapiens
aggaagctgagtcaggagaattgcttgaacacaggaggcggaggttgcagtgagccgagatccactgcactccagcctggtgacagagcaagactgtctcaaaaaaaaaaaaaccaacaaattggtagcttggagttatggtacggaaggctttaaattccaggccaaggagtctttcctaaattccacagcaaatgagga

SEQ ID NO: 15350 - DNA, 201 bp, Homo sapiens
gtcagatctgcacctgctgcaccactgcaccagcttcctctggaccataccctcagcatcacgtgactcacacactcttctcccagatccctgcatgtagrtgaactcacttgctcacatggagggaaagtctggagaatacctcgtttcttttcttcttttcttttttcttttatttatttatttatttattttgagaca

SEQ ID NO: 15351 - DNA, 201 bp, Homo sapiens
gcagaagaatcagtgaacatgaaaattggccagtcgagattatccaggttgagaaaaacagtttggcagctcctcaaaactcaaacatagagttattataygacataacaatttcactcctaggtataaacccaagtgaattgaaaacatacatctacaggaaaatttgtacataaatgtttattgcaccattatttacaa

SEQ ID NO: 15352 - DNA, 201 bp, Homo sapiens
aggcattgtgccaaacatgtgggtcattggcgagcaagaccagaaagagtttctcaccttatgttgctcactgaatatttgggaacatagacattcgtttatccatccatccatccatccatccatccatccatccatccatccatcctttcatttccttgaaaagtatttattgaatgtctatatattctaggtactgtt

SEQ ID NO: 15353 - DNA, 201 bp, Homo sapiens
ggcattgtgccaaacatgtgggtcattggcgagcaagaccagaaagagtttctcaccttatgttgctcactgaatatttgggaacatagacattcgtttatccatccatccatccatccatccatccatccatccatccatccatcctttcatttccttgaaaagtatttattgaatgtctatatattctaggtactgttt

SEQ ID NO: 15354 - DNA, 201 bp, Homo sapiens
gcattgtgccaaacatgtgggtcattggcgagcaagaccagaaagagtttctcaccttatgttgctcactgaatatttgggaacatagacattcgtttatccatccatccatccatccatccatccatccatccatccatccatcctttcatttccttgaaaagtatttattgaatgtctatatattctaggtactgtttt

SEQ ID NO: 15355 - DNA, 201 bp, Homo sapiens
tacagtcatgtgcggcttaacaatgagaatacattctgagaaatgcctccttaggcaatttcatcattgtttgaaaataatggtgtgtacttacacaaacytagatggtatagcctgctatacacctaagctgtatgatatagactattgctcctgtgctacaagcctgtacagcatgctactgtactgagtactgtaagc

SEQ ID NO: 15356 - DNA, 201 bp, Homo sapiens
cattgtgccaaacatgtgggtcattggcgagcaagaccagaaagagtttctcaccttatgttgctcactgaatatttgggaacatagacattcgtttatccatccatccatccatccatccatccatccatccatccatccatcctttcatttccttgaaaagtatttattgaatgtctatatattctaggtactgttttt

SEQ ID NO: 15357 - DNA, 201 bp, Homo sapiens
tgtttccctgcagaagttctcttttgcctgctgccacgtaagatgtgtctttcgccttctggcatgattgtgaggcctccccagccacgtggcactgtggrtccattaaacctctttttcttcgtaaattatcccatctcaggtatgtctttatcagcagcatgaaaacagactaatacactcagtatgttcattcatcac

SEQ ID NO: 15358 - DNA, 201 bp, Homo sapiens
tgggacttgcagttggtgtataaaattgacagaagacctgagggactgagtccttaacctggggggtctacagtaaatatgggtagttaatgtcaaaattmaaactcagttggtgtccccagagttggagaattggttgatgtcttagtctgttttggctgccatagcaaaatacctcaaactgggtaatttataaacaat

SEQ ID NO: 15359 - DNA, 201 bp, Homo sapiens
tccaggatacctgggagaggtccgctgcagagtgaaaatttgggtctagacctcagggaagcgcggaaggctggagacaaaagcattcatcatcatcatgrtagacaaacatctatgcaaatctttataacttggcaatctgttatagcatgtacatttataaatataaacattcaattataaatatattcatagatatat

SEQ ID NO: 15360 - DNA, 201 bp, Homo sapiens
gaattcagcaagtgtttacttcctgtatgttaaacaatgcactgagtatagcagaaggtggaaacgaaaatgacacctagaccccagcctcctagactaaraatgcaagtgtctgagtcaccacaataccaggtatgctacaaacgcattatagttaccacacttatattatctcaatcaatatcggatttattcagcaat

SEQ ID NO: 15361 - DNA, 201 bp, Homo sapiens
cctgaggttccagaaactcagcacagtgtgatttcacccacgtgccactgttcagtgtgagtgaagaggatcttctggctctctctgctcaaagaggtgaytcagaggtccagtcgcttttcatggtatggctttgccatctcggggccatttgcttctagagagagagagagaaagagggagaaagagagagagtgaata

SEQ ID NO: 15362 - DNA, 201 bp, Homo sapiens
gagaaagagggagaaagagagagagtgaataaaaaaccatgcttcagaaagcagtgattaggccagataagtgaccttcatcacttctggccacattccaytggccagaatcagtcacgtgactgatgaagggcagctggaaataaaatcttcctgtggcaactggaaggaaaattaaacaatttagttaaacatgacatc

SEQ ID NO: 15363 - DNA, 201 bp, Homo sapiens
atatgtaaaatgcttaaaagagtgcctggcaccatatataccatggaatactatgcagccataaaaaaagatgcattcatgtcctttgaagggacatggawgaagctggaaaccatcattctgagcaaactatcgcaaggacaaaaaaccagacactgcatgttctcactcataggtgggaattgaacaatgagaacactt

SEQ ID NO: 15364 - DNA, 201 bp, Homo sapiens
tgacatcaccagcctgtaggttaaacatttattttaacaccaaaacttgctgccccttgcccccacctacataaatgcagggcgctaacgcccactttaargtcatgcaattattctgggttatccattgaatctgtagaaatcttcttccggtcatttcatcagtgtttggtacccataaggcatgtgacaagtgcttgc

SEQ ID NO: 15365 - DNA, 201 bp, Homo sapiens
aggcttcagaacaactggatttgatgatagagggttcagggacctcagtactacaactggaaggaaataaattctaccaactaatcaaaagggctttaaastcgatttatccccaagagacaagagctagtctgggcaacaacttttccatttgtcttctgtgagatcccaagcagagtatcaagccaagcctgcctgaat

SEQ ID NO: 15366 - DNA, 201 bp, Homo sapiens
tggaagtattttattattgcttaaaaataccaggaagattaccatgaaaactgtacatttataatttaaggatggaatcttcatgtagtttcttaaacctyggaggtgaaggtattacatattccagaaattcaggaaactttctgtgttatagaatagcaggatattgaaacctacattctctggttaagagaatgccta

SEQ ID NO: 15367 - DNA, 201 bp, Homo sapiens
gcctcagcctcctgagtagctgagactacaggcacgcgccaccatgcccagctaattttttgtatttttagtagagatggggtttcaccatgcttgtcagkctggtctcgaactcctgacctcatgatccaccttcctcagcctgccaaagtgctgggattacaggcgtgagctaccctgcctggcccagagttatttcat

SEQ ID NO: 15368 - DNA, 201 bp, Homo sapiens
atcacaaagacaacaggtatgccttcgtagatgcaaaaaagcccacttgtgcatttggtacttgtggagaagaattctttctttttttttggcagcggggsgggggggggcgggaggcagggggacggagtctcactctgttgcccaggctggagtgcagtggcaccatcttggctcactgcaacctccacctgccaggtt

SEQ ID NO: 15369 - DNA, 201 bp, Homo sapiens
acatcctaaatcatgtagcccatgaatatgttatgtgacatggcaaaagagattttgcagacgtgattaaggctataggccttgagatggggagcttatgmtgaattatctgggtgggcttaatctaacagagaacattctcagctggaggcagataagatgaaacagagaggaagtcaaagagaattgaggcttcagaac

SEQ ID NO: 15370 - DNA, 201 bp, Homo sapiens
gaacactttggaataattgtttgttttctttcttgtcttgttttccccttaactctctagtaaaggataacacacatacagaggaatatataaaaaaaaamaactggaattcaaagaattttcacaaggaaacatacccatgttaccaacactcagatcagccaacagaacattaccatcctcacagaggccctcctcata

SEQ ID NO: 15371 - DNA, 201 bp, Homo sapiens
gtagccttttcagattggctttttaaaaacttagcataatgcccttgagaaccagccaggttgttgcttggatcaatagttgacttttttttgttactaargaatatttcacagtatgatattccacagcttgtttaaccatttacttctcgagggacattttgattgcttctgatttttggatattacaaataaaactga

SEQ ID NO: 15372 - DNA, 201 bp, Homo sapiens
tattccacagcttgtttaaccatttacttctcgagggacattttgattgcttctgatttttggatattacaaataaaactgatatgaacaatcacatctargtttttgtacagacataagttttcatttttatgtgataaatgcccaggaatgcaattgctgggttgtatagtgagtatatacttagttgcctttttttgg

SEQ ID NO: 15373 - DNA, 201 bp, Homo sapiens
ccactgataagtcacagagctactcaagatggataatgctccagggaatggagggaaatagaaactctttaaattggatatgttgcatcttcaatgcctargccactaatggtcaacagggcagccagtatctataaagagatactactataaaaataagattttagtcattatcttctctagtcctacctttgcttttat

SEQ ID NO: 15374 - DNA, 201 bp, Homo sapiens
cactaaggtcaggggccagatgtggtggctcattcctgtaatcccagcactttgggaggctgaggtgggaggatcacttgaacccaggagttcgagtctgyagtgagctgtgatttcaccattgcaccactgcactccagtctgggcaacatagtgagacctcatcgcttaaaaaaattaaaatttaaaaaagttaaagaa

SEQ ID NO: 15375 - DNA, 201 bp, Homo sapiens
gtgttgcattgacaattatgtttcaaaataaatttgagagggaataccatcattcaaacaagtggttggtatgaaaaagaaaccttacaaatttggtgtcwgatatgttgtaaatagtagataaactgtttttgctgttgctgtttgtttttgttattcacctggctaggacaacattctcaaagattttgaatttgaggg

SEQ ID NO: 15376 - DNA, 201 bp, Homo sapiens
gcctccagctgcatccaagttgctgcaaaggacgtgattttgttcatttttataaaaatgccctttacactaactttttttttcctgtccaggatccaatyctggatcacacattgccttgttttcatgtcccatttctctaaaaaagttactcttttgtttagctttctagaaaagtccatcactgtgtttgtcattact

SEQ ID NO: 15377 - DNA, 201 bp, Homo sapiens
gtactttgagacagagccctgaggcctaactctgaagttctctaaaaatacactagttttcccttattaaaaatttcctacacataaatcaccctattttmcacacacacacacacacacacacacacacacacacacacttttcagtggtagccacattaacataaaacttttcttcagtctttagttgcttataaaaat

SEQ ID NO: 15378 - DNA, 201 bp, Homo sapiens
tactttgagacagagccctgaggcctaactctgaagttctctaaaaatacactagttttcccttattaaaaatttcctacacataaatcaccctattttacacacacacacacacacacacacacacacacacacacacttttcagtggtagccacattaacataaaacttttcttcagtctttagttgcttataaaaatg

SEQ ID NO: 15379 - DNA, 201 bp, Homo sapiens
caagaggttacaaagatggcacagagaggttgcatgcatgtaggcttcactcagtttttctgagtggttacattttacatcattacatctatctatctatctatctatctatctatctatctatctatcatctatctatctatctatccatctatctatctatcatctatctgatgtgagggcaatctggctgcggcatct

SEQ ID NO: 15380 - DNA, 201 bp, Homo sapiens
aagaggttacaaagatggcacagagaggttgcatgcatgtaggcttcactcagtttttctgagtggttacattttacatcattacatctatctatctatctatctatctatctatctatctatctatcatctatctatctatctatccatctatctatctatcatctatctgatgtgagggcaatctggctgcggcatctg

SEQ ID NO: 15381 - DNA, 201 bp, Homo sapiens
agaggttacaaagatggcacagagaggttgcatgcatgtaggcttcactcagtttttctgagtggttacattttacatcattacatctatctatctatctatctatctatctatctatctatctatcatctatctatctatctatccatctatctatctatcatctatctgatgtgagggcaatctggctgcggcatctgt

SEQ ID NO: 15382 - DNA, 201 bp, Homo sapiens
aataacattgcaattaagaacacaggctgtacatccagattttctaagcttggagtttggcgtattaatcaaagtatcatctttgctgtaccaaagattcytgaggttccagaaactcagcacagtgtgatttcacccacgtgccactgttcagtgtgagtgaagaggatcttctggctctctctgctcaaagaggtgact

SEQ ID NO: 15383 - DNA, 201 bp, Homo sapiens
cgaagccctgtctcaggctctgctttcaagagcactcccaattaagacactgactccatctggtctcgcaccactatcctagaaggcttgtgttatccaargatacctgcagtgatttggagcatgcatgtgtaattttttactcagaaagagtatgatatatagacaagacatttagaaactgtagacacgaaacagacc

SEQ ID NO: 15384 - DNA, 201 bp, Homo sapiens
ccttgaacagaacaactggaaatgataaaaagattaagaaaacactcatattacatatcacactcaacatttttgcacatgggaattgcattagaatcagrcagaactgcattggaatctcagctctgttattttctatgcaggtatcttcatctgcaaataagaattcctatctcagggtggttatggtgattaaatgag

SEQ ID NO: 15385 - DNA, 201 bp, Homo sapiens
attgtctcaagagggggtttaagtcctagaactgcacagcaggtgctgaaagcaaatgctttagggaagaatcccttctttttgactaaagacaagtaaaraggacctctgtatgctggagaatgtggggagaatcccccatctccttttttaaatcatttacctccagaccctgcccagagcagctcagtaactgagctg

SEQ ID NO: 15386 - DNA, 201 bp, Homo sapiens
ttcttccaagatggtgccttgttgctgtatctgctgtgcccacatgtggtgaaaagcagaagagtaagagagccctcccttcaacccagcatccttttatraggatgctcattccattcatcagggcagacccctcatgacttaatcacctcctaaaggccacaccacctctcaatagtgttgcattgacaattatgtttc

SEQ ID NO: 15387 - DNA, 201 bp, Homo sapiens
gttttaagtcactacgtttctagtaatttgttatggcagcaataagacactaataaaagggagaatcaataaagtagtcatgatagaaaagacacttgaasagagacttgattgacaggcagggttttcctgcttaaataaagtgggaggacattccagataaaagaaacagtgttgagcagaggaacagggaaggtaggg

SEQ ID NO: 15388 - DNA, 201 bp, Homo sapiens
aaagaaaccttacaaatttggtgtcagatatgttgtaaatagtagataaactgtttttgctgttgctgtttgtttttgttattcacctggctaggacaacrttctcaaagattttgaatttgaggggatttgtagtgaatatgcaaggatggaggaaggcacttgtatatccaggtgtggaggtcagagagatgacgtgaa

SEQ ID NO: 15389 - DNA, 201 bp, Homo sapiens
agtagtcatgatagaaaagacacttgaacagagacttgattgacaggcagggttttcctgcttaaataaagtgggaggacattccagataaaagaaacagygttgagcagaggaacagggaaggtagggtgggagtttgttagagttgagttccatgtgatattaggaacttatgagcaatgattaaaaattggtagcttg

SEQ ID NO: 15390 - DNA, 201 bp, Homo sapiens
ggtaatcagcttaaatgccctgttttatcattctcctttgtttttcatttatcacatatatttttatgcctaaacagcctgttgcttcatattgaatgttytaaactttatatcaacggaataaaactacctgtatttttctgtgacttactttttttggcttaatatcatgtttttgagggtcatccaggttgatatatt

SEQ ID NO: 15391 - DNA, 201 bp, Homo sapiens
aacttatgagcaatgattaaaaattggtagcttgggccaggagcggtggctcacgtctgtaattccagcactttgggaggctgaggcttgtggatgatgargtcaagagatcaagaccatcctggccaacatggtgaaaccctgtctctaccaaaaatacaaaagctagctgggcgtggtggcgtacacctgtagtcccag

SEQ ID NO: 15392 - DNA, 201 bp, Homo sapiens
catcatcccatacagatttgccaagaagcattccaaaatgattcttgacgattagctatcaaatagaaaaagaaataagatacttggccgggcgcggtggytcatgcctgtaatcccaacactttgggaggctgaggtgggaggatcatgaggtcaggaggtcgagactggcaccacagaagtcatttctctagtttatcc

SEQ ID NO: 15393 - DNA, 201 bp, Homo sapiens
gaactactaagtagtaaattagcatgtaatactgaaggcattttcagttatgcctgtatttttataaagtagaggtactggttttttactttgcaattttyatgtaattacaaacttacaggaaacttgcaagactaatacaaaggcatttcacataccattcatccagattcaccaattgttaaaactttgccacatttg

SEQ ID NO: 15394 - DNA, 201 bp, Homo sapiens
taagatcaagatggacaccacccccacttttccctgcccaaggagacctattgaacaagcccattcttgccttcaagccctgcttctcagagttaattaaygtttgtttcattccactagattctcttctatttcctaggcagtctggtctgctatgaattttaggtttatccatgtttccttcaatttaacattctcaac

SEQ ID NO: 15395 - DNA, 201 bp, Homo sapiens
accaacaaattggtagcttggagttatggtacggaaggctttaaattccaggccaaggagtctttcctaaattccacagcaaatgaggaaccattgctggrttttgattggagatgtggtgtgatcagagacatgcattaggaggttgtctgacagtacactagatggaaggggcacaatgactaggagaattgcttatac

SEQ ID NO: 15396 - DNA, 201 bp, Homo sapiens
ctttatatctttggaccagacatagatgtaactgttaactctcccatagtcttttaagagtttcttgctctcggaggcttattccatatttaaaatagacytaaaatagtattcatgtaatttttctactaataaaaggaagatgatctaaataatcaagataaaatgagggtatatgaatacgattttagaaggaagtga

SEQ ID NO: 15397 - DNA, 201 bp, Homo sapiens
gagtctttcctaaattccacagcaaatgaggaaccattgctggattttgattggagatgtggtgtgatcagagacatgcattaggaggttgtctgacagtrcactagatggaaggggcacaatgactaggagaattgcttataccataaggagtgaaccaagatagtagctttgggaatggaaaggtgggcacttaagaga

SEQ ID NO: 15398 - DNA, 201 bp, Homo sapiens
atatcaaaatcaaagccatcacaagaaaataaaactatagacatatattcctcaagaatatacatgtaaaaattctaaataaaattcaacaattttgataragataatacttcataactatgtagagcacattccaggaatacaacactcaaaagtaagtcaatttaattcactataaaaaaagcaagcaaacaaaatctt

SEQ ID NO: 15399 - DNA, 201 bp, Homo sapiens
ttccgtgcaggggtgctgtgaagatgaaatgactgctcctccaagtgtggtccttggaccagcagcttccacaaaatctaggcacttgctagaaatgcagrtccctagcatcatcccagacctgctgaattaacacccataaggatggagtcttggaatatgtttaataagccttcctggtgattctgatgctggttcagt

SEQ ID NO: 15400 - DNA, 201 bp, Homo sapiens
atgcctgttatgtctcttgctcactgccttttcattttgagttgcaggaagagaatagatggatgaatagttggatgagtggatgaataaatgaatggatrgatgaatgaatatagatagacagatattctaatattttgggtcagttttatgtgttgcaaataccttacagtttttagcttgacttttcactctcgtttc

SEQ ID NO: 15401 - DNA, 201 bp, Homo sapiens; identical to SEQ ID NO: 1854

SEQ ID NO: 15402 - DNA, 201 bp, Homo sapiens
gcaaagtaaccacagcaagtgggttgaagattgatgtcaaaacatgagtaatgacccaaaaggggtagagcagaggggtgggatatggcaggtgagtttcrtgttgttgttttctttgtctgtcagcattgtctcaagagggggtttaagtcctagaactgcacagcaggtgctgaaagcaaatgctttagggaagaatcc

SEQ ID NO: 15403 - DNA, 201 bp, Homo sapiens
aaatcaatttataaattgatggacatttggattatttccactttttggctattgtaaataatggtgcaataaacatttatgtacaaattttcctgtagatrtatgttttcaattcacttgggtttatacctaggagtgaaattgttatgtcatataataactctatgtttgagttttgaggaactgccaaactgtttttct

SEQ ID NO: 15404 - DNA, 201 bp, Homo sapiens
gtgagaggctaaacatctaagaagattcaatctttctggctagagataccaggggaaaaaggtcattgattatgggaacatgtgggagaaaattcagagaygaaagagctgaagaaatagaattccaaatttcgggtatgtaatgacataactcttggactcaccctgagctaagtatgtgtggaacaacaccaaggcata

SEQ ID NO: 15405 - DNA, 201 bp, Homo sapiens
  misc_feature (101)..(101): n is a, c, g, or t
acattgtgttgtggaaaaactctcctaaactaaatttgtcctctgctttcacatcacaataatcatcaacacagaagacctctgtgaccaaaggtatgggntttttttttttcccacacaccaagcagtggataccacatgaatgtccttcaattcagttctgacactatctacccagagatagcatcagatcctacaggt

SEQ ID NO: 15406 - DNA, 201 bp, Homo sapiens
gggctagttctaaacagtgaatggagacaaacagcgtaataaccaaggtattaactcatacttagggtcccttccttcttcaatttaacatttctaagttaaaaaaaaaaagttattttccccttaaaaacctaattgagtagaaaaaagtatcctttccattttagtttgtaagctgtacttctggggactgtggctgtt

SEQ ID NO: 15407 - DNA, 201 bp, Homo sapiens
agataaatacaacctcatcaaaattaaaacattagctccctgaaagaacctattagagaatgaaaagaaaagccacagactagaagaaaataatagcaaayagaatatctcataaagaacatttattacagctcaggaaaaggagtggaaaaaaagatttattcataacatatgaaaaacactcaaaaattcattaataag

SEQ ID NO: 15408 - DNA, 201 bp, Homo sapiens
attgctcttactgagatagcaatgttcatgtgtaaaactctcatcattaatgtctgaaacacagaaaattgaaaggaattacgaagattgttaattttcayggcaaaagttgagacacatagtttaaggagattcttcactttttggaagaattttaaaccagctatgtcccttggagaggagatatagacacctgaagtt

SEQ ID NO: 15409 - DNA, 201 bp, Homo sapiens
tgaggcacaagaatctcttgaacccaggaggtgaaggttgcagtgagccgagattgcaccattgcactccagcctgggtgacagagcaagacacagtctcaaaaaaaaaaaaaaaaaaattatgaagagtagtttaaatagtgcctgccttcaggtcatataacttatgatatggagcaagcatcttttctatgccttggc

SEQ ID NO: 15410 - DNA, 201 bp, Homo sapiens
tataatattctatcttagtccctggcttcttatagaatagtttctaagactcttggaatctccagagagaaataaaagtgtctttttttatgctaatgagrtgactgatggcagaggttcctagatagctttaggaacggggctggtcaccagaaagaccaagacatgattagagagttagaacttttaaccttactttct

SEQ ID NO: 15411 - DNA, 201 bp, Homo sapiens
taatttttgtgtttttttgtagagatgggctttcactgtgttagccaggctggcctcaaactcctaacctcaagtaatctgcccaccttggcctcccaaastgcttagattataggtatgagccatcacacttggcctgaaagtctaattctgatggctcaagagaagaagaagagaaattaaaggcagtatagagaaaga

SEQ ID NO: 15412 - DNA, 201 bp, Homo sapiens
gaggttacaaagatggcacagagaggttgcatgcatgtaggcttcactcagtttttctgagtggttacattttacatcattacatctatctatctatctatctatctatctatctatctatctatcatctatctatctatctatccatctatctatctatcatctatctgatgtgagggcaatctggctgcggcatctgtc

SEQ ID NO: 15413 - DNA, 201 bp, Homo sapiens
aaaattccaattttctacgttgaattcagcaagtgtttacttcctgtatgttaaacaatgcactgagtatagcagaaggtggaaacgaaaatgacacctasaccccagcctcctagactaagaatgcaagtgtctgagtcaccacaataccaggtatgctacaaacgcattatagttaccacacttatattatctcaatca

SEQ ID NO: 15414 - DNA, 201 bp, Homo sapiens
gataaatcagatgttatttttctctttgctcctctatagataagtttttttcccctctggcttctttaaaggttttcttctttatctttgattttctgcargttaaatatgatatgcctaactgtggttttgggcatttttccttcttggtgttctctgagcatcctgaatctgtggtttcatgtctgactttaatttgaa

SEQ ID NO: 15415 - DNA, 201 bp, Homo sapiens
aggttacaaagatggcacagagaggttgcatgcatgtaggcttcactcagtttttctgagtggttacattttacatcattacatctatctatctatctathtatctatctatctatctatctatcatctatctatctatctatccatctatctatctatcatctatctgatgtgagggcaatctggctgcggcatctgtca

SEQ ID NO: 15416 - DNA, 201 bp, Homo sapiens
aaggttaagtctgtacacttcatttcttgttctttggcagattctgggagccaacattgtcttgttctggtttaggaagctcattcagtggaactgcagcrtcctcctatggtagcctgtcttctcaccaagcattgtcaatcaaatccaagattcttccatctctttgtacctcactgttcattttcctggagctttaac

SEQ ID NO: 15417 - DNA, 201 bp, Homo sapiens
atgtctccctcttcttctttattttgagctttatgataattctttgaagtctggagtatggtaaattccctcagacactatctgtttctgcctattcttakagtgtaggaactaacaaacgaggaacacttctttagtagaaataggtgtccaccaaaacatttccttcttcatcctggatgcatagctagactacatttc

SEQ ID NO: 15418 - DNA, 201 bp, Homo sapiens
ggttacaaagatggcacagagaggttgcatgcatgtaggcttcactcagtttttctgagtggttacattttacatcattacatctatctatctatctatctatctatctatctatctatctatcatctatctatctatctatccatctatctatctatcatctatctgatgtgagggcaatctggctgcggcatctgtcac

SEQ ID NO: 15419 - DNA, 201 bp, Homo sapiens
cattttccagaaatgtctacctaatttttacacatgagggtgatcacagtgaaacatttttaaatgctttcagttactctgaggaaccataattggatggyaatgttttattgttactaatgaggaaagtggaactagatattgatcacattagtatattgttcaagttaaacaagaatgaactagaaactgttatgcatt

SEQ ID NO: 15420 - DNA, 201 bp, Homo sapiens
gtgacattttattaaatttaattgatttaatcctcaaaaatccaacgagttagctgtagcaaaagaaagaaagtaaggaaggaaagaaggaaggaaggaargaaagaaggaaggagaaagggagggagggagagagggaaggagggaggaaggaaggaaaaaagagggagaaaggaaggaaggaagagaggatcaaaggca

SEQ ID NO: 15421 - DNA, 201 bp, Homo sapiens
tcatctatctatctatctatccatctatctatctatcatctatctgatgtgagggcaatctggctgcggcatctgtcaccccattgatcaccagggttgaytcggctgatctgactggttagacgggtgtccccttcctccctcactgctccatatgcatccctcccaaagctgcatgctctgtcaaagaggatgaccatc

SEQ ID NO: 15422 - DNA, 201 bp, Homo sapiens
caagggcatacgagtacctccgctcccatgctagaacctccaaacaagctatctatcatctatctatctatctatctatctatctatctatctatctatctatcatctatctatctatctgtctatctacgtatccatctatctatctcaaaaaatatatagatatcaaaaatatgtatgaatagcaaaaccaagatatgg

SEQ ID NO: 15423 - DNA, 201 bp, Homo sapiens
aagggcatacgagtacctccgctcccatgctagaacctccaaacaagctatctatcatctatctatctatctatctatctatctatctatctatctatctatcatctatctatctatctgtctatctacgtatccatctatctatctcaaaaaatatatagatatcaaaaatatgtatgaatagcaaaaccaagatatgga

SEQ ID NO: 15424 - DNA, 201 bp, Homo sapiens
gggcatacgagtacctccgctcccatgctagaacctccaaacaagctatctatcatctatctatctatctatctatctatctatctatctatctatctatcatctatctatctatctgtctatctacgtatccatctatctatctcaaaaaatatatagatatcaaaaatatgtatgaatagcaaaaccaagatatggaca

SEQ ID NO: 15425 - DNA, 201 bp, Homo sapiens
atacgagtacctccgctcccatgctagaacctccaaacaagctatctatcatctatctatctatctatctatctatctatctatctatctatctatcatctatctatctatctgtctatctacgtatccatctatctatctcaaaaaatatatagatatcaaaaatatgtatgaatagcaaaaccaagatatggacactgc

SEQ ID NO: 15426 - DNA, 201 bp, Homo sapiens
gaacccaaaattaggtagcaagtattcccttctaccaagatgaatagtaacccacaaacccctggtcgttcctacacaacagaaagctctttgcagagagrgagagagagagagagagagagagagagagagagagagagagagaaagcaaaccaacagagtatcctagctgaaagaagagcaagtgcaaaggtcatgaaa

SEQ ID NO: 15427 - DNA, 201 bp, Homo sapiens
tggagaattattttgaggaagaatggttaatacacatacacacacatataaaacctatataaacacatatataaaaacacatttaaatataaagtgcctcaaaaaaaaaagcaatttggtaaaacattagcctgaaaataaaataccaatacagaacaatttctagtttacttaatgaggacatggtgatacctctctacc

SEQ ID NO: 15428 - DNA, 201 bp, Homo sapiens
tcactgggtgacaagaatttttcagttccactataatcttgtggcaccaccatcattgcggtacattgttgaccaaaatgtcattacacagggcatgaccrtgtctgtttaatatcctctaatataacacattagaagcattaggaattaaagtgttttatttattaataaaaatcatagaccaggtgtggtggctcatgc

SEQ ID NO: 15429 - DNA, 201 bp, Homo sapiens
tgaggtccgaataaataaaagaagaaatatcagcgttctctctctctcttcctctctctgcacatgcacagagataagaccatataaggacacaatgagamgatgcctctttgcaagccaggaaaatagcgcttaccaaaaaccaactgtactggcaccttgaacttggacttccagcctccggactgtgagaaaataaat

SEQ ID NO: 15430 - DNA, 201 bp, Homo sapiens
gcctgaggcaaaatacctaagtgctcagcctctgcatctctaaaatggactgatactagcaactatcttctggaactcttgtaagaatgtcaaggtgcctrggacacaagaaaaaatgtaatcaccggtactattagccattacatttatagtggaggaaaaataattttccctctacccttatgagttcttagctgtgga

SEQ ID NO: 15431 - DNA, 201 bp, Homo sapiens
attgttagagtcaggactatactattttcaatgtgtttttaaaaataatttggaaaataaaatgaaccctttggctcaaattaaacctttctgtctcaaawtttattttggctagtgcttatactgctattctttatttgcttgttgtttatgtgttgtttgtattttcatgaaatacacttctccatatagctgaatttt

SEQ ID NO: 15432 - DNA, 201 bp, Homo sapiens
taatcaaaagaacactttggaataattgtttgttttctttcttgtcttgttttccccttaactctctagtaaaggataacacacatacagaggaatatatwaaaaaaaaaaactggaattcaaagaattttcacaaggaaacatacccatgttaccaacactcagatcagccaacagaacattaccatcctcacagaggcc

SEQ ID NO: 15433 - DNA, 201 bp, Homo sapiens
cgagtctgcagtgagctgtgatttcaccattgcaccactgcactccagtctgggcaacatagtgagacctcatcgcttaaaaaaattaaaatttaaaaaarttaaagaaataggaccaaagtcagggaaaattcaggatgaataaccaagaaagaagaggttgcatgtccatgtcacaggagatctgtgcaaccgcagttt

SEQ ID NO: 15434 - DNA, 201 bp, Homo sapiens
agtgagacctcatcgcttaaaaaaattaaaatttaaaaaagttaaagaaataggaccaaagtcagggaaaattcaggatgaataaccaagaaagaagaggytgcatgtccatgtcacaggagatctgtgcaaccgcagtttctatgaaatagaaagcatagaaaagaaatcaaccagcaagaaaaaaagaaatgagaaatt

SEQ ID NO: 15435 - DNA, 201 bp, Homo sapiens
tatctccaaatttggtggaagttgctatagaatcatattacaaagggagaagtgagaagtgacagtcatttttgcatcagtgttctaaaacctggagcatygctggtcatgatggcaaaggaaacataagcacatcacttctctcacatttctttggtagagcaagtcatgtggccaagtcaggtgtcaacccagtaggca

SEQ ID NO: 15436 - DNA, 201 bp, Homo sapiens
tatctgattgtaagggggaacttggaataaacctcctctacagactctttatccatctcttcatatctcacatttctgcccctgagacttacatataaaayttaagtcttacctctcaggagtgaatgccatcgtctccatagttcaccattcacaactggactaggtacatatttctcaatgtaggatagctagggataa

SEQ ID NO: 15437 - DNA, 201 bp, Homo sapiens
tgaataaccaagaaagaagaggttgcatgtccatgtcacaggagatctgtgcaaccgcagtttctatgaaatagaaagcatagaaaagaaatcaaccagcragaaaaaaagaaatgagaaattgaggaatcaagcacagttaggcatgtcagttggtatatcagtcactatgggctaggttactctgggtaacaaatagac

SEQ ID NO: 15438 - DNA, 201 bp, Homo sapiens
gggcccagacaccttagctaatttatgaagttgattttctaagatgttagaactttagtactgagaatgataatgaggcctactgttaatagactgagttytgtcttccgtgaattcatatgttgaagtccgaattcccaatgggacgtatttggaaataggccctgtaaggagctaattcaggttaaatgaggtgataaa

SEQ ID NO: 15439 - DNA, 201 bp, Homo sapiens
ttgcctatataggaaaaccattgtgtgaactgtcatgaaactttcctgcttagcttggctcttagacatgtctagaaaaagcaaagaggaaatgttagctaaaaaagactctcctgcaattaaatttattttcctccctttgtttagatgccagattttatttctaatacctgtttatgttttatttccttttgtgcagtt

SEQ ID NO: 15440 - DNA, 201 bp, Homo sapiens
atgagtgctgtggggatagggagaggaagtgacttaccaaagatgttttgatttcatggttaacattcaactagaagcttatctgcctgatgtacaggctrtcgcatataggtgtataccttgagtacaacttcctgttattctttattcctgtaaaacaaacttgctccaaaggaaggaatcttttctgccagaaggcaa

SEQ ID NO: 15441 - DNA, 201 bp, Homo sapiens
acttgtcagtgaatgactgaaaatgtacaagtattgattttaggggttgcaaatacattttagcaagtagacaaacacaattattgacttcgtgaataataaaaaacaactatgcatttttagattgttaattgttagagtcaggactatactattttcaatgtgtttttaaaaataatttggaaaataaaatgaaccctt

SEQ ID NO: 15442 - DNA, 201 bp, Homo sapiens
aacttggaataaacctcctctacagactctttatccatctcttcatatctcacatttctgcccctgagacttacatataaaacttaagtcttacctctcargagtgaatgccatcgtctccatagttcaccattcacaactggactaggtacatatttctcaatgtaggatagctagggataattgccattaaaaaattat

SEQ ID NO: 15443 - DNA, 201 bp, Homo sapiens
ttggccaggacggtcttgaactcctgacctcgggtgatccatccgcctcagcctctcaaagtgctgggattacagacgtgagccaccacacctggccaccttttttttttttttttttttttaacatttcttgcaagggaggcctactggccacagattctctcattttacttgtttgagagtgtctctgtttctccttaa

SEQ ID NO: 15444 - DNA, 201 bp, Homo sapiens
ttatttggtacatttactttaattttttaatgcataatatctcgttaacaattctgacatgggctttctaaacactgaagttataattatataaacatttytgggccgggcatggtggctcacgcctgtaatcccagcactttgggaggccaaggcaggcggatcacgaggtcaggagatcgagaccatcctggctaacat

SEQ ID NO: 15445 - DNA, 201 bp, Homo sapiens
tttgtctggccttgtgatttgtgttctccaaaagattgcaacagaaatgatggtgaaatagtctaagcataaccttcaagtggtcttgacacctgtccagycactatgcccaggctagcctgttgaaggtgaggtgccacatggagcagagatgggctaccccagactagccagccccgacccacccacagctgattagag

SEQ ID NO: 15446 - DNA, 201 bp, Homo sapiens
tatttccactttttggctattgtaaataatggtgcaataaacatttatgtacaaattttcctgtagatgtatgttttcaattcacttgggtttatacctargagtgaaattgttatgtcatataataactctatgtttgagttttgaggaactgccaaactgtttttctcaacctggataatctcaactggccaatcttca

SEQ ID NO: 15447 - DNA, 201 bp, Homo sapiens
ggctcacgcctgtaatcccagcactttgggaggccaaggcaggcggatcacgaggtcaggagatcgagaccatcctggctaacatggtgaaaccccatctytactaaaaatacaaaaaatcagccaggcatgatggcgggcgcctgtagtcccagttactcgggagactgaggcaggagaaaggtgtgaccccaggaggcg

SEQ ID NO: 15448 - DNA, 201 bp, Homo sapiens
aaactcagatatctcagagtaaaatactcaggctgttaatccttgtgcttagtttacttaataaatggcttaatgaatataaagtgcttagaagagttttkggcatatataggtaaatatataattttgggcatatgcaggtaaatatacatgataagcatgtaagttatgagtgttagctattattatccttttcttttg

SEQ ID NO: 15449 - DNA, 201 bp, Homo sapiens
actttcagatttgactgtgtgaactggctgaagatccttagtattttttcaacccttttattttgaaataattatagcctcacaagaggttacaaagatgrcacagagaggttgcatgcatgtaggcttcactcagtttttctgagtggttacattttacatcattacatctatctatctatctatctatctatctatcta

SEQ ID NO: 15450 - DNA, 201 bp, Homo sapiens
gccaaggcaggcggatcacgaggtcaggagatcgagaccatcctggctaacatggtgaaaccccatctctactaaaaatacaaaaaatcagccaggcatgrtggcgggcgcctgtagtcccagttactcgggagactgaggcaggagaaaggtgtgaccccaggaggcggagcttgcagtgagctgagatcgcaccactgc

SEQ ID NO: 15451 - DNA, 201 bp, Homo sapiens
gactgaggcaggagaaaggtgtgaccccaggaggcggagcttgcagtgagctgagatcgcaccactgcactccagcctgggtgacagagcaagactccgtytcaaaaaaaaaaaaaaaaaaaaatttctggctctgttttagtttcatggtggtggaaattatagccataaaaatcctctaactgtatgtattatagggag

SEQ ID NO: 15452 - DNA, 201 bp, Homo sapiens
tgaggcaggagaaaggtgtgaccccaggaggcggagcttgcagtgagctgagatcgcaccactgcactccagcctgggtgacagagcaagactccgtctcaaaaaaaaaaaaaaaaaaaaatttctggctctgttttagtttcatggtggtggaaattatagccataaaaatcctctaactgtatgtattatagggagaaa

SEQ ID NO: 15453 - DNA, 201 bp, Homo sapiens
ctcatgccaaagtggcatattctgggctacacagtaatgatataaagttatgattgctaaatacagcctgtgtaatggtgctttaggcaggcccaaaggcytggtgtatctcttagggggagaggcaacagggcactaggggagtatccaagtcatttggtttgagccccctcactcagaaacctgagaatcacctggtct

SEQ ID NO: 15454 - DNA, 201 bp, Homo sapiens
cccctgcaagctgattgcttcttactgcaagcacttgagcatcttcctgagagctttcttgggcaatgggaaccaggcttggcccaatcacaggcaggtgaaaagtatgaggaaatggagaaggcattgtccaaggagcagtcttcaaccttcaccccgcaagtgagacaactctgaataagatgtgttctacactctctt

SEQ ID NO: 15455 - DNA, 201 bp, Homo sapiens
ccctgcaagctgattgcttcttactgcaagcacttgagcatcttcctgagagctttcttgggcaatgggaaccaggcttggcccaatcacaggcaggtgaaaagtatgaggaaatggagaaggcattgtccaaggagcagtcttcaaccttcaccccgcaagtgagacaactctgaataagatgtgttctacactctcttc

SEQ ID NO: 15456 - DNA, 201 bp, Homo sapiens
ctcaaatttcaggctcttctccaagtgcagcgtgcatcagcctggcccaaagagcacagtaaagactttgaaaacagaattgacattgggaccaccatcaytgaaggtgaaacttcttgacagtctgaagctaatcatgttaattatcagttactaaaaaaaattaacattttttagattataacaggacctacaaacttg

SEQ ID NO: 15457 - DNA, 201 bp, Homo sapiens
agtgtaccttcaaatagagagattatcctggattatccaggtaggccctgtatcatcacaagtatctttaaaggtgaaaaagggagatggaaaaagaggaratttgaaaaggacttagcttgcctttgcaaggcaaccacaagccaaggaatgtggtcagcctctaggagatggaaaaagtcaaggaaacaattatctcct

SEQ ID NO: 15458 - DNA, 201 bp, Homo sapiens
tcttgttaatgctttgtgccttgtgcctgcttgctgtagctctgtcctacatcttctgtactccaggtgcaggccaacagagcagcttcaatctgtgtatyagttatttcttgccacattaatcctgtaattccaaaccaccatgaaacttcagcagcactcaggaataaacatttatttttttctcgtgagtctacatgg

SEQ ID NO: 15459 - DNA, 201 bp, Homo sapiens
acctcaaaattgttaatgtattaaatacaattgttaatattttgtgacgattttttgacacaaaggaaaataggcttttcttgctgaggatgtgaaatggrttatttagcaattatgagtgctctggatgtctctgagccctacttcccactctttcagactcacctatgatacagctgtttttatcaacctcatgccact

SEQ ID NO: 15460 - DNA, 201 bp, Homo sapiens
ttagctttctagaaaagtccatcactgtgtttgtcattactatcaaagatatatagaagctgatatggccttctggtgcctttgcaagataactttggaayctgcttttcaatattgtctatatctggcttaacaaagttagaagatatagaagcattcactcagccaggagagatgtaaatgtagctgtggcactgttcg

SEQ ID NO: 15461 - DNA, 201 bp, Homo sapiens
caacttctagatatcttgttaagatcaggctgcttatggtggttgatagatgacaatgctatcaaccagatcaggactatcttcggagagtacattttggrgagaaaaagatgaaattgatttaggactattagaatctaatatactttccaggatacctgggagaggtccgctgcagagtgaaaatttgggtctagacct

SEQ ID NO: 15462 - DNA, 201 bp, Homo sapiens
ctgaattgaaaaccacctgctacttgacatttaagatatttaaagaaggaatcagaagatttgcatttcttatgaataagtaattaattattattactgcrcctggaaatcgaaaacatttgtgttatagggctttgaagagggtagtgtaattggcttggggttctgactggtttgaagggaatacgtagtagatcctca

SEQ ID NO: 15463 - DNA, 201 bp, Homo sapiens
gcacataaacaccccaagacagcaacctagtaaaactcaacaagcagtttctgaagggatgagtgaacagtttgaagagatatttttgaggtggattccayaggctctggcaactatttgagtgtaggataaaggagaaacagaggacaacttctagatatcttgttaagatcaggctgcttatggtggttgatagatgac

SEQ ID NO: 15464 - DNA, 201 bp, Homo sapiens
tttgcaaaaccttgtcaaaaataagataaacctgtacatacagtttaaaagtagaagagctattttaaaccaagctctgtgtcacgaagctcaagacttcratttcctttcatgtcactaaatagcatagtccaataataaagggtgtagtgcaggaaaacggggaagttaaaaagttatcaaaacattaataactctttc

SEQ ID NO: 15465 - DNA, 201 bp, Homo sapiens
tgtagatacatacagttgtttttttttaagagacaaggtttctcttgttgcccaggctggagtgcagtgacacaatcattgctcaatgcagcctcaaaatyctaagctcaggctatcctcccagctcagcctcccaaatagctgagactactggcaggcagcaccaacacccagctaaatttttcacatttttttttttgt

SEQ ID NO: 15466 - DNA, 201 bp, Homo sapiens
ttttgtagagtcagggtcttgctaagttgcccaggcagccttcaaactcctgggctcaagtgattctcccaccttggcctcccaaagtgctgggattacargcctgagacacaatgcctggtctcaaatatttttaactcgactgaaaacagaggaacaaagtatatattctccaaatctactggacagaaacaaaattga

SEQ ID NO: 15467 - DNA, 201 bp, Homo sapiens
taagtcatttgcttgtaggtagtccttaaaactctgagttgtaatacttgagcaagactaaactgggagagtaaatgccttgctgaccatttatatttacyggctggggaaaagagaatgaatctgcaatgaactcagaaaaagattctgaagaggtaggtggaaaaccagaaaagtatggtttcctaaagcaaggggaag

SEQ ID NO: 15468 - DNA, 201 bp, Homo sapiens
catccaaatgaaatcaatggtcctaaaaggccaactcatttttaccactggtgcaattaaaatacagcagtaaaaagcagaactgacattgattttccttytcttttttggaagtagattctttcccttgataagcaatgagaaaaaaaatgtattctacatgactgtttttctttgtgttatacaagattattctttgtg

SEQ ID NO: 15469 - DNA, 201 bp, Homo sapiens
tgatggaaatctttcccaaaattgatgtcagtgagatctgctttgtgactaaaaaatttgttaatattaatttatcaatatcactaatatcagtttatttkttcttaatactgctagtgtgcaacttacctgaaggcatatgcaatattttgtaggccaatttaaatgcagtcagaaggattaagctcttctactttcatt

SEQ ID NO: 15470 - DNA, 201 bp, Homo sapiens
aacatggtggggaagggagtattcaaaattatattctgggcaatagatgcaatatattaaggcactacaggtttttaaagaagctgaaagtaacaaaaggraagtactaattattttatatatcacaccaaatggataatctaaaaattaaaatcaaaatgtagagttggcattggggtactttttttcaacagttatata

SEQ ID NO: 15471 - DNA, 201 bp, Homo sapiens
atggcagtttggttggcatgatggggctgaatgactaatttttttttttttttttgagacagagtcttgctttgtcacccaggctgaagtgcaatggtgcratcttggctcactgcaaccttcgcctcctgggttcaagagattctcctgcctcagcctcccaagtagctaggaataggcatacgccaccatgcctagcta

SEQ ID NO: 15472 - DNA, 201 bp, Homo sapiens
tggacctaattaacaagcattcattttggggagctgagaaacaacattctaaccctagattgttcttgcctctgttcattgccataatgaattctatttcyttaatgagaaaccagctaactatcttttattctctctaatatttgtaaaataaataagactcaaaattagagttctagaatcttcttacagaaacggctg

SEQ ID NO: 15473 - DNA, 201 bp, Homo sapiens
aaagacaacaggtatgccttcgtagatgcaaaaaagcccacttgtgcatttggtacttgtggagaagaattctttctttttttttggcagcggggcggggkggggcgggaggcagggggacggagtctcactctgttgcccaggctggagtgcagtggcaccatcttggctcactgcaacctccacctgccaggttcaagc

SEQ ID NO: 15474 - DNA, 201 bp, Homo sapiens
gaccacataggattgttatgaagattaagtgaggcagtatatgtaaaatgcttaaaagagtgcctggcaccatatataccatggaatactatgcagccataaaaaaagatgcattcatgtcctttgaagggacatggatgaagctggaaaccatcattctgagcaaactatcgcaaggacaaaaaaccagacactgcatgt

SEQ ID NO: 15475 - DNA, 201 bp, Homo sapiens
aagatgtggatgaaacaaaattgtccccaggtgtctaccactaggccatccactctttcaatgtagttttcgagcactgatattgaactaagttaacaggyatgcagcaaggcaacttacgcaatctccaaagtactcatttaatctatcataagacaaccccaccagaccccttattttccctaaccctgctcctctgtg

SEQ ID NO: 15476 - DNA, 201 bp, Homo sapiens
tcacaggaagagttttggccttttaattccatatgattttcacatccatccaggaaggagaggcgatctgagaaaagtgcagatgaaaggcacacagtttycaagttttctagaactcactaaagatgtggatgaaacaaaattgtccccaggtgtctaccactaggccatccactctttcaatgtagttttcgagcactg

SEQ ID NO: 15477 - DNA, 201 bp, Homo sapiens
ttgttacctttaaagttgctatttaaataccacttaaaagtatttttacaaggactttgcaatatcacaggaagagttttggccttttaattccatatgaytttcacatccatccaggaaggagaggcgatctgagaaaagtgcagatgaaaggcacacagtttccaagttttctagaactcactaaagatgtggatgaaa

SEQ ID NO: 15478 - DNA, 201 bp, Homo sapiens
tgcaagctactggtcatattttcatcaactaaccaatatgcaattgtgttttacatatgcttctgcttaaagacatcttatcttatatatatatatatatrtattttgattcattaatattgaatggccaatggcactataactcatgccttaacaaagcttatcttacacacatagtttctccgtagggcacattcaagc

SEQ ID NO: 15479 - DNA, 201 bp, Homo sapiens
gcttgagagagaagttctgtaatgttgcttccaccacattctattggcccatgatagtcataagttcaatccagattcaaggcataggaaagtagactccrcctcttcaaagtcatattgcaaggagtcatggggacagggagacatgattcaccaggggccatttttaacactctaccacattacctctgacatctccac

SEQ ID NO: 15480 - DNA, 201 bp, Homo sapiens
atttttcccatccccatgttaaaagcagaggaaaccttttttttttttttgatacggagtctcactctgttgccaggctggagtgtggtggcatgatctargctcaccgcaacctccgcctcccaggttcaagcaattcttctgcctcagcctccctagtaactgtgattacaggcacgtgccaccacacccaactaaaat

SEQ ID NO: 15481 - DNA, 201 bp, Homo sapiens
ttgaaaattccaattttctacgttgaattcagcaagtgtttacttcctgtatgttaaacaatgcactgagtatagcagaaggtggaaacgaaaatgacacytagaccccagcctcctagactaagaatgcaagtgtctgagtcaccacaataccaggtatgctacaaacgcattatagttaccacacttatattatctcaa

SEQ ID NO: 15482 - DNA, 201 bp, Homo sapiens
atgaaatggacaaatatatatgaaatggacaaatttcttgaaagacctaaactacaaaagctaactcaaaaaaaaaaaaaaaaaagatagcgcaaacagcyttttatctacttaagaaattaaatttgtagttaaaagcctccctacaatgataaatccagggccagatgtccttactggtaaatccagtcaagcatttaa

SEQ ID NO: 15483 - DNA, 201 bp, Homo sapiens
cattatgaaaagaatataaatgtagatgtccaggacagagagattatagtcaataagaattgggttctacataatggtcagataaatgcttagtcccttargctgctgtagcaaaataccataaatggaggagtggcttataaatagtggaaatgtatttctcacagtcctggaagctgggaagtccaagatcaaggtgtc

SEQ ID NO: 15484 - DNA, 201 bp, Homo sapiens
agaatacattctgagaaatgcctccttaggcaatttcatcattgtttgaaaataatggtgtgtacttacacaaacctagatggtatagcctgctatacacytaagctgtatgatatagactattgctcctgtgctacaagcctgtacagcatgctactgtactgagtactgtaagcagttgtaacccaatggcacatatct

SEQ ID NO: 15485 - DNA, 201 bp, Homo sapiens
tgctctgcttcctgaactctacattagagatggcagtttggttggcatgatggggctgaatgactaatttttttttttttttttgagacagagtcttgctytgtcacccaggctgaagtgcaatggtgcgatcttggctcactgcaaccttcgcctcctgggttcaagagattctcctgcctcagcctcccaagtagctag

SEQ ID NO: 15486 - DNA, 201 bp, Homo sapiens
acccatggggttccactcaataccggtcttaaatacatagtttttttctgaaagctactaagcacagcttgaatgccagtgctttcaattaaaccttctargttttgtgctggtgttaaataggccaccactggggttggttgcttccaataaatgtagaactaaaggcaactgtagggtgtagagagagatgatccttta

SEQ ID NO: 15487 - DNA, 201 bp, Homo sapiens
ctgtcctttgggccttttatggaggcttcatcagttgtccatgatggaagcatgagcaactgtgtcaaaatgtgattggacaaaaacagtatgatctaaayccagaaagacctgtctgttcagattcctctaggtctctccatgcagcattcccttctctagactatgggcaggactctctgaaatgagggtcttttgact

SEQ ID NO: 15488 - DNA, 201 bp, Homo sapiens
gtgatatggtttggccgtgtccccactgaaatctcatcttgaattgtagctcccacgattcccaggtgttgtgggagggaccctgtgggagataattgcaycatggggatgggtctttcctgtgctgttgtgatagtaataaatcccacaagatccaacgcttttgtaagggggtgtttccctgcagaagttctcttttgc

SEQ ID NO: 15489 - DNA, 201 bp, Homo sapiens
ctatcaaacacatagtagattcatatgtgaatttaaaaagtttgctggtgttgcatttctctttttaagcctatctgccaatccccctacaatcatgaggygccctcaagtttctctctgatacattttcctctttctgacttattcctttcctttgttagagccagggaagatgtggtggataaatcttttgttttaaaa

SEQ ID NO: 15490 - DNA, 201 bp, Homo sapiens
atacttaccaaatcctggagaagggcctgtttgcttctaagtttccttgctttgtggaatttaaagtgattgtcatacccaagtaagagatgcttaggggrtgaggagaggattaatacagaggctaagttcttattcaaatgcagctcagttttagatctcattttatggccatcatcccatacagatttgccaagaagc

SEQ ID NO: 15491 - DNA, 201 bp, Homo sapiens
tagatacttaccaaatcctggagaagggcctgtttgcttctaagtttccttgctttgtggaatttaaagtgattgtcatacccaagtaagagatgcttagsggatgaggagaggattaatacagaggctaagttcttattcaaatgcagctcagttttagatctcattttatggccatcatcccatacagatttgccaaga

SEQ ID NO: 15492 - DNA, 201 bp, Homo sapiens
ataccacaatttattttttccattctacttctgttgggaatttgagtagtttccaatttggggctattatgaataatgctgctataaatactctattataggatgggatgtggtggctcatgcctataatcccagtgcttttggaggctgagatgaaaggactgcttgaggccaggagttcaaaagaagcctgtccaataa

SEQ ID NO: 15493 - DNA, 201 bp, Homo sapiens
aggatgaataaccaagaaagaagaggttgcatgtccatgtcacaggagatctgtgcaaccgcagtttctatgaaatagaaagcatagaaaagaaatcaacyagcaagaaaaaaagaaatgagaaattgaggaatcaagcacagttaggcatgtcagttggtatatcagtcactatgggctaggttactctgggtaacaaat

SEQ ID NO: 15494 - DNA, 201 bp, Homo sapiens
gcttataaaaatgcaaacccctttggaaatgttgtttgaacttaataaaaaccagaatatcagtcaaacgaatcacaaagtgcatgatgaaacttatatakgtgtgtgtgtgtgtgtgtgtgtgtgtgtgtgtgtgtagatacatacagttgtttttttttaagagacaaggtttctcttgttgcccaggctggagtgcag

SEQ ID NO: 15495 - DNA, 201 bp, Homo sapiens
ggcagcccttgtttggtatggtagtgtaacactgtaaaaatgactacacaaattgtttcttactatctaagttataaacagaaatgaaatactagtaaacytaatacagtcatgtgcggcttaacaatgagaatacattctgagaaatgcctccttaggcaatttcatcattgtttgaaaataatggtgtgtacttacaca

SEQ ID NO: 15496 - DNA, 201 bp, Homo sapiens
tggaatttggatttcaggagagtctccaccaccattaaccataagagtggttcattgtatacaaactgcttacataaacaatatggttcatgtcagacacytactgtcactctgggagtttggaattttggtatgcatcagtcaaagactgtccacataaccagtgtccgataaaacctttgggttgtgagactctaatga

SEQ ID NO: 15497 - DNA, 201 bp, Homo sapiens
ggccatttgcttctagagagagagagagaaagagggagaaagagagagagtgaataaaaaaccatgcttcagaaagcagtgattaggccagataagtgacyttcatcacttctggccacattccattggccagaatcagtcacgtgactgatgaagggcagctggaaataaaatcttcctgtggcaactggaaggaaaatt

SEQ ID NO: 15498 - DNA, 201 bp, Homo sapiens
aggacagagtgatgacttccaagttccttacatgttagactggaaaccagactcttaacttgttaatacagaatacagtaaattttattatttatatgtartaaatttatatatttaatatattaaaagttacatatatattatgtgtatatatataactttttaaaccagcatcacattcttgggacaaatataaattgg

SEQ ID NO: 15499 - DNA, 201 bp, Homo sapiens
tcaaaataacccagaagctaaagcagaaatcaaaaaagaaattagaaagtactttggactgaatgacacaacatatcaaaatttgcaggactttgctaatrtagtacttaggaagaaatttatagcactaaccacccataacagaggagaagaaaggtttcaaatcagtgtcttcagtttgcatctcaaggaactagaaaa

SEQ ID NO: 15500 - DNA, 201 bp, Homo sapiens
ttaatgtttgaaagaggttaccttttttcttttagtacactgaatacttttcttgaaatagatttttataactaatttatttgaaaattccaattttctaygttgaattcagcaagtgtttacttcctgtatgttaaacaatgcactgagtatagcagaaggtggaaacgaaaatgacacctagaccccagcctcctagac

SEQ ID NO: 15501 - DNA, 201 bp, Homo sapiens
atcttacattcccaccagcgatgtatgagaggcccagtttttctacatcctcaccagcattttgtactatcattaccttaaagtttcagttgttccaatargtgtgtagtgatacctcattatggtcttcatttgagttttcctaatggttaatgatgttgaacattttatatgcgtatttgccattcgtatattttcttc

SEQ ID NO: 15502 - DNA, 201 bp, Homo sapiens
cttctaatgcctgaggatgagacatagactctaactctcaatggaagagtgtcgatatcatcttgtaggataagcacatgggatatgatatacaatggtgwggtcatctttagaaaatactgtctgccatattttgcttcttataacatatgctgaactgcagaactatgaattctctctcattatttactagacaaaata

SEQ ID NO: 15503 - DNA, 201 bp, Homo sapiens
tccctggtgccaaaaagtttgggaacctctgctctagtaggggagaacaataaagaaaacaaataaatacaatgtatagtatacatgaaaatgataaatgytatggagaaaaatgaagacgggaggtaggatgcttcttggtattctccaaaagggttcgaatagttatgcacacacagttgggggttcaataaatattta

SEQ ID NO: 15504 - DNA, 201 bp, Homo sapiens
cttgtggatgatgaagtcaagagatcaagaccatcctggccaacatggtgaaaccctgtctctaccaaaaatacaaaagctagctgggcgtggtggcgtayacctgtagtcccagctactcaggaagctgagtcaggagaattgcttgaacacaggaggcggaggttgcagtgagccgagatccactgcactccagcctgg

SEQ ID NO: 15505 - DNA, 201 bp, Homo sapiens
gactagagaaaagacattgatggtaaagaggtaaggatccagctgtctgcggtgttggagagttcacctatgtgagataactgcagaacttccttcgggcrgagaggaacaccaaaagccaaaacaagtttattgtctatattattcagaccctctgtatttcaattaaattttatttaactgattttttgattctcagag

SEQ ID NO: 15506 - DNA, 201 bp, Homo sapiens
tgtcttataacaaatagctataactaaaatttttataattgttatggctgatacttctgtggcactttatagtctgacttttggactgccagatttgatargcagaacatttctattggaaatgtagtgccccatgcctcatgtcttgttctaatcccatccctaccagtcccctcagaggtaatcagcttaaatgccctg

SEQ ID NO: 15507 - DNA, 201 bp, Homo sapiens
cagcctggagtgcagtggcatgatctctgttcactgcaatttccgcctcccaggttcaagcaattctcatgccttagcctcccaagtagctgggattacargcacctcccccacccgatcatgcctggctaattttttatatttttattagagacagggttttgtcatattggccaggctggtctcgaactcctgacctca

SEQ ID NO: 15508 - DNA, 201 bp, Homo sapiens
atagaaaaagaaataagatacttggccgggcgcggtggctcatgcctgtaatcccaacactttgggaggctgaggtgggaggatcatgaggtcaggaggtygagactggcaccacagaagtcatttctctagtttatcccttcagaagtggcttacatggtataaggcactgcaaaaataaataaatatttgtggctagta

SEQ ID NO: 15509 - DNA, 201 bp, Homo sapiens
gaatagtgatagcaaacatagcatatttttcttattcaaagaaataattattgagatcctattatgtatatgttttgtaaactggtcccctattcatggtsgggccccacttaagctcaggactagatacttaccaaatcctggagaagggcctgtttgcttctaagtttccttgctttgtggaatttaaagtgattgtca

SEQ ID NO: 15510 - DNA, 201 bp, Homo sapiens
aaaggtccccagttggatggagctctagctgctcatgtgataagctgcctattaatacacaaaagattgcctttcctccttgctctgtcttcctgctgctmtcctactaatgtttcctgggattgcctccaaataaaccacttgaactcacatattagtgttattgtcagttggaagattttagtgttttagatatatagg

SEQ ID NO: 15511 - DNA, 201 bp, Homo sapiens
ttctacactctcttccaaaggtccccagttggatggagctctagctgctcatgtgataagctgcctattaatacacaaaagattgcctttcctccttgctytgtcttcctgctgctctcctactaatgtttcctgggattgcctccaaataaaccacttgaactcacatattagtgttattgtcagttggaagattttagt

SEQ ID NO: 15512 - DNA, 201 bp, Homo sapiens
agattaagtcacaattgtgatcacttatgactggacattctctcagctctttcagatcttgctccctgggctctgtgccctgagacccatggggttccacycaataccggtcttaaatacatagtttttttctgaaagctactaagcacagcttgaatgccagtgctttcaattaaaccttctaggttttgtgctggtgtt

SEQ ID NO: 15513 - DNA, 201 bp, Homo sapiens
tgtttcttactatctaagttataaacagaaatgaaatactagtaaacctaatacagtcatgtgcggcttaacaatgagaatacattctgagaaatgcctcyttaggcaatttcatcattgtttgaaaataatggtgtgtacttacacaaacctagatggtatagcctgctatacacctaagctgtatgatatagactattg

SEQ ID NO: 15514 - DNA, 201 bp, Homo sapiens
acttatgttgtagtctaaaagacaggaggaaaaagcaaatgtctactaaaatatttacaagcctctataagtgttttgaaagaagaaaggaataaacgcasagaccaagctgcactcaatttgtatagggttatctggaaaggctgtctagaagaactgacactctggtggagtcctaaaaaactacaggctgctggccaa

SEQ ID NO: 15515 - DNA, 201 bp, Homo sapiens
gggcatatataggtaaatatataattttgggcatatgcaggtaaatatacatgataagcatgtaagttatgagtgttagctattattatccttttcttttktcctccccaagagtggcttctctcttctgcttccatttggagcacagtgaatagattatttgaagctacaatgctatgaagccattgatagctgagaaaa

SEQ ID NO: 15516 - DNA, 201 bp, Homo sapiens
tgactttatactcaacaagattacatggtgaagagtcatcagaatacaagattacatggtgaagagtcatcagaataatcaatcttcctccactttccttytaacagtctcttcgtggcctgtgctgaggactacatcagtctcctgcaattatcatctacactgaaaaacaaagaggacagaggcaaagctagtggccct

SEQ ID NO: 15517 - DNA, 201 bp, Homo sapiens
ttttctaagatgttagaactttagtactgagaatgataatgaggcctactgttaatagactgagttctgtcttccgtgaattcatatgttgaagtccgaaytcccaatgggacgtatttggaaataggccctgtaaggagctaattcaggttaaatgaggtgataaaggtgatgccctaatccaataggactgaggtccga

SEQ ID NO: 15518 - DNA, 201 bp, Homo sapiens
caccaggggccatttttaacactctaccacattacctctgacatctccacacactcctttttcccctgactgacaggtagatgtagatgctcagggaagcyttatgagccatataatgaagataggggggactccccacctccagtttccaacctgtggcgttgaatgtggtgaaagcgataaataaatgtgcattgtgtt

SEQ ID NO: 15519 - DNA, 201 bp, Homo sapiens
ggcaaaagttgagacacatagtttaaggagattcttcactttttggaagaattttaaaccagctatgtcccttggagaggagatatagacacctgaagttrcaggcaaaattagtgtgctttttttcctggatataaggaacatgcctttcatcagcatcacaaagacaacaggtatgccttcgtagatgcaaaaaagccc

SEQ ID NO: 15520 - DNA, 201 bp, Homo sapiens
aatgttgtattaagttcctgcaagctactggtcatattttcatcaactaaccaatatgcaattgtgttttacatatgcttctgcttaaagacatcttatcwtatatatatatatatatgtattttgattcattaatattgaatggccaatggcactataactcatgccttaacaaagcttatcttacacacatagtttctc

SEQ ID NO: 15521 - DNA, 201 bp, Homo sapiens
gggcaagttctatactacggaatgttaataacactctaacactcctatgtctggcttctggcttccttttttttttttttttttttttttttttgacagartcttgctctgtcacccagcctggagtgcagtggcatgatctctgttcactgcaatttccgcctcccaggttcaagcaattctcatgccttagcctcccaa

SEQ ID NO: 15522 - DNA, 201 bp, Homo sapiens
tacttgggctccaaagcattacctctgcctccttcccaaactctgccatgatccagctggccaaaccccatccaaatccctcatttcagctcatgccttgygatcttcttctctctctctgggctcttcatatctgattgtaagggggaacttggaataaacctcctctacagactctttatccatctcttcatatctcac

SEQ ID NO: 15523 - DNA, 201 bp, Homo sapiens
ctgctttagatgaccgtgacaagaatgacccgatttcatctgatcaactttcatagaaggaaggaaagaagaaagggaggaagaaaggaaaacagggagcytagagaaaggagggagaaaataagaaaaaaaaaagagagagagaaaggtagaacctggatgtaagccagatttctcttttcttcattctaacaccccagt

SEQ ID NO: 15524 - DNA, 201 bp, Homo sapiens
tctgagcttttctccccctgcctagaactctcttctgctctgtatcctatggctattttattgacacatcccttcagcatgtgtatatttggtgtcaatargatgctttcttaatgttttaaagaagttaacttctgtttgttttcatcattctggtctcagttcagacatcatttgttcagagtggcctgtcttctcttt

SEQ ID NO: 15525 - DNA, 201 bp, Homo sapiens
agtaaaaatatccagtgacaaaggaaaaaaggagagaaaataacttttagttagctgtgttagttattggcaatgcatatatcaaaacaggaaagatgtgwtttcattcttcagggttgactttatactcaacaagattacatggtgaagagtcatcagaatacaagattacatggtgaagagtcatcagaataatcaatc

SEQ ID NO: 15526 - DNA, 201 bp, Homo sapiens
catagactctaactctcaatggaagagtgtcgatatcatcttgtaggataagcacatgggatatgatatacaatggtgtggtcatctttagaaaatactgyctgccatattttgcttcttataacatatgctgaactgcagaactatgaattctctctcattatttactagacaaaataactcacagcttttaaggcctga

SEQ ID NO: 15527 - DNA, 201 bp, Homo sapiens
gattaagtcacaattgtgatcacttatgactggacattctctcagctctttcagatcttgctccctgggctctgtgccctgagacccatggggttccactyaataccggtcttaaatacatagtttttttctgaaagctactaagcacagcttgaatgccagtgctttcaattaaaccttctaggttttgtgctggtgtta

SEQ ID NO: 15528 - DNA, 201 bp, Homo sapiens
aggagagaaaataacttttagttagctgtgttagttattggcaatgcatatatcaaaacaggaaagatgtgatttcattcttcagggttgactttatactyaacaagattacatggtgaagagtcatcagaatacaagattacatggtgaagagtcatcagaataatcaatcttcctccactttccttctaacagtctctt

SEQ ID NO: 15529 - DNA, 201 bp, Homo sapiens
aatctaccttctgtctctatggatttgcttattctggatattttatataaatggaatcatacatatgtggtcttttgtgactggcttcttcacttagcacwgtgttttttttgttttgttttgtttttcttagacggaatctcactctgtctcccaggctggagtgcagtggtgcgatctcggctcaccgcaatctccgcc

SEQ ID NO: 15530 - DNA, 201 bp, Homo sapiens
agggtgatacgtattttcaagcattgggaggaaagaatgctgagtctcagaggcagctctcaggttgaaactatggaagcacagcaggcagaatcaaagasataggcacagagaaccagtaaaggtccttaggacctgggagctcaccaacagcatccgcttcagaggtggtgcagcttgagtgcatggcagctggtgggg

SEQ ID NO: 15531 - DNA, 201 bp, Homo sapiens
gcgccaccatgcccagctaattttttgtatttttagtagagatggggtttcaccatgcttgtcaggctggtctcgaactcctgacctcatgatccaccttyctcagcctgccaaagtgctgggattacaggcgtgagctaccctgcctggcccagagttatttcatatatattatttgcatatcagtattccaaagtgtgt

SEQ ID NO: 15532 - DNA, 201 bp, Homo sapiens
tactcactaagaagttttggcagatttatatgtggactgtggagttcagaaaagtagtgaccaattagttgtatttgtaatctctctggagaattattttraggaagaatggttaatacacatacacacacatataaaacctatataaacacatatataaaaacacatttaaatataaagtgcctcaaaaaaaaaagcaat

SEQ ID NO: 15533 - DNA, 201 bp, Homo sapiens
cttataaatgtgagcaaacactagcacagtttctaacagctaaggccacatccctaaatgaccctacccctctttaaagtgactgcctgagaaaactcaargctgccaaagaagattcactgtttgttgtggctgacacccaaggatagggcctctgacttccagtctcagtgggaagatagaatcctaactttgattaat

SEQ ID NO: 15534 - DNA, 201 bp, Homo sapiens
agtgaggaagttcaataattgaaatgaaatattgactggagaggctcaacagcaaatttgacctggcagaagaatcagtgaacatgaaaattggccagtcragattatccaggttgagaaaaacagtttggcagctcctcaaaactcaaacatagagttattatacgacataacaatttcactcctaggtataaacccaag

SEQ ID NO: 15535 - DNA, 201 bp, Homo sapiens
ttttgtggtgtatttattactatctttttcacatttttgtgcttttttgttggtacttttgctgtttaaaatggatcccaggcatactgctgaagtgtttytaagtgcaagaaaactgtgacgtgccttatggagaacatatgtgtgttagataagcttcgcttaggcctgagttatagcgctgtagactgtgagttcaat

SEQ ID NO: 15536 - DNA, 201 bp, Homo sapiens
taaactgtttttgctgttgctgtttgtttttgttattcacctggctaggacaacattctcaaagattttgaatttgaggggatttgtagtgaatatgcaargatggaggaaggcacttgtatatccaggtgtggaggtcagagagatgacgtgaactgttgctaaaactctaagtcatttgcttgtaggtagtccttaaaa

SEQ ID NO: 15537 - DNA, 201 bp, Homo sapiens
cactaatactcaaaatgtacctatgtggtttgaagtaaggacagtggtgacccttatagggatgggggacaatggcagaaaaggataagtgtctgtttccwgatccaggtgctgcttacgaggggacaatttctgaagatccagcaggctctaccttcctaatgtgccctctgggaaacttcctttctattcaataacaag

SEQ ID NO: 15538 - DNA, 201 bp, Homo sapiens
aagtccaagatcaaggtgtcagcatggtcaggttccaacttcttgttgtgtcctcacttggcaggaggggcgaacgagctctcttgggcctcttttataarggcatgaatcatatcatgaggactcttccctgtggtctaatcacttccccaaaggccccaccccctcatttagtcaccttggggattaggatttcaacat

SEQ ID NO: 15539 - DNA, 201 bp, Homo sapiens
tacccttaagtgagccactttatcacaggtctttaatgcattttgatatttctaatgtaacatagttttttcctaataaacttgttacaaggagttaccasctgacatgtgtcaacagtcaggtaagaacccttcagcgtgtgtacgttcagtgtcaataggttgcgttcttaatgtttgaaagaggttaccttttttctt

SEQ ID NO: 15540 - DNA, 201 bp, Homo sapiens
tggctggtctctgctgtaggtagttttctttcttccctgttaacagcaggatagcctggtcaggtcctttccatggttacggtgagggcaaaagtgagcargcctagttgtacagggtctcttcaagactcactgacattccatggaccgaagaaagtcatgtggctggagccagagtccgagtaggagtattgcaaagtt

SEQ ID NO: 15541 - DNA, 201 bp, Homo sapiens
aatttgaaggttacttgggggtagaaaggaataagggctataagtttacttacttatctaaaacatacattttaagaattttctcagagccaagtcaattytgaagcaaataatttacaactggagtagaagagcataaccttctcagaggacattgacatttacctacaaaatattgagagcgcctttaggcagattaca

SEQ ID NO: 15542 - DNA, 201 bp, Homo sapiens
tcctgtcatcatgcaaacatccggtaaactcactcatattaaaaataagatgaaataaaaaataaaatccttttaacattctatattctttccaacttccrtctgatttatctcttttgtatcaaaattcatcagaagagtagtttctgcctgcttactctctctccttgtgcagaaaagagtttatatgagaagcctgac

SEQ ID NO: 15543 - DNA, 201 bp, Homo sapiens
tgacactctggtggagtcctaaaaaactacaggctgctggccaattagagctttgaagagagatcatttgttagagggaaaccaggagaggaaaagagatmtggggatactggcaagggagtgattacattgagaagtcgtggacatagagttggacaggagagaataaaaaagttatggggtccatattttggcagtctc

SEQ ID NO: 15544 - DNA, 201 bp, Homo sapiens
gatctaggctcaccgcaacctccgcctcccaggttcaagcaattcttctgcctcagcctccctagtaactgtgattacaggcacgtgccaccacacccaaytaaaatgtatttatttatttatttatttacttttgagacagagtctcactctgtcgcccaggctggagcgcagtggcgcgatctcggctcactgcaagct

SEQ ID NO: 15545 - DNA, 201 bp, Homo sapiens
aattaagtgacttaaaacaataagatacagttaactaatgactctgagggctggtgatttagtccagcgtcatctgggcagctcttctagtcttggctggktcactcatatatctggactcttagccttgattgggatgactgatgtggctggtctctgctgtaggtagttttctttcttccctgttaacagcaggatagc

SEQ ID NO: 15546 - DNA, 201 bp, Homo sapiens
tcctggcctccagggtttatttagtaaagctaatctaaccccaaaaatgcagccttaagccaagttcttagcttgaggcttttcagaccatacaggtaatrgtaattaggttgcagacttatgaaaggaacaagctgtgactcacccaatgctaaggtctcagattatccacttttcttactgatccatgtggtgtgaagc

SEQ ID NO: 15547 - DNA, 201 bp, Homo sapiens
catggttggctctaagcaaaatcctgagatgagtgatcttggctttcagcgtttctggctctgacaagtggcctcatgctttatgatattaggcctctcargagcttccattataatactctacccatttttaggaatcacccaataaaagaataatcaaaatgaacaaatgaatgaatgaagattgaatgaatgaatgaa

SEQ ID NO: 15548 - DNA, 201 bp, Homo sapiens
ggtcgtttcatgctgacttcctagaactaaattgaaaggaaaaccctaactttccacgcctaagggaaaaaaggaccagaggctactccctttgcaaaccyccgaccttttctgccaagcagatgggaaattggctgtccgcaaccaatcagactgatggccggtccagtcttcctttgcctagaagtgcaactttgtaac

SEQ ID NO: 15549 - DNA, 201 bp, Homo sapiens
tttaaaaataatgtattttctttatagggtaaaaatttagataaccattcctttgagcttctaatatatgcaaggttttatattaggtactgggaatgaarggagaacaagacaggatttctgtactcatggaacttatgttgtagtctaaaagacaggaggaaaaagcaaatgtctactaaaatatttacaagcctctat

SEQ ID NO: 15550 - DNA, 201 bp, Homo sapiens
acaaaaaaccagacactgcatgttctcactcataggtgggaattgaacaatgagaacacttggacacagggcagggaacatcacacaccagggcatgtcargcgtggggggctgggggagggatagcattaggagaaatacctaatgtaaatgactaattaatgggtgcagcaaaccaacatggcacatgtatacatatgt

SEQ ID NO: 15551 - DNA, 201 bp, Homo sapiens
aaaggtcttcaaatccacttcacttccgactgaaggtagacttccacgatttaagttatgtcatgaacagaggggaaaaagataaatgtagtaagcccatyttggcattttcctcatatgcattttcaggaaaaaatttaaggagggatgattcatttgcattaggctggctttctcttagttaaatacctttgttttatg

SEQ ID NO: 15552 - DNA, 201 bp, Homo sapiens
tatatgagcaaagacagcacatattgttggattagatagtatgaaagggttgaaatgacagtctgtgaattgggcagaggtatttccaggtttcagactgrgatgttcccattattgcattttggttagatcttctttggggtacatcctcatgttattaatctcaaagatgaatcagcctaaatcttgacataaatcctc

SEQ ID NO: 15553 - DNA, 201 bp, Homo sapiens
ccggtcttaaatacatagtttttttctgaaagctactaagcacagcttgaatgccagtgctttcaattaaaccttctaggttttgtgctggtgttaaatargccaccactggggttggttgcttccaataaatgtagaactaaaggcaactgtagggtgtagagagagatgatcctttaaaccaatatagtggagataaaa

SEQ ID NO: 15554 - DNA, 201 bp, Homo sapiens
agttgattttgatacataatgttctttaatttataaaatgtttttaattgtactctttaatcttttcttttgtctcctctccaagaattattaaaaacaargtttttggatttccagttagttagatttagctatggttattttatccttattgtatttttagttttattatggtatggtgaaagcatgtaggtcgcacaa

SEQ ID NO: 15555 - DNA, 201 bp, Homo sapiens
attagagttctagaatcttcttacagaaacggctgggccagcacagtgtctttgctcagtgatggttgctttgagggatgtgcttatcttccaagggttcyttacctaagaaagattagggtaacataactaactccgggcagatagactcagggagagatgagttaagattccaggtgctcattgtctcagctttgcaaa

SEQ ID NO: 15556 - DNA, 201 bp, Homo sapiens
gctgcaacctcaaattttggggctcaagcaatattcctgcttcagcatcccaagtagctgggactacaggagtataccactgcatctggctgtttgtttgyttgtttttagagataggttctcactatgttgctcagtctggtctcaaactcctggcctccagggtttatttagtaaagctaatctaaccccaaaaatgca

SEQ ID NO: 15557 - DNA, 201 bp, Homo sapiens
aaaaaagaagaagaagaagaaagaaaacatgtacaaatgagaagtcactcaaggaaacatcttcaacaataaatgaaaaaaaaaaccctcaaaaattgctytgggtcaagatagagattagtattacagcaggatgataataaactcattctatcagttagttattgacacataacaaaccacccccagactcagtgaatt

SEQ ID NO: 15558 - DNA, 201 bp, Homo sapiens
gaagagatatttttgaggtggattccacaggctctggcaactatttgagtgtaggataaaggagaaacagaggacaacttctagatatcttgttaagatcrggctgcttatggtggttgatagatgacaatgctatcaaccagatcaggactatcttcggagagtacattttggagagaaaaagatgaaattgatttagga

SEQ ID NO: 15559 - DNA, 201 bp, Homo sapiens
agaattatccaggcatggtggcgggcgcctatagtcccagctacttgggaggtataagccaccatgcccagccctggcttcctcttttttttttttttttkgcctttccatctcatatcttcaatcatttgtgtcacaggacacatgtaagtacttgggaggagataaactggagtgcagtggcacgacctcggctcactg

SEQ ID NO: 15560 - DNA, 201 bp, Homo sapiens
gggaggtataagccaccatgcccagccctggcttcctcttttttttttttttttggcctttccatctcatatcttcaatcatttgtgtcacaggacacatrtaagtacttgggaggagataaactggagtgcagtggcacgacctcggctcactgcaacctctgccttccgggtgcaagtgattctcctgcctcagcctcc

SEQ ID NO: 15561 - DNA, 201 bp, Homo sapiens
aaaaaaaaaaaaaaaaatttctggctctgttttagtttcatggtggtggaaattatagccataaaaatcctctaactgtatgtattatagggagaaaaatkacattaatcctgaacaatgggtaataattgagacgtgttgtcaagcagtgcagtgacaaaaaataaccttgctgatctcctctgtatctttgaataatta

SEQ ID NO: 15562 - DNA, 201 bp, Homo sapiens
cacgacctcggctcactgcaacctctgccttccgggtgcaagtgattctcctgcctcagcctcccaagtagttgggactaaaggcacgcaccaccataccyggctaattattggattttttagtagagatggggtttccaccacgttggctaggctggtctccaactcctgacctcaaatgatccatccacctcgggtggg

SEQ ID NO: 15563 - DNA, 201 bp, Homo sapiens
ccctaggagcaatggttcactatttgttgattcggtctttgcagtgactttatagaacaaaactactgtgaataatgagaatcagttgtatgcatatgttrtataataaagggtgaaatttcaacttttctttcccctttcaccctttataatatagcatatacattatattatataataggctaaataacaaattataaa

SEQ ID NO: 15564 - DNA, 201 bp, Homo sapiens
tatgagaatctaactaatgcctgatgatctgaggtggaacagtttcatccagaaaccatcccccctccatccatggaaacttgtgtcttccattgaggcargagtataggttctggagtgagggaacctaaggtcgtttcatgctgacttcctagaactaaattgaaaggaaaaccctaactttccacgcctaagggaaaa

SEQ ID NO: 15565 - DNA, 201 bp, Homo sapiens
gctttgtggaatttaaagtgattgtcatacccaagtaagagatgcttaggggatgaggagaggattaatacagaggctaagttcttattcaaatgcagctmagttttagatctcattttatggccatcatcccatacagatttgccaagaagcattccaaaatgattcttgacgattagctatcaaatagaaaaagaaata

SEQ ID NO: 15566 - DNA, 201 bp, Homo sapiens
taaaactttgccacatttgttgtattactgtctctccctttacacacacacacacacacacacacacacacacacgttttttccgaaccactgcgaacacrttgcagaaattatgcccatttacctgtaattcttcagtgtgtgtttcccaggatcaaggctattcatttccataaccacagtacattatcaaattcaagg

SEQ ID NO: 15567 - DNA, 201 bp, Homo sapiens
agttctagaatcttcttacagaaacggctgggccagcacagtgtctttgctcagtgatggttgctttgagggatgtgcttatcttccaagggttccttacytaagaaagattagggtaacataactaactccgggcagatagactcagggagagatgagttaagattccaggtgctcattgtctcagctttgcaaagcagt

SEQ ID NO: 15568 - DNA, 201 bp, Homo sapiens
actatggaagcacagcaggcagaatcaaagagataggcacagagaaccagtaaaggtccttaggacctgggagctcaccaacagcatccgcttcagaggtrgtgcagcttgagtgcatggcagctggtggggtatgaagatgagggtgatggaaaggaagtgagggcagcaccaatctccgtgcccttggtcttgggagaa

SEQ ID NO: 15569 - DNA, 201 bp, Homo sapiens
caggctctaccttcctaatgtgccctctgggaaacttcctttctattcaataacaagagtagaaaatttacaatcatgtccaagcaatgctgttcactttyagatttgactgtgtgaactggctgaagatccttagtattttttcaacccttttattttgaaataattatagcctcacaagaggttacaaagatggcacag

SEQ ID NO: 15570 - DNA, 201 bp, Homo sapiens
aaagcagagtccagtgacatcaagttggataaatgctttcattaggactatggaaacgtctgtggaaacctgtgtaacccctaaacagcacattaactcarggtatgtcagcattaggtcatctctttggtcaggtagttggaaagaacttagcagaacaatgttgaagaaaaaaaataatttcctgaaataaaatgtcta

SEQ ID NO: 15571 - DNA, 201 bp, Homo sapiens
atttttcctactgataccgtgaatgatgatcttttctttcccattagatttttgaaataggatagctattgattttgtctacttaatcatattagttgtgwccatacaaaactctcttgttaatacaatttataactaaagtagacacatatttattatgtctattgacaatcataattacttacatgatgggtgaactta

SEQ ID NO: 15572 - DNA, 201 bp, Homo sapiens
taaagtagacacatatttattatgtctattgacaatcataattacttacatgatgggtgaacttaccctgttccctcgtaaggcttatgtttctttttttytttttctttttttttttttttgagatggagtctcactctgacgcccaggctggagtgcaatggcttgatctcggctcactgcaagcgccccctcccgggt

SEQ ID NO: 15573 - DNA, 201 bp, Homo sapiens
taaggcatgtgacaagtgcttgcatcagaatcatggatgcctagccctataagtgagtattgtgcccccaagaggcattttgcctagtcattcaactgctrttgaagtccaaggctactgacgggcatatgccgtgttccattctgttcttatttcatgaaagccacattctatgttccatgaaaaacgttgttacttggg

SEQ ID NO: 15574 - DNA, 201 bp, Homo sapiens
cagcgtcatctgggcagctcttctagtcttggctgggtcactcatatatctggactcttagccttgattgggatgactgatgtggctggtctctgctgtargtagttttctttcttccctgttaacagcaggatagcctggtcaggtcctttccatggttacggtgagggcaaaagtgagcaagcctagttgtacagggtc

SEQ ID NO: 15575 - DNA, 201 bp, Homo sapiens
ccataggcacaaaaaatgggtgaaaaactggactattttcacactccatcacacaagtaaactgagacaagtcatgtaatcagttctgctgtcaatacaaygggggtgattataacccagaagcctctcccaaattttcctaatggtttaaaatgtaataaatagattgaaaacacttaagtgcttcaaaactgttaagtg

SEQ ID NO: 15576 - DNA, 201 bp, Homo sapiens
gattataacccagaagcctctcccaaattttcctaatggtttaaaatgtaataaatagattgaaaacacttaagtgcttcaaaactgttaagtgatatatrcatgtgagatcttgctattattattattattatttatattattctttttattatattcacatggttggctctaagcaaaatcctgagatgagtgatcttg

SEQ ID NO: 15577 - DNA, 201 bp, Homo sapiens
acttccaaacagaaatttccttacaatatctggagaactacattggagatatgtgccaatgaaagtgagtttttatgggccttcctagagaagtaagaagrtttcaaagaaggcactttggagctgaaaggaactggggggagggggtgttcccaggctcacaggaagggggtgcacattccaattcgaggcaatggcctg

SEQ ID NO: 15578 - DNA, 201 bp, Homo sapiens
tcttgaaagacctaaaccacaaaagttaactcaaaaaaatgatagccaacgtatatgaaatggacaaatatatatgaaatggacaaatttcttgaaagacytaaactacaaaagctaactcaaaaaaaaaaaaaaaaaagatagcgcaaacagccttttatctacttaagaaattaaatttgtagttaaaagcctccctac

SEQ ID NO: 15579 - DNA, 201 bp, Homo sapiens
cctcccacaacaggagcatgaaaaggatattcagccaatcactatgtgagtcagtcaacagactgacatttactgagagcttactttgggcaaaccaagamgttagtcgttgtggagcatctataaagatgatgaagataaagacctctgacaattagtaaaaattagctgtatgtcacagaatcaaaacaagagacttta

SEQ ID NO: 15580 - DNA, 201 bp, Homo sapiens
tgaggacaaggactcagttttcaaaacccaagtttagtgcatatgaacaaatgccagaatactttaggaaaatgtaaagtttggttgtcttcaaggagtayggatgaaaggtgacactaatacaaaaggtaattattctgcattgttttctgaactgagacacttcagtattactgtgaatgttatttttgatcatgtaat

SEQ ID NO: 15581 - DNA, 201 bp, Homo sapiens
gaaaacaaataaatacaatgtatagtatacatgaaaatgataaatgctatggagaaaaatgaagacgggaggtaggatgcttcttggtattctccaaaagrgttcgaatagttatgcacacacagttgggggttcaataaatatttatgaatgtcacgactaagtgtctgaatatacagagtgtgctattcatatgatctt

SEQ ID NO: 15582 - DNA, 201 bp, Homo sapiens
gcatatggttgatccatatggtggcagtgtcattacttaatttttttaatagttgaataatattccattgtgtggatatataacatttaaaaaatcaattkataaattgatggacatttggattatttccactttttggctattgtaaataatggtgcaataaacatttatgtacaaattttcctgtagatgtatgttttc

SEQ ID NO: 15583 - DNA, 201 bp, Homo sapiens
gtaaattttattatttatatgtaataaatttatatatttaatatattaaaagttacatatatattatgtgtatatatataactttttaaaccagcatcacrttcttgggacaaatataaattggttgtgatacaccctttttgtatattgctcaattcaatttttggaatttttctttcaggattgtatacttatgttcat

SEQ ID NO: 15584 - DNA, 201 bp, Homo sapiens
cctgaaatgctgataattgcctatgtgaggcttcattttagagagaaaagcattgttgaagctggaattgttccagtgaaaagatggttagtgttgaaacratttgggtgaaacttgtggatttgatgaagaagaaagaggaggacgaagaggaggaggagaagcaggaggagaaggcagcggaggccaattgtgtttaaa

SEQ ID NO: 15585 - DNA, 201 bp, Homo sapiens
ttcccctgactgacaggtagatgtagatgctcagggaagccttatgagccatataatgaagataggggggactccccacctccagtttccaacctgtggcrttgaatgtggtgaaagcgataaataaatgtgcattgtgttaagccactgatatttcagggctttttttaattaatattttttgtagagacaaggtctcac

SEQ ID NO: 15586 - DNA, 201 bp, Homo sapiens
ataggtgggaattgaacaatgagaacacttggacacagggcagggaacatcacacaccagggcatgtcaggcgtggggggctgggggagggatagcattargagaaatacctaatgtaaatgactaattaatgggtgcagcaaaccaacatggcacatgtatacatatgtaacaaacttgcaagttgagcacatgtaccct

SEQ ID NO: 15587 - DNA, 201 bp, Homo sapiens
gatcaataaaaataataaaactctagcaagcatgattgtgaaaaaaaagagaaggcacaatctatcaatgtcaggaatgatagaaatgagaccattacackttctgtatatatttaaaagataataagggaatacgatgagtgactttatgccagtaaatttgacaatgtatgtgaaatggacaaatatatgaaatggaca

SEQ ID NO: 15588 - DNA, 201 bp, Homo sapiens
cccgtaaaaagaagtgcaacatcattagccattgaagatataccaattaaaaccacagttggataccactccatacctattagaatggctataataaataraaacagcaatactaaatgctgatgaggattttgagcaactggcatagatagatcacctgcgagaatgtaagatggtacagccactttggaaagcagcttg

SEQ ID NO: 15589 - DNA, 201 bp, Homo sapiens
taaaaacaaggtttttggatttccagttagttagatttagctatggttattttatccttattgtatttttagttttattatggtatggtgaaagcatgtargtcgcacaattcccacatgatagaattaattaaggttatattgatatctatatatgcaattaaactttgtagccattacactgatagacatttaaaaata

SEQ ID NO: 15590 - DNA, 201 bp, Homo sapiens
ctgatgtataatatcacttctgcaataacatagtaggattaaaactactagaaataactggaaaatataatggaaaaatctaccatgtataatatataacmatatgaaatacttaaaacttgtataatgaaacctccaaaacactgctgaggaaaattataggagacttaaataagaaaatagatataccatttttaagga

SEQ ID NO: 15591 - DNA, 201 bp, Homo sapiens
accctgcccagagcagctcagtaactgagctgcatagatgtctggcagtgaagaaaaacctaaaaccatggcagaaggcttgtctttctagccagaggagytaaaaagaagctcctattgtccagagtgtgtacaatccatgccatttttctcattctcttttctttttccacttaaccttaaagtaaccctatttactca

SEQ ID NO: 15592 - DNA, 201 bp, Homo sapiens
aattagtaaaaattagctgtatgtcacagaatcaaaacaagagactttattaaggaacacacaatgtgctacgatatcattgagaaaagagtgattggacytaattaacaagcattcattttggggagctgagaaacaacattctaaccctagattgttcttgcctctgttcattgccataatgaattctatttccttaat

SEQ ID NO: 15593 - DNA, 201 bp, Homo sapiens
caaaaaatttcagaggctttagtggttgtcaaaagaatgggaggtaacagtgtcatttaataggctagagacaaatatgtagatgttttcatcctcacacmgtgaaaaagtccccagtagcatggcaatcaaatattccaccagacattcattgaggcaaaaaaaccacttacgttaacctagaacctaaccccattttac

SEQ ID NO: 15594 - DNA, 201 bp, Homo sapiens
tggttgtcaaaagaatgggaggtaacagtgtcatttaataggctagagacaaatatgtagatgttttcatcctcacacagtgaaaaagtccccagtagcayggcaatcaaatattccaccagacattcattgaggcaaaaaaaccacttacgttaacctagaacctaaccccattttacatatccacacaaattacacatt

SEQ ID NO: 15595 - DNA, 201 bp, Homo sapiens
tgttacgtttttactcttgatagaaagtcaatgtcaaaatcagtatgtgtcaatccctgctttgttttctagggattccaatgttggaagcatttttagcrtacaacaacatccaagtggattactatgaatgcctagacctctatggcaaacaggtcagtaaaaagaacaattcatggaatctaaaacttgtattctgtt

SEQ ID NO: 15596 - DNA, 201 bp, Homo sapiens
acatcagattctataaaagctgtctttgaagaactgcagaacagtctatttgaatatgaataactttaaaccatatgacctaaaattttatgcttctcaawggaaaacagaaatttgctacggtctcttaattttgctccaatacacattgtgttgtggaaaaactctcctaaactaaatttgtcctctgctttcacatca

SEQ ID NO: 15597 - DNA, 201 bp, Homo sapiens
ttatattcacatggttggctctaagcaaaatcctgagatgagtgatcttggctttcagcgtttctggctctgacaagtggcctcatgctttatgatattargcctctcaggagcttccattataatactctacccatttttaggaatcacccaataaaagaataatcaaaatgaacaaatgaatgaatgaagattgaatga

SEQ ID NO: 15598 - DNA, 201 bp, Homo sapiens
taaaaaccaacatatatatcatgacaccacacaaatttaattcagttaaacaattcaattaaaaaatgcaaaaaattacttatcagattatcaatgattaraaagactaaaaataactactgttgatatggattctgagtgttgggttcttcttcactcctggaagtgtaaattggggtaacttttggaaattcagtttag

SEQ ID NO: 15599 - DNA, 201 bp, Homo sapiens
agtatgtatcaaatttaaaaatacatacatatactgtttgattcagcaattaagcttctagaaagctctttgctgttctgcccatgctagtaaacaaaagsaataatttaaatgtttattaatgggagaatagttgaatgggttttggcacagtccaatcagtggaatagtctgcatttactgaatgtaaaatgatgttta

SEQ ID NO: 15600 - DNA, 201 bp, Homo sapiens
attcacatcctctgctttttttgctgttgttattttgttcttttaaactggaaaatagtaccacgagtactctaagaaacgtcctgatgacattttcactyactgtgacctctggtggctaatttacatttcagaaccatgagtaagatcaagatggacaccacccccacttttccctgcccaaggagacctattgaacaa

SEQ ID NO: 15601 - DNA, 201 bp, Homo sapiens
tctcttttcttcattctaacaccccagttgacataagggatttatttcgggagcacattatgagatctaaagacaattccattagagtgtatgggtgtgtrtttacttgtaacagctcataaatctttgaatctacacatggagtgtgtgaggtttttgttccacacctcccctctcaggtcccatattacagaagctagc

SEQ ID NO: 15602 - DNA, 201 bp, Homo sapiens
caaccaatctgacctagtatgtcttacataagcagctggttagcaatcggtctgaaatcttaaagactgtcaagagagcatctgcaatctgttattagtgrggaaaatataaattattctgagccgtggagtatgtggttgccactgagtataccactattagatattttagagggaataagacaaatggcacaattagga

SEQ ID NO: 15603 - DNA, 201 bp, Homo sapiens
gccatgcaggttatatactgaagaacaaccgttggtggaatttggaattatacagtacacaaccaggacagcattatgtggggttcataggtttgcatcaytatcttcatcttacagataaggaaaccaaaaatcagaaggatttaaaaatttgcccaaagatacattggctgtcagtgtcagaaccaggattaaacctgg

SEQ ID NO: 15604 - DNA, 201 bp, Homo sapiens
tggtcttgggacctgctcagtcactatgcccagggtagcctgttgaaggtgaggtgccatatgcagcagagatgattgatgtttattgattcaacaaacakctccagaagagcactgagaagttgtcaagacataattcttatctgcaagaaatcatggacctctgggtaagaaagctccataaatagatacatgacaatc

SEQ ID NO: 15605 - DNA, 201 bp, Homo sapiens
agacataattcttatctgcaagaaatcatggacctctgggtaagaaagctccataaatagatacatgacaatccaatatgatgcatgttgacatacagctrtggaagtacaaagctgtcagagaagagggtgtgatttactttgctttgagaaattgagggtggcttttcagagctgtttcctgggcaagggaagtgaaat

SEQ ID NO: 15606 - DNA, 201 bp, Homo sapiens
ttccacttaaccttaaagtaaccctatttactcaaaagtacatgacgttgtgagaggctaaacatctaagaagattcaatctttctggctagagataccasgggaaaaaggtcattgattatgggaacatgtgggagaaaattcagagatgaaagagctgaagaaatagaattccaaatttcgggtatgtaatgacataac

SEQ ID NO: 15607 - DNA, 201 bp, Homo sapiens
cttttagtttagcttgggttttttccttacctctgcccacttttagtgttacgtttttactcttgatagaaagtcaatgtcaaaatcagtatgtgtcaatycctgctttgttttctagggattccaatgttggaagcatttttagcgtacaacaacatccaagtggattactatgaatgcctagacctctatggcaaacag

SEQ ID NO: 15608 - DNA, 201 bp, Homo sapiens
atattttgacatcaccagcctgtaggttaaacatttattttaacaccaaaacttgctgccccttgcccccacctacataaatgcagggcgctaacgcccactttaaagtcatgcaattattctgggttatccattgaatctgtagaaatcttcttccggtcatttcatcagtgtttggtacccataaggcatgtgacaagt

SEQ ID NO: 15609 - DNA, 201 bp, Homo sapiens
tattttgacatcaccagcctgtaggttaaacatttattttaacaccaaaacttgctgccccttgcccccacctacataaatgcagggcgctaacgcccactttaaagtcatgcaattattctgggttatccattgaatctgtagaaatcttcttccggtcatttcatcagtgtttggtacccataaggcatgtgacaagtg

SEQ ID NO: 15610 - DNA, 201 bp, Homo sapiens
gaagagaatagatggatgaatagttggatgagtggatgaataaatgaatggatagatgaatgaatatagatagacagatattctaatattttgggtcagtyttatgtgttgcaaataccttacagtttttagcttgacttttcactctcgtttctgtcttaaaaaatgtttattgtatacacatttacattattatatata

SEQ ID NO: 15611 - DNA, 201 bp, Homo sapiens
acaaagacaacaggtatgccttcgtagatgcaaaaaagcccacttgtgcatttggtacttgtggagaagaattctttctttttttttggcagcggggcggkggggggcgggaggcagggggacggagtctcactctgttgcccaggctggagtgcagtggcaccatcttggctcactgcaacctccacctgccaggttcaa

SEQ ID NO: 15612 - DNA, 201 bp, Homo sapiens
gaaatttccttacaatatctggagaactacattggagatatgtgccaatgaaagtgagtttttatgggccttcctagagaagtaagaagatttcaaagaargcactttggagctgaaaggaactggggggagggggtgttcccaggctcacaggaagggggtgcacattccaattcgaggcaatggcctgtggaaatgcct

SEQ ID NO: 15613 - DNA, 201 bp, Homo sapiens
ttaggcaatttcatcattgtttgaaaataatggtgtgtacttacacaaacctagatggtatagcctgctatacacctaagctgtatgatatagactattgytcctgtgctacaagcctgtacagcatgctactgtactgagtactgtaagcagttgtaacccaatggcacatatctgtgtatctaaacatagaaaatgtag

SEQ ID NO: 15614 - DNA, 201 bp, Homo sapiens
aaaattagccaggcatgttggtgcatgcctgtaatcccagctactcggaggctgaggcacaagaatctcttgaacccaggaggtgaaggttgcagtgagcmgagattgcaccattgcactccagcctgggtgacagagcaagacacagtctcaaaaaaaaaaaaaaaaaaattatgaagagtagtttaaatagtgcctgcc

SEQ ID NO: 15615 - DNA, 201 bp, Homo sapiens
gaggtgaaggttgcagtgagccgagattgcaccattgcactccagcctgggtgacagagcaagacacagtctcaaaaaaaaaaaaaaaaaaattatgaagrgtagtttaaatagtgcctgccttcaggtcatataacttatgatatggagcaagcatcttttctatgccttggccaatggtcatattccctttaagtttgg

SEQ ID NO: 15616 - DNA, 201 bp, Homo sapiens
ctataattccatttacattctatttgaattgcacttccgacatgacgactttttgtttttttgctgatctttcactttattggtcaattctctctttcaaktattcatttttataaaatgttacatgggtttatcactgggagacacagaggcaacacagctataagctttgctgtctgtgtctgagctgaataacaaatg

SEQ ID NO: 15617 - DNA, 201 bp, Homo sapiens
tgttacatgggtttatcactgggagacacagaggcaacacagctataagctttgctgtctgtgtctgagctgaataacaaatgtgcagtgactaattaccracagactttgaaagaggtgttgtctttggtcactgatttttgaggtgcatatgttatgtgcaaagggattggtggacagaagagcaagaagtaaagtttg

SEQ ID NO: 15618 - DNA, 201 bp, Homo sapiens
agtacatttgattaaattaatttgaggagaaaatactctattacaatatttagtctttcttttcaagaacattgattgatatgtttctccacttattcttstctattttatgccattagtgatattttacagcatttttcatataagttctccatataccaaataagtgtatttttcctactgataccgtgaatgatgatc

SEQ ID NO: 15619 - DNA, 201 bp, Homo sapiens
agctgaatcccattctccttttccactcaaatatcccactctgtcctgcctcaccaaatttcctcttctactgtatcattcctgtcatcatgcaaacatcyggtaaactcactcatattaaaaataagatgaaataaaaaataaaatccttttaacattctatattctttccaacttccgtctgatttatctcttttgtat

SEQ ID NO: 15620 - DNA, 201 bp, Homo sapiens
gagaacacttggaagcccatgcctgatttccccctagacttcactccttacacgtcttccttttgccaattgtgtttgttttgtgtccttttcctgcaatraatcataactgtaaatacaactatatgctgagcattgtgcgttctccctgagtattgtgatcttggggactcttacagtcctcacttcccattctctttt

SEQ ID NO: 15621 - DNA, 201 bp, Homo sapiens
cttataactgaactatggcaacagaaagttttgcatattggaaccaggcatgtcaaggactgcaagcctaagaaaagcctggaaaaacatgcaataaaatrtaaagaggaagtggctgttcctgggtcttacatttccagatagttgtattttgcgttttttaaaacattcttatttgtattttaaaatttcctacaatta

SEQ ID NO: 15622 - DNA, 201 bp, Homo sapiens
cttattctatcttcagcagcatttgaatcaggccatcattttcttccttttgaattacttttgttcattgatttctagggcagcacattattctggttttmctcctatcacattggcatgcccttttcagcttctttttctggatgttgctctgcttcctgaactctacattagagatggcagtttggttggcatgatggg

SEQ ID NO: 15623 - DNA, 201 bp, Homo sapiens
ctctctgatacattttcctctttctgacttattcctttcctttgttagagccagggaagatgtggtggataaatcttttgttttaaaatgaatctgtgagsacaaggactcagttttcaaaacccaagtttagtgcatatgaacaaatgccagaatactttaggaaaatgtaaagtttggttgtcttcaaggagtatggat

SEQ ID NO: 15624 - DNA, 201 bp, Homo sapiens
gacatactaccagaaatggaaattggaacccagaaaacatttttaagttgtgagaaattacgatatgtttgaatgttgaagggaatgattcaattgtgagragggtaaagacaggatgcaggagagagagaaattgcgaatatccaaggcacaagcagagggtttatcttagatgagaggaggagaaactttatctttaat

SEQ ID NO: 15625 - DNA, 201 bp, Homo sapiens
atgctgtctacttccattagagctctcagcatactcatcacagttgtttaaaattgctgatctaataattccaacatccctgccatagctgactctcgttycagtgcttgttctggctcttcaaactatggtttttaccttttagtgtgccttgtaattttttcttgatagccagacatgatgtttttggtaaaaggaacc

SEQ ID NO: 15626 - DNA, 201 bp, Homo sapiens
aataataatacttatcaagcatttaccgtgacattttattaaatttaattgatttaatcctcaaaaatccaacgagttagctgtagcaaaagaaagaaagkaaggaaggaaagaaggaaggaaggaaggaaagaaggaaggagaaagggagggagggagagagggaaggagggaggaaggaaggaaaaaagagggagaaag

SEQ ID NO: 15627 - DNA, 201 bp, Homo sapiens; identical to SEQ ID NO: 1852

SEQ ID NO: 15628 - DNA, 201 bp, Homo sapiens
agacaaatggcacaattaggagaagcaaaaccttgtaatttaagaaaaccttgagatggatttttcatttcgtacacaggctaataattaaagtctaatayacagtctttattttgtttttgtgttttgatttctcatgttggctggtggttactgtacttggcctagattaactttttcctcctatgaataaacatgaat

SEQ ID NO: 15629 - DNA, 201 bp, Homo sapiens
ttgtaaataatggtgcaataaacatttatgtacaaattttcctgtagatgtatgttttcaattcacttgggtttatacctaggagtgaaattgttatgtcrtataataactctatgtttgagttttgaggaactgccaaactgtttttctcaacctggataatctcaactggccaatcttcatgttcactgattcttctgc

SEQ ID NO: 15630 - DNA, 201 bp, Homo sapiens
attttgacatcaccagcctgtaggttaaacatttattttaacaccaaaacttgctgccccttgcccccacctacataaatgcagggcgctaacgcccactttaaagtcatgcaattattctgggttatccattgaatctgtagaaatcttcttccggtcatttcatcagtgtttggtacccataaggcatgtgacaagtgc

SEQ ID NO: 15631 - DNA, 201 bp, Homo sapiens
tctttgacattcccccagcaaagttggcactgaattgcaatggacaatgcagcagctgctctcaggtagaggccctcaactagaaggattatcaaaaaccaaagcagtgatgtgtgagtttgagacctaccccttaggaatcctggaaataattgtgtgaagcttgaggaagggacttgaggacctacatttgcccccttg

SEQ ID NO: 15632 - DNA, 201 bp, Homo sapiens
ttttgacatcaccagcctgtaggttaaacatttattttaacaccaaaacttgctgccccttgcccccacctacataaatgcagggcgctaacgcccactttaaagtcatgcaattattctgggttatccattgaatctgtagaaatcttcttccggtcatttcatcagtgtttggtacccataaggcatgtgacaagtgct

SEQ ID NO: 15633 - DNA, 201 bp, Homo sapiens
gatattaggcctctcaggagcttccattataatactctacccatttttaggaatcacccaataaaagaataatcaaaatgaacaaatgaatgaatgaagaytgaatgaatgaatgaataaatgaagttctcaagaaatggctagtcaacccttattcttccctgccttccaccagaatgaattgagtaccttctctgtaca

SEQ ID NO: 15634 - DNA, 201 bp, Homo sapiens
tagactatgggcaggactctctgaaatgagggtcttttgactcacaatcagattagagtcctgccttgggcaggtgaaagaaagtcaggagaaggccagartgagagattctgtttcctgaggcctaaagtgcctcaagagtatagaaagtactgtagaagttaggagccaggaactgtggataaaaaccaacatatatat

SEQ ID NO: 15635 - DNA, 201 bp, Homo sapiens
gaggcacaagaatctcttgaacccaggaggtgaaggttgcagtgagccgagattgcaccattgcactccagcctgggtgacagagcaagacacagtctcaaaaaaaaaaaaaaaaaaattatgaagagtagtttaaatagtgcctgccttcaggtcatataacttatgatatggagcaagcatcttttctatgccttggcc

SEQ ID NO: 15636 - DNA, 201 bp, Homo sapiens
aggcacaagaatctcttgaacccaggaggtgaaggttgcagtgagccgagattgcaccattgcactccagcctgggtgacagagcaagacacagtctcaaaaaaaaaaaaaaaaaaattatgaagagtagtttaaatagtgcctgccttcaggtcatataacttatgatatggagcaagcatcttttctatgccttggcca

SEQ ID NO: 15637 - DNA, 201 bp, Homo sapiens
aaagtagacacatatttattatgtctattgacaatcataattacttacatgatgggtgaacttaccctgttccctcgtaaggcttatgtttctttttttcyttttctttttttttttttttgagatggagtctcactctgacgcccaggctggagtgcaatggcttgatctcggctcactgcaagcgccccctcccgggtt

SEQ ID NO: 15638 - DNA, 201 bp, Homo sapiens
aagtagacacatatttattatgtctattgacaatcataattacttacatgatgggtgaacttaccctgttccctcgtaaggcttatgtttctttttttctytttctttttttttttttttgagatggagtctcactctgacgcccaggctggagtgcaatggcttgatctcggctcactgcaagcgccccctcccgggttc

SEQ ID NO: 15639 - DNA, 201 bp, Homo sapiens
agacacatatttattatgtctattgacaatcataattacttacatgatgggtgaacttaccctgttccctcgtaaggcttatgtttctttttttctttttytttttttttttttttgagatggagtctcactctgacgcccaggctggagtgcaatggcttgatctcggctcactgcaagcgccccctcccgggttcatgg

SEQ ID NO: 15640 - DNA, 201 bp, Homo sapiens
ttatgaataatgctgctataaatactctattataggatgggatgtggtggctcatgcctataatcccagtgcttttggaggctgagatgaaaggactgctygaggccaggagttcaaaagaagcctgtccaataaagtgagacctcatctttacaaaagaaaaattaaaaattagccaggcatgatggaggatgcctgtag

SEQ ID NO: 15641 - DNA, 201 bp, Homo sapiens
taccttcctaatgtgccctctgggaaacttcctttctattcaataacaagagtagaaaatttacaatcatgtccaagcaatgctgttcactttcagatttractgtgtgaactggctgaagatccttagtattttttcaacccttttattttgaaataattatagcctcacaagaggttacaaagatggcacagagaggtt

SEQ ID NO: 15642 - DNA, 201 bp, Homo sapiens
aaggcacattactgcttctaccacattctattgaccaaatcatgtctcaggctagcccagcttctagggacagcgatctccatatctccaaatttggtggragttgctatagaatcatattacaaagggagaagtgagaagtgacagtcatttttgcatcagtgttctaaaacctggagcatcgctggtcatgatggcaaa

SEQ ID NO: 15643 - DNA, 201 bp, Homo sapiens
ccaaatcatgtctcaggctagcccagcttctagggacagcgatctccatatctccaaatttggtggaagttgctatagaatcatattacaaagggagaagkgagaagtgacagtcatttttgcatcagtgttctaaaacctggagcatcgctggtcatgatggcaaaggaaacataagcacatcacttctctcacatttct

SEQ ID NO: 15644 - DNA, 201 bp, Homo sapiens
agactcacctatgatacagctgtttttatcaacctcatgccacttgttttcatcttttgatgtatgcccaggactgtttgggcctaacatggaagcatggrggctgtctgcacccactggggcaacccttacctaattgggaaagaaggtgatggatcattatttctctccactgatcttcatttacaacaagctcattta

SEQ ID NO: 15645 - DNA, 201 bp, Homo sapiens
agaagccttgtcattgaggaccagacagagaaacttggcaggatttttcaggcattgttgaggccgttttaaagttgacatctttgcctatataggaaaaycattgtgtgaactgtcatgaaactttcctgcttagcttggctcttagacatgtctagaaaaagcaaagaggaaatgttagctaaaaaagactctcctgca

SEQ ID NO: 15646 - DNA, 201 bp, Homo sapiens
tacaaatgtatattagaaagatgtgacagattgtagtttcaaattgactataacaagatctctcatctcacatgttcttcttaaaatgtaagtttgactaycctgccatcaaaatgtggtggtcctagctcgtttggacttctacaacaaaatgtcataaactgggtagcttataaacaacagaaatttacttttcacagt

SEQ ID NO: 15647 - DNA, 201 bp, Homo sapiens
tgactataacaagatctctcatctcacatgttcttcttaaaatgtaagtttgactatcctgccatcaaaatgtggtggtcctagctcgtttggacttctayaacaaaatgtcataaactgggtagcttataaacaacagaaatttacttttcacagttctgaagtctgagaagtccaagatcaaggcatcaacaaattcaa

SEQ ID NO: 15648 - DNA, 201 bp, Homo sapiens
tcaaaatgtggtggtcctagctcgtttggacttctacaacaaaatgtcataaactgggtagcttataaacaacagaaatttacttttcacagttctgaagkctgagaagtccaagatcaaggcatcaacaaattcaatgtctggggagagtctatttcctgatacctagacagtggcttctctctgtcttttcacatggta

SEQ ID NO: 15649 - DNA, 201 bp, Homo sapiens
tgatcttggctttcagcgtttctggctctgacaagtggcctcatgctttatgatattaggcctctcaggagcttccattataatactctacccatttttargaatcacccaataaaagaataatcaaaatgaacaaatgaatgaatgaagattgaatgaatgaatgaataaatgaagttctcaagaaatggctagtcaacc

SEQ ID NO: 15650 - DNA, 201 bp, Homo sapiens
gtttcaacctatgaatttggaggggacacaaacattctgaccatcgcccatggcaagtggtgtctatattttgtccccttaaactgggcaggcttctgacwgtgttagaagaaactctgtggatttctgaagctgttttataaaaggccatgtagacgtgattctcaggacagcttctgagattcctaagccaccatttga

SEQ ID NO: 15651 - DNA, 201 bp, Homo sapiens
ctattatgaaatggtcaagagatgaagcagagagaaggagaaagagagaaagaaagaaagagagaaagagagcgggaaagagaaagaaggaaagaatatcytatatactggcagcccttgtttggtatggtagtgtaacactgtaaaaatgactacacaaattgtttcttactatctaagttataaacagaaatgaaatac

SEQ ID NO: 15652 - DNA, 201 bp, Homo sapiens
tttaaatttaactctataacttctttttttatttgttgtcataaagttctctcctaaattttattcttgaacaatctgaaaatcactgtcttataacaaayagctataactaaaatttttataattgttatggctgatacttctgtggcactttatagtctgacttttggactgccagatttgataggcagaacatttcta

SEQ ID NO: 15653 - DNA, 201 bp, Homo sapiens
gaaagagacattatttcactgtttggagaggacattggggtaaaataaccacagctacccttaagtgagccactttatcacaggtctttaatgcattttgmtatttctaatgtaacatagttttttcctaataaacttgttacaaggagttaccacctgacatgtgtcaacagtcaggtaagaacccttcagcgtgtgtac

SEQ ID NO: 15654 - DNA, 201 bp, Homo sapiens
ccataaaatggagatagtaacagtactaactctgaccacataggattgttatgaagattaagtgaggcagtatatgtaaaatgcttaaaagagtgcctggyaccatatataccatggaatactatgcagccataaaaaaagatgcattcatgtcctttgaagggacatggatgaagctggaaaccatcattctgagcaaac

SEQ ID NO: 15655 - DNA, 201 bp, Homo sapiens
ccttagcctgtgattgattacaaaaagcaaccaatcagatatttgcacaggagtgtgaacttcattaactccacttcagtccactttgtaactcctcttcrcaactcctctgattgcaggccaccacttcatttacatgaggtgagcatgaagtggccagtgggtatttggacccgagaagattctgtatccgggcctttg

SEQ ID NO: 15656 - DNA, 201 bp, Homo sapiens
tgtttgtttgttttgttttgttttgttttgttttgagacggagtctcgctctgtcgcccaggctggagtgcagtggtgcaatcctggctcactgcaacctstgcctccagggttcaagcgattctcctgccctagcctcccgagtagctgggattacaggcacacgctaccatgcccagctgatttttgtatttttagttg

SEQ ID NO: 15657 - DNA, 201 bp, Homo sapiens
agggttcaagcgattctcctgccctagcctcccgagtagctgggattacaggcacacgctaccatgcccagctgatttttgtatttttagttgagacgggrtttcaccatgttggccaggacggtcttgaactcctgacctcgggtgatccatccgcctcagcctctcaaagtgctgggattacagacgtgagccaccaca

SEQ ID NO: 15658 - DNA, 201 bp, Homo sapiens
aaatggatcccaggcatactgctgaagtgtttctaagtgcaagaaaactgtgacgtgccttatggagaacatatgtgtgttagataagcttcgcttaggcytgagttatagcgctgtagactgtgagttcaatgttaatgaagcaacaatgtatgttaaataaggtgtctttcaacagaaaaacacacaaagcaaagttat

SEQ ID NO: 15659 - DNA, 201 bp, Homo sapiens
ccctagcctcccgagtagctgggattacaggcacacgctaccatgcccagctgatttttgtatttttagttgagacggggtttcaccatgttggccaggayggtcttgaactcctgacctcgggtgatccatccgcctcagcctctcaaagtgctgggattacagacgtgagccaccacacctggccaccttttttttttt

SEQ ID NO: 15660 - DNA, 201 bp, Homo sapiens
tcttgccttcaagccctgcttctcagagttaattaatgtttgtttcattccactagattctcttctatttcctaggcagtctggtctgctatgaattttargtttatccatgtttccttcaatttaacattctcaacattaaatatatatcttagtctgagagctcccaaaagtagaccttgagacaaggattcaaaggca

SEQ ID NO: 15661 - DNA, 201 bp, Homo sapiens
tttatcaccccaaaaagaaaccccacacccattagcaataaatcccattccatcctcccttccagtcctaggcaactactaatctaccttctgtctctatrgatttgcttattctggatattttatataaatggaatcatacatatgtggtcttttgtgactggcttcttcacttagcacagtgttttttttgttttgttt

SEQ ID NO: 15662 - DNA, 201 bp, Homo sapiens
ttatctccaatattgtttttatcttgattagttcaactctaattaactttgtgttcattttagtgctttttaccctcagcttcttttcttgaatacctaattaatttattttaatttttcttgcttaataatagaaagcattttagactatacttttttctgaggacaattttagacttatgcagttgattttgatacata

SEQ ID NO: 15663 - DNA, 201 bp, Homo sapiens
tatctccaatattgtttttatcttgattagttcaactctaattaactttgtgttcattttagtgctttttaccctcagcttcttttcttgaatacctaattaatttattttaatttttcttgcttaataatagaaagcattttagactatacttttttctgaggacaattttagacttatgcagttgattttgatacataa

SEQ ID NO: 15664 - DNA, 201 bp, Homo sapiens
atctccaatattgtttttatcttgattagttcaactctaattaactttgtgttcattttagtgctttttaccctcagcttcttttcttgaatacctaattaatttattttaatttttcttgcttaataatagaaagcattttagactatacttttttctgaggacaattttagacttatgcagttgattttgatacataat

SEQ ID NO: 15665 - DNA, 201 bp, Homo sapiens
tctccaatattgtttttatcttgattagttcaactctaattaactttgtgttcattttagtgctttttaccctcagcttcttttcttgaatacctaattaatttattttaatttttcttgcttaataatagaaagcattttagactatacttttttctgaggacaattttagacttatgcagttgattttgatacataatg

SEQ ID NO: 15666 - DNA, 201 bp, Homo sapiens
ctccaatattgtttttatcttgattagttcaactctaattaactttgtgttcattttagtgctttttaccctcagcttcttttcttgaatacctaattaatttattttaatttttcttgcttaataatagaaagcattttagactatacttttttctgaggacaattttagacttatgcagttgattttgatacataatgt

SEQ ID NO: 15667 - DNA, 201 bp, Homo sapiens
atattcaattgctcatttttactaaaagccgaattatgcaacttatttatccaatctacttttaccagaaatttttgtctgttttgtgtgtgtgtgtgtctgtgtgtgtgtgtgtgtgtgtgtgtgtgtgtgtgtgtttgcaatgttataaacattcttgcataaatctcttgaggcaaagctgtaatggtttctcccagg

SEQ ID NO: 15668 - DNA, 201 bp, Homo sapiens
tattcaattgctcatttttactaaaagccgaattatgcaacttatttatccaatctacttttaccagaaatttttgtctgttttgtgtgtgtgtgtgtctgtgtgtgtgtgtgtgtgtgtgtgtgtgtgtgtgtgtttgcaatgttataaacattcttgcataaatctcttgaggcaaagctgtaatggtttctcccaggg

SEQ ID NO: 15669 - DNA, 201 bp, Homo sapiens
cagtggcgcgatctcggctcactgcaagctccacctcccggattcacgccattctcctgcctcagcctcccgagtagctggggctgcaggcgcccgccacyacgcctggctaattttttgtatttttagtagagacggggtttcaccatgttagccaggatggtctcgatctcctgacctcgtgatccacccgcctccgcc

SEQ ID NO: 15670 - DNA, 201 bp, Homo sapiens
cgcgatctcggctcactgcaagctccacctcccggattcacgccattctcctgcctcagcctcccgagtagctggggctgcaggcgcccgccaccacgccyggctaattttttgtatttttagtagagacggggtttcaccatgttagccaggatggtctcgatctcctgacctcgtgatccacccgcctccgccttccaa

SEQ ID NO: 15671 - DNA, 201 bp, Homo sapiens
ggcctccaaaacttctgaccgaccagcttcaagttggatttcccactatcccttctttggattcaattaatttgctggaatggcccacagaacttacattwaccagtttattattaaggatactgcaaaggatacagataaagagatgcattggtacacaccctccaggaagctccacatcttcagctatccagaagctcc

SEQ ID NO: 15672 - DNA, 201 bp, Homo sapiens
ttaccaaactctagtgaggctcttttgagccctcctctcaactaggtctaaccttggcttataaatgtgagcaaacactagcacagtttctaacagctaargccacatccctaaatgaccctacccctctttaaagtgactgcctgagaaaactcaaggctgccaaagaagattcactgtttgttgtggctgacacccaag

SEQ ID NO: 15673 - DNA, 201 bp, Homo sapiens
ttcggctgatctgactggttagacgggtgtccccttcctccctcactgctccatatgcatccctcccaaagctgcatgctctgtcaaagaggatgaccatscccgacagaggaggaccagtcttcagtcaagggcatacgagtacctccgctcccatgctagaacctccaaacaagctatctatcatctatctatctatct

SEQ ID NO: 15674 - DNA, 201 bp, Homo sapiens
agttgagacggggtttcaccatgttggccaggacggtcttgaactcctgacctcgggtgatccatccgcctcagcctctcaaagtgctgggattacagacrtgagccaccacacctggccaccttttttttttttttttttttttaacatttcttgcaagggaggcctactggccacagattctctcattttacttgtttg

SEQ ID NO: 15675 - DNA, 201 bp, Homo sapiens
ttttttttttaacatttcttgcaagggaggcctactggccacagattctctcattttacttgtttgagagtgtctctgtttctccttaaattttgatgatyaatttcgcaggatacagaattctaggttggtgggctttttttttttatctcagtacttaaatgttttgtccatttatttctccttatttgcatggtttct

SEQ ID NO: 15676 - DNA, 201 bp, Homo sapiens
attcttaggcattattgctttaaatatttcttttatttctttctctctttattctccttctgctattcccattacacatttgttataatttttgtagttgyttcagggttcttggatattctagtcctctttttttggtatttttttctttgcttttcagttttggatgtttatattgacatatcatcaagcttggaaatt

SEQ ID NO: 15677 - DNA, 201 bp, Homo sapiens
gaaaaagcttgcaggcgaataattgtacataataaaagatgggccagtgtggattgaagtaaaacttgctgagactgtgtgtcagtttcctagggctgctrtaacaaagcgccacaaactggatggcttagaacaacagcgactgatggtcccacatctctgcaggcgcgaagtctgaaatcaaggtgtcggcagggccag

SEQ ID NO: 15678 - DNA, 201 bp, Homo sapiens
cacatctctgcaggcgcgaagtctgaaatcaaggtgtcggcagggccaggcttgctctggaactgcagaggaatcttcccttgtcctttcctagcttctgrtggtttgccggcaatctttggcatcccttatcttgtagaggcatcgttctaatcctctacatatggtgttcttcctctgtcttcactttgtcttctgtct

SEQ ID NO: 15679 - DNA, 201 bp, Homo sapiens
aattcctgaagaaatctgttcatctgaaagcaaactgtttatataaaagaagagtgatattttagcttgtgaatgattttggctaaatatcagtctttaayatctactgaaaagggatatactttcttgattaagaagaaaccgtaactctattttaactagatcctacagttcaaaacaatcaaacccaccatattactg

SEQ ID NO: 15680 - DNA, 201 bp, Homo sapiens
cttcaaatacatatattttttatgagacacaattcaacccatatcaggggataaaagtcagtatgctgacagcatctgatgtagtctctacttcaaaggayctatactctagtacaggggtccccaattgataccagcaggggtctccccacgataccggtctgaggcctgttaggaacagggctgcaaagcagaagctga

SEQ ID NO: 15681 - DNA, 201 bp, Homo sapiens
gccattctcctgcctcagcctcccgagtagctggggctgcaggcgcccgccaccacgcctggctaattttttgtatttttagtagagacggggtttcaccrtgttagccaggatggtctcgatctcctgacctcgtgatccacccgcctccgccttccaaagtgctgggattacaggcatgagccaccgcgccaccgcgcc

SEQ ID NO: 15682 - DNA, 201 bp, Homo sapiens
cattgatttctagggcagcacattattctggttttcctcctatcacattggcatgcccttttcagcttctttttctggatgttgctctgcttcctgaactmtacattagagatggcagtttggttggcatgatggggctgaatgactaatttttttttttttttttgagacagagtcttgctttgtcacccaggctgaagt

SEQ ID NO: 15683 - DNA, 201 bp, Homo sapiens
tggaaatatattgttagtgcatcttgtagatgcaacgtgaatttaaagcaatatatttatttgcttgaaatctttgttgaagtctcatttgtccgtatatytagattttactacttcaaattcctgaagaaatctgttcatctgaaagcaaactgtttatataaaagaagagtgatattttagcttgtgaatgattttggc

SEQ ID NO: 15684 - DNA, 201 bp, Homo sapiens
gtgagagataagggtggatatgacatacacttactagtgctaatgggagaatgtgattgacttgatgaataagagagttataccctcccacaacaggagcwtgaaaaggatattcagccaatcactatgtgagtcagtcaacagactgacatttactgagagcttactttgggcaaaccaagaagttagtcgttgtggagc

SEQ ID NO: 15685 - DNA, 201 bp, Homo sapiens
ctcgtgagtctacatggcagctggaaagttctgctgatctgggcctggcttggctgagctcagcttggctcactcacctatttggggatggactggcatargctggtctaggatgacctcagctaagacaatgcatccctggtccactggtctctcctctttcagctaacccgtgctgaattacacgatggtatcagaatt

SEQ ID NO: 15686 - DNA, 201 bp, Homo sapiens
tcaactacatatacttttggagattcttaatacacattactattttttacatcttatagacctcgactgaatttatttgatagataaatacttgactccarctctcactggaaatatattgttagtgcatcttgtagatgcaacgtgaatttaaagcaatatatttatttgcttgaaatctttgttgaagtctcatttgtc

SEQ ID NO: 15687 - DNA, 201 bp, Homo sapiens
cgcctggctaattttttgtatttttagtagagacggggtttcaccatgttagccaggatggtctcgatctcctgacctcgtgatccacccgcctccgcctyccaaagtgctgggattacaggcatgagccaccgcgccaccgcgcccggcccacacccagctaatttttgtatttttagtagagacggggtttcaccctgt

SEQ ID NO: 15688 - DNA, 201 bp, Homo sapiens
gtatacaaactgcttacataaacaatatggttcatgtcagacacctactgtcactctgggagtttggaattttggtatgcatcagtcaaagactgtccacmtaaccagtgtccgataaaacctttgggttgtgagactctaatgagattctctagttggtaaaacttctcacaactcattgctgggggaattaaatatgtg

SEQ ID NO: 15689 - DNA, 201 bp, Homo sapiens
tagacaagacatgagaaagttgtaatgcactttcatttttccaaaattctgtcccttgaaagtccctttagcatataggcacccctcactggcataacctytaggtcaattaatacaacctattatcaacctggcccttggaagcaacaggcatatacctgttcctcatatggcaaatggtaaaatgaactcaaaaagaac

SEQ ID NO: 15690 - DNA, 201 bp, Homo sapiens
tcagtattccaaagtgtgttttatagaacactggtcacatatgcatatttaagaggaaaaggattccatgatgaaattatggggaatgtattcaactacayatacttttggagattcttaatacacattactattttttacatcttatagacctcgactgaatttatttgatagataaatacttgactccagctctcactg

SEQ ID NO: 15691 - DNA, 201 bp, Homo sapiens
ttcttgggacaaatataaattggttgtgatacaccctttttgtatattgctcaattcaatttttggaatttttctttcaggattgtatacttatgttcatrggtaagaattttctgtaaatttccattccctaaatcttgtttggttcttgtgtcatgactatgctaacctcataaactgttgggaaatattctttctttt

SEQ ID NO: 15692 - DNA, 201 bp, Homo sapiens
ttggcatgcccttttcagcttctttttctggatgttgctctgcttcctgaactctacattagagatggcagtttggttggcatgatggggctgaatgactmatttttttttttttttttgagacagagtcttgctttgtcacccaggctgaagtgcaatggtgcgatcttggctcactgcaaccttcgcctcctgggttca

SEQ ID NO: 15693 - DNA, 201 bp, Homo sapiens
gaatagcaaaaccaagatatggacactgctacaatgtgcacgtatagttctatatcattttaatcacatgggtagattttcataacaaccacatgatgtasatacagaactattccactaccaaaaagaactctcttatgctgtgtgtttgtagtcatactcaactccctcctctacaccatttctaatgcctggtaacca

SEQ ID NO: 15694 - DNA, 201 bp, Homo sapiens
ggtactgtttttggaatatataaggctgacacacaaatgagtataaaattttggatggaacatgtacaataaaaagagatcaaagagatcagtgatattargagacttcataatagggttataatcaaaagaacactttggaataattgtttgttttctttcttgtcttgttttccccttaactctctagtaaaggataac

SEQ ID NO: 15695 - DNA, 201 bp, Homo sapiens
gcagcggggcgggggggggcgggaggcagggggacggagtctcactctgttgcccaggctggagtgcagtggcaccatcttggctcactgcaacctccacytgccaggttcaagcaattctcctgcctcagcctcctgagtagctgagactacaggcacgcgccaccatgcccagctaattttttgtatttttagtagaga

SEQ ID NO: 15696 - DNA, 201 bp, Homo sapiens
ccattctcctgcctcagcctcccgagtagctggggctgcaggcgcccgccaccacgcctggctaattttttgtatttttagtagagacggggtttcaccaygttagccaggatggtctcgatctcctgacctcgtgatccacccgcctccgccttccaaagtgctgggattacaggcatgagccaccgcgccaccgcgccc

SEQ ID NO: 15697 - DNA, 201 bp, Homo sapiens
tgacccgatttcatctgatcaactttcatagaaggaaggaaagaagaaagggaggaagaaaggaaaacagggagcctagagaaaggagggagaaaataagaaaaaaaaaagagagagagaaaggtagaacctggatgtaagccagatttctcttttcttcattctaacaccccagttgacataagggatttatttcgggag

SEQ ID NO: 15698 - DNA, 201 bp, Homo sapiens
tgaaattgatttaggactattagaatctaatatactttccaggatacctgggagaggtccgctgcagagtgaaaatttgggtctagacctcagggaagcgsggaaggctggagacaaaagcattcatcatcatcatgatagacaaacatctatgcaaatctttataacttggcaatctgttatagcatgtacatttataaa

SEQ ID NO: 15699 - DNA, 201 bp, Homo sapiens
aatgtaaatgactaattaatgggtgcagcaaaccaacatggcacatgtatacatatgtaacaaacttgcaagttgagcacatgtaccctagaacttaaagwatatatatatatatataaaaagagtgcctggcacatagcactattcaagtgagctattcctactttatatgtaaataaaattactagaaaggagatatga

SEQ ID NO: 15700 - DNA, 201 bp, Homo sapiens
ttcaagtgagctattcctactttatatgtaaataaaattactagaaaggagatatgatggtccataggatttcagagtagaataagatcatctttatggcrggggatacatggtaggcataatggcccctcaaagatgtccacatcctaaatcatgtagcccatgaatatgttatgtgacatggcaaaagagattttgcag

SEQ ID NO: 15701 - DNA, 201 bp, Homo sapiens
tatatgtaaataaaattactagaaaggagatatgatggtccataggatttcagagtagaataagatcatctttatggcgggggatacatggtaggcataayggcccctcaaagatgtccacatcctaaatcatgtagcccatgaatatgttatgtgacatggcaaaagagattttgcagacgtgattaaggctataggcct

SEQ ID NO: 15702 - DNA, 201 bp, Homo sapiens
aactaatcaaaagggctttaaagtcgatttatccccaagagacaagagctagtctgggcaacaacttttccatttgtcttctgtgagatcccaagcagagkatcaagccaagcctgcctgaatttctaactacaaaattgtgagataattgtgtgttgttttaagtcactacgtttctagtaatttgttatggcagcaata

SEQ ID NO: 15703 - DNA, 201 bp, Homo sapiens
aactccaccttagcctgtgattgattacaaaaagcaaccaatcagatatttgcacaggagtgtgaacttcattaactccacttcagtccactttgtaactmctcttcgcaactcctctgattgcaggccaccacttcatttacatgaggtgagcatgaagtggccagtgggtatttggacccgagaagattctgtatccgg

SEQ ID NO: 15704 - DNA, 201 bp, Homo sapiens
cctccactttccttctaacagtctcttcgtggcctgtgctgaggactacatcagtctcctgcaattatcatctacactgaaaaacaaagaggacagaggcraagctagtggccctcaccatcccctgcaagctgattgcttcttactgcaagcacttgagcatcttcctgagagctttcttgggcaatgggaaccaggctt

SEQ ID NO: 15705 - DNA, 201 bp, Homo sapiens
ggcactggaaatgctgggttatctccccattttcctgtggaggctggaaggctgatctacatcccctgccttgccctgccattccgggttctgcaactcayggcagagggaccttggttaccatcttctgctcctggctttgatcttgttctcagccacctcagaacaccaccacactctctatgccctgcaacactcctg

SEQ ID NO: 15706 - DNA, 201 bp, Homo sapiens
caccctcctgcctccccgggcactggaaatgctgggttatctccccattttcctgtggaggctggaaggctgatctacatcccctgccttgccctgccatkccgggttctgcaactcacggcagagggaccttggttaccatcttctgctcctggctttgatcttgttctcagccacctcagaacaccaccacactctcta

SEQ ID NO: 15707 - DNA, 201 bp, Homo sapiens
ctctatcctcctggccttcatttttgctgttcacatggcctggaacgtacgtacccttccccagaggaagatctgctgtgaaccaagagaagcttacactycaggcctccttacttgaatgggcccctccgagtccctgagtctaacactgtattcctaatttttctatcctttttttttttctaaaggcaacctcccctt

SEQ ID NO: 15708 - DNA, 201 bp, Homo sapiens
ccaccctcctgcctccccgggcactggaaatgctgggttatctccccattttcctgtggaggctggaaggctgatctacatcccctgccttgccctgccaktccgggttctgcaactcacggcagagggaccttggttaccatcttctgctcctggctttgatcttgttctcagccacctcagaacaccaccacactctct

SEQ ID NO: 15709 - DNA, 201 bp, Homo sapiens
gaaactataagacttagtctcatcatcaacattttcagaagcaagtgcataaccttctcaccaaaaccaggttatctgcttctgtccctggcttgagtccygggcttaactgtcatttcagaatctgagaatcagtcaggtatggtggctcatgcctgtaatcccagcactttgggaggcagaggtgggcagatcactcaa

SEQ ID NO: 15710 - DNA, 201 bp, Homo sapiens
tgcttcctgactttgtttcaaattcctctaccaggcacgcagaagcttagcccacagctctcctcttgcctccccacctcacatgccttggctcacctgcrcttctgggtgctgctggtacagccaccctctgacacttccttacctctggacctttgctcatctgtccctctacctataatgccatcttcccctctcccc

SEQ ID NO: 15711 - DNA, 201 bp, Homo sapiens
agcagatgtggcctccactgttgaaacccacagtgctttatcctcccaagccattcctcaaacacggttctggggttgaatgatgcgtgtttgtaattaasgcacttcgacagcaggtatctcccaacttcagcatagtgggtgctcagtgaatattggcccaaatggaattgagcatccatgctacacctgcagatggga

SEQ ID NO: 15712 - DNA, 201 bp, Homo sapiens
acacttccacacatggcaggctgtgtgcacacagacgattccctcgcctttataggtgctattcctttgacttgaaaagcccatcaactctaatctgcacwcaaacttcagcacccagcccaaatgtcactttctctgtgaatccttcccctatacctctcaggcagagttcatcccatcctcctttttattcccatcaca

SEQ ID NO: 15713 - DNA, 201 bp, Homo sapiens
tctaggcaccaagggaggtgcacaagaaactataagacttagtctcatcatcaacattttcagaagcaagtgcataaccttctcaccaaaaccaggttatytgcttctgtccctggcttgagtcctgggcttaactgtcatttcagaatctgagaatcagtcaggtatggtggctcatgcctgtaatcccagcactttggg

SEQ ID NO: 15714 - DNA, 201 bp, Homo sapiens
catccatgctacacctgcagatgggagaggcagcaaactcatgtcccaggaaccagcatgacacagatctctcttgtcctccccttgtttctcaataaggrcaatatttgcgctcaggggagaagggcacagcttgcccctcccttccttcctcagccaacggtttggcttcccttctagagaggtgagagaaggtgtgac

SEQ ID NO: 15715 - DNA, 201 bp, Homo sapiens
gggctgtgcccaggtaactcctctctcaagatagtccctctgtaatgtatcctgttttaacctttcttctaggcaccaagggaggtgcacaagaaactatragacttagtctcatcatcaacattttcagaagcaagtgcataaccttctcaccaaaaccaggttatctgcttctgtccctggcttgagtcctgggcttaa

SEQ ID NO: 15716 - DNA, 201 bp, Homo sapiens
atttcaagtgaactgtataactttgcttttgaaacaatcatttattttgcccagtttttgattgttcaaatttttgtttgtttgtttggggacagggtctyactgtgtcacccaggctggagtgcagtggtgccatctcagctcactgcagcctcaacctcctgggctcaagtgatcctcccacctcagcctcctgagtag

SEQ ID NO: 15717 - DNA, 201 bp, Homo sapiens
taaaaaaaaaaaaagtcttgagaaagtctagctttgagtaaggcaacttcctgatatgcgctccaaagtaaacctgatgcaaaatgtatgagtgaggaaaygggccacatggagttgttagttgtagacctgctacaaacagcaaatactggtgacactcgtaaagtaaaaagtggccacacacacacagccctttctttg

SEQ ID NO: 15718 - DNA, 201 bp, Homo sapiens
cagtaagagccctggaatcccactctcttggctactcctctctccaaccaccaccatggtgcctagccacagacatttcagcctgaacttttaaaatagtrtgtgtaaccaaatacctatctcacccatttaaaaaaaaaaaaagtcttgagaaagtctagctttgagtaaggcaacttcctgatatgcgctccaaagtaa

SEQ ID NO: 15719 - DNA, 201 bp, Homo sapiens
cagcaaatactggtgacactcgtaaagtaaaaagtggccacacacacacagccctttctttggggttaatagttatcattggccagtccagcccaccctattttttttttttttttttgagacagagtctcactctgttgcccaggctggagtgcagtggcacaatcacggttcactataacctccacctccccagttcaa

SEQ ID NO: 15720 - DNA, 201 bp, Homo sapiens
agagactccatctcaaaaatataaaagagatgagggatattacacaatgattttttaaaagaaggttcaatttgccaggaagttgtcaaaattccgtattygtttgtacctcaattacagcctcaaatattgaatgcaaaagttgacaaaactacagggaagaaagaaacccgcaatcatctctgtattcaacagaataat

SEQ ID NO: 15721 - DNA, 201 bp, Homo sapiens
gcagcctcaacctcctgggctcaagtgatcctcccacctcagcctcctgagtagctgagactacaggtgcacactaccatacccaagtaatttttttgtgtttttttttgtttgttttgcggaggcagggtcttactatgttgtgcaggctggtcttgaactccctggctcaagtgatcttcccacctcggcctcccaaag

SEQ ID NO: 15722 - DNA, 201 bp, Homo sapiens
cagcctcaacctcctgggctcaagtgatcctcccacctcagcctcctgagtagctgagactacaggtgcacactaccatacccaagtaatttttttgtgtttttttttgtttgttttgcggaggcagggtcttactatgttgtgcaggctggtcttgaactccctggctcaagtgatcttcccacctcggcctcccaaagt

SEQ ID NO: 15723 - DNA, 201 bp, Homo sapiens
gtttcttcttcttcttcttcttcttcttttttttttttttttagacggagtttcactcgtcacccaggctggagtgcaatggtgtgatctcagctcactgaacctccgcctcctgggttcaagcaattctgctgccccagcctcccaagtagctgggattacaggcatgcaccaccacgcccggctgcttttgtattttta

SEQ ID NO: 15724 - DNA, 201 bp, Homo sapiens
atcccagcattttcggaagatgaagcaggtggatcacctaaggtcaggagtttgagaccagcctgaccaatatggtgaaaccctgtctctattaaaaatasaaaaaaattagctggatgtggtggcatgcgcctgtagtgccagctactagggaggctgagacaggagaattgcttgaacctgggaggcagaggttgctgt

SEQ ID NO: 15725 - DNA, 201 bp, Homo sapiens
tgagacaggagaattgcttgaacctgggaggcagaggttgctgtgagccgaaattgcaccactgcactccagcctgggcaacacagtgagactccctctcaaaaaaaaaagagaaagttccactttattttgtctggttccctttatcctgccctcattgaatgaccgaatgcattaacttaggcacttaaaacgaaggat

SEQ ID NO: 15726 - DNA, 201 bp, Homo sapiens
aggagaattgcttgaacccagaaggcagaagttgcagtgagctgagatcatgccattgcactccagcctgggcaacagagtgagactctgtctcaaaaagraaaaaaaaaaaaaaggaagggtattagggaataatacatagaggttaagagtatggcttcagagtcctgcagacttgcgtttgagttcttctgccatctt

SEQ ID NO: 15727 - DNA, 201 bp, Homo sapiens
aatgagaccctgtctctacaaaaaaaaaaaaaagattagccaggcgtggtggtgcacactgatagtcccagctactcaggaggctgagggaggcggatcamttgagctagagagttcaaagctgcagtgagccatgtttgtgccactgcactccagcctgggcaacaaagtgagaccctgtctggaaaaaaaaaaaaaaaa

SEQ ID NO: 15728 - DNA, 201 bp, Homo sapiens
gaattgcttgaacctgggaggcagaggttgcagtgagccgagatcgggccactgcactccagcctgggtgacagaacgacactctgtctcaaacaaataarttaattaaattaaataaaaatcatcatttaaaaatctattcctggccaggtgcagtggctaatgcctgtaatcccagcacttcgggtgtctgaggtgggt

SEQ ID NO: 15729 - DNA, 201 bp, Homo sapiens
ggccaccctgatcctcagcctggcctttgcctccctccactcggcttgctcggcaggtagcgttatgagctttattcatggccaggctgggaagggggagrgaaggagggaagagaggtgggagggaaagaaggaggagggggaagattctttggccagggttggtcctgcgcaaaggaaggaggaaacagaactttctca

SEQ ID NO: 15730 - DNA, 201 bp, Homo sapiens
ctctctgcctacttcttttctttttcacatgaaatcttatcagggataacaggtgaaattggaagcagtaagagccctggaatcccactctcttggctacycctctctccaaccaccaccatggtgcctagccacagacatttcagcctgaacttttaaaatagtgtgtgtaaccaaatacctatctcacccatttaaaaa

SEQ ID NO: 15731 - DNA, 201 bp, Homo sapiens
gaatgcaaaagttgacaaaactacagggaagaaagaaacccgcaatcatctctgtattcaacagaataattagaccaaattttaaaagacaggaaaaatayggatgttctgaaccacacaattagcactcttgatctaatggacttacccggagcactgaccccacaactgcatgacacattcaagagccacaaaaattgg

SEQ ID NO: 15732 - DNA, 201 bp, Homo sapiens
ggatggatttcttgttcctaagtgttaaatgatcacatacataaaagagtctgagcctgagcaacataatgagaccctgtctctacaaaaaaaaaaaaaarattagccaggcgtggtggtgcacactgatagtcccagctactcaggaggctgagggaggcggatcacttgagctagagagttcaaagctgcagtgagcca

SEQ ID NO: 15733 - DNA, 201 bp, Homo sapiens
ttttttttttttttttttttggagatggagtctccctctgtcggccaagctggaatgcagggtcaggagcatctcagcttactgcaacctctgtcttccgrgttcaagcgattttcctgcctcagcttcccaagtggctgggactacaggcatgcaccaccacacctggctaatttttgtatttttattagagatggggtt

SEQ ID NO: 15734 - DNA, 201 bp, Homo sapiens
acagctctcctcttgcctccccacctcacatgccttggctcacctgcacttctgggtgctgctggtacagccaccctctgacacttccttacctctggacytttgctcatctgtccctctacctataatgccatcttcccctctccccctgtcaaaattctagccatccttcaaggcccaggccaaatgccattttctttt

SEQ ID NO: 15735 - DNA, 201 bp, Homo sapiens
aaaacttagctgggcgtggtggcgggcacctgtagtcccagctactcgggaggctgaggcaggagaatggcgtgaacccaggaggcagcttgcagtgagcygagatagcgccactgcactccagcctgggcgagtgggtaaatggagttaaagttctgaggtcttcatattatctatgaaagtggtgaaagtgtcaattaa

SEQ ID NO: 15736 - DNA, 201 bp, Homo sapiens
gtttgtaattaacgcacttcgacagcaggtatctcccaacttcagcatagtgggtgctcagtgaatattggcccaaatggaattgagcatccatgctacamctgcagatgggagaggcagcaaactcatgtcccaggaaccagcatgacacagatctctcttgtcctccccttgtttctcaataaggacaatatttgcgct

SEQ ID NO: 15737 - DNA, 201 bp, Homo sapiens
tttatatcttagagccaattagaaaaaagtgcctcccctgggctgttacactccactaggaaatctttccttggggcttactcacgccttctatgtctttmcacagagctggagtccacccctcacccttaccaggcccattcatgcgcaggaacacttccacacatggcaggctgtgtgcacacagacgattccctcgcc

SEQ ID NO: 15738 - DNA, 201 bp, Homo sapiens
attcctcaaacacggttctggggttgaatgatgcgtgtttgtaattaacgcacttcgacagcaggtatctcccaacttcagcatagtgggtgctcagtgartattggcccaaatggaattgagcatccatgctacacctgcagatgggagaggcagcaaactcatgtcccaggaaccagcatgacacagatctctcttgtc

SEQ ID NO: 15739 - DNA, 201 bp, Homo sapiens
tttgctcatctgtccctctacctataatgccatcttcccctctccccctgtcaaaattctagccatccttcaaggcccaggccaaatgccattttcttttyttttttttttttttttttggagatggagtctccctctgtcggccaagctggaatgcagggtcaggagcatctcagcttactgcaacctctgtcttccggg

SEQ ID NO: 15740 - DNA, 201 bp, Homo sapiens
ctcatctgtccctctacctataatgccatcttcccctctccccctgtcaaaattctagccatccttcaaggcccaggccaaatgccattttcttttttttyttttttttttttttggagatggagtctccctctgtcggccaagctggaatgcagggtcaggagcatctcagcttactgcaacctctgtcttccgggttca

SEQ ID NO: 15741 - DNA, 201 bp, Homo sapiens
ttctgaatctcagatgttgaatcagtgcaacgggatggatttcttgttcctaagtgttaaatgatcacatacataaaagagtctgagcctgagcaacatartgagaccctgtctctacaaaaaaaaaaaaaagattagccaggcgtggtggtgcacactgatagtcccagctactcaggaggctgagggaggcggatcact

SEQ ID NO: 15742 - DNA, 201 bp, Homo sapiens
ggatcttccttgccatgtggtaggagtgccttgtatacaccctctgcctgccacctacttccagccttacctggctccagcccctcctcctcacttcttcsagagtgatctgtctaatacataaataagtgatcaaatcacccccttccaaaatccttctgtggctctgcacagctgagggaacaggatttttactcaggg

SEQ ID NO: 15743 - DNA, 201 bp, Homo sapiens
agtaaagttccctgacaacagaaactgaagagattgcctggttcatcttgtagtcttccaaaacagcagataatttctgaatctcagatgttgaatcagtrcaacgggatggatttcttgttcctaagtgttaaatgatcacatacataaaagagtctgagcctgagcaacataatgagaccctgtctctacaaaaaaaaa

SEQ ID NO: 15744 - DNA, 201 bp, Homo sapiens
aactacagggaagaaagaaacccgcaatcatctctgtattcaacagaataattagaccaaattttaaaagacaggaaaaatatggatgttctgaaccacayaattagcactcttgatctaatggacttacccggagcactgaccccacaactgcatgacacattcaagagccacaaaaattggtcatatggtgtcttttaa

SEQ ID NO: 15745 - DNA, 201 bp, Homo sapiens
ctgatccccatctaggtgcacaatctttgacacagattgctttaatgacccatcccaggtcagcagctaacaatgccctaggttcaaatgcttgaagaagyttggaggtggaaaggccataagaaatcatctagtccaacttccacccaatgcaacagcttggttttggcgtccttggcatacatatttcttcttcttcta

SEQ ID NO: 15746 - DNA, 201 bp, Homo sapiens
aaaaatcaggagtggataggccaggtgtggtggctcacgcctgtaatcccagcactttgggaggccgaggtgggcagatcacgaggtcaggagatcgagaycatcctggctaacacggtgaaaccccatctctactaaaaatacaaaaacttagctgggcgtggtggcgggcacctgtagtcccagctactcgggaggctg

SEQ ID NO: 15747 - DNA, 201 bp, Homo sapiens
acaatgccctaggttcaaatgcttgaagaagtttggaggtggaaaggccataagaaatcatctagtccaacttccacccaatgcaacagcttggttttggygtccttggcatacatatttcttcttcttctatgcacgtttttcctcttcttgcctacttctagccacaaggcgctcagtaattcatagagcaaccactat

SEQ ID NO: 15748 - DNA, 201 bp, Homo sapiens
gaggccgaggtgggcagatcacgaggtcaggagatcgagaccatcctggctaacacggtgaaaccccatctctactaaaaatacaaaaacttagctgggcrtggtggcgggcacctgtagtcccagctactcgggaggctgaggcaggagaatggcgtgaacccaggaggcagcttgcagtgagccgagatagcgccactg

SEQ ID NO: 15749 - DNA, 201 bp, Homo sapiens; identical to SEQ ID NO: 1866

SEQ ID NO: 15750 - DNA, 201 bp, Homo sapiens
gatcgagaccatcctggctaacacggtgaaaccccatctctactaaaaatacaaaaacttagctgggcgtggtggcgggcacctgtagtcccagctactcrggaggctgaggcaggagaatggcgtgaacccaggaggcagcttgcagtgagccgagatagcgccactgcactccagcctgggcgagtgggtaaatggagt

SEQ ID NO: 15751 - DNA, 201 bp, Homo sapiens
tgctgggttatctccccattttcctgtggaggctggaaggctgatctacatcccctgccttgccctgccattccgggttctgcaactcacggcagagggaycttggttaccatcttctgctcctggctttgatcttgttctcagccacctcagaacaccaccacactctctatgccctgcaacactcctgctcccaaaacc

SEQ ID NO: 15752 - DNA, 201 bp, Homo sapiens
acactgtcctcaacacagctacagtttatgtaacacagagtccatattatatggggcatgtctgtatcaaaatgtcatatgtagaaataaagtattaaatrttaaggtgtggcataattatctgactttaaaaatcatcatttagtggccgggcatggtggctcacgcctgtaatcccagcactttgggaggccaaggcgg

SEQ ID NO: 15753 - DNA, 201 bp, Homo sapiens
gtatttttattagagatggggtttcaccattttggccaggctggtcttgaactcctgacttcaagtgatccacctgcctcagcctcccagagtgctgggaytacagggtgagcccccatgcccaacctcaaatgccattttcttcttgaagcatcccatcagcagatgtggcctccactgttgaaacccacagtgctttat

SEQ ID NO: 15754 - DNA, 201 bp, Homo sapiens
atactggtgacactcgtaaagtaaaaagtggccacacacacacagccctttctttggggttaatagttatcattggccagtccagcccaccctattttttwtttttttttttgagacagagtctcactctgttgcccaggctggagtgcagtggcacaatcacggttcactataacctccacctccccagttcaagtgatt

SEQ ID NO: 15755 - DNA, 201 bp, Homo sapiens
ttttttttttttttggagatggagtctccctctgtcggccaagctggaatgcagggtcaggagcatctcagcttactgcaacctctgtcttccgggttcargcgattttcctgcctcagcttcccaagtggctgggactacaggcatgcaccaccacacctggctaatttttgtatttttattagagatggggtttcacca

SEQ ID NO: 15756 - DNA, 201 bp, Homo sapiens
cagatttattctcaacagaaaattttttgattacagcagaccagatctttatctgtcaataagttaaaaaagataatctgggctggatgtggtggctcackcctgtaattccagcacttcgggaggccaagacaggaggattgcttgagcccaggaatttgagaccagcctgggcaacatggcgaaaccccacctctacaa

SEQ ID NO: 15757 - DNA, 201 bp, Homo sapiens
ccttgtggtaggatttttttttttttctgctttaataagtgaagggtcagggcaccagttggtgtctgagatgccctccagtctggggaaccccgtagatkcttagactactttgaactgaagtatgtgcagtctgccatctcacattaaaatgtaggcattttgtcaattgcttttctttcatctgcacaagaggaagga

SEQ ID NO: 15758 - DNA, 201 bp, Homo sapiens
caaaaaacatttcaaaatctatgcctgggaatagcttttgccagtgcctcagactatctcctatcttttcttccagaagcaagcagcagcaacagctcaascttgaccgctcaccacccagaccctgggaccctggagcagtgcctcagtaagcttctcctgccaactgctctaaccccagaactggccctcagcctggga

SEQ ID NO: 15759 - DNA, 201 bp, Homo sapiens
tgtctttaaaccttgtggtaggatttttttttttttctgctttaataagtgaagggtcagggcaccagttggtgtctgagatgccctccagtctggggaaycccgtagatgcttagactactttgaactgaagtatgtgcagtctgccatctcacattaaaatgtaggcattttgtcaattgcttttctttcatctgcaca

SEQ ID NO: 15760 - DNA, 201 bp, Homo sapiens
gcaccaagggaggtgcacaagaaactataagacttagtctcatcatcaacattttcagaagcaagtgcataaccttctcaccaaaaccaggttatctgctyctgtccctggcttgagtcctgggcttaactgtcatttcagaatctgagaatcagtcaggtatggtggctcatgcctgtaatcccagcactttgggaggca

SEQ ID NO: 15761 - DNA, 201 bp, Homo sapiens
agcactttgggaggcccaggtgggtggatcacttgaggccaggagttcaagaccagcctggccaacatggcaaaacccagtctctactaaaaatacaaaamattagctgggtgtggtggtgcgtgcctgtaatcccagctacttgggaggctgaggcaggagaattgcttgaacccagaaggcagaagttgcagtgagctg

SEQ ID NO: 15762 - DNA, 201 bp, Homo sapiens
agtagagacagggtttcatcatgttggccaggctgttcttgaactcctgacctcaggtgatctgcccacctcggcctcccaaaatgctgggattacaggtstgaaccactgcacctggcctcttcctcatcttataaggaccccgccatattggattagggcccacccataggacctcatttaagcttaactgcctcttcg

SEQ ID NO: 15763 - DNA, 201 bp, Homo sapiens
ctacagaaccttcccctttgcttcctgactttgtttcaaattcctctaccaggcacgcagaagcttagcccacagctctcctcttgcctccccacctcacmtgccttggctcacctgcacttctgggtgctgctggtacagccaccctctgacacttccttacctctggacctttgctcatctgtccctctacctataatg

SEQ ID NO: 15764 - DNA, 201 bp, Homo sapiens
taggccaggtgtggtggctcacgcctgtaatcccagcactttgggaggccgaggtgggcagatcacgaggtcaggagatcgagaccatcctggctaacacrgtgaaaccccatctctactaaaaatacaaaaacttagctgggcgtggtggcgggcacctgtagtcccagctactcgggaggctgaggcaggagaatggcg

SEQ ID NO: 15765 - DNA, 201 bp, Homo sapiens
aggagaatggcgtgaacccaggaggcagcttgcagtgagccgagatagcgccactgcactccagcctgggcgagtgggtaaatggagttaaagttctgagktcttcatattatctatgaaagtggtgaaagtgtcaattaatattagactttgatatgttaagaatgcacttgtgagaacatatattcagggtaacttgga

SEQ ID NO: 15766 - DNA, 201 bp, Homo sapiens
aatcctcccatcttgaacagggttttagaaaagttgaaagtaatatgatgggaaaatgatttagcatgccaaacaaaacaaaagaaacctgttatagctayagcaatatcagacaaagtaaagtttatggcaaaaaaacattactagagataaagaaggctgggcgcagtggctcacacctgtaatcccagcactttggga

SEQ ID NO: 15767 - DNA, 201 bp, Homo sapiens
ggggttaggacttcaatatatgaaacttgggagaggggaacataattcggtccataacagggagttagctttgttgcagaaagcctcaatatgcccatgckggagcttctataatactttcataatactcactactgatttacaaaaaacatttcaaaatctatgcctgggaatagcttttgccagtgcctcagactatct

SEQ ID NO: 15768 - DNA, 201 bp, Homo sapiens
gcagcaaactcatgtcccaggaaccagcatgacacagatctctcttgtcctccccttgtttctcaataaggacaatatttgcgctcaggggagaagggcayagcttgcccctcccttccttcctcagccaacggtttggcttcccttctagagaggtgagagaaggtgtgacaggccaagtttcctttgctccaccccatg

SEQ ID NO: 15769 - DNA, 201 bp, Homo sapiens
ggaaaggccataagaaatcatctagtccaacttccacccaatgcaacagcttggttttggcgtccttggcatacatatttcttcttcttctatgcacgttyttcctcttcttgcctacttctagccacaaggcgctcagtaattcatagagcaaccactattatgcatgtctagctaatagaaagttttgcagctgggcgc

SEQ ID NO: 15770 - DNA, 201 bp, Homo sapiens
gtggtgcacacctgtaatcccagctacttgggaggccgaggcaggagaatctcttgaacctcggaggcggaggttgcagtgagccaagatcatgccactgyactccagcctgggcggcagagcaagactctgtatcagaaaaaaaaaaaaaaaaaaagaatgtgaggatcaggtgggcatggtggctcatgcctgtaatcc

SEQ ID NO: 15771 - DNA, 201 bp, Homo sapiens
ccctggctaacatggtgagacctcgtctctactaaaaatacaaaaattagccaggtgtggtggcgggcacctcagctactcgggaggctgaggcaggaggmtcacttgaacccaggaggcggaagttgcagtgagctgagatcatgccactgcactccagcctgggcaaaagagtgagactccgtctcaaaaacaacaaca

SEQ ID NO: 15772 - DNA, 201 bp, Homo sapiens
agccagctccagatgtagaaagaccctttggggtcatggctggagggcaagctggtggaggggactggactggagggggacccaaaaggccagataagaggttgagatagaccaggcgcggtggctcatgcctgtaatcccagcactttgggaggccgaggtgggtggatcatgaagtcaagagattgaggccatcctggc

SEQ ID NO: 15773 - DNA, 201 bp, Homo sapiens
aaaaaaaaagatttagttctgggcttcctggtagccatggcaaaaaggcaaatactgtcctttccttagccaggtccctgatatacagcagaggctggaaytctgagctgctttgattttaccaaaaagccaagacaacctgttggaagcctatgggtttaccattgaggctgcaggaatctagttcctaattatcttcag

SEQ ID NO: 15774 - DNA, 201 bp, Homo sapiens
caattgtccagcccccaggcaacaggggaagggccttggccaacatctgggtgccagcagggcaggggtggggctctgaggggataagggcttttaaaagsctccccagggaggttccccagttcctccacctgctggcccctggacacctctgtcaccatgtggttcctggttctgtgcctcgccctgtccctggggggg

SEQ ID NO: 15775 - DNA, 201 bp, Homo sapiens
gtgacagagcaagactccatctcagaaaaaaaaaaaaaaaaaaaaagatttagttctgggcttcctggtagccatggcaaaaaggcaaatactgtcctttycttagccaggtccctgatatacagcagaggctggaactctgagctgctttgattttaccaaaaagccaagacaacctgttggaagcctatgggtttacca

SEQ ID NO: 15776 - DNA, 201 bp, Homo sapiens
cgcgttgcccccacccgggggaggcctgtgtggtgtctggctggggcctggtgtcccacaacgagcctgggaccgctgggagcccccggtcacaaggtgcrtgaaaggatggagctggatgcgaggcctcaaggaatcctatgctccagggctcttgggcggaggggacaagggccggaatttatggatctgctccaagtc

SEQ ID NO: 15777 - DNA, 201 bp, Homo sapiens
cgcagccaccgcaacgacatcatgttgctgcgcctagtccagcccgcacgcctgaacccccaggtgcgccccgcggtgctacccacgcgttgcccccaccygggggaggcctgtgtggtgtctggctggggcctggtgtcccacaacgagcctgggaccgctgggagcccccggtcacaaggtgcgtgaaaggatggagct

SEQ ID NO: 15778 - DNA, 201 bp, Homo sapiens
tgcacacacacacatacacattcctacctcatccttacaacaatcttcattttacagatgaggaaacagaggcacagacaggtcgaataacttactcaaartttcacagctagtacattcgaacccaggcttaaggacccatctttgtccagaccctgtatgcaagtgtctgtgacactggatgccaagactcacactaga

SEQ ID NO: 15779 - DNA, 201 bp, Homo sapiens
ccagaccctgtatgcaagtgtctgtgacactggatgccaagactcacactagagatgttgaatttaggtctgaacaatatccaattctgtgtgtgtgtttktgtgtgcatgtgtgtgtgtgttgtattcatgtcttaaccatccatattcatatacacatatgaacatctgtgctgtgattcttttttttttttttttttt

SEQ ID NO: 15780 - DNA, 201 bp, Homo sapiens
atcaggggtgcttcatcagtacctgcctaggctggttaggaggaggagcacgtgcgatcgtgacgggaagcgctcagcacagacctggcaccgaggaagtyccaggggctcggctcctttccctcgtcaccaccgcgccccaacagagggaggcggctgcaggggtggcggcgaaagggcccaccgggcgttccggagtcg

SEQ ID NO: 15781 - DNA, 201 bp, Homo sapiens
ttgcccagtggagaggggtcctggtcctgtgaccttgaatgtctctaatcatgtccttaagcataatgccattctgtgtgtgtgtgtgtgtgtgtgtgtgkacatgcacgtgtgcagtgggtatacaaggccctgtatgttcacatcctctccacatgcatgagccagatccccatatgtgaaacccaatcagtgactcca

SEQ ID NO: 15782 - DNA, 201 bp, Homo sapiens
gtccagaccctgtatgcaagtgtctgtgacactggatgccaagactcacactagagatgttgaatttaggtctgaacaatatccaattctgtgtgtgtgtktgtgtgtgcatgtgtgtgtgtgttgtattcatgtcttaaccatccatattcatatacacatatgaacatctgtgctgtgattcttttttttttttttttt

SEQ ID NO: 15783 - DNA, 201 bp, Homo sapiens
cagcactttgggaggccgaggtgggtggatcatgaagtcaagagattgaggccatcctggctaacacggtgaaaccctgtctctacttaaaaaaaaaaaawttccaaaaaattagccgggcacggtggtgggcgcctgtagtcccagctactcgggaggctgaggcgggagaatggtgtgaacctgggaggtggagcttgc

SEQ ID NO: 15784 - DNA, 201 bp, Homo sapiens
cacttttgtccttgaaagtgaggctggagccaggcaactcatgcctgtaatcccagcactttgggaggctgaggcgggtggatcactagaggtcaggagtwcaagaccagcctggccaacatggtgaaactccgtctctactaaaattacaaaaattagctgggcgtggtggcacacacctgtaatcccaattgcttggga

SEQ ID NO: 15785 - DNA, 201 bp, Homo sapiens
gagttgagttgggttggggttccctgggatggggatggattgggtttggggtgagattgcaaatggtgattaggatgaggatgaatccaggaggtttcacycaacctgagaccccctcttttccccacagggtgactctgggggacccctggtctgtgggggcatcctgcagggcattgtgtcctggggtgacgtcccttg

SEQ ID NO: 15786 - DNA, 201 bp, Homo sapiens
tgtccttgaaagtgaggctggagccaggcaactcatgcctgtaatcccagcactttgggaggctgaggcgggtggatcactagaggtcaggagttcaagaycagcctggccaacatggtgaaactccgtctctactaaaattacaaaaattagctgggcgtggtggcacacacctgtaatcccaattgcttgggaggctga

SEQ ID NO: 15787 - DNA, 201 bp, Homo sapiens
tggcccacagtctatcctagtccggggtgccccggctcttatctatcttgcgcggccccaccctaaacttccacccccgctcctccatgttgtcatagtgytcactcccacaccagattcctgctcctcccaggaagcctcagtactttctcctcttccctagccaacgccctgtcccaccgctttaccaaaggggcagat

SEQ ID NO: 15788 - DNA, 201 bp, Homo sapiens
ccttgaaagtgaggctggagccaggcaactcatgcctgtaatcccagcactttgggaggctgaggcgggtggatcactagaggtcaggagttcaagaccagcctggccaacatggtgaaactccgtctctactaaaattacaaaaattagctgggcgtggtggcacacacctgtaatcccaattgcttgggaggctgaggc

SEQ ID NO: 15789 - DNA, 201 bp, Homo sapiens
ccccacctggcttcaaccccaggaatgcgtccagcgtgatccagggcctgcagaacaggtgctggttctccctccccgtctacagctctggggatcggagsggggggggcaattgtccagcccccaggcaacaggggaagggccttggccaacatctgggtgccagcagggcaggggtggggctctgaggggataagggct

SEQ ID NO: 15790 - DNA, 201 bp, Homo sapiens
gtcctggtcctgtgaccttgaatgtctctaatcatgtccttaagcataatgccattctgtgtgtgtgtgtgtgtgtgtgtgtgtacatgcacgtgtgcagkgggtatacaaggccctgtatgttcacatcctctccacatgcatgagccagatccccatatgtgaaacccaatcagtgactccacagatctggcttggggg

SEQ ID NO: 15791 - DNA, 201 bp, Homo sapiens
tgtcctccagaccctgacatctggtctccccagtccttccagggtcccccaaatttcaccagaaaaccctgcttcccaaactggcatgtgggatcccccayctggtatgggggggggtctgcaaatgtcccttcccacccagcacccccagctctcccaggaaaaacaccacaccctcccaccacatgctcctttccttgg

SEQ ID NO: 15792 - DNA, 201 bp, Homo sapiens
cttcccaaactggcatgtgggatcccccatctggtatgggggggggtctgcaaatgtcccttcccacccagcacccccagctctcccaggaaaaacaccamaccctcccaccacatgctcctttccttggggaagttccatcccgccccaggccccagcccttctctgcctgaattgttcctacacagctctggttttctg

SEQ ID NO: 15793 - DNA, 201 bp, Homo sapiens
gccgggcacggtggtgggcgcctgtagtcccagctactcgggaggctgaggcgggagaatggtgtgaacctgggaggtggagcttgcagtgagccgacatygtgccactgcactccagcctgggtgacagagtgagactccgtctcaaaaaaaaaaaaaagttgggacaggggtccttggtgatgatggagagagatccag

SEQ ID NO: 15794 - DNA, 201 bp, Homo sapiens
ccacatgctcctttccttggggaagttccatcccgccccaggccccagcccttctctgcctgaattgttcctacacagctctggttttctggaaccccacsccaaggatcctgaatgccttctcagccagcgcttctgccctggcctcccccaagtcagtatgtgattctacaacctcacatcaagtgggtcctgcattgc

SEQ ID NO: 15795 - DNA, 201 bp, Homo sapiens
gggcgtggtggtggtcgcctgtaatcccagctactcaggaggctgaggcaggagaatctattgagcccaggaagtggaggttgcagtgatctgagatcgcrctattgcactccagcctgggtgacaagagcgaaacttcatctcagaaaaaaaaaaaaaaaaagaatccagaccccacaattcaaaatcccaaatctacca

SEQ ID NO: 15796 - DNA, 201 bp, Homo sapiens
aaggctgtgagcaggggaggggcggggtgatctccaagtgcagagagaccctctagggccacgtggtgaccgacaggaggctgtcctcccggacaggaggrgcgagggtccagagagagaggaggacgtctgagctggagccaggccaaggggacagagaggaggggacggggcagagagaggcaggggccgaagggacaa

SEQ ID NO: 15797 - DNA, 201 bp, Homo sapiens
agcgccctcagtgtccccgtctgtatcaggggtgcttcatcagtacctgcctaggctggttaggaggaggagcacgtgcgatcgtgacgggaagcgctcakcacagacctggcaccgaggaagtcccaggggctcggctcctttccctcgtcaccaccgcgccccaacagagggaggcggctgcaggggtggcggcgaaag

SEQ ID NO: 15798 - DNA, 201 bp, Homo sapiens
caaggtcagtgccaagggcgtctggccgaataactgggtggtcggtgacgctgcccctgagatgaagaacgtggaagaacagggaaggagggtttggggamatagagcaatgagttgggactcggtaagtgagaggggcctagggacagtggtgcagggggcgcccaggagcaggtggctgcccaagccggagttcagggt

SEQ ID NO: 15799 - DNA, 201 bp, Homo sapiens
gggagccgagcgcagaccgggtgcgcgcctgggttcggcgcggcgggagcgccctcagtgtccccgtctgtatcaggggtgcttcatcagtacctgcctargctggttaggaggaggagcacgtgcgatcgtgacgggaagcgctcagcacagacctggcaccgaggaagtcccaggggctcggctcctttccctcgtcac

SEQ ID NO: 15800 - DNA, 201 bp, Homo sapiens
cccataaagatgatgactttccacacatggggagagaccacgcttacaacaggtcccatccttcactgggtgacctgagtgaggtcagtccctcctgtctygggacctcctcattaattaagccaaaatagactctagataattgcttggggccctctggggttctgagacattggaagccagcctcaaatacccaaagcc

SEQ ID NO: 15801 - DNA, 201 bp, Homo sapiens
acccaaagccttgggtcatctcagtgatcatctccagcctctgggatgcagaatccagatttcaagctctagaacccagaaataagactacaggaccagartagagaccctgggttcccagactctaaattcagactctagagtcaagattctagcaatctcagaatcgtgaaagccaggtccctgtctctcaattcagcc

SEQ ID NO: 15802 - DNA, 201 bp, Homo sapiens
aaggaacggaggccgtggtgagactaagttagaagagggccagcacctcatggggaggcccttcgggcaccacgagtccagtcccgctccggaggtgggcrgtctgcaggccccctgagaagggggtttgaggggaggctttttcctgctggggaatctcaaagggcttaaaactgcagaccgagaagccgggaccttgcc

SEQ ID NO: 15803 - DNA, 201 bp, Homo sapiens
cgaggcctcaaggaatcctatgctccagggctcttgggcggaggggacaagggccggaatttatggatctgctccaagtccactgtcttccccagtgagtytcccagatacgttgcattgtgccaacatcagcattatctcggacacatcttgtgacaagagctacccagggcgcctgacaaacaccatggtgtgtgcagg

SEQ ID NO: 15804 - DNA, 201 bp, Homo sapiens
ctggttttctggaaccccacgccaaggatcctgaatgccttctcagccagcgcttctgccctggcctcccccaagtcagtatgtgattctacaacctcacrtcaagtgggtcctgcattgcattcccacagctgcttggcgcctgttctcaccacttctccaatcctcttcctaggattgcctccaagaggaccccatatc

SEQ ID NO: 15805 - DNA, 201 bp, Homo sapiens
ccccccgataagaccttcccctccaacaccccaccctcatccctctggcccacagtctatcctagtccggggtgccccggctcttatctatcttgcgcggscccaccctaaacttccacccccgctcctccatgttgtcatagtgctcactcccacaccagattcctgctcctcccaggaagcctcagtactttctcctct

SEQ ID NO: 15806 - DNA, 201 bp, Homo sapiens
ctgagccccgtcccagtcctgaccgcaactgtgttctcagggccccaacctcccctcagattgccattcctggttcacaggaaggaccccaaaacctctcrgaagcccacctctagccttaaccatagccctttcttttaccctttaaccaggaagccctgaaatctaactgtcccagccaagctggccccttccaacccc

SEQ ID NO: 15807 - DNA, 201 bp, Homo sapiens
tcagcctcccaaaggcatgagtcactgggcccagccacagtccaggttttcaatgcaaaaacagatttgaaactccagactgtatgttccaaagtctactyctgaaagctcagaggctagatccaccctgtagaatccagaccccaagcctggcatggtggctcacgcctgtaatcccagcactttaggaggctgagtcag

SEQ ID NO: 15808 - DNA, 201 bp, Homo sapiens
tcttgaacccagaaggcagaggttacagtgagcggagatcacgccactccactccaacctgggctacagagccagactccgtctcaaaaaaaaaaaaaaaraagaaaaaaaaagaaagaaagtgaatttgaagagctggactttatcctggtggtgccaaggatccatggagggtggtgagcaggggaggggcacagccag

SEQ ID NO: 15809 - DNA, 201 bp, Homo sapiens
tttccctagcctaggagccccttagccctccagattcttcctcagtgagcctctgatcctgtcccacccttggcgccttgatccctggtttccagaatccytttccactcccctaacccaccacctcccatcccccagccccagaccccaaatgacctgacgcccagatgcagtgtctgctccagacactgtctcctgtct

SEQ ID NO: 15810 - DNA, 201 bp, Homo sapiens; identical to SEQ ID NO: 6806

SEQ ID NO: 15811 - DNA, 201 bp, Homo sapiens; identical to SEQ ID NO: 6796

SEQ ID NO: 15812 - DNA, 201 bp, Homo sapiens
agtgctgaggtcacagaaagaacctgacctgagccccatcttcaagacccccagatggagaaaagaacaggccagacctcagcaagtatggggcatctgcrctgtaatggagacagaatgggtgctgtgggattcaggggagacacctgttaggtgttggggcctcccagaagaggtgggggcagagtgtcagaggacaaa

SEQ ID NO: 15813 - DNA, 201 bp, Homo sapiens; identical to SEQ ID NO: 6797

SEQ ID NO: 15814 - DNA, 201 bp, Homo sapiens
acacctgttaggtgttggggcctcccagaagaggtgggggcagagtgtcagaggacaaagatgaatttggaagatatggggaagaaggatttcaattcacyctcaaagcttcctgaggcctcccgtgggtcgggccctgcagtactggagacccagagtggagtcagaccagctcctcggggagctgccagtctcgtaggg

SEQ ID NO: 15815 - DNA, 201 bp, Homo sapiens
acatgagcctcctggagaaccacacccgccaagcagacgaggactacagccacgacctcatgctgctccgcctgacagagcctgctgataccatcacagaygctgtgaaggtcgtggagttgcccaccgaggaacccgaagtggggagcacctgtttggcttccggctggggcagcatcgaaccagagaattgtatgtggg

SEQ ID NO: 15816 - DNA, 201 bp, Homo sapiens
ggtgaggtcgggctgcagccctttttctcccgggttcgtagtctcatttccagatgatctccagtgtgtggacctcaaaatcctgcctaatgatgagtgcraaaaagcccacgtccagaaggtgacagacttcatgctgtgtgtcggacacctggaaggtggcaaagacacctgtgtggtgaggcagccctgcccccaggg

SEQ ID NO: 15817 - DNA, 201 bp, Homo sapiens
aaatcttaccttccagagtgtcctccactgccagaatgtcttagggcctgtgcttttagaatctgaaagtctgatattctagaaattccaggggcctgtarttctagaatggctgaatccttcccataaagatgatgactttccacacatggggagagaccacgcttacaacaggtcccatccttcactgggtgacctgag

SEQ ID NO: 15818 - DNA, 201 bp, Homo sapiens
ccaccgaggaacccgaagtggggagcacctgtttggcttccggctggggcagcatcgaaccagagaattgtatgtgggggcagactgtgtagcccaaggcrgggatggggactcctgcgtccaagggagaaagggccagggaagcaggtgaggtcgggctgcagccctttttctcccgggttcgtagtctcatttccagat

SEQ ID NO: 15819 - DNA, 201 bp, Homo sapiens
atgactggtttcaagtgaccacctgtctgaacctgtatccagtgcccctgtctccacccccaaccacagaggacttcttgccctctggtctgttccccttsctctctctcccagagtcttatagcaaatggggtgggggctagagttctggagaaaacaggcagcggttgtaaataaacaacagggcaggcggagcatggt

SEQ ID NO: 15820 - DNA, 201 bp, Homo sapiens
tcaccctgtccgagaaggactgccactcacgcctccctcctcctgagccccgtcccagtcctgaccgcaactgtgttctcagggccccaacctcccctcakattgccattcctggttcacaggaaggaccccaaaacctctcggaagcccacctctagccttaaccatagccctttcttttaccctttaaccaggaagccc

SEQ ID NO: 15821 - DNA, 201 bp, Homo sapiens; identical to SEQ ID NO: 6800

SEQ ID NO: 15822 - DNA, 201 bp, Homo sapiens
cgatgtgcccgcaggggcagcgtcctgcagatggtcctgcccctcctccccctaacctgtctgcaggcactgtccacctggaccctgccccatgtgcaggmgctggaccctgaggtcccttcccccttggccaggactggagaccctgtcccctctgtgggaatccctgcccaccttcctctgggagtgggcactggaggc

SEQ ID NO: 15823 - DNA, 201 bp, Homo sapiens
accctttaaccaggaagccctgaaatctaactgtcccagccaagctggccccttccaaccccaatgtagggaccccaagtcacccccaaactcttcagtcsagatgctcttctttacctctcagacctggttccctaaagctgcatcctttcctgaacctcaaaagcccaacccaggtcctgtttccctagcctaggagcc

SEQ ID NO: 15824 - DNA, 201 bp, Homo sapiens
tcccacactcggtcactcctgcttcctctctgcctctgtttctagttctcactctgacgtcccgcgtcctttttcatttgtctgcttctcgctcccttccrtgttctgttccctcttcctccctcttccctgggcctgtttctcgctgtccctgtcttttatccttctcatctgcctcttttttgctcaccctgtttctca

SEQ ID NO: 15825 - DNA, 201 bp, Homo sapiens
ctgagctgagtcctggggcaaccgcttccttgctgtgtgtccttgagggaactgcttcacctctctgggcttcgaatgccttctctataagacagcacccrcttgagacaataacagtgaggtctcaatagcataacagaggtaatatacatagcaagcattagacaagtgctgagaggccaacagcacagacagactcca

SEQ ID NO: 15826 - DNA, 201 bp, Homo sapiens
ccgctccctcatccctactaaacacacacccagatggacctaagggaggccccagagtaaaggaagggctttatccccaacttgtgtgcctgggagggggygcctctccctctgtccagctccccgccccacaggatatccctccactctggagagacacagggaagggctggtttcagcgggagctgggtggggcaactg

SEQ ID NO: 15827 - DNA, 201 bp, Homo sapiens
ccaagcagacgaggactacagccacgacctcatgctgctccgcctgacagagcctgctgataccatcacagacgctgtgaaggtcgtggagttgcccaccsaggaacccgaagtggggagcacctgtttggcttccggctggggcagcatcgaaccagagaattgtatgtgggggcagactgtgtagcccaaggcggggat

SEQ ID NO: 15828 - DNA, 201 bp, Homo sapiens
cagtgaggtctcaatagcataacagaggtaatatacatagcaagcattagacaagtgctgagaggccaacagcacagacagactccagcttgagtcccacrcctgccactccctgtctcttacagggtctttgaggggattaaatgtggttgtgtgtgaggcagaagcataagcctggcccaggtagtgccccttcaggtg

SEQ ID NO: 15829 - DNA, 201 bp, Homo sapiens
agcccaacccaggtcctgtttccctagcctaggagccccttagccctccagattcttcctcagtgagcctctgatcctgtcccacccttggcgccttgatscctggtttccagaatccctttccactcccctaacccaccacctcccatcccccagccccagaccccaaatgacctgacgcccagatgcagtgtctgctcc

SEQ ID NO: 15830 - DNA, 201 bp, Homo sapiens
tcacaaggtgcgtgaaaggatggagctggatgcgaggcctcaaggaatcctatgctccagggctcttgggcggaggggacaagggccggaatttatggatytgctccaagtccactgtcttccccagtgagtctcccagatacgttgcattgtgccaacatcagcattatctcggacacatcttgtgacaagagctaccca

SEQ ID NO: 15831 - DNA, 201 bp, Homo sapiens
agactccagcttgagtcccacacctgccactccctgtctcttacagggtctttgaggggattaaatgtggttgtgtgtgaggcagaagcataagcctggcycaggtagtgccccttcaggtgtgcaagccaggcacggtgcttagagcttacatacaacgtctatgtgtggtgggcaccaccgacctcatttgacaaggga

SEQ ID NO: 15832 - DNA, 201 bp, Homo sapiens
gatgctcttctttacctctcagacctggttccctaaagctgcatcctttcctgaacctcaaaagcccaacccaggtcctgtttccctagcctaggagcccsttagccctccagattcttcctcagtgagcctctgatcctgtcccacccttggcgccttgatccctggtttccagaatccctttccactcccctaacccac

SEQ ID NO: 15833 - DNA, 201 bp, Homo sapiens
ggggattaaatgtggttgtgtgtgaggcagaagcataagcctggcccaggtagtgccccttcaggtgtgcaagccaggcacggtgcttagagcttacatacaacgtctatgtgtggtgggcaccaccgacctcatttgacaagggaaggggctgtggctcagagggacggccacaacatcaaggtcaccttgggtgtcagg

SEQ ID NO: 15834 - DNA, 201 bp, Homo sapiens
tgtcccagccaagctggccccttccaaccccaatgtagggaccccaagtcacccccaaactcttcagtccagatgctcttctttacctctcagacctggtyccctaaagctgcatcctttcctgaacctcaaaagcccaacccaggtcctgtttccctagcctaggagccccttagccctccagattcttcctcagtgagc

SEQ ID NO: 15835 - DNA, 201 bp, Homo sapiens
tctggcttggactggccaggtgcagcctcggtgcccagctgttcagcccgtaccctccgcccttcggaggacgacctcacccttcctttgttaagcccctygtccaccacatccgcattcccctggtctcacgggggcctttggcccagttcctgactgtgatggggagagtgtgggcatttggtctggctgtgcaaatcc

SEQ ID NO: 15836 - DNA, 201 bp, Homo sapiens
ccaaaggggcagattctgggccatctctgtctctctctggaggaccccaaccctcccatgggcttcccccaccccacaggactctgatcatcccctcctgycccctagttccctgcggccacctatttggctcctgagtctacaaatcccaccacactccagtgactttttccatccagctgtccgctctcaactgtgtcc

SEQ ID NO: 15837 - DNA, 201 bp, Homo sapiens
tgaaacccaatcagtgactccacagatctggcttgggggctgatctagagatggataaatatgtcctgccctggctgcctctggcttcagctgcatgtctytgaccttgaatgcccagccccgtgtctgggtgctgccccagacagcaagtccacatctgagtgttggccttctgggttggtgtctgcagctctaactcta

SEQ ID NO: 15838 - DNA, 201 bp, Homo sapiens
ggggatgtgggagggggaacgggccctgattctcttgctggcctcacatccccccccgataagaccttcccctccaacaccccaccctcatccctctggcycacagtctatcctagtccggggtgccccggctcttatctatcttgcgcggccccaccctaaacttccacccccgctcctccatgttgtcatagtgctcac

SEQ ID NO: 15839 - DNA, 201 bp, Homo sapiens
ggcttcaaccccaggaatgcgtccagcgtgatccagggcctgcagaacaggtgctggttctccctccccgtctacagctctggggatcggaggggggggggcaattgtccagcccccaggcaacaggggaagggccttggccaacatctgggtgccagcagggcaggggtggggctctgaggggataagggcttttaaaag

SEQ ID NO: 15840 - DNA, 201 bp, Homo sapiens
gtggggagcacctgtttggcttccggctggggcagcatcgaaccagagaattgtatgtgggggcagactgtgtagcccaaggcggggatggggactcctgygtccaagggagaaagggccagggaagcaggtgaggtcgggctgcagccctttttctcccgggttcgtagtctcatttccagatgatctccagtgtgtgga

SEQ ID NO: 15841 - DNA, 201 bp, Homo sapiens
cccacctggcttcaaccccaggaatgcgtccagcgtgatccagggcctgcagaacaggtgctggttctccctccccgtctacagctctggggatcggaggsgggggggcaattgtccagcccccaggcaacaggggaagggccttggccaacatctgggtgccagcagggcaggggtggggctctgaggggataagggctt

SEQ ID NO: 15842 - DNA, 201 bp, Homo sapiens
aaaaaaaaaaaaaaaaaaagatttagttctgggcttcctggtagccatggcaaaaaggcaaatactgtcctttccttagccaggtccctgatatacagcaraggctggaactctgagctgctttgattttaccaaaaagccaagacaacctgttggaagcctatgggtttaccattgaggctgcaggaatctagttcctaa

SEQ ID NO: 15843 - DNA, 201 bp, Homo sapiens
gaaaaaaaaaaaaaaaaaaaaagatttagttctgggcttcctggtagccatggcaaaaaggcaaatactgtcctttccttagccaggtccctgatatacarcagaggctggaactctgagctgctttgattttaccaaaaagccaagacaacctgttggaagcctatgggtttaccattgaggctgcaggaatctagttcc

SEQ ID NO: 15844 - DNA, 201 bp, Homo sapiens
caggagttgcagtgagccgagatcgcgccactgcactccagcctggtgacagagcaagactccatctcagaaaaaaaaaaaaaaaaaaaaagatttagttstgggcttcctggtagccatggcaaaaaggcaaatactgtcctttccttagccaggtccctgatatacagcagaggctggaactctgagctgctttgattt

SEQ ID NO: 15845 - DNA, 201 bp, Homo sapiens
aggcaggagttgcagtgagccgagatcgcgccactgcactccagcctggtgacagagcaagactccatctcagaaaaaaaaaaaaaaaaaaaaagatttasttctgggcttcctggtagccatggcaaaaaggcaaatactgtcctttccttagccaggtccctgatatacagcagaggctggaactctgagctgctttga

SEQ ID NO: 15846 - DNA, 201 bp, Homo sapiens
tctctactaaaaatactaaaaaaatttagccgggcgtggtggcacacgactgtaatcctagctacttgggagggtgatgtgggaggatcgcttgaacttakgaggcaggagttgcagtgagccgagatcgcgccactgcactccagcctggtgacagagcaagactccatctcagaaaaaaaaaaaaaaaaaaaaagattt

SEQ ID NO: 15847 - DNA, 201 bp, Homo sapiens
actgccaaagccggtatgaaggcaggggctcagggtcctgagggagcctggttcggggggaagagctcctagatttgggggaagacggaggcagacgccasaactcctgggttctgaaagacgaggaggccggatgtcaagcccctgggttaggaaggagtgtgtgtttcaaagccttcgatctctgaaggaggaaggaga

SEQ ID NO: 15848 - DNA, 201 bp, Homo sapiens
ctccccacactgggtgctgtctgcggcccactgccaaagccggtatgaaggcaggggctcagggtcctgagggagcctggttcggggggaagagctcctakatttgggggaagacggaggcagacgccagaactcctgggttctgaaagacgaggaggccggatgtcaagcccctgggttaggaaggagtgtgtgtttcaa

SEQ ID NO: 15849 - DNA, 201 bp, Homo sapiens
gattttgagatgggcatgggtttgatttgattttgaatggtgaggatgtgggctgagttggatttaacttagtacagttgcactggagttgcatgggggtragattggatataggttgggtgagttgtattgagctgtgttgaattggggttggggttggggttgggttggctctgtttgggataaactgggctgtattga

SEQ ID NO: 15850 - DNA, 201 bp, Homo sapiens
ctacgagcgtggacgctttaactgtggcgcttccctcatctccccacactgggtgctgtctgcggcccactgccaaagccggtatgaaggcaggggctcarggtcctgagggagcctggttcggggggaagagctcctagatttgggggaagacggaggcagacgccagaactcctgggttctgaaagacgaggaggccgg

SEQ ID NO: 15851 - DNA, 201 bp, Homo sapiens
ttgtccttgaaagtgaggctggagccaggcaactcatgcctgtaatcccagcactttgggaggctgaggcgggtggatcactagaggtcaggagttcaagrccagcctggccaacatggtgaaactccgtctctactaaaattacaaaaattagctgggcgtggtggcacacacctgtaatcccaattgcttgggaggctg

SEQ ID NO: 15852 - DNA, 201 bp, Homo sapiens
gtggggcagggtctgtccgagtgcctagaggaagagtaaaccttccagagatgggggacccagaaggaagcgcagagtggggttgggggaaggggataccrgtggtcagaagaaatttattaacagtggatgggataagtctgtgtctggagggatcctggtggaggcagaagggtcctgcctcacctggattctctcact

SEQ ID NO: 15853 - DNA, 201 bp, Homo sapiens
aggggcctggggtctgggaggagggcatctatgctgccacaggattgacaggccagtggcattccccttggataacctcaggcaagactggggggctgagscagagaggaaggctctggcgcaggtcgcctggcagggcagagctgggctggacacccctctccaaggctgcctgggtctcttgggatctggttctgcttg

SEQ ID NO: 15854 - DNA, 201 bp, Homo sapiens
tgtcggacacctggaaggtggcaaagacacctgtgtggtgaggcagccctgcccccagggtctggaagggctgagggaggggactcagcctctgaactggyttctgagagctaaccaggcatctgcttcactgcttcccagctagctgtagccactcgccccatcagtgccccagctccccctccttcccccgcccatcca

SEQ ID NO: 15855 - DNA, 201 bp, Homo sapiens
catgctgtgtgtcggacacctggaaggtggcaaagacacctgtgtggtgaggcagccctgcccccagggtctggaagggctgagggaggggactcagcctstgaactggcttctgagagctaaccaggcatctgcttcactgcttcccagctagctgtagccactcgccccatcagtgccccagctccccctccttccccc

SEQ ID NO: 15856 - DNA, 201 bp, Homo sapiens
tgccccacctggcttcaaccccaggaatgcgtccagcgtgatccagggcctgcagaacaggtgctggttctccctccccgtctacagctctggggatcggrggggggggggcaattgtccagcccccaggcaacaggggaagggccttggccaacatctgggtgccagcagggcaggggtggggctctgaggggataaggg

SEQ ID NO: 15857 - DNA, 201 bp, Homo sapiens
ccagatctctgggactttggaggacaggacgttgagcacccataactgggagcaagaagtgggaggctcattgagaccccagcattgtttgggagggacaytggattttgtaatgctaaagaacttaccctgggagacccctgaaacttcacattcctggatctggaggcactaggaatgtggtgatgtgtaccccaaaat

SEQ ID NO: 15858 - DNA, 201 bp, Homo sapiens
ctggccaaccttgactatttattataggtaattctgtgcagatgtctgacttatgttggccatctccaggatggacctgaactttcacacgtatgtccctrtgactaaatccaggtgtcatttgcaaaaaacaactaatattattaagtagctaccagggctaggtatcactcaccatacatacacacatgcacacacaca

SEQ ID NO: 15859 - DNA, 201 bp, Homo sapiens
gggggaagggtcattggaatctgtggttagcctgatcttgacctgggagggaaggttgtccagatctctgggactttggaggacaggacgttgagcacccmtaactgggagcaagaagtgggaggctcattgagaccccagcattgtttgggagggacactggattttgtaatgctaaagaacttaccctgggagacccct

SEQ ID NO: 15860 - DNA, 201 bp, Homo sapiens
tgagatgattcgtctgaactgattaaaatcgtgtctggcactgagtaaataccctctatctctggatcccagttaaaggacctaacagacactagattacsaagaatggctttttctttaaggtttagttctgggccgggcatggtggctcacacctgtaatcccagcactttgggaggccaaggcgggcggctcacttga

SEQ ID NO: 15861 - DNA, 201 bp, Homo sapiens
gtgcaccccactcccagccatggcaagtggctctctacgagcgtggacgctttaactgtggcgcttccctcatctccccacactgggtgctgtctgcggcmcactgccaaagccggtatgaaggcaggggctcagggtcctgagggagcctggttcggggggaagagctcctagatttgggggaagacggaggcagacgcc

SEQ ID NO: 15862 - DNA, 201 bp, Homo sapiens
caacacacatgaccacccgtgtgatcttgaacaagaggcccaatctcacttcgccttggtttccttatctgtaaaatgagaccatcttattgctgacttcmaagggctgttgtgaggattaaatgagatgattcgtctgaactgattaaaatcgtgtctggcactgagtaaataccctctatctctggatcccagttaaag

SEQ ID NO: 15863 - DNA, 201 bp, Homo sapiens; identical to SEQ ID NO: 1872

SEQ ID NO: 15864 - DNA, 201 bp, Homo sapiens; identical to SEQ ID NO: 1873

SEQ ID NO: 15865 - DNA, 201 bp, Homo sapiens; identical to SEQ ID NO: 1875

SEQ ID NO: 15866 - DNA, 201 bp, Homo sapiens
gttgggttggctctgtttgggataaactgggctgtattgagttgagttgggttggggttccctgggatggggatggattgggtttggggtgagattgcaamtggtgattaggatgaggatgaatccaggaggtttcactcaacctgagaccccctcttttccccacagggtgactctgggggacccctggtctgtgggggc

SEQ ID NO: 15867 - DNA, 201 bp, Homo sapiens
cggatggggttggattttctttgctttgggccagagaagatgctagggttaggcttggagatggagtaggaagagaagttagaataggggtgaggttggarttggggttataggtggggattgcgttgtttgaggtggataatgtgatagttagtttgagatggcatgggttggggttgagaatgggaatggtttggtttg

SEQ ID NO: 15868 - DNA, 201 bp, Homo sapiens
agtagtcctggagaggtggcctctgcgatgtgcccgcaggggcagcgtcctgcagatggtcctgcccctcctccccctaacctgtctgcaggcactgtccwcctggaccctgccccatgtgcaggagctggaccctgaggtcccttcccccttggccaggactggagaccctgtcccctctgtgggaatccctgcccacct

SEQ ID NO: 15869 - DNA, 201 bp, Homo sapiens
ccaggatccagattccagacccccagcccaagaactcagactttgaaatccatattccagactgcaggtcattaatctccaactcaagatcctcaaatccrgaatccaagacccagatccagaaccagatccggatccagaacccgggatccagaactctgccccaagcccaagaacagggactttaggatccagtttcca

SEQ ID NO: 15870 - DNA, 201 bp, Homo sapiens
atctcaccccccacaccagagttcaccgttcctcgtggtaatgtgttgttaccgtcgagtcagagagtagtcctggagaggtggcctctgcgatgtgcccrcaggggcagcgtcctgcagatggtcctgcccctcctccccctaacctgtctgcaggcactgtccacctggaccctgccccatgtgcaggagctggaccct

SEQ ID NO: 15871 - DNA, 201 bp, Homo sapiens
gccacttttgtccttgaaagtgaggctggagccaggcaactcatgcctgtaatcccagcactttgggaggctgaggcgggtggatcactagaggtcaggakttcaagaccagcctggccaacatggtgaaactccgtctctactaaaattacaaaaattagctgggcgtggtggcacacacctgtaatcccaattgcttgg

SEQ ID NO: 15872 - DNA, 201 bp, Homo sapiens
tgttgttaccgtcgagtcagagagtagtcctggagaggtggcctctgcgatgtgcccgcaggggcagcgtcctgcagatggtcctgcccctcctccccctracctgtctgcaggcactgtccacctggaccctgccccatgtgcaggagctggaccctgaggtcccttcccccttggccaggactggagaccctgtcccct

SEQ ID NO: 15873 - DNA, 201 bp, Homo sapiens
ccacttttgtccttgaaagtgaggctggagccaggcaactcatgcctgtaatcccagcactttgggaggctgaggcgggtggatcactagaggtcaggagytcaagaccagcctggccaacatggtgaaactccgtctctactaaaattacaaaaattagctgggcgtggtggcacacacctgtaatcccaattgcttggg

SEQ ID NO: 15874 - DNA, 201 bp, Homo sapiens
  misc_feature (101)..(101): n is a, c, g, or t
ctgcgatgtgcccgcaggggcagcgtcctgcagatggtcctgcccctcctccccctaacctgtctgcaggcactgtccacctggaccctgccccatgtgcnggagctggaccctgaggtcccttcccccttggccaggactggagaccctgtcccctctgtgggaatccctgcccaccttcctctgggagtgggcactgga

SEQ ID NO: 15875 - DNA, 201 bp, Homo sapiens
gcgatgtgcccgcaggggcagcgtcctgcagatggtcctgcccctcctccccctaacctgtctgcaggcactgtccacctggaccctgccccatgtgcagkagctggaccctgaggtcccttcccccttggccaggactggagaccctgtcccctctgtgggaatccctgcccaccttcctctgggagtgggcactggagg

SEQ ID NO: 15876 - DNA, 201 bp, Homo sapiens
ttttctcccgggttcgtagtctcatttccagatgatctccagtgtgtggacctcaaaatcctgcctaatgatgagtgcaaaaaagcccacgtccagaaggwgacagacttcatgctgtgtgtcggacacctggaaggtggcaaagacacctgtgtggtgaggcagccctgcccccagggtctggaagggctgagggagggg

SEQ ID NO: 15877 - DNA, 201 bp, Homo sapiens
gccagtctcgtaggggaggcagacaccactgagggtcaggggaggtcagagaaggcctcaaggaggaagcggggctggaagggaatggcgttggatatgcrgtgggaggaatagcctaagcatgaaatggcaggagggaaaatggcagcactggctgcgtctaggacaaggtcatgggagacccagggagaggggctggaa

SEQ ID NO: 15878 - DNA, 201 bp, Homo sapiens; identical to SEQ ID NO: 6804

SEQ ID NO: 15879 - DNA, 201 bp, Homo sapiens
atgtggtgatgtgtaccccaaaattttattatgaaaggaacagtagctttggggacctaggtcctgggtctgggagtgcaagaaccagggcattctgaagkccaaggcttatatttcagggggaactggcagctgagatgctagtatcttggctccgagtggtgcagggaatcagagccctaactgctggtgtttgagggc

SEQ ID NO: 15880 - DNA, 201 bp, Homo sapiens
gcgcggcgggagcgccctcagtgtccccgtctgtatcaggggtgcttcatcagtacctgcctaggctggttaggaggaggagcacgtgcgatcgtgacggraagcgctcagcacagacctggcaccgaggaagtcccaggggctcggctcctttccctcgtcaccaccgcgccccaacagagggaggcggctgcaggggtg

SEQ ID NO: 15881 - DNA, 201 bp, Homo sapiens
gaccctgacatctggtctccccagtccttccagggtcccccaaatttcaccagaaaaccctgcttcccaaactggcatgtgggatcccccatctggtatgkgggggggtctgcaaatgtcccttcccacccagcacccccagctctcccaggaaaaacaccacaccctcccaccacatgctcctttccttggggaagttcc

SEQ ID NO: 15882 - DNA, 201 bp, Homo sapiens
gctgcagccctttttctcccgggttcgtagtctcatttccagatgatctccagtgtgtggacctcaaaatcctgcctaatgatgagtgcaaaaaagcccaygtccagaaggtgacagacttcatgctgtgtgtcggacacctggaaggtggcaaagacacctgtgtggtgaggcagccctgcccccagggtctggaagggc

SEQ ID NO: 15883 - DNA, 201 bp, Homo sapiens; identical to SEQ ID NO: 1895

SEQ ID NO: 15884 - DNA, 201 bp, Homo sapiens
taacgttctgccacaaatgaccctcactcctgggggcccctgagacccccacgcctccagcctcccctccggctctctctgtgcactcacctacctgcctygcgcctgcctgctgcgcccagctggggcctccaccttcctctggcttggactggccaggtgcagcctcggtgcccagctgttcagcccgtaccctccgcc

SEQ ID NO: 15885 - DNA, 201 bp, Homo sapiens
aagaaattaattgtaacctgatgcctctcttctggagaaattggggggtggactttcattaacgttctgccacaaatgaccctcactcctgggggcccctsagacccccacgcctccagcctcccctccggctctctctgtgcactcacctacctgcctcgcgcctgcctgctgcgcccagctggggcctccaccttcctc

SEQ ID NO: 15886 - DNA, 201 bp, Homo sapiens
tgtgacactggatgccaagactcacactagagatgttgaatttaggtctgaacaatatccaattctgtgtgtgtgtttgtgtgtgcatgtgtgtgtgtgttgtattcatgtcttaaccatccatattcatatacacatatgaacatctgtgctgtgattcttttttttttttttttttttttttgagatggagtttcactc

SEQ ID NO: 15887 - DNA, 201 bp, Homo sapiens
ctgtggttctaggctattctaaaatcttaccttccagagtgtcctccactgccagaatgtcttagggcctgtgcttttagaatctgaaagtctgatattcyagaaattccaggggcctgtagttctagaatggctgaatccttcccataaagatgatgactttccacacatggggagagaccacgcttacaacaggtccca

SEQ ID NO: 15888 - DNA, 201 bp, Homo sapiens
ccaagaaattaattgtaacctgatgcctctcttctggagaaattggggggtggactttcattaacgttctgccacaaatgaccctcactcctgggggcccytgagacccccacgcctccagcctcccctccggctctctctgtgcactcacctacctgcctcgcgcctgcctgctgcgcccagctggggcctccaccttcc

SEQ ID NO: 15889 - DNA, 201 bp, Homo sapiens
aggcagaagcataagcctggcccaggtagtgccccttcaggtgtgcaagccaggcacggtgcttagagcttacatacaacgtctatgtgtggtgggcaccmccgacctcatttgacaagggaaggggctgtggctcagagggacggccacaacatcaaggtcaccttgggtgtcaggcaaactccagattgaactcagctg

SEQ ID NO: 15890 - DNA, 201 bp, Homo sapiens
agtcccacacctgccactccctgtctcttacagggtctttgaggggattaaatgtggttgtgtgtgaggcagaagcataagcctggcccaggtagtgcccyttcaggtgtgcaagccaggcacggtgcttagagcttacatacaacgtctatgtgtggtgggcaccaccgacctcatttgacaagggaaggggctgtggct

SEQ ID NO: 15891 - DNA, 201 bp, Homo sapiens
ttgaacccagaaggcagaggttacagtgagcggagatcacgccactccactccaacctgggctacagagccagactccgtctcaaaaaaaaaaaaaaaaaagaaaaaaaaagaaagaaagtgaatttgaagagctggactttatcctggtggtgccaaggatccatggagggtggtgagcaggggaggggcacagccagct

SEQ ID NO: 15892 - DNA, 201 bp, Homo sapiens
gcggggctggaagggaatggcgttggatatgcggtgggaggaatagcctaagcatgaaatggcaggagggaaaatggcagcactggctgcgtctaggacarggtcatgggagacccagggagaggggctggaagggaagaagccacttttgtccttgaaagtgaggctggagccaggcaactcatgcctgtaatcccagca

SEQ ID NO: 15893 - DNA, 201 bp, Homo sapiens
tgtagtctaggccccaggcttctcatagcaggtgcaaaggtttccagcctcgattgccagattccaaacaccagattccaggctcctattgtgggttctarattcgaatgccccgggatccagaatcaaggttcacgatctgtcactcaaaggcccgactccaggatccagattccagacccccagcccaagaactcagac

SEQ ID NO: 15894 - DNA, 201 bp, Homo sapiens
ctgggcgtggtggtggtcgcctgtaatcccagctactcaggaggctgaggcaggagaatctattgagcccaggaagtggaggttgcagtgatctgagatcrcgctattgcactccagcctgggtgacaagagcgaaacttcatctcagaaaaaaaaaaaaaaaaagaatccagaccccacaattcaaaatcccaaatctac

SEQ ID NO: 15895 - DNA, 201 bp, Homo sapiens
gtaatcccagcactttaggaggctgagtcaggtggatcacttgagatgaggagttcgacaccagcctggccaacatggtgaaaccctgtctctactaaaartataaaaattagctgggcgtggtggtggtcgcctgtaatcccagctactcaggaggctgaggcaggagaatctattgagcccaggaagtggaggttgcag

SEQ ID NO: 15896 - DNA, 201 bp, Homo sapiens
acagatttgaaactccagactgtatgttccaaagtctactcctgaaagctcagaggctagatccaccctgtagaatccagaccccaagcctggcatggtgkctcacgcctgtaatcccagcactttaggaggctgagtcaggtggatcacttgagatgaggagttcgacaccagcctggccaacatggtgaaaccctgtct

SEQ ID NO: 15897 - DNA, 201 bp, Homo sapiens
ccgctgaaagtttagaaaacaaagagcaggagagcccagatctgtggaaggtccggccccagtccgcgtcccactcggcagtaaacacgcgaaccacgatmtgctctcgttccgtcgcggactcatttcttaccagacgtttaaggatttgtttatagaaacagcctttctgaattgccccggtgatggggccatacaacc

SEQ ID NO: 15898 - DNA, 201 bp, Homo sapiens
tcgccgtcttgcacaaagaatatccttcaagaagaacgctccaaaagaaaaacagcctattttaaaatgcccgactcctgcgtcggcgaaggccatccctrctgttttgaatttcagaacattaaaaacacaaaactagagaagctatacagttcaactgcataacataacaaaatggattatttctcccgtgtcttctaa

SEQ ID NO: 15899 - DNA, 201 bp, Homo sapiens
aacactctttctactgccatcacactcaaagaggaaactctaatctctcaatacgccagcaaaatacctgcaactgaaccaacaccctgtctttatttctycaccagacaacagctgaaagaacgccctccctgatagggctcagcagcttatttctatcagagttaagtggtctagcaccttcccggctaaaaactgaac

SEQ ID NO: 15900 - DNA, 201 bp, Homo sapiens
ataaacaacactctttctactgccatcacactcaaagaggaaactctaatctctcaatacgccagcaaaatacctgcaactgaaccaacaccctgtctttwtttctccaccagacaacagctgaaagaacgccctccctgatagggctcagcagcttatttctatcagagttaagtggtctagcaccttcccggctaaaaa

SEQ ID NO: 15901 - DNA, 201 bp, Homo sapiens
tacacaaacaagcaaaaggggaggatgagagtggtcattcgggtttgctttggaggtccagagaaaatgcaagtccaacttccaggcacagaccagttgcycgcagcaggcttcctcccattggtctcagaccaaggtgagccactcccccgggcgggacagagaaagctcctctggaagccagacaagctcggccacctc

SEQ ID NO: 15902 - DNA, 201 bp, Homo sapiens
aaaagaaaccctgtgcccaccagcagtcactccccattccatccgcccccagcccctggcaaccactcatctaccttctgcctctatggatttgtttattytagacatttcacataaaccggatcatacgatatgtggtcttttgtgactgacttctttcactttttgtgatatttttaagcttcatctattcaaccttag

SEQ ID NO: 15903 - DNA, 201 bp, Homo sapiens
taggtgttcatccctcaccataaaagaaactactttctgttgtggtccagtgaaaacagaagagcaatctatgagtttacaaattcttgtaggctgggggyggtggctcgcacctgtgatcccagccctccgggaggccgaggtgagtggatcgcttgagtccaacctgagcaacatagcaaaacctcgtctgtactaaaa

SEQ ID NO: 15904 - DNA, 201 bp, Homo sapiens
cctgttgctaagcttcaattatcagtttgttgtattgctgcaactcacggatctgaaaaactcataaatgaaaagagagagagacatcagcctgtcaaatrtatgtaataattttaacgtaatttaaggtagcataacaagttattttcaacctgatcacatttctttaaaaaaaaaaaaaaagggtttattgagatataa

SEQ ID NO: 15905 - DNA, 201 bp, Homo sapiens
ctccaggagggtttaaaagcacactacagacataaatcggtgccaatgaattattcattacatcttatctatagggaacttatggaacaaagtctccatcyacagggatgaggtgatcttgacacaaggccagactcacaaattacccttccaggagttctaattttttttattcacctcaatgtgcaaaaagcctaatca

SEQ ID NO: 15906 - DNA, 201 bp, Homo sapiens
ctttcccagtgtgctcactccatcctcactcataaaagcatctggttccattccacagctgggcacaccttatcttctcaagagacaatgtaagctctttwtaaaacaggggctgcattttacacacctcacatacctcctgcaggtccccgaacatccaaacactccaaatttgtctctgtctccaaatcctacaaaacc

SEQ ID NO: 15907 - DNA, 201 bp, Homo sapiens
agttcatggaaaagggaagagaaaacctcacatgggtttgtatacccttcatttaagcacactgtcttcaggcagcagaggtttcaaggtgcatgctaaamacccttgcgcaggtttcagagagcagataaaaggggctaaccaggctctcaggaagcccaatccgcacacgcacggagccgagccagtggaaaccataag

SEQ ID NO: 15908 - DNA, 201 bp, Homo sapiens
gcactacacatgaagaattaaagtccagtctactaatttttaaatatttcttaagttctctgcatgaggttggtcttgattcctgcagatccactctggarttaaatgcaaaggaatattgatatataatttcattatacttgatttcagaatttttaatacatacttgtaagacaaaaatttagagctgatttttaaaag

SEQ ID NO: 15909 - DNA, 201 bp, Homo sapiens
ataatccaatggttttaagtatatttagagctatgcagccatcgccacaaactaattttagaacaattttcatcaccccaaaaagaaaccctgtgcccacyagcagtcactccccattccatccgcccccagcccctggcaaccactcatctaccttctgcctctatggatttgtttattctagacatttcacataaaccg

SEQ ID NO: 15910 - DNA, 201 bp, Homo sapiens
taatccccaagaatgctacgtggcacagtagctcatgtctatcagcccaactacttgggaggttgaggcaagaggatcacttgagcccaggagttcaaggytacagtgagccatgatcacaccactgcactccagccaggataataaagacctcatttttttaaaaaaaagtaaaataaaataaaaagatgctcccatgtg

SEQ ID NO: 15911 - DNA, 201 bp, Homo sapiens
ctgtctttatttctccaccagacaacagctgaaagaacgccctccctgatagggctcagcagcttatttctatcagagttaagtggtctagcaccttcccsgctaaaaactgaacgcccgttcacaggcatagcttttaattctccacatttcagagatggagggaggggcaggtactgagtcagtcaagacttcagcaaa

SEQ ID NO: 15912 - DNA, 201 bp, Homo sapiens
tcagccccagcagcggagacgcggtgcggcccagggtgctgtcgctgctgcctgcgcgccgcagggggatcagcgctgtgtgcggagaggctcgtgcgcayggaaggggcgaggtgcgggtcgcggggcccgggaaccgcggagcccgccccggcaccaacttccctaccgagtcctcgcgcctagccgggaaacacggct

SEQ ID NO: 15913 - DNA, 201 bp, Homo sapiens
gggatcctggggggaagctttggtatcatggagtaaaaacatacattaaaacaccccctccctcctgcctgtgttctcaaaaatcgccgtcttgcacaaasaatatccttcaagaagaacgctccaaaagaaaaacagcctattttaaaatgcccgactcctgcgtcggcgaaggccatccctgctgttttgaatttcaga

SEQ ID NO: 15914 - DNA, 201 bp, Homo sapiens
tgcccggtcagccccagcagcggagacgcggtgcggcccagggtgctgtcgctgctgcctgcgcgccgcagggggatcagcgctgtgtgcggagaggctcktgcgcacggaaggggcgaggtgcgggtcgcggggcccgggaaccgcggagcccgccccggcaccaacttccctaccgagtcctcgcgcctagccgggaaa

SEQ ID NO: 15915 - DNA, 201 bp, Homo sapiens
cagaaccagcctcgggcccagccggcccaactcagaaaaaggcaggggtcagtctccagcctggactcctctaaaaatcagaaagcagtgccccagcaaaygaacaacaacagcgctcacctgaaacagtttcaccttcatttttagaggagaggaacacaataggagggcgtattactccacgggttttaaccctagccc

SEQ ID NO: 15916 - DNA, 201 bp, Homo sapiens
taacaagttattttcaacctgatcacatttctttaaaaaaaaaaaaaaagggtttattgagatataattcacataccattaaagtccccgatttaaagtayataatccaatggttttaagtatatttagagctatgcagccatcgccacaaactaattttagaacaattttcatcaccccaaaaagaaaccctgtgcccac

SEQ ID NO: 15917 - DNA, 201 bp, Homo sapiens
agtaaggcagaggttgcagtgagcggagattgcaccactgcactccagcctgggcaacagagcaagactgtctcaaaaaaaaaaaaaaaaaaaaagggccytattcaactggcagcaattccccagtgttgtggggaaggaggactggaggccccagagagagcccaccagggccacccaccatgaggaggagaaaaaaag

SEQ ID NO: 15918 - DNA, 201 bp, Homo sapiens
gtgctgagtaagctgtagttctttcgacttatcgccttcatacttgcctgtccaaacaaaaagatctcaagaattccactgaaatagtccaaacaagagcytaaacttacaaagctgtttttcagagctcaatagtacaacaacaggaagtagaacttctgggatggggattttgctatttattttttctttcaatggcca

SEQ ID NO: 15919 - DNA, 201 bp, Homo sapiens
ccatctctctctctgcctagtatcttgagatctgaaggctggaagggcctgtgaaatgacctaggtccaccctgtaactcaaggtcagcaggtgtgcaagyaccctacccacccaactttctgagatgccaccctggccctctgcaccaggccactccggagaccaccaggcagccgagtccagcctgcagatgcttcctc

SEQ ID NO: 15920 - DNA, 201 bp, Homo sapiens
aaggcgaagcctctagcccttttctacttttaggatgctcagattcttgcctgcagaggtcaatccctttctttcaagggctcccccctctgtaatgaggsagtccatttacaataaaaaaaaaattgagctgtcaaaacaaatgaaaaacttccagtataatcataatcagtgagggaatcaaacatctaaacaaatctc

SEQ ID NO: 15921 - DNA, 201 bp, Homo sapiens
atcaaacatctaaacaaatctctcttctggaaaaataagaaaatgaaaaagcaattacacgtcacatggctgattagcaataaatttcatttgtgactacrgtggcatgagagtttgactcctgacttgctttccttgaaagaaaaaaattatctgcaatactgtctcttgatatagaaaacagacccattccatctgact

SEQ ID NO: 15922 - DNA, 201 bp, Homo sapiens
gaatggtgtcatgaaacaagactggggggaaaagggagaaggcctgctttctagtcgagaaaagcggagaccgtctgaaactctacttgctccaacaggtsaacgtgattgaaaattcagaattcactctcctaatagcaggaaagtgttacaaaagcccacaggccaaatgataccaccctcccaggaagtctcttgcag

SEQ ID NO: 15923 - DNA, 201 bp, Homo sapiens
tttctagtcgagaaaagcggagaccgtctgaaactctacttgctccaacaggtgaacgtgattgaaaattcagaattcactctcctaatagcaggaaagtrttacaaaagcccacaggccaaatgataccaccctcccaggaagtctcttgcagaactgtgttttttaatgttatttgtcaagtgaaaacagttacagtgg

SEQ ID NO: 15924 - DNA, 201 bp, Homo sapiens
ggcgcgtgcacgctgcgggtctccgaagctcggggggcgtgtccgggtcccggggcgccgaggagggggtggaggctggggccgggaagcctcccttggcygcggtcccgacccgggaacacgccgcatgcactcgggatcagcggctactgcggaaacccacccgcacctgtctcgggtcctcccaggcacgttcctctt

SEQ ID NO: 15925 - DNA, 201 bp, Homo sapiens
aatgtgcaggaggagaggtttccccaaagcgagactcccctaggactgccatctaatgaataaatgctgcggagaccaggtcctcaaagagggaaacagcycagcagtggcaggagagaggagtttgaaatacgtggacttttacaaacagtgattggaccatgtgtcgcccttaatgtggtccggtttcatgactcaggc

SEQ ID NO: 15926 - DNA, 201 bp, Homo sapiens
agaggaacacaataggagggcgtattactccacgggttttaaccctagcccttgatgctaccaggtatccatgatgcccctaataaaggtgacagttcctycacttttctaacatccagctattctttaaaaaagttgaacactgcagtttccggagaactttgctatgtgaattgcctcactgcaggtgtgctctcccct

SEQ ID NO: 15927 - DNA, 201 bp, Homo sapiens
ttgacacaaggccagactcacaaattacccttccaggagttctaattttttttattcacctcaatgtgcaaaaagcctaatcaaacaatgattttaaagawaattttattgctttcaagttccatgcagcagtaactggtgtgataaaatgttttggctagcagaggtgcaatgatcagatgaaaataaatttgttgtaca

SEQ ID NO: 15928 - DNA, 201 bp, Homo sapiens
tcctcccaggcacgttcctcttgcttcgtttgctacgtaagtgactggaaaccagtaccgaccctaagtctccgcggttgttttcttgaatgtgcaggagsagaggtttccccaaagcgagactcccctaggactgccatctaatgaataaatgctgcggagaccaggtcctcaaagagggaaacagcccagcagtggcag

SEQ ID NO: 15929 - DNA, 201 bp, Homo sapiens
accacccatcaggtttccaggaactaaccactgtaaagggatcctggggggaagctttggtatcatggagtaaaaacatacattaaaacaccccctccctyctgcctgtgttctcaaaaatcgccgtcttgcacaaagaatatccttcaagaagaacgctccaaaagaaaaacagcctattttaaaatgcccgactcctgc

SEQ ID NO: 15930 - DNA, 201 bp, Homo sapiens
ttttggagctttaaatttattaaagtcctgtaaaattatcttaaaactctaactgtaaaagacacactaggtgttaacagctctgccatggagttgcagtrcgcctgtctgcatcacttaggaagaccctaattctctcaggacagctcgcactgacacagtagagtaaccttaatccaaaactgtagcccagtgatttct

SEQ ID NO: 15931 - DNA, 201 bp, Homo sapiens
gtctatctgtcccccaatcctgactccatcgagagaccagagcagcctccccagaacacccttctcagcgggtccactgcaatggtgcaaaggtttcagcrctcctcattctctagccagcagtcaattccttcccaccacacaaacaccggattctgacaccctctccactccatcagtgcacactgccacccacaccac

SEQ ID NO: 15932 - DNA, 201 bp, Homo sapiens
tctgagatgccaccctggccctctgcaccaggccactccggagaccaccaggcagccgagtccagcctgcagatgcttcctcctcaggaacccagctccargagggtttaaaagcacactacagacataaatcggtgccaatgaattattcattacatcttatctatagggaacttatggaacaaagtctccatccacagg

SEQ ID NO: 15933 - DNA, 201 bp, Homo sapiens
aaactagagaagctatacagttcaactgcataacataacaaaatggattatttctcccgtgtcttctaaaccgtacttatcttttaaagataaaaaccctyctttgtccccccagccaccacctaaacgacttagtaaagggagccggaaggctttcgcccaatcgagtccgctgaaagtttagaaaacaaagagcaggag

SEQ ID NO: 15934 - DNA, 201 bp, Homo sapiens
gtaagctttcttctgtccagaggtcgggagctggcctcaccgtcgccctaccaggacactgtcaaaggccttcaccagcaaccaaaaccggcagggttggrgagggtgcttcaatgatagagagacctgtaagaccttgctactgtccctcccaggagtgaggcaaaagcttactggcctcaccaagaaaacaatgcaaaa

SEQ ID NO: 15935 - DNA, 201 bp, Homo sapiens
aatgaaacaactaaaaagtcactgcccagggatttgagtcttttctttccacttctattattgagagagcctccagaagactacagctaagagggctgttattttcctactagaagagcagctgaggaaaggtaaaacagagcgagaatgatcatctatttactgtacaaccgctagtccgccactaagagaagtatgcaa

SEQ ID NO: 15936 - DNA, 201 bp, Homo sapiens
agctgtttttcagagctcaatagtacaacaacaggaagtagaacttctgggatggggattttgctatttattttttctttcaatggccacttttaagcaaragagaaaaaagtctacaggcattacaaatcctggaagctatgaatcaggaagtgggaaatggctgatcctgaaatggccagcctgaaaatcctggctctt

SEQ ID NO: 15937 - DNA, 201 bp, Homo sapiens
aaatgtaatgtatatcatatacatcaagtgcaaacgtgagaaacagcacaacaattgacaagtatcaagtaatacagtatattgtgatgtattcgcagaarggaatgttagcagcaaaagtgaataaactacagccccacacaacatgggcagatctttgaaacacactgagtaaaaatatacaaatatcaaaaacgcaca

SEQ ID NO: 15938 - DNA, 201 bp, Homo sapiens
aaatgaaacaactaaaaagtcactgcccagggatttgagtcttttctttccacttctattattgagagagcctccagaagactacagctaagagggctgttattttcctactagaagagcagctgaggaaaggtaaaacagagcgagaatgatcatctatttactgtacaaccgctagtccgccactaagagaagtatgca

SEQ ID NO: 15939 - DNA, 201 bp, Homo sapiens
caactgggactgctctctcgacaaaccaccccagcccacagctcctctggcaacccagcccctcacaccgaggacccatctcaccagtcacctccctcagstgggccaacctgtccagtccattcctgcttcctggtctcaggtctagagacaagacttccctccctgagcctgtcctcactgcctccctcatctatacca

SEQ ID NO: 15940 - DNA, 201 bp, Homo sapiens
gtgattctcccacctcagcctcccgagtagctgggactacaggcgcacaccaccacacgcggctaatttttgtattgtatttttcgtagagacggggtttygccgtgctcgccaggctggtctcaaactcccgaccacaggtgatccgcccgcctcggcctcccaaagtgctgggattacaggcgtgagccatggcaccca

SEQ ID NO: 15941 - DNA, 201 bp, Homo sapiens
atgaggaaaggagagcagagagggtcaataacgtgccccggtacaatgcatcagtagacttctaattctccaaccctcatctcagaggggaatggtgtcakgaaacaagactggggggaaaagggagaaggcctgctttctagtcgagaaaagcggagaccgtctgaaactctacttgctccaacaggtgaacgtgattga

SEQ ID NO: 15942 - DNA, 201 bp, Homo sapiens
aaatgctgcggagaccaggtcctcaaagagggaaacagcccagcagtggcaggagagaggagtttgaaatacgtggacttttacaaacagtgattggaccrtgtgtcgcccttaatgtggtccggtttcatgactcaggctaattgatgccagtaataaatttttttaagatagctaataaaagagttgtgaattgtcgag

SEQ ID NO: 15943 - DNA, 201 bp, Homo sapiens
caaatgaaacaactaaaaagtcactgcccagggatttgagtcttttctttccacttctattattgagagagcctccagaagactacagctaagagggctgttattttcctactagaagagcagctgaggaaaggtaaaacagagcgagaatgatcatctatttactgtacaaccgctagtccgccactaagagaagtatgc

SEQ ID NO: 15944 - DNA, 201 bp, Homo sapiens
gcaaatgaaacaactaaaaagtcactgcccagggatttgagtcttttctttccacttctattattgagagagcctccagaagactacagctaagagggctgttattttcctactagaagagcagctgaggaaaggtaaaacagagcgagaatgatcatctatttactgtacaaccgctagtccgccactaagagaagtatg

SEQ ID NO: 15945 - DNA, 201 bp, Homo sapiens
agtcttgctctgtcactcaggctggagtgcaatggcgccatcttgtctcgctgcaacctctgcctcccaggttcaagtgattctcccacctcagcctcccragtagctgggactacaggcgcacaccaccacacgcggctaatttttgtattgtatttttcgtagagacggggttttgccgtgctcgccaggctggtctca

SEQ ID NO: 15946 - DNA, 201 bp, Homo sapiens
ttctatgaatgtttaaagtagattctattaaaattataatttcacagatgaggaaactgaggcacaagaagattaaattatttgcctgagagcttagctastgaagagctgagattcaaaccagccactttggctccatggtcctaataaaattacaagcaaggaacaagacaaatcactgtcaaccagcaaaaccgtggg

SEQ ID NO: 15947 - DNA, 201 bp, Homo sapiens
ggggtgggcggggagtgcggggctgggagaggttcattgaaaacaacaacagcgcggctggaaagcgcgtttccccggttcttgaaaagcttcattgtttmttgcagctgttgcaaaataaataaatgcgtgcatgcggcatttttttcgctgcgtactggaaagcccgaacgtggcggaaggggcgcacctgggagaaag

SEQ ID NO: 15948 - DNA, 201 bp, Homo sapiens
caaataattccaaagccagtttgagaaagctagtgccatgttaaaaagaaaatggttgaacaaaagtatacaaaacagcaacaacaatgtatttcaaactygcagaatttggacgatggacggatggatggagatacacaattctgaacaaacggcattcgtattatgtaactcttactgaagtagagacctatggtatta

SEQ ID NO: 15949 - DNA, 201 bp, Homo sapiens
gatcatgggctcctacctggaatttctctccatgcttcctactttttccaggaagttatcaaaggtcactaagacgctttgaatttggggaaaactcctayaaataaattcatctctccctaattaccattagacttctgttctttaaagttctattgactaaactttggctgacttaaattggtgatgtctcatttacgt

SEQ ID NO: 15950 - DNA, 201 bp, Homo sapiens
ttaatactttgagtcaaataaaaccaaagcaatttaacaaaagaaaacatcatgccgaggaagtatgcttctcttgagataacaatctaacttgttttaaagatcctttgtttactaaccattttatattccaaatatatgttccttcctcagaacaaatcaattcttttccagaccctcggggatgggggtgcaggcatg

SEQ ID NO: 15951 - DNA, 201 bp, Homo sapiens
gggtgaaattacagctaactcttaaaggagcttgccagagggcaagctggtagtattgtttgctattccaagcagaggggcttccacctgccaagacaaaragacacgaatgagtacagcctgaactgttcaaaatgtctgggaggaagggaggctgaagttctctctcagacagccaaacaaagatttccgaattaaaaa

SEQ ID NO: 15952 - DNA, 201 bp, Homo sapiens
ttgttaatactttgagtcaaataaaaccaaagcaatttaacaaaagaaaacatcatgccgaggaagtatgcttctcttgagataacaatctaacttgtttwaaagatcctttgtttactaaccattttatattccaaatatatgttccttcctcagaacaaatcaattcttttccagaccctcggggatgggggtgcaggc

SEQ ID NO: 15953 - DNA, 201 bp, Homo sapiens
ggagctcaagtcagtgcaatcattctgcatgcagaatcaaggccagagagagggtgaaattacagctaactcttaaaggagcttgccagagggcaagctgrtagtattgtttgctattccaagcagaggggcttccacctgccaagacaaagagacacgaatgagtacagcctgaactgttcaaaatgtctgggaggaagg

SEQ ID NO: 15954 - DNA, 201 bp, Homo sapiens
ttaaataataaaataatatttttcctttgttttgcttttgttttagcaaaagaattaatgaaggatgtgaattcctttggagaggatgagaagcccatagscacatgggtttccattgtaatttggaaatgagttcactcttggattgagtgacggatttacaaatttccattttataagtatgcttaataactaacacat

SEQ ID NO: 15955 - DNA, 201 bp, Homo sapiens
gagaaagctcctctggaagccagacaagctcggccacctcgaagtcttctttggaatccagcaggtccaggcctgagccctggcgcctggttaaaccaaargatgacaaccaagcagaaaaaaatagccccagagagtatctgctggagaggcagacaggcggacctggccttcgacacacagcatgcgtgccatggtctc

SEQ ID NO: 15956 - DNA, 201 bp, Homo sapiens
tatccttagcaacaatagtatcagctaactcctagtgtttataaaccctaggttctaagaaatgtgtatgtattcactcatgaagtattggtaacgatccyccaagatgggtgacactttttttttttttttttgacatggagtctcactctcgcccaggctggagtgcagtggcgcgatcttggctcactgcaacctcca

SEQ ID NO: 15957 - DNA, 201 bp, Homo sapiens
tggcacccctctttaaacaaactgttcctcttcacttgcatggtaaggactggaaagagccctgccgcgttggccagctcttcagggtagcgggggccacygccctctcccagcctcgggaagcccaaggccactgcatcagcctggcccagcccagaaccagcctcgggcccagccggcccaactcagaaaaaggcaggg

SEQ ID NO: 15958 - DNA, 201 bp, Homo sapiens
gcgtgaacccgggaggtggagcttgcagtgagccaagattgcgccaccacactccagcctggacgacagagcgagattccatccaaaaaaaaaaaaaaaaatgaagctggttcctaattctgcagtcaaaaaaaaacggcaaatgtagctaggagcaaaacatcagaatcaatacacacccaaagggtattttttttttta

SEQ ID NO: 15959 - DNA, 201 bp, Homo sapiens
ggcgtgaacccgggaggtggagcttgcagtgagccaagattgcgccaccacactccagcctggacgacagagcgagattccatccaaaaaaaaaaaaaaaaatgaagctggttcctaattctgcagtcaaaaaaaaacggcaaatgtagctaggagcaaaacatcagaatcaatacacacccaaagggtattttttttttt

SEQ ID NO: 15960 - DNA, 201 bp, Homo sapiens
gcggcccagggctcggcggagtcgggaacccgaggcgcgccggggcggactgtcggcgtcgtcggcctccattttcaaacccggagaggcaggaagggggraaaactgcaaagaaagggggcaaagcccaaatctgcctaggcgaggaaaaacaagcccggccctggccgcgcgggaggcggccggacgcccgagcttccg

SEQ ID NO: 15961 - DNA, 201 bp, Homo sapiens; identical to SEQ ID NO: 1907

SEQ ID NO: 15962 - DNA, 201 bp, Homo sapiens; identical to SEQ ID NO: 1909

SEQ ID NO: 15963 - DNA, 201 bp, Homo sapiens
tataacatgcatgacattttaaacacaatattttatatcaaggagtcttcatatttagccattaaacttaaattccaacaaaaatatttttcatcttaaaataaatcaaatgtgaagattacggtaatattttttcttgctcgatataaaaatatcgttactaattgtttagcttaaattgccaaactgcaactacatgca

SEQ ID NO: 15964 - DNA, 201 bp, Homo sapiens
gcattaaaaaaaaaaaaacttttggccaggtgctgtggctcatgcctataatcccaacactttggtaggccaaggagggatgattgcttgagcccaggaatttttttttttttttttttttttttgagacagagtttcactctgttgcccaggctggaggtgcaatggcgcgatctcggctcactcccgggttgacgccat

SEQ ID NO: 15965 - DNA, 201 bp, Homo sapiens
gcctctgtccaaagaacagaattcagcaaacgaaaaccaaaatgttaaaggttttaagtttccaaatatctaacatcttcctttctcaaataagctatatwcaattcgagttggttctgtttaatttttaaaagtttgcttcccttcccaccaccactcccccaaaaccagcactatcatcaaacagcctgacaagaatct

SEQ ID NO: 15966 - DNA, 201 bp, Homo sapiens
tgaggcaggagaaccgcttgaacccaggaggcagaggttgcagtgagctgaggtctcgccactgcactccagcctgggctacagagcaagacactgtctcaaaaaaaaaaaagaaagaaagaaaatcttgcctcatgtagctacatggtcaagatttttgaaaattgaacccaaattctgaccataaagatggctgaatta

SEQ ID NO: 15967 - DNA, 201 bp, Homo sapiens
gggtgaggcaggagaatcgcttgaacccgggaggcagagtgcagtgagccgggatcacgtcactgcactccagcctggcaacataaccagactctgtctcaaaaaaaaaaaaaaaagaaagaaagaaaaagaaaaaaaaaagaaataaaaaggaaaaacacaaatcactcataaggtcataagactaccttctgaatataa

SEQ ID NO: 15968 - DNA, 201 bp, Homo sapiens
cctagttaccctcatgcaaggaaagcatcactttttatggcagttataaaggtcaggccatgggaaagaaaggcttctcttgtccttacaattgtacattrctaaataaatgaattagtgttttggattttgcagtggtgccttgtgagtttgattgtgtggtagcacaatctgagaactagactttggtctgtggtaggc

SEQ ID NO: 15969 - DNA, 201 bp, Homo sapiens
cttgaaggctaaaactaatcacatccttcacgttggcataaatagtatactcaatatgtatactcaaatgtatactcaatagtatactcaaaatgttctcrtattagggcagccttaccctaatattatgtattaggacgatagcagagtacccaggaaatattaaaaacatacactgagtttgtagaaagggtcacatgg

SEQ ID NO: 15970 - DNA, 201 bp, Homo sapiens
ataaacccctgaaaattcaaatataatcctaaaagcagaaagactgacatttaggggaggggaaaggatggataaaaagaacaatactcaacctaccagcytccaaagagaagtcatgcaattgtgaatacatgtcaaccaactgttattaatattccagccaaatcacactgaaaataaaaaatctggtaagagctgtag

SEQ ID NO: 15971 - DNA, 201 bp, Homo sapiens
catggtgaaaccccgtctctactaaaaatacaaaaattagctgggcgtggtggcacacacctgtagtcccaactactcaggaggctgaggcaggagaaccrcttgaacccaggaggcagaggttgcagtgagctgaggtctcgccactgcactccagcctgggctacagagcaagacactgtctcaaaaaaaaaaaagaaa

SEQ ID NO: 15972 - DNA, 201 bp, Homo sapiens
cccacagcttggggagttgaggggcatgtttcagcccatttgtgttaacagctctttcagtgctgccactctgctccagcctgcggctcctggactggccyagccccaccactgcttcccattgtgtggggcagctgcccagtgccggcagaagacaggaaggctatagggttacagctctggcttgggaaatcctgaggt

SEQ ID NO: 15973 - DNA, 201 bp, Homo sapiens
ttacagcatgtcacagccccagctcgaaaccctgaggtctgggctcccagaagggccacagctcttttctccttcttgtcacccacagcttggggagttgrggggcatgtttcagcccatttgtgttaacagctctttcagtgctgccactctgctccagcctgcggctcctggactggcccagccccaccactgcttccc

SEQ ID NO: 15974 - DNA, 201 bp, Homo sapiens
aaagataaaatgctacacataggatatgtgctataggacagtcagagaaaactcttcaaggaaataactttttgagtagtgccctgaagaaagtaagagakaaaaccatatacttagcttagggaagactttacaaggcaaagggtacacctgaggcaggagcgtgatttgtgcttacaatgaaaaatggagtccagtgtg

SEQ ID NO: 15975 - DNA, 201 bp, Homo sapiens
gcaagccagctcatcagaatgaactcatcaccactggtaacattgtggccaggcacagcccctaagtcagctagtcacatttgaagaacttccctttgaatttttttttttttttttttttttttttggagaaagagtcttgctttctcacccaggatggagtgcagtggtgcaatttcagctcactgcaacctccgcctc

SEQ ID NO: 15976 - DNA, 201 bp, Homo sapiens
caagccagctcatcagaatgaactcatcaccactggtaacattgtggccaggcacagcccctaagtcagctagtcacatttgaagaacttccctttgaatttttttttttttttttttttttttttggagaaagagtcttgctttctcacccaggatggagtgcagtggtgcaatttcagctcactgcaacctccgcctcc

SEQ ID NO: 15977 - DNA, 201 bp, Homo sapiens
tgtggtcgctagcagccaattttacatgaccccacccccacctcccttgccattgccaagtccagcggtggacacctgacccaaactggtcaattggatatttttttttttttttgagatggagtctcactctgtcgccaggctggattacaggcacatgccactatgcccagctaatttttggggtttttttgttttttg

SEQ ID NO: 15978 - DNA, 201 bp, Homo sapiens
ataagaaggcaaagcaaggaagcttttattctcaggatgtggaagcatcacccacttctcccagtaagttgtggccgttttcaatttctcaatttctccaycagctcccactttgcagttgtgtcagccaatcacgacagcttcccagacttccgtgcaagtgcctgctttgaggccaaggtggccataaatggcagctcc

SEQ ID NO: 15979 - DNA, 201 bp, Homo sapiens
aactgttattaatattccagccaaatcacactgaaaataaaaaatctggtaagagctgtagtggaaagccacattagcccaccttttaatggtatatatayatacacacacacacacacacacacacacacacacttcttattaaaggtctatttacaaatatgctaggtaaaagacaaacatttttccataatacacagt

SEQ ID NO: 15980 - DNA, 201 bp, Homo sapiens
aaacacaatattttatatcaaggagtcttcatatttagccattaaacttaaattccaacaaaaatatttttcatcttaaaataaatcaaatgtgaagattmcggtaatattttttcttgctcgatataaaaatatcgttactaattgtttagcttaaattgccaaactgcaactacatgcattaccacagaccaaatacca

SEQ ID NO: 15981 - DNA, 201 bp, Homo sapiens
tacacagcttccaagtggaatgggaaaaaaaattactctattcctttttaaatgctttcaagcatggtatgtattatgacttgaaggctaaaactaatcayatccttcacgttggcataaatagtatactcaatatgtatactcaaatgtatactcaatagtatactcaaaatgttctcgtattagggcagccttacccta

SEQ ID NO: 15982 - DNA, 201 bp, Homo sapiens
ttgtaaaactatctcaaagttaacacaacattgtagtttccattgatttttaaactttaaaaactctgccctcagagagcttgctacatggcatgtatatkttgccagacactaaataattttaaagtacctaccccaaatgaactgcagcactgcagagaacagaatgggtccacaccacaaagtaaaatgagaaattcc

SEQ ID NO: 15983 - DNA, 201 bp, Homo sapiens
aataaaaaatctggtaagagctgtagtggaaagccacattagcccaccttttaatggtatatatatatacacacacacacacacacacacacacacacacwtcttattaaaggtctatttacaaatatgctaggtaaaagacaaacatttttccataatacacagtgctgcttaaagaactgcttcagacatctccagaat

SEQ ID NO: 15984 - DNA, 201 bp, Homo sapiens
acccaatccaatgcaggaaagtctatgtacctaccttgtaaaactatctcaaagttaacacaacattgtagtttccattgatttttaaactttaaaaactstgccctcagagagcttgctacatggcatgtatattttgccagacactaaataattttaaagtacctaccccaaatgaactgcagcactgcagagaacaga

SEQ ID NO: 15985 - DNA, 201 bp, Homo sapiens
tggacgacagagcaagagcctgtttcaaaaacaacaacaacaacgaaacgcttcttcaaatgacctggtgatggatgtatgaaatttcttgagaatgaaaygaaactttttgttacacattcataggtaacaattaattgtttaagtggctggagatgctgtattggacttgccccaaacagtagaaggaaggaatatccc

SEQ ID NO: 15986 - DNA, 201 bp, Homo sapiens
taaaaaatctggtaagagctgtagtggaaagccacattagcccaccttttaatggtatatatatatacacacacacacacacacacacacacacacacttyttattaaaggtctatttacaaatatgctaggtaaaagacaaacatttttccataatacacagtgctgcttaaagaactgcttcagacatctccagaatat

SEQ ID NO: 15987 - DNA, 201 bp, Homo sapiens
atctcaagctttagatgtccaaaactgaactctactttccctacaaacctgcttctttggtcttcctcttctcagtaaatgacatctccacccacccatayattcctgccaaaatccagggaatcatctttgatatcccccctccctcaccccccacatccaatcaatcaccaactcctcccacctccaagatatatcttg

SEQ ID NO: 15988 - DNA, 201 bp, Homo sapiens
gtctagaatttcctggggatcaatgggcaactaaccaatacacagcctctacatattatgactactgaaacctttataatacagaaataaaatttaaaagwtttaccattcttcccgctgtgccgtcgctgcttcagagtgtcgtggggaggagtttgaatggctagggaattaacaaccggtacagcaaccaatcaaaat

SEQ ID NO: 15989 - DNA, 201 bp, Homo sapiens
gctttagatgtccaaaactgaactctactttccctacaaacctgcttctttggtcttcctcttctcagtaaatgacatctccacccacccatatattcctrccaaaatccagggaatcatctttgatatcccccctccctcaccccccacatccaatcaatcaccaactcctcccacctccaagatatatcttgattcatc

SEQ ID NO: 15990 - DNA, 201 bp, Homo sapiens
tggagtccagtgtggctaaagtgaaggaaagcaagtataatagatcatacctgagaggtagccagtaatgagcttactcagggtcttgtaaactgtggttrgcactctacttttattatcaaagtcatgagaaaccatggaagggttttgagcagaggaagaacatgacctgactttaagtggaagataatggatgctgtg

SEQ ID NO: 15991 - DNA, 201 bp, Homo sapiens
aaaaggtaccccacgacaggcgggaaaaaatcctggcggctaagtcggtgggaggagacccatggcgagggaggaaaggagggcgggccgaggagcagcawggtgacggctaaaggtggaaacgtgtgtgatgggggaggggggcgataagcaggcaaaggaagaaggaaatgaaggtccggggaacccaacatagaaaaa

SEQ ID NO: 15992 - DNA, 201 bp, Homo sapiens
ttaatgatcccttttcacagccctttatctttacctctgttattcttcattgttttctactagaccatgagttcttagaaaacagtgtcttctatgtatcyctccctccctaacacactctcacacacacataaacacagcagcagtatatccacactatgtaattgccagttgaattattgaatgacaaaataataagta

SEQ ID NO: 15993 - DNA, 201 bp, Homo sapiens
gtattgatcaggaaacagtgaaactttggaaattagagtttaaacaaattccaatgaaccagatgaccttgaacctcaaaattctgccaagccttcattgkgaacattcttcctctactgtgatagacagaataatggcccccaaagatgtccacatccaaatccataaagtctgtgaatatatttctttacatggcaaga

SEQ ID NO: 15994 - DNA, 201 bp, Homo sapiens
ctaaccgagtggcgctagaggaattaaagacacacacacggaaatatagaggtgtgaagtgggaaatcaggggtctcacagccctcagagccctgaacagrgatttacccatgtatttattaacaacaaaccagtcattagcattgtttctgtagatattaaattaactaaaagtattccgtatgggaaacgaagggatgg

SEQ ID NO: 15995 - DNA, 201 bp, Homo sapiens
cccggtctgtactaaaaatacgaaaattagctgggcgtgctgtcacgtgcctctaatcccagctactggggagggtgaggcaggagaatcgcttgaacccrggaggcagagtgcagtgagccgggatcacgtcactgcactccagcctggcaacataaccagactctgtctcaaaaaaaaaaaaaaaagaaagaaagaaaa

SEQ ID NO: 15996 - DNA, 201 bp, Homo sapiens
caagtaagatttttgtttgcctgcttttctcctggaatttttttgtttttggtcgaagaagcaggtaacttgcatatcttaaggaaaacattgtttttgcwttgcttttgttgtttaaagatcctaaaacgtaccgtgattcctttacgttactaataattggaaagtgtgttaaatcaagggttcgcttaatgttcttta

SEQ ID NO: 15997 - DNA, 201 bp, Homo sapiens
gttagattaaggggctttcaagcaaactaggtgttcttccagggacttgaaagtctcctctccacaccatctcatttcatctctggcattaaaaaaaaaamaacttttggccaggtgctgtggctcatgcctataatcccaacactttggtaggccaaggagggatgattgcttgagcccaggaatttttttttttttttt

SEQ ID NO: 15998 - DNA, 201 bp, Homo sapiens
taactcagttagtaggtttggtgttaaacatgatcagttctgattcctttcacttttctcagtcagttaagaaatctgtcatcagctgagagtgtggacargggaggagatttaagggtattagagaaagacgaagagcaaattcactagctccagggaatttaaggctaataaagatgacagaaaaaagataggacccac

SEQ ID NO: 15999 - DNA, 201 bp, Homo sapiens
cttgtaaagatataagttaactgcctgcaagttagtggccttctactctccagtggtggtgtataaacccctgaaaattcaaatataatcctaaaagcagraagactgacatttaggggaggggaaaggatggataaaaagaacaatactcaacctaccagcctccaaagagaagtcatgcaattgtgaatacatgtcaac

SEQ ID NO: 16000 - DNA, 201 bp, Homo sapiens
caacattttacttaaagccctcttgatcagtttggcatgtttctgggaaaatgtgttttcccatagtcctttagggattcactctgcccctagccaagatyatccaaagatgtgattcaggaaaccaaactctatgcagctgtacatctacataccatacccttcttcttccctcccattgccaatcttctactgaaaacc

SEQ ID NO: 16001 - DNA, 201 bp, Homo sapiens
tagtaatacaaacagagaagctgtttgtgtctgtgtttttatgcccaagactgtagaaaaagggaaaaagaggggacagcatggaaagaaaaaaggtaccycacgacaggcgggaaaaaatcctggcggctaagtcggtgggaggagacccatggcgagggaggaaaggagggcgggccgaggagcagcatggtgacggct

SEQ ID NO: 16002 - DNA, 201 bp, Homo sapiens
aacagctctttcagtgctgccactctgctccagcctgcggctcctggactggcccagccccaccactgcttcccattgtgtggggcagctgcccagtgccrgcagaagacaggaaggctatagggttacagctctggcttgggaaatcctgaggtctggaaccccagaagggttgtcactcttcactcccacagtctggga

SEQ ID NO: 16003 - DNA, 201 bp, Homo sapiens
ggagagattgaaggtgctgcaccactggctttgaagatgaagggagaaggccacgtgccgaggaatgcaggtggcctctggaagctggaaaaggcaaggaragaaattctccctaaaaatctccagaataacacagccctgctgacaccttaatttagtccagtgagacctctagaactacaaaataataaatgggttatt

SEQ ID NO: 16004 - DNA, 201 bp, Homo sapiens
cgagttggttctgtttaatttttaaaagtttgcttcccttcccaccaccactcccccaaaaccagcactatcatcaaacagcctgacaagaatctgcctargctgggcttaataaaccctatattccaaagtgcttctcccctcccaactttccctccaaatcctgggctctttctcagtaaaggaaatcgtgttttctaa

SEQ ID NO: 16005 - DNA, 201 bp, Homo sapiens
tgacaagaatctgcctaggctgggcttaataaaccctatattccaaagtgcttctcccctcccaactttccctccaaatcctgggctctttctcagtaaargaaatcgtgttttctaatactagattaaagcgacatcttgttatatccaccaacacctttctctttacagttaaaaaaaaattcagacacacacacaccc

SEQ ID NO: 16006 - DNA, 201 bp, Homo sapiens
tcagacacacacacacccctccccattacaaaaaggaatggaagcgtgaacccacgatcatcggtcagtaatcggagctaagaaaactcaaccaagaaacytgatttagtccctcctgctaactcccgtattatgttcccaatcccaaatgctgcattttaatacactaaatgcagatttaggtagtatatacaactgtta

SEQ ID NO: 16007 - DNA, 201 bp, Homo sapiens
agaaggaaatgaaggtccggggaacccaacatagaaaaagggagaccagtgcaaggaggctgcatgggggcccggagaacgggctgagagcgggaaccagscctaatggcgggggaataaagagggggagggggactagttgggcctgactatcctgggatgccccttactcacccttcatcctcctcgttcttactggcg

SEQ ID NO: 16008 - DNA, 201 bp, Homo sapiens
tccaaggtaaagctggactgatttcagtggatgagaatacagtgataagcaaatctttaaatgttaccctaaataggctcttaaaatagaatgtagcttgkaaagatataagttaactgcctgcaagttagtggccttctactctccagtggtggtgtataaacccctgaaaattcaaatataatcctaaaagcagaaaga

SEQ ID NO: 16009 - DNA, 201 bp, Homo sapiens
aaaatacataatggagtaatgtcaaatagtttatagtttaatcttaatttgccactattagctagcagtgaaattgagctgctagtgcccaccactcaccmaatacagggaataacattcatcgaaactgtgaccccagtctttttttttcctcttttttgcttttccccttgcctgtttcccatctgctttttctccaag

SEQ ID NO: 16010 - DNA, 201 bp, Homo sapiens
gaaggaaatgaaggtccggggaacccaacatagaaaaagggagaccagtgcaaggaggctgcatgggggcccggagaacgggctgagagcgggaaccaggsctaatggcgggggaataaagagggggagggggactagttgggcctgactatcctgggatgccccttactcacccttcatcctcctcgttcttactggcgt

SEQ ID NO: 16011 - DNA, 201 bp, Homo sapiens
gtgaaagcagatagtgtccaccacatttgataagactgtagaccaggggtccccaactcctgggccacaaactggtactggtccacgcctgttaggaatcrggctgcacaggaggaggtgagcggcaggtgaatgagaattacagtctgagctccacctcctgtcagatcagctgtggcattagatgctcacaggagcacg

SEQ ID NO: 16012 - DNA, 201 bp, Homo sapiens
tgggaggcggagcttgctgtgagccgggattgtgccactgtactccagcctgggcaagagagcaagactctgtctcaaaaaaaaaaaaaaaaaaaaaatcrgtgaaagcagatagtgtccaccacatttgataagactgtagaccaggggtccccaactcctgggccacaaactggtactggtccacgcctgttaggaatc

SEQ ID NO: 16013 - DNA, 201 bp, Homo sapiens
gttattaatattccagccaaatcacactgaaaataaaaaatctggtaagagctgtagtggaaagccacattagcccaccttttaatggtatatatatatayacacacacacacacacacacacacacacacttcttattaaaggtctatttacaaatatgctaggtaaaagacaaacatttttccataatacacagtgctg

SEQ ID NO: 16014 - DNA, 201 bp, Homo sapiens
tgttaccctaaataggctcttaaaatagaatgtagcttgtaaagatataagttaactgcctgcaagttagtggccttctactctccagtggtggtgtatamacccctgaaaattcaaatataatcctaaaagcagaaagactgacatttaggggaggggaaaggatggataaaaagaacaatactcaacctaccagcctcc

SEQ ID NO: 16015 - DNA, 201 bp, Homo sapiens; identical to SEQ ID NO: 1912

SEQ ID NO: 16016 - DNA, 201 bp, Homo sapiens
atcccaaatgctgcattttaatacactaaatgcagatttaggtagtatatacaactgttatttcaattggaggaagcaagttaatactaagaaatttgcaycaaaaagaaaaaaaaagtatcccatagcacaatacaggatttgtttctcttaagaggactacaggcctcccttagtgggcgggaaacagatatcaagaca

SEQ ID NO: 16017 - DNA, 201 bp, Homo sapiens; identical to SEQ ID NO: 1911

SEQ ID NO: 16018 - DNA, 201 bp, Homo sapiens
ttttcctgagattattcaaaaaagttgtaatattacatcgttttaggtagcaggtcaagtgtaattacttcgaagagtcaaaacactgaccttcaaatttaagtttatggtcatttcaaatcactggaaacaattacatgagactcaaaatacataatggagtaatgtcaaatagtttatagtttaatcttaatttgccac

SEQ ID NO: 16019 - DNA, 201 bp, Homo sapiens
ctgttattaatattccagccaaatcacactgaaaataaaaaatctggtaagagctgtagtggaaagccacattagcccaccttttaatggtatatatatayacacacacacacacacacacacacacacacacttcttattaaaggtctatttacaaatatgctaggtaaaagacaaacatttttccataatacacagtgc

SEQ ID NO: 16020 - DNA, 201 bp, Homo sapiens
caggatagggctgcataattggaaagttaagaaaagtcaaatattagagcccttaaaaatgagaacattatttttaagtgtaattttaaaatcaacctggstaggccgggcgcagtggctcacgcctgtgattacagcacttggggaggccgaggcaggcggatcacctgaggtcgggagttcgagaccagcctgaccaac

SEQ ID NO: 16021 - DNA, 201 bp, Homo sapiens
atacttgcagtgactttgttttctcactatacccagttattagtaagataagtagtttccaggaagctacactttaaggataaaaattttctgatcccatkggatttaaaggttttaacgacctcattgccagtgataatggcattggtggtccatggcatacagtggcaaaatagttactaccttggatgaccaagaagt

SEQ ID NO: 16022 - DNA, 201 bp, Homo sapiens; identical to SEQ ID NO: 1910

SEQ ID NO: 16023 - DNA, 201 bp, Homo sapiens
tgtcaaccaactgttattaatattccagccaaatcacactgaaaataaaaaatctggtaagagctgtagtggaaagccacattagcccaccttttaatggtatatatatatacacacacacacacacacacacacacacacacttcttattaaaggtctatttacaaatatgctaggtaaaagacaaacatttttccataa

SEQ ID NO: 16024 - DNA, 201 bp, Homo sapiens
gtcaaccaactgttattaatattccagccaaatcacactgaaaataaaaaatctggtaagagctgtagtggaaagccacattagcccaccttttaatggtatatatatatacacacacacacacacacacacacacacacacttcttattaaaggtctatttacaaatatgctaggtaaaagacaaacatttttccataat

SEQ ID NO: 16025 - DNA, 201 bp, Homo sapiens
tagggcctgtatgagtatgccattgtgcgatagcgtatggtggagaaaatgagtaaatccttaggcgaaacttattcaaaatcccaagaaaacagtcggcstaaggccgacaagggagaggcagaggtggacagcctacgcgttccccaaaacatgtgcttataaacaatcgcatcgtttcaggatggtggagaagcacca

SEQ ID NO: 16026 - DNA, 201 bp, Homo sapiens
tcagtataacatgcatgacattttaaacacaatattttatatcaaggagtcttcatatttagccattaaacttaaattccaacaaaaatatttttcatcttaaaataaatcaaatgtgaagattacggtaatattttttcttgctcgatataaaaatatcgttactaattgtttagcttaaattgccaaactgcaactaca

SEQ ID NO: 16027 - DNA, 201 bp, Homo sapiens
cagtataacatgcatgacattttaaacacaatattttatatcaaggagtcttcatatttagccattaaacttaaattccaacaaaaatatttttcatcttaaaataaatcaaatgtgaagattacggtaatattttttcttgctcgatataaaaatatcgttactaattgtttagcttaaattgccaaactgcaactacat

SEQ ID NO: 16028 - DNA, 201 bp, Homo sapiens
agtataacatgcatgacattttaaacacaatattttatatcaaggagtcttcatatttagccattaaacttaaattccaacaaaaatatttttcatcttaaaataaatcaaatgtgaagattacggtaatattttttcttgctcgatataaaaatatcgttactaattgtttagcttaaattgccaaactgcaactacatg

SEQ ID NO: 16029 - DNA, 201 bp, Homo sapiens
gtataacatgcatgacattttaaacacaatattttatatcaaggagtcttcatatttagccattaaacttaaattccaacaaaaatatttttcatcttaaaataaatcaaatgtgaagattacggtaatattttttcttgctcgatataaaaatatcgttactaattgtttagcttaaattgccaaactgcaactacatgc

SEQ ID NO: 16030 - DNA, 201 bp, Homo sapiens
ttaaaatgttaaatattttacattatcttcacaatccctgtacccccaacaccttccacagcaaatctccctcaacaatacttcagtaatctggctagagyccaaaacaaatacttcttattcagaacttggctttgaagaaaatgcagccctaacaaaattttaagtaagttactgaaggatgcagaggcttcattttac

SEQ ID NO: 16031 - DNA, 201 bp, Homo sapiens
aatcttgtagtagtcttccccaaaatgtataaaaatgagtttaatgatgagaaacattagaaccaatttggagcattctatgcaacaacctgtccatactmttcaaaaatatcaaggtcatgaaaaacaagcaaagatagacacatttttacagactggagaagactagatatagtaagtaaacacaatgaaggatgttgg

SEQ ID NO: 16032 - DNA, 201 bp, Homo sapiens
aaagatgatgccagcagtcacctcttttccaggaagacagaaacaaaaaccgttctcctcgagaggccaacagtgtagaagccccttttccagaactttccaaggagtaggtgaacttctttgtaagtgtatcagcacaggggagagtggtgctccatgttccaaggaagaaaagcaacccacagctcctcctgcccgtgc

SEQ ID NO: 16033 - DNA, 201 bp, Homo sapiens
taagcttccaacacagcaggttcagagaggttaggaaaaataagcaagggaaagaaacaagtactgatctaacaatgacggaagctgactccatgccttadtggatgcttgcggaggatggcactatcttggctgggctgactgtattagcaatgcatgtatctaaatcagctctaaaacccatagagagactggcacttt

SEQ ID NO: 16034 - DNA, 201 bp, Homo sapiens
agacccatcgtggaataaaacacagaatttaaaatagcatccgatgtgacccaaaccagcaacaataacgagaaaaccacccagtccttccagagatgcamcttgtttctgctgcagtgttgctaatcaaaatcgatctgcccatccaagcaatttaaagaggaagggcggcatttgtagaaaatggtacatgttgataaa

SEQ ID NO: 16035 - DNA, 201 bp, Homo sapiens
aggcctgcctggctccacagaccatggtgccattaaatgagactgtcctcactctcatggggggacacagagaaagctccccaccccaaccacaggaggaraagatgactgtgggagaacacatcaccatacagcatcagtgtcccattagcgcggaaggcaagattgacaggaaaaacaaacaaggaaatagtacagtgg

SEQ ID NO: 16036 - DNA, 201 bp, Homo sapiens
tctggttggtcttgactcacaacccattcctcattctggcctctccatcctcacaggacccccagccaggggaaacttcccagcttccagcgggaagtgcygcttccccaaattgggcagcacctggggatgcctctagatgcataatcacctcagaggtcctgagccagagtccagagattctttctgagattctggcaa

SEQ ID NO: 16037 - DNA, 201 bp, Homo sapiens
taaaggacatcaatccatgtgggggaaaggtaaacaaatattaatcaagtccctagtgattctacataattctctgtaattctttctgcagtcctatagcrtagataacatctccatctatggatgataaaaagcactgcttgtaataactcacttcctaagtacctgcaaggcacgaattcagggccaggcacagttaat

SEQ ID NO: 16038 - DNA, 201 bp, Homo sapiens
tagactacaactatcaatgggccattcaaaaatggagccattgtcaagtcacccacatgaaatagtgaaggtttacaaccaaaagagaatcgctcacttcyacaaaatagctgatggaaatactgtgctccgggggcttacgtggaacaaacattaggaaggtgtctacctgcaaacccgctctaaggctggaccaaacca

SEQ ID NO: 16039 - DNA, 201 bp, Homo sapiens
gagagtggtgctccatgttccaaggaagaaaagcaacccacagctcctcctgcccgtgcagcagatgaccagaaagacgagaaagggaaacaaactcccaytcatggtgaggctgcttgtttctcaaacacacttttccaatgcctccacaagttgtttgtttctgtattttgaaagcactcaacatgcagagtatttgct

SEQ ID NO: 16040 - DNA, 201 bp, Homo sapiens
agaagtctgaggctgcactcccctgcctgggcaacagagcaagactgtctcaaaaaaagaaaaaagaaaagaaatatgaaaaaagagaaacgagacatctrcatactgtgagtatcagccctaagatatcagtaacaatgcgaaaagcagaaaatttacactggagaaacctggcaggcaccacctcaatcaagtgttcaa

SEQ ID NO: 16041 - DNA, 201 bp, Homo sapiens
agaggcctaaaaagccaggtggacagagaccacatgtgaccccaaacagaaacaggctgctggaaactaactctctctctctctagctgatacttattcarcacttactgtatgtcaggtactattctaaaaactttacgtatagtaactcagttttcacacagatgcaattattttccatactttagagatgagaacatt

SEQ ID NO: 16042 - DNA, 201 bp, Homo sapiens
aatgctggggtggccatggaagaattctgcccaacagaggatgatgttccttaagcttccaacacagcaggttcagagaggttaggaaaaataagcaaggsaaagaaacaagtactgatctaacaatgacggaagctgactccatgccttagtggatgcttgcggaggatggcactatcttggctgggctgactgtattag

SEQ ID NO: 16043 - DNA, 201 bp, Homo sapiens
tgcagcagatgaccagaaagacgagaaagggaaacaaactcccattcatggtgaggctgcttgtttctcaaacacacttttccaatgcctccacaagttgyttgtttctgtattttgaaagcactcaacatgcagagtatttgctaaccacaggcagagtacccagtcaggatgtaccaactcaaactcctccctggggca

SEQ ID NO: 16044 - DNA, 201 bp, Homo sapiens
ttacatcagggaagtttctagtcaaaatgttattcctgtctacagggaaaaacaaaagcaaaacacaaaagaacactgcttctaatggcatcatagcaagsagtttatctagaaagatgatgccagcagtcacctcttttccaggaagacagaaacaaaaaccgttctcctcgagaggccaacagtgtagaagcccctttt

SEQ ID NO: 16045 - DNA, 201 bp, Homo sapiens
tacctggctccaaagccttttcctttccagatggtacactgcccacatctcttagtttatcggcacagggtcaagaaggtggtgagggtatggactgacayggcatctacggagctttccatacttataccaagacgcccccctgtaaagagtggactgtccggtagccgggcaaggtggctcataccttaatcccagcac

SEQ ID NO: 16046 - DNA, 201 bp, Homo sapiens
ttattgaacctatggatcaattctggtgaaatgtcaaataaggcaaaataaaacagaagtaagtgtgaaggcaagagtttttaccagaatctgaccctttkgtgagataactcacgtgacggaaagctctgatgatattgctgaagctggagtgtttaatgacctccattttctcaagagcattttccctgtaaacaaaga

SEQ ID NO: 16047 - DNA, 201 bp, Homo sapiens
gcctttagaaggacacaatgggatgggggggaatcaaagggtgatagtcttaacaataaatagaggttgagatcctaatcaagaatcaaagcaatacattytgagttggcattcacaaatgagtaagtcaaatggtgtggggcataatgctggggtggccatggaagaattctgcccaacagaggatgatgttccttaagc

SEQ ID NO: 16048 - DNA, 201 bp, Homo sapiens
gaatgaagaagtcatgctgacattggggaaagagaacttactgaaaatttttaaaatgttaaatattttacattatcttcacaatccctgtacccccaacmccttccacagcaaatctccctcaacaatacttcagtaatctggctagagcccaaaacaaatacttcttattcagaacttggctttgaagaaaatgcagcc

SEQ ID NO: 16049 - DNA, 201 bp, Homo sapiens
ggtacatgttgataaagcatgacctgtcccacatggagagcaataaaaggaaaacaagcctgagaacagtatgctgtgctcaccaggagatggaagagaaraaagccagaataagggcagggatgccgggggaagggaggacggggtgtcaaaggcctgcaggatttttgtaaacagcagcccgtaatggccacggtgaga

SEQ ID NO: 16050 - DNA, 201 bp, Homo sapiens
gagaccacatgtgaccccaaacagaaacaggctgctggaaactaactctctctctctctagctgatacttattcagcacttactgtatgtcaggtactatyctaaaaactttacgtatagtaactcagttttcacacagatgcaattattttccatactttagagatgagaacattgaggcatagagaggttaagtaattt

SEQ ID NO: 16051 - DNA, 201 bp, Homo sapiens
caaagactcaaggaccatttgaacaaagacatccacatctataccacagatgacttggcatctatggaggagtggaggtgagcaccactctaccatgtagrggaagcagccactgtggaggctgggcttgtggagattccttctggatgccctcagatctgtcattaatggggacaaagcagaatcaagggactgctctat

SEQ ID NO: 16052 - DNA, 201 bp, Homo sapiens
cgcaggggctgtatgaaggtggttctagaaaatggggtggcctggcacaggggcagccattccagaactaggaaggcagggtaaggtactccacatgtgtkggggggggcaggggtggagggagtgagaggggaacaaagaccaaggcaggctaaagtcagaccgtgtagaacccaaagccaggccagggtactcgtactg

SEQ ID NO: 16053 - DNA, 201 bp, Homo sapiens
gcgaaagcacctggcccagatgagtaagggagagaagccggagcacacatcactggagcacactttattacagtgtctttctgccttcaatcacttgcccmgttttgtaacttcataagagagtcatgatgcccagaacctcatggccccggggcaaaactctgcaccagctctgacactctccttaacctgctgtcacca

SEQ ID NO: 16054 - DNA, 201 bp, Homo sapiens
tcaatgacaccactttagaatttaactgttccaaaccctttgtttggcagatggggaaaggagaggtagagggagatcagaagagtcaatacaagaatctyggctgattggctggtttttctaatatggttcattcaccacatcatgttattctattgaagttcaggagagggtaccaggggatacctcaacccaaaatga

SEQ ID NO: 16055 - DNA, 201 bp, Homo sapiens
tcagaaaagctcccctggtgaagactatggacgatgcccgtcatatagcctgattggacaattcctgctttaatcaggaaggctacgattgtcctcgtctrcaaggacctgcctccaaggaggggcatggctctggatctttgcagccccagagcttagttgagcacctgccctgcaggcctcccacatatttttgtggag

SEQ ID NO: 16056 - DNA, 201 bp, Homo sapiens
gtttttcttctttcagggttgctttctctatggatcaaggtaagaaggaagaaaagctaggtctcctatctatctcacacagcagattttaaaatattttwaaaatattttaaatactttcaattttttaatattttaaaaacttttaaaactaactactgtatcgtgtacctatgaaatttcgttttcagtgcaattcaa

SEQ ID NO: 16057 - DNA, 201 bp, Homo sapiens
ccactctgtcgagagaaacaattactcctaaagaaaatctctacttaaagccacgattaaagtcactctcctcttcatccctcaacaacttgctttgaaarggtaagaagggaaagaagatgagtgcttccacttcgctggtaggggtgaatggtaggtagtcctatctgcactctttccatctagtcccctacacataat

SEQ ID NO: 16058 - DNA, 201 bp, Homo sapiens
cctcctctgtgtctgtgagtggctggctccttctcaaccttcattcaggtctccgctcaaacaccaccctcaccaccatgcccacctgccagctactatcmcacagaccttcattttcttcatgaggtgattctgaagagaaaataagcttgggagctatcaccctaacttacttattccctcagtgatggaatttggggg

SEQ ID NO: 16059 - DNA, 201 bp, Homo sapiens
gccagactgtccaagctgaaaacgtaaacaaaagctccttgcaggaagcaacagggtgcaaacttgccacctggggggcctctctgccaccccttggccarccctctcctccagcatctggccccaccccggccctgcccgcctggcatgtaaagcaccccctcctctccaagcatccgttcctcagccgctgtgttcctg

SEQ ID NO: 16060 - DNA, 201 bp, Homo sapiens
tgggccctggtgattggcgtgttattcggagtggaaagtagtaaacaaccttggtccacggcggcggcgcgggcgcggggtgcccgctccctcttccctcrcccggggcggggtggggcgcgcgcgccagacaaaaggagcctcagcccctcggaggggagagcaggaagggcgcacaccacagccggcggagcgggcgtc

SEQ ID NO: 16061 - DNA, 201 bp, Homo sapiens
agcagtcctaatggcttaaggctactcagacttggagaaggccccttctacagaagcaggcacagctcagcacaccccgtctccctctaaaccgaggctgyggggaaatcactgtgaccttgccactatacagcagcttcatgctttggccaccgtgttgcagcctctacggccactctgctctagtaactggcctccttc

SEQ ID NO: 16062 - DNA, 201 bp, Homo sapiens
gggtatagaaagatgttcaggacttagaatataccttttctcatggttctcttatcccaacgtataaattgtgacaatttgtttaaaagattgaactaaaytatgatattctctttgtcttccaaatttatttagacttggtatcctgttctttctctggaatttcctttgcttttctttttgtcagtaagctaaattact

SEQ ID NO: 16063 - DNA, 201 bp, Homo sapiens
gctggggctggatgacagagcctcagcagtgacagggaagcctgcttacttccctcatgctcagagtgccttttggccacgggcttatttcagctgtcttktgttccatttctgaggctctaaagggatgctctgggaactgggatctaggaataaatcaagatgagtggggcaaggttaataccctgattagatcagcct

SEQ ID NO: 16064 - DNA, 201 bp, Homo sapiens
ttcctttctcttaaaaaactaagcaagactggatgtcatttagaataccgacttctaaaaaagggcatttttgaactgaatgccacatgctgtattttgcyattttgcctgcgcttcctgcttggagcctgtgacacagagaagcctcagacactggagctgctccgggccacgcaaactccgctccgcatcttccaggca

SEQ ID NO: 16065 - DNA, 201 bp, Homo sapiens
acacatttatttaaaaatatcccaacaaagtgttgcaaaatttcccttgattgcaatgattctttaagctgttaacattaatcttgggtggatgcaggagytgtccactggctttccaaaaggcatccaatgcctttaaggcagcataagagaaacactgcccctctcgatgaactgggtccctgagtctggcagtactgc

SEQ ID NO: 16066 - DNA, 201 bp, Homo sapiens
gcagcttcttctctagcaactgttaatttaatagactactacttatggtgaaacaaaaaacaatcccactctgaagaaagcactgaagacctataaccagyggtgaatttcttccgtattgctcagtggaaacaaaagaaagctcaaatgggtgagtttttcttctttcagggttgctttctctatggatcaaggtaagaa

SEQ ID NO: 16067 - DNA, 201 bp, Homo sapiens
gcaatttagttcctcctctttcctgccctccaccccaaccctccaccttttaagattaatttttagttctgtctttgcagaagttgttttaaatccctgtrctaaaaattgttgctttattcacacaatacgccattaagggcacacgggtgaatcagatgccccgttagtccctttccttgcaagttcctggagctgtga

SEQ ID NO: 16068 - DNA, 201 bp, Homo sapiens
gaaaattgccattaaagcatggcagtaataattattgtagataagctccaccaaagcatgacaagatcagtgagtgacaatgtgatgagaaacaggacctyggccagttgtggttgggaggctgaggtgggaggccaggagttcgagaccagactgggcaacatagtgagtttctacaaaaaatttaaaaattggtgaagg

SEQ ID NO: 16069 - DNA, 201 bp, Homo sapiens
gaaggatcacttgaggtcaggagttcgagaccagcctagccaacatggtaaaaccctgtctttactaaaaatgcaaataatagccaggcatggtggtacgygcctgaaatcccagctacttgggaaactgagggatgagaatcacttgaacccaggaggtagaggttgcagtgagccgagatcatgctactgcactctgac

SEQ ID NO: 16070 - DNA, 201 bp, Homo sapiens
ttccccgactctgcactctgcgctcggcccgcttcgctccggtggggccccggggctgggatgtgttttggctcctccaccctccacccgctttcttagtsgggggaacacatcttgtttatggggaaggttactcctcctctgctctggtgatcgcctccctaatactcctgctgcatccttgcgggatgcccacttgac

SEQ ID NO: 16071 - DNA, 201 bp, Homo sapiens
ttggcatttagaagcttcattcaacttttggccttttcaaggctaaatgaatcttagggaagaaataaaaagttcccattgattcacttaaaaaaagattkcttgcaattaacagatctaaatctatgaaaaagggagcatttatggtaatttccataatctctcactttctctagacatttcaaatcaaattgtaataat

SEQ ID NO: 16072 - DNA, 201 bp, Homo sapiens
tgatgattattcctgtctaataaatgtggtatgtctttccatttattccagttgtcttctgtatcttttaatagtatggttatcttaaggtgttttctctytttattttaattggatgtagaatcttcagtaatatcatctagcaagttatttgcatattgtacagttgtatgatgataaatttgtatgttatttctggca

SEQ ID NO: 16073 - DNA, 201 bp, Homo sapiens
ctgagtaaattacaaagctcatatgaagggccgcagaagaaagaatgggagagatgatttaccagacagagaaggggaagtctcagccctaggcacctcakgagcccaggagagtgccaggcaaaatccctaaggcacttcactgagtcctacaacctcgcatagacatcactgtgctcatctcaggcaggggacacccag

SEQ ID NO: 16074 - DNA, 201 bp, Homo sapiens
attatttttcctttctcttaaaaaactaagcaagactggatgtcatttagaataccgacttctaaaaaagggcatttttgaactgaatgccacatgctgtrttttgccattttgcctgcgcttcctgcttggagcctgtgacacagagaagcctcagacactggagctgctccgggccacgcaaactccgctccgcatctt

SEQ ID NO: 16075 - DNA, 201 bp, Homo sapiens
aggggcatggctctggatctttgcagccccagagcttagttgagcacctgccctgcaggcctcccacatatttttgtggagaaagactcagcagtcctaawggcttaaggctactcagacttggagaaggccccttctacagaagcaggcacagctcagcacaccccgtctccctctaaaccgaggctgcggggaaatcac

SEQ ID NO: 16076 - DNA, 201 bp, Homo sapiens
tcccctgagccctacactgctgtgttcaactccatcttagcttgccccccctggatgtctgaggcatttctgacctgagagatgcaagacagagctcctgycccatctgccttctccaccacacacttcccaaactacactgctcctccctccccactcctttgcagctcaggaatggaagcctccaccccctgttctgtc

SEQ ID NO: 16077 - DNA, 201 bp, Homo sapiens
aatttggagagttcgagcacgattaattttgtgtgttcagctcaaaggaaaaagcttcctcataggagaaatgcattaatggatgagcgaatgaataagargctttataacccaaccaaccagaagccgaggggctcactatattaaattataccagctctcaatacaatgggtcaaaatgtattttattttaaattctaa

SEQ ID NO: 16078 - DNA, 201 bp, Homo sapiens
agtcagttaccagggaactcacaaaatttggagagttcgagcacgattaattttgtgtgttcagctcaaaggaaaaagcttcctcataggagaaatgcatkaatggatgagcgaatgaataagaagctttataacccaaccaaccagaagccgaggggctcactatattaaattataccagctctcaatacaatgggtcaa

SEQ ID NO: 16079 - DNA, 201 bp, Homo sapiens
ttcgaggtcagtttattcacattctgagcagtggtttacttttagcaaaatattacccatgtcattaaattaatatttgggtttgaatctttttgttttakatgcacttaatgtgtaaaatcatttaacttacagttgtaaaagatctgcaagcgtaaaaaattgacacctaggccttataaggctgtaggtatttaagta

SEQ ID NO: 16080 - DNA, 201 bp, Homo sapiens
aaaaatgcctattactccaatcctgtactcacttgctccctgccagagacaacacaaagagatgagtatacacactcaggaaaacttcgcccgggccttcsaggtagggcgaggactgtgcaccacacgagatgacttgaaaacctgtaggaaggttgtatctcagtgccacttgctttgaggagactcactgggtaactg

SEQ ID NO: 16081 - DNA, 201 bp, Homo sapiens
taatcctaggcagccgtatggccagaccaattataaaccccgtagacttttcacacgtcacagagagcaaactgctccaggagcagctcttaatactttaytgcctattcaggtgcacctgcacttttaagatatacttgtcagcaacaaaatacagcacttccctctgtctttatcacattggttgccagacaactgcac

SEQ ID NO: 16082 - DNA, 201 bp, Homo sapiens
ggaaatgtagtgacattaaccaaacacacaaagccatctcaagcctaaaaatgcctattactccaatcctgtactcacttgctccctgccagagacaacayaaagagatgagtatacacactcaggaaaacttcgcccgggccttcgaggtagggcgaggactgtgcaccacacgagatgacttgaaaacctgtaggaagg

SEQ ID NO: 16083 - DNA, 201 bp, Homo sapiens
tctcaattaccttagatgaaaaactgccttgcccacctgggagcatcattatcttatcatagaatgaagttactttcacagtgatgaccctgagtattgasaaaaagttggattatgttcattatattctttttaatgcaagcaatgtaaaacgtcctttagaaatgtttcctttaaaaattatttaaattgtattgctta

SEQ ID NO: 16084 - DNA, 201 bp, Homo sapiens
ccaaaggaagtctagatttatagcctaaatatgtcttcctctagaatatttaatacacttaagctttagtcattctatacactttgaaaatgcccttcaaygataaattacagtcgttgcatttttcattgcagttcacttaaatatcattttgctttcaggaaaacaattataggacagtaaatcacttttacattgcat

SEQ ID NO: 16085 - DNA, 201 bp, Homo sapiens
ataaagaacgaaacagcgtaatagatgatcaagtcttaggagagtgactgcagactacaactgcaacagagtgtttaggaaaaaatagatgttagctagtragtgatgatcaaggaaaaagcatgggaaagaatgccgagcaagtgggagaacacatgagtaacagcagtggggtgggagacaagggcccagccttttggc

SEQ ID NO: 16086 - DNA, 201 bp, Homo sapiens
atgtctaactaagcctggtctaataactgttttgcatctgtcctctagcagtctgctgctgattggtggtgggaggggaagagggaaacagcttaaaccaktactcctgttttgtgggcatttgaagtagctgccaggcacatgacaccactgctccaattggttcagagtgacatcacttcatgattcaactttgtttgc

SEQ ID NO: 16087 - DNA, 201 bp, Homo sapiens
gaggcaggtggatcatgacgtcaggagtttgagaccagcctaaccaacatggtgaaaccccatctctactaaaaatacaaaaattagccgggtgtggtggygtgcgcatgtaatcccagctactcaggaggctgaggcaggagaatcgcttgaacccggaaggcagaggttgcagtgagctgagattgcgccactgcactt

SEQ ID NO: 16088 - DNA, 201 bp, Homo sapiens
ccatctcaagcctaaaaatgcctattactccaatcctgtactcacttgctccctgccagagacaacacaaagagatgagtatacacactcaggaaaacttygcccgggccttcgaggtagggcgaggactgtgcaccacacgagatgacttgaaaacctgtaggaaggttgtatctcagtgccacttgctttgaggagact

SEQ ID NO: 16089 - DNA, 201 bp, Homo sapiens
tctaatttagtcaaacactaccctctctttctccaaaataattattcttaatttatttcacctaacttctgttttttacatcttagcaatgtgaccaccaraagctggagcaactgctttctgattcagaaaataaaagtttattctgatttttatttctgtcttccatacagtcagttaccagggaactcacaaaatttg

SEQ ID NO: 16090 - DNA, 201 bp, Homo sapiens
attactccaatcctgtactcacttgctccctgccagagacaacacaaagagatgagtatacacactcaggaaaacttcgcccgggccttcgaggtagggcsaggactgtgcaccacacgagatgacttgaaaacctgtaggaaggttgtatctcagtgccacttgctttgaggagactcactgggtaactgtttgagggtg

SEQ ID NO: 16091 - DNA, 201 bp, Homo sapiens
aaaatttggagagttcgagcacgattaattttgtgtgttcagctcaaaggaaaaagcttcctcataggagaaatgcattaatggatgagcgaatgaataasaagctttataacccaaccaaccagaagccgaggggctcactatattaaattataccagctctcaatacaatgggtcaaaatgtattttattttaaattct

SEQ ID NO: 16092 - DNA, 201 bp, Homo sapiens
gacctcatccagggtggaggcagcatgtgggcaatggtaccaagaaagcatcagaaagaagaagggcttggaaggcaactacagaacaggctgccccacaycaaacttaggtagaataagactcacttccattgttccttctctagccaaagctagagaagctctgaatttctctgcatttcgaaaacactccaacacaca

SEQ ID NO: 16093 - DNA, 201 bp, Homo sapiens
tgccactgggctcagaccagccctgtgcagctcacaacttcaactggaatcaaacctgaccatatccccacttctcacttaaaaagaaatggttttggccrtactggtagagcaaaaccagaaaatagactttgaattagtcttcatgctttgcaaaaaggtactaacttgttaagatgcatcctccatgtctaactaagc

SEQ ID NO: 16094 - DNA, 201 bp, Homo sapiens
caaaatggctggtgtcaaaggagaaagggacctccccacagcttgagtatggaagactgttgagcttcagaaatgaacacagggaaggagaaggaatgctrcaaatattttaccatattgacttttaattagttgagaatcaatgtaacaggtctagacctcatccagggtggaggcagcatgtgggcaatggtaccaaga

SEQ ID NO: 16095 - DNA, 201 bp, Homo sapiens
ttaagatcaaatgaggtcataagggtgagaccctgatacaattggattaatgtccttaatcagtgaagagacaccacagcttgctctctcccaccactatrtgaggatacagtgagaaggtagctgtttgcaaaccaggaagagagccctcactagaaccagaccttgttgacacctgaccttggactttcagcatccaga

SEQ ID NO: 16096 - DNA, 201 bp, Homo sapiens
tttagaacatatttgtaggatatgaaattacctacgtatgtgactcttataagaccagagaaaaaggctagaattatatatatatatatatgaaaatagcrtcagcaattccacaaggccatcaacttggggtatgaactatccgtgaaggactagtgatggctgaacttcaaccacactctgaacagcataaaaatgaga

SEQ ID NO: 16097 - DNA, 201 bp, Homo sapiens
acaatgggtcaaaatgtattttattttaaattctaagttaggctccaaactttacatcgggaccttgtaagacgagatcttttatcatgctagacttttaytatcccctaggaaatgtagtgacattaaccaaacacacaaagccatctcaagcctaaaaatgcctattactccaatcctgtactcacttgctccctgcca

SEQ ID NO: 16098 - DNA, 201 bp, Homo sapiens
cctgagttctgcctaattatgtgagccgttcaatactcaccagcaagtgaggagaggaaccaggtggccgtgcacacagggatgtgcatttgctctcttcracctggggagaacgggcagccctgtcaatattctccactcctgtataggctgctgtcaaccagtcagccccgagaatgacaatacttccatgttaccctc

SEQ ID NO: 16099 - DNA, 201 bp, Homo sapiens
agagggaaacagcttaaaccattactcctgttttgtgggcatttgaagtagctgccaggcacatgacaccactgctccaattggttcagagtgacatcacytcatgattcaactttgtttgcatttcggcttcctcctttccaaggggttctcaacttcaccctgccaagtcactttcaaacagaaagagagaggaacagc

SEQ ID NO: 16100 - DNA, 201 bp, Homo sapiens
agctgagtctaatggttaggacttcacatcacagagaacagggagccaccatggtattttgaacatatgagtaccttacctaaacgagttatttagataaraagaagtctgacaataatttacaggatgtattggagggaaggaaaagctgaaggtgagaccgaaccatgaggctgcaccagagaaaaggcactgggactg

SEQ ID NO: 16101 - DNA, 201 bp, Homo sapiens
aaagagatgagtatacacactcaggaaaacttcgcccgggccttcgaggtagggcgaggactgtgcaccacacgagatgacttgaaaacctgtaggaaggytgtatctcagtgccacttgctttgaggagactcactgggtaactgtttgagggtggctctaatgctctgcaacagtccctgcagggacaaagagaaattt

SEQ ID NO: 16102 - DNA, 201 bp, Homo sapiens
agcatgggtgacagagcgagaatccgtttcaaaaaaaaaaaagaagaagaaaagttaaaaaataaagaacgaaacagcgtaatagatgatcaagtcttagragagtgactgcagactacaactgcaacagagtgtttaggaaaaaatagatgttagctagtaagtgatgatcaaggaaaaagcatgggaaagaatgccgag

SEQ ID NO: 16103 - DNA, 201 bp, Homo sapiens
gtgccagtacactccagcatgggtgacagagcgagaatccgtttcaaaaaaaaaaaagaagaagaaaagttaaaaaataaagaacgaaacagcgtaatagrtgatcaagtcttaggagagtgactgcagactacaactgcaacagagtgtttaggaaaaaatagatgttagctagtaagtgatgatcaaggaaaaagcatg

SEQ ID NO: 16104 - DNA, 201 bp, Homo sapiens
ttcaacacaggcaagtgctttcgaattactggctccctgaaaagggggatctggacacatatggcaatgcgatgaatgatgattcctggaaagaaaaatgyttaatgaaacaagaaactcacaatttcctgagacctgatatgcacaaggtactgggcagatcttgtagttattgatgggaatttcagagaaaggcctgat

SEQ ID NO: 16105 - DNA, 201 bp, Homo sapiens
acagcttatatattctatcattcagtcttctacagcaaacgttaaatccctgaggaaagtcctaccgttagtttggtttttaaatatttagattatttcarcgtatgcacataagtattagtgcaacaaatatttactgaactcccgcaatatgcagtcatccagatttggggtagaaatttgggaatccccctgatttca

SEQ ID NO: 16106 - DNA, 201 bp, Homo sapiens
ccacttcctctttggttcattaagaatataaacattacttaaatagagcaaagctccctgagctaaggggtcttcatggtatacattcaaacggcatgtgracgaggttacagggcatagtgcagaatccctcctcggattccaaggtggctaaaaatgcctatgtcagtggatttgcctgttttccaagtcatttgctct

SEQ ID NO: 16107 - DNA, 201 bp, Homo sapiens
agaacgggcagccctgtcaatattctccactcctgtataggctgctgtcaaccagtcagccccgagaatgacaatacttccatgttaccctccctagttcygagtgctggctatgcgacaaacatatttttaatgagaaaaactatttttgtttcagttttgtttgaaccacatcattcacaaatgactgagtataagaaa

SEQ ID NO: 16108 - DNA, 201 bp, Homo sapiens
ccccacagatataaggaagcatcatagcaagtcttcttcctgtttccagtaattcggaatggccattctcccaggtagagccacgcttatatcagatacartttcttctccccatttttggtcttccattcatttctctttcactcttctaatttaagtgaaatggaattccaaatggccaagacactaataagctctctg

SEQ ID NO: 16109 - DNA, 201 bp, Homo sapiens
ggcacgctggaccagagggtgaatgcccccagcgggaatctctccctaaagccttgctttttcacatcacgccacctcccctcttccaaattttggaggcktactaccaataggaactcactatctgactgattaatcagctttcagtagacaggagcgggacaggtgtgggagaaaacatttctttccaactcccattct

SEQ ID NO: 16110 - DNA, 201 bp, Homo sapiens
gtttgcatgggcccagcccggcatacacaaaggcctgctttcatgcgccaggcctctccccactgtagaaggatgggcatatttcgccctcctcacttcttcaacaacttcactgaggcaattccattcggaaaggagcaacaggaagaggttgttaccaccaggaataggagcaactcccattaaaaagacagccattgt

SEQ ID NO: 16111 - DNA, 201 bp, Homo sapiens
ttctcactcttgccatggcctacagaccctctctgctctggtcccatctaatactgtgacccatcttataactcgacgctatgaaatcaattgtgtctcayccccggccacctcccacctccaccctgccaattcatatgtaggaaccctaacccctcatgtgactctgttgaaggtagggctgttaaggagacaattaag

SEQ ID NO: 16112 - DNA, 201 bp, Homo sapiens
ttatctcacccaaaatgccaacagtgccaatgctgagaaacctggcactggttcaggactgcacccctaccccccgccctgccactccccaactaattatytcacccaaaacgtcaatactgccaatgctgagaaacccagcactggttcaagccaccaacatctctcatatgcacggtcccagcagcttcctaagcggtc

SEQ ID NO: 16113 - DNA, 201 bp, Homo sapiens
ctagggggcggggtgggtgggcttctggcatctagcaggtagagactagtgaagctgctgaacattttgcaatacacaggacagccccccacaactaattwtctcacccaaaatgccaacagtgccaatgctgagaaacctggcactggttcaggactgcacccctaccccccgccctgccactccccaactaattatttc

SEQ ID NO: 16114 - DNA, 201 bp, Homo sapiens
taaaccattactcctgttttgtgggcatttgaagtagctgccaggcacatgacaccactgctccaattggttcagagtgacatcacttcatgattcaactktgtttgcatttcggcttcctcctttccaaggggttctcaacttcaccctgccaagtcactttcaaacagaaagagagaggaacagcacatcttatgtagt

SEQ ID NO: 16115 - DNA, 201 bp, Homo sapiens
tccaagccaaaatgtctcagaggtatctttcactctcccagtctccattcccttcaggctatattttacaagtcttcaaatattcctaaatctatccactrcaaattgctatgactctggtccagtggttctcaacagggtacaattttggtctccccaccccctaatcccaggttaacatctgtcaatgtctagatacat

SEQ ID NO: 16116 - DNA, 201 bp, Homo sapiens
tcatagtatctccaaatgccttggtttaccaagtctgagggtttcctagaactctccttataagcattagaatgaaatctagtcctggctcttttcccatraccacttcctctttggttcattaagaatataaacattacttaaatagagcaaagctccctgagctaaggggtcttcatggtatacattcaaacggcatgt

SEQ ID NO: 16117 - DNA, 201 bp, Homo sapiens
ggaagggaaaaaccagaagcgcacaggccatttagcgcaatgtagcgcgtctcacaccagaagttgtttacacactcttggacgcctgagttctccttgayttttgtttttcttcattttatctatcttcgtttatccatcttctagttcatctacttaaccttcttgtaactcagtgctgccaagtggattcggcatcag

SEQ ID NO: 16118 - DNA, 201 bp, Homo sapiens
cacttctagtcttggctcctgagccccaggtactctattcctgaagatccttgcagatatcaatcatcccaagaatgggctagtggtttccgggtttcatraataaagctgtcccattctcatcactaatcaaggtaagagagttacatcttatttctctgccttggtttcatcatctatggaagagcagtcatactggat

SEQ ID NO: 16119 - DNA, 201 bp, Homo sapiens
gaatgaagttactttcacagtgatgaccctgagtattgagaaaaagttggattatgttcattatattctttttaatgcaagcaatgtaaaacgtcctttakaaatgtttcctttaaaaattatttaaattgtattgcttaaaaaatatgactctttcaactcagttatcacttaaggtttcctggaatattctgctgttta

SEQ ID NO: 16120 - DNA, 201 bp, Homo sapiens
gagagcaaactgctccaggagcagctcttaatactttattgcctattcaggtgcacctgcacttttaagatatacttgtcagcaacaaaatacagcacttycctctgtctttatcacattggttgccagacaactgcacagagctaaagtaggtaatgttacagtaaacagctccctaaaacatttacatatgtcactgat

SEQ ID NO: 16121 - DNA, 201 bp, Homo sapiens
ttgcagttcacttaaatatcattttgctttcaggaaaacaattataggacagtaaatcacttttacattgcattccaaaaatatttaagttgcaacatggrcaatgtgtagaatcacaagaaaaatacagcttatatattctatcattcagtcttctacagcaaacgttaaatccctgaggaaagtcctaccgttagtttg

SEQ ID NO: 16122 - DNA, 201 bp, Homo sapiens
tggtttattctcggtactcaaattcaaatcttagtaacatagcaattacattttaaaataaactatctccttgtgcttgcttctaaggagagtgtttagtrggatatgaaaagagtctaatcctaggcagccgtatggccagaccaattataaaccccgtagacttttcacacgtcacagagagcaaactgctccaggagc

SEQ ID NO: 16123 - DNA, 201 bp, Homo sapiens
gagctaaagtaggtaatgttacagtaaacagctccctaaaacatttacatatgtcactgataaacaatagaaaatttaaaagagatacaaatgtactcttrgaaccttaaatcttcttcccactgaggcctaagaacttaaaatcttcatacacctggctgagaaaaaggaaacaaattccaaaggaagtctagatttata

SEQ ID NO: 16124 - DNA, 201 bp, Homo sapiens
ctaaaaaaaaagttcccaacagcagcccttcctgaagctgacggtctgactgtggaagtttagcccgagtatttagggtgctgggaagacatgagaactamcttatgtcctttgttttcttcctaagcaaactgggcagtcttgttcatgcaaaaccactatggagtgatcactgtaacaggcacgctggaccagagggtg

SEQ ID NO: 16125 - DNA, 201 bp, Homo sapiens
aaaatgccaacagtgccaatgctgagaaacctggcactggttcaggactgcacccctaccccccgccctgccactccccaactaattatttcacccaaaaygtcaatactgccaatgctgagaaacccagcactggttcaagccaccaacatctctcatatgcacggtcccagcagcttcctaagcggtctccctgctttt

SEQ ID NO: 16126 - DNA, 201 bp, Homo sapiens
ccctaggaaatgtagtgacattaaccaaacacacaaagccatctcaagcctaaaaatgcctattactccaatcctgtactcacttgctccctgccagagayaacacaaagagatgagtatacacactcaggaaaacttcgcccgggccttcgaggtagggcgaggactgtgcaccacacgagatgacttgaaaacctgtag

SEQ ID NO: 16127 - DNA, 201 bp, Homo sapiens
agcttgccccccctggatgtctgaggcatttctgacctgagagatgcaagacagagctcctgccccatctgccttctccaccacacacttcccaaactacrctgctcctccctccccactcctttgcagctcaggaatggaagcctccaccccctgttctgtccaagccaaaatgtctcagaggtatctttcactctccca

SEQ ID NO: 16128 - DNA, 201 bp, Homo sapiens
catcaaacttaggtagaataagactcacttccattgttccttctctagccaaagctagagaagctctgaatttctctgcatttcgaaaacactccaacacrcagagtcacacaaaactctcctttggaccagatggaccctatcctacgcactgagagatttggagtgaatgggacaagaggtaagcccagtctctttcct

SEQ ID NO: 16129 - DNA, 201 bp, Homo sapiens
cacatttaacgcctccctcacgcatcactcaactgactggcaagccaccccttccccttcgactctcttccaaaaatgcttacgaacttgaaatccagcaraaaaggggccacagtgactacgtactcatgattctgttttactcttctaaattcacggtctacttactattaacttatatacacgttaatatttaagttc

SEQ ID NO: 16130 - DNA, 201 bp, Homo sapiens
tatactccatatacatagctacaatgcctcatgcagaatgctcttcccaaaactgtgctcaaggatacaaacccaggctgtccaatttggggaaatcattktttgagggtggcacagacaagcagtcggcttggggtttgctccctgtgcacagctcgatcatcaaggaaaggcctcttccgggcctcaaagctccctttg

SEQ ID NO: 16131 - DNA, 201 bp, Homo sapiens
ttgtagaagcacagtctaaatacacacacgcaagccactgcaaaatgactttctaagttaaaagtcagagaaatcaatgtttgactgactatggagcatamaaattcttcatttgctttcatcagctgaaaaaaaaatgctagaaataactacggagaaatggtaaagaaaaaaatgtaatgtacacagttttgctgaaaa

SEQ ID NO: 16132 - DNA, 201 bp, Homo sapiens
taatgtgacatatttactaatatttctgtcaaaataacaacatctaaactgtcacttcaacaaggaagcttctcttcctgttttagtatagagaagcactrggatatcgtctcttttccttttaaagaaaaatgtattctgactgctggtaaaatcaggagtaacttgagtctgtgacttaaagggcagaactaagcccta

SEQ ID NO: 16133 - DNA, 201 bp, Homo sapiens
aatgtgacacctacctctaagtcatttggatttataaaaatcccaccatgctacaatcaagaaagcatttcactgagcaactgtaagccaggtacagggcrtgagctgaagaatgtcccaggtgagtgaggccgttctaatttcaacacctaaagaacaggtcacatcagacgttataaattctccaattttcttttcttt

SEQ ID NO: 16134 - DNA, 201 bp, Homo sapiens; identical to SEQ ID NO: 1922

SEQ ID NO: 16135 - DNA, 201 bp, Homo sapiens
aagagggagttcttaacctctgtggcagagcaacctgaaaacagaattatactccatatacatagctacaatgcctcatgcagaatgctcttcccaaaacygtgctcaaggatacaaacccaggctgtccaatttggggaaatcattgtttgagggtggcacagacaagcagtcggcttggggtttgctccctgtgcacag

SEQ ID NO: 16136 - DNA, 201 bp, Homo sapiens
aagtcacacattacacacctaagtggtcacaaacaggattttaatctatgtgaacagatcaccaatcttggtttcatccttttatgagtaaaatgtcatawaaaaataaactccttaatacatgtaataagttacaagtgaagtaaaaactaaatattagaggaaaagatacaaataagttagttgttgcttttttaagtt

SEQ ID NO: 16137 - DNA, 201 bp, Homo sapiens
ctctccttccttcttctatttcttccctttcaaaccagaccactgaaactctcagtctgtatttatgtgaaataacaggaacgttaaacatgctaccttcyatttgtacagaattgccatgcaacacaaagaatgattatgcattagctacgtcacatttacctgtgaaatttatctcattgtagcactataactctattt

SEQ ID NO: 16138 - DNA, 201 bp, Homo sapiens
gaagagcacctggcacaggtcagggactcagaagcatttgttgaagaaatggaagtgctcacccactgagttcttgcttctgcagcattcctggcaggtaaccctctcgagttggctgaaatctttccaagaatgaaaagctgggcttttacaacaaactaacaagcaaaccccaaccaaccacccccacacacccccagg

SEQ ID NO: 16139 - DNA, 201 bp, Homo sapiens
taatttgtcttcatttgcaaagatgaatcttactctgaaacctcatttgagagtgctctagtctctcaggatgcatagaaatgccttataaatgctaagtyatataataatggttatgtatttgggtgttagtcatctgctcttcttgctgagataaatagctaccatctgaaggtgaacacttcaccttccctacattta

SEQ ID NO: 16140 - DNA, 201 bp, Homo sapiens
acatccagtgtgaacatgcattcagcaaacatttcctgagccctgctttgtgccaggctgttctcagtgctcaggatacacaaggaagaaataaataaaarataaggtttctgtccttgtaaagcttatattcgtgtccgtgtgtgcatgcctgtgtgtatgtataagaatacattcaatagacacaattattaagtaaat

SEQ ID NO: 16141 - DNA, 201 bp, Homo sapiens
ctgtgtctgctgagagctgagctgcctgcctgggatcagccagatggagcaggcagagacggcacggaccacactccagaggaacacgccatggatggctrtattgttgatgtttcagatatccaaaaagtaaattataaatcttagcggtgatttagctatcctatttgccaaaggtagtttacacgggtgtttcaaatt

SEQ ID NO: 16142 - DNA, 201 bp, Homo sapiens
aaatcttatgagataaggaacaacttcaattcttaatatatttttctaatttatgaataaaccaacaaccaacatgcttcatccaggcaggatgaagcactgtctccctcgcccacacccttttccacagctgccctcccagcccagcatcttttatcacctagaagggccaaggaggctggtttgtgcaactcaacaagc

SEQ ID NO: 16143 - DNA, 201 bp, Homo sapiens
aaatggcatatcaccttctttgtaaggtataacattttcaatgttgcaatataagctgaccacctcctctaaggcgaggactcggcgtcaggggcagggargtggtgagcaaagaaagggcaaaaacaagaccttgatcacagaagcaagaatctgacattggattatttttgaaacatactacatacataaggaaaatga

SEQ ID NO: 16144 - DNA, 201 bp, Homo sapiens
gaaatcttatgagataaggaacaacttcaattcttaatatatttttctaatttatgaataaaccaacaaccaacatgcttcatccaggcaggatgaagcactgtctccctcgcccacacccttttccacagctgccctcccagcccagcatcttttatcacctagaagggccaaggaggctggtttgtgcaactcaacaag

SEQ ID NO: 16145 - DNA, 201 bp, Homo sapiens
tgactgctggtaaaatcaggagtaacttgagtctgtgacttaaagggcagaactaagccctatactacagtgataacagtaacaggaacatctgattacakataagctggctcctcataaaccctgatacaacctaaggcctccattttcattacacaccttcaaagatgcttttaaaatggacttgtttattgacaacac

SEQ ID NO: 16146 - DNA, 201 bp, Homo sapiens
tgtctgctgagagctgagctgcctgcctgggatcagccagatggagcaggcagagacggcacggaccacactccagaggaacacgccatggatggctataytgttgatgtttcagatatccaaaaagtaaattataaatcttagcggtgatttagctatcctatttgccaaaggtagtttacacgggtgtttcaaattact

SEQ ID NO: 16147 - DNA, 201 bp, Homo sapiens
agtgagctgtgattgcaccactgcactccagcctgggggacagagcaagaccctatctcataaataaataaataaataaataaataaataaataaataaataaaatgtaatattcactaagtgtagcctaagtgtacagtatttatccaggccttcacaattactcaccactgactcactgactcacccagagcaacttct

SEQ ID NO: 16148 - DNA, 201 bp, Homo sapiens
gctccagcaacccgcctctctgacttcttcctcccatggtgcttttccacccagataactcgcccccaaagctgaggaccctcccaaggccatgaaagggscctgggttcacctccactgtcacagagtttaagaacacatgccctgtatagcctattttgtttgcttgtttctttattaaactataagagcatcatccaa

SEQ ID NO: 16149 - DNA, 201 bp, Homo sapiens
acaactgatcctccctttcatttttagagtaacaaacccagcttgtactacccatgcctacaacagcccagatgtggcactcaaggttgaaaaggggccayaacttggtaacgggacacacatgaccccatgcaggagaacagccagggccatgaggaaagggactttggtgcacaatggcaggtacctatgcccttgctg

SEQ ID NO: 16150 - DNA, 201 bp, Homo sapiens
tgtgcacagctcgatcatcaaggaaaggcctcttccgggcctcaaagctccctttgtgaggaatgaggcccactgtcgaggctcacacaggcagctgtaaycaggctgcccctctctctgggtgtttgttttgatagaggttcatttatgccagagacaatgcccgctctctttgttctgcccccagcaggaagcagtgca

SEQ ID NO: 16151 - DNA, 201 bp, Homo sapiens
cagtgagctgtgattgcaccactgcactccagcctgggggacagagcaagaccctatctcataaataaataaataaataaataaataaataaataaataaataaaatgtaatattcactaagtgtagcctaagtgtacagtatttatccaggccttcacaattactcaccactgactcactgactcacccagagcaacttc

SEQ ID NO: 16152 - DNA, 201 bp, Homo sapiens
gcagtgagctgtgattgcaccactgcactccagcctgggggacagagcaagaccctatctcataaataaataaataaataaataaataaataaataaataaataaaatgtaatattcactaagtgtagcctaagtgtacagtatttatccaggccttcacaattactcaccactgactcactgactcacccagagcaactt

SEQ ID NO: 16153 - DNA, 201 bp, Homo sapiens
gttgggaggccgagacaggtggatcacgaggtcaggagatcaagaccatcctggctaacacagtgaaaccctgtctctactaaaaatacaaaaaaaattarccaggggtggttgcgggtgcctgcagtcccagctgctcgggaggctgaggcaggagaatggcatgaacccaggaggcggagcttgcagtgagccgagatc

SEQ ID NO: 16154 - DNA, 201 bp, Homo sapiens
aaagcaggtgtggcatttatcagtgctgctgtcatccatagagaagccaggaacaacgaaatgtaactctgtgtacacagaactctgccaccccacacagrgcagatggggcagccatcagaaatgcggggcatggacccaaacgccagcatagcaccacacccccaaatgaggggggaacaggctcagcaccccaagaca

SEQ ID NO: 16155 - DNA, 201 bp, Homo sapiens
cccacggagaagcctctttcacgttcatatgtgctggggatctgtgtctgctgagagctgagctgcctgcctgggatcagccagatggagcaggcagagayggcacggaccacactccagaggaacacgccatggatggctatattgttgatgtttcagatatccaaaaagtaaattataaatcttagcggtgatttagct

SEQ ID NO: 16156 - DNA, 201 bp, Homo sapiens
caggacagttcttccctttgaccttccactggtcccagattatgactcagagactgtctcccactctttacccaaggggagatccctgcacctcctcctcyaacatcctacatctttaaaatgctcctctgaatcccagaactacagaaaccacagcactcgtgctggtgagcagattcctaattgcagaagatgcataca

SEQ ID NO: 16157 - DNA, 201 bp, Homo sapiens
gctcaccaccatgagttttctctcatcagcctccaaagtccaagccatcgctacatctcagagatgacgtacaacatgtgcctttattttatactctcaakatgctggatatagtagttattatccagaaagaatgacttcacaatcaggatccgagactggctataaacagtgatcgaatcctcaactcattccctctcg

SEQ ID NO: 16158 - DNA, 201 bp, Homo sapiens
ggaggccgaggcgggtggatcacttaaggtcaggagtttgagatcagcctgggcaacatggtgaaacctcatccctactacaaacacaaaaattagtcagscatggtggtgtgtgcgtctagtcccggctactcaggaggctgaggtaagaggatcgcttgagccttggcggtcgaggctgcagtgagctgtgattgcacc

SEQ ID NO: 16159 - DNA, 201 bp, Homo sapiens
aaaacccagtgtggtcgtctctgttctcaatgtctaccttggaagagggagttcttaacctctgtggcagagcaacctgaaaacagaattatactccatayacatagctacaatgcctcatgcagaatgctcttcccaaaactgtgctcaaggatacaaacccaggctgtccaatttggggaaatcattgtttgagggtgg

SEQ ID NO: 16160 - DNA, 201 bp, Homo sapiens
ttgtggttttctacattttaaaaaaaggctagccagccgaccttatcatccctgtcattccaatgggaaaaagcgtcatcagcacaattgtagaagcctaraacaatgtgtccctgtcaactcagtgagggttttcttctttcaaagataaatcaagatgccataacctaggaataatataactacttacacacagagaac

SEQ ID NO: 16161 - DNA, 201 bp, Homo sapiens
ccagccatttctagggaaaatcatctctgacagctggcatgaaatcaatgtccacctgaaaagtacctttgagggccatctaataaaggccaaaactatgsccacgaatccaaaactgcggaagtctagactggcgtttctaaataagctagagaaaaatactcaatgtgcgacatcttgtaaactcacagctgctgaaga

SEQ ID NO: 16162 - DNA, 201 bp, Homo sapiens
cagaaatggggccatcctggagaatcatgatgctgttaactgagctacatggaaggcgcagttttcctcctcttatcactggtcttttccttctcacactmagcaatctgagcaccacggggggcaacacctgctctctaatacagaagagatgggtgtatacctccattctaatacagaatgtctccatatacccagcca

SEQ ID NO: 16163 - DNA, 201 bp, Homo sapiens
ttaacattgtccctatgccatctcaccccccatataagctctctgctaactttccaacacagagaacaaaatccaaattcttcaccatggctccagggccmatgtgatctaatagccctctctgcctgtcactcaccaggctccagccacccaacctcatctcatcctcctcactggacatcccacgtgcatcctgtgtgc

SEQ ID NO: 16164 - DNA, 201 bp, Homo sapiens
cgaagtcctcaccgtggcctccagggccctacataactgactcagtttaccccatcccccaccaagatgcaccaagctctccaagctcctcgcctttcccytccctttcctttaggtcttcgtccaaatgtcacctctctagagaccttctctgaataccctacgtaaaaaggtacccggatacctgcctggcaccacgta

SEQ ID NO: 16165 - DNA, 201 bp, Homo sapiens
caattattaagtaaattaagtcatatgttagaaaataagtgctgtggcaaaatccagattaaaatcaccaatcactagtcaggagaccccatcagctacgsaaagaccatacaggtagtgtgcagagacaccagagaggtcaccctgtttgatcgacaaaagtatgctcattagaaggtaaaccacaggactatggggtct

SEQ ID NO: 16166 - DNA, 201 bp, Homo sapiens
agattgctcctctgccaacttctctccttccttcttctatttcttccctttcaaaccagaccactgaaactctcagtctgtatttatgtgaaataacaggracgttaaacatgctaccttctatttgtacagaattgccatgcaacacaaagaatgattatgcattagctacgtcacatttacctgtgaaatttatctcat

SEQ ID NO: 16167 - DNA, 201 bp, Homo sapiens
aggtagtgtgcagagacaccagagaggtcaccctgtttgatcgacaaaagtatgctcattagaaggtaaaccacaggactatggggtctttatctcttttytccctgcaggattctcagctcaagaagagcacctggcacaggtcagggactcagaagcatttgttgaagaaatggaagtgctcacccactgagttcttgc

SEQ ID NO: 16168 - DNA, 201 bp, Homo sapiens
ggtagcacaattcctatctaggaaaacataataagtttcctgtaggaaaagtaagataaaggaattaagaattcttaggggtctcactcacttaagaccgytaatatatgagaaaaaatatcttgtgctttgagaagtaagcttcaattacctgggaaatcaactcaagcaaaaaactctttcaatgatgctagacaaata

SEQ ID NO: 16169 - DNA, 201 bp, Homo sapiens
tttttaaaagactgaagttaaaatatataatacatatatgaaaagatcccctaatttgggccagccataatcatcttaaaatggtaacctgggtaacaacyacctatcataatttatcctttgaagataaccacagattcatggttttgattttaaaagcttctttccaaacaaataaataggtatcaaatcaaaaggcac

SEQ ID NO: 16170 - DNA, 201 bp, Homo sapiens
aaagactgaagttaaaatatataatacatatatgaaaagatcccctaatttgggccagccataatcatcttaaaatggtaacctgggtaacaactacctaycataatttatcctttgaagataaccacagattcatggttttgattttaaaagcttctttccaaacaaataaataggtatcaaatcaaaaggcacacttta

SEQ ID NO: 16171 - DNA, 201 bp, Homo sapiens
attttaaaagcttctttccaaacaaataaataggtatcaaatcaaaaggcacactttaaaaataggaagattttgctaatttgtcttcatttgcaaagatkaatcttactctgaaacctcatttgagagtgctctagtctctcaggatgcatagaaatgccttataaatgctaagtcatataataatggttatgtatttgg

SEQ ID NO: 16172 - DNA, 201 bp, Homo sapiens
agtaagatgctcagtccattggcttgcagtgtttcagagtccctgcttgctgctagccacggggatgggggctgggagtcatcctgtttaaaagctgcagkgaaaacccagtgtggtcgtctctgttctcaatgtctaccttggaagagggagttcttaacctctgtggcagagcaacctgaaaacagaattatactccat

SEQ ID NO: 16173 - DNA, 201 bp, Homo sapiens
tgcagtgagctgtgattgcaccactgcactccagcctgggggacagagcaagaccctatctcataaataaataaataaataaataaataaataaataaataaataaaatgtaatattcactaagtgtagcctaagtgtacagtatttatccaggccttcacaattactcaccactgactcactgactcacccagagcaact

SEQ ID NO: 16174 - DNA, 201 bp, Homo sapiens
aagaaatagttgaaaaggatgggagtgaaggcactttaagcccacagatgccagcagaggtgggacatgacaagtgaggctggggggctggccccaaactkgtccctcccaagtcagcttggacaccacacagcacttcgtgcgccctcggctggcttagcacatggacaaggcattgccgctggagtcccaccttcttag

SEQ ID NO: 16175 - DNA, 201 bp, Homo sapiens
cagttttttgttttttttttttaatcaagaaatagttgaaaaggatgggagtgaaggcactttaagcccacagatgccagcagaggtgggacatgacaagkgaggctggggggctggccccaaactggtccctcccaagtcagcttggacaccacacagcacttcgtgcgccctcggctggcttagcacatggacaaggca

SEQ ID NO: 16176 - DNA, 201 bp, Homo sapiens
actgaaccctcatccctgtggagtctgtgctaactccaggtggtgagtgtcagaactgcactgaattgtaaggcccccagttggtgtctggagagttagasaactggttgttggtatggcaaaaccccacacatttggcgtcagaaatgttatgagtagcaacagttcagagtcctttatgtgcgtttacaaaagcaataa

SEQ ID NO: 16177 - DNA, 201 bp, Homo sapiens
agaagagcacctggcacaggtcagggactcagaagcatttgttgaagaaatggaagtgctcacccactgagttcttgcttctgcagcattcctggcaggtmaccctctcgagttggctgaaatctttccaagaatgaaaagctgggcttttacaacaaactaacaagcaaaccccaaccaaccacccccacacacccccag

SEQ ID NO: 16178 - DNA, 201 bp, Homo sapiens
cagagggaaacaattgaaacagacaatcgctcagataccaacaccaagttcgcctccccttgagaagtttgctgcagtctcctggtctaatccaaataggyggagggagggctgggagggcatcctgcagagctgttcagtggcggttctaacgctaacacccagcgtgttattaaaggaattcccatctgctgagtcaca

SEQ ID NO: 16179 - DNA, 201 bp, Homo sapiens
gaggtcatctaaattcaaaccttaaatataaaaccactcccaaaagagaatgcctttgaatataatggcagtttcaaactttggcaaataattatcctgtwcttcttatctgtgagaatctatcatttattttaaaaattctctgcagcggccgggagtggcggctcatgcctgtaatcccagcactttgggaggccaagg

SEQ ID NO: 16180 - DNA, 201 bp, Homo sapiens
ccaagaaaacattatcttctagatatgcacactgaagtatttgatataaaatgtatgatatttgggattgcttcataatattttagcaaaaataaaataartgaaatacagcaagctgctgagcattgataagtcttgatgatgatgatggtatatttcactatcttacttttatgtctgtttggaatttttcacagtgag

SEQ ID NO: 16181 - DNA, 201 bp, Homo sapiens
aaatcatatttcggtattttattttctataaatagtttttgttctgttttgttttgtataaaacagggatcacgtgttatacacataattttgtaacctgtttttttttttttcacttaacattctattttaagcaattcccacattcttaaatactctctgagaagggtatttttaatggctgaaaaacattctaccata

SEQ ID NO: 16182 - DNA, 201 bp, Homo sapiens
atgaaagttcttgggagccaagaagaagttggatcagaggcctaataagtttaagagaataattcttgacatcccttgatctaatcgcagatctatatgasaatatggaaatgtttgtacctgctcccattatgcccctaaatcacagatcaaaacagtagcatctctgtgcctatctctacatcacaagttaacttcatt

SEQ ID NO: 16183 - DNA, 201 bp, Homo sapiens
aatgagaacacatggacacaggaagggaaacatcacactctggggactgttgtggggtgggggtggggggagggatagcattaggagatatacctaatgcyaaatgacgagttaatgggtgcagcacaccagcatggcacatgtatacatatgtaactaacctgcacattgtgcacacgtaccctaaaacttaaagtataa

SEQ ID NO: 16184 - DNA, 201 bp, Homo sapiens
gtcaccactctggagaaatgcttcaaagggcagctgcagaggtggcagccagctcactgaggaaaacgtaagtcacaggagaggagaggggaggtggggaygctctcagggagtggctgtgttctgttttatttgctgcacatgctaaaccaagacttcaaccagaaagcaaaggttccaggaatcatgggcaagcatttg

SEQ ID NO: 16185 - DNA, 201 bp, Homo sapiens
aataaagtattacaatacacacacacaaacacacacacacacacacacacacacacacacacacacaagaataaaggaccaagagggaatggaatgccagmagatgtaattaatacatgagagaattatcattccaagtactgggagagaagagaactgaaacagactaaaaaatatgtatatttaaaattattaaaactt

SEQ ID NO: 16186 - DNA, 201 bp, Homo sapiens
acagacaattcttggtcatggttttagctgaaatgtttcatctcgcacgcagtgccctttcaggagggcagggctcccctcttaagccattcccagaagayaaggagaggactcagacccaacagaattaacacaggaaagacagaacatttgagggcccagatgtccttctcttcatccaggctctcaacacatggaata

SEQ ID NO: 16187 - DNA, 201 bp, Homo sapiens
aaatttccttcctctcattttttaatcacaattccccataataactttattgagtagtagagagggggagagactatgaatttgtggatgatgtaactggracaaaaaagagttggtaggaaaaccaatattagcacttagcctcccaaacttgagtatcttgttctctgttgttctgttttgttttgtttttttgagaag

SEQ ID NO: 16188 - DNA, 201 bp, Homo sapiens
gctaccaaaagatggagaagacccctgataggagctgtggcctttggtaaagggatgcaaccatcctcaggtaactagccagcaaggaaggagcaggggtggggtggtaaataccctgaataaatatctcctcctcattctctctgatctcctgctagtgcttcccattggccaattccaacaggaagtcaggaagcaaga

SEQ ID NO: 16189 - DNA, 201 bp, Homo sapiens
acggggccccagctagctgttctctcttgtgctacttaccatgcttagatcttgatttgaacaaatcgactataaaaagactgtgctggcaattgaatacwtgcgactatggtctgggtattacttactattaaggaattactgttaatttttttaggtgtattaatgacattatgttacgaaaatataattttctttttt

SEQ ID NO: 16190 - DNA, 201 bp, Homo sapiens
gcctgggcaacatggtgaaaccctatctctatcaaaaatataaaaaattagttgagcatggtggcatgcacctatggtcccagctactcaggaggctaagrtgggaggatcaagcactcgagcccagaaggtggaggttgattgcagtaagccgagatggtaccactactctccagtctgggtgacaaagtgagaccctgt

SEQ ID NO: 16191 - DNA, 201 bp, Homo sapiens
ttttctatcaacgaaggatcttgtgatacatcaacttttcagcccagaagccacctggagggttggttctctaactagtcaaattaaactatggtttagtytttggccatgttctctaacatttttgttgctggtaggaatcgggagaaaataatttacaggtctctctaccttaatggaggaaaaggaccacagtgggga

SEQ ID NO: 16192 - DNA, 201 bp, Homo sapiens
aatcacttcctgggatagatgctccattattctgaaatcatgtcagttctacccttttagtattaaaatatcctttcttttaagaaataatggtgatagattttttttttttttttgagatagagtcttgctctgtcgcccaggctagagttcagtggtgcagtctcagctcactgaaacctctgcctcgtgggttcaagt

SEQ ID NO: 16193 - DNA, 201 bp, Homo sapiens
gcatcttgtggcaatagagccacaagagtaaggctaaaacagctacatgctgagggttgtagaagggaaagacacaaggaagctggtcctggaggacaccrttaagctgaggctgaatcaagccagcaatttcctactttcagccttcttgttatggaatatacataaataaatctctctttatggaagactccacttgtc

SEQ ID NO: 16194 - DNA, 201 bp, Homo sapiens
tgcatataataaacgtaagggcactttggaaggccgaggcaggtagctcgcttgagctcgggagttcgagaccagcctgggcaacatggtgaaaccctatytctatcaaaaatataaaaaattagttgagcatggtggcatgcacctatggtcccagctactcaggaggctaagatgggaggatcaagcactcgagcccag

SEQ ID NO: 16195 - DNA, 201 bp, Homo sapiens
tacatcaacttttcagcccagaagccacctggagggttggttctctaactagtcaaattaaactatggtttagtctttggccatgttctctaacatttttrttgctggtaggaatcgggagaaaataatttacaggtctctctaccttaatggaggaaaaggaccacagtggggagcttgaggagtgaaataaataatact

SEQ ID NO: 16196 - DNA, 201 bp, Homo sapiens
actctccattgctcatattaccacctgagctccgcctcctgtcagatcagctgcaacattagattctcacagaagcatgaaccctattgtcaactgcgcaygtgaggaatccaggttgcatgctccttagaagaatcaaatgcctgataacctaaggtggtgatgctagcgctgtgtagtggctgcaaatacagattaaca

SEQ ID NO: 16197 - DNA, 201 bp, Homo sapiens
atcaccatcataatcactgccatcatcaccatcttcatcatcactatcatcatcattacctccatcagcaccatcatcatcattatcattatcctcatcamtaacattaccttttttccaggccctatatttctttgccctcagggccttcaaaattttatggagcaaaaaaccctcttggagggaaataagagatgagat

SEQ ID NO: 16198 - DNA, 201 bp, Homo sapiens
tacaggcatgagccatcacacccagccaagaaaacattatcttctagatatgcacactgaagtatttgatataaaatgtatgatatttgggattgcttcawaatattttagcaaaaataaaataaatgaaatacagcaagctgctgagcattgataagtcttgatgatgatgatggtatatttcactatcttacttttatg

SEQ ID NO: 16199 - DNA, 201 bp, Homo sapiens
cactgacaggccaaacttagctcaaggctctgcacaatgcctgagcagacttcatgagcccctccttcatgggcctgggtgtcatgttcccatgcagacaracattcctttaattcatttgtccaccatatcccaccatcagataagaatacaattcatgtcaacataaaatcatgaagattttttacatatgctattatt

SEQ ID NO: 16200 - DNA, 201 bp, Homo sapiens
cgattcctcagggatctagaactagaaataccatttgatccagccatcccattactgggtatacacccaaaggattataaatcatgctgctataaagacayatgcacatgtatgtttattgcggcactattcacagtagcaaagacttggaaccaacccaatgtccaacaatgatagactggattaagaaaatgtggcaca

SEQ ID NO: 16201 - DNA, 201 bp, Homo sapiens
cacctggagggttggttctctaactagtcaaattaaactatggtttagtctttggccatgttctctaacatttttgttgctggtaggaatcgggagaaaakaatttacaggtctctctaccttaatggaggaaaaggaccacagtggggagcttgaggagtgaaataaataatactatttccaaggaaatagccccaccta

SEQ ID NO: 16202 - DNA, 201 bp, Homo sapiens
cagaatacctctccctaccaccaccaaaatgcacacagtgctcaggactgtttatataatttcaagtgtacacgggttccctgtagcctatccatggaacrctggcgatggggcccagattaagaacgatcataaacatattgaagaattaaaaacctgaaatgtctagaaaggtttatccacacctgaggaaattcaagg

SEQ ID NO: 16203 - DNA, 201 bp, Homo sapiens
ccctctaaagagggtctattgtcatccccatcttacagaggaaactgagcacagaatggtaacttgcccaaggtcatcatttagccagaacttaaacccaytgggtcaaactccagcacccactatacaaagctgtctcatctcaaccagccctctctccttctgactcacttcggtatttcattttttaattgacatttg

SEQ ID NO: 16204 - DNA, 201 bp, Homo sapiens
aattaatatgcacaaggttatccactacagcattgtaattacgaaatattggaagcgacctagatgctcaatgttcatatgtaagagtggttgaataaacyacaatgtatccaacacaatgggatactatacagctataaagaagaatgaagatctctatgaacttatattgagtgatttccaggacacattaaatttaaa

SEQ ID NO: 16205 - DNA, 201 bp, Homo sapiens
cgcctcctgtcagatcagctgcaacattagattctcacagaagcatgaaccctattgtcaactgcgcatgtgaggaatccaggttgcatgctccttagaakaatcaaatgcctgataacctaaggtggtgatgctagcgctgtgtagtggctgcaaatacagattaacattggcagggaggtttgactgcacagagaccat

SEQ ID NO: 16206 - DNA, 201 bp, Homo sapiens
ctgcagctgacaatcccatctgattgatatgtggctgagagcctcttttcccctgcatttcgtgggaggtggagcatgctaactgaatgccctgcagagaragccgcagattcccccagcttttccccgcatgccttctatccagcacatcctctcctaaatatcactttcttcagagtttatccctgctccaaaacagtc

SEQ ID NO: 16207 - DNA, 201 bp, Homo sapiens
cctcatctccaagtaccatcacattgagggttagggattcaacatatgaattgtggggacacaaacattcagtctataacagaggggatcaatattaagargggctcaaattcacatattttaaaataaaatatttatgcaagtcgccttgatagatgatatagtacagagaatacaaccatgaacaggatgcagtcctgg

SEQ ID NO: 16208 - DNA, 201 bp, Homo sapiens
atctgaagtaattttgttattttagggacattaaaaattcatcatacagaatttaatatactcataaaataatcatgcttcataaatttaaaggtataatmttggagatgattaaatatttactagttgaatttactttaaaacgttttatatttgttgtagggtgctgaaactgctaggcttttttaaaatctagggtta

SEQ ID NO: 16209 - DNA, 201 bp, Homo sapiens
ccaggccctatatttctttgccctcagggccttcaaaattttatggagcaaaaaaccctcttggagggaaataagagatgagatttggagtcagaagagtkgcgttggaatgctgggtttgccattgactaactgtaggatccttctgagtttcccagttttctcatctgttaaacagaaatacctacctacctctgttga

SEQ ID NO: 16210 - DNA, 201 bp, Homo sapiens
ataaggtatctacaatagtcagacacatagaagcagagagtagaatgctggttcccaggagctgcagggagggaaggatgggatagggagtgtctattcarcaggtataaagtttcagttacgtgagataagaaagttctggagatctgtggtacagtattatgcctattataaacaatgctatattgcactgttaaaaac

SEQ ID NO: 16211 - DNA, 201 bp, Homo sapiens
aatcatgaatgtctagagattagcacagtacctatctcacagtcacaacccacagcctatggcatcaggcaattaagaatagtccttaaagggccaggcgygatggctcacacctgtaatcccagcactttgggaggccaagccaggcggatcacgaggtcaggagttcaagaccagcctcaccaacatggtaaaacccca

SEQ ID NO: 16212 - DNA, 201 bp, Homo sapiens
aacaagatcacaggactgttgaaaatggaatgagttagttcaagtaaagcacttagcacacactaactcgagcacttaataacattagcattattattccyataacccacccttacttggtttcactgcaggcaacctattattgatcccaaagtgcagttagatccccacatccctttaatttttgctctgctcgatgtt

SEQ ID NO: 16213 - DNA, 201 bp, Homo sapiens
taaaaaggtgaaattttggactccatgggcaatggccaccctgcccaatatccctgcctgctgttcaactcatgtcctgcccgcccacctccagcacctgyaagtcctactccacccagaggatgtcctggctgctcatatttcaacgaaatcgtaaggctcttcgagtattcctccttgatttatgacttggaaatgtca

SEQ ID NO: 16214 - DNA, 201 bp, Homo sapiens
ggcaatggccaccctgcccaatatccctgcctgctgttcaactcatgtcctgcccgcccacctccagcacctgcaagtcctactccacccagaggatgtcytggctgctcatatttcaacgaaatcgtaaggctcttcgagtattcctccttgatttatgacttggaaatgtcagcaggaatggaaaatccaggacatggc

SEQ ID NO: 16215 - DNA, 201 bp, Homo sapiens
acacactttgggtgtcactatctcccatcattcccagatgggaccatctagtggtaggaaacaagctcagagctcccactgattctacattatggtgaggygtataattatttgatcatatatattacaacgcaataataatagaaataaagtacacaataaatgtaatgcacttgaatcaccccaaaaccatccccaact

SEQ ID NO: 16216 - DNA, 201 bp, Homo sapiens
agcaaaaaaccctcttggagggaaataagagatgagatttggagtcagaagagttgcgttggaatgctgggtttgccattgactaactgtaggatccttcygagtttcccagttttctcatctgttaaacagaaatacctacctacctctgttgattattttccctttgcccctccaaatccattctctgccctccctttg

SEQ ID NO: 16217 - DNA, 201 bp, Homo sapiens
gtctctgccactttaggagagaaaacatgcttgaaagccactgatctaaataaatgtgtatgtgtgtatatgccaatggggatgtataaccaaacttttcrtatgacctaaacctaactaaatatataccaccttggcatattaatcagcaatgtatatttttgtcccatgtggaaacttaataagcacaccacaactaac

SEQ ID NO: 16218 - DNA, 201 bp, Homo sapiens
ccactgtttattatagactttacaaatgaggtgtccgataaacatttgcttgctaaaaagaaaaggcaggataatttttaaaaataaacaacgaagaaatkcttttgtggacccaaaagcaatttgtctgaaggggaaacacatctcaggttaaatttgtaatctgcacacatacagaaagaatgctaattattatcctta

SEQ ID NO: 16219 - DNA, 201 bp, Homo sapiens
cgacagacaattcttggtcatggttttagctgaaatgtttcatctcgcacgcagtgccctttcaggagggcagggctcccctcttaagccattcccagaaracaaggagaggactcagacccaacagaattaacacaggaaagacagaacatttgagggcccagatgtccttctcttcatccaggctctcaacacatggaa

SEQ ID NO: 16220 - DNA, 201 bp, Homo sapiens
caggcacatagtccctgatcggccatgtgccgacctctgtactgattctcaaaagactaagcccaccagcaaaagaggcactaggtctgtctgccttttcytttaaaaatggtagtaactccctgaatgttataagcttacatttgtaccattttccattgatcctaagacacaccttatgagtcaccaggagcaacacca

SEQ ID NO: 16221 - DNA, 201 bp, Homo sapiens
cagaagcatgaaccctattgtcaactgcgcatgtgaggaatccaggttgcatgctccttagaagaatcaaatgcctgataacctaaggtggtgatgctagygctgtgtagtggctgcaaatacagattaacattggcagggaggtttgactgcacagagaccataataaatcaattacttgcagactcctatcaaatcagt

SEQ ID NO: 16222 - DNA, 201 bp, Homo sapiens
agggagaacaatgtcgggggaatgcatgaaaaacattcaccgaggttgtactgacacaatccatcctatatcctgacttgagctgcttctctattaagcamggctgatatcactccatcaagtccaacataccggctttggtttgctcaggtataggggtttcaggggtagttgagcaatgttggcattggatcagtcatt

SEQ ID NO: 16223 - DNA, 201 bp, Homo sapiens
tccttctctccctgaattaaagaaaaacttagattatgctggagtccaagaaagtatttgcctattaggctttggcagtggttttcaagcttttaataccragagtcatctggggtattttctagaagagtagatttctcagctgcacggacaaagttcctgatttcgtggaatagggcctgaagtgtgcattttaataag

SEQ ID NO: 16224 - DNA, 201 bp, Homo sapiens
gttcaattgtgcatgtgtatgtttttcctttcatatttataactcctcctacagcttattaaatatgtatttcagccaccccactcagcataaatttctgytccctttgcccctcccttgaagtatctgtttctggcttctggccaaaggctgtgttttccagcctgtcagaatagccacctgcaggctgcaaccctttat

SEQ ID NO: 16225 - DNA, 201 bp, Homo sapiens
gtgcatgtgtatgtttttcctttcatatttataactcctcctacagcttattaaatatgtatttcagccaccccactcagcataaatttctgttccctttkcccctcccttgaagtatctgtttctggcttctggccaaaggctgtgttttccagcctgtcagaatagccacctgcaggctgcaaccctttatgagaaata

SEQ ID NO: 16226 - DNA, 201 bp, Homo sapiens
caatcatcgaatctggcaaacccatacttatcttccctctatccatagctgccaagtagtgtgggaaaaatcaccaaagcacatagattgtatcccacaartctattttctctaaatcctggctgggccctccctccttcttgacaatcctttctgttaacttttcctgttgcccttcagcacttctaacagcattagtct

SEQ ID NO: 16227 - DNA, 201 bp, Homo sapiens
agcaggacattgcatcaagctaatgggcttgtgttgaggtctctttcaactcaccccaagccttgggagagtcatatttctgacaactaaattcatgaagycttcctaagcctcttttaaatcatgattctccctttgaaacaataggcacacacattaaagtccaaatagtcattaacctttatcaccattcactaggag

SEQ ID NO: 16228 - DNA, 201 bp, Homo sapiens
cccaaacttgagtatcttgttctctgttgttctgttttgttttgtttttttgagaaggagtctcgctctgttgcccaggctggagtgcagtggctgatttyggctcactgcaagctccgcctcccgggttcatggcattctcctgcctcagcctctggagtagatgggactacaggcacccgccaccacgcctggctaatc

SEQ ID NO: 16229 - DNA, 201 bp, Homo sapiens
ctgaatgttgcactaaggagcttgggctttattctctaatgaatataagtacccacaatgctcctctgctctaaagttaagagcatcatctagggattgcygggcagaaggcaaatcccactggtttccttctacgcacacatatatcccctccaagggtgtccagtgagccaatcaaccacttttttcacttttatgcaa

SEQ ID NO: 16230 - DNA, 201 bp, Homo sapiens
gaagggatgatgttatgggaaccttgtcagggccattagggacatggctgtgggagaggggctgcccagcaggatctgtggccatctgcttaaaccccagscaagcaaggagggaagggggcagagatgggggaagaaaccccctgacttctttctctctccctaccggctggtcaccatagcttaagaaggaatgtttaa

SEQ ID NO: 16231 - DNA, 201 bp, Homo sapiens
aggagcttgggctttattctctaatgaatataagtacccacaatgctcctctgctctaaagttaagagcatcatctagggattgccgggcagaaggcaaaycccactggtttccttctacgcacacatatatcccctccaagggtgtccagtgagccaatcaaccacttttttcacttttatgcaaacacagcagctggat

SEQ ID NO: 16232 - DNA, 201 bp, Homo sapiens
aaaaaggttaggatggtaacatttatgtgtttttcacaataaaaagaaaaaaagaaaggggttggagatctgaatatgtgaaaggaatcataaaagtaatrcagaaaagcaactgtgaaggacaggctagcaccactcgggccaggaaacaaagggaagagcttagtgttgtcacccagaagctcggagcagggcagcaga

SEQ ID NO: 16233 - DNA, 201 bp, Homo sapiens
taaaaaggttaggatggtaacatttatgtgtttttcacaataaaaagaaaaaaagaaaggggttggagatctgaatatgtgaaaggaatcataaaagtaaygcagaaaagcaactgtgaaggacaggctagcaccactcgggccaggaaacaaagggaagagcttagtgttgtcacccagaagctcggagcagggcagcag

SEQ ID NO: 16234 - DNA, 201 bp, Homo sapiens
gtatctaaagtagtcaattcgtagagacagagagtagaatggtggtcatcaggggctgggggacgggcaatggggatctgtttcaagggcagagaggttcrgttttgtaagatgaaaaagttctggagattagatgcaaaacaatgtgaagctacttaacaccactgaactgtgcacttaaaaaggttaggatggtaacat

SEQ ID NO: 16235 - DNA, 201 bp, Homo sapiens
tccttcactgtagttctctatttctaccttctactaccttatttttctttctgcatcaaaacattcctttttttttttccactccatttttctaagtaggycagtcacaagtaagcatctttttgaaggctaatgcaatcccatcactgtgttctctacacttaactcagtatgaggatgccaaagtaagtcccaatgaaa

SEQ ID NO: 16236 - DNA, 201 bp, Homo sapiens
cacacacacatgcaggatattgcaagtcatttcttgggattgatacagctcctggacattagaggagtagctcacgtctgtaccccataacattgagccaygaaactcacacagatgagctttttctcatggttagtcccacccaagtacaaagagaccaagccagtcaaatagtttcaggaggaagcaatagcctccctt

SEQ ID NO: 16237 - DNA, 201 bp, Homo sapiens
cactgagtctccattttctagattcttctcttgtctcctcattcatcagagtctttctggcttcttttgccccttacccagcctggaatccattagaaatkatttaaatagggcttttgcaggaatcttagaattgctcactcccaaactgcctcctatggctggattgtcaatcatcgaatctggcaaacccatacttat

SEQ ID NO: 16238 - DNA, 201 bp, Homo sapiens
tgtctctttttctccgctaataacatggaaggggaaccaactcttatttcatctagctacactaatactacaactttgagtttacaaatttccttcctctsattttttaatcacaattccccataataactttattgagtagtagagagggggagagactatgaatttgtggatgatgtaactgggacaaaaaagagttgg

SEQ ID NO: 16239 - DNA, 201 bp, Homo sapiens
ataactaaaatgaagaggaaaataattccaactaagaataggataatgatgaatcaaatagtcctttcacttcctgcaatgttctgactcctttccgttamgtgtcttaaagtgagggactcagagctatctttcttacctactcaccaacagtatgtcatgttagtttgctgtgatcttaatgacaatatcctgctacat

SEQ ID NO: 16240 - DNA, 201 bp, Homo sapiens
gagccatcatcatgccactgcattctagtctaggtaacaaagtaagaccctgtctccaaaaaaaaactcatggcataatataaatggaagagatatataayagaattctagcagtaatattactgtaagtctgtacaacctaaatgtacacacaaggactaaaaggtacatggaccaatgaatacatcagcttggtgcaca

SEQ ID NO: 16241 - DNA, 201 bp, Homo sapiens
atgagagtaatctagggttgttatgagaattaaattagagaagtaattccctattccctacttcctaactacttataatctccttaacacaaaggctcagwtgatgaaaaaatagctcagatgatgaaaaataggaatgtgcacatgtgctgatggacagaaaatttctgtgaattctaagtcatactgggaaattcaagg

SEQ ID NO: 16242 - DNA, 201 bp, Homo sapiens
cttaacacaaaggctcagatgatgaaaaaatagctcagatgatgaaaaataggaatgtgcacatgtgctgatggacagaaaatttctgtgaattctaagtsatactgggaaattcaagggctttgtttggcatttgtcttaagctggcttgtctaatgagaaaagcagaaagatatctaacaatttgtagaccttcataac

SEQ ID NO: 16243 - DNA, 201 bp, Homo sapiens
acatgtgctgatggacagaaaatttctgtgaattctaagtcatactgggaaattcaagggctttgtttggcatttgtcttaagctggcttgtctaatgagraaagcagaaagatatctaacaatttgtagaccttcataaccccgcaaatcagagtatggtccagcagcatcaccaacacctagaagcctattagaaatgc

SEQ ID NO: 16244 - DNA, 201 bp, Homo sapiens
ctgggaaattcaagggctttgtttggcatttgtcttaagctggcttgtctaatgagaaaagcagaaagatatctaacaatttgtagaccttcataaccccrcaaatcagagtatggtccagcagcatcaccaacacctagaagcctattagaaatgcatgttctgtaccccttaccaccagaatctgcattgtaacaagat

SEQ ID NO: 16245 - DNA, 201 bp, Homo sapiens
gaagtgggacagcctgctggaggaaatgccccctctgactaagcccagagaagatgctgaacaggcaaagccatcaggaccaggacagactcacctccctyccctttaccatgaggttttttgaaaagccaagggagatctcgactgggctcctgccaaaatcattctatcattttcaggtgaattaaatatgagctagca

SEQ ID NO: 16246 - DNA, 201 bp, Homo sapiens
aaatctctgcctcatgccctgccctggactgggtgtcctttgatgagctcccactatgctgtgtacctcttagcactttcaactgtcattaactaatcaaytgattgattacatgaattaaataatgatttgtttattctgatggtggcaccaaggggtagcttggtgttacgctgtgtgtggcaggactgcaggaggggg

SEQ ID NO: 16247 - DNA, 201 bp, Homo sapiens
agacaattcttggtcatggttttagctgaaatgtttcatctcgcacgcagtgccctttcaggagggcagggctcccctcttaagccattcccagaagacawggagaggactcagacccaacagaattaacacaggaaagacagaacatttgagggcccagatgtccttctcttcatccaggctctcaacacatggaatacc

SEQ ID NO: 16248 - DNA, 201 bp, Homo sapiens
cagaagacaaggagaggactcagacccaacagaattaacacaggaaagacagaacatttgagggcccagatgtccttctcttcatccaggctctcaacacrtggaataccgaaaccttttccagcccctttctcacaatcacctggagatgctggtttaaagatgccaattccaggattccaccctagacctattgaatca

SEQ ID NO: 16249 - DNA, 201 bp, Homo sapiens
aaaaaaaacaaagttcaaagttccagattgaacctgggtggcacaggaatgcaggggcttttctttgtttattttgaggaagagcagggacacattggcarccaaatcccaaaaccaagacggaatcacaaagccatttcccgggtgtcttgttgctcaagaatctccctctcccttgttgctgggtctagacgcagcctc

SEQ ID NO: 16250 - DNA, 201 bp, Homo sapiens
ggtcataactaaaatgaagaggaaaataattccaactaagaataggataatgatgaatcaaatagtcctttcacttcctgcaatgttctgactcctttccrttacgtgtcttaaagtgagggactcagagctatctttcttacctactcaccaacagtatgtcatgttagtttgctgtgatcttaatgacaatatcctgct

SEQ ID NO: 16251 - DNA, 201 bp, Homo sapiens
ctacttaagggatggctcttcctctcttaggctccagaaagcagttcggttgttactttgcaaaaattatgcactattgtgttcattcctccaaccatgcrtatctgcttcactaatatcaaattaaagtcctgctgctctgtttctacgcctttttgcacacaaggtaatttttcattttaatgtcaaatcatagtataa

SEQ ID NO: 16252 - DNA, 201 bp, Homo sapiens
ctggaaggtggaggttgcagtgagccaagatcacgtcattgcactccaacctgggcaacaacagtgaaactccatctcaaaaaaaaaaaaaaaatatatawatatatatatatatatatatatatatatatgctcctatcaccccatcactcagagaattataagagattcaggagctctgtcaaaaaccaaggacaaaga

SEQ ID NO: 16253 - DNA, 201 bp, Homo sapiens
agggttgagagaaccaaaaagagatggcaggtcacccagggactagcaacaggggaagcagttatcacccaggcttaaagggataaagagagggagtaacyactccctactactagacaccaatgagagccatcagagaggcctcctaagttgtggacttgacatagagaaacaccactactgccaaaccatttggaaagt

SEQ ID NO: 16254 - DNA, 201 bp, Homo sapiens
ccagtaatttggttccaggttcatatagtatgcaaatgttttctgcatgtcaacatctgcaatcatgcaaatcattggcagaaatgttgactaggtcaagyggaataccagatgattagtcagtacacacctattggctacataaaggcaggtattcatgtgggtcctttattttgaaatattctttagggctttcccttc

SEQ ID NO: 16255 - DNA, 201 bp, Homo sapiens
cattctatcattttcaggtgaattaaatatgagctagcagacactgagcactcacagtaattcggtttctgtacagctacattctacaaagcagctttgayccatgctgctaccttgttgagctggccctgtccctcattttacagatgaggaaattaggaaactccctcaagatcacaaagcagcaagtgggaagaaaaa

SEQ ID NO: 16256 - DNA, 201 bp, Homo sapiens
ctctccaccaaaaacaaatgcttgtttttaacaaggattggagattttttaacaaacatctccaacgctgatacctgctactctgaaacgtcttgactctyaagtcacggcccagcctatgatgttcagaggctgaccatcagtttaggccatgccaggcccatgaggtaggggaatttcatggaactcaatgagactcca

SEQ ID NO: 16257 - DNA, 201 bp, Homo sapiens
tactctgaaacgtcttgactcttaagtcacggcccagcctatgatgttcagaggctgaccatcagtttaggccatgccaggcccatgaggtaggggaattycatggaactcaatgagactccattcaacctgacctttttttttgcatttttaaattagagtataacagtcaccaccagtggcgaatggcctggatagctg

SEQ ID NO: 16258 - DNA, 201 bp, Homo sapiens
tgactcttaagtcacggcccagcctatgatgttcagaggctgaccatcagtttaggccatgccaggcccatgaggtaggggaatttcatggaactcaatgrgactccattcaacctgacctttttttttgcatttttaaattagagtataacagtcaccaccagtggcgaatggcctggatagctgcccctgcagcctccc

SEQ ID NO: 16259 - DNA, 201 bp, Homo sapiens
ctctcttaggctccagaaagcagttcggttgttactttgcaaaaattatgcactattgtgttcattcctccaaccatgcatatctgcttcactaatatcarattaaagtcctgctgctctgtttctacgcctttttgcacacaaggtaatttttcattttaatgtcaaatcatagtataattttttgaggatcttctaaac

SEQ ID NO: 16260 - DNA, 201 bp, Homo sapiens
tgaagtatctaaagtagtcaattcgtagagacagagagtagaatggtggtcatcaggggctgggggacgggcaatggggatctgtttcaagggcagagagkttcggttttgtaagatgaaaaagttctggagattagatgcaaaacaatgtgaagctacttaacaccactgaactgtgcacttaaaaaggttaggatggta

SEQ ID NO: 16261 - DNA, 201 bp, Homo sapiens
aaaatatgggcacttttaggaaatatataacaaccagaatacctctccctaccaccaccaaaatgcacacagtgctcaggactgtttatataatttcaagkgtacacgggttccctgtagcctatccatggaacgctggcgatggggcccagattaagaacgatcataaacatattgaagaattaaaaacctgaaatgtct

SEQ ID NO: 16262 - DNA, 201 bp, Homo sapiens
gtttcaaggccctgcaggggaagctcagatgtggcctcacttaaattattactactatgaattataatatatagtgctttttagttaaaagagtttttacygttattattattttaacctaatcttcatctgacctccccagtaattccatagtgtatcagctgcggtcccagcatggatcagatggccattcaaagagtt

SEQ ID NO: 16263 - DNA, 201 bp, Homo sapiens
aaaaaacccaaccactcccaaacctcctcaagccaagctctcagattcagcataacatttaagatccagaatcaggcgccacaaacccatcttgaatttaycaataaccacaagagagagaaaatgtatacgttgaaattaggtcatcattattgtacaggattttgtttcagagaaagttgttaagtgtttatttgggac

SEQ ID NO: 16264 - DNA, 201 bp, Homo sapiens
agtcaaaaccacaaatgtcagggtgcactttattagtaaaactgactcactgtgcactaggcaaagaaattcctgcattccactctaagaactgtaaacgrggccccagctagctgttctctcttgtgctacttaccatgcttagatcttgatttgaacaaatcgactataaaaagactgtgctggcaattgaatacatgc

SEQ ID NO: 16265 - DNA, 201 bp, Homo sapiens
ctgttaatttttttaggtgtattaatgacattatgttacgaaaatataattttcttttttcttttttttttggagacagggtcttgatcaggctggagtgsagtgacataatcacagctcactgcatcctcagactcctgggctcaagcaatcctcccatctcagtcttccaagtaattaggactagaagtgtgtattagt

SEQ ID NO: 16266 - DNA, 201 bp, Homo sapiens
gcccaagcaagaggtagcagtgacctagactggagtggtagggatagtaatggcatgaagtaaatagactgaaatatattcggaagtaaaatcttagaggrgtgaatatggatgcgagagctcctggtttctggcatgagcaagtctccattttgcacaataggaagagaggacgaagagctagaatgaggaagcagagta

SEQ ID NO: 16267 - DNA, 201 bp, Homo sapiens
gcctgtaatcccagctactcaggaggctgagacaggagaatggcttgaacctgggaggcggaggttgcagtgatccgagatcatgccattgcactacagcmtgggccacagagcaagactccgtctcaaaaaaaaaaaaaaaaaaagaatagtccttaagcccttaagatagatgtccatgtcaagtgttagaatatgcac

SEQ ID NO: 16268 - DNA, 201 bp, Homo sapiens
cctctcttaattttttttttttttcattttatctcaaatgccctcagagctttaaacagggggtacaatgtgacacaatttccattttaagaaagtcactstggctgtatgaagaatgaactggtagggttagtgtagagatggtggagtaagaagaactgttgtagaagcccaagcaagaggtagcagtgacctagactg

SEQ ID NO: 16269 - DNA, 201 bp, Homo sapiens
cctccaggcccttttgttaattggacctggcaatagctgtcactcccagccatcctgactccggtcctttccatttccctgccactcagataaaggaacawgaattctgacgcggggcatatgaaaaggaaagacagctcttccatagtcacacccagaagagggcagatgaacctgagaaataaaaataaaatcctaagc

SEQ ID NO: 16270 - DNA, 201 bp, Homo sapiens
taaatttataactaaattctgtacattattatttagatcaatggaacagaacagagccctcagaaataatgccacatatctacaactatctgatctttgasaaacctgagaaaaacaagaaatggggaaaggattccctatttaataaatggtgctgggaaaactggctagccatatgtagaaagctgaaactggatccct

SEQ ID NO: 16271 - DNA, 201 bp, Homo sapiens
attgaaagcagacatattatagtgagatttcaatttcccattaaattcaggaaaagaaatggatacttctatcatcatttctattcaacattgtactggasattatatcaaataaaataagccaataaagaaaactaaatgcataaagactagaaagaaaaaacaaacctctgatttttcagaccaaattattatatacac

SEQ ID NO: 16272 - DNA, 201 bp, Homo sapiens
catggtgaaaccccgtctctattaaaaatacaaaattagccaggcatggtggcagatgcctgtaatcccagatacccaggaggctgaggcaggagaatcayttgaacccaggaggcagaggttgccatgagctgagatcatgccactgcactccagcctgggcaacaaagcaagactctgcttcaaaaaaaaaaaaaaaga

SEQ ID NO: 16273 - DNA, 201 bp, Homo sapiens
atacagaatttaatatactcataaaataatcatgcttcataaatttaaaggtataatcttggagatgattaaatatttactagttgaatttactttaaaaygttttatatttgttgtagggtgctgaaactgctaggcttttttaaaatctagggttagtttttgctggtttataagaagcattccaaaactgcaaattct

SEQ ID NO: 16274 - DNA, 201 bp, Homo sapiens
attaaaaacctgaaatgtctagaaaggtttatccacacctgaggaaattcaaggtggggatgggatgggatggatgaggacacaagcttgaaaatattctytttactcatgtcttgattgttaatagaaatctggcagaaataaaatagatatatgcaatatttgtttctggtccttttattaatctgaagtaattttgtt

SEQ ID NO: 16275 - DNA, 201 bp, Homo sapiens
ataccatcaacaatgcatccaattcaattgacatgatgacagtgtgaactgccatgatattattaacgactgtatctccacagagcctgaccaacaccatsagctgatccccagagatgttaggatgtgacagatgtgcattctggaatcaattaaatagggctcccacactgtaaccctgtgctcttgtcttaatgtctg

SEQ ID NO: 16276 - DNA, 201 bp, Homo sapiens
aacagaatttataggaatgaaaaatatagtgcttaaaattagaagttcaaggccaggcacggtggctcacacctgtaatttcagcactttgggaggccaaggagggtctatcacttgaggctatgagttcaagaacagcctggccaacatggcaaaaccccatctctattaaaaatacaaaaattagctgggcatagtggt

SEQ ID NO: 16277 - DNA, 201 bp, Homo sapiens
ctatacaaagctgtctcatctcaaccagccctctctccttctgactcacttcggtatttcattttttaattgacatttgctaagaaggtcaaatggatgaygaaggatgttgttgagcactcattttagcaaagttgtatctagcacttaatcatgtgaccaattgctgtactaagactaggggataaagggaggggagga

SEQ ID NO: 16278 - DNA, 201 bp, Homo sapiens
aataggcagccgtgtggtcaggccagggcacaagattcacacactccctctctccctcagtaatgctcaggttgtctacaggaaacatcctatagtcctayatatcttgttccccacgttgaacaaagtgaggagaaagacataaaaggatttctctgctcttgctcagttttcatctcatgaaagaataagacttgcctc

SEQ ID NO: 16279 - DNA, 201 bp, Homo sapiens
tctttctttggctcatagttttccttgtttggcctttcaaatacttatacgtctgattattttcaagtctggaagactacataggtagcattacacagatmtggcttctcatggctgacatctcaggaagctctcaaattcacaaccccacatgtcaaaagtaaggaaacagagaaagcttccaaaaaggcagggcagagc

SEQ ID NO: 16280 - DNA, 201 bp, Homo sapiens
ggcagccgtgtggtcaggccagggcacaagattcacacactccctctctccctcagtaatgctcaggttgtctacaggaaacatcctatagtcctatatawcttgttccccacgttgaacaaagtgaggagaaagacataaaaggatttctctgctcttgctcagttttcatctcatgaaagaataagacttgcctcaaat

SEQ ID NO: 16281 - DNA, 201 bp, Homo sapiens
tgaaaagtgcctagctagttctcaagactataatggagtcagatgagagaaaaaggatttgatccacttggggcagaatagggaaggttttgttaactgtraagttttaaaaggcagagtaaaggagaataaaaaagacttatggttgcacatctgcagactttcacaatcataagaccaaaaactagtaatttcccatcc

SEQ ID NO: 16282 - DNA, 201 bp, Homo sapiens
taaaaggcagagtaaaggagaataaaaaagacttatggttgcacatctgcagactttcacaatcataagaccaaaaactagtaatttcccatcccagcccmggagaaatgactcactgggctgtccttcataggcccaaatcccaaagtttcttataaaaaggtgaaattttggactccatgggcaatggccaccctgccc

SEQ ID NO: 16283 - DNA, 201 bp, Homo sapiens
gtataagaatcactgcatttacctgaaatttttctgagaaaatcaacatatctatcttagaaatcatagaatctctgagggggctgagaccttagataacwttaaaagcaaacttctttggtagggtgaccaattcttccaggtttgcctgggatttttctgattttagcactgaagattctaagtcttagaaaaatctct

SEQ ID NO: 16284 - DNA, 201 bp, Homo sapiens
gagttgctcgaacccaggaggcagaggttgcagtgagccaagattgcaccattgcactccagcctgggtgacaagggtgaaactctgtctcaaaaagaaaraaaaaaaaatagaaaaacatgcttcagaaaggttcctagataaaaaaatcaatacacaaacatttgttgaactcttattccattcacactagcaacaaaa

SEQ ID NO: 16285 - DNA, 201 bp, Homo sapiens
ttatcaaaggaaaccagactgccctcagcttgtggacccacggctctcactgattccagcaggaattatgggcatggcattgtgagccagaatgtgacctrtctcctatgaatgagtcctacaccataggaagggaatttgaagttaacagaaagagtcctgtgcttcagccatctgctcagggattccagtttttttata

SEQ ID NO: 16286 - DNA, 201 bp, Homo sapiens
gaaaattgtatacccaaaataatgctgcagaagagtaattattgtcatagcaaaatgtgcaccttgtgacactaaacaaaataaacatccatataagtatrtaagtgtaagctatatttactgctttggactatagtatgatcttatttttgtggaatacgtatgtgtgtaatacatactgtattatatacactagaagac

SEQ ID NO: 16287 - DNA, 201 bp, Homo sapiens
ctatagtatgatcttatttttgtggaatacgtatgtgtgtaatacatactgtattatatacactagaagacaaacacaaatattaacagtgattctgttgrgttataggtgatgttttcattgtgatgtgtgtgtgtgtgtgtgtgtgtgtgtgtgtgtgtgtgtgtgcatcccaaatcttgtatatcaagcatggcacta

SEQ ID NO: 16288 - DNA, 201 bp, Homo sapiens
tatacaaaaattaattcaagatggattaaagacttaaacgttagacctaaaaccataaaaaccctagaagaaaacctaggtattaccattcaggacatagrcatgggcaaggacttcatgtctaaaacaccaaaagcaatggcaacaaaaggcaaaattgacaaatgggatctaattaaactaaagagcttctgcacagca

SEQ ID NO: 16289 - DNA, 201 bp, Homo sapiens
tccttaaagggccaggcgtgatggctcacacctgtaatcccagcactttgggaggccaagccaggcggatcacgaggtcaggagttcaagaccagcctcamcaacatggtaaaaccccatctctactaaaaatacaaaaattagccaggcgtgatggtgggcgcctgtaatcccagctactcaggaggctgagacaggaga

SEQ ID NO: 16290 - DNA, 201 bp, Homo sapiens
accataaaaaccctagaagaaaacctaggtattaccattcaggacatagacatgggcaaggacttcatgtctaaaacaccaaaagcaatggcaacaaaagscaaaattgacaaatgggatctaattaaactaaagagcttctgcacagcaaaagaaactaccatcagagtgaacaggcaacctacaaaatgggagaaaatt

SEQ ID NO: 16291 - DNA, 201 bp, Homo sapiens
gcctcccctgcttccttgatgggcttcctttcatcaaaaacactccaaaaacatccctggtatcactatgaaggtgagaattcaaccgatgtttgaagcawttcacttcaccaaaatgaaacaattctaataaaaggtgctccatatctctgaaattaataaaccatctcaaacatgtttaattgcccaaaacatttttta

SEQ ID NO: 16292 - DNA, 201 bp, Homo sapiens
acacatggacacaggaagggaaacatcacactctggggactgttgtggggtgggggtggggggagggatagcattaggagatatacctaatgctaaatgaygagttaatgggtgcagcacaccagcatggcacatgtatacatatgtaactaacctgcacattgtgcacacgtaccctaaaacttaaagtataataataaa

SEQ ID NO: 16293 - DNA, 201 bp, Homo sapiens
atcacactctggggactgttgtggggtgggggtggggggagggatagcattaggagatatacctaatgctaaatgacgagttaatgggtgcagcacaccakcatggcacatgtatacatatgtaactaacctgcacattgtgcacacgtaccctaaaacttaaagtataataataaaaaaaagaataaagtttagaaaaat

SEQ ID NO: 16294 - DNA, 201 bp, Homo sapiens
ttataggaaatggttctacaaatatgttgactcttctctttaaaaactgtaataaaagtgtgggcttaagttatggggccattttccatgtatttgatttyagtcttttctaataaggtacttagtgtttttttaatggacatattatagatctttgtctataatggacagatttagcactttatcaagacagaggggtca

SEQ ID NO: 16295 - DNA, 201 bp, Homo sapiens
ccacacctgaggaaattcaaggtggggatgggatgggatggatgaggacacaagcttgaaaatattctttttactcatgtcttgattgttaatagaaatcyggcagaaataaaatagatatatgcaatatttgtttctggtccttttattaatctgaagtaattttgttattttagggacattaaaaattcatcatacaga

SEQ ID NO: 16296 - DNA, 201 bp, Homo sapiens
tttgctggtttataagaagcattccaaaactgcaaattctttctttaaataaagaactgtactcttttttaaaaaaatccattgtccatctcacattcacrtgtctagaaggaggacaggtcctggacacttgctctattcctccacactcttgagacctgtcctatctcctgtgtgttctgagtcattagggcaagtagc

SEQ ID NO: 16297 - DNA, 201 bp, Homo sapiens
gtgagttggcgagtggtcagggagtttccagtcttttacaactctcgaaaagcaacctgatttttcatttgaagtcaggatgttgaagtgtccctgaatcrctggggactgacatctgggatcggagccttgtcttgctggagccagagtctccgtatcacttaaggacacagaaatcctggtttctttcccacattaact

SEQ ID NO: 16298 - DNA, 201 bp, Homo sapiens
aaatgtgtaggggattttccacacccacaaccaattctacaattccttggcaccaaccgggtattctacaattcagttcaattctgacactaactaaccasagttagtatcagacaccaaaggtttaaggactcagtaccacgaatcagtcacaagtatgaggttcccagattactgatgcctcatctgacttagctacaa

SEQ ID NO: 16299 - DNA, 201 bp, Homo sapiens
gacaatttaaatagcttcttggcaatggtctgtaaaactgaatattaaatagaagagtctttccaaatcctatgcagaaaaggcagccttatcaggaaacraaatagaagttgagatttgcccaggcatggtaggaagagacacttcagaaatgaagccagtcatggtgaccttaaatgacctttgttaacaggaggtggt

SEQ ID NO: 16300 - DNA, 201 bp, Homo sapiens
taggatccttctgagtttcccagttttctcatctgttaaacagaaatacctacctacctctgttgattattttccctttgcccctccaaatccattctctkccctccctttgccatcttattttgtatcttgtaaggatgacttttacagaccaaatcacctaggctcccttgtatgtgtatatgtttgtaggaatattga

SEQ ID NO: 16301 - DNA, 201 bp, Homo sapiens
ggagctgagagaccccatgctgcagctcagagccactaacttttcctccagatagcaaggatctaggaaataattgagccacaaataattactggtatgcktggccctgggaactattccatggccaagagctcaagctggaaaatcccctttcctgaccttacttcctgcacttcttaccccacagccctctcatccctg

SEQ ID NO: 16302 - DNA, 201 bp, Homo sapiens
agttggcagacctcaataaaccatcgcatggttgtattgaagttgaacagttagaatggccaggtggcatattaccaaaaagaatgccaagggaaaactamaaaacctctttgtgaaggtcttattcctaaatacacaaacattgaaccccaaaaaatgaacaaatcttcaagattgcagattgatttaataaatttattc

SEQ ID NO: 16303 - DNA, 201 bp, Homo sapiens
tggccattcctttgctctacatgctgcaatgaacatctgagtacacaggtctgtttgtgcatatacaattacttcctagcaataaatttctaaaagcacartaactggaacaaacaccacatatattttctggattcttgctatatattactgaatttccccagaaatacaaacacagttcgtactacccagtgggtactt

SEQ ID NO: 16304 - DNA, 201 bp, Homo sapiens
tccagctatggggtttgtcatgtttcctcctcagtgttgttttgatcagggaaagaagtgtcaagacaaagccttcattagcctgggtccctgggagaacrcaactcttagtagggtgaatatgagggtgatggatgtgtcagagttcccctgcggacccatattggacatgcaggttgagtaggaaacgaagcccctgag

SEQ ID NO: 16305 - DNA, 201 bp, Homo sapiens
gctggaaatatacatatcaagcttaagttatctgatttaagaaagcagtagtggtggctgggcacagtttgttgctattttatgagcaacaaagtgtaatyccagcactttgggaggcctgaggtcaggagttcaagaccagcctggccaacatggcaaaaccccgtctctactaaaaatacaaaaaaatcagctgggaat

SEQ ID NO: 16306 - DNA, 201 bp, Homo sapiens
aaagactgtgctggcaattgaatacatgcgactatggtctgggtattacttactattaaggaattactgttaatttttttaggtgtattaatgacattatrttacgaaaatataattttcttttttcttttttttttggagacagggtcttgatcaggctggagtgcagtgacataatcacagctcactgcatcctcagac

SEQ ID NO: 16307 - DNA, 201 bp, Homo sapiens
catgctaactgaatgccctgcagagagagccgcagattcccccagcttttccccgcatgccttctatccagcacatcctctcctaaatatcactttcttcagagtttatccctgctccaaaacagtcaatgggttctggaggtctatgcttcagcacagtatggtgggtcaaagggcaggctcacagccatactacaaagg

SEQ ID NO: 16308 - DNA, 201 bp, Homo sapiens
atgctaactgaatgccctgcagagagagccgcagattcccccagcttttccccgcatgccttctatccagcacatcctctcctaaatatcactttcttcagagtttatccctgctccaaaacagtcaatgggttctggaggtctatgcttcagcacagtatggtgggtcaaagggcaggctcacagccatactacaaaggg

SEQ ID NO: 16309 - DNA, 201 bp, Homo sapiens
caatagcaagaaatattgaactttccggaaaccatgtgtaagctatttcttggagggacacttaaaccaactgagaacacagaaatcccacaaggaaaaamacaacctgctgataatgaactctatttaaaaataaagtattacaatacacacacacaaacacacacacacacacacacacacacacacacacacacaaga

SEQ ID NO: 16310 - DNA, 201 bp, Homo sapiens
tatatgaaatttaaataaatgttaggtacaattcctcatctgtgacaccaccaaatgtcatgttgatgcatcaatctctgcatattctattaatatatatttactgagttataaaaaatgcatgtttgtctaaccaaaggttgctattctcaaacttactttaaaaaaaaaaaaggtagggggaggagctagaattcattg

SEQ ID NO: 16311 - DNA, 201 bp, Homo sapiens
atatgaaatttaaataaatgttaggtacaattcctcatctgtgacaccaccaaatgtcatgttgatgcatcaatctctgcatattctattaatatatatttactgagttataaaaaatgcatgtttgtctaaccaaaggttgctattctcaaacttactttaaaaaaaaaaaaggtagggggaggagctagaattcattga

SEQ ID NO: 16312 - DNA, 201 bp, Homo sapiens
acatggtgaaaccctatctctatcaaaaatataaaaaattagttgagcatggtggcatgcacctatggtcccagctactcaggaggctaagatgggaggaycaagcactcgagcccagaaggtggaggttgattgcagtaagccgagatggtaccactactctccagtctgggtgacaaagtgagaccctgtctcaaaata

SEQ ID NO: 16313 - DNA, 201 bp, Homo sapiens
tatgaaatttaaataaatgttaggtacaattcctcatctgtgacaccaccaaatgtcatgttgatgcatcaatctctgcatattctattaatatatatttactgagttataaaaaatgcatgtttgtctaaccaaaggttgctattctcaaacttactttaaaaaaaaaaaaggtagggggaggagctagaattcattgac

SEQ ID NO: 16314 - DNA, 201 bp, Homo sapiens
aatttgaaacctatccatgattttaagatatgaaaaacttagaaaattagaatacaagggaactttcttaatttgataacaggcatctattgaaagcagayatattatagtgagatttcaatttcccattaaattcaggaaaagaaatggatacttctatcatcatttctattcaacattgtactggagattatatcaaat

SEQ ID NO: 16315 - DNA, 201 bp, Homo sapiens
gaaggggccaggcgtggtggctcatacctgtaatcccagcactttgggaggccaaggtgggcaggtcacaaggtcaggattttgagaccagcctggccaayatggtgaaacctcatctttactaaaaatacaaaaaaaaattagccaggcatggtggcatgcacctgtagtcccagctactcgggaggctgaggcaggata

SEQ ID NO: 16316 - DNA, 201 bp, Homo sapiens
atgaaatttaaataaatgttaggtacaattcctcatctgtgacaccaccaaatgtcatgttgatgcatcaatctctgcatattctattaatatatatttactgagttataaaaaatgcatgtttgtctaaccaaaggttgctattctcaaacttactttaaaaaaaaaaaaggtagggggaggagctagaattcattgact

SEQ ID NO: 16317 - DNA, 201 bp, Homo sapiens
acagaaaatccaagaaaatgtaccatattattagaatagaaaaacatgggctgggcacagtggctcacacctgtaatcccagcactttgggaggccgaggygagctgatcacctgaggtcaggagttcgagactagcctggccaacatggtgaaacctagtatctactaaaaatacaaaattagcctggcgtagcagtgca

SEQ ID NO: 16318 - DNA, 201 bp, Homo sapiens
ttgatgcatcaatctctgcatattctattaatatatatttactgagttataaaaaatgcatgtttgtctaaccaaaggttgctattctcaaacttactttaaaaaaaaaaaaggtagggggaggagctagaattcattgactcagagaaatcacaaaagaaaatgaaagaagtagcacacccagaaaatgaaaaaacagct

SEQ ID NO: 16319 - DNA, 201 bp, Homo sapiens
attcccacattcttaaatactctctgagaagggtatttttaatggctgaaaaacattctaccatatggatgggccacaattatttcagatatttcctcacwgttggaaatgtaggtcatggccattcctttgctctacatgctgcaatgaacatctgagtacacaggtctgtttgtgcatatacaattacttcctagcaat

SEQ ID NO: 16320 - DNA, 201 bp, Homo sapiens
cctgggagaacacaactcttagtagggtgaatatgagggtgatggatgtgtcagagttcccctgcggacccatattggacatgcaggttgagtaggaaacraagcccctgagatgtcggttgtttttttttttcactgttctatgactttgcctattacacagggtaactacaatgcagaagtagaaaaatacatgaactc

SEQ ID NO: 16321 - DNA, 201 bp, Homo sapiens
atgtgtatctgtaaaattagggtagttacatctgtttctagtttactcagaaatcttacaaaatagtagtggtggagggaatggaaatggttaatgggtamaataatatagttagaatgaataagatctactatttcatagcacaagatgattacagtcaacaattatttattatacacttaaaagtaaataaaagaattg

SEQ ID NO: 16322 - DNA, 201 bp, Homo sapiens
aggagcaattcctcagatatatacctaataatgcaattacttggtaaattgtattttcaaattaatttctacattgtttttaagaatattaaaattgaatrtgtttttgaatattactcagaattttttaaaaatacaaatattttgaatatcttatatacacaatcatataagtaaatagagacttttactttattcttt

SEQ ID NO: 16323 - DNA, 201 bp, Homo sapiens
atctgtgtgtcaatgtacattttattcatccatcgtttgggtcagggtctgcaggcagacccctgcagctaatgccctcttgtgaggagcaattcctcagrtatatacctaataatgcaattacttggtaaattgtattttcaaattaatttctacattgtttttaagaatattaaaattgaatgtgtttttgaatattac

SEQ ID NO: 16324 - DNA, 201 bp, Homo sapiens; identical to SEQ ID NO: 1928

SEQ ID NO: 16325 - DNA, 201 bp, Homo sapiens
gtaatgcaaaaatattctgcattgtattcactgcatgatttaaatatgtttaaatgtgtgtgagatctgtagtaatggctcccacttccattaacagtatraactgtgttttctctgttttctcatgatcatttctgttaaaaattttatgtatttattaaactatttaaagaacaaactttccacattgttgattttctc

SEQ ID NO: 16326 - DNA, 201 bp, Homo sapiens
ctcccacttccattaacagtataaactgtgttttctctgttttctcatgatcatttctgttaaaaattttatgtatttattaaactatttaaagaacaaaytttccacattgttgattttctccattttatttgacttttattgattttaaagaaaatgtggtatatgcatagaatattatttaaacttaaaaatggaaat

SEQ ID NO: 16327 - DNA, 201 bp, Homo sapiens
actgggtatcactatgttgctggggattgaatttttgggctcacacagtcttcctacctctgcttctgtagtagttaggactacaggtacatgccgccgtrcctggctacatttcacatattttgattttttttctcacttttatgttttccattatttcatttagttcttgttttcaaaaatcccatttctcactgatgt

SEQ ID NO: 16328 - DNA, 201 bp, Homo sapiens
agacagactaggccagataaagaatattactgcacatgcttttaatttcatgctttatttgcttaagtagttctgtcttaaggaggttctcagaaacctcmactgtgtaataaagagatataatttttcactccagataaccacattctaataagaactacacacacaaacacacacacatatatatatatatttgagtct

SEQ ID NO: 16329 - DNA, 201 bp, Homo sapiens
ttttgactgggtatcactatgttgctggggattgaatttttgggctcacacagtcttcctacctctgcttctgtagtagttaggactacaggtacatgccrccgtgcctggctacatttcacatattttgattttttttctcacttttatgttttccattatttcatttagttcttgttttcaaaaatcccatttctcact

SEQ ID NO: 16330 - DNA, 201 bp, Homo sapiens
agccaagacaattgatgaagtgactaccctgaataacagatattcaaggtcgacaagacaaccttatatcggaataagatgccacctagcactttcatagstagagaaaagtacatgcctggcttctaagcttcaatagacaggcttactctcttgctgctactaatgcaattgtgactttaagttgaagccattgctcat

SEQ ID NO: 16331 - DNA, 201 bp, Homo sapiens
aatataactaaattttatttagttatattttatttaagagctaaaatatttagagctaaaatataaattaataaaataatagtttaaaaaatgactataaytggtgatttactgtgtacaagacaaagttctaaatgcctcagaaaaatttgtatctcaaatctacccaaccaaggaaatactattattattcccatttat

SEQ ID NO: 16332 - DNA, 201 bp, Homo sapiens
taaaataatagtttaaaaaatgactataattggtgatttactgtgtacaagacaaagttctaaatgcctcagaaaaatttgtatctcaaatctacccaacsaaggaaatactattattattcccatttatagataaggaaattgagatgtagaaatgatacacaagtcattcaaaattttactgctagtttgtgacaaagt

SEQ ID NO: 16333 - DNA, 201 bp, Homo sapiens
gatgtgaagacctgattggaccttagagaatatatcattgtatatatacaggaatgcaaaaattgtaaatttggaggagataacattaacgaaatgttggyatggaataatggagaagacagactaggccagataaagaatattactgcacatgcttttaatttcatgctttatttgcttaagtagttctgtcttaaggag

SEQ ID NO: 16334 - DNA, 201 bp, Homo sapiens
caggcagcgaaaaaaagttatatattaacatgtaatgtataaaattataatatatgaacatattatgtatgcattaaataatagatgcccaaaatatgtayaaattatgttttaaattttaaaaattatgtgtgaaatctctcatgaatatccaagttaaaatgtcatcctaccaattgcgttaggttaaatcagtttcta

SEQ ID NO: 16335 - DNA, 201 bp, Homo sapiens
agtttgtgtgatataatcaaaaagactaaagagtaagatgacaaatttaactttatgtttttaagtctgtgctttacatcttaaacttgattgtatcttcmgtattgtttaagatatcttctcacgcatgaaggaaaaagatagtaattctcccatttaatataatgttattttagtgagaatgagaaatatatatataca

SEQ ID NO: 16336 - DNA, 201 bp, Homo sapiens
attttaaaaattatgtgtgaaatctctcatgaatatccaagttaaaatgtcatcctaccaattgcgttaggttaaatcagtttctatggtagtaggaagamataagggtagtggagacctacttttgagagtgggcacctagatttaatccttaagtctatagcctgggtgctgtcattatctttctgctgagcaattata

SEQ ID NO: 16337 - DNA, 201 bp, Homo sapiens
caaggaagtgtggggcatcatatggtgaggggggctaatgtgctagctcaggtctctcttagttccattcccattaatctcttaatccattaatccataastagattaattcattcatgagggcagaactctcatgacccaattatctctgaaaggccccagctttcaatactgccacattggaggttaagtttcaacatg

SEQ ID NO: 16338 - DNA, 201 bp, Homo sapiens
tgaaaatcctaagcctggaggtcataaacaattgctatttctacttctggccaggcatcacaggaaccagtacttttctgagaaatcgatgtttcttatastctgcttcagtatctgagaggctactgggcttgggtcagagtttttacatatgtatctcaaggccagtcaattaaagaatttaggtttttattgcaaaag

SEQ ID NO: 16339 - DNA, 201 bp, Homo sapiens
taatttataaataatataatttatttcttgtggttatggaggttgagatgtctgaggttgagggcccccatttggtgagatacttcttgctggtggggacyctgcagggtctcaaggaagtgtggggcatcatatggtgaggggggctaatgtgctagctcaggtctctcttagttccattcccattaatctcttaatcca

SEQ ID NO: 16340 - DNA, 201 bp, Homo sapiens
agcacaccttccaagtgctactcagaaaagggactaagtactgtgctgcccaatgttatgtgtaggtgttgattcctatggaagaatgaggtgaatcagcygctgatttctggtgagcaggtgtggcagtgcatggagagatatatgagcagtgcacactgagaactgggccatgtggctgacctgcaccaggcagcgaaa

SEQ ID NO: 16341 - DNA, 201 bp, Homo sapiens
tatacacctatgatgtaccaaaaattaaaagtaaaatgttagtataaaaattttattaaaaggataaaaatgtttaaattttatatattaaggtgatcatytttttctatctttggcagtgtgaagaagtatatctataattttttaaaacaaattatgtactagaatagccttcatttgtttgcaatgtgttattctctt

SEQ ID NO: 16342 - DNA, 201 bp, Homo sapiens
ctgtttgaacttatccagaagacctattatagccaagacaattgatgaagtgactaccctgaataacagatattcaaggtcgacaagacaaccttatatcrgaataagatgccacctagcactttcatagctagagaaaagtacatgcctggcttctaagcttcaatagacaggcttactctcttgctgctactaatgcaa

SEQ ID NO: 16343 - DNA, 201 bp, Homo sapiens
tatagtctgcttcagtatctgagaggctactgggcttgggtcagagtttttacatatgtatctcaaggccagtcaattaaagaatttaggtttttattgcraaagtgcctatgtacatgaggtcttatgatttacattcttatgaatcacctaatgacactttgagggtctgtgtgttgtattcacatggccccatgtgct

SEQ ID NO: 16344 - DNA, 201 bp, Homo sapiens; identical to SEQ ID NO: 1933

SEQ ID NO: 16345 - DNA, 201 bp, Homo sapiens; identical to SEQ ID NO: 1935

SEQ ID NO: 16346 - DNA, 201 bp, Homo sapiens
ctgactaatggattttaacagtggcagaaacttccatggtatctcaagttcaaagactgacaaatattctgggaaggatatcctgggaaagtgctgtgtcrcctcgcctgcataacttcatgcagaacctttgtttgcagcaggctgcttcttttatggggaaagaagatattatactgagtcttttatgatcagtgatta

SEQ ID NO: 16347 - DNA, 201 bp, Homo sapiens
ctaatggattttaacagtggcagaaacttccatggtatctcaagttcaaagactgacaaatattctgggaaggatatcctgggaaagtgctgtgtcacctygcctgcataacttcatgcagaacctttgtttgcagcaggctgcttcttttatggggaaagaagatattatactgagtcttttatgatcagtgattacaaa

SEQ ID NO: 16348 - DNA, 201 bp, Homo sapiens
aaacttccatggtatctcaagttcaaagactgacaaatattctgggaaggatatcctgggaaagtgctgtgtcacctcgcctgcataacttcatgcagaayctttgtttgcagcaggctgcttcttttatggggaaagaagatattatactgagtcttttatgatcagtgattacaaatatgtggcactggaaatttaacc

SEQ ID NO: 16349 - DNA, 201 bp, Homo sapiens
aactgcatgggataaatcaagaaacaaaactaacacaaatgtctgcgctgcggagcttgccttctgctacatctggccctgtggagcttgcattctgttaygctcttataaagccaagtccatgggctcaaaaaaatcattgccaaatctgtagcttcaagtggaatcatctgccaaatgtgtaagtttctgtgcaatcat

SEQ ID NO: 16350 - DNA, 201 bp, Homo sapiens
ctcttataaagccaagtccatgggctcaaaaaaatcattgccaaatctgtagcttcaagtggaatcatctgccaaatgtgtaagtttctgtgcaatcatarccaaaacaaacatataattttaaaacttttactcactgataccaacagtaatttagcactgatgtaccctttgcttttaggcttatagcatagtcacaag

SEQ ID NO: 16351 - DNA, 201 bp, Homo sapiens
tcactgataccaacagtaatttagcactgatgtaccctttgcttttaggcttatagcatagtcacaagtgtagtttttaaaatctagtaatgtataacatytctatgtgatatatgctggcctttgcctatcactttaccgagttgtgtttttttccatctacatttgattctaaaatactctatcctaaaattcaaggtt

SEQ ID NO: 16352 - DNA, 201 bp, Homo sapiens
actgataccaacagtaatttagcactgatgtaccctttgcttttaggcttatagcatagtcacaagtgtagtttttaaaatctagtaatgtataacatctmtatgtgatatatgctggcctttgcctatcactttaccgagttgtgtttttttccatctacatttgattctaaaatactctatcctaaaattcaaggtttc

SEQ ID NO: 16353 - DNA, 201 bp, Homo sapiens
tttgaatatcagaatttgtcgcgctttgtttttgttttttggtttttgtttttttgactgggtatcactatgttgctggggattgaatttttgggctcacrcagtcttcctacctctgcttctgtagtagttaggactacaggtacatgccgccgtgcctggctacatttcacatattttgattttttttctcacttttat

SEQ ID NO: 16354 - DNA, 201 bp, Homo sapiens
ttccaccgtctctctcccacttctcaggcttccttattccccgagacacaacaatatcaaaatttggccaattaataaccttacaatggcctctaggtgtycaagggaaaggatgagtcacacatctatgactttaaattaaaagctagaaatgattaagcttagtgagaaagtcatgttgaaaggtgaggacggctgata

SEQ ID NO: 16355 - DNA, 201 bp, Homo sapiens
gtagattcttaaaattaacaattttgattttcagtattttgttgtatatgttatgattgttccaccgtctctctcccacttctcaggcttccttattcccygagacacaacaatatcaaaatttggccaattaataaccttacaatggcctctaggtgtccaagggaaaggatgagtcacacatctatgactttaaattaa

SEQ ID NO: 16356 - DNA, 201 bp, Homo sapiens
aaggaggttctcagaaacctcaactgtgtaataaagagatataatttttcactccagataaccacattctaataagaactacacacacaaacacacacacmtatatatatatatttgagtctaagattagagagaacatgtttcacatcattagagttaagaagaaaaatggctacataattggtagtataaatttcctca

SEQ ID NO: 16357 - DNA, 201 bp, Homo sapiens
ttactaatttaatttacattcatattgtatttgttttatattttgaataattataactgcatgggataaatcaagaaacaaaactaacacaaatgtctgcsctgcggagcttgccttctgctacatctggccctgtggagcttgcattctgttacgctcttataaagccaagtccatgggctcaaaaaaatcattgccaaa

SEQ ID NO: 16358 - DNA, 201 bp, Homo sapiens; identical to SEQ ID NO: 1936

SEQ ID NO: 16359 - DNA, 201 bp, Homo sapiens
ggatggcataccatggcaacaggggcacttttcacccagccacattttttctcattggaatcccaggtctggaagacgtccatatgtgaatctccctgcayttctgctctgtttaccttttggctttgctgggaaatgctaccattctgctagtcatcaaggcagaacagaccctccgggagcccatgttctactttctgg

SEQ ID NO: 16360 - DNA, 201 bp, Homo sapiens
gcgatttgttgaaatgataaataatttagagtattatataatataaagtgagtagatgaggcagcagcagggtttgagagaaatgactaattctgaaagaygctctgctaagggtaaagtggtacaaaatagaattacatggtacagaaaagcctttcatgaaagaaagagtctattgatttgacaagcttcactgttgtt

SEQ ID NO: 16361 - DNA, 201 bp, Homo sapiens
tggaattagaagtgaaacctgaagatggaactgaatgctgcaatctcacgacaaaaggttaatggatgaggagttgctatttatggatgagcaaagaaagygatttgttgaaatgataaataatttagagtattatataatataaagtgagtagatgaggcagcagcagggtttgagagaaatgactaattctgaaagatg

SEQ ID NO: 16362 - DNA, 201 bp, Homo sapiens
gggtggaataaattgaaaaccttctggaaaggattcaccattggagataacattaagagcatttatgattcatggaggagatccaaacatcaacattaacrggagtttggaagaagcccattccaacctcatggataacgttgaggggttcaagacttcagtggaggaagcagctgcagatatggtggaaatagcaagaga

SEQ ID NO: 16363 - DNA, 201 bp, Homo sapiens
actgctcagtaaaaaaatattcatttcaaaatactactcattgacaatgcacctaatcacccaagaattctgattgagacatatgtgattcatcttgtttycatgtctgctaacacaacatgcattctgcagcccataggtcaataagtaatttttactttcaagtcttaatgtataagaaatatttcataaggttacaat

SEQ ID NO: 16364 - DNA, 201 bp, Homo sapiens
tcttagtggtctgtatagaaaatcaaaccagtcaaaatattcctttaagtcaaagtctaatccagagctagggtctacttctgtttaattctatcaagaaygagagaagtgaggaagatgcagaagaaaagtttgaagttagcaaaggttagtttatggagtttaaagacaaaatgctgtttccataatataaaaggacaa

SEQ ID NO: 16365 - DNA, 201 bp, Homo sapiens
gtgtccaagggaaaggatgagtcacacatctatgactttaaattaaaagctagaaatgattaagcttagtgagaaagtcatgttgaaaggtgaggacggcygatagtgaggccttttgtgccaaaaggttagccaagttgtggatgcaaaggaaaatactctgaaagaaattacatgtgctactccagtgaacatatcaac

SEQ ID NO: 16366 - DNA, 201 bp, Homo sapiens
aggaccaaatggaaacgagagcgagtgctctatgtacttactaaaaaataagattctgaccatgttcttttactaaggactttgatctcccctatgaagaytgatacgttcttgctttaaggaatatctcctaatccttaccttattcctgtcaatttgcagtacaagttggtttgttcctggatgctgactaatggattt

SEQ ID NO: 16367 - DNA, 201 bp, Homo sapiens; identical to SEQ ID NO: 1930

SEQ ID NO: 16368 - DNA, 201 bp, Homo sapiens
tactttgatcctgaaattcatacgtagattcttaaaattaacaattttgattttcagtattttgttgtatatgttatgattgttccaccgtctctctcccwcttctcaggcttccttattccccgagacacaacaatatcaaaatttggccaattaataaccttacaatggcctctaggtgtccaagggaaaggatgagtc

SEQ ID NO: 16369 - DNA, 201 bp, Homo sapiens
tattctgagattttatgtctctattacttctagaaacttttcagactttatatctttaaatattttcttctcaactttctttccatattctttggtaagtytttttaaataaagataaagtagaaactccttatttttcttccatgtattctaactttttttcttttcttctatcacttgatctagtttactttgatcctg

SEQ ID NO: 16370 - DNA, 201 bp, Homo sapiens; identical to SEQ ID NO: 1932

SEQ ID NO: 16371 - DNA, 201 bp, Homo sapiens; identical to SEQ ID NO: 1934

SEQ ID NO: 16372 - DNA, 201 bp, Homo sapiens
attgaggctttgtactttgaagtagaattattaagcaacagaattttagtgaatcagaacatatttgtgcttcttgatctttatttttgattaagtacttygaatatcagaatttgtcgcgctttgtttttgttttttggtttttgtttttttgactgggtatcactatgttgctggggattgaatttttgggctcacaca

SEQ ID NO: 16373 - DNA, 201 bp, Homo sapiens
agaaaatacggtgcacatctttgtggcatattttacatttttatagtaattcattgaggctttgtactttgaagtagaattattaagcaacagaattttartgaatcagaacatatttgtgcttcttgatctttatttttgattaagtactttgaatatcagaatttgtcgcgctttgtttttgttttttggtttttgttt

SEQ ID NO: 16374 - DNA, 201 bp, Homo sapiens
tcatattacctttatcaccactccaacacagtttccctcctgattttagaggcagtctggcatgtgtttttctgatatcacagcacacattttagttttayaacaaatcatagcatgtctattggatcactcgttattattttatataggttaaaatactttatgttttgttttgtaacattgatgtcattaatgtattcc

SEQ ID NO: 16375 - DNA, 201 bp, Homo sapiens
ttgatctagtttactttgatcctgaaattcatacgtagattcttaaaattaacaattttgattttcagtattttgttgtatatgttatgattgttccaccrtctctctcccacttctcaggcttccttattccccgagacacaacaatatcaaaatttggccaattaataaccttacaatggcctctaggtgtccaaggga

SEQ ID NO: 16376 - DNA, 201 bp, Homo sapiens
catgttcagtatataataggtccttatattctgagattttatgtctctattacttctagaaacttttcagactttatatctttaaatattttcttctcaaytttctttccatattctttggtaagtttttttaaataaagataaagtagaaactccttatttttcttccatgtattctaactttttttcttttcttctatc

SEQ ID NO: 16377 - DNA, 201 bp, Homo sapiens
tcaatactcttaatgaaacatatgatactgatcattttctcactgttttaaaagaacttttcccctcattctttggaaagcatgtttatttttcatattcyaaaattttaatacattgaatctcgatttataatttttagagtcatgttcagtatataataggtccttatattctgagattttatgtctctattacttcta

SEQ ID NO: 16378 - DNA, 201 bp, Homo sapiens
aaatcaaaaatttataaaattctgaataaaattctgttctatcatctttcttaattcatcattcattcagttgtttatttttggcatcaatactcttaatkaaacatatgatactgatcattttctcactgttttaaaagaacttttcccctcattctttggaaagcatgtttatttttcatattctaaaattttaataca

SEQ ID NO: 16379 - DNA, 201 bp, Homo sapiens
ctttgtggcatattttacatttttatagtaattcattgaggctttgtactttgaagtagaattattaagcaacagaattttagtgaatcagaacatatttstgcttcttgatctttatttttgattaagtactttgaatatcagaatttgtcgcgctttgtttttgttttttggtttttgtttttttgactgggtatcact

SEQ ID NO: 16380 - DNA, 201 bp, Homo sapiens
gttttttaaaataatattcaataaccatttttatttgatgatatatattattaacaatttatttctacaataactcttcatgaatatattcttgcttaccrattcttaggagaaacatctcttgcatttttgacccaagccatattaccagccacaatatacccctgctttggtaataattctaattttatgtctaagtat

SEQ ID NO: 16381 - DNA, 201 bp, Homo sapiens
acatcaacattaacaggagtttggaagaagcccattccaacctcatggataacgttgaggggttcaagacttcagtggaggaagcagctgcagatatggtkgaaatagcaagagaaatggaattagaagtgaaacctgaagatggaactgaatgctgcaatctcacgacaaaaggttaatggatgaggagttgctatttat

SEQ ID NO: 16382 - DNA, 201 bp, Homo sapiens
tgtaactagcatactttgaacaaacaaaaatattagtcccccttaggttttctgtttttcttgtacatttatttctttcatgttgtgattatctgcaatcytgtttccagttttttaaaataatattcaataaccatttttatttgatgatatatattattaacaatttatttctacaataactcttcatgaatatattct

SEQ ID NO: 16383 - DNA, 201 bp, Homo sapiens
tctttctctttctctctctctttcccccaaaagaagaaggagcttcacctcttcagaacaatgcagtgcaggatggcataccatggcaacaggggcacttytcacccagccacattttttctcattggaatcccaggtctggaagacgtccatatgtgaatctccctgcacttctgctctgtttaccttttggctttgctg

SEQ ID NO: 16384 - DNA, 201 bp, Homo sapiens
aatatacataaaaatatacacctatgatgtaccaaaaattaaaagtaaaatgttagtataaaaattttattaaaaggataaaaatgtttaaattttatatrttaaggtgatcatttttttctatctttggcagtgtgaagaagtatatctataattttttaaaacaaattatgtactagaatagccttcatttgtttgcaa

SEQ ID NO: 16385 - DNA, 201 bp, Homo sapiens; identical to SEQ ID NO: 1939

SEQ ID NO: 16386 - DNA, 201 bp, Homo sapiens
aactgctgtgctagcagctgctatgctagctgctatgctatgctagcaactgcttcatctgatctttctctttctctctctctttcccccaaaagaagaaggagcttcacctcttcagaacaatgcagtgcaggatggcataccatggcaacaggggcacttttcacccagccacattttttctcattggaatcccaggtc

SEQ ID NO: 16387 - DNA, 201 bp, Homo sapiens
aaataaataaataaataaataaagcctggcatggtggcacaaacctgtagagtccctctttctaaaaattagatatataaagaaagtaatttgtaactagyatactttgaacaaacaaaaatattagtcccccttaggttttctgtttttcttgtacatttatttctttcatgttgtgattatctgcaatcttgtttccag

SEQ ID NO: 16388 - DNA, 201 bp, Homo sapiens
caactgctgtgctagcagctgctatgctagctgctatgctatgctagcaactgcttcatctgatctttctctttctctctctctttcccccaaaagaagaaggagcttcacctcttcagaacaatgcagtgcaggatggcataccatggcaacaggggcacttttcacccagccacattttttctcattggaatcccaggt

SEQ ID NO: 16389 - DNA, 201 bp, Homo sapiens
taaaactaatttgtccagctggggtaacatagcaagaccttgtttctgaaaataaataaataaataaataaataaataaataaataaataaagcctggcayggtggcacaaacctgtagagtccctctttctaaaaattagatatataaagaaagtaatttgtaactagcatactttgaacaaacaaaaatattagtcccc

SEQ ID NO: 16390 - DNA, 201 bp, Homo sapiens
gcaactgctgtgctagcagctgctatgctagctgctatgctatgctagcaactgcttcatctgatctttctctttctctctctctttcccccaaaagaagaaggagcttcacctcttcagaacaatgcagtgcaggatggcataccatggcaacaggggcacttttcacccagccacattttttctcattggaatcccagg

SEQ ID NO: 16391 - DNA, 201 bp, Homo sapiens
ataatttatttcttgtggttatggaggttgagatgtctgaggttgagggcccccatttggtgagatacttcttgctggtggggaccctgcagggtctcaargaagtgtggggcatcatatggtgaggggggctaatgtgctagctcaggtctctcttagttccattcccattaatctcttaatccattaatccataactag

SEQ ID NO: 16392 - DNA, 201 bp, Homo sapiens
taacaaaggtaaaattaacaggtgctctaagaatacctggtgtggggtagataataaacagagtgtgaaaatggcattacacagccttcttatccttttccacttgaaaatcctaagcctggaggtcataaacaattgctatttctacttctggccaggcatcacaggaaccagtacttttctgagaaatcgatgtttctt

SEQ ID NO: 16393 - DNA, 201 bp, Homo sapiens; identical to SEQ ID NO: 1931

SEQ ID NO: 16394 - DNA, 201 bp, Homo sapiens
cagttatatttggtctgaaaaaactaccagtgaagagaaatagtttaagtcagaaagcctactatggtagttaaaatgttggacatgaatttagccagttyattctgtatgaaaaaggcctacagaattgggccacacattcacaattaggtagagatacaattatctgtttttacatatatcaaggataaatgacagtga

SEQ ID NO: 16395 - DNA, 201 bp, Homo sapiens
agaaaacacaatggacaaaaagatcatgactttgtgtttttatgctaattagagaaattcaagtcagttatatttggtctgaaaaaactaccagtgaagakaaatagtttaagtcagaaagcctactatggtagttaaaatgttggacatgaatttagccagttcattctgtatgaaaaaggcctacagaattgggccaca

SEQ ID NO: 16396 - DNA, 201 bp, Homo sapiens
attcatgtatagaaaacacaatggacaaaaagatcatgactttgtgtttttatgctaattagagaaattcaagtcagttatatttggtctgaaaaaactaycagtgaagagaaatagtttaagtcagaaagcctactatggtagttaaaatgttggacatgaatttagccagttcattctgtatgaaaaaggcctacagaa

SEQ ID NO: 16397 - DNA, 201 bp, Homo sapiens
tcatgtatagaaaacacaatggacaaaaagatcatgactttgtgtttttatgctaattagagaaattcaagtcagttatatttggtctgaaaaaactaccrgtgaagagaaatagtttaagtcagaaagcctactatggtagttaaaatgttggacatgaatttagccagttcattctgtatgaaaaaggcctacagaatt

SEQ ID NO: 16398 - DNA, 201 bp, Homo sapiens
atagtagtgtgaagttcaaaatttgttgagggcagaccacatgttaagtgttctcaccacaaaataaaacaacaacaacaattaccaaaaaaaataaaaawaaataaaaaaaagagatccaagtaaggttactttgtgaggtaatgagggtttaggactctaacatatacattttcaggggctacaattcaactgataata

SEQ ID NO: 16399 - DNA, 201 bp, Homo sapiens
tgtgattattatgcattgtatgcctgtatccaaatatacataaaaatatacacctatgatgtaccaaaaattaaaagtaaaatgttagtataaaaattttrttaaaaggataaaaatgtttaaattttatatattaaggtgatcatttttttctatctttggcagtgtgaagaagtatatctataattttttaaaacaaat

SEQ ID NO: 16400 - DNA, 201 bp, Homo sapiens
tatagtagtgtgaagttcaaaatttgttgagggcagaccacatgttaagtgttctcaccacaaaataaaacaacaacaacaattaccaaaaaaaataaaawaaaataaaaaaaagagatccaagtaaggttactttgtgaggtaatgagggtttaggactctaacatatacattttcaggggctacaattcaactgataat

SEQ ID NO: 16401 - DNA, 201 bp, Homo sapiens
caatatagtagtgtgaagttcaaaatttgttgagggcagaccacatgttaagtgttctcaccacaaaataaaacaacaacaacaattaccaaaaaaaatawaaaaaaataaaaaaaagagatccaagtaaggttactttgtgaggtaatgagggtttaggactctaacatatacattttcaggggctacaattcaactgat

SEQ ID NO: 16402 - DNA, 201 bp, Homo sapiens
tttaagtctgtgctttacatcttaaacttgattgtatcttccgtattgtttaagatatcttctcacgcatgaaggaaaaagatagtaattctcccatttawtataatgttattttagtgagaatgagaaatatatatatacatttgactgaaaaacgagggataaaatgttagaataaatgagaactttcacaccaaatgt

SEQ ID NO: 16403 - DNA, 201 bp, Homo sapiens
tacacaatcatataagtaaatagagacttttactttattctttcaaattctcatctttttttctataatttttcttactgtattatactcttttgggcatmtagtgcagttctgaatagaagtatttataagacatctttgactttacctgaccttataggagaaatattgaatatgttttcattaatataattttagctg

SEQ ID NO: 16404 - DNA, 201 bp, Homo sapiens
gtgtatctgtaaaattagggtagttacatctgtttctagtttactcagaaatcttacaaaatagtagtggtggagggaatggaaatggttaatgggtaaartaatatagttagaatgaataagatctactatttcatagcacaagatgattacagtcaacaattatttattatacacttaaaagtaaataaaagaattgga

SEQ ID NO: 16405 - DNA, 201 bp, Homo sapiens
taagatgacaaatttaactttatgtttttaagtctgtgctttacatcttaaacttgattgtatcttccgtattgtttaagatatcttctcacgcatgaagkaaaaagatagtaattctcccatttaatataatgttattttagtgagaatgagaaatatatatatacatttgactgaaaaacgagggataaaatgttagaa

SEQ ID NO: 16406 - DNA, 201 bp, Homo sapiens
gtttttaagaatattaaaattgaatgtgtttttgaatattactcagaattttttaaaaatacaaatattttgaatatcttatatacacaatcatataagtraatagagacttttactttattctttcaaattctcatctttttttctataatttttcttactgtattatactcttttgggcatatagtgcagttctgaata

SEQ ID NO: 16407 - DNA, 201 bp, Homo sapiens
gactaaagagtaagatgacaaatttaactttatgtttttaagtctgtgctttacatcttaaacttgattgtatcttccgtattgtttaagatatcttctcmcgcatgaaggaaaaagatagtaattctcccatttaatataatgttattttagtgagaatgagaaatatatatatacatttgactgaaaaacgagggataa

SEQ ID NO: 16408 - DNA, 201 bp, Homo sapiens
aacaggcagaatgaaaattctgaatttcaccatgccctggtctgtataaatggctaaggcaatgactcagtacaggagtttctgaacccgcctgcttgcayagtaaatgtgaattcaattccgtgctgaaacacagggctagaaattgatgctagcaactgctgtgctagcagctgctatgctagctgctatgctatgcta

SEQ ID NO: 16409 - DNA, 201 bp, Homo sapiens
ttatgatttacattcttatgaatcacctaatgacactttgagggtctgtgtgttgtattcacatggccccatgtgctgtcttgatatttccaatgttactmaacagagggtgaattcccagagtaaaataatgtattacttgctttcaaagtgagtggaaagtattaattattagaaatactcaataaggttgttgcaaat

SEQ ID NO: 16410 - DNA, 201 bp, Homo sapiens
attggaccttagagaatatatcattgtatatatacaggaatgcaaaaattgtaaatttggaggagataacattaacgaaatgttggcatggaataatggakaagacagactaggccagataaagaatattactgcacatgcttttaatttcatgctttatttgcttaagtagttctgtcttaaggaggttctcagaaacct

SEQ ID NO: 16411 - DNA, 201 bp, Homo sapiens
ttctatttggttcttatttatggtttccactgctttgtcaaacttttaatttgttcatgaattgttttccatatttcatttaactttttatatgcatttgyttgtaatttcttgaacttaagaggatacttctgaggtcttttttggtcatttcatagatctcctagtttgtacttgtaagcataaaggaaaatgagtatt

SEQ ID NO: 16412 - DNA, 201 bp, Homo sapiens
tttcatagatctcctagtttgtacttgtaagcataaaggaaaatgagtatttaatatagaacatgtagaattaagtatttatcatcttgagaaaaatattytattattatttgtaattgtaattggcataataaatataataaaaagtaccttatttaatttcccaaatatcttattatatttttaagatattaccttata

SEQ ID NO: 16413 - DNA, 201 bp, Homo sapiens
atcttgaacatttgagaacttgaaaaatgacatggttgtttttggattaacctttttcattcactcattaatcttttgttgactgaataaagatatccaartgtcgttattatagtaattttctttcctaaatttcatgatttggagagcttggtggtaagattttttgctcattacaagtattgatctgggacagatctg

SEQ ID NO: 16414 - DNA, 201 bp, Homo sapiens
tcctaaatttcatgatttggagagcttggtggtaagattttttgctcattacaagtattgatctgggacagatctggtgctgcttaaggaaagactaatamcatgtcccaagttctcctggttatttttatttaaatactgctggggaaaaggtggtggaaaattattttattccatttgtgtatataaatcactatgcat

SEQ ID NO: 16415 - DNA, 201 bp, Homo sapiens
aggccaatatattttagcatgtgtaatttgtaaaaatacatgtttgtatttgtagtaaaacttatacacaagatcaaatatgtaaatattaaaggagaagragttgtatatgtatgtaaattgtttcttatttgaatgacatttagatactgtcatctaggtttagctatattttacagtacaaatttaattaaaatatat

SEQ ID NO: 16416 - DNA, 201 bp, Homo sapiens
ctttccaataaggaaaatttgtcagagcatataacacaccatttattcttcacttcattattttatctaccttttcctatgtgtcttttaattcttaatakttactaaaatttctatatcaaggaataatacacagagcttttaccttcaagttatttagtattggaatagtgcacaaaattataaacattgagataatgc

SEQ ID NO: 16417 - DNA, 201 bp, Homo sapiens
aattatgtgaggtgatggatatgtaaattcattttgtttgataacttcacagtttatacctatataaaagcatcacattgcatactataaatatatgtatrtgtgtgtgtgtgtgtgtgtgtgtgggtgtaaactataccttaaggctgggggaataagctaaagtggtcaacataacctattatatgataaagatatatc

SEQ ID NO: 16418 - DNA, 201 bp, Homo sapiens
agacagttgtactgagaaggtaaagttttgaacgtctcttcatttatatagagggtttccccttgatagggaactgaggataaatatttgaagaaatatgrtggaggtttccagcaatactcataataattgaaacatctaattaaaatagggctaacatcattcatcagcctcacaatatcagctgttttccaagaactt

SEQ ID NO: 16419 - DNA, 201 bp, Homo sapiens
ggccacatagcggtcataggccatggtggtgaagagaaccatctcagctcccagagaccatgtgaacaagaagagctgggacatgcagcctgcatatgaamtggtattttctgatgttagcatggtccccagcatcttcggtatgatgcttgttgtgcagatgatgtccacaacagccagtgtcagaaggaaaacatacat

SEQ ID NO: 16420 - DNA, 201 bp, Homo sapiens
aaatggccacatagcggtcataggccatggtggtgaagagaaccatctcagctcccagagaccatgtgaacaagaagagctgggacatgcagcctgcatawgaaatggtattttctgatgttagcatggtccccagcatcttcggtatgatgcttgttgtgcagatgatgtccacaacagccagtgtcagaaggaaaacat

SEQ ID NO: 16421 - DNA, 201 bp, Homo sapiens
gttcctccattgatgactcaaactgaagccagtggttgagaagaaaaatattttcaaaatgccttcaaatattttgatatcattttcacttaaaacttgtytaaatacacacacacatatatatatatacacacacatatgtatatattctggatatgcatatatatccaatggagctgtaatacaaattattacatacct

SEQ ID NO: 16422 - DNA, 201 bp, Homo sapiens
ttacaaaaaaatgaatgcaagttgatctcaaaaagatgtcataaagaataaataaaatgagaacacaatatcaacaaattatatgaacctaacaaaatagyctaaaaaataaaccaatagtattctattttcagaaatatcaaatatgtaaataccttaataaacttgaaaatgcatgcattaaactaatactgtatacta

SEQ ID NO: 16423 - DNA, 201 bp, Homo sapiens
ataattatgtgaggtgatggatatgtaaattcattttgtttgataacttcacagtttatacctatataaaagcatcacattgcatactataaatatatgtrtatgtgtgtgtgtgtgtgtgtgtgtgggtgtaaactataccttaaggctgggggaataagctaaagtggtcaacataacctattatatgataaagatata

SEQ ID NO: 16424 - DNA, 201 bp, Homo sapiens
caaatatgtaagatttaaatgacagtattttcattatattatttgtaacctgtgtaaatggaataaaatacccatttatggctatctggtgaaactgttgrgaagtaaagcctgtgcattgatcacccttctatgtttgttgttattgatacttctcctttttgttgacataacatgctatgacttcttctgtagttttac

SEQ ID NO: 16425 - DNA, 201 bp, Homo sapiens
ggttcaaccccagagtagatacctcattatcacaatgctgtaagtgaatgaacccagcctattaagcaagggaaaatttatcacacacactacttctctcyagctcacattcacataccaacaaataaatggcacaaaatacacaaaatgttttgtgatatttgcatgtatgatgtgcacatgcacatataggtaaatatt

SEQ ID NO: 16426 - DNA, 201 bp, Homo sapiens
acactacttctctccagctcacattcacataccaacaaataaatggcacaaaatacacaaaatgttttgtgatatttgcatgtatgatgtgcacatgcacrtataggtaaatatttgtgtatatgcatatataagtattcgaagttatgtacatatttttggaaaatgttggaatatatattatgacatatatttatgtga

SEQ ID NO: 16427 - DNA, 201 bp, Homo sapiens
ttcacataaagagtacagaattttggagacaatgagactgctaggaagaaggcaggaataagagggaagggaaaattggagtggaggtaagtatgaaaaaycagtaaaatctgagatgctctagaagatggttctggagtacagaagtgatgttgcatgttgaaactactagtgtttcagaaatgcaaacaccttcctaat

SEQ ID NO: 16428 - DNA, 201 bp, Homo sapiens
atataggtgtagattacaggagaatagtaaagggtcaccactgtgagatgagatgagcatgttgagaaggccttcctcttgccttctactgtgcggatacrgagaatagcaacaatgataaaaccataggagatgcaggtaagaataaagtcccctatggccagggtaatatcagcaacatacaccatcacctcattgatt

SEQ ID NO: 16429 - DNA, 201 bp, Homo sapiens
aaagtcaacctcatgataagagctgtgtgcacccaggaattggtgactgcaatagccatgaccatgctgagcaaggctacacacatatggtggttcataayagtactgtaatgaagagggaaacaaatggccacatagcggtcataggccatggtggtgaagagaaccatctcagctcccagagaccatgtgaacaagaag

SEQ ID NO: 16430 - DNA, 201 bp, Homo sapiens
cagagcgagactctgtctcaaaaaaaaaaaaaaaaaaaagattattcctaatagatacggtcttactttttgttttcctttgtgtttgtgcgttttctctrgtagcatatttttattccttgctttttattttagtgtgtctattttaagattttgccttgtggtcaccatgaagcttacagaaaatatcttgtagctaga

SEQ ID NO: 16431 - DNA, 201 bp, Homo sapiens
tgaccatgctgagcaaggctacacacatatggtggttcataacagtactgtaatgaagagggaaacaaatggccacatagcggtcataggccatggtggtraagagaaccatctcagctcccagagaccatgtgaacaagaagagctgggacatgcagcctgcatatgaaatggtattttctgatgttagcatggtcccca

SEQ ID NO: 16432 - DNA, 201 bp, Homo sapiens
actatctagttttataacattgtggtcccaaaagatattcgatagaatttcagtcttcttaaatttgcctagattatttctggggcctaatgtatagtctstcctgaaatatgtttcatttgctgttgagaagaaagtatattttgcagcttttggatgaaatgttattttaatgtctgttaagtcatttggtctagaatg

SEQ ID NO: 16433 - DNA, 201 bp, Homo sapiens
cagcatcttcggtatgatgcttgttgtgcagatgatgtccacaacagccagtgtcagaaggaaaacatacatgggcgtatgcaaggtgttgttatagattwtggcaatgatgatgagcatgttgccgagaaaagccacaagatagacaatgagaaaaaagaggaagataattccctggagttcaggctttttggtgaggcc

SEQ ID NO: 16434 - DNA, 201 bp, Homo sapiens
atggaaagaatccctgtgttgttaggagataacatgaggagtgtgtgtacttagggacttaattcttgattggacacaactttgcagcaggaattcccatwtgatggagttctgtattccaggcaatatactctgttttccagactaatcccattctctgatgtatgttcctccattgatgactcaaactgaagccagtgg

SEQ ID NO: 16435 - DNA, 201 bp, Homo sapiens
taggcaagtgttagtttgcttgatggtatcctataattcccataggccttttccatttttgtttattcttttctttttacttctctgaattgataatttcrtatgtcatattttccagctaactggtttttctgcttgatcaaattagttgttgaagcattgtatttaattgttcaattaaattattttattctttatttt

SEQ ID NO: 16436 - DNA, 201 bp, Homo sapiens
ggatatgcatatatatccaatggagctgtaatacaaattattacatacctcaataatttagttaattgcatggtacatttaggtgtccttgagatatacaygagcaaagatacttgaaataatacaagctgacagggctaattatagtgaggatatttcagatgaaaaatgcccaacctagtattttgaggctgtatattc

SEQ ID NO: 16437 - DNA, 201 bp, Homo sapiens
ggatacggagaatagcaacaatgataaaaccataggagatgcaggtaagaataaagtcccctatggccagggtaatatcagcaacatacaccatcacctcrttgattcttacagggctacaggacaaagccagcaatgggggtatctcacagaagaagtggtcaatggtgtttggcccacagaaagtcaacctcatgataa

SEQ ID NO: 16438 - DNA, 201 bp, Homo sapiens
ttctgaaggatagatttgctggatacattattcttggttggcagatttttttctttctctagcactttgaatgtatcatcccactatctcctgccctgaakaatttctgctgagaaattttctgcatgctgtattggagctcccttgaatgtgatatgttttttatctcttatttctttgagtatttttctttgtttttca

SEQ ID NO: 16439 - DNA, 201 bp, Homo sapiens
ggtttagtcatgaagtctttgcccatgcctatgtcctgaatggtattggctagcttttcatctagggttttttatggttttaggttttacgtttacgtctktaatccatctcgagttattttttgtataaggtgtaaggaaggggcccagtttcagttttctgcatatgactagccagttttcccaacactattaaataga

SEQ ID NO: 16440 - DNA, 201 bp, Homo sapiens
atataatgaaacattgcatatatacatatatataacagtttatgatatatataacatatatgtataacagttctatatccaaggttatataacatatatcyaaggttatatatataacagtttatgatatatataacaacatgacattacatatacatatacagtaaagttatatataatatgttatatataacataagtg

SEQ ID NO: 16441 - DNA, 201 bp, Homo sapiens
aattcattttgtttgataacttcacagtttatacctatataaaagcatcacattgcatactataaatatatgtatatgtgtgtgtgtgtgtgtgtgtgtgkgtgtaaactataccttaaggctgggggaataagctaaagtggtcaacataacctattatatgataaagatatatctatgttggaaatttttctgatattg

SEQ ID NO: 16442 - DNA, 201 bp, Homo sapiens
cctatttgtcaattttggcttttgttgcaattgcttttggtggtttagtcatgaagtctttgcccatgcctatgtcctgaatggtattggctagcttttcwtctagggttttttatggttttaggttttacgtttacgtctttaatccatctcgagttattttttgtataaggtgtaaggaaggggcccagtttcagtttt

SEQ ID NO: 16443 - DNA, 201 bp, Homo sapiens
atagcaacaatgataaaaccataggagatgcaggtaagaataaagtcccctatggccagggtaatatcagcaacatacaccatcacctcattgattcttasagggctacaggacaaagccagcaatgggggtatctcacagaagaagtggtcaatggtgtttggcccacagaaagtcaacctcatgataagagctgtgtgc

SEQ ID NO: 16444 - DNA, 201 bp, Homo sapiens
atgtatagctggaagcagggcggatataggtgtagattacaggagaatagtaaagggtcaccactgtgagatgagatgagcatgttgagaaggccttcctmttgccttctactgtgcggatacggagaatagcaacaatgataaaaccataggagatgcaggtaagaataaagtcccctatggccagggtaatatcagcaa

SEQ ID NO: 16445 - DNA, 201 bp, Homo sapiens
actatctcctgccctgaataatttctgctgagaaattttctgcatgctgtattggagctcccttgaatgtgatatgttttttatctcttatttctttgagyatttttctttgtttttcatttttgataatctgattatgatgtgctttataaactcctcttttgttgttccattggcagcctctgagcttccagtacctat

SEQ ID NO: 16446 - DNA, 201 bp, Homo sapiens
tttaatttgttttgtgtttgtttcttctgtcttttatttctctgcttttcatttattgattttctgatgttttctttaagatttttaaggattctaacttrtgtatagcatttttattacatcacaatgtatagtttttttataccaactaatgttgttataatttttctttcaaccataaaatataatttaaggaactca

SEQ ID NO: 16447 - DNA, 201 bp, Homo sapiens
acaactgctccagatgtatttgtaagacaaaattccaacatgttttcataattgtggaaatatattgtaaaaatatgctttactaatcacagcaaatgatrtatttcttccaacttgttataagatgtgttgtatattgtatatttttattatgtagcctcagttttggcattctcactctctcaacctaactttatttca

SEQ ID NO: 16448 - DNA, 201 bp, Homo sapiens
ctcaaactgaagccagtggttgagaagaaaaatattttcaaaatgccttcaaatattttgatatcattttcacttaaaacttgtctaaatacacacacacatatatatatatacacacacatatgtatatattctggatatgcatatatatccaatggagctgtaatacaaattattacatacctcaataatttagttaat

SEQ ID NO: 16449 - DNA, 201 bp, Homo sapiens; identical to SEQ ID NO: 1940

SEQ ID NO: 16450 - DNA, 201 bp, Homo sapiens
gaacatgtttatagaaaccataatttaaaatataatagaatgactcaatgttccacttttaattcatagaaaaagtaattttctattgatatatagaatgyatacctacataggcgtataaatttatagaaaatacatatacatataacttcagttatatctatttatatgtatatgtatatttctatttgtgtacattgg

SEQ ID NO: 16451 - DNA, 201 bp, Homo sapiens
tcaaactgaagccagtggttgagaagaaaaatattttcaaaatgccttcaaatattttgatatcattttcacttaaaacttgtctaaatacacacacacatatatatatatacacacacatatgtatatattctggatatgcatatatatccaatggagctgtaatacaaattattacatacctcaataatttagttaatt

SEQ ID NO: 16452 - DNA, 201 bp, Homo sapiens
tgtttttgatgtgtcccataggttttggtataatgtgtttccatttttgtttgtttcaaaaatttttaaacttttagttaatttcttcactggccctttgkctattcaagagcatgttgtttgtttaattctcatgtctctgtaaattctgcaaattttcttctggaattgactatctagttttataacattgtggtccca

SEQ ID NO: 16453 - DNA, 201 bp, Homo sapiens
cagttatatctatttatatgtatatgtatatttctatttgtgtacattgggaacttaacatttatcagccaaagtagactttttttttttttttaagttcyggggtacatgtacaggatgtgcaggtttgttatgtaggtaaacatgtgccatggtggtttgctgcacctatcaacccatcacctaggtattaagaccagc

SEQ ID NO: 16454 - DNA, 201 bp, Homo sapiens
aagtagactttttttttttttttaagttctggggtacatgtacaggatgtgcaggtttgttatgtaggtaaacatgtgccatggtggtttgctgcacctaycaacccatcacctaggtattaagaccagcatgccttagctttttttcctgatactctccctctctacgccaccctccacccaacaggtcctagtgtgtgt

SEQ ID NO: 16455 - DNA, 201 bp, Homo sapiens
tcatcggtttgagaagcacattgccaaaattcactggaccagctatttgttttgctgttatataatggcaagataattggatttaaaaatataaaatgtarggttgtgtcttcatttcatcatagctatagattggccatttaagctctgtaagatttggatttattatttctaaacattgaataaattgaaataaatatc

SEQ ID NO: 16456 - DNA, 201 bp, Homo sapiens
gtagactttttcagaataaatcaggaactgttagtagtaattacactggtataagatgtttaaaataggcctgtcttaggctgggcgcggtgcctcacacytgtaatctcagcactttgggaggcagaggcaggtggattacctgaggacaggagtttgagaccagcctggctaacatagcgaaaccctgcctctactaaa

SEQ ID NO: 16457 - DNA, 201 bp, Homo sapiens
ctgggcgcggtgcctcacacctgtaatctcagcactttgggaggcagaggcaggtggattacctgaggacaggagtttgagaccagcctggctaacatagygaaaccctgcctctactaaaaatacaagaaattagccagatgtggtggttggtgcatgtagtcccagctacttgggaggctgaggcaggagaatcacttg

SEQ ID NO: 16458 - DNA, 201 bp, Homo sapiens
taatgttgttataatttttctttcaaccataaaatataatttaaggaactcatgagagaaatatagtatattgtaattatttctctttgtacaaaatttgytttttcctgtatgacattgtggctttcctatctctgtagaaaaccatatatactgtactcttaaaaatactaagagagtgggtatacagtgtttccacca

SEQ ID NO: 16459 - DNA, 201 bp, Homo sapiens
cagtcttcttaaatttgcctagattatttctggggcctaatgtatagtctgtcctgaaatatgtttcatttgctgttgagaagaaagtatattttgcagcytttggatgaaatgttattttaatgtctgttaagtcatttggtctagaatggactttagatcctttgttgcttttttatccagatgatctattaattgatg

SEQ ID NO: 16460 - DNA, 201 bp, Homo sapiens
agagtgggtatacagtgtttccaccatgaaaatgataattatgtgaggtaatgcatatcatatgttaattaactaaatgtagtcactccacaatgcatctrtacttcaaaatgttaggctgtaaacaataatacataaattttatgtcaattatttttgaattacaaaaaaatgaatgcaagttgatctcaaaaagatgtc

SEQ ID NO: 16461 - DNA, 201 bp, Homo sapiens
gtcccataggttttggtataatgtgtttccatttttgtttgtttcaaaaatttttaaacttttagttaatttcttcactggccctttggctattcaagagmatgttgtttgtttaattctcatgtctctgtaaattctgcaaattttcttctggaattgactatctagttttataacattgtggtcccaaaagatattcga

SEQ ID NO: 16462 - DNA, 201 bp, Homo sapiens
aacaaaatgttataattataaaacaaaatgttatacgtgtaaaacatgaaatgttttatcattttctttatcaatttatctgatgatggacacaactgctycagatgtatttgtaagacaaaattccaacatgttttcataattgtggaaatatattgtaaaaatatgctttactaatcacagcaaatgatatatttcttc

SEQ ID NO: 16463 - DNA, 201 bp, Homo sapiens
tcttctaggatattcagtttgttgtcatataattgcttataatagtctcttatgatcctttgtgtttctgtggtatcatttgtaatgtctcctttttcatrttttatctatttgaatattgtctcttttttcttagtttgtctacctaaagatttgtgtgtttatctttaaaaaaaacccaactctttgtttcattgacct

SEQ ID NO: 16464 - DNA, 201 bp, Homo sapiens
atttgcatttctctaatgaccagtgatgacgagctttctttcatgtttgttggtcgcataaatgtcttcttttgagaagtatctgttcatatcctttgccyacttttttatgaggttgtttgactttttcttgtaaatttgtttaagttccttgtagattgtggaattagccctttgtcagatggatagattgcaaaaatt

SEQ ID NO: 16465 - DNA, 201 bp, Homo sapiens
ttgctgagtcaaatggtatttctagttctatatctcagaggaatcgccacactgtcttacacaatggttgaactaattttcactcccacagtgtaaaaatsttcctatttctccacatcctctccagcatctgttctttactgactttttaatgatcgctattctaaacgggtgtgagatggtatctcattgtggttttga

SEQ ID NO: 16466 - DNA, 201 bp, Homo sapiens
tagtcccagctactcgggaggctgaggtgggaggatcacttgagcctgggaagcagaggttgcaatgagctgagatggcaccactgcactccagcctgggbgaccgggggcaaaaaaataataataataatgcagctgggcacactccaggagccagggtggggaagggagaggagaacattgagatggtataggtcattt

SEQ ID NO: 16467 - DNA, 201 bp, Homo sapiens
gaccttagggccatagaccccgaaacatgcattctccagaactgagtatgcaactgtttgctttcgaccttacagcacaggctttgggagaaaacagttamgttcaggtcctaactccagtaatgaatttcaagcttcttgttattgtttttcttcctgaaagacaaagggagttttatgccatggtattttgaggacaat

SEQ ID NO: 16468 - DNA, 201 bp, Homo sapiens
gtgtagaaatcacgtgcttagtcttgaattatgattcacctttactgaatgtcccttctcttttctttactcactgtcgaacaggaacccaaaggatgtartttttggcagatgtcctttgtagggttcagtatttctcactcacccctttaagaccctaaagggagagttattaatagtttcagaaagttgagggaaatc

SEQ ID NO: 16469 - DNA, 201 bp, Homo sapiens
aaaccaagagggtttttttatccttccatggtttcaaaatctggaaggacaatttgtacagaccctgagatagaaggattcctcagctttaatttcatgawcgatttgcctttcattgattcttgaggatatgaatgttttagaaagcaacagtgtatgccttgattttaagaggcaatgagccttttccttccttcgttt

SEQ ID NO: 16470 - DNA, 201 bp, Homo sapiens
ccgaactggacatggctcgaggtgggtgaccattactgctgtggtggaaatgggttctgtacccttataccttgctcttcttcttcccaggatggcctgaycattcactcacccatccatccttccctccttccctccctccttctctccaacaagcatgtattgagtacgtaatagttattaagcactgggatacaccag

SEQ ID NO: 16471 - DNA, 201 bp, Homo sapiens
taatgtacaacatgcagcaagaacaagtgtggtgggaatagcctggcaccagagattaagggagtcctagattcagctgtttgatgggtggccctctggcytggagcaagtcttgttcccttttggggcctcagttccctcatcttaaaaaatgaaggtttttgagcttagtggtctccaggattgcctcaaagctttgcc

SEQ ID NO: 16472 - DNA, 201 bp, Homo sapiens
gttcacaccaaccctgaccggagatgcaccgaactggacatggctcgaggtgggtgaccattactgctgtggtggaaatgggttctgtacccttatacctwgctcttcttcttcccaggatggcctgatcattcactcacccatccatccttccctccttccctccctccttctctccaacaagcatgtattgagtacgta

SEQ ID NO: 16473 - DNA, 201 bp, Homo sapiens
cctcggcctcccaaagtgctgggattacaggcatgagccaccacactccacctccaaccacaattcttgttttaaaaaatgaaaatagagtgaaacagaartggtagaatcaagtcaccttgctcattcacagtcatgtgtggctaggacaccatgtggtccagtctgacacaggctgatcctttcccctcaggacccatc

SEQ ID NO: 16474 - DNA, 201 bp, Homo sapiens
agggttggatgcagagaaatagtaagaaaggatggaggatggaggggataaaaagatcacatgtttggtgaatcctcttttaaaaacacttagaagatttyccctaaactaattatctggcttaatgctaactgcttatttgctgaccttctgctttatttacaaatttaaagtggggccaacccttcctgttttccttta

SEQ ID NO: 16475 - DNA, 201 bp, Homo sapiens
atgtgttcagaacacttacattagcctacagttgggcaaaagtcatctaacacaaagcttattttacaataaagtgttgaatatctcatgtaatgtattgracactatactgaaaatgaaaaacaaaatggttgtatgggtactcaccattaacacacacagctgaaagcacactggacctaaagaatatttgaactaaaa

SEQ ID NO: 16476 - DNA, 201 bp, Homo sapiens
aggacacacataaaatgaaagcaaagggatgaaaaaaattctatgcaaatggaaaccaacacagagcaggagtagactttaagtcaaaaatagactttaartcaaaaactgtaaaaacagacgaagatcattatacaatgataaagggatcagttcagcaagaggacataacaattgtaaatatatatgcacccaacacca

SEQ ID NO: 16477 - DNA, 201 bp, Homo sapiens
aagcagccaagcttgtgtttgccagaggacttaggaggatgtggataaaatcaggctgaggcctttttttaaaggcccaagctggagctattgggattgtyccctcagaggaaaatcaggagtttgggccattggcttcatggagaacctgtactttgtaccaaggagaagtcatttctacttggtttttgaaactgcatt

SEQ ID NO: 16478 - DNA, 201 bp, Homo sapiens
tacataatataaatagatataaactgaggcatcaatagcatgtaacttggggggagcagagggaaaatcagagtttttatgcaagtaaagttacattgtgracttataacagactgttacaaattatttcgtgtaagctcctggtaaccaccaagaaaatacctatggaagttatatatataaaaaaagaaaggaatcaaa

SEQ ID NO: 16479 - DNA, 201 bp, Homo sapiens
tcataaagtcaaaaaactgttaagtcgaggtatggtaacttggggattatttgtacttgttagatcatcaaattcagagtcactatctttagtttagtgtwtatctttagtctttagtttttatattttatctttagccattatctttagttgaagtcattatctttacttaaggggatgacaaaaaccttgctaaattta

SEQ ID NO: 16480 - DNA, 201 bp, Homo sapiens
gcagagggaaaatcagagtttttatgcaagtaaagttacattgtgaacttataacagactgttacaaattatttcgtgtaagctcctggtaaccaccaagraaatacctatggaagttatatatataaaaaaagaaaggaatcaaaacctatcgatacaaaaaaaaaaaagaaacaaaacaaaagaaaaccgcaagggaga

SEQ ID NO: 16481 - DNA, 201 bp, Homo sapiens
atcataaagtcaaaaaactgttaagtcgaggtatggtaacttggggattatttgtacttgttagatcatcaaattcagagtcactatctttagtttagtgwttatctttagtctttagtttttatattttatctttagccattatctttagttgaagtcattatctttacttaaggggatgacaaaaaccttgctaaattt

SEQ ID NO: 16482 - DNA, 201 bp, Homo sapiens
caagtaaagttacattgtgaacttataacagactgttacaaattatttcgtgtaagctcctggtaaccaccaagaaaatacctatggaagttatatatatwaaaaaagaaaggaatcaaaacctatcgatacaaaaaaaaaaaagaaacaaaacaaaagaaaaccgcaagggagaaaaagagggacaaaagaacaagacac

SEQ ID NO: 16483 - DNA, 201 bp, Homo sapiens
acggtgcagtaacccaaagacctgttaattgatggtctaaactccagcctcatatttgacttatacgggaggtcttaatgtttccggcttattgccatatyccatatgtaatttcctccattcctttcaaggggaaagccactgagtgttacccagctgccactgctgaccggttgcccacttcactgagggcctttgaag

SEQ ID NO: 16484 - DNA, 201 bp, Homo sapiens
tggtttccttgctaagatttttgcagtttattctgtgtggctgtgtgtgttggtcccttgccaataatcctagactcacccatcccggcacaggcttgttwctgtgggccaagccaaattctgaagcagcgcagttgtttgttgtctgaactcagtcttccccaacacatacttttcttgttgtcctgcacacaccctctc

SEQ ID NO: 16485 - DNA, 201 bp, Homo sapiens
ttatgctcacagaagtcagaggcctggtttgtgtcatattcatgtagaaccatctaccacctgcatgatttttacatttttttggtcttaaactcatactkcctgtgatattttctttcatatttttctctttaaatcagccaacttttggtctcaaataaaataatttaaaacagaaactttgtacctttctataagcag

SEQ ID NO: 16486 - DNA, 201 bp, Homo sapiens
tgtacaggacagtcatgacctacacctggctaaatccagtagtcatttttcagtcttctttctggacccgtcagcatctattagtacaaataacgactacktctgttattattattattattattattattattattattattattatactttaagttctagggtacatgtgcacaacgtgcaggtttgttacataggtat

SEQ ID NO: 16487 - DNA, 201 bp, Homo sapiens
atggggtcagcgtcacacagcaccattgtttcagaacaataggagggagaaggagaggggatgtgagagctatttaagtgctgttgccattcagcacttgytggttgagagaggaaggcagtggggcagggcttggagggggcagagagagggcacagagcagacagggactcagcagatgttcagggaacggcgtggtgg

SEQ ID NO: 16488 - DNA, 201 bp, Homo sapiens
aaggctttcactagatgctagttatacccccagtaactatgaacaagatgaaatttttaccctcaagacttccacagccccaaacaggtcaacacacacayacacacacacacacacacacacacacacacacacacacgtgcacacacatcacacccctgcagcactgtatgcatacgtgcccagagtatctgtgctgaa

SEQ ID NO: 16489 - DNA, 201 bp, Homo sapiens
tcaagatgaagtcagatggtgtcttgggctggattctcaagaagcagaccctgagatgagggcatcatgtaagcagtttatttagggagatgctcctaatragacccagaaataaatgggacaggataggaaagaggagaagggaagcaagggtgagatttcagggaccatcttagctccaccctgatcttgacctcggag

SEQ ID NO: 16490 - DNA, 201 bp, Homo sapiens
actgcctgttttattcatcaatgaatttccacaatgtctagcacataggagatactgcagacacatttgttggttggttggatggatggatggatggatgratggatggatgaatggatggatggaacgacggacagacggatggacagagcagatggacaggttgattgacagatggataggtggtggatgggcggatgg

SEQ ID NO: 16491 - DNA, 201 bp, Homo sapiens
gagtgtggtggcatgcgcctgtaatcccagcttcttgggaggctcagacaggagaattgcttgaacccaggaggcagaggttgcagtgagttgagattgcsccaccgcactgcagcctgagcaacggagcaagactccgtctcaaaaaaagaaagaaaagaaaagagaaaagaaatgaaaccaggtactgtagttcataca

SEQ ID NO: 16492 - DNA, 201 bp, Homo sapiens
cagacaggagaattgcttgaacccaggaggcagaggttgcagtgagttgagattgccccaccgcactgcagcctgagcaacggagcaagactccgtctcawaaaaagaaagaaaagaaaagagaaaagaaatgaaaccaggtactgtagttcatacatcatcattccattcatagcaaggacccaaagaagcaggtgatgc

SEQ ID NO: 16493 - DNA, 201 bp, Homo sapiens
ctggtgattgcaggtccccctggggtccccactcatagatgcccagctctcctgcctttccagggaagaaggagtatcctgttagagcttccttcatggcmccggtacagtgaaggacagtgacccttcaggcagggagtggaatcttggctccccttgaggccattcacaactgaggatttggaccacttcagagtgaag

SEQ ID NO: 16494 - DNA, 201 bp, Homo sapiens
aaggagtgtatattttaagctttttaaaaattatatttatttttttattttgagatggagttttgctcttgtctcccaggctggagtacagtggagtgatytcagctcactgcaacctccccctcccgggttcaagcaagtctcctgcctcagcctcctgaatagttgggattacaggcgtctgtcaccacaaccagctat

SEQ ID NO: 16495 - DNA, 201 bp, Homo sapiens
cctcatgcctcacgcagcacccatctaagtaaggctgtttggggcaatctgttgtttccctaggagttttctggttgcttttggatacatggttatatgaraaaattgtgtatgtctgttacgagggttcagggagctgctctttggagctgcaggaccagcagacacaaaaaccagaaagcacactgttccttcggcttc

SEQ ID NO: 16496 - DNA, 201 bp, Homo sapiens
cacagtctagagccttgaattcactttggggaaaacagaaaaagctgtcatgatgtttcagggctggaagaggtctgagaatcccattgatctcttaggcrgagacgaagacactatggctcgaagccagaaaataaccttcccaggctgggcgcggtggctcacacctgtaatcccagcactttgggaggccaaggcagg

SEQ ID NO: 16497 - DNA, 201 bp, Homo sapiens
ctgtcttaggacattggacctccgagcagcctgcagatcttgggaattcctctgccccctaaagtattctttgtctttaatccagttgttacagtgagtgwacctgatttgttccagatgtcctaagatttagtgattccggaaactactcctaaagtcaaggctgatgaggatttgaattcctctgttagctgggaacca

SEQ ID NO: 16498 - DNA, 201 bp, Homo sapiens
tcttgtaatagtgaataagtctcacgagatctgatggttttataaaggggagttcccctgcacacactctcttgcctgccaccatgtaagacgtgactttscttctcattcaccttccgccatggttgtgaggcctccccagccatgtggaactgtgagtcaattaaacctctttcctttataaattacccagtctcaagt

SEQ ID NO: 16499 - DNA, 201 bp, Homo sapiens
caaacaaatgcataaccacaacttcgataagtgccatgaagggttgatggggcacatggggggtggggggctcataatgggaggatttatttcacctaggsagggagatcaggaaggatcccctggggacatgatagtcagggggctggagaatgtgggttatgttggagaggaatgagttttgaagggataggagttgct

SEQ ID NO: 16500 - DNA, 201 bp, Homo sapiens
tttcatgtgagcctctaaacagtctagtgagttaggcaaggtagaaccctgtgctttacatgaggaagctgaggccctagagctaactgattgcccaaggrcacatggctagttaatggggctcctggaacttgtagttctgatctcggtttctgccccccaccttcaactaccccctgtgcctcatgttatattagtgta

SEQ ID NO: 16501 - DNA, 201 bp, Homo sapiens
tctcaaaaggctaactatgacttttgagacttataaagtctcaaaagactttataagaggttaaaagggcaattgaaatgtaggattattttaaagacctmcgtatttctagaacttcaactacagacctcttgttaactctgattcccatgtctacaacctaagaatgatacattatgtttagtgaatagtgattcggta

SEQ ID NO: 16502 - DNA, 201 bp, Homo sapiens
tgttgctctaactgctgatagctgttcagctgggactgcttgcagctttttaatatttacagcattgaacggggttgccttgttctttatgttaaaatggraccaaaatcactttctgtggaaaaccttcactctgcccaccgatgagcactgggcatacattgagcaggtcaacggcgtttgttcaggcacatattctgt

SEQ ID NO: 16503 - DNA, 201 bp, Homo sapiens
atgttatggatgggataaagaaatgttacaatgaaaccaggaaatcagtggcagaattaaaatatgttatagtcaggaaagagcagaatcagcagaacagraaattgatttaatgatgcggaggtgtttttgagaggctctgagaattcagagaaaaagaacaaagcaataaaaaaggatgacatgaggactatattgtgg

SEQ ID NO: 16504 - DNA, 201 bp, Homo sapiens
agctacaatgaagttctacaatctgttgttctcaattttcctggcaggaaaaaaaaaatcttttctgagtaggaaggtttgcctttttagaacaaacacgwtcttccctgcgtgattcttctgaatgcctggccttctgtcaactatcagtctgaaggggaatttccatagagcctcgccaccaaatttaaattaggcaaa

SEQ ID NO: 16505 - DNA, 201 bp, Homo sapiens
caggagttgggtgaggcaggtgtggtatgtgggtgaagaggaccagggtggggcaggaggaagcagtgaagacagtgggaagatggagggttccagcttcmcccacagggcagcaggctcacagcagcattcagtggttgccaggtgggagtgaggcccagcacactctattttctaataaaaccgagagatcttatgact

SEQ ID NO: 16506 - DNA, 201 bp, Homo sapiens
ggcatctggcccaaagggctggaggagtgcggtatgggattcagactttttatcaggtaggcagtaagtgaggtcttgactgagagaacagagaacgaagracagaggctagagacatcttagaggaagaacaaagaaacagtgctgacaggccaggaaggtcagagactcagtgttgggactgctggaagaaagacaagt

SEQ ID NO: 16507 - DNA, 201 bp, Homo sapiens
tcctctactcctgatcatgctctagcgcacagagcactgtaagctcgtgaggaatgtgcttcgtacctggcatcggttggccataagtcactgaatttggstaataagatgttgcattgtctctgatctccttgagagactgagatagatggataggccctaggtccttatttcctccatgggagggtattgtgggagggg

SEQ ID NO: 16508 - DNA, 201 bp, Homo sapiens
tgtttgaatgacttaaagagattacatccaaattgccaagacctagtaactgctctttaactatttaccacccccttctcctccataaagtgcagttggcrccaaggcctcagagacacgggagggtgtggcaaaccacgaggctgagagtggaggtgtgggagaggctggagggaagctatggccttggaattttattgc

SEQ ID NO: 16509 - DNA, 201 bp, Homo sapiens
agtcttttccgcccccttcctgtctttaatccagtgccccaagccccctggtgactttaccttgaacttcctgtataacgccaggtagaaaagcctcaccyggctggaagcccactcgaggctctaacacaacagcaagctctttatcttgctttgttggtcttccccatccgcttatcagatggaaactcggcattcctc

SEQ ID NO: 16510 - DNA, 201 bp, Homo sapiens
aaacactgggtgttttaaaaacaagttgtttgaatgacttaaagagattacatccaaattgccaagacctagtaactgctctttaactatttaccaccccmttctcctccataaagtgcagttggcaccaaggcctcagagacacgggagggtgtggcaaaccacgaggctgagagtggaggtgtgggagaggctggaggg

SEQ ID NO: 16511 - DNA, 201 bp, Homo sapiens
gacttggagacctggagctggaatttgagggtcaagacagtctctgagccaagatgttgggtttgtggcagacccaagactatgcctgccttggcttccargccccccctggagaacttctgtggttcgttcttgtgatagcattgtcctttaggatgccatcattatgtgaatgtttcctgctatgattgtccaaaggga

SEQ ID NO: 16512 - DNA, 201 bp, Homo sapiens
aatggccttctttgtctcttctgatctttgttggtttaaagtctgttttatcagagactaggattgcaacccctgccattttttgttttccgtttgcttgrtagatcttcctccatccctttattttgagcctatgtgtgtctctgcacgtgagatgggtctgctgaatacagcacactgatgggtcttgactctttatcc

SEQ ID NO: 16513 - DNA, 201 bp, Homo sapiens
ttaagtttggatgaaatgacatgaatatactattatgaaccagtgcctacactaggacattttttttattgttatactttaagttccaggatacatgtgcygaacgtgcaggtttgttacataggtatacacatgccatggtggtttgctgcacccatcaacctgtcatctacattaggtatttctcctaatgctatccct

SEQ ID NO: 16514 - DNA, 201 bp, Homo sapiens
ctcttcttcatcaacatgtggcagaaggtaaggagggcatccctgtaaaaagagcagttgttccatctggtgcgcttgctgactttcattattgcctggamtaggcaatgattctacaagcactaatcctttctgtggactatcatttagaatgattagaacttttttcttcctgggcttagaaaacatgttggtatagcc

SEQ ID NO: 16515 - DNA, 201 bp, Homo sapiens
cacctcagcctagatttcgttgtccctattattatcagcattttggtcaaagccattcaacaagtctctaggaagttccaaactttctcacatttcctgtyttcttctgaaccctccaaactgttccaacctctgcctgttacccaatttcaaagtcgcttccacattttcagatatcttcacagcaatagccccctcctg

SEQ ID NO: 16516 - DNA, 201 bp, Homo sapiens
tcacgtggttcccattgtgctgaattgcacactgctcctgaaagtgctgcccactccctaatcaccagaggcaggctcagtcaataggacagacagatgakgagtagacccccaagaatcacccaccagaggaggagcatcaacaccagggcagagaggcagcaaccgcaatcaaaagaactaataccagagggtgcagta

SEQ ID NO: 16517 - DNA, 201 bp, Homo sapiens
agaaatgttacaatgaaaccaggaaatcagtggcagaattaaaatatgttatagtcaggaaagagcagaatcagcagaacagaaaattgatttaatgatgyggaggtgtttttgagaggctctgagaattcagagaaaaagaacaaagcaataaaaaaggatgacatgaggactatattgtggaaggtagaaactggaaaa

SEQ ID NO: 16518 - DNA, 201 bp, Homo sapiens
tgcaatggatttttctgtcttctaatgcaaaactactttcatagatttattctggattattttttcctttgagggaaggctgcttataaaaacatggggtrcacatggatgaccatctgctggcttttttctctcctaaataaagctaacttgaaaacacattataaaagagggcttaatttgttggtggctactctgctg

SEQ ID NO: 16519 - DNA, 201 bp, Homo sapiens
tccccaccggaattaatggtaatggatcctttactttccactgtacattaagactctctaaaaaaaaaaaaaaaaaaaaaaaaaagccacacttcccaaasttatttgaccatgaaaccttttttttttttttttttttttttttgagatggagtctcactctgtcgcccaggctggagtgcagtggtggcacgatctcgg

SEQ ID NO: 16520 - DNA, 201 bp, Homo sapiens
ttatttgaccatgaaaccttttttttttttttttttttttttttgagatggagtctcactctgtcgcccaggctggagtgcagtggtggcacgatctcggytcactgcaacctccgcctcccaggttcaagcgattctcgtgccccagcctcccaagtagctgggattacaggcacacaccaccatgcccagctaattttt

SEQ ID NO: 16521 - DNA, 201 bp, Homo sapiens
ccgcctcccaggttcaagcgattctcgtgccccagcctcccaagtagctgggattacaggcacacaccaccatgcccagctaatttttgtatttttagtaragacagggtttcaccatgttggccaggctgctctcaaactcctgacctcaagtgatctgcctgtctcagcctcccaaagtgctgggattacaggcgtgag

SEQ ID NO: 16522 - DNA, 201 bp, Homo sapiens
agggagaaattagcatttcccatcggagaccatgggaagggcactctagaaaaaagagcacaggaaaaagtatggctcaatacagggtccagaaatactcwcctggaggaactatgtgtatttcctgctatagtaatatagcatagtatttgtaatgaaaaattgtattctaaacctaaagattactaagccaattggctt

SEQ ID NO: 16523 - DNA, 201 bp, Homo sapiens
tggggatgggcggcccggctgcgccgaggggcgccgggaggctccgcgcgctgctgctggcgctggtggtcgcggggatccccgcgggcgcctacaacctygacccgcagcgccccgtgcacttccagggccccgctgactcgttcttcggctacgcagttctggagcatttccacgacaacacgcgctggtgagtgcccg

SEQ ID NO: 16524 - DNA, 201 bp, Homo sapiens
attaaaggcatgagccaccgtgcccagctattctttttctttcttttcttttttttttttttttcagatggagtcttgctcagtcacccaggttggaatgyagtggcgcactgtcggctcactgcaagctcgacccctcagcttcaagcgattctcctgcctcagcctcccaagtagctggaattacaggcatgtgccacc

SEQ ID NO: 16525 - DNA, 201 bp, Homo sapiens
atgaggtggaggtgaaaggtcaggtaactgtgggggcccagctctgggtgaggtgtcctagaattcagcaaggaaggcagcctcttggctctgcacagttkggaaggtcagtcttcagatggaggaaagatgggcacttccaggacacagataccctccactcccatccaagctcagcagagggtgctggccaactctgtc

SEQ ID NO: 16526 - DNA, 201 bp, Homo sapiens
ggttcatagataaagtcaaacatccctttatactctaagggtgtgtttccccgataatcaggcttaaaggggatggtaactggagaattttgatatctcartataataaggcaatgcagaaaattattcatccccagcatgtttctgtcactttctctggcattcatatctcaatctttgcagtagaaagagaaatgtaga

SEQ ID NO: 16527 - DNA, 201 bp, Homo sapiens
atcacttgtaacataaaggataaacgcttcaggtgatggataccccatttaccctgctgtggttattacatattacatgcctgtaacaaaatatctcatgyacctcataaatatgtacctactgtgtgcccaaatcttttttttttttttttttttgagatggagtcttgctctgtcacccaggctggagtgcagtggtgc

SEQ ID NO: 16528 - DNA, 201 bp, Homo sapiens
ctgagcgcagaggagatgtgggtgcctcctcatgctgttcccgaccagtggctctttctggggccccatctagcatgagcctttcacagactgctaagcayaattagaatgaaggtctaggcttagccatagccccagaagtgttggggtaaagtggaagaggccggcagttggatggcatcttgtactgtaccttgtggg

SEQ ID NO: 16529 - DNA, 201 bp, Homo sapiens
ttacaggcgtgagccaccgcacccggactatgtgcccaaatttttaagaaaaataaaaaatcacggaacaaatttcctccatcttagctgatctgttggtrtgttaaggccacctgggagatggcctttcctaccccttcctatctagtgtccaagtgctgtgatgtatgtggatcccagagtaaacttggtgttgtgcag

SEQ ID NO: 16530 - DNA, 201 bp, Homo sapiens
actctgttaaaaaacatttttaaagaatgaagattaattttgatacacataagaatgagaactattctagaactctcaaaaagggcaaacgagtaatagtktctgtgtatgttcatttgacacatgcttattatgtatccacatgtgccaggcactggagatatagtcctgccctcatggagcttctaaagggagttacaa

SEQ ID NO: 16531 - DNA, 201 bp, Homo sapiens
ctttgggaggctgaggcaggtggatcacctgaggtcagaagttcaagaccggccttaccaatatggtgaaaccccatctctactaaaaatataaaaattascggggcgtggtggcgtgtgcctgtggtacccagctactagggaggctgagacaagagaattgcttgaacccgggaggtggaggttgcagtgagcggagat

SEQ ID NO: 16532 - DNA, 201 bp, Homo sapiens
gtcttttccgcccccttcctgtctttaatccagtgccccaagccccctggtgactttaccttgaacttcctgtataacgccaggtagaaaagcctcacctkgctggaagcccactcgaggctctaacacaacagcaagctctttatcttgctttgttggtcttccccatccgcttatcagatggaaactcggcattcctca

SEQ ID NO: 16533 - DNA, 201 bp, Homo sapiens
gccacacctcaaatgttctaccttatttaatatgttcatccttcttggctgtctcattggcaatttctcttgatcttcaggtatattgaataagctcaackattaaacatatttattttatcattttttaaaaagagcttagaaatttcaacattgaatgaaaccataccataaaacttgggaactggttagtgagggagg

SEQ ID NO: 16534 - DNA, 201 bp, Homo sapiens
tagcttttcaaagtggttctgccttttacaccctcaccagcaatgtataagagtttgagttggtccccatccttgtatattcagtattgtcagtcattttwattttagccattctggtgtgtaattgtgtttctttgtgatttagagctgcatctcccatatgactaataaacacgttttcacgtgcccctcagccattgg

SEQ ID NO: 16535 - DNA, 201 bp, Homo sapiens
caggactttgggctccgctttggacttctgaatcagaatctgcattttcacaagagccccacaagattcctgtgcacatttaagtttgagaagcactgctstggagcacacatgtgtgcacacacgcccactcatgcagaaatatttacgtgagctagttcattcctcagccacacctcaaatgttctaccttatttaata

SEQ ID NO: 16536 - DNA, 201 bp, Homo sapiens
tcagaagttcaagaccggccttaccaatatggtgaaaccccatctctactaaaaatataaaaattagcggggcgtggtggcgtgtgcctgtggtacccagytactagggaggctgagacaagagaattgcttgaacccgggaggtggaggttgcagtgagcggagatcgccgcactgcactccagcctgggtaacagagca

SEQ ID NO: 16537 - DNA, 201 bp, Homo sapiens
aagctggctgggaggaaagagatttttctctcccagcaaagtagtaaacaggctctctcaagcattcatccatctggggagcttggcacacaggacagatmctttctcttaagtgtcccaaggccaaccctgaaccatggaagccttcatttaccatcagtttttctttcaaaacttctgcaagggcataaaaatggggga

SEQ ID NO: 16538 - DNA, 201 bp, Homo sapiens
actcacagtgtagcccctggcctagcattgtcagcatcactgggaacttgttagaaatgcaggactttgggctccgctttggacttctgaatcagaatctkcattttcacaagagccccacaagattcctgtgcacatttaagtttgagaagcactgctctggagcacacatgtgtgcacacacgcccactcatgcagaaa

SEQ ID NO: 16539 - DNA, 201 bp, Homo sapiens
aaatataaaaattagcggggcgtggtggcgtgtgcctgtggtacccagctactagggaggctgagacaagagaattgcttgaacccgggaggtggaggttscagtgagcggagatcgccgcactgcactccagcctgggtaacagagcaagacaccatctcaaaaaaaaaaaaaaaaaaaaaaaaaaaaaaagggcctttg

SEQ ID NO: 16540 - DNA, 201 bp, Homo sapiens
taaagaataaagtaggggattcgaaacttggattttctgagaatgtattgcagaagaacaaaaaagccagttaaacttattcctttttttaaatagcaatstggaatgaaaatatcagatgatcataatataagagttagaagtcaagagagatggaaatgaaagcaagtcaagattcttgtcttggggggacaagtttat

SEQ ID NO: 16541 - DNA, 201 bp, Homo sapiens
acagaggcttaggtttctaaaagaggggtgctgctttggcagctcagaattgaaaagaggcaggcattgtcctgacagctggtaactgtccctgccatttktctggctggggaaaatcaacttgctagcccagctctagagactggattaaaccccagaacaagatagaaccagtgttgattggaattcagagcacgtgat

SEQ ID NO: 16542 - DNA, 201 bp, Homo sapiens
tacaaaggaggtattttgttataatcatgactgcaagcatttctttctccaaagtctttttgcataaagattttctaatttttttgttgttttttgtttgyttgtttgtttttgagacagagtcttgctgtgtcacccaggctagagtgcaatggtacaatctctgctcactgcaacctctgcctcccaggttcaagcgat

SEQ ID NO: 16543 - DNA, 201 bp, Homo sapiens
ttgagtttttatttttagagaactgatattttttctgttcttgatgaggtaatcaggcagtctctatgttacatgagttaagagtcctagacttacttagyaagtcctcaattctgacacttattataagacatctgatccagagctgcatgttcaactccatcaagccttgcctactttcctcatcggtaaaattgacct

SEQ ID NO: 16544 - DNA, 201 bp, Homo sapiens
aacacgttccaggagagattggtaatgagccaccaagtcagggctcaggatacccgtttagctggagtgggctagtgggatatttccgatgttccctgtcrctgttcctcccagctggttttgcaggcagcaggcacacaggctggacatcctttccctctgaggttcctccccttctatttcctgcttatcaacatgttt

SEQ ID NO: 16545 - DNA, 201 bp, Homo sapiens
acaaaggaggtattttgttataatcatgactgcaagcatttctttctccaaagtctttttgcataaagattttctaatttttttgttgttttttgtttgtytgtttgtttttgagacagagtcttgctgtgtcacccaggctagagtgcaatggtacaatctctgctcactgcaacctctgcctcccaggttcaagcgatt

SEQ ID NO: 16546 - DNA, 201 bp, Homo sapiens
tccatcaacatcacagcgcctcagtgtcacgacggacagcagcctgtgaactgcctgaacgtcaccacctgcttcagcttccatggcaaacacgttccagragagattggtaatgagccaccaagtcagggctcaggatacccgtttagctggagtgggctagtgggatatttccgatgttccctgtcgctgttcctccca

SEQ ID NO: 16547 - DNA, 201 bp, Homo sapiens
gtggtgtctggtgctgatagaaaacctaagaacaaatggagaatttgaaagctgcaatggggcgtgaaatgtctcagtgaccaaaggcattatgtggaccmtggacccagcaaccagctctggcaaggaccagattgtcaggctggtctggcaggttgaccttggcttagtgcctgcccatctcagctccatggacactgt

SEQ ID NO: 16548 - DNA, 201 bp, Homo sapiens
ggagtgattatttacttagtgatatattttttatagttctctgcctcatatcatttcagtctatttagaaacctgctattttagcacaaaacaatatcaargagaggagtgaatgtggtttgcagcagaaaaaataacaatagattgttttctgtagtttaatgtcatacgacaagaggcagaatgtgggcaagctcaggt

SEQ ID NO: 16549 - DNA, 201 bp, Homo sapiens
ttcatgagtctttttatttttattttttggttatatagatcagaggtttccgtgttgcccaggctggcctcgaacgtctagcctcgccttcttatgcgccwggacaacaggcctgagccactgcagctccctatttcatgagtcttttagctttggtcccaaaattgaattctgctcagttctgagctggggttctcactg

SEQ ID NO: 16550 - DNA, 201 bp, Homo sapiens
tgagggaatccctgagtatgcatctatttcttgaatcatggcatctgctataggaaatcctcttaaatgtattcttatctccctaataaaatggaaattgrtacttaattggtaaaattttaaataattacccagcatctggtggttcatttatggcttcaaccagatgcgttttattaacaacaaacttgcttttattat

SEQ ID NO: 16551 - DNA, 201 bp, Homo sapiens
ctgaagtagggagttggcaaaatgggttgctaagttctaggtaaagggaacgctttaaagattacaaaactccttttttggtaatattaaaaaattattgsccaggcgtggtggctcatacctgtaatcccagcactttgggaggctgagactggcagatcacctgaagtcaggagttcgagaccagcctgaccaacatgg

SEQ ID NO: 16552 - DNA, 201 bp, Homo sapiens
cagcaaatgcttgagggaatccctgagtatgcatctatttcttgaatcatggcatctgctataggaaatcctcttaaatgtattcttatctccctaataawatggaaattggtacttaattggtaaaattttaaataattacccagcatctggtggttcatttatggcttcaaccagatgcgttttattaacaacaaactt

SEQ ID NO: 16553 - DNA, 201 bp, Homo sapiens
acccatgaaatgatttccaacatccagtcactttcctgggtatttttagtcactcactttgcagaacctttgatggtctacagaagtgaaggaatgggttkctaagtccaagctgaggtagaatcctggcattgccatttactagagctgtgtgaccttagacaattcacttaacctctctgagcctcaatattcttacct

SEQ ID NO: 16554 - DNA, 201 bp, Homo sapiens
cactttgctattaccagctgggactccacttatcaagttcttttaggaaattacccaatgaattggtggaggtaaatgatgcaggaggtttgaccaactgsatggggctacaacattgcagttcatgctcataatggcagcaaatgcttgagggaatccctgagtatgcatctatttcttgaatcatggcatctgctatag

SEQ ID NO: 16555 - DNA, 201 bp, Homo sapiens
gatttactctttgtttttgtgggatgtccttggggagcccaaggactgtccattcatcaagcactgggagatggtccatggcagggaggagagtatggctwtttattgagtttcatttggtcataagactgggcaggttgatttcttctgccctgaagcactttgctattaccagctgggactccacttatcaagttcttt

SEQ ID NO: 16556 - DNA, 201 bp, Homo sapiens
ctgttggttttaaaggtttttgaagacaggaattactttatcttaccctgtttataatgtttgagaggggatgcagtggtatggtaggcatacatttttcmacttttatcctgggttagtctaaatcatcagaaagcaacatatcccatccctgcccccaatgttccgaagagcctttgcaggcctgtgctgatgctcaaa

SEQ ID NO: 16557 - DNA, 201 bp, Homo sapiens
tcaccccagatagtttccttgtgcctctgtctggtcatacccctctcctgatagacaaccactgttctgacttctatcaccatagatccatcttgcccatkctagaatttcacattggtgggaatatacagtatggactcttgtttctggcctcttttaatcagtgtgatgcatttgagattcgttcatgttggtgtgttg

SEQ ID NO: 16558 - DNA, 201 bp, Homo sapiens
aagtttagagtcctgcattgatgagaggacctaaaaggcttatgaggccaggcatagtggctcaggcttgtaatcccaacactttgggaggctgaggcagktggatcacctgaggtcagaagttcaagaccggccttaccaatatggtgaaaccccatctctactaaaaatataaaaattagcggggcgtggtggcgtgtg

SEQ ID NO: 16559 - DNA, 201 bp, Homo sapiens
cagggagctgacgaactttccagttgactaggcttgactaaggataatttctgtggatcctcctgggcagaggttaggagctgctgctcacgtttctggascatgtgcctccctcctccctaacactgatgctgtggaaagaggttcttcaaaactgaaaccagataaaccagggccctgagctggcagggaggagggatc

SEQ ID NO: 16560 - DNA, 201 bp, Homo sapiens
atgactccatgagttttgaccactgcatacgctgtgtgactaccaccccaccacaataaagaatacttctgtcaccccagatagtttccttgtgcctctgkctggtcatacccctctcctgatagacaaccactgttctgacttctatcaccatagatccatcttgcccattctagaatttcacattggtgggaatataca

SEQ ID NO: 16561 - DNA, 201 bp, Homo sapiens
ggcatggtggctcatgactgtaatcccatcactttgggaggctgaggtgggcacattgcttgagcccagaagttcaagaccagcctgtgcaacatggtgaragcctatctctactaaaaatacaaatattagctgaacgtggtgatgcatgcctgtagtcccagctactcaggaggccgaggcaggaggatcacttgaacc

SEQ ID NO: 16562 - DNA, 201 bp, Homo sapiens
aacccaggggccttttattagaaaacatttattttaaaagaataatgctttttctctttcttttcttttcttttcttttcttttcttttcttttcttttcytttcttttcttttcttttctttctttctttctttctttctttctttctttctttctttctttctttccttccttccttccttccttccttccttccttcc

SEQ ID NO: 16563 - DNA, 201 bp, Homo sapiens
caggcgtgagccattgcgcctgacccaacaggccctcttaaaaccggggccatctggctgaaggtccatcatatagactctgctttctcatcattcttgtrttttttaatcttcctgctgtgagcttaatccaaagggtattttctttttctcttcttcatggtgagggacagccttctccaggagtttgctcacatatgg

SEQ ID NO: 16564 - DNA, 201 bp, Homo sapiens
cagagtggcccttgcagcaggcgctggcagggtggaagacctggcagtgcctgatgctgcaggaatggccagacactgacccatgggcagggtcagagagyggaggaggtggaagaatgcacttaatccaggccacatggtgggtggaatgagcatgggttttggagacacatagatccagtgtgtatccagctggacaca

SEQ ID NO: 16565 - DNA, 201 bp, Homo sapiens
tctgtagctaatggagggtgggtgagtgggggctgggttgggggacagcagtgcatcgtggaagcaggagaccagtgagaaagcagtcttttcaggatctkgaagtacaagtgttcaagtacaagtattcagcaagaacaacatggttcaatgaaaacattctggtgccgcctaccttttctctaacatgagaaaacgctt

SEQ ID NO: 16566 - DNA, 201 bp, Homo sapiens
agaacagacataggctgtctttgcttgtgtagatgacaattacaagactcttttctttaatttatgccctaaatgctataattctggattgaaagcgaagytaaatttaggaaggcctaatgatgacacacaatgctctttcgcactcatgatacataacttacagggaaaggccctgactccctttttgcatagcgtcac

SEQ ID NO: 16567 - DNA, 201 bp, Homo sapiens
tgggagtgcaggcatggggttatgggggtcagggtgacctcactgacgaggtgtgatttgagcaaagcatggaaggaggctggggagttagcacagcgggytcctggaggagggctcagaccagtgtctgagtgtctggtgtgtctgaggaggagcagggagaccagtgtgggcaaagaggtcagagtggcagtgatggtt

SEQ ID NO: 16568 - DNA, 201 bp, Homo sapiens
ttaaataaatgagtgctgtgggcattcagtggtgcctgccattgtatttgcaggagactgagacatttgtgtaggagtcaggtccaacagccagactgtgwgtctaaatcagaaggtggactcttgaagcacaagaactcccccaggcctccactgggcatgatgcacccacaccctcccctgccaaccagtgtttcttga

SEQ ID NO: 16569 - DNA, 201 bp, Homo sapiens
tgactaataaatattttctgatttaaatgtaatgaaatattatcagcttttgaagaaggccctggggataattatcttcattttacagacagggataccaygagatactcaggtcacatagagtgaggggtggagggtgacaattccatgttcttcagaacctagagcattttccaagagtcactgaattctaggtatgtc

SEQ ID NO: 16570 - DNA, 201 bp, Homo sapiens
tcgggggagttgaatggtgagcctggagtccaggcagggtgcggtattgcttactgcttttcatgagtggtgttccccagaatctgtggttgaggtcaatktcagctgtttgtcatttccttgttagagcctgatgtaaagttgaggaaacgtgtgtggtctcatcgtggatagaataggggcctggcctgtcgtgaattc

SEQ ID NO: 16571 - DNA, 201 bp, Homo sapiens
actcagtaggaaaacttacgaatatggaaactattttgccatgaggcatacatagtctgaggggcatttatctatccagaccatcctcttttcattagaartacataacaggagattaataaacttcggtgattcagcccacaaggcaggaggaagagagctttgggcacagtttgggggccacatctgagtcacaagagc

SEQ ID NO: 16572 - DNA, 201 bp, Homo sapiens
acagtcatttcttgtctacaccctcctgaattatcaaaaagcaagcctttccggcgagaatctagtggcttttcttccatctgtgttcctgccctatcctytgttaaggctcttccccaaattaaccataacacgtattgtttaaggcattgccctcttgcctgcaggctctatcctcctctctctattttttttctttag

SEQ ID NO: 16573 - DNA, 201 bp, Homo sapiens
aacagtcatttcttgtctacaccctcctgaattatcaaaaagcaagcctttccggcgagaatctagtggcttttcttccatctgtgttcctgccctatccyttgttaaggctcttccccaaattaaccataacacgtattgtttaaggcattgccctcttgcctgcaggctctatcctcctctctctattttttttcttta

SEQ ID NO: 16574 - DNA, 201 bp, Homo sapiens
gcactgtccctcccttcagcctcagccctgagggtcgcaggcttggccctgttttatgtagtatgggctgaagggagaggggtgtgagcactgggggcggrgtggcgtggtgcggtaaaaacaagagctgttggttttaaaggtttttgaagacaggaattactttatcttaccctgtttataatgtttgagaggggatgc

SEQ ID NO: 16575 - DNA, 201 bp, Homo sapiens
ttaaaaaagatttcgatctttaatctttctggaatttgtgttgtatacattgtgtgatagaaactaactacattatttttctaaatatatagttggttgtyctgatactggtttgttaaacaacttttcctctccccattgaaatgccatcctgccgtgtggcgacttcactctcttcttccatctcagcaaacatttaga

SEQ ID NO: 16576 - DNA, 201 bp, Homo sapiens
tagcactttcataggttgtttttaaaaaagatttcgatctttaatctttctggaatttgtgttgtatacattgtgtgatagaaactaactacattattttyctaaatatatagttggttgttctgatactggtttgttaaacaacttttcctctccccattgaaatgccatcctgccgtgtggcgacttcactctcttctt

SEQ ID NO: 16577 - DNA, 201 bp, Homo sapiens
atttttaatagcactttcataggttgtttttaaaaaagatttcgatctttaatctttctggaatttgtgttgtatacattgtgtgatagaaactaactacrttatttttctaaatatatagttggttgttctgatactggtttgttaaacaacttttcctctccccattgaaatgccatcctgccgtgtggcgacttcact

SEQ ID NO: 16578 - DNA, 201 bp, Homo sapiens
cattgaggccgaatttaaagattgttctctcacctcactctcctacttctaagccaccttgcaagtcccaccacctcctatgccctcaaaacctctaacawtgacatccattgccctccacatcctctgccaccctacaaatctaagccatagttgtcttgcttccaacccactgcggaatccttctgccgtcttgcttcc

SEQ ID NO: 16579 - DNA, 201 bp, Homo sapiens
gaaactgctgtttaaatccaaagagaacatagacagttggcaatatagtgtctgatccagaaagcaagaaagaaaaggcagaaagtctgaagttttatttycactctcaaaccaataaataggagatgctaccctccaacccccattccgcaccctcagtgattcttacctcgctggagaatcatttttatgacagtcgac

SEQ ID NO: 16580 - DNA, 201 bp, Homo sapiens
tgagcttccagcccactggagttttgcctctgcataatcccttctcaccagctcagtgttctttgttgtttgcagtggaagcaaaccttggggctggtccrtttgggacttcttatggcaagaagtttgaatagcttcatcctgccatcaactctccttgtttctgagcctttgatgctccatcatgctctaccatgttga

SEQ ID NO: 16581 - DNA, 201 bp, Homo sapiens
ccttggggctggtccatttgggacttcttatggcaagaagtttgaatagcttcatcctgccatcaactctccttgtttctgagcctttgatgctccatcaygctctaccatgttgatggggaaatgagtgaggagagaattagaaacccagacatcttctgcctgattatagcagcagctagattgacttttgagagtgta

SEQ ID NO: 16582 - DNA, 201 bp, Homo sapiens
gaagtttgaatagcttcatcctgccatcaactctccttgtttctgagcctttgatgctccatcatgctctaccatgttgatggggaaatgagtgaggagaraattagaaacccagacatcttctgcctgattatagcagcagctagattgacttttgagagtgtacgcgtgtgtgtgtgtgtgtgtgtgtgtgtgtgtgtg

SEQ ID NO: 16583 - DNA, 201 bp, Homo sapiens
ccgcttcccgggttcaagtgattctcttgcctcagcctccagagtagctgggacaacaggtgcgtgccaccacacccagctaatttttgtatttttagtaragctggggtttcactatgttggccaggctggtcttaaactcttgacctcaggcgacctgcccgccttggcctgccaaagtgctgggattacaggcgtgag

SEQ ID NO: 16584 - DNA, 201 bp, Homo sapiens
aaggcagagagtgtagtcattggctaccatgacattctccttccctcaaaaatgcatctcaggctatgggagaccatcctgctaagcaggtaaaagggackcattttgccagcaggagagagaagtttgggttcctgtaattctgcccaggtgtttcctgtcaatgagtgtgctctagcagggcagcattcaaactctggt

SEQ ID NO: 16585 - DNA, 201 bp, Homo sapiens
gacctgcccgccttggcctgccaaagtgctgggattacaggcgtgagccaccacactggcctacttttttttttttttttttcctgctgagggatcttgtscccaaattaatgcttgaacaatcaacaaccaataatttctggtatccagggactcagacatgacaaccagaattagggaagctgcacttgtattattaat

SEQ ID NO: 16586 - DNA, 201 bp, Homo sapiens
cataggagcaatcagttgctggtgttcctctcctcttccccactacactgaaagaaagaaattaatgcatatttgtgttttggggtggaggtttcattcayccaagaaatcatctcaccttgactgttttcaaggtgtaaattgtgtttatagtgaaaaagaagacttggtcatgataaaagccagacactcgtgggatgg

SEQ ID NO: 16587 - DNA, 201 bp, Homo sapiens
gtagaaatggtaaaaatgcctacgtctagttcacagtgatgcgggtgcctctatgctaatgatagcagctttcttttctccctaattgcagaaaacacgayccagttttatagtttttccttcagatgattgtgatgaacttcatagtccctgtcaagtcttaagatgacccctccgcaaacccctctcactggctatctg

SEQ ID NO: 16588 - DNA, 201 bp, Homo sapiens
tgcctgtgtggatatgtgatgaacttaatgatgaataagaagtgagcacagccaggagtggtggctgtaatcccagttccttgggaggctgaggcaggaayatcgtttgaggcttggagtttgaaaccaccttgggcaacatggcgagaccccgtctgacaaaaaaagtaaaacagctgggtatattggagcatgcctata

SEQ ID NO: 16589 - DNA, 201 bp, Homo sapiens
tctgtagaaatggtaaaaatgcctacgtctagttcacagtgatgcgggtgcctctatgctaatgatagcagctttcttttctccctaattgcagaaaacaygacccagttttatagtttttccttcagatgattgtgatgaacttcatagtccctgtcaagtcttaagatgacccctccgcaaacccctctcactggctat

SEQ ID NO: 16590 - DNA, 201 bp, Homo sapiens
tttttgtttttaaaaaacatataaagtaagcatagatgctagtgtgtcccatggtgaagttgtgaactctggttggttgagggggctgttttctagagggsagggcagggcatcttcttcagctgagtgcttttgatttcctacagtttaagaagtgttcaggaccatggagttctagatttactgggtaaaactgttcac

SEQ ID NO: 16591 - DNA, 201 bp, Homo sapiens
tcagtctcttcacatctttagtcctgataatcccgtctgtataatagattccataatgctgatgaatctggtgaaatctgtttttgttgcttagctggggmaaaaaaagttcttggtgtgaggaatttctcctttgttgtgactgtggttctcattgcattcccctcctcccctcctcacttccttctctgcttaccgttg

SEQ ID NO: 16592 - DNA, 201 bp, Homo sapiens
gtaggtggccccagggctggcttagtaacctaacaatggcaccagtggcaccaggggtgaaggctctttatctgtccttgccttgcagaaggccaaggcamcttgagcaacatgtcaaagggcatcccaactggttgtattatttaccttgaagtgaagtgtcaggatttgaactgtcagccctcagggagaagtgttcca

SEQ ID NO: 16593 - DNA, 201 bp, Homo sapiens
gacaccagttctccgctggaaaaagggacaaaagattgcccaaaagaatcaggtcagaaccttaaagctcatactcagcacccaaggtggcagctgcacasagcagaaataatggcccaaaagttgagagagccgtgggcctggctgctcaggagaccgcagccaggacacacctcctctctgggtctcccttttctgatc

SEQ ID NO: 16594 - DNA, 201 bp, Homo sapiens
atcccgggcactcctgcccagctgctcatgccaacttgcagtacacagaggaaatatatggcttctcccaggcccacctacataccccggttcctctaggkgttctgctaataaatgcatcttgggaaaaagctgcattgcttattgatgggattccacaaatgtgatttaggtagtggtggcctttgcttagagaagctt

SEQ ID NO: 16595 - DNA, 201 bp, Homo sapiens
gaccagtggctctttctggggccccatctagcatgagcctttcacagactgctaagcacaattagaatgaaggtctaggcttagccatagccccagaagtrttggggtaaagtggaagaggccggcagttggatggcatcttgtactgtaccttgtgggcaatgcgaagcaacctggcttatatctgacattaggtggggc

SEQ ID NO: 16596 - DNA, 201 bp, Homo sapiens
gtgtaccctcccattaatttctcttccctatcctccatctgccacatgggttcatagataaagtcaaacatccctttatactctaagggtgtgtttccccrataatcaggcttaaaggggatggtaactggagaattttgatatctcagtataataaggcaatgcagaaaattattcatccccagcatgtttctgtcactt

SEQ ID NO: 16597 - DNA, 201 bp, Homo sapiens
atggggtgtcagcatgtgctggctgtgctcatggtacagcaaagtggggacatggtgggtgtacagagtgtccggggagggtgggcagtggtgagtgggawggcagcccctctgggcgccactctgtcctctgaccccggcctgctgtctcctggctactttggactttggcctccgcttcagttcccaggcttttggcct

SEQ ID NO: 16598 - DNA, 201 bp, Homo sapiens
gatgaagggtgctctctggcttccaaagtgagggcccctcctgagtcaggagcaagactgcctaccttcctttcagaaactgctgtttaaatccaaagagracatagacagttggcaatatagtgtctgatccagaaagcaagaaagaaaaggcagaaagtctgaagttttattttcactctcaaaccaataaataggaga

SEQ ID NO: 16599 - DNA, 201 bp, Homo sapiens
cagttccgctcagggctttggaatgagtggtcagcatttcttcttgcctcctcaggcagggtctctcgttgtgactcttgctttcttctagaggagacagkctgatgtagaagtaatttcctttggggtaatttaaaatgtcaaaatttaaatcaaggaaaagtactaattaggcagttctagagatgaaatgcttccaga

SEQ ID NO: 16600 - DNA, 201 bp, Homo sapiens
catttagattgtgtgacaactatggctgttgttcctccaacaggcctgtctagtattgtatgacttgagtcaataggcagtgggaaccactgtaagttcayaagcaggtgacacactggcagatggcagtgttgaaagaaaggctatttgagctgggtttgcccagaactttgggagtggaagggcctgaagggaggcctg

SEQ ID NO: 16601 - DNA, 201 bp, Homo sapiens
acctgtatttttagtagagacggggtttcgccatgttggccaggctggtcttgaacacctgacctcaggtgatctgccagtctcggcttcccaaagtgctrggattacaggctgagccaccacacccggcctgagagacttggttttacacacaactctaaccattccttttcccagattcagaaggacaggacacctgca

SEQ ID NO: 16602 - DNA, 201 bp, Homo sapiens
caaaaaaagagtactttttacttctaattcatctgcagtcctgttgttttagcctccaaaacacatcccaaatatgacagcttttattactattacaatcrcctccattatcaccatcatgcttctagaaaggccaccaccatcacctggaggtacactggccctgattggtcttcttatgtctattatgcttttttaaaa

SEQ ID NO: 16603 - DNA, 201 bp, Homo sapiens
gtgagcatcccctcctagcagccttctctccttagtggagagacttgtttgtttttcgagacagagtcttgctatgtcactcaagctggagtgcagtggcrtgatctcggctcactgcaatctccgcctcctgggttcaagcaattctcttgccttagcctcccggttataggcgcccaccgccacacctgtatttttagt

SEQ ID NO: 16604 - DNA, 201 bp, Homo sapiens
gtctggtggattcctgagactttccttcctcaccccagtctggacagcatccctgggcccagcctgccgcggcactcgtgggaagtggctggctggctctsctggctccacgcacagctggcatacactgacatggctgtggtttgcttctctctccttccttgcccctagagtataagaagaagtacggagaggaacacg

SEQ ID NO: 16605 - DNA, 201 bp, Homo sapiens
gctggggcactgggcagcctcccttcccgatggcaccagagcctggatttttgaggtctggtggattcctgagactttccttcctcaccccagtctggacrgcatccctgggcccagcctgccgcggcactcgtgggaagtggctggctggctctgctggctccacgcacagctggcatacactgacatggctgtggtttg

SEQ ID NO: 16606 - DNA, 201 bp, Homo sapiens
tgctggggcactgggcagcctcccttcccgatggcaccagagcctggatttttgaggtctggtggattcctgagactttccttcctcaccccagtctggayagcatccctgggcccagcctgccgcggcactcgtgggaagtggctggctggctctgctggctccacgcacagctggcatacactgacatggctgtggttt

SEQ ID NO: 16607 - DNA, 201 bp, Homo sapiens
ggagtaaatgaaataattgtcactagcctcccacttaatgactgtggctattgctcctctttctcgcacacgaggggaggaagtctgctggggcactgggyagcctcccttcccgatggcaccagagcctggatttttgaggtctggtggattcctgagactttccttcctcaccccagtctggacagcatccctgggccc

SEQ ID NO: 16608 - DNA, 201 bp, Homo sapiens
tggtcaacccttgaagccaagggctttgctaagtccaaaaacttagcaaaaccaaaacataactgatttacccacaaattagataacaataagtgattcargtttgcgagccataagaattgagtcagaactttaaaaatcaattatttagcagtatggagtgattatttacttagtgatatattttttatagttctctgc

SEQ ID NO: 16609 - DNA, 201 bp, Homo sapiens
cacactgggatggccacatcattccatttctgggtcacgttttcagctccttgggcctgcaagggatctctgtcccttctggagtaaatgaaataattgtmactagcctcccacttaatgactgtggctattgctcctctttctcgcacacgaggggaggaagtctgctggggcactgggcagcctcccttcccgatggca

SEQ ID NO: 16610 - DNA, 201 bp, Homo sapiens
ccaggagactccacactgggatggccacatcattccatttctgggtcacgttttcagctccttgggcctgcaagggatctctgtcccttctggagtaaatraaataattgtcactagcctcccacttaatgactgtggctattgctcctctttctcgcacacgaggggaggaagtctgctggggcactgggcagcctccct

SEQ ID NO: 16611 - DNA, 201 bp, Homo sapiens
gttgtgagctgagggggtggaggagaaaagcttatctgttagttttctttccacctggagagatcttccccctttccttccacacagcaatagtgtaaccraatgccagagcagtcccttcttcttgcggtcctctgtggacggcttgtttctttttggatggtaggaggcatccaaagcctcttttagggaaggttggtc

SEQ ID NO: 16612 - DNA, 201 bp, Homo sapiens
atccccaaaacagttaaaaaataaaaagggttacggaggggatgacctctggcacagaaaagcagtaaaataggtgtattgacactgaagtcatatttctrtaatgaaatacatacctatctatttacttattgactctgaaataacagaggtagatccttccaggtttatctagcctgcatttgatactgtgatcatctt

SEQ ID NO: 16613 - DNA, 201 bp, Homo sapiens
ttttgtaggagtctgcttgactctgagacctggggaaggagtcgatttggggatgtgtgagtgagatgacattcagtcaggttgtgccccatcattggcgrctgtgcagatacatgaagcgtgtgagcatcccctcctagcagccttctctccttagtggagagacttgtttgtttttcgagacagagtcttgctatgtca

SEQ ID NO: 16614 - DNA, 201 bp, Homo sapiens
gaggctatttctacctgccaggagggcaccagctggccagagaccactgggcagaggaggtggggtggctcatctcgaggctacccctatttgatgatttytgtaggagtctgcttgactctgagacctggggaaggagtcgatttggggatgtgtgagtgagatgacattcagtcaggttgtgccccatcattggcgact

SEQ ID NO: 16615 - DNA, 201 bp, Homo sapiens
ttggcaacccttagaggtgggacttctggagtcccagatacttgagcctcgagggagcagattctggtcctcacaccagaggaggctatttctacctgccmggagggcaccagctggccagagaccactgggcagaggaggtggggtggctcatctcgaggctacccctatttgatgatttttgtaggagtctgcttgact

SEQ ID NO: 16616 - DNA, 201 bp, Homo sapiens
ctgccgcggcactcgtgggaagtggctggctggctctgctggctccacgcacagctggcatacactgacatggctgtggtttgcttctctctccttccttscccctagagtataagaagaagtacggagaggaacacggctcctgccaggctgggatagcgggcttcttcaccgaggtgggtgtctgctgtctgggcattt

SEQ ID NO: 16617 - DNA, 201 bp, Homo sapiens
gtaaccgaatgccagagcagtcccttcttcttgcggtcctctgtggacggcttgtttctttttggatggtaggaggcatccaaagcctcttttagggaagrttggtcttcttccaggagactccacactgggatggccacatcattccatttctgggtcacgttttcagctccttgggcctgcaagggatctctgtccctt

SEQ ID NO: 16618 - DNA, 201 bp, Homo sapiens
tctgcctcccagactcaagccatcctcccacctcagcctcctgagtagctgggactacaggtgtgcaccaccgcatccagctaatttttgtatttttgtasagatgggggtctcactttgttccccaggctgattttcaactcctggactcaagtgatctgcctgcctcggcctcccaaagtgctgggattacaggtgtca

SEQ ID NO: 16619 - DNA, 201 bp, Homo sapiens
gctgattttcaactcctggactcaagtgatctgcctgcctcggcctcccaaagtgctgggattacaggtgtcagccaccgtgctggccagcttccccaaakgtaagggttaggtttgttacagtgcctgtgagctgctgtcaggcaaagcctgcttttcccctgcttctttgaggtggataaatgttttgttcagtagtgg

SEQ ID NO: 16620 - DNA, 201 bp, Homo sapiens
tgccactctgttagaaacaaaatgcttgttcctcagtgccacaatgaaatagcacttgaacataaatttaattttctcagcaaggcaatttttacttctaytgaagcgtgcgacttgtggatggagtaatggtgagagcacacctggacaggggaggggcaggggttcttattcctgttgcaggtagcccctactgctgtg

SEQ ID NO: 16621 - DNA, 201 bp, Homo sapiens
tgtataattgcccttttttttttttttttttactagagctgtgtctgcccaaatgcattgtttcctgtattgtacaattatcagttatttagatttgccastctgttagaaacaaaatgcttgttcctcagtgccacaatgaaatagcacttgaacataaatttaattttctcagcaaggcaatttttacttctactgaag

SEQ ID NO: 16622 - DNA, 201 bp, Homo sapiens
ggcaggaagagttccacaacctggttccagctcctctaagtgacttctaagtccccttgttcaaccctatcttttgggtctcagatttggcttcccccccsctttttttttttttttttttgagaccgaatctggctctgttgcccaggctggagtgcagcggcatgatcgtggctcactgcaacctctgcctcccagact

SEQ ID NO: 16623 - DNA, 201 bp, Homo sapiens
tgactggcttgtttcacttagcataatgtcctcaaggtgtatccatattgtagcatctgtcagaattttcttcctttttaaaggaaggaatatttaataakattccattgtatgtgtgtgccccacatttatctattcatctgtttataaaacattttctttggatgataagaatgttttcactggaaatgtgctttgtga

SEQ ID NO: 16624 - DNA, 201 bp, Homo sapiens
tgtgataaaatcaagtacagagatttctttcatcctttgcccttgagaccactgaggcaagaagccggaacttagcaggagtgagactgcaaacaagttgyctttttattgtgaccgaaaaacctgatgagtgtggaatagtttgggagcagcatggcaaattaacaaagcctgttcaagattaaactctgagaaagaaat

SEQ ID NO: 16625 - DNA, 201 bp, Homo sapiens
gcatatccttcagtcagtttagtttgtgtttgtctgatgtgagaacatcattacctaccatatgttctttggttttatcagaatgtgtgagaaaacgagakctttggtgggacgatgtatagggaaaactacttgtaaattaaagggcaagcactataaaacattaattactattaaccaagctatgatattttaggactc

SEQ ID NO: 16626 - DNA, 201 bp, Homo sapiens
agctcccgagaaaactcaggtgaaagtgctcagcaaggccacccattgttctataactgtggcctcatggtaagtctccatatgggccagctgtgctcctwtacaacattggaaggtcggtttggttgcagagactctaaatatgtggggatctctccaaaatgtctcaagcttttgaattcttaaaaaattggtctctgg

SEQ ID NO: 16627 - DNA, 201 bp, Homo sapiens
tttagagtttgacaggacctttcagataccacctagaacagcctcctgtctttcatgaggtccagagaggtgatggcctgagtttttctttctaatctgtwattcacatgccacacaatggagaggcagagtagcttggtggccaatgcacagattctggacacagactgccggagttcaagtcccggctctgctacttcc

SEQ ID NO: 16628 - DNA, 201 bp, Homo sapiens
gggctcttgtctgtgctctgttggctttaggcatctccacctccctgttttgtggtttaaactagacctactatggcttttaaggccaccattatttcctyaatgtggagaaactcagtaatgcaagttctctgttccacgttaggggtcacattatggttaaagacaatgggaagattttagagtttgacaggacctttc

SEQ ID NO: 16629 - DNA, 201 bp, Homo sapiens
attttcttcctttttaaaggaaggaatatttaataatattccattgtatgtgtgtgccccacatttatctattcatctgtttataaaacattttctttggrtgataagaatgttttcactggaaatgtgctttgtgaagcataagggagtggcagaagcagatcagaagttgggagccttgctcttgggtcctgatgctga

SEQ ID NO: 16630 - DNA, 201 bp, Homo sapiens
gtcagaattttcttcctttttaaaggaaggaatatttaataatattccattgtatgtgtgtgccccacatttatctattcatctgtttataaaacattttstttggatgataagaatgttttcactggaaatgtgctttgtgaagcataagggagtggcagaagcagatcagaagttgggagccttgctcttgggtcctga

SEQ ID NO: 16631 - DNA, 201 bp, Homo sapiens
gcttgtttcacttagcataatgtcctcaaggtgtatccatattgtagcatctgtcagaattttcttcctttttaaaggaaggaatatttaataatattccrttgtatgtgtgtgccccacatttatctattcatctgtttataaaacattttctttggatgataagaatgttttcactggaaatgtgctttgtgaagcata

SEQ ID NO: 16632 - DNA, 201 bp, Homo sapiens
attgaattctgctcagttctgagctggggttctcactgaaatgtgactgtcccatgttcagggtcacttttttttttctgagagtagagcatgacataatrcatagtaagttgcatgtctatatatacattattatgtgcctgtattattacttgctgctgaagtagggagttggcaaaatgggttgctaagttctaggta

SEQ ID NO: 16633 - DNA, 201 bp, Homo sapiens
caaaattgaattctgctcagttctgagctggggttctcactgaaatgtgactgtcccatgttcagggtcacttttttttttctgagagtagagcatgacayaatgcatagtaagttgcatgtctatatatacattattatgtgcctgtattattacttgctgctgaagtagggagttggcaaaatgggttgctaagttcta

SEQ ID NO: 16634 - DNA, 201 bp, Homo sapiens
tttcagtatctgcacagcagtttgtctgtccatgctttggtgccagttatttcatgagtctttttatttttattttttggttatatagatcagaggtttcygtgttgcccaggctggcctcgaacgtctagcctcgccttcttatgcgccaggacaacaggcctgagccactgcagctccctatttcatgagtcttttagc

SEQ ID NO: 16635 - DNA, 201 bp, Homo sapiens
ggtttccttggagccaagaattttaatcttgggcaaacctgtctcctatacttcaaacgtgtttccatgtattacgtggaattatagactacctaaactgmatcttttgtttctctcagaaaaattcacagattcagattcacctaatatttattgagcacctacctggtgccaggggttgtgctaggtacttaacatttt

SEQ ID NO: 16636 - DNA, 201 bp, Homo sapiens
atcttatttaaataaatagagcaaattaaagagaagaggatgcagttgtacattatggccagttaaacagagagggattctgagggggaggaagggagggwggccccagaggacagccatggctgtaaggaggaggccagaggtctccagcagggcctctctggggctttccaggtttccttggagccaagaattttaatc

SEQ ID NO: 16637 - DNA, 201 bp, Homo sapiens
gtgttgatctgaggtctttacacattctctcatctaatcttcccagaagctgtgaaaaatgtttgtttcttttttttcttgggtctgattacaggtatttwattttggaaattgttctagaagacaccagtgaggcagggggaagtaagaatgggaagggaaggcagcccatggaagatgtactcctcagcacgttacctg

SEQ ID NO: 16638 - DNA, 201 bp, Homo sapiens
ctccctgttttgtggtttaaactagacctactatggcttttaaggccaccattatttcctcaatgtggagaaactcagtaatgcaagttctctgttccacrttaggggtcacattatggttaaagacaatgggaagattttagagtttgacaggacctttcagataccacctagaacagcctcctgtctttcatgaggtcc

SEQ ID NO: 16639 - DNA, 201 bp, Homo sapiens
ttatttggacagaagtctcactggcttatgtccacattgcctttgggcctccctgggttttcctaggtttcaaattttgtggacactaaaaaggattcatkagaaacactatatggacactgggacccttctgggtactgaggtgacacaggtagggtgctctgggaaacgtcccccacagaagagccagcaagatctctg

SEQ ID NO: 16640 - DNA, 201 bp, Homo sapiens
agccacacagccaaatggaaatacaaataatagattgaggtcacattgactgtttcacgttgtacttagacatgctgattaaaacctgagttgcaagtgtrccatggaacataatctctccctctagtgttttggaacaatcacacacaaatgtttatatccacatacaggccccatatacaatgggggaaacagaacaga

SEQ ID NO: 16641 - DNA, 201 bp, Homo sapiens
tcaggactagctacaattctcatttgttgatatatttatttcctgtctcctagtaggctcccagtggcttgttcctgttcatgcagttttctgatgcccaraaaagtgcctgttatgaaggtgtggctttctggtccctctgctcctctcttctcccacagaaagaaacatctggcactgacaggagtctgctttgtgatc

SEQ ID NO: 16642 - DNA, 201 bp, Homo sapiens
ccacttcccattgcagatctgctgaagtcacagccattcctacgtccccctgtggtccaaccttggccgcctctttgatcttatctccttcccaccatggkcactccagaccggcctttctttctcttgagcctctgagcctttctcacgatgtatcctttacattctgctatcctttgaatcctcccagaaccctcttcc

SEQ ID NO: 16643 - DNA, 201 bp, Homo sapiens
aaccagccactccctggcatgagggaactttctggtgagatggagatgttctgtgtcttgctagggccttggtgacatgagtgtgtacatttgtcaaagcycatttgtgcattttgctgtatgtaagtttccataaaaaaacaactctccacacacatttacttctagttaatgagatgcatgctgaagtgtttctgtggg

SEQ ID NO: 16644 - DNA, 201 bp, Homo sapiens
cctgcctcatggtgtcttgcgtggcttcgaccctagtgctgagaggctcctctggagagctggccaatgcatctgtccatcttcttcgccagtatgcggasctctcatgcaccccaagacccttggccatgaaccttccttcagctttctcctcagagaggccttccttgacctgcctggcaaaaccagccactccctggc

SEQ ID NO: 16645 - DNA, 201 bp, Homo sapiens
tcagtgtgcagctggctatcagacagcaccatgataaacatccgcctcttttcacagcccctccaactcagaaatacaataaaacatggtcaacccttgargccaagggctttgctaagtccaaaaacttagcaaaaccaaaacataactgatttacccacaaattagataacaataagtgattcaagtttgcgagccata

SEQ ID NO: 16646 - DNA, 201 bp, Homo sapiens
aataatttaagcttctagattatttttgtgcagaagcagtattctctggttctctttgtcatttcctttctaattatcagggctgtccttatctgttcagkgcttcccatctgtccatttttttttttcaaagccacagggtacatttttgcatttacttctgttgctctgtttcctgattttttttaaagtgaacttttt

SEQ ID NO: 16647 - DNA, 201 bp, Homo sapiens
ttcctgttttgaggaaagattcggagccagctaaggttttctgagggcccgtcatgtctcagactgtcacacttattcctctgtcatgtatgcttaagtcygttttagatgaccccttgtaaagaaaggaagcctggcccctgaagcctcattgcgtgggataaggggactaacatattctgtggttgtaccagcaaatta

SEQ ID NO: 16648 - DNA, 201 bp, Homo sapiens
tgtgttgttcaggtgcattttgagaacttgagaagtgcctgggggtgtaggcaagagaccagtatccccaaggagcacaatattggattccaaggttgggkttgaagagggagaggtgggctagctcttttgaaagtggtgtctggtgctgatagaaaacctaagaacaaatggagaatttgaaagctgcaatggggcgtg

SEQ ID NO: 16649 - DNA, 201 bp, Homo sapiens
tgttaagggttttctggaacaagctgagcatcttttgtgtcattaggaactcaacatcatcttattacttatattgtgtgtataatttattttgtggccayatgtccccttttatggaagccacttggggatagagaccaaatctacccactttcattctcagcatctggaggacatctctctaaggaatggcatctgaaa

SEQ ID NO: 16650 - DNA, 201 bp, Homo sapiens
tctcattttgcattacaatagcatctagtaacattcaagcctcaattaattgaaccaataattattatattaaaaatggtatgtatgccccagggcagagrttaggctatggtgggcatttgagaccttagggccatagaccccgaaacatgcattctccagaactgagtatgcaactgtttgctttcgaccttacagcac

SEQ ID NO: 16651 - DNA, 201 bp, Homo sapiens
tcacagactcccctaacgtccatgaagatcatcaccaggatttgagggaatgctgtggtgcatactttgtgttggacagttatgggggattgcttttgccrtctcagcatttcaccgctgtcctcggtatgagattatggtgatgttgaatgggggtcattagaaggctgtccacagaggggatcagcccccctcaatgac

SEQ ID NO: 16652 - DNA, 201 bp, Homo sapiens
ctacagacattttgagtactgttaagcataaacaatatttcaaggtgtctacaactataatatagtgtgtaatatctcagatttctatcgacggtagagtyacaggtctttctaatacttttgtggtttgatgcctacattttataatggaaggaaatgctaaatttcagttagaggttaataaaaataaagaaggaaaat

SEQ ID NO: 16653 - DNA, 201 bp, Homo sapiens
ggagtgctagggtgaccctagcactgtatccagctcttctcacctctttaggaattttaagcccacaaattaagtatggaatttattacatggtatcttgsatttcagaagcagaatctgagatggggatttttgccagagatttattgggggagtgctctcagaagtgaggaaaacagaaagggacagagaaaaaaatgt

SEQ ID NO: 16654 - DNA, 201 bp, Homo sapiens
gttccggcagccattgccaggaagcagcattcgcacccctacatgtccaaatgcattactcatccaaaataagatatgccacgactcaggtttccctcctyagccaccatggcttgaatggctgcatttagaaacagcccttacttcaagcccctatttcttaattatttgtcacttattcgcattcatccttgtgtgtga

SEQ ID NO: 16655 - DNA, 201 bp, Homo sapiens
cgactcaggtttccctccttagccaccatggcttgaatggctgcatttagaaacagcccttacttcaagcccctatttcttaattatttgtcacttattcscattcatccttgtgtgtgaaacatttttcccctcaccctatatgctgttatgtaaacaagtaattttttaggatgatgtcagaacctgatgtagttgggg

SEQ ID NO: 16656 - DNA, 201 bp, Homo sapiens
gggactctggaacaaaaattacaccaaagagttgtcctcaccttgaggcaagaggggcttcccttttgtgccccatatcattcagccattgactggctgtkggggggaagggaagtgtaaccctccttgaaaggagatcccctcagctgaggatggttctctagagaagaatgcagatgtgagccataagcagcctacaca

SEQ ID NO: 16657 - DNA, 201 bp, Homo sapiens
acagtccaggaataatttacaaagtgagatttagattagtgtgtaagaatttcactgcagaggccacttctggctgaggagaagatgttctatggagaaarggagaattggccagagccttaaaggtggagtaggatttgggtcctcagggaatggaggggctgatggatgctaaaggtctctcacgtggctgaatatcta

SEQ ID NO: 16658 - DNA, 201 bp, Homo sapiens
ggctgggaggatgccggccgtagtgagagggctcttgtctgtgctctgttggctttaggcatctccacctccctgttttgtggtttaaactagacctactwtggcttttaaggccaccattatttcctcaatgtggagaaactcagtaatgcaagttctctgttccacgttaggggtcacattatggttaaagacaatggg

SEQ ID NO: 16659 - DNA, 201 bp, Homo sapiens
tatccctcctcctcagctgagcataccaatggtgatgacagaggccctgtcttcaatccctgtacacagaatagcgctctgaaaattataactcttctcasgcttcatcagcaggcccccaaagagacctggctacagcagggcttccaggtctttcactgcggtaggcagaatggccccccaaagatgtccatgccctaa

SEQ ID NO: 16660 - DNA, 201 bp, Homo sapiens
gaaagtttctgtagttcttggccctgtaagaggagaggggtagaagatgctgagtatttttctagaagactggactggacgggtggggctgggaggatgcyggccgtagtgagagggctcttgtctgtgctctgttggctttaggcatctccacctccctgttttgtggtttaaactagacctactatggcttttaaggcc

SEQ ID NO: 16661 - DNA, 201 bp, Homo sapiens
caatcttccttcccatgggcgcacacacacttttatatgctaacccattcattggcccagggtgggaaataagggatggatggggctggcatgtggagtaytggggtgtaagagcagccccttagaaaaatgggggactaaattgaaagtttctgtagttcttggccctgtaagaggagaggggtagaagatgctgagtat

SEQ ID NO: 16662 - DNA, 201 bp, Homo sapiens
ttgcccaagacttccatgatattttccctgataatcaaggaagggagtgttggctgggacacttttttcttttggaaatgtggcaggggaatatgaatttycataggcgaaattactctgtctggtcgagtctagactgttcgttggccagcacgtttgctggcgcccacactgacactctgaggtgctgcctggacttat

SEQ ID NO: 16663 - DNA, 201 bp, Homo sapiens
tgattatgcccctgcccaatcttccttcccatgggcgcacacacacttttatatgctaacccattcattggcccagggtgggaaataagggatggatgggkctggcatgtggagtattggggtgtaagagcagccccttagaaaaatgggggactaaattgaaagtttctgtagttcttggccctgtaagaggagaggggt

SEQ ID NO: 16664 - DNA, 201 bp, Homo sapiens
cagctccaagtcagtcattaggctcccacacagcttctggctgcactgtggacagatgtcctgaggctggggggagaggagacccaggattcataaagcarcagctggacagaaacctgacactctgaactttcagcatttcatgacatttgaggtctgactttccttcccatgtggtcctgcagcccaggcagatgctgg

SEQ ID NO: 16665 - DNA, 201 bp, Homo sapiens
tcatggtgtcttgcgtggcttcgaccctagtgctgagaggctcctctggagagctggccaatgcatctgtccatcttcttcgccagtatgcggagctctcrtgcaccccaagacccttggccatgaaccttccttcagctttctcctcagagaggccttccttgacctgcctggcaaaaccagccactccctggcatgagg

SEQ ID NO: 16666 - DNA, 201 bp, Homo sapiens
tagttgccatcttttcttggtggctgattctaagtggctgaaggaaacaccaggaaacattctgtaaaatgttccttggaaatggcaggcaaaaacaagawacagtgagtgtccctatttacatttggaggtctcatagccatttgcttttttctttaatgtttcaaccctacctgtcagagctttctgggaggcaagtat

SEQ ID NO: 16667 - DNA, 201 bp, Homo sapiens
agttcctctgcccttggtgagtgaacaactattctgacataggctttctcttgcccttgacttttatcagaagctgtacgaagatttttgttataaaagcrtaagctcaagaggggaaagtaatactagctgccgcttatggagggcttcatttgggtcacatgctgcaaagctgagggtttcgtgtgtattttatcccag

SEQ ID NO: 16668 - DNA, 201 bp, Homo sapiens
tttcacgcatgtacacttatgcatccccattgccagtactccggaaggacccctgcaccctttcccagtcagttcctctgcccttggtgagtgaacaactrttctgacataggctttctcttgcccttgacttttatcagaagctgtacgaagatttttgttataaaagcgtaagctcaagaggggaaagtaatactagct

SEQ ID NO: 16669 - DNA, 201 bp, Homo sapiens
tgcagaggttttgtttttgtcaatttttcctttaagcttttctatgaggtataatactaaagcacttaacacacccagctgtgagtgcacagcccgatggkttttcacgcatgtacacttatgcatccccattgccagtactccggaaggacccctgcaccctttcccagtcagttcctctgcccttggtgagtgaacaac

SEQ ID NO: 16670 - DNA, 201 bp, Homo sapiens
tgtttaggtcctttgcccaattttaaattggattgtttggtttttattgttgttgagttatcctcatggcattttgcacatgggcagtcttgctaggaaakgcttgtcctaagtcccctctgcccctgccccactctgtcctcggcacttctctttcttcccctgtatgggctctgcctccttcgtgaagcctgttaaggg

SEQ ID NO: 16671 - DNA, 201 bp, Homo sapiens
atctgcttgttggtcattttatatcttttttggagaaatgtttaggtcctttgcccaattttaaattggattgtttggtttttattgttgttgagttatcstcatggcattttgcacatgggcagtcttgctaggaaaggcttgtcctaagtcccctctgcccctgccccactctgtcctcggcacttctctttcttcccc

SEQ ID NO: 16672 - DNA, 201 bp, Homo sapiens
catcatctgcttgttggtcattttatatcttttttggagaaatgtttaggtcctttgcccaattttaaattggattgtttggtttttattgttgttgagtyatcctcatggcattttgcacatgggcagtcttgctaggaaaggcttgtcctaagtcccctctgcccctgccccactctgtcctcggcacttctctttctt

SEQ ID NO: 16673 - DNA, 201 bp, Homo sapiens
aatattttattgtgattttggtttgcatctccctgatgattagtaacattgagcattgtttcatcatctgcttgttggtcattttatatcttttttggagraatgtttaggtcctttgcccaattttaaattggattgtttggtttttattgttgttgagttatcctcatggcattttgcacatgggcagtcttgctagga

SEQ ID NO: 16674 - DNA, 201 bp, Homo sapiens
taccaccttaaccattttgagtgtacagtagtggtaaatgtatggcacattgttgtacaacaaacctttaaactttatcttgcaaaacttacatccattgracaacactctcctttttctccttcccgtggttcctggcaacattgtatttctattaagagtttgactactttagatcttatgtgagtggagtgtggtgtt

SEQ ID NO: 16675 - DNA, 201 bp, Homo sapiens
tatgaagttattgcatcatccactcagtaagccactgtatatgggtgctgggcaaagaggagcatctgacaccatctgctttccttgtgccttttgtttgkttttctaattgtggccaaacacatgacataaaacttaccaccttaaccattttgagtgtacagtagtggtaaatgtatggcacattgttgtacaacaaac

SEQ ID NO: 16676 - DNA, 201 bp, Homo sapiens
taccacagatcagtatcacaaaggagtcatttctggggacagtgaacagcaatgaggaccacagggaagatttagcaaagggagccaagaaggcagcactrgagcatttgtggataatggtgccatggatagtcctgtctaattaattgcatgcaggactatttttttaatgttttatgaagttattgcatcatccactca

SEQ ID NO: 16677 - DNA, 201 bp, Homo sapiens
tggtggcctgaccctgactggacaaatgggccccagaggggctgaacccttgtctgccattctggggaaagaaagggaagaagctgactcatctgtaaatyaaagggtagcccaaggtcctgattcagaacaaaaaggaggtggtggccccgtggcagcataacacaagatgctcttaagggcatcgagcctagagtcaga

SEQ ID NO: 16678 - DNA, 201 bp, Homo sapiens
ggtcctgcacaggctccctgagcccgctgtttgccttggtttccagtcctttcatcactgtcatggctggccctggaccctctccaaacttccacattccyccaggcatggtggcctgaccctgactggacaaatgggccccagaggggctgaacccttgtctgccattctggggaaagaaagggaagaagctgactcatc

SEQ ID NO: 16679 - DNA, 201 bp, Homo sapiens
tataatactaaagcacttaacacacccagctgtgagtgcacagcccgatgggttttcacgcatgtacacttatgcatccccattgccagtactccggaagracccctgcaccctttcccagtcagttcctctgcccttggtgagtgaacaactattctgacataggctttctcttgcccttgacttttatcagaagctgta

SEQ ID NO: 16680 - DNA, 201 bp, Homo sapiens
atgcctacattttataatggaaggaaatgctaaatttcagttagaggttaataaaaataaagaaggaaaattcttttcctctatctaaatccacagatgcyctgaattctcttcgaggttaagaacttctggtttaagatatgcttttggttgacagtagtaaaacaagccaaaagaagttgaccatttatgtgatgtgca

SEQ ID NO: 16681 - DNA, 201 bp, Homo sapiens
ctgacaattcaatacagtcccattgctcaggcagaacctatttcatatataaatttcctgcatccccaaggcagagcaaatagggggaaatgaccaaactrtaatctgagagttctttactcaactggattatcattcatctaagagcatctgaaagacagtctcacacaagcaaagactgaaaggacatccaccaccacg

SEQ ID NO: 16682 - DNA, 201 bp, Homo sapiens
aattcaatacagtcccattgctcaggcagaacctatttcatatataaatttcctgcatccccaaggcagagcaaatagggggaaatgaccaaactataatytgagagttctttactcaactggattatcattcatctaagagcatctgaaagacagtctcacacaagcaaagactgaaaggacatccaccaccacgtacct

SEQ ID NO: 16683 - DNA, 201 bp, Homo sapiens
ggccttccacaaagtgttttagggaaaaaataacaagaaacaaaaatatatggatttgttttgtcttgaggcagactggaaatgctggaaatttattttgsatcgtagaaaaacttcatgtggtgggaaaatgttcacttgctccaaggtcaggtattaagttagcaaagtcctaatgcttttgctacccattagtggatg

SEQ ID NO: 16684 - DNA, 201 bp, Homo sapiens
cagcaggatatctgtaaagccagaatcatctggtggcaacatataattgtcctatggttgtaaccttgatagtgctgttaccatgggggttgggtggtggrgcgaagtgcatttcccaaaactgttggctagctgagggatgagagctccatccatgaaaaccagtcttccagaggaggatccccaaacccagagagctat

SEQ ID NO: 16685 - DNA, 201 bp, Homo sapiens
taatactgtttgtttacagatttcatgaaggcatttaccctggcattgtaccactaaaggctgatgttggcggcattattcttaggagacatagaaatgtkgtggttttgagaatgggcttttatattatttggcgtagattattaaagaacagttacctgtgtcatgaaggagaggcccccagactggcactttgaatgc

SEQ ID NO: 16686 - DNA, 201 bp, Homo sapiens
aagaacagttacctgtgtcatgaaggagaggcccccagactggcactttgaatgcaaattcttctgtgacaaatccaggggactttggaataactctcagrtatggcagtagacttaactgtaaaagctcccagcccacagaggtgagcagaggctgaggagtaaacaccataccaacattctgggacaaaatagcctgaa

SEQ ID NO: 16687 - DNA, 201 bp, Homo sapiens
tctgtacattcatgggattcatactcgctttaggagacattctgtagcaagatgagttatatggggccaagttacagcacagagttttaagagattgtccrtagttcagactgtcatcaaagtgactgcatgccctgtctctctgcctccatcctttctcaacgaatctccacctccagagagagcagatctttctgagta

SEQ ID NO: 16688 - DNA, 201 bp, Homo sapiens
ctgtgtctcactctaccccttccctactggtgttttatggaaccacctctggaataaacaacttgctttcaaacctgtctccagctctgcatctgggggcrcctgcactgacattctttattccctagatctgtgtggcttgctacttttttctcccaccacatcacaggtaatgaatgaggctcatttgcacaacataca

SEQ ID NO: 16689 - DNA, 201 bp, Homo sapiens
taagtggctcaataatcacaaatggttactggctactctattggaaagcagagagagagaatattttcatcatcacagaaagttttattagactcaacacraaaggaatttctaacactgcagaggttttgtttttgtcaatttttcctttaagcttttctatgaggtataatactaaagcacttaacacacccagctgtg

SEQ ID NO: 16690 - DNA, 201 bp, Homo sapiens
agcctgcccagcttaggggacagctgaaatgctcagagccaccaacagtagaggcactccaaaactttccaagaagtcatctcagattccctgctgcttcrtagcttttaggagctccagggttgagggaggccacaaaagcaatcaaggactgcaggaggggtgtgctttccatccactttctatattctaaaaattacc

SEQ ID NO: 16691 - DNA, 201 bp, Homo sapiens
cagtctcagctcattgcagcctcaacctcctgggctcaagcaatcctcccacctcagcctcctgagtagctgggactagagttacacaccaccacgcctasctaattttttttgtggagagggggtcgggttttagatacggggtttcaccacgttgcccagctggtctcaaacatgcctgcctcccaaggcttattttac

SEQ ID NO: 16692 - DNA, 201 bp, Homo sapiens
aggtggccaccagccctgtgtccttatttaaacttaaatttatccaaattaaactagaaattcaggtttttagtcatattagccacatttaagtggctcartaatcacaaatggttactggctactctattggaaagcagagagagagaatattttcatcatcacagaaagttttattagactcaacacgaaaggaatttc

SEQ ID NO: 16693 - DNA, 201 bp, Homo sapiens
agcataccctgatacaatgatacaggtacaggtagtttatttgggggtgggcgatctcagtgttgagtttagacaggaaagagaggaaagacaggaaggcrtgcatttataagcaggttactgccgtaggcaccttgggcttgtcttcctcagaccctccaagagactgtgtgtaacaaacctcacatccacttcactcca

SEQ ID NO: 16694 - DNA, 201 bp, Homo sapiens
tataatttacagtacacaaatcttaagattacagtcttgattttcacaattgtacacacctgtgtaaccatatgcccactgagatatagaatatttccatygtcccaaaagtctccgatgtccctttccagccaactcctctcacctgagacaaaccacagctgtgatttgtataatacattacttttgctttttctagaa

SEQ ID NO: 16695 - DNA, 201 bp, Homo sapiens
cccatggcaggaagagttccacaacctggttccagctcctctaagtgacttctaagtccccttgttcaaccctatcttttgggtctcagatttggcttccyccccgctttttttttttttttttttgagaccgaatctggctctgttgcccaggctggagtgcagcggcatgatcgtggctcactgcaacctctgcctccc

SEQ ID NO: 16696 - DNA, 201 bp, Homo sapiens
tatttttctttggtaataataaaataagaaatgggcatttcagggctagtatgcacctgtgtggtacccacaggaaccccattccttctgtctttcctctmagcctgtcttcataggggttttcatctccatactccaaggctgggctttccctgatggtgctttttggtttccgcttccaacactacagctgcattccaa

SEQ ID NO: 16697 - DNA, 201 bp, Homo sapiens
cagcccctctcctgtaaaactcatgaataatccactccttttttagcatttaatcaagaaataaccattaaaataggcaagcagcagcccttggggctgtkttacctatggggtaaccaccttttatttctttactttcttaataaacttgctttcactttactctctgggcttcctcttgaattctttcctttaggaagc

SEQ ID NO: 16698 - DNA, 201 bp, Homo sapiens
aagtctcctggggctgtgtttaagtgccgtgttcacaccaaccctgaccggagatgcaccgaactggacatggctcgaggtgggtgaccattactgctgtsgtggaaatgggttctgtacccttataccttgctcttcttcttcccaggatggcctgatcattcactcacccatccatccttccctccttccctccctcct

SEQ ID NO: 16699 - DNA, 201 bp, Homo sapiens
aaatgcttccagaatgattgcacttggtgaattggataatgcggtatgtctgtgattgtatgttttaacattttagagaaatctgaaagtttaatgtgctrgcatgcacacaccccgctggagaggagcagcagttgccttgtcctcagctcagtttctgtgaactgtgggttgtttctctcttccttgagttgcaagaga

SEQ ID NO: 16700 - DNA, 201 bp, Homo sapiens
aacacatttcatctcttgacaagagaagctgcaaagtcacactgaaaagagcagggatacaggaaggatggggaattgtggccactttgtaatatattacyggtggtgaaagcatcctggctgtccctgaattactgtgacagtctgaataaattcctgcccagcgcaccagaaaagggaacaaggttctattaacctaaa

SEQ ID NO: 16701 - DNA, 201 bp, Homo sapiens
tcctgtcagatgagcagaggcattagattctcacaggaacatgaaccctacacatgtgagggatctagattgtgccgaaaccatcccgccccctccaccgyccgttcatggaaaaattatctttcacaaaactggtccctggtgccataaaggttggagaacactggtctaagggttctggcaggctctcagatgaacctc

SEQ ID NO: 16702 - DNA, 201 bp, Homo sapiens
accaccccaaaacttagtggcttaaatcaaccaccacctgtagcttattctctggttggcagcttaggttgggttcagctgggtggttcttctgttctctscaggactcactcatgcatctgtggtcaacttctgggttagctggttggctggctggcaaaggatggcttcagctgggagggcttatttttgctccatatg

SEQ ID NO: 16703 - DNA, 201 bp, Homo sapiens
gtttggacttagcgggaattagtgggcgatggaattaccacggtccagattccgtcagaagtggcatgccttagcttgatgacgtatctgttttctatcascacaatattgctgcatccctaacaaaccaccccaaaacttagtggcttaaatcaaccaccacctgtagcttattctctggttggcagcttaggttgggtt

SEQ ID NO: 16704 - DNA, 201 bp, Homo sapiens
agagaatattttcatcatcacagaaagttttattagactcaacacgaaaggaatttctaacactgcagaggttttgtttttgtcaatttttcctttaagcktttctatgaggtataatactaaagcacttaacacacccagctgtgagtgcacagcccgatgggttttcacgcatgtacacttatgcatccccattgccag

SEQ ID NO: 16705 - DNA, 201 bp, Homo sapiens
caataatcacaaatggttactggctactctattggaaagcagagagagagaatattttcatcatcacagaaagttttattagactcaacacgaaaggaatktctaacactgcagaggttttgtttttgtcaatttttcctttaagcttttctatgaggtataatactaaagcacttaacacacccagctgtgagtgcacag

SEQ ID NO: 16706 - DNA, 201 bp, Homo sapiens
tttctagaatttcatataaatggaatcctacagtatgtgctcttttatataagacttctttcactcaaaataatattttctgaaattaatccccattgtaygtatcagtagttcattcctgtttatctctacataatattacattttatgaaataaatgttatttttaactagttatttatcggacctccaaagcacctat

SEQ ID NO: 16707 - DNA, 201 bp, Homo sapiens
tcccaaaagtctccgatgtccctttccagccaactcctctcacctgagacaaaccacagctgtgatttgtataatacattacttttgctttttctagaatktcatataaatggaatcctacagtatgtgctcttttatataagacttctttcactcaaaataatattttctgaaattaatccccattgtacgtatcagtag

SEQ ID NO: 16708 - DNA, 201 bp, Homo sapiens
atatttccatcgtcccaaaagtctccgatgtccctttccagccaactcctctcacctgagacaaaccacagctgtgatttgtataatacattacttttgckttttctagaatttcatataaatggaatcctacagtatgtgctcttttatataagacttctttcactcaaaataatattttctgaaattaatccccattgt

SEQ ID NO: 16709 - DNA, 201 bp, Homo sapiens
ccatatgcccactgagatatagaatatttccatcgtcccaaaagtctccgatgtccctttccagccaactcctctcacctgagacaaaccacagctgtgakttgtataatacattacttttgctttttctagaatttcatataaatggaatcctacagtatgtgctcttttatataagacttctttcactcaaaataatat

SEQ ID NO: 16710 - DNA, 201 bp, Homo sapiens
tggagaaatgcttcccccacctggtgattgcatcttgctgtatgggatcaggcctgaaaagtgagttaagtctgttggtgctggaactcatcactgaggarcagcctatgtctgtgccttcaggggtgacagacagtggaccaaggccatgcctgcatattcctccctggacccctcattcaaagccagaatctctttcct

SEQ ID NO: 16711 - DNA, 201 bp, Homo sapiens
cagctatggtcagatattccttccttttctatgtcttcaggttgtttggtgaatattgttcttttttgaatcaggagttggcaacccactcatctgctctrtcagtttttatctatttattctttgaagtggaaccaactattgcagaaaaccaaagacacagttttctagggaagagctagctggagctagatcttcata

SEQ ID NO: 16712 - DNA, 201 bp, Homo sapiens
gggtgacagacagtggaccaaggccatgcctgcatattcctccctggacccctcattcaaagccagaatctctttcctgccagagcagtcctttgtccacrtgggtttctgcagtagcccaagtttgcaggcccttgatagggctggagtgtgagctgtaatcctatgggcttgaaataatctctgctatgggctctttaa

SEQ ID NO: 16713 - DNA, 201 bp, Homo sapiens
gctctttcgcactcatgatacataacttacagggaaaggccctgactccctttttgcatagcgtcactgggaacttcttgttaaatggggttagggagtcrttgacttgccttttcccttctaactacaagttttttgcctggtagcatagacccaacaatccttctactctggggtgtttgctcctgtaggcacccagct

SEQ ID NO: 16714 - DNA, 201 bp, Homo sapiens
agtatacagcaaccattttatttttcttgtgcctcatgaattaatagggcagtgagaggaaagagcatgcatactgagcatctgagcttttttaaagcaaygattcacccagctttctagtataaaaaacttcctctggcccaccccgagcaaaccctcattcactgctcagtcctcccatttgttcatctggaaagaagg

SEQ ID NO: 16715 - DNA, 201 bp, Homo sapiens
cctggcttctcttctttccggtagatgaacttgagcacatgatctcaccacttggagcctagtaaaatccatgctactgttctgcaattgttcttttattytttctctctactaatgttttcacctatggatgtcagttctacttctccttggggctttaactaaaaaggaagaattgtctgtggcttcttagaaagtggt

SEQ ID NO: 16716 - DNA, 201 bp, Homo sapiens
ggagcctagtaaaatccatgctactgttctgcaattgttcttttattctttctctctactaatgttttcacctatggatgtcagttctacttctccttggrgctttaactaaaaaggaagaattgtctgtggcttcttagaaagtggtgtgtggacaggcaagggctgccctgcccttggctggcagcacaggctctgcaa

SEQ ID NO: 16717 - DNA, 201 bp, Homo sapiens
gccttagttttcttcttcttttttttaatgctgcctcaattacagaacagatgcctaagttttcttatctgtgagactgagctaagaataatgttgacctyataaatttgttgcaaagattaaattagacattcatgtaaagcacttaggaccatacctgagacatagtagcctttagttatttttgtctaattcttcttt

SEQ ID NO: 16718 - DNA, 201 bp, Homo sapiens
gccaagacctgagccccaggccagggcagcagcctctgacctttcactccctaacacacaagctggggaccaatgtcactccaaggttggaccctgccccygtgcctctgcttttcccagttgggcatggactccaccaatttcattctctgacttagcgttatgtggtgtggattgtactgctctccctccatttactgt

SEQ ID NO: 16719 - DNA, 201 bp, Homo sapiens
ttgttattcccatcttacaggggtgacagcttagctcagaaagcttgcagtttgctccacgttacaaagctagtaagtagcagagctgagattggaacccycgtccgtctaatggcaatgcttcctcttttgctattctgcctcacaattaaatggagtaggacctgatccccgacatcgagaaactgacggtgttgtcaa

SEQ ID NO: 16720 - DNA, 201 bp, Homo sapiens
agtaggacctgatccccgacatcgagaaactgacggtgttgtcaagaaataaatatcccccccccacacacataaatagagaacaataaaagataacgtcrgaggatgaacccacgagcgtggtttgtgtgggaggatgtcttgatcctgggctcgcagggctgtccgctgaacatgacagttatcctggcttcacagtaa

SEQ ID NO: 16721 - DNA, 201 bp, Homo sapiens
cctggaagaccacttgctcagagtctgaaatgtttacactgcctctgactggcatctctataccagaaaggagaagagggggactagatgtttttgtgtgrtagtctctttcctgctatcttaggctgagttccctaaaacaaaatcctgagatgagacatcatgtaaaaataatttgttaggaagtgttctcaggggaat

SEQ ID NO: 16722 - DNA, 201 bp, Homo sapiens
gcccctctcctgtaaaactcatgaataatccactccttttttagcatttaatcaagaaataaccattaaaataggcaagcagcagcccttggggctgtgtwacctatggggtaaccaccttttatttctttactttcttaataaacttgctttcactttactctctgggcttcctcttgaattctttcctttaggaagcca

SEQ ID NO: 16723 - DNA, 201 bp, Homo sapiens
gggctcacttggtccaccaatgtctgttctgaccaaaaaggacttctgtgttgagtttaaattagcaacagtagcaacaataacaccaaaagcagcaacartgtatctgaatattcagtagatgtcaagtgctatctacattggtactcataccagctcatttaatgttcccaacagtcctttcagctggtagccatttgg

SEQ ID NO: 16724 - DNA, 201 bp, Homo sapiens
cctctcctgggacacatcaagacggctgtgcttaggcacagagcgagtgctcggaaatggaagatgtgctgggctttttgctttgttaaagttgtcagagygttgttcagtgaggaataggaggcaattccaagccaaggagaacatatccttgatttgcatgaaggttgagaattaaaagaacaagctagatagttctgg

SEQ ID NO: 16725 - DNA, 201 bp, Homo sapiens
gtgaaaagatgtgttgtctctagggaaagggagggagaagaatgtgctggaagtggtagggggagagcacagaccccaaagtcagcacggactctgcaggyggcagagtagagcgttcccatgttgagggacctgcgggtgtacatctcaaagcatgtgaatgtgctctgttggtggaactagcacttctctaatcccata

SEQ ID NO: 16726 - DNA, 201 bp, Homo sapiens
ttcaactgtggggttggttgattgacttggtaactgattgttggtcgcttactcctaagcagtacctgagccctggatcttctagtcctgcttgagggacrtgtcagtcattttcaattattcgtgattgcaaacagcagcaggggtaaacaacctttaacgaaacccttgaggacaatcttaattatttcctttgaataa

SEQ ID NO: 16727 - DNA, 201 bp, Homo sapiens
tgttttccaagatgaagagttgtggagatggatggtggtgaaggttgcataacatgcatatacttaatcccccgaactgcacagttacaaatggttaagayggtaaactttctgttatgcatatttacaattacacacacacacacacacacacccttcagtgcacgcaaaccctgctggactccaaccttcagagcttcc

SEQ ID NO: 16728 - DNA, 201 bp, Homo sapiens
ttgttttattgatttactaaaattacacagttgttcgggcctgggagttaaattctcttcaccagatgccaaatcctacgtttttcttaccacatcatggygccacaggttaaggaatacagtgcagggttctgaatctctctcctgtaggacagtgcttcccaagcctggctacttgacaaatctcccaagaggtgttgg

SEQ ID NO: 16729 - DNA, 201 bp, Homo sapiens
tagctgggactacaggcatgcacaatgcctggctcatttttttatttttttgtaaacatagggtctcactatgtttctcatactggtcctgaactcctggsctccagctatcctcccacctcagcctcccaaagtgctgggattataggtgtgaaccaacgcacctggcctggatttgatttattaatctgggaaaaacgt

SEQ ID NO: 16730 - DNA, 201 bp, Homo sapiens
gtagagtgtctgcagtctactcatccagtcccctgatactggaatttaggttgcttctgtttcacacttcttttaacagtgccacattaaatatccctggrgccaaatatttgcacaaatctttcattatgtcgttaggttgaaagcctagaaatagaattgccatcaaaaggagtgtatattttaagctttttaaaaatt

SEQ ID NO: 16731 - DNA, 201 bp, Homo sapiens
ggctgagacaagagaattgcttgaacccgggaggtggaggttgcagtgagcggagatcgccgcactgcactccagcctgggtaacagagcaagacaccatytcaaaaaaaaaaaaaaaaaaaaaaaaaaaaaaagggcctttgagtttgtggcatctttaactggggatgggataggaggagagagccttgcttctcaagg

SEQ ID NO: 16732 - DNA, 201 bp, Homo sapiens
ttcggcggaagccatatgacccacctctgtcattttagggagactgagcatggctggtaaatctcagtgatggctggagccctgggggtccttagtttccyagcaagtgccctgtcctgctcttgcctttctgagcatcatcctcgtggcattctggagcatgaggacccaaggctgggtctgagtggatgactgtagtta

SEQ ID NO: 16733 - DNA, 201 bp, Homo sapiens
ggtgaagtgtagacagtggggcttcaatagcttaagggcagaagaagacccacggttctggctcttggagccaaacgaagactgaagccacagtgtgcatrtaaagggagtccaaggagcattgggtggggcattgaaattgtttgctacagtcggtttaccttcaactggtttccttcttgttctgaaggatatattaca

SEQ ID NO: 16734 - DNA, 201 bp, Homo sapiens
gcccctttcctgtagccgggggatgctcctgctggggatggcccaccctaggcagcttttcagttcaagatggaggatacagaggttcattcttgctcctstttgcatgcaaactgttctatttctgttttgcagtgggagagaggatacggtttataattccgcactgctgctattttttttcctatttgcccctaaatg

SEQ ID NO: 16735 - DNA, 201 bp, Homo sapiens
gtctctgagccaggttagtgacgatgtcctttgtgatatctgccagcctttgctggagtcccctttgagggcctcagacttctgttgtatgatgtagaggmcttgtttgtctgcccctttgcctagctggagtgttgcaggaggagcagcagcattccaagaccagggtgcagtgaatgactgagatcccaagatgaaggt

SEQ ID NO: 16736 - DNA, 201 bp, Homo sapiens
atcttttcagtggcttgttctgaactctgggccatggtaatctctgtatcccttgggatcagcctggtaaacagccagctgaattaacttcagaaaagacycactcatgggctggcctgcggtagtcttgctggatggtggcctaggtacagagcagtgctgggctgcggaggaagccacgatgttctgtaaacacataga

SEQ ID NO: 16737 - DNA, 201 bp, Homo sapiens
ctgtaaaatggggataatattagtacctcccgtagggttgctgtgaagagtaaatttgatcctgcccgcaatgagcctaacccagcacctgcacactctaygtgcctgctacatgctggttgccctaattagaagtttagagtcctgcattgatgagaggacctaaaaggcttatgaggccaggcatagtggctcaggctt

SEQ ID NO: 16738 - DNA, 201 bp, Homo sapiens
gagggggcactgggtacctgttggttcccttttcctcctttcaggctgatgtggggtgggtagaatagggcacgggtgatgtatttgactactggggtgcrtgctacagcttggcatcttaacatgaataaccatcttaacctcctctggccacctgcttccctatctgtaaaatggggataatattagtacctcccgtag

SEQ ID NO: 16739 - DNA, 201 bp, Homo sapiens
aagaagagcttatgaggcctttcaggtcccatggctccattgggcaagcattggtccctagtgagtcccctccctctggaaatgaagggtttggtgtggtyagaggtggctatcctggcaccagctcttcctttactcaagcctgggctgctttctgcccagtaagggatgcggacaattcctggggtttccccgtggtgg

SEQ ID NO: 16740 - DNA, 201 bp, Homo sapiens
ttctctatcaccagcaaatctcccttttcaacaaagatggagtagaccttaggctcagaggcttccaaaggcaacagagttcagcattgctctgttttcaktgtgttcatttttacaactaccttctctttttggcaagtgatcctggattcccatctatgacagtgatataaattgttcttttaaaacaatctttaaact

SEQ ID NO: 16741 - DNA, 201 bp, Homo sapiens
agcagaacgaaaaaatggtatggaaagcaaggcacctgaaaaaattttcaaagggagaaaaagaatgagcaaaactatcctgtagaggagagagacattgmaaatgacatatacagacacagaaaaggttgctcagtcaacaacttctgcaggctcaaagcatgggaagtaatcagtaaatggccaatttatctctccctc

SEQ ID NO: 16742 - DNA, 201 bp, Homo sapiens
ttgtaaaactgtcttgcccttgttctaattgcgtattgatcaccgaggttcttggcatcgggcttttctttgatgtgtgcatgatcagaacacactaagakacagcctgtgtgctccttcctgtcctcgtgggcatttcctaaagcttcagccctaagctggtatatgtttctctgttacatcaactgccaaggcaattac

SEQ ID NO: 16743 - DNA, 201 bp, Homo sapiens
ttccagcactgttatgcaaattggagagactcatgccaaggtgaagggcttggtgagagcagccaggtcttctatgcagtgatcagcctgcacagctgggygtggcatctctggctcccaggtggttccagtgcacacccccagttaagaaccaatgaagaatgttgcttgttaacaacctttgaaggctttttagcaaaa

SEQ ID NO: 16744 - DNA, 201 bp, Homo sapiens
tgcagatgctccttgaactatgttggggttatgtcctgataaacccatagttagttgaaaatatcataagttgaaaatgcatttaatacactcagcctacsaaacatcatagcttagcctagcctacttaaacatgcttagaacagttccattaacctacagttgggcagaatcatctggcaacacagccctccatagagt

SEQ ID NO: 16745 - DNA, 201 bp, Homo sapiens
gtgagtcctggaaattggaggacctctgtaccttctcttccaaaatctgtaaacatactgtttccgcttggcagtcttgatttgctttcagtgactctgaraagccctgtggtttgtgaagagcctcttggctttcctttgaccttggttggaagccatgtgcccaggtggaaagacagcagttccctacagcctttctct

SEQ ID NO: 16746 - DNA, 201 bp, Homo sapiens
tttagccgcttctttttactggtccacaagacttggttattttctattgacactattttcaagatcacataatttacatcacataaaacatgactgtgatytaatagaagcctatgcaaagcatagatagggtagacttcattcccattgcacaaaatccagaagggcttcagtggggaggtagcatttaaacagaggagt

SEQ ID NO: 16747 - DNA, 201 bp, Homo sapiens
ggcctaagccggccaaacaaacggcagggcaagacctggcaggatgctggggtgggggcgggagtgggccaggatggtgttaacccatccacaggggagtygcctttggcctgcccacagcagtgatcccaaggcttttgtcaccccttgggaaaggaaggacaaggaagtcaggctgtgtgggcacctgatcctgctgct

SEQ ID NO: 16748 - DNA, 201 bp, Homo sapiens
cagatttttctatgcttttaaaaatcggttattcaacaagctacataattgtttaaaggctccactgccattgtacacaggagaaaggcagaaatactagycttgggcctgctttttacatttcatcatagtttttaaacagacacattaatttctcgacaataagaggcttttttggcatcaaaatttaaagcatttccc

SEQ ID NO: 16749 - DNA, 201 bp, Homo sapiens
aaaaacaatggccaaaaataatgcagatattacacatgaacatttgcagagaatccagtataaagacatttgttaaaaataaagatggtaatacaagctcwcctgtcctcctggctctgatgagtgaaatagtgcaaatcagcatccttttcttcattgcttaccccattcatgcttgaaatgggatttcccagacatgcc

SEQ ID NO: 16750 - DNA, 201 bp, Homo sapiens
tggctaccctcttaaatattattaaccatgctgaccatgccacatttccccagcatctaggagtgttctcttcctagagcatgctttctgagttgttcacrtgaacatctacagtgttgcaggagcctttttttttcctatgggcaaaatcatctattgaccaaaacaagacatttaagtcactcagattctgaaggtacc

SEQ ID NO: 16751 - DNA, 201 bp, Homo sapiens
gtgaagaagagaacattccagatagaggaacagtcaccacttgtgagtgtatgatgagtatctgctgtgctgggagctacacccggttctccattctgttwgcctagctcttatacaaataggcaagagtaagtgttccgtatgccttctgcagatgtacagcagatagatattttggcagaatgacagagagtactgaac

SEQ ID NO: 16752 - DNA, 201 bp, Homo sapiens
ttcatttttatttaaaaggctgatttaataatagaaagaaaaactccaggcaaacaaaaacactaacggacctgaacctactgacgttcttagatattttkaatgtcatgagtgactccttttgctactcacagtgtagcccctggcctagcattgtcagcatcactgggaacttgttagaaatgcaggactttgggctcc

SEQ ID NO: 16753 - DNA, 201 bp, Homo sapiens
aggatctatgagctcttgggtgctgccaggagttagaactgggatgagttgagtgtcaaggtgtttgacctactactgcccagcagtctaacatttctttraacacctactttgtagcaggcactatgatgggtgttttataaacattcttttgcttaaaccttacaagaaaccttcttaggtacacttttattcctcctg

SEQ ID NO: 16754 - DNA, 201 bp, Homo sapiens
gctaaagacttgctgatcacattaggattactttttttttttctttcaacaactttaagaccaagtgtcctagggaagctggaataaagcagtcacagttsttatttgtgactgtggtcttttcctgtgactccatttccctattatctgtttcagaaactgtctgggcagaagataaatccagtgctccggatgtttggt

SEQ ID NO: 16755 - DNA, 201 bp, Homo sapiens
gtgggagccctgccttctcataacctcagtggtgagcatctttgcagagttcctctgtcctgtgccagactctaggggaaggtgtaggtccgcttcctcakttgaatttttctagggaaatggcattttcagacattgttcctggtcctcactcaccctacagagcctgctttctcaagctctcaagaaggaacaacacat

SEQ ID NO: 16756 - DNA, 201 bp, Homo sapiens
cactccgagattctcagtaaaaaaaaaaaaaaaaaaaaaaaaaaatcaaggaaatcttaatggccaaagccataggtccaaaacccggcgttccctcccamccaactttccaggccattttctccaatagcccctcatccctgaccttgtcttccagcctccctggaccatgaatgctgctgaaggctctcactttgtact

SEQ ID NO: 16757 - DNA, 201 bp, Homo sapiens
tgtggatttgcatgggccacaggtcaaagccacactgcctgggaaaggaatgggtagagacgagagcagatctgacagagaaaaggtgttcagcctacttkgatttaaaacggggatgaagaaaagctgtgtgacatgagcagatttggccagtgtgggaaaagacagtctggccttcagcttggtacccagggtaaatgg

SEQ ID NO: 16758 - DNA, 201 bp, Homo sapiens
gcgcctggaggcgggcgggggcgtccgggtgcctccctggggtcccagcccagagcgtggggggagagccgctagagttgtctcctccgccgcccagctaractcggcttcactctctgaatcgaaaagtaacttggctcctctgcctccgggcggccgccgctggcccagcgagcctcctgaacctcgcagggcctggag

SEQ ID NO: 16759 - DNA, 201 bp, Homo sapiens
tccggggcccgctaaggtcggggtcggcgcctggaggcgggcgggggcgtccgggtgcctccctggggtcccagcccagagcgtggggggagagccgctaragttgtctcctccgccgcccagctagactcggcttcactctctgaatcgaaaagtaacttggctcctctgcctccgggcggccgccgctggcccagcgag

SEQ ID NO: 16760 - DNA, 201 bp, Homo sapiens
aagaggggcaagggcacaggacaaaagccataagtcagctgagttgcctctcctttaagaaacctcctgagaagcctaccacccaaataacatgctcatayctcattggccagacactgcacatggccactctgtctgcaaaagagactgggaaacatagttttatttatttttaaagctaggcatattaacactccacta

SEQ ID NO: 16761 - DNA, 201 bp, Homo sapiens
tgaagcaacatggaaaatgagtgaactctaggttaggagcatctgttctagattccattcattctagatgttaaatcaacaagaaattctgcttgcctacraataacagaatccctaaaagcagtggctcttataaattaggtgtttactttttttcaggtagtaagaagtccccaggaaggcatcccatgtcaggtgcag

SEQ ID NO: 16762 - DNA, 201 bp, Homo sapiens
aagacaagtaataataaaggagtgtgtggccttcaactgcctgctaaagacttgctgatcacattaggattactttttttttttctttcaacaactttaasaccaagtgtcctagggaagctggaataaagcagtcacagttcttatttgtgactgtggtcttttcctgtgactccatttccctattatctgtttcagaaa

SEQ ID NO: 16763 - DNA, 201 bp, Homo sapiens
aaggttctctgcttttaaggattcacataattagactgtgcccagccagataatcctggaaaatctttccatctcaagacccttaaccttaatcacatttkcagtccttttttgccatataaggtgacatattcacaggttccagggattaggagggggactattagtctaccaaccacaggggatcttaggacctctgaa

SEQ ID NO: 16764 - DNA, 201 bp, Homo sapiens
catggtagtctaggtggatttttttcattaacacagaacttagaaaaaattttaaatgatgacgtttggccaagacaagtaataataaaggagtgtgtggycttcaactgcctgctaaagacttgctgatcacattaggattactttttttttttctttcaacaactttaagaccaagtgtcctagggaagctggaataaa

SEQ ID NO: 16765 - DNA, 201 bp, Homo sapiens
gtggatcacctgaggtcagaagttcaagaccggccttaccaatatggtgaaaccccatctctactaaaaatataaaaattagcggggcgtggtggcgtgtscctgtggtacccagctactagggaggctgagacaagagaattgcttgaacccgggaggtggaggttgcagtgagcggagatcgccgcactgcactccagc

SEQ ID NO: 16766 - DNA, 201 bp, Homo sapiens
gtaaccaccatcctcaactccacattgcaaaaaggaacgctcggaaactcagtaggaaaacttacgaatatggaaactattttgccatgaggcatacatastctgaggggcatttatctatccagaccatcctcttttcattagaagtacataacaggagattaataaacttcggtgattcagcccacaaggcaggaggaa

SEQ ID NO: 16767 - DNA, 201 bp, Homo sapiens
acatagccctggtacagaaaccagaaatggagagcgggcacactcacgcaaaaataggaagcagtgagccaaactcactttgaaaacagatacaaaagttytaaataaattgcaaattgagggccgggcgcggtggctcacgcctgtaatcccagcactttgggaggccgaggcgggtggatcatgaggtcaggagatcga

SEQ ID NO: 16768 - DNA, 201 bp, Homo sapiens
gtctctgccaggctttggtatcaggatgatgctggcctcataaaatgaattggggaggattccctctttttctgttgattggaatagtttcagaaggaatrgtcccagctcctccttgtacctctggtagaattcggctgtgaatccatctggtcctggatgttgtttggttggtaagctattaattgttgcctcaatttc

SEQ ID NO: 16769 - DNA, 201 bp, Homo sapiens
tagaagactgttgtagtcagctgtgcttgtcataaagttttgtttaaaattattttagaattttcttctttggctttaatttaaatttttgtttgtttacttttttttttttttttccccggctcactgcaagctccacctcccaggttcacaccattctcctgcctcagcctcccaagcagctgggactacaggcgcccg

SEQ ID NO: 16770 - DNA, 201 bp, Homo sapiens
gcacaagggtttcaatttctccacattcttgacaattcttgtcttctgtttttttgatagttgccatcctaatagtcatgaagtgggaaaaaatagttttwaaaaagtaacagatggataaacaactaagagaaagaaggaaggagtgaaggatggacggatggacagacttggctgccctatactattatcctagtcatc

SEQ ID NO: 16771 - DNA, 201 bp, Homo sapiens
tttgagatatccatccaggtgttcacgtaagtgctgagatttttaccaaggcatcgcattatctcccaaagcctctttcccatcatcctaagtggggttcyctagaagcagagcctgagaaagggaattgggaacacatggtctaatgatgctgtgctcttagggaaaacctgtaaaggaaaggcatgggggctcaaaatg

SEQ ID NO: 16772 - DNA, 201 bp, Homo sapiens
ttcccagatgccttcacagatggccctgcctcagggcctttgcacctgcctttgctgagaacactgttccctccaatctttgcatagctggctccttcttmttatgcagatctgagcccagagttcactttctcaataagtcttccctgaacactttacctaaagttgcaaacccccattactctctatctcatttgtatg

SEQ ID NO: 16773 - DNA, 201 bp, Homo sapiens
tggaatgagtcagtttatttggctggtgaaggaggaacctaggttggagcagggatgagagggtagaagagagcaaaggaggaggggcaggagagaacccrgtaggatggaaagaggctgcccatgttgaacaaagggccagtaacatttctggtggcagggagatgtcaggacattttagaaatctgatgcctgctgtta

SEQ ID NO: 16774 - DNA, 201 bp, Homo sapiens
tgtccatggatgatgggtggtcctttcaggtgagacatagctgctgaagtctagcaactccttcctggctgcaataccctaacttcattggtccattgttygtggaacaggcacttacacaagtagcacacacagtaggtgccctgcccataacccctcagccctcacccttcccaatctatccgcaaactgggcagattc

SEQ ID NO: 16775 - DNA, 201 bp, Homo sapiens
aaagaccatcattcttcagaaggatctcccaaagaatgccattgaaaactcctcattaccttcaaatggggtgatgcacacacgagtagcatgaaattagscatgttcatattaaggagcaatctaagatcattattgctgtttctctggccttatattaaatagtgtcattgcaattgaaaaattagagtaaatgaacag

SEQ ID NO: 16776 - DNA, 201 bp, Homo sapiens
agtaaatgaacagagcctgtgagcatccaccctttgtaggttatcctgagtctgcattattacagggtcttgaaatgaatggtgatacgtgaaagtatttktcctaggattcattaatattattatattttagtctttggtcaatatgaagaaatactcaatagtaaatcatagcaacatgatttaacatgagatataatt

SEQ ID NO: 16777 - DNA, 201 bp, Homo sapiens
cactcccgtgttctttgtttcaaagctgaaacaaaaggtacattgtcgttatctgttctgaatcaagaacatagtgtgtcctctaagtttttcagtacacktttgttcacttcatgatatttaaatcagggttgttgtcattacaaccctttcaagacctagggcttggatttcaagtgccttttcaggtgccagtgaaaa

SEQ ID NO: 16778 - DNA, 201 bp, Homo sapiens
gagagcagctttcaggctgacagctgtgggcagcaatcctgactctcacacttgcctgacatgaggccttaagggggctgcttaccttctgtgaccctcastttcttcctctgtaaaaaggagaccatcacctccagtttggtatgtagaggttatgcaaggaaaatgtttagcactgcgcttagcacacagaagccaggg

SEQ ID NO: 16779 - DNA, 201 bp, Homo sapiens
tagtgggggagaaagatgcaggatggtggtttaggggatactggggaggagactctcagaaaagaaaacaattaggcaggcaccccaaaggagttcgctcytgcaggatttcatcgttgttagtgctgctgctgcctgaattgcaggctgttgtatcataccagctagctatgctgcatacaaactgcccccaaattgaat

SEQ ID NO: 16780 - DNA, 201 bp, Homo sapiens
ggtcttaatgtttccggcttattgccatattccatatgtaatttcctccattcctttcaaggggaaagccactgagtgttacccagctgccactgctgacyggttgcccacttcactgagggcctttgaagacagcggttggcggggacagtgttgaagtcctcttccctttacagaaccgtggctcttgaatgtccttct

SEQ ID NO: 16781 - DNA, 201 bp, Homo sapiens
tcctccattcctttcaaggggaaagccactgagtgttacccagctgccactgctgaccggttgcccacttcactgagggcctttgaagacagcggttggcrgggacagtgttgaagtcctcttccctttacagaaccgtggctcttgaatgtccttctagagtagctcttggcattgctacctatggtcatttgctgctgc

SEQ ID NO: 16782 - DNA, 201 bp, Homo sapiens
agtagctcttggcattgctacctatggtcatttgctgctgccttgaggtccggagccaaaagtggttgttcccaaaagtgttgcataaacgtgaatcgtgwcatggtactgaaagctgagcagagcagctggccatgccgccgcattcacagcaccacacaagcctgaaggtctgcatgctttatgcttgcaagatggcca

SEQ ID NO: 16783 - DNA, 201 bp, Homo sapiens
ggagtgcagtggtgcagtcttggctcactgcaacctccgcctcccgggttcaagcaattctcctgcctcagcctcctgtgtagctaggattataggtgtgygccaccatgcctggctaatttttgtatttttagtagagacagggtttcaccatattggccaggctagtcttgagctcctggcctcaagtgatccacccac

SEQ ID NO: 16784 - DNA, 201 bp, Homo sapiens
gagcaacatgtcaaagggcatcccaactggttgtattatttaccttgaagtgaagtgtcaggatttgaactgtcagccctcagggagaagtgttccagctmccaggttttttttttttttttttttttttttttttttttttttttttttttttttttgagacggagtctcccgctgtcaccaaggctggagtgcagtggc

SEQ ID NO: 16785 - DNA, 201 bp, Homo sapiens
tgtccttgggtgctcctttgcttttatctcagaggctggcacatttgtaggcaggactgtgagacacagtctcccctgcccccaggagtgtggctggcccrctctgccctcaggaagtttgcttccctcagattagctccggggcaggtcctgtgtcagggtgataggcacacggtgctctcccattgaaggtcacaggaa

SEQ ID NO: 16786 - DNA, 201 bp, Homo sapiens
gccaaagagaaccaggaagttaaactttaaaatggaaaatcaaagaataagagagctgaacatattgacatactgattctttgaagagaaacttggaattygctataacaactccttggtgaaattcagaataaagactggcaagctatttttcccccagtattttatttcagagctaagctaaggaactacagaaaaata

SEQ ID NO: 16787 - DNA, 201 bp, Homo sapiens
taagaaaaaaaaagcactgaaagcgcttgtggtgctgtccttgggtgctcctttgcttttatctcagaggctggcacatttgtaggcaggactgtgagacrcagtctcccctgcccccaggagtgtggctggcccactctgccctcaggaagtttgcttccctcagattagctccggggcaggtcctgtgtcagggtgata

SEQ ID NO: 16788 - DNA, 201 bp, Homo sapiens
atgaataccaacatctgttagaatattccaagttggtgccaggactcatattttagtaaactgtaaaatcttccctccccatgcttgtacagtagacaggsctacccatgatgtacgatgggtatcccacaatgagtcagttgatgtgggaacttcaattaatttatagtgggactgctcacatccctatgaagaaaatat

SEQ ID NO: 16789 - DNA, 201 bp, Homo sapiens
gttgcaaacccccattactctctatctcatttgtatgttgttttcttcatagcacttgtcactatgtgaaattactctcttatcatcagtcttcttccacsagattaaaaacaccatgagagtaaagggcaaggtccttattttctgtgtatttgcagcatttggtgccgagaccatagtgagtggtcagacaaatgaaag

SEQ ID NO: 16790 - DNA, 201 bp, Homo sapiens
agtcttcttccacgagattaaaaacaccatgagagtaaagggcaaggtccttattttctgtgtatttgcagcatttggtgccgagaccatagtgagtggtsagacaaatgaaagaaatggctgcttccactctgttagtggcatcctcagacacacagtcaccccttgtatctcctggggattggctccaggacatccccc

SEQ ID NO: 16791 - DNA, 201 bp, Homo sapiens
aaagttacgatcttttcctttctgtgcttaagtgatactaggtcattctttaacttcttgctccacctgctctatccccagctctgcaggtttggagtggsctgtcatgtgattttgtttacccgtttcggttcaaagacagaactctttatttgaacactgaagctagcagggactgtccaaagccagagcccctcatat

SEQ ID NO: 16792 - DNA, 201 bp, Homo sapiens
cagagaatttacctgcagattaccctcaaaacatgagacaggttcagagcgaggtgggcggctggaatggagccttcacagacagcttgaccacacacagrgagctcaggaagcagctttgttggaaaaatgcagggcacttaaactgccacaccaggagggggtttggagaggctggaaagagcatgccattggacacag

SEQ ID NO: 16793 - DNA, 201 bp, Homo sapiens
atgatgacacacaatgctctttcgcactcatgatacataacttacagggaaaggccctgactccctttttgcatagcgtcactgggaacttcttgttaaayggggttagggagtcgttgacttgccttttcccttctaactacaagttttttgcctggtagcatagacccaacaatccttctactctggggtgtttgctcc

SEQ ID NO: 16794 - DNA, 201 bp, Homo sapiens
tggccagccctaaaggcccgggctgctctgcttacagccacacggctgtttctgagctgaggatgaccctccaggtggctgagattccctccaatcttttwatttctggttgggaaaccctacacagaccagtgtctgtctcacggtttaaaaggctgcatgcaaaacatttcctcccctggtagaaatgctgcattgagc

SEQ ID NO: 16795 - DNA, 201 bp, Homo sapiens
tatttaatggaaaagcttctgaggacagggctatactcacatacctccacacctggcacagtagatgagctcactatctgttgaataagttcgtgacagarcagaagttctactgcagccacaaaggcctattcacagtctttaagcctgatgaagttctgaataagtaaacccttagctacatcaggcagtttatgaatg

SEQ ID NO: 16796 - DNA, 201 bp, Homo sapiens
gcccatgacagctgggtttgcttcacgatttgtgtaggacacgtcttatatgtgcatgcactgttggcagcagactgcagagagtcttaagggttttccartatgacttgggaattgcaagctgatgataccatggtaccacaacctgcagtgtggcaagcctaccagcaccaggtcaagtgtgtgtctctgtttgatttc

SEQ ID NO: 16797 - DNA, 201 bp, Homo sapiens
cttcactgtttggtggtgatgactatgtgagaaaaactagacacttgtcttaccatatgtgaaaagttgtaagaccaaatgtaacatcaaagggcagggtyttttcagaactaagctagaggaaattgccatcctgggtcaggatgaaacgcccgttctaagtgagaatgtgctgctgactgtggtgcacagacagcacaa

SEQ ID NO: 16798 - DNA, 201 bp, Homo sapiens
tggtggtgatgactatgtgagaaaaactagacacttgtcttaccatatgtgaaaagttgtaagaccaaatgtaacatcaaagggcagggtcttttcagaaytaagctagaggaaattgccatcctgggtcaggatgaaacgcccgttctaagtgagaatgtgctgctgactgtggtgcacagacagcacaaattccatggg

SEQ ID NO: 16799 - DNA, 201 bp, Homo sapiens
tgtgaaaagttgtaagaccaaatgtaacatcaaagggcagggtcttttcagaactaagctagaggaaattgccatcctgggtcaggatgaaacgcccgttytaagtgagaatgtgctgctgactgtggtgcacagacagcacaaattccatgggtttgagagaaagatgtaaatgacagcaaggtagaatgcagacctgca

SEQ ID NO: 16800 - DNA, 201 bp, Homo sapiens
ttgacagtagatatattgtcagatgcactgtgctgcttagttttgagtgcagtgtgattttctgaaagggcaatgagatgatggatgtagcatgctcagcrctgacctggcccatagtgatcactcaataactgttaacagctatggctgctattcctactgatggataaccatctaataagacagaaaacatggggctaa

SEQ ID NO: 16801 - DNA, 201 bp, Homo sapiens
cgttggtgacagtgtagaagggtgattcgcaggcccatgttctgcccaccagcaaagccccactggagaagggtagactcctgtgggcagtctcagagctsggacctatttgcttctgcttgattctgcgtgggtggacccacatgagcagctgtatacccaggaggtcactaagactttataaaggcaggttttaagaaa

SEQ ID NO: 16802 - DNA, 201 bp, Homo sapiens
tcctgacgttgccatggcatctgcaaactgtcaagacaccggtgggagtgtcttttaacatgataatgcattataattagcacataatgagcagtgagggraaccagaagttactcttgtagccatgttggttttggtgggttttggctggcttctttataacagcctgttttaacaaggtttttatgacctgtatcttgt

SEQ ID NO: 16803 - DNA, 201 bp, Homo sapiens
actataaatctagtgggtacttaatgaatattatataatgactaataaatattttctgatttaaatgtaatgaaatattatcagcttttgaagaaggcccyggggataattatcttcattttacagacagggataccatgagatactcaggtcacatagagtgaggggtggagggtgacaattccatgttcttcagaacct

SEQ ID NO: 16804 - DNA, 201 bp, Homo sapiens
agtgagtaatttcaagcattttaattccagtgcttcctggcttaacaaacctgccaccattactaatgctaattaaataggtttctctgaggttgcccaamctgttttcctaagccaggaaatggactcgacaaactcaaaagaatcaaaagatacaaatttaagaggaagaaaaatcactaattagtgaagtctgcttcc

SEQ ID NO: 16805 - DNA, 201 bp, Homo sapiens
aaatagaagaggacaaaatgacatatgccccctcccttttaactattcttcctagaagttccatataacgctggccagaaattaattatgtatgtagatayacccacccactaaggaggctggggaatgcattattaaggaataagaggagggtaagtgttaagagacaactaccagttgccacaccctccactgagaaaa

SEQ ID NO: 16806 - DNA, 201 bp, Homo sapiens
agccaccgtgcccggccagcaatccgtgttttaacaagatggctgggtgattctcatgcagctaaagtatgagaactgatacagtagaggagttaaactartaatttgcccatcaaaattatggaggtgaaggagtggggatcgttatgtgagataaattcctgtctatcatggaaggaatttagtaaaataatgtctaga

SEQ ID NO: 16807 - DNA, 201 bp, Homo sapiens
taagacacagttcacaacttttggagaaatttttggtttccacaactagttcagcgctattagcatctagtgggtatgccagggatgctgctaaatacccmacaatgcacaggacagctccccacacaacaaggaattatccaacaatgcacaggacagctccccacacaacaaggaattatccaacaatgcacaggacag

SEQ ID NO: 16808 - DNA, 201 bp, Homo sapiens
tccctggaggctggtttggacagtgtgagaggcatccttcccaaagcagacaaagagaaaacacatgggaatggtaattaaatgagtccatgtttaagggrcacttaagtggattaaaatcaatatgtagtcacataagtctgctaagccatccttaatgtttggcgggtggatttctttgtttaaaaaatcctggtttgc

SEQ ID NO: 16809 - DNA, 201 bp, Homo sapiens
cttccaaaggcaacagagttcagcattgctctgttttcattgtgttcatttttacaactaccttctctttttggcaagtgatcctggattcccatctatgwcagtgatataaattgttcttttaaaacaatctttaaactaaaagagtaaggcaacaaaaatatgaacaaatatcccaggtgatgtaatttgcagatgtgg

SEQ ID NO: 16810 - DNA, 201 bp, Homo sapiens
aatgacgggaagccttttgatgtttgacgtctttatctcaactcttcaacttagctcattctggagcagtcacacgatgacagatgagacggttgggcctragccggccaaacaaacggcagggcaagacctggcaggatgctggggtgggggcgggagtgggccaggatggtgttaacccatccacaggggagtcgcctt

SEQ ID NO: 16811 - DNA, 201 bp, Homo sapiens
gccatctgcccttggagaatgtagagattcaactctaaagtggaacagagaaagcccactgctggacagctagtgttggccagcgttcattcattctcctytctctgcacagtggcaacacggagcgctctgaatccctgcatgacaacaccctcgtgctgatggtgccactgatgcacgaggtggacacgtccatcaccg

SEQ ID NO: 16812 - DNA, 201 bp, Homo sapiens
taggccaggcacggtggctcacgcgtgtaatcccagcagtttgggaggctgagacgggcagatcacttgagatcaggaattagagaccagcctggcaacayggggaaaccccatctctactaaaaacacaaaaattagcggggcatggtggtacgtgcctgtaatcctagctactcaggaggctgaggcacgagacttgaa

SEQ ID NO: 16813 - DNA, 201 bp, Homo sapiens
ctcactttaaataaccattgcagcttggggaacctggcctgtctttaggtggaaacaagttttggaaattcctcctattgcagaaagcatttgatttgcaktttcctgaatgcgaggctccaagtgtagggaccgccacccaaggacgtttttctctgttgggcagactcaaagcactgaggggagcttttcagggcccac

SEQ ID NO: 16814 - DNA, 201 bp, Homo sapiens
ggcagaaagatgtgggaagcctttgacctggaggggcatggcttcaggtgaccagaactgtggctggttctggggaatgtgagcgaggtgctggccacatstgctatagtaaccatgagagcttcctgaaaagtagttatttactgataaactactcaagaatacaaaagtagttgaataaaaagtgtgccacagccaaat

SEQ ID NO: 16815 - DNA, 201 bp, Homo sapiens
acagggactgtgtttggctgctctgtttggggccctgtgggaggaaacctgtgtcctctctcttgctctgagtcaacagacaactcttagaagtgcctgaytgagcctacaacatggaaatgccatttcctccaagccgtttatctgaccacctcagcctggaaagtaacagctcttgacttcccttctccacctgggatc

SEQ ID NO: 16816 - DNA, 201 bp, Homo sapiens
ggggcgatggccacagagtccttagccagccaaggaaatgacattgttggtcattggccggggatgcttgggttgtctgcaacacatgaaaaaagcatcaygtccccttgactttgagcaaagagtgcggttaaaaccaagttgtgggaggatggatagtcagtaattgtttatctgtgtgatgagataaggtagtcccct

SEQ ID NO: 16817 - DNA, 201 bp, Homo sapiens
ctttggctgttttgttgagtgcccaggtcatcctggtagaagggagacagtgacccacgtgaaaaaggatggctacagatgcatggctgcatggctgtgcrtcatccaccctggagtatctgcttgccaaaaatagggctacctgcaaaatgctttgagcactgtggaaaccagccgttacaactccaaacgtttattttt

SEQ ID NO: 16818 - DNA, 201 bp, Homo sapiens
tattgaaatgatgttcttggtcacttctggttccagatggccaaccaagcacaaatgttgatgtctgtgccttggtaccccattgcaatgattataaatgagtagatcggaacagggaggacaacactgtgaaagaaagggcatcagctaataataagagtccagtaattttctggtatgagtgaagtaaatggaagagtg

SEQ ID NO: 16819 - DNA, 201 bp, Homo sapiens
tgaaatgatgttcttggtcacttctggttccagatggccaaccaagcacaaatgttgatgtctgtgccttggtaccccattgcaatgattataaatgagtagatcggaacagggaggacaacactgtgaaagaaagggcatcagctaataataagagtccagtaattttctggtatgagtgaagtaaatggaagagtgtta

SEQ ID NO: 16820 - DNA, 201 bp, Homo sapiens
gaaatgatgttcttggtcacttctggttccagatggccaaccaagcacaaatgttgatgtctgtgccttggtaccccattgcaatgattataaatgagtagatcggaacagggaggacaacactgtgaaagaaagggcatcagctaataataagagtccagtaattttctggtatgagtgaagtaaatggaagagtgttag

SEQ ID NO: 16821 - DNA, 201 bp, Homo sapiens
aatgatgttcttggtcacttctggttccagatggccaaccaagcacaaatgttgatgtctgtgccttggtaccccattgcaatgattataaatgagtagatcggaacagggaggacaacactgtgaaagaaagggcatcagctaataataagagtccagtaattttctggtatgagtgaagtaaatggaagagtgttagtg

SEQ ID NO: 16822 - DNA, 201 bp, Homo sapiens
cctacagttgggcagaatcatctggcaacacagccctccatagagtatcgattgtttaccctggtgatgatgtggctgacgaggtgctacagctcgctgcrctggccagcatcttgagagtattgtacagctttctaccactttccactgaatacctattgtttttacaccatcagaaagttgaaaaatcttaagtagaac

SEQ ID NO: 16823 - DNA, 201 bp, Homo sapiens
tgatgttcttggtcacttctggttccagatggccaaccaagcacaaatgttgatgtctgtgccttggtaccccattgcaatgattataaatgagtagatcggaacagggaggacaacactgtgaaagaaagggcatcagctaataataagagtccagtaattttctggtatgagtgaagtaaatggaagagtgttagtggg

SEQ ID NO: 16824 - DNA, 201 bp, Homo sapiens
gatgttcttggtcacttctggttccagatggccaaccaagcacaaatgttgatgtctgtgccttggtaccccattgcaatgattataaatgagtagatcggaacagggaggacaacactgtgaaagaaagggcatcagctaataataagagtccagtaattttctggtatgagtgaagtaaatggaagagtgttagtgggt

SEQ ID NO: 16825 - DNA, 201 bp, Homo sapiens
atgttcttggtcacttctggttccagatggccaaccaagcacaaatgttgatgtctgtgccttggtaccccattgcaatgattataaatgagtagatcggaacagggaggacaacactgtgaaagaaagggcatcagctaataataagagtccagtaattttctggtatgagtgaagtaaatggaagagtgttagtgggtg

SEQ ID NO: 16826 - DNA, 201 bp, Homo sapiens
tgttcttggtcacttctggttccagatggccaaccaagcacaaatgttgatgtctgtgccttggtaccccattgcaatgattataaatgagtagatcggaacagggaggacaacactgtgaaagaaagggcatcagctaataataagagtccagtaattttctggtatgagtgaagtaaatggaagagtgttagtgggtga

SEQ ID NO: 16827 - DNA, 201 bp, Homo sapiens
attgtccccacccctacaggcttcaggcatgcagaatagcaagcagccaggcatcgccttctctaaagtgttaagtaaactgtttaagatagtgtgggcgrcctcgttctcagagaaaagaaagccttacttctggcatttgaagtcaccaacgtaagagctagctttctctcccacaatccacccaaacactttcacaga

SEQ ID NO: 16828 - DNA, 201 bp, Homo sapiens
gggcaaaagtcatctaacacaaagcttattttacaataaagtgttgaatatctcatgtaatgtattgaacactatactgaaaatgaaaaacaaaatggttktatgggtactcaccattaacacacacagctgaaagcacactggacctaaagaatatttgaactaaaattaactgctggattatggggctactagtgtaac

SEQ ID NO: 16829 - DNA, 201 bp, Homo sapiens
cagcagtgtagctttaaacaaaccacttgctctttctgagcaaaaatattccatttgtaaataaatggacagagttagagttattaggcattccctaaagrtcttttccccttttaaaatctttctttcatttaattctaagtttctggctttatgcactttgtgtttcatgcacaccatagcttagtcatcagttatttt

SEQ ID NO: 16830 - DNA, 201 bp, Homo sapiens
atcttgatccaaaaatgacgaggctgggtggttgccattggtgtcacacccacatcccttgctgtgcaggtgcactgctcccagctgctgtgctggctgcwagctgctcacagtggcccgtcctttggtctggaaagtcacccttgccctgcctgggagggtgacttgttagccaatggctggctgatttggggtgtggat

SEQ ID NO: 16831 - DNA, 201 bp, Homo sapiens
gaggtagtgcaggaaagtggtgataagcagatgtctgcagctgtgtgacgtgtgtcccagcccagttctgtggcctgctacctggggagcctctggttgtmattgggcctcctgttgcctctcagcttgcctccctctgtaaaatggggacagtaggccaggggctgtggctcacacctgtaatctcaacactttgggagg

SEQ ID NO: 16832 - DNA, 201 bp, Homo sapiens
cttttcttttcttttctttctttctttctttctttctttctttctttctttctttctttctttccttccttccttccttccttccttccttccttccttcyttccttctttcttttcttttcttttcttttcttttcttttcttttcttttcttttcttttcttttcttttcttttcttttctttctttctttcttctttc

SEQ ID NO: 16833 - DNA, 201 bp, Homo sapiens
ctgcagctgtgtgacgtgtgtcccagcccagttctgtggcctgctacctggggagcctctggttgtcattgggcctcctgttgcctctcagcttgcctccmtctgtaaaatggggacagtaggccaggggctgtggctcacacctgtaatctcaacactttgggaggccaaggcaggtggatctcctgaggtcaggagttc

SEQ ID NO: 16834 - DNA, 201 bp, Homo sapiens
gaatctttgccagtctgctgcctgaaacttgttatcgtaaccaccatcctcaactccacattgcaaaaaggaacgctcggaaactcagtaggaaaacttasgaatatggaaactattttgccatgaggcatacatagtctgaggggcatttatctatccagaccatcctcttttcattagaagtacataacaggagattaa

SEQ ID NO: 16835 - DNA, 201 bp, Homo sapiens
cgtatagatgaaacatcatcaaggtatgtatacgcattttggaacctatcatataaaaaagaaaacttttgtaacttaaatttgggatttatgtttttggytttttgtttgtttgtttgttttgagatggagtcttgctctgtcgcccagggtggagtgcagtggcatgatctcggctcactgcagcttctgcctctcggg

SEQ ID NO: 16836 - DNA, 201 bp, Homo sapiens
gctcataatggcagcaaatgcttgagggaatccctgagtatgcatctatttcttgaatcatggcatctgctataggaaatcctcttaaatgtattcttatytccctaataaaatggaaattggtacttaattggtaaaattttaaataattacccagcatctggtggttcatttatggcttcaaccagatgcgttttatta

SEQ ID NO: 16837 - DNA, 201 bp, Homo sapiens
cccctcccccaaccccacaaccgtccccggtgtgtgatgttccccttcctgtgtccatgtgttctcattgttcaattcccacctatgagtgagaacatgcrgtgtttggtttttttgtccttgcgatagtttgctgagaatgatggtttccagtttcatccatgtccctacaaaggacacgaagtcatcattttttatggc

SEQ ID NO: 16838 - DNA, 201 bp, Homo sapiens
aaaagaaaaaattgttcttagattgggaagattgtccaggagcctgagagaagttctgggagagcagttctttcttattgtccttttcctgattatggggaaaaaaaaaaaaaaaaaaaagataatcttccagatgttggctcagtttgaggaggaggaaagattctgagagtgaggcccactgcaggaagcagagctgat

SEQ ID NO: 16839 - DNA, 201 bp, Homo sapiens
ggggtgccatcggctgctctgcctgcctctgggtggtggtgggattacatgagggaaatgtgagaagcccggaaatgatgaggcagcactggatcctgctgttcccttcctgggaagccggcttcctggtgttgtgaggagaggatgaggccgtcatgggagcaggtctgacctgggctctgaggaagcaggtgctctgct

SEQ ID NO: 16840 - DNA, 201 bp, Homo sapiens
ggacacagggtttccccatgttgcccaggctggtcttgaactcctaggctcaaggaatcctcctgcctcagcctccctaagtgctgggattacaggcatgrgccaccgtgcatggccttagctgcctatttgattccttcgtgacatctaacagaacgtgttatttcgtctacttgttattgtatttacctctctagaatg

SEQ ID NO: 16841 - DNA, 201 bp, Homo sapiens
gacacagggtttccccatgttgcccaggctggtcttgaactcctaggctcaaggaatcctcctgcctcagcctccctaagtgctgggattacaggcatgarccaccgtgcatggccttagctgcctatttgattccttcgtgacatctaacagaacgtgttatttcgtctacttgttattgtatttacctctctagaatgg

SEQ ID NO: 16842 - DNA, 201 bp, Homo sapiens
cgggaaaggagaggggactcatcaaaggttagaccatgtcctgaagtgacctgttgaatttgcaaaacttctttttcagtgttatgttttatttttgcaatttttgtggggggaaaatgcattctaggcttctgaaaccctttttagaagaaaatcatggtttcctcaaactcttcaagcttattgagttttcttctgtat

SEQ ID NO: 16843 - DNA, 201 bp, Homo sapiens
gggaaaggagaggggactcatcaaaggttagaccatgtcctgaagtgacctgttgaatttgcaaaacttctttttcagtgttatgttttatttttgcaatttttgtggggggaaaatgcattctaggcttctgaaaccctttttagaagaaaatcatggtttcctcaaactcttcaagcttattgagttttcttctgtatt

SEQ ID NO: 16844 - DNA, 201 bp, Homo sapiens
cacttagcataatgtcctccagtttcatccatgttatcaaaaatggcaggatctcctttttaaaggctgaataatattccattgtatgtttatatatgtgtatatatatatatgtgtgtgtgtgtagtatatatacatatatacacaccacaatttctttatccattcacctgttgacaaacacttaggttgattccatgt

SEQ ID NO: 16845 - DNA, 201 bp, Homo sapiens
acttagcataatgtcctccagtttcatccatgttatcaaaaatggcaggatctcctttttaaaggctgaataatattccattgtatgtttatatatgtgtatatatatatatgtgtgtgtgtgtagtatatatacatatatacacaccacaatttctttatccattcacctgttgacaaacacttaggttgattccatgtc

SEQ ID NO: 16846 - DNA, 201 bp, Homo sapiens
taatgaatttcaagcttcttgttattgtttttcttcctgaaagacaaagggagttttatgccatggtattttgaggacaatgttgaatcaattgttatcaratgggaagatttctgaatgctgaatagtttgtaatatccttcaaaaaaccaaaccaagaacccacccacccattcaccatttatctctccatttgtccac

SEQ ID NO: 16847 - DNA, 201 bp, Homo sapiens
tctagttcaatgataaaatttttgtctgggctacatggaatcatggaatttcagttctgcccagtccctctcaaggcccagccattatcatagaaaaatcytcaagtaagttgtgttgtttcttccacaggacagttcgtctgtcatccagttcatgtcccgcgccaaggtgaaggtggatcctgccctaagggtggtgga

SEQ ID NO: 16848 - DNA, 201 bp, Homo sapiens
ccctctctctcctgggttcaagcaattctcctgcctcagcctcccaagtagctgggattacaggcacccaccaccacacccggctaatttttgcatttttagtagagacagggtttcaccaagttggccaggctggtctcaaactcctgacttcaggtgatcacccgcctcagcctcccaaagtgctgggattacaggtgt

SEQ ID NO: 16849 - DNA, 201 bp, Homo sapiens
accatgcctggccccaccatccacacccagccccaccatccattaattaagcttcatggtgttcactcagtcacactgttgtcgctctcatttgccaatgttaaatagtgatgcacagtgcctaagacaaaatcgctatcactgcaagctcctacccctggctaaatgctaatctggatttatgggacagtgacgagtgct

SEQ ID NO: 16850 - DNA, 201 bp, Homo sapiens
gttttctgcatatggctaaccagttttcccaacaccatttattaagtagggaatcctttccccattgcttgtttttgtcaggtttgtcaaagatcagatgrttgtagatgtgtggtgttatttctaggcctctgttctgttccattggtctatatctctgttttggtaccagtaccatgctgttttggttactgtggcctt

SEQ ID NO: 16851 - DNA, 201 bp, Homo sapiens
gcgagggcatccttgtcttgtgccagttttcagagggaatgcttccagcttttgcccattcagtatgatattggctgtgggtttgtcataaacagctcttatttttttgagatatgttccatcaatacctggtttattgagagtttttagcatgaaggggtgttgaattttgttgaagcccttttctgcatctattgagat

SEQ ID NO: 16852 - DNA, 201 bp, Homo sapiens
ttggtggtaatatcccctttatcattttttgttgtttctgtttgattctctgttttcttctttattagtgtggctagtggtctcttttgttgatcttttcaaaaaaaaaaaaaccagctcctggatttgtttattttttttttgaagggtttttcatgtctctatctccttcagttctgttctgatcttaattatctcttg

SEQ ID NO: 16853 - DNA, 201 bp, Homo sapiens
tggtggtaatatcccctttatcattttttgttgtttctgtttgattctctgttttcttctttattagtgtggctagtggtctcttttgttgatcttttcaaaaaaaaaaaaaccagctcctggatttgtttattttttttttgaagggtttttcatgtctctatctccttcagttctgttctgatcttaattatctcttgt

SEQ ID NO: 16854 - DNA, 201 bp, Homo sapiens
ttttcaaaaaaaaaaaaaccagctcctggatttgtttattttttttttgaagggtttttcatgtctctatctccttcagttctgttctgatcttaattatytcttgtcttctgctagcttttgaatttgtttgctcttacttctctagttcttttaattatgaagttagggtgtcaattttagatctttcctgctttctcc

SEQ ID NO: 16855 - DNA, 201 bp, Homo sapiens
ttggagtgggacaaggccctccttcccctttcttatgattagttgaaatctgagtttgagcaagtcttgctgttttcagagaatgctctccttctcctgtycttccctcacagccgaactcatttggagagattgatggagttactaatgctttggagacagtccctaggaatttttttaaaatgtagtggtcagattgac

SEQ ID NO: 16856 - DNA, 201 bp, Homo sapiens
gtctgacctggaggccttgttcaatagcttttcctcctggagacacaagcaatctgtcctgctgggtcagtggcagtccttgcattgagtcagcacattcttttttttttttttttttttttagacggagtttcgctcttgttgcccaggctggcaatggcacaatctcagctcaccataacctccacctcccgggctcaa

SEQ ID NO: 16857 - DNA, 201 bp, Homo sapiens
gggagaggctggagggaagctatggccttggaattttattgccttttattgttgttcttgcaggagcaggggggttgaggggggttcatcctgtatttgaygcccacactcagatcccaggggagtagaggaggagacagcagccgatgcacttcttttgccagtgagctgtgcaatgatgctacctgtctgcttcccttc

SEQ ID NO: 16858 - DNA, 201 bp, Homo sapiens
taatatttggagtgggacaaggccctccttcccctttcttatgattagttgaaatctgagtttgagcaagtcttgctgttttcagagaatgctctccttcycctgttcttccctcacagccgaactcatttggagagattgatggagttactaatgctttggagacagtccctaggaatttttttaaaatgtagtggtcag

SEQ ID NO: 16859 - DNA, 201 bp, Homo sapiens
tctgacctggaggccttgttcaatagcttttcctcctggagacacaagcaatctgtcctgctgggtcagtggcagtccttgcattgagtcagcacattcttttttttttttttttttttttagacggagtttcgctcttgttgcccaggctggcaatggcacaatctcagctcaccataacctccacctcccgggctcaag

SEQ ID NO: 16860 - DNA, 201 bp, Homo sapiens
ttctaatatttggagtgggacaaggccctccttcccctttcttatgattagttgaaatctgagtttgagcaagtcttgctgttttcagagaatgctctccytctcctgttcttccctcacagccgaactcatttggagagattgatggagttactaatgctttggagacagtccctaggaatttttttaaaatgtagtggt

SEQ ID NO: 16861 - DNA, 201 bp, Homo sapiens
ggtttatgtttaatgaatgaaatgatgattaagataggacaattggacaaaaaggctgggccttcttaggtgggtattgagtgggaagtgattcaagaggscagacattctgtctggacattagctggaagtggggctggacaagatgaactagagccctcttgtggtcccatcattcaggcctgtagctttcatttgaga

SEQ ID NO: 16862 - DNA, 201 bp, Homo sapiens
agttttctgtgataatgagatttgaactggaagaaatgctgttctttcagttaacagttgtgttttttccaagaaaaaaaagaaatacaaatgttaaaacttttttttttttttctggtgctaaagaacaatttcacctcctaagccaagaaggaaaaaattctcatctaaaccgccaggcttaaaggtggctccttgtca

SEQ ID NO: 16863 - DNA, 201 bp, Homo sapiens
gataagtgctggggctcctatggtgggtgtgctgcagtcttcagcagagcttggctacagaggagaaagatctaaactggaccaatttcatatggtcattkcctctggcttgtggctgatcatcttgttctttggaattgactgtctcatgaaatagtgagtttcttgtcaccagagagatttaagcaagagccatggaat

SEQ ID NO: 16864 - DNA, 201 bp, Homo sapiens
cccgtgtgatgatggctaagtgcgcagaacatgtgaaatttaagtagatttgtggaaacagaaacacatttttatttagtcgtgagcgtcacttggagtakaaatagagccctttatgattcgtgtgctggtctttcttcctggagggcttcagtattatctcatgctgtcatctttatgttgtattggaaaaatctggga

SEQ ID NO: 16865 - DNA, 201 bp, Homo sapiens
atgtgccagtcacctagggctgagaaaggggagcaagcagagagggagaagaggaagaagccaaatgagatggttcgtaattgattagtggaagttaaatmatgttaaggataggaggcttgtcccctccatcatgatttagtatatcatccttcccaagagaagttttgagaacttgtcctctggtatccaggaaatggc

SEQ ID NO: 16866 - DNA, 201 bp, Homo sapiens
gtgatgtaaccagggactgcaacttctagggaaaggggaaaaatcactgttggccccaccctctagcattggaagcttaacagggctttggcccacagcasatggaagtttgagctgtgttttgtaattcttttttaaatgttcgccagagcatccattattcttcctcattttctcttctcctcttccctccttttcttc

SEQ ID NO: 16867 - DNA, 201 bp, Homo sapiens
aggtctgcacgttggctggggaagctgttctccatgtctcttatctttctagaaccagttggctactggggcaggttcttctcatggtgatggcaaaaatkcaagaggggcatgcagaaacatgtgagacctcttaaggggtaggctcagaactggcactatcacttctgccctcattccattggccagagcaagtcatga

SEQ ID NO: 16868 - DNA, 201 bp, Homo sapiens
ggcagctgataagtaatgcagtctagcctgtaatcccagcactttgggaggccaaggcaggtggatcatgaggtcaagagattgagaccatcctggccaaygcgatgaaaccccatctctactaaaaatacaaaatttatctgggcatggtggcatgtatctgtagtcccagctactcgggaggctgagtcaggagaattg

SEQ ID NO: 16869 - DNA, 201 bp, Homo sapiens
cttttagttgggttcagtcagaggggagcactggaaaaagagggtggaagagtggccagccatagtgaccatggctctctacggaaggccatagcttctgycaggtggttagttctaataacttaggggttccagtgaccactccccaccttgctccttccgacctagggcattaatggctccctgctttgccacaggggt

SEQ ID NO: 16870 - DNA, 201 bp, Homo sapiens
tgcccgttgggacaattagggagggattctttcaagtacaacattttctctagcaattatgggggttttatctcccagatgtgatttatgccatattacaytccaagaagggaacatgaagaatgtttgtggctaaaaaagtctcaacacaaggaaactacaggtgaaacgtaacaatagtaattgccttactttatttgc

SEQ ID NO: 16871 - DNA, 201 bp, Homo sapiens
ttgggcctgggaatctgttttcaacgtgtatcctgagtcatatttgggaagcactgggctctgcttatgattctcacgttctggtctgtgactgaggagaygtgccatgatgagagtgatgatggtgatggtggcagacaagagcatgtcacatttagaaatactgtaactggttgctgaggttttacatatattccttct

SEQ ID NO: 16872 - DNA, 201 bp, Homo sapiens
tatgttacgctttttttttcagcatttcacaatattcactaaagcattttataagcaagtgagttgtaggagctaaatatgatcaatttttaaaaactactttttttttttttttttttgagatggaatcttgctcttttgccagactggagtgcagtggtgtgatctcggctcactgcaatttctgcctcccgggttcca

SEQ ID NO: 16873 - DNA, 201 bp, Homo sapiens
ggagtgcagtggtgtgatctcggctcactgcaatttctgcctcccgggttccagccattctcctgcctcagcctcctaagtagctgggactacaggtgtgyaccaccacacccagctgatttttgtatttttagtagagacagggtttcaccatgttggccaggatggtctcaatctcttgatctcatgatccacccgcct

SEQ ID NO: 16874 - DNA, 201 bp, Homo sapiens
caaggactgcaggaggggtgtgctttccatccactttctatattctaaaaattaccgctggattaagcccagtcaagagagaaccaagtatctgtatggtycaagtatcgctggccacacacacagtatcttttacagaatcgcatgtgctgtgatgccatctccctgtgcagggtgggttggtaggtgggggaaaggggc

SEQ ID NO: 16875 - DNA, 201 bp, Homo sapiens
cacacacagtatcttttacagaatcgcatgtgctgtgatgccatctccctgtgcagggtgggttggtaggtgggggaaaggggcttccttggggatttgayctgtggaactcatctctgtggtaactgaaaagatgtaattggcaactggctcattacattacacagatttctctcactcaggacccatgcgagaaatttc

SEQ ID NO: 16876 - DNA, 201 bp, Homo sapiens
tgccatctccctgtgcagggtgggttggtaggtgggggaaaggggcttccttggggatttgatctgtggaactcatctctgtggtaactgaaaagatgtarttggcaactggctcattacattacacagatttctctcactcaggacccatgcgagaaatttccttccagcctcatttaagctatttccagacttagaaat

SEQ ID NO: 16877 - DNA, 201 bp, Homo sapiens
atttgttggtggctactctgctggctggcgtgtgctgtccagccagagcacagggtattatggccagcaactgggtttcctcaggggcaggcccagtgcaycgtgttgcctgccgggcaaggaaccagcaaagcctcactacagagtgacaattcctggggtgccctgtgggagcagtgagagggagctcctggggccggg

SEQ ID NO: 16878 - DNA, 201 bp, Homo sapiens
  misc_feature (101)..(101): n is a, c, g, or t
caggcccagtgcaccgtgttgcctgccgggcaaggaaccagcaaagcctcactacagagtgacaattcctggggtgccctgtgggagcagtgagagggagntcctggggccggggggtgctgcatggttaaaaaggagcataaggaagaatagataaccactgcatcacaccagggtcaccattcacactgggttccatgt

SEQ ID NO: 16879 - DNA, 201 bp, Homo sapiens
gggataagtgctggggctcctatggtgggtgtgctgcagtcttcagcagagcttggctacagaggagaaagatctaaactggaccaatttcatatggtcawtgcctctggcttgtggctgatcatcttgttctttggaattgactgtctcatgaaatagtgagtttcttgtcaccagagagatttaagcaagagccatgga

SEQ ID NO: 16880 - DNA, 201 bp, Homo sapiens
aggacagtcatgacctacacctggctaaatccagtagtcatttttcagtcttctttctggacccgtcagcatctattagtacaaataacgactacttctgttattattattattattattattattattattattattattatactttaagttctagggtacatgtgcacaacgtgcaggtttgttacataggtatacatg

SEQ ID NO: 16881 - DNA, 201 bp, Homo sapiens
tgaagcacatttcttatgtcaggttcccagtttcctcttctgtaaaatggaggcagcatgggattgtaatgaggattaatggagctcatttacctgaacgscccagagggtgcttagcaaatactttatgcttcttgtgggtccattactttcccttgcctgtttttttagggaccctggagtgttaccttggcttctgat

SEQ ID NO: 16882 - DNA, 201 bp, Homo sapiens
ggacagtcatgacctacacctggctaaatccagtagtcatttttcagtcttctttctggacccgtcagcatctattagtacaaataacgactacttctgttattattattattattattattattattattattattattatactttaagttctagggtacatgtgcacaacgtgcaggtttgttacataggtatacatgt

SEQ ID NO: 16883 - DNA, 201 bp, Homo sapiens
gtgaagcacatttcttatgtcaggttcccagtttcctcttctgtaaaatggaggcagcatgggattgtaatgaggattaatggagctcatttacctgaacsccccagagggtgcttagcaaatactttatgcttcttgtgggtccattactttcccttgcctgtttttttagggaccctggagtgttaccttggcttctga

SEQ ID NO: 16884 - DNA, 201 bp, Homo sapiens
gacagtcatgacctacacctggctaaatccagtagtcatttttcagtcttctttctggacccgtcagcatctattagtacaaataacgactacttctgttattattattattattattattattattattattattattatactttaagttctagggtacatgtgcacaacgtgcaggtttgttacataggtatacatgtg

SEQ ID NO: 16885 - DNA, 201 bp, Homo sapiens
atcttcctgctatcagtgaaaaagggagagggatcagctcttgtttcttggctttgctctttacagcctcttagaaacttgagttctatctggattcatcstgtcatttgatggtacaggagtacaaatggaggtccacttagcgaatatctaaatatttaaagattacaaatcaaggtaactgttcagtaaactgtgttc

SEQ ID NO: 16886 - DNA, 201 bp, Homo sapiens
agcctcatgctgtcctcaggccaccctagccccctgttctcctggctggctttatcccgctgagcagtgggacagaggacaggaagatgagaggaagataktccagagctgggtggagagtcagggtggagtagagctgtgtgagggtgtgcatgagggagccaacaggaaggagggctgggttcttgttctctgaccaat

SEQ ID NO: 16887 - DNA, 201 bp, Homo sapiens
aatgtccctggaatttatttgctggagcattttccattttcatattcagtttagaccttggctgaagtagggaggttatgtaactgggatggaacaaatcycattggcatctggggaccctagtgtaccccacccttagccattcctgcagtggactgagtgcccccctggctgtatattcaagtcgcctctgtggctgcc

SEQ ID NO: 16888 - DNA, 201 bp, Homo sapiens
aaattcatagatgctcaagtccctgatataaggtggcatcgtatttgtatataacctacatatatcctcctgtatactttaaattatctctagattacttrtaatacctacaacaatgtcaatgctatgtaaatagttgttatactgtattttgggttttttgttgtattgttatttttattgtttttttcctgaatattt

SEQ ID NO: 16889 - DNA, 201 bp, Homo sapiens
gctcaagtccctgatataaggtggcatcgtatttgtatataacctacatatatcctcctgtatactttaaattatctctagattacttataatacctacarcaatgtcaatgctatgtaaatagttgttatactgtattttgggttttttgttgtattgttatttttattgtttttttcctgaatatttttgatctgtggt

SEQ ID NO: 16890 - DNA, 201 bp, Homo sapiens
agccagctgagggtgacaccttgggctgcagccacaggccactttgccactgggctcacccacgctgctgctgccacacgtggggccaagggtgacaaggytgccagggagcctgggatcggagttccagggccatctgagctctgggtcagcagcagtcattggagcagggatctggggaggcttttcacgtgggggttg

SEQ ID NO: 16891 - DNA, 201 bp, Homo sapiens
gcataacagaggtgaagggcacagacttgggagccccatggccaggatttgaatctgaactcttaggcaggtccctgaactgctcagccctcagtttcccrtctgtaaatggtgataacagtaccttcctaaggtcattatgaggactaaatgagtaaacattgatacagtgctaacaacgcttaatagagtacttacaac

SEQ ID NO: 16892 - DNA, 201 bp, Homo sapiens
ttttgtttttgtttttgtttttttttgactttgagacaggatctcactctgacacccaggcgggagtgcagtggtacagtctccgctcactgcagcctcarcagcccaggcccaagtgatcctcccacctcagctttccaggtagctgggcagtgtcagcagctctcctatggccagctccaccaccaggtcagacagtac

SEQ ID NO: 16893 - DNA, 201 bp, Homo sapiens
cagctagctgttggttatctagactggcattggctggggtgactggggcaactcagcaccgctccatgcatatctcactgtccaacaggccagcctgggcrtattcacgtggagactgagaagcacgagaaggcagaattgggcccttgataagatcatcctaacacagaggcagatgtagatttgaaccctatttgcaac

SEQ ID NO: 16894 - DNA, 201 bp, Homo sapiens
atgggaggagctactgtatcatcttttcatgacacatatgtagggacaggtagaacattgtggtcatatgcagtggactgagcccatgggctttggagtcmcatggggctctcaagccatgattctttacttaaccttcatctataaaatgaaaacactgatagaatctatctcacaagatcattttgaggtaaatgcaca

SEQ ID NO: 16895 - DNA, 201 bp, Homo sapiens
cctttttatggctacatagtattccatggtgtatatgtgccacattttcttaatctagtctattattgatggacatttgggttggttccaagtttttgctrttggaaatagtgctgcaataaacatacgtgtgcatgttctttatagcagcatgatttataatcctttgggtatacacccaataatgggatggctgggtca

SEQ ID NO: 16896 - DNA, 201 bp, Homo sapiens
acaatggttgaactagttgacagtcccaccaacagtgtaaaagcattcctatttctccacatcctctccagcatctgtggtttcctgactttttaatgatygccattctaactggtgtgagatgatatcttattgtggttttgatttgcatttctctgatggccagtgatgatgagcattttttcatgtgtcttttggctg

SEQ ID NO: 16897 - DNA, 201 bp, Homo sapiens
atgtcctgaatgatattgcctaggttttcttctagggtttttatggttttaggtctaacatctaagtttttaatctatcttgaattaatttttgtataagrtgtaaggaagagatcccgttttccatcatatgaatatgccacaatatgttttctccattatcctgatgatggacattgaagttgtttctggttttatctt

SEQ ID NO: 16898 - DNA, 201 bp, Homo sapiens
acaggacagctccccacacaacaaggaattatccaacaatgcacaggacagctctccacacaacaaagaattatccaacaatgcacaggacagctccccayacaacaaagaattatccagccccaatgccaacagcattgaggctgagaaaccctggattatccctttttacacatgagatgagggtcttacaggtcttct

SEQ ID NO: 16899 - DNA, 201 bp, Homo sapiens
gctccccacacaacaaggaattatccaacaatgcacaggacagctctccacacaacaaagaattatccaacaatgcacaggacagctccccatacaacaargaattatccagccccaatgccaacagcattgaggctgagaaaccctggattatccctttttacacatgagatgagggtcttacaggtcttctaagtggtg

SEQ ID NO: 16900 - DNA, 201 bp, Homo sapiens
aagcatgggaagtaatcagtaaatggccaatttatctctccctcacagccaagccaactcctaacataattggaagtttaatatattccaacaagttcagracaagcatactagatcttaaggcaatctcatggccctgcagctcatcctttttttcaaagaaattaattttcaaaaaatgactctattgagattgaattt

SEQ ID NO: 16901 - DNA, 201 bp, Homo sapiens
ggtaggcacccatgttggagccagccatggtctgcagagttcatttctctgagtccctgccccagaggcacatgacataggaggctccagacaactgactyaaagacagagaggaccataataccagggttcctcagtcctcaccagcataagaatcccagagaaggcattttttttctcacatactctaggtctcaatct

SEQ ID NO: 16902 - DNA, 201 bp, Homo sapiens
ggaggctccagacaactgactcaaagacagagaggaccataataccagggttcctcagtcctcaccagcataagaatcccagagaaggcattttttttctyacatactctaggtctcaatctcttaacttcaaaaatggcagtggctacattagctcttgggaccagtgtttcaaaggctagtgtagaacacttgcctcag

SEQ ID NO: 16903 - DNA, 201 bp, Homo sapiens
agaggaccataataccagggttcctcagtcctcaccagcataagaatcccagagaaggcattttttttctcacatactctaggtctcaatctcttaacttyaaaaatggcagtggctacattagctcttgggaccagtgtttcaaaggctagtgtagaacacttgcctcagatgattcaagatccaggtttcctgactctg

SEQ ID NO: 16904 - DNA, 201 bp, Homo sapiens
gaatttcaatgcagtttcacttttgagggtttttaacttgattgtccatcagaaccacctggggagctttcagcaaatgcatgccgacgccacatgcattrattctgcggccacacagaggggcctgcatctgggtcttttttacaaagcttttcataggattgtcatcgtcacctttccagcactgttatgcaaattgga

SEQ ID NO: 16905 - DNA, 201 bp, Homo sapiens
gtagggacaggtagaacattgtggtcatatgcagtggactgagcccatgggctttggagtcacatggggctctcaagccatgattctttacttaaccttcrtctataaaatgaaaacactgatagaatctatctcacaagatcattttgaggtaaatgcacatgtacctaatgcatagtaaattctcagtagaaaataaca

SEQ ID NO: 16906 - DNA, 201 bp, Homo sapiens
atggggctctcaagccatgattctttacttaaccttcatctataaaatgaaaacactgatagaatctatctcacaagatcattttgaggtaaatgcacatrtacctaatgcatagtaaattctcagtagaaaataacattttatgtattttgcatgtttctcataaactgattgtgcattctaattatttagtttggaaaa

SEQ ID NO: 16907 - DNA, 201 bp, Homo sapiens
cactgatagaatctatctcacaagatcattttgaggtaaatgcacatgtacctaatgcatagtaaattctcagtagaaaataacattttatgtattttgcrtgtttctcataaactgattgtgcattctaattatttagtttggaaaatgtagtctctgtaggtttacccttccctgaggcagtaggggagatcatcacct

SEQ ID NO: 16908 - DNA, 201 bp, Homo sapiens
gatcattttgaggtaaatgcacatgtacctaatgcatagtaaattctcagtagaaaataacattttatgtattttgcatgtttctcataaactgattgtgyattctaattatttagtttggaaaatgtagtctctgtaggtttacccttccctgaggcagtaggggagatcatcacctctgtaatggtataatatgaactc

SEQ ID NO: 16909 - DNA, 201 bp, Homo sapiens
gtaaagcagtaaggaatgcatagtcagctatactggaaatttgggaaagggaaatggactatgtgggaaagcgggactcttatccttgcagaagtcactaygaaatgaggctttcagtaaacagaagatgggcatttcatcctttctcattactgagccttcctcaagacctccttaacatcctaacattataaatacaat

SEQ ID NO: 16910 - DNA, 201 bp, Homo sapiens
cattcttccaagcaggcccggagaaggaatgggctccacgatgcagggcccgcggtagagaacagccaggcagagcagggggcctggctggatgtggccascatctgcaggggttcagcattgagatatgacactgtcacctccatctcaagaagcccttacggatgcctcccttcccttcatgactcactgtgatctaca

SEQ ID NO: 16911 - DNA, 201 bp, Homo sapiens
atgatctccagaagcaacttacatgtagacatttttctgagaattccagaaagaatattgataattttcagacaccatggcttccacgcctcatcaacatragcagtattaggctttatctctgacatcaatcaaacttgaacaccatcagcatgggctttaatgaaattctcacatatgtatcagaacttgtattttttc

SEQ ID NO: 16912 - DNA, 201 bp, Homo sapiens
agcaacttacatgtagacatttttctgagaattccagaaagaatattgataattttcagacaccatggcttccacgcctcatcaacataagcagtattagkctttatctctgacatcaatcaaacttgaacaccatcagcatgggctttaatgaaattctcacatatgtatcagaacttgtattttttcctttagtcagtg

SEQ ID NO: 16913 - DNA, 201 bp, Homo sapiens
agtttttttaatttttattttttgcatttcttgatcatttcaaagtgaggtcagttacagagtgaatgggttcatcctgtcattgtaaataacagtttttygtttaataatggcattttgtattaccaagaccttgcttcacattaggtgttttgtatacattatctcatttaatcaaaaccagcactctatatcatgggt

SEQ ID NO: 16914 - DNA, 201 bp, Homo sapiens
ccccaccccaggccccgtctgatctattcttacatcacaactaaaaatattcttaaaaatgtgaatcagatggtatgactcccctgctcagaaccctccaktgccttccctctgtacttggaaccaagtccaaactcctgatgagcagcagggctccgcatggcctggcctttcatctgttgcttcccaaacgtgtggcct

SEQ ID NO: 16915 - DNA, 201 bp, Homo sapiens
agctcttcagtgagttagtaaacaaagtggttctcaaaatgtaaaattcttccttgactcactaagcaaccttctgattgcaactgctttccctttttggsctccaagacaggaattctctggccctgctgacaggagccccatgttgcacagggcaactatgtcactcattggaaattaacatgtctgccctctgacttc

SEQ ID NO: 16916 - DNA, 201 bp, Homo sapiens
tgggcaagtgatataacttcacattccagtttcctcctcataaaaatggaaataaagagaaggtgtacatagagtttttagataatggatttaaaacactrcctggcacacagtaaaccattactaagtagaggctatgtactccatcctacacgcatcagcagtggcagtccagcaatactcctataaggcacatgttat

SEQ ID NO: 16917 - DNA, 201 bp, Homo sapiens
attcttccaaccactgcacgttacaaacagggctgtagcctgggtctactggccaagcttccggggctgggacaggcaaggtatgtctggatgagagaagktctttgccaagacaagcatctcttgtgccaggcagaccagcaaatgagctgcttcttgcagccccttctttggcatctcccataagccaaggcctattca

SEQ ID NO: 16918 - DNA, 201 bp, Homo sapiens
ccaaccactgcacgttacaaacagggctgtagcctgggtctactggccaagcttccggggctgggacaggcaaggtatgtctggatgagagaaggtctttsccaagacaagcatctcttgtgccaggcagaccagcaaatgagctgcttcttgcagccccttctttggcatctcccataagccaaggcctattcatttaat

SEQ ID NO: 16919 - DNA, 201 bp, Homo sapiens
tagatgagctccgggccccttgtgtggcatgcactgtgcttagcactgggacacagacagacacagacttctcactccgactgtgggctcctccaggagcrggtttacaacgtatttcataaagcactttaaaataggagttcttcctgtccctaatagtattattcatcacttcattcttggcctgggaacagcctgtgg

SEQ ID NO: 16920 - DNA, 201 bp, Homo sapiens
attgtttaccctggtgatgatgtggctgacgaggtgctacagctcgctgcgctggccagcatcttgagagtattgtacagctttctaccactttccactgratacctattgtttttacaccatcagaaagttgaaaaatcttaagtagaaccatcataagtcagggactatctgtatggtagtagaaatttttaattgaat

SEQ ID NO: 16921 - DNA, 201 bp, Homo sapiens
ctagatgagctccgggccccttgtgtggcatgcactgtgcttagcactgggacacagacagacacagacttctcactccgactgtgggctcctccaggagmaggtttacaacgtatttcataaagcactttaaaataggagttcttcctgtccctaatagtattattcatcacttcattcttggcctgggaacagcctgtg

SEQ ID NO: 16922 - DNA, 201 bp, Homo sapiens
atctttacttcaagaacagacctttgacttaaaattaaagcttctctcctggtttgaaaggaattcccagtgaggtattgggcattacaagagaaactggraacagagttaggtaagcatgtaatatatgtatatgtgtatgtgtgagatacacacacacacatacacttatatatatttgcttatcctgggacactcttg

SEQ ID NO: 16923 - DNA, 201 bp, Homo sapiens
cctaccgtctgagcactgctctgaaggactcgattgccccgtggagcctgctcccacacacctgccttttgtgcagccggcccatctgttggtgctttttytttcaggaggagatgggcatctcctgtgagctgctggaatcggacttcctcaaatgcagcgtgggatttcctttcatgaggtcaaagtcaaaggtaaggg

SEQ ID NO: 16924 - DNA, 201 bp, Homo sapiens
ccttgggtgctcacagttttctgaagagaactctcaaaattctcaaaacataaatacctgtatcccacttcatttttaagaagagtaaagaaattaagtcmctttggtattggtatggagacagattttctaagttcaaatagtatactacagcatcttcagacattcatggaacattgtagtatgtgccatcattataag

SEQ ID NO: 16925 - DNA, 201 bp, Homo sapiens
caagagatagtgggacctgctcaaggtttcatccaggaggccagggagaaagggccaacctcagtatctaagggttaagggtgtgcaagagagtgcaatcwgtattgcatttcagcagatcagccaagctgcaggataggtgacagatatgaaacgataaatgtggaggcagggagaccaggtaagaagtctgcggtggtc

SEQ ID NO: 16926 - DNA, 201 bp, Homo sapiens
gctccccacacaacaaggaattatccaacaatgcacaggacagctccccacacaacaaggaattatccaacaatgcacaggacagctctccacacaacaargaattatccaacaatgcacaggacagctccccatacaacaaagaattatccagccccaatgccaacagcattgaggctgagaaaccctggattatccctt

SEQ ID NO: 16927 - DNA, 201 bp, Homo sapiens
gttacagagtgaatgggttcatcctgtcattgtaaataacagtttttcgtttaataatggcattttgtattaccaagaccttgcttcacattaggtgtttygtatacattatctcatttaatcaaaaccagcactctatatcatgggtgccaccattcctctgatttttgctaaggaggaaactgaggttcaaaaagggta

SEQ ID NO: 16928 - DNA, 201 bp, Homo sapiens
gaactgtggggtgaaaatattccaaaaaaatggatggttgcatctgtactgaacatatacagacttttttcaatatttcctaaacaataaagtatagcaaygatttacatattatttacattgtattgggtattataagtaatctagagattaaagtatataggaggatgtgtgtatgttatatgcaaattctacaccatt

SEQ ID NO: 16929 - DNA, 201 bp, Homo sapiens
ggaggatgtgtgtatgttatatgcaaattctacaccattttacatcaaggacttgtgtgttcttggggtttggtgtcagggtggtcctggaaccagttccycatggacattgaggaatgactgtgcttcccctacccaacagaagtggttctcccgtcaggttataatagggaagggatgtgtgatctttcctgagaactg

SEQ ID NO: 16930 - DNA, 201 bp, Homo sapiens
ttacatcaaggacttgtgtgttcttggggtttggtgtcagggtggtcctggaaccagttccccatggacattgaggaatgactgtgcttcccctacccaayagaagtggttctcccgtcaggttataatagggaagggatgtgtgatctttcctgagaactgaggcatgctattaagctttaaatggagcatctctaagtt

SEQ ID NO: 16931 - DNA, 201 bp, Homo sapiens
taatcagacaaagggccatgtggcaagagctcttgcttcaccaaacacgtagtgatggacccccctatacccagtgtgccagacatcatcatgagatgtamctcctttcacatatctcttcccttgccagaggaaggaactgaggctcagaaaggttcaattcctcacccaaaggtttccaacccaaggtttctgacctgg

SEQ ID NO: 16932 - DNA, 201 bp, Homo sapiens
ttgaattatgattcacctttactgaatgtcccttctcttttctttactcactgtcgaacaggaacccaaaggatgtagtttttggcagatgtcctttgtarggttcagtatttctcactcacccctttaagaccctaaagggagagttattaatagtttcagaaagttgagggaaatcatgcagaggttctcagatgttca

SEQ ID NO: 16933 - DNA, 201 bp, Homo sapiens
caaatgcccatggtttggaggcaggaatggtgttccaagagtagtagggagcctcgggactagagtttggaggatgagcggggagagtgggaggagatagygggaaagtctgtggagccagttccctgaggggcctggtgggccatgctcagtgggggtttcatttgacgagccatgggaaggcttccagcaatgggggat

SEQ ID NO: 16934 - DNA, 201 bp, Homo sapiens
atgggggatgtggttttacttgtaccttaagaagatcacactgggtcttgtttggagaatggacaggaaaggagcaggagagcaagcagagagtctgaggkgcaagaaatgccctgtcctcccagcagactggagcgaattctaattctgcctctgctacttcattcctatgcaactttgggcaggtttcctaatctctct

SEQ ID NO: 16935 - DNA, 201 bp, Homo sapiens
aactgaaaaatgttcactggaacggagctgcaatggtggaaacgttctgtgtgtgccctgttcagtacagcagccactgcgcggctgctgagcccttgaawtgtggctatcagggtagaagaactgatttttaatatattgaattatgagtcatttaaatttaaagagcacagctgtattggacagcacagctgtagaagg

SEQ ID NO: 16936 - DNA, 201 bp, Homo sapiens
ggtgcaatagagtgatcatagttcactgtaacctcgaactccaggtctcaagggatcctcctgcctcagtctcctgagtaactggatctatacacatgtgyccccgtacctggctaatgtggcttcctttatgttcagcaaggaactctcagtgtttgtccatttccttaggaacatgagtgtttttggaaggcctttgat

SEQ ID NO: 16937 - DNA, 201 bp, Homo sapiens
actctcaaaattctcaaaacataaatacctgtatcccacttcatttttaagaagagtaaagaaattaagtcactttggtattggtatggagacagattttytaagttcaaatagtatactacagcatcttcagacattcatggaacattgtagtatgtgccatcattataaggagatacaaacataggtaaaaagatgtgg

SEQ ID NO: 16938 - DNA, 201 bp, Homo sapiens
tgcagtgctaaatgctgggcacatgagaaaatgacagtaacctactaaattcaagaacaccccctatgtacattaacagtgctgcatagcttcaggaagcmctaggatctgtagcttcaataatataaaaatttctagtttcttaaatcacaaatgttaagatgaccatattatcttctaagcacacaccagaatatttca

SEQ ID NO: 16939 - DNA, 201 bp, Homo sapiens
cattaacagtgctgcatagcttcaggaagccctaggatctgtagcttcaataatataaaaatttctagtttcttaaatcacaaatgttaagatgaccatawtatcttctaagcacacaccagaatatttcagatgctcatttcttttcaggcattggtgaagatatggtctgactgccccggagggcacccacacacagcg

SEQ ID NO: 16940 - DNA, 201 bp, Homo sapiens
tgctgcatagcttcaggaagccctaggatctgtagcttcaataatataaaaatttctagtttcttaaatcacaaatgttaagatgaccatattatcttctragcacacaccagaatatttcagatgctcatttcttttcaggcattggtgaagatatggtctgactgccccggagggcacccacacacagcgcttgactcc

SEQ ID NO: 16941 - DNA, 201 bp, Homo sapiens
tcagctaggaagactgactctgcctcacagagtccccgcgagactgggccctggctgccgacagcacgaccctcctgtatggcatgcctttattgtctccyttcctttgctctctcccttctccactctccagtcctactggcatttcctggggccacctctcgaataaactacttacactcaaatctttgtgtggaacac

SEQ ID NO: 16942 - DNA, 201 bp, Homo sapiens
gagaaagggaaggatggggttagagcttgtttttgagacagtagagtgattgctgtgaacagcacctctgcatttctgaattgcttctcagagttattttmtttttctcctttgcttttcgtaattgggtaggaaatagataaagacctgatgggtttatttcatcttagttgtttctactctttcctactcttatagttt

SEQ ID NO: 16943 - DNA, 201 bp, Homo sapiens
attgaatttaacgcaggctttttattgcaggacttcatggagctttagaagcccaggcacgcaaggaggatgcactgtttggcatttcctaaatgtacttraccacggaacaccatttttctcctgaggtttaggaaatggtgctatgatatagattagttttctatgaataacttggctttatgccttcatatacctttt

SEQ ID NO: 16944 - DNA, 201 bp, Homo sapiens
gagacagtagagtgattgctgtgaacagcacctctgcatttctgaattgcttctcagagttattttatttttctcctttgcttttcgtaattgggtaggamatagataaagacctgatgggtttatttcatcttagttgtttctactctttcctactcttatagttttgggggtgtcttgcaattaaagatgtagttcaga

SEQ ID NO: 16945 - DNA, 201 bp, Homo sapiens
tcaaaatttaaagcatttccccacctgaaaaacaatggccaaaaataatgcagatattacacatgaacatttgcagagaatccagtataaagacatttgtkaaaaataaagatggtaatacaagctctcctgtcctcctggctctgatgagtgaaatagtgcaaatcagcatccttttcttcattgcttaccccattcatg

SEQ ID NO: 16946 - DNA, 201 bp, Homo sapiens
agcatccttttcttcattgcttaccccattcatgcttgaaatgggatttcccagacatgccaggatgtttctttttaattctgtgcactcatgtttcactkcaaattagttatttcagctatggtcagatattccttccttttctatgtcttcaggttgtttggtgaatattgttcttttttgaatcaggagttggcaacc

SEQ ID NO: 16947 - DNA, 201 bp, Homo sapiens
ggtcagatattccttccttttctatgtcttcaggttgtttggtgaatattgttcttttttgaatcaggagttggcaacccactcatctgctctatcagttkttatctatttattctttgaagtggaaccaactattgcagaaaaccaaagacacagttttctagggaagagctagctggagctagatcttcatacatcctg

SEQ ID NO: 16948 - DNA, 201 bp, Homo sapiens
cacttctctatcaccagcaaatctcccttttcaacaaagatggagtagaccttaggctcagaggcttccaaaggcaacagagttcagcattgctctgtttwcattgtgttcatttttacaactaccttctctttttggcaagtgatcctggattcccatctatgacagtgatataaattgttcttttaaaacaatctttaa

SEQ ID NO: 16949 - DNA, 201 bp, Homo sapiens
gccatctgtcacagtaatgagttgtgcaaagcccaatgaaccttgtagaaacaacatcgtgcccagaaatagcctagacctcagagtgacatcagggggcrgggacctgatagatgtggtcctgcaaaaggaccgaaggttcttctttaacaattcaaattgaataggaaccatttttaatttgggggtaactccgtcttc

SEQ ID NO: 16950 - DNA, 201 bp, Homo sapiens
tagaggatttttgttgttgttgtttctttgaggttttctctgaaacttcagattaaggtagtccttgaagtggaggctattaagacctagtgttatctgtytcagggaggtgggggactaggtggactgatggaccccagaactccagattccttgcactggaagctggtgttttgtgtttggaagagcctctgccctctg

SEQ ID NO: 16951 - DNA, 201 bp, Homo sapiens
ttaagtggtgtcatactctgatccttcttccactgaacatcacattcttcatgagaatcacaccattgtcctctgtctgccctgcctgtgagacgggccaygctctatgcttgcccgcctcttccatcaggaacactcacacagtcattctcctcacataccccactctcatctgctgcccctcacacctgcccttctata

SEQ ID NO: 16952 - DNA, 201 bp, Homo sapiens
tgagaatcacaccattgtcctctgtctgccctgcctgtgagacgggccatgctctatgcttgcccgcctcttccatcaggaacactcacacagtcattctyctcacataccccactctcatctgctgcccctcacacctgcccttctatagaatgttctaccctttaatagggaagggtttcttcttcctatgaattttta

SEQ ID NO: 16953 - DNA, 201 bp, Homo sapiens
gaggacagagagagaatgtcccttggatccaatatggtggccattagtgaccttgttaaaaccagtaggaatggggtggcaagaaggagagtagaacagaytataagaaagaatgagttttgatgaaagtattggaattttgatgaccttttttattacaggtttgggagcaactactttcttcactctctaaactgcaaa

SEQ ID NO: 16954 - DNA, 201 bp, Homo sapiens
tctcttcctcagatgtctagtgtttattagacctccatagtatcttcaccaactgagaaggtgccccatcagcctgaggaactcccagggtcacccctctmcaaggattcttgacacttgcacttctacccactctgggtcagaagctattcttccctcattggattgccaccattcttgtaagggcaccttctctgcacc

SEQ ID NO: 16955 - DNA, 201 bp, Homo sapiens
actttataaattacccagttttgggtatgtctttatcagcagcatgagaacagactaatacaccaattgaggttcctccagagaattaacaaaatgtccakgcactctttcgttgttcccccatacccacagacctgccatccctggccctgcctggatgccggtacctggccactgctgctatattccatgcttttggac

SEQ ID NO: 16956 - DNA, 201 bp, Homo sapiens
tgttttacctttgaagagaaaaaagcatcagtggggttatgtgattttcatagatgaacaatttttgcaaatatgttaattgaagagtaattggtgctttyttgaccctcctgagcactgatgcttgccaaagggttatacatttcagactaatgatgatatccattactatatgtgcaattgcttataaactaatatata

SEQ ID NO: 16957 - DNA, 201 bp, Homo sapiens
ccattactatatgtgcaattgcttataaactaatatatagtcatattaaaatctctaatctgattgagaaattttcagaaacaaggtacactgattttctyaccacttatttcctgctctcatgacagaatttctggagttctttgaattcacctggtttttggagctctgtcaagtcaatatttataactgaactagttc

SEQ ID NO: 16958 - DNA, 201 bp, Homo sapiens
gaggcagggagaattgttcgaatccaggaggtggaagttgcagtgagccgaggttggcccactgcactccagcctgggcgacagagcaagactctgtcttaaaaaaaaaaaaaaaaaaaagaaggaagccaaacagaaagatacctgggtccaactgaagcaccagcctgcaccacccagagaagcacactttgtgagaac

SEQ ID NO: 16959 - DNA, 201 bp, Homo sapiens
aggcagggagaattgttcgaatccaggaggtggaagttgcagtgagccgaggttggcccactgcactccagcctgggcgacagagcaagactctgtcttaaaaaaaaaaaaaaaaaaaagaaggaagccaaacagaaagatacctgggtccaactgaagcaccagcctgcaccacccagagaagcacactttgtgagaacc

SEQ ID NO: 16960 - DNA, 201 bp, Homo sapiens
agagatctactcactttttttattcctctgcatattctgtttcttcctcgagtttcatgttcagctttttcctctccctccttgctcttactggtctctgygacctccatctttttcctcatttctcaggaaatgattgacttctgaagacagaaaatggagaaatgctagggaaaacaagagaggcaaagttttatagaa

SEQ ID NO: 16961 - DNA, 201 bp, Homo sapiens
aggattgtgaaagcattgctctctataggggcacgtgaaggacattcagccaaagggacagtttttccatagatagcttgaaaatcagggcagcaaggccmatatggagcaggtgaatatctgagccgagagttgaagaggacacagcccacagggtggaggttcagaaaacattgtgtgatggtgacagtaatttctggc

SEQ ID NO: 16962 - DNA, 201 bp, Homo sapiens
aaatcaagggtcaatggcatgaactaagctgatcctggaaatcagggatgttgcatctaactgtgggatggaggcacagaggtagctacagggagcaggaygaggcaaagaaagcagctgtcactcagagttcgcttatgagttttatcaaaagcagcaagaaaagcagtcttgggtgggttttatcacttattaacagcc

SEQ ID NO: 16963 - DNA, 201 bp, Homo sapiens
ggattgtgaaagcattgctctctataggggcacgtgaaggacattcagccaaagggacagtttttccatagatagcttgaaaatcagggcagcaaggccchtatggagcaggtgaatatctgagccgagagttgaagaggacacagcccacagggtggaggttcagaaaacattgtgtgatggtgacagtaatttctggca

SEQ ID NO: 16964 - DNA, 201 bp, Homo sapiens
aaatattattaaccatgctgaccatgccacatttccccagcatctaggagtgttctcttcctagagcatgctttctgagttgttcacgtgaacatctacartgttgcaggagcctttttttttcctatgggcaaaatcatctattgaccaaaacaagacatttaagtcactcagattctgaaggtaccccaaaaccaggga

SEQ ID NO: 16965 - DNA, 201 bp, Homo sapiens
gagtccccagatacttgtttcagaggcccacagctggcacaccctctgccttaaagccctcggcaagggcctcctgtggctccgcccctcccttgctcagyagggcctgagaatgctcactgggtcaggtgtgattcagagctcatgacggtttccactttggccttatgggactttgaatggagcagggctttcattctg

SEQ ID NO: 16966 - DNA, 201 bp, Homo sapiens
aaactcccagccttggctcgtgatcttctttccttgtagctaatgtctctgagcccctctgctgtgcttgtatttaccttaaaaacagagccacggtggtsgcctgaggaaagactatcaattttcactgcttcccacccacgggggttgtgtggaccctactctgacttcccacagcacagaaaaaaaaggaaacaggtc

SEQ ID NO: 16967 - DNA, 201 bp, Homo sapiens
ctcccagccttggctcgtgatcttctttccttgtagctaatgtctctgagcccctctgctgtgcttgtatttaccttaaaaacagagccacggtggtggcytgaggaaagactatcaattttcactgcttcccacccacgggggttgtgtggaccctactctgacttcccacagcacagaaaaaaaaggaaacaggtcact

SEQ ID NO: 16968 - DNA, 201 bp, Homo sapiens
gaaacttggattttctgagaatgtattgcagaagaacaaaaaagccagttaaacttattcctttttttaaatagcaatctggaatgaaaatatcagatgakcataatataagagttagaagtcaagagagatggaaatgaaagcaagtcaagattcttgtcttggggggacaagtttatgtaccaattagctcaaggcttt

SEQ ID NO: 16969 - DNA, 201 bp, Homo sapiens
ctctccacacccttgggaccctcaaattgtttctccctctctaacagtgcccttggtgtctgtattgcctgtgatcatcatccatagagcataatgaggawgggcttactcgccctatgggccctgggctgtcaccctacctacggacccacgtgtggcacagttttctgacttggttcagaattcatttagaagtctctg

SEQ ID NO: 16970 - DNA, 201 bp, Homo sapiens
tctccacacccttgggaccctcaaattgtttctccctctctaacagtgcccttggtgtctgtattgcctgtgatcatcatccatagagcataatgaggatkggcttactcgccctatgggccctgggctgtcaccctacctacggacccacgtgtggcacagttttctgacttggttcagaattcatttagaagtctctgg

SEQ ID NO: 16971 - DNA, 201 bp, Homo sapiens
agccaagagctccagggctgaacagatgtgactgaaaatctttaccagccatgtgccctggggaactgagcctttcatttcccctttccttttctgtatawtggaggataacaagccttcactcacagggcgtgggtgtgtttctcatctccttgcagcacctagcacagtacctggcatctcatatgttcagggcatgtt

SEQ ID NO: 16972 - DNA, 201 bp, Homo sapiens
agaagggttagagttgacttttcaccattgtccccacccctacaggcttcaggcatgcagaatagcaagcagccaggcatcgccttctctaaagtgttaartaaactgtttaagatagtgtgggcgacctcgttctcagagaaaagaaagccttacttctggcatttgaagtcaccaacgtaagagctagctttctctccc

SEQ ID NO: 16973 - DNA, 201 bp, Homo sapiens
aaagaagggggagaaaattatgtaataatagaatagcatgtttcagagttaaagagggagactattttttaaaattggtgtaaacaacaatttacaatcamaataaaccaaaattatcatagacacatcattttgaaatgtcagtgcttcaaagacaaagggaaaattctaaatgtttcgagggcaaagaatgcaggaatg

SEQ ID NO: 16974 - DNA, 201 bp, Homo sapiens
ttccccatgttgcccaggctggtcttgaactcctaggctcaaggaatcctcctgcctcagcctccctaagtgctgggattacaggcatgagccaccgtgcrtggccttagctgcctatttgattccttcgtgacatctaacagaacgtgttatttcgtctacttgttattgtatttacctctctagaatggaagcccagtg

SEQ ID NO: 16975 - DNA, 201 bp, Homo sapiens
atcaatgtggcaaaactgcacttgtatcccatgaatatataccatgtttttaaaaatgttgcctttgggcagaggggataattctgcaaactgcagagccrtggagtaaaaaaaacacccaagatagcagaacttgtcatttctagtttttccacaggaccataaagcaaaattggtgccgggtttgtatttaaagggaaa

SEQ ID NO: 16976 - DNA, 201 bp, Homo sapiens
cctggccttggtgaccatggcactgtaagagaagcacagccagccccagcgtccttactctgactcagaggaaaatgcaacttgagctggattcattgaawtcttttttttcctggcctgaaggaaatgaagaaacatagccaaatattctaaaacaggattcaacaaacagcccataggccaaatccaccactgcctgtt

SEQ ID NO: 16977 - DNA, 201 bp, Homo sapiens
tcaaggctgcagtgagccatgttcacaccactgtactcaagccaggatgacagatcctgtctcaaaaaaacaaaaacaaaacaaaaaaatcttttcaattktattcacacaaagataaaatctgaataaaatatgcatgaggttaaaaaaaaagtccaactagactatcttagaaaaaaatgtaaaagtagacaaagacct

SEQ ID NO: 16978 - DNA, 201 bp, Homo sapiens
ttcacaccactgtactcaagccaggatgacagatcctgtctcaaaaaaacaaaaacaaaacaaaaaaatcttttcaattgtattcacacaaagataaaatytgaataaaatatgcatgaggttaaaaaaaaagtccaactagactatcttagaaaaaaatgtaaaagtagacaaagacctatatcttaaaaaaaatcaccg

SEQ ID NO: 16979 - DNA, 201 bp, Homo sapiens
aacatgtttctaatgtcacacaacctccagctctaggacaaataatgttggaccccaagcattctttttgcaaatatgagggctagactgaagcctcattkgaccacaggtcctatgggactggtggagatatagtgcccggagcctggcccttagggaacattcgagcagttagaaagcagaagtgacaggactttggag

SEQ ID NO: 16980 - DNA, 201 bp, Homo sapiens
aacaaaaacaaaacaaaaaaatcttttcaattgtattcacacaaagataaaatctgaataaaatatgcatgaggttaaaaaaaaagtccaactagactatyttagaaaaaaatgtaaaagtagacaaagacctatatcttaaaaaaaatcaccgacccagatagctatataggcagattctagtaggctttcaaggaatgg

SEQ ID NO: 16981 - DNA, 201 bp, Homo sapiens
ctcttctcctctttctccagggaagaatcggggcacgtcctgcggaaagacctgccgggaagaccgcgatgatgagtggatgggggtgagcctggcccgamagcccaaggctgatggccgtgtgttggtaagtccctcctgggggtgctgtgggaagggggtggcactctgagaatgaatgatctgttaggaaggctggat

SEQ ID NO: 16982 - DNA, 201 bp, Homo sapiens
acaattctatgtttaattattttgagaaatgttcatattgttttccaagcagccactcgattttacgttcctaccaacagtgcacaagggtttcaatttcyccacattcttgacaattcttgtcttctgtttttttgatagttgccatcctaatagtcatgaagtgggaaaaaatagtttttaaaaagtaacagatggata

SEQ ID NO: 16983 - DNA, 201 bp, Homo sapiens
taactttctgtctcgttgatctgtctaatgttgacagtggggtgttaaagtctcccattatattgtgtgggagtctgagtctctttgtaggtcactaaggrcttgctttatgaatctgggtgctcctgtattgggtgcatatatatttaggatagttagctcttcttgttgaattgatccctttaccattatgtaatggcc

SEQ ID NO: 16984 - DNA, 201 bp, Homo sapiens
aaaaaagtccaactagactatcttagaaaaaaatgtaaaagtagacaaagacctatatcttaaaaaaaatcaccgacccagatagctatataggcagattytagtaggctttcaaggaatggataattcttatgttaatataagctgttccagagagtagaaaaagataaagcaactcattccagaaaactaacatagccc

SEQ ID NO: 16985 - DNA, 201 bp, Homo sapiens
tgacaattctatgtttaattattttgagaaatgttcatattgttttccaagcagccactcgattttacgttcctaccaacagtgcacaagggtttcaattyctccacattcttgacaattcttgtcttctgtttttttgatagttgccatcctaatagtcatgaagtgggaaaaaatagtttttaaaaagtaacagatgga

SEQ ID NO: 16986 - DNA, 201 bp, Homo sapiens
atatatatacccacacacacacacacacacacacatatacccacatacatatatatgcatacatgcaatatatattttgccagcagaaacatcagaggctrcacactccaggaaaaacagactccagagactatgtctaggcaagtcactaaacaaacaaaacaaaaaaaaagtaacaactacccctcaatgggaggggta

SEQ ID NO: 16987 - DNA, 201 bp, Homo sapiens
cccaggaggcggaggttgcggtgagccgagatcacaccactgcacttcagcctgggcaaaagagtgagactctgtctcaatttaattaaaaaaaaaaaaaagcaaaacacctgaaatgaacaattcattagaggggctcaatagcatatttgagctgacacagaatcagtgaacttgaagctggattacagtacagatttt

SEQ ID NO: 16988 - DNA, 201 bp, Homo sapiens
attcgcagcccctctcctgtaaaactcatgaataatccactccttttttagcatttaatcaagaaataaccattaaaataggcaagcagcagcccttgggyctgtgttacctatggggtaaccaccttttatttctttactttcttaataaacttgctttcactttactctctgggcttcctcttgaattctttcctttag

SEQ ID NO: 16989 - DNA, 201 bp, Homo sapiens
ttcgcagcccctctcctgtaaaactcatgaataatccactccttttttagcatttaatcaagaaataaccattaaaataggcaagcagcagcccttggggktgtgttacctatggggtaaccaccttttatttctttactttcttaataaacttgctttcactttactctctgggcttcctcttgaattctttcctttagg

SEQ ID NO: 16990 - DNA, 201 bp, Homo sapiens
ttactatctgagaactttagtcctaataatttctctacaccaacttctagtcctaataatttatccgtataatgctcagaaacactccgagattctcagtaaaaaaaaaaaaaaaaaaaaaaaaaaatcaaggaaatcttaatggccaaagccataggtccaaaacccggcgttccctcccacccaactttccaggccatt

SEQ ID NO: 16991 - DNA, 201 bp, Homo sapiens
ctgaagctagcagggactgtccaaagccagagcccctcatattagcctagcttatgttgttgtgatcatcagactgtttctgttttttggatttttgtccwtaaataaacaccttggaaccactagctacacagaggggtaaatatcagaaaatccaaatttggtgcactaatgaacacggggtctcttttcacaaagcaa

SEQ ID NO: 16992 - DNA, 201 bp, Homo sapiens
atggtattgactgttatggcatgcatggaaacagacctggacatgaaaggataagcttcaagccaggtgcatgagggctcccagctgacttttgggtgcamacaggatgcaacagcttgccacagagtgatagaggaggccatgctaggagagaagggagaacaagcagggcaggcaccctggcccgactcttacacacag

SEQ ID NO: 16993 - DNA, 201 bp, Homo sapiens
ctttggcctgtgctttggattatttatttatttattttttgagacaagtctcgctctgtcacccaggctggagtgcagtgccacaatctcggctcactgcracctccacctcctgagttcaagtgatcctcccacctcatcctcccgagtagctgggactacaggtgtgcacctggctaatttttgtattttttggtagag

SEQ ID NO: 16994 - DNA, 201 bp, Homo sapiens
aaagaagtagagtaaggatttagtgagaagctggagaaaatattttcaaagacaactgtattctccagggaaacctgagatgaagaccaaggtgaggaagragccagcagagaaatcgagtccatgaggctgaggaggccactggatgtccagtcttcagctctctgaagcctgagacaggaaacagttgtctcccgagag

SEQ ID NO: 16995 - DNA, 201 bp, Homo sapiens
gatttagtgagaagctggagaaaatattttcaaagacaactgtattctccagggaaacctgagatgaagaccaaggtgaggaaggagccagcagagaaatygagtccatgaggctgaggaggccactggatgtccagtcttcagctctctgaagcctgagacaggaaacagttgtctcccgagagaaaggtttgaacctcc

SEQ ID NO: 16996 - DNA, 201 bp, Homo sapiens
acctcctttaactagggaggaataagagatgatggcttcttagatctgtttacatttgctggaaaaacttcttccagggaaataactagacagggctttgrccaactagcaggtgaagtctggagggaggtggaagagactgcttccaagctgggttccgatttgtctgattgaagcagccaagcttgtgtttgccagagg

SEQ ID NO: 16997 - DNA, 201 bp, Homo sapiens
aagcactggccacatctaaaatggttgaatagtgaaacctcatgttttcctttgtatttaaccacattcaaaggcttcttactcttgagagggaaaaagakcagcacccccaccgccccctgcccctactcttgaaataaaatgatggagaaagatttggagttaaaagaaaaccaagtcctcttgcgtgtggacaaagca

SEQ ID NO: 16998 - DNA, 201 bp, Homo sapiens
gagaaaaagagggacaaaagaacaagacacatagaaaatagtcaccaaaatggcaatagtaaatctgtctctatatttactttaaatgtaaaaagactaamcttcccaataaaaagatacagcatgactgaatagattattaaaaaaaacaacaacaaccaggatcaaactgtatgctgtctacaagaagctcacttttag

SEQ ID NO: 16999 - DNA, 201 bp, Homo sapiens
ttatatgacaattctatgtttaattattttgagaaatgttcatattgttttccaagcagccactcgattttacgttcctaccaacagtgcacaagggtttwaatttctccacattcttgacaattcttgtcttctgtttttttgatagttgccatcctaatagtcatgaagtgggaaaaaatagtttttaaaaagtaacag

SEQ ID NO: 17000 - DNA, 201 bp, Homo sapiens
actgtgccgcagacctgcagcttcagggtaaactgctgctctccaggtatgtcggtgtttccttcagagcattgttctcaggctcctttttcttgaccccrggtcccaaacctgaatgtgcagatttccccactgaagaggataaacagagttgatgggttacagtaatattctgtggttttaaaaaaatgtatgttacaa

SEQ ID NO: 17001 - DNA, 201 bp, Homo sapiens
aaattcaacacacagccaacttgccctccattgtgacgtcaaaataaagatatactcagatatatgagaattcataggctattacctcttccagtttggayttccccaaaagcataccctgatacaatgatacaggtacaggtagtttatttgggggtgggcgatctcagtgttgagtttagacaggaaagagaggaaaga

SEQ ID NO: 17002 - DNA, 201 bp, Homo sapiens
actgacatcaaatgcttgtatgattgggaggaaggagcccgaaggccaaagaggctcactaatttcattattcgattcttccaaccactgcacgttacaawcagggctgtagcctgggtctactggccaagcttccggggctgggacaggcaaggtatgtctggatgagagaaggtctttgccaagacaagcatctcttgt

SEQ ID NO: 17003 - DNA, 201 bp, Homo sapiens
agtgatagctggcatgagaaagccagggtgacagaggtgaggagggcacatgccagatctggcagcctgcatgtcaccagatggatttaggtcacatcctkttcttccgttctcacctctttcacctccatctccacctccacctctaccccttcacctctccatgcctcacaaagttggactgtcttgcctgtgagacag

SEQ ID NO: 17004 - DNA, 201 bp, Homo sapiens
agccaggcactgtgctaggcactggggactcgatggggaacaaaagagacatgatccgtgccctcccagagctggccgagggggcagcagtcagcaaggasgcaaacaagaattctatttccagttgaggttagtccccagggagtagcctgctttagattgggggtcgaggaatgtttctacaaggaagctgagactggc

SEQ ID NO: 17005 - DNA, 201 bp, Homo sapiens
agatggcaaagaaagagcaaatatattgaaatctcctggaaatttggctctctccttgaccccagtagtgtccaaaagaacacaggaatttcctctttttkcccaagacttccatgatattttccctgataatcaaggaagggagtgttggctgggacacttttttcttttggaaatgtggcaggggaatatgaattttca

SEQ ID NO: 17006 - DNA, 201 bp, Homo sapiens
gattgaggggaagactaacaagccctccatggaccgtagaagaaagccctaacccctctccaaatgctgctgctgatctcctggcaagcctccacagatargcccaggcccaggcacagccagcaagctctctggaaatatttgggttttgacatgccaagacttggccccagtaagggctgggtggggctttggctgttg

SEQ ID NO: 17007 - DNA, 201 bp, Homo sapiens
gctcttctcctctttctccagggaagaatcggggcacgtcctgcggaaagacctgccgggaagaccgcgatgatgagtggatgggggtgagcctggcccgrcagcccaaggctgatggccgtgtgttggtaagtccctcctgggggtgctgtgggaagggggtggcactctgagaatgaatgatctgttaggaaggctgga

SEQ ID NO: 17008 - DNA, 201 bp, Homo sapiens
cctttgtaggttatcctgagtctgcattattacagggtcttgaaatgaatggtgatacgtgaaagtatttgtcctaggattcattaatattattatatttwagtctttggtcaatatgaagaaatactcaatagtaaatcatagcaacatgatttaacatgagatataatttgaagggctctttaaggctgctaagcaacc

SEQ ID NO: 17009 - DNA, 201 bp, Homo sapiens
ctgtccccttcctttagacatggaccggttactcagctgcagggctgacaactgtaacaccctgtgatataaataaatgctgcctggctggcgtgcagccyccagagcggacgtctttcacaccccaccccgtcccctcctccttctctgccccagacgccctggagtccaaagtggttgggtgcactggcttcctttctg

SEQ ID NO: 17010 - DNA, 201 bp, Homo sapiens
catcatcccagctactcgggaggctgaggcaggagaatcgcttgaacccggaaggcagaggttgtggtgagctgagattgcaccattgcactccagcctgrgcaataagagcaaaactctgtctcaaaaaaaaaaaaaaaaagctaaaaatatcacataccaaagctgcaaattatttctttaattttgagcgacgttaat

SEQ ID NO: 17011 - DNA, 201 bp, Homo sapiens
atgtcctctttggggtaaaggggaggacagatgccaacagaaaaccctcagtacctgccttggtagaatacagccttgtcactgtgtcctgcatcctcctktccttgtttgggtgcctggtgaagtccttttgttcaaattctaatagccatggacctctgccagctcccagaggccctgagagataagcagccatgtcat

SEQ ID NO: 17012 - DNA, 201 bp, Homo sapiens
aataaagttttattggaacacatctatgcccattcccttatgtattatctatggctgcttttgctctacaacagcagagttgagtagtgtgactgagaccrtatagcctacaagcccaaaacatatactgtctcacccttttcagaaaaagttgccagccttgttctaaaagaagtagagtaaggatttagtgagaagctg

SEQ ID NO: 17013 - DNA, 201 bp, Homo sapiens
accagcctgaccaatatggtgaaaccccatctctactaaaaatccaaaaagcttagccaggcatggtggcgtgtgcctgtaattccagctactggggaggstgaggcaggagaattacttgaacccaggaggcagaggtttcagtgagccaagatcgcaccactgcactacagcctgggtaacagagcaagactccatctc

SEQ ID NO: 17014 - DNA, 201 bp, Homo sapiens
atccaagtgtgcatcttctgagattgatgggtttcatttctaagccacatttttagtcagcagtttaccagaatatatcatctacaatttgcctaatttakttgaaatgcagaacttcttgaatccatgttggtgctgaaatttgattggcacacaccaacgcccacttgcgtagcactgcagcagttgttttcctcattt

SEQ ID NO: 17015 - DNA, 201 bp, Homo sapiens
aactttcaacaattgaacccaaggaataattaccaaatcttcattaaagctcattgcctccttcccattgtttccctctcgtgacctctaaaatcgtccaracctgatgttgattgagatcatttcaggctagtgtgttttccccaaatgttgtcgttcaaataaagtaattgaggctgggtgcagtggctcatgcctata

SEQ ID NO: 17016 - DNA, 201 bp, Homo sapiens
gcctataatcccagtgctttggaaggccaagacaggcagattgcttgagctaaggagttcgagaccagcctgggtaatgtggcaaaactctatctctaccaaaaaaaaaaaaaagaaaccagcaaaaaacaaaacaaaacaaaaactagccatgtgtggtggcatgtgcctatagtcccagctactcaggaggctgaggaa

SEQ ID NO: 17017 - DNA, 201 bp, Homo sapiens
cctggtgcggtggctcatgcctgtaatcccagcactttgggaggccgaggcgggcggatcatgaggtcaggagatggagaccatcctggctaacacggtgaaccccatatctactaaaaatacaaaaaaaaattagccgggcatggtggcaggtgcctgttgtcccagctactcgggaggctgaggcaggagaatggcttg

SEQ ID NO: 17018 - DNA, 201 bp, Homo sapiens
ggaacagaaaaccaaatatcacatgatctcaatgataagtgggagctaaattatgagaactcatgaacacaaagaagggaacaacagacactggagtctayttgagaatggaggttggaaggagggagaggagtagaaaaaataactattgggtactaggcttagtacctgggtgatgaaataatctgtaccaaaaacctc

SEQ ID NO: 17019 - DNA, 201 bp, Homo sapiens
ctgtccagccttcagctacaaccagtgtgatatggtgatatataaagaagacttcatttttctaacagttcctcaatttaaacatcagaaagagtgctgtycttaaggaaatcatcaagaaagactaagcaccattgttttgtttctgatgttgctgtcactcagcaccgttgccattgctgtcagaagcaaaatcaaatc

SEQ ID NO: 17020 - DNA, 201 bp, Homo sapiens
ttcttattgctgctgtaacaaattactacaacatttgtggcttaaaacaacacaaatttgttatcttacagttctgaagaacagaagtccaaaatgggccycgctgggctaaaaccaaagtatcagggcctgtgttcttgccagaggcaccaggggaaaatccacttcttgcctttgccagcctctaagggctgcctgcat

SEQ ID NO: 17021 - DNA, 201 bp, Homo sapiens
ttcttctgcagaggcgagccgtgtagcatagcccctgagcacaggtctaagattgcaccaagataacacatctgtcacaagcttcatggcttatgaagggragagggtagtggtctttccaaagttaagttttactcacaatttctgaaggttcaatggaagagatgggagctttatctcagactgcaagcttcacttgat

SEQ ID NO: 17022 - DNA, 201 bp, Homo sapiens
ctaacagggagtgaagggctagaacttttattccaggtgaaagtactggatttttgaaagaactctagtgttagtccagaagagatataaaataaatatcrtaccattcattcctcctcctgcaaaaccaattgaaaatattggcctctctggcttgttgttttcttgctatggggcagtgattctaaagaactgacctga

SEQ ID NO: 17023 - DNA, 201 bp, Homo sapiens
ggcttgttgttttcttgctatggggcagtgattctaaagaactgacctgatttccaggaggtaaaattgtagggatgaatgataattttctaaggagatayatcaatgtctttgccatagggtaccattaggacattgacttcaatatggcatgaataccaacatctgttagaatattccaagttggtgccaggactcata

SEQ ID NO: 17024 - DNA, 201 bp, Homo sapiens
gccacagtctctgaccacaatgcaataaacttggaagctaaaaacaaaaggttaggcaaacaaccaaccaaaaacaaatccacttgggaaattttaaacamcattcaaattaactttttagaaaaaaaagaaatcaaagttgaagggatgaacaaattagaagtgaaagacagtgagcggttgttcatatcaaaaccaatg

SEQ ID NO: 17025 - DNA, 201 bp, Homo sapiens
attaactttttagaaaaaaaagaaatcaaagttgaagggatgaacaaattagaagtgaaagacagtgagcggttgttcatatcaaaaccaatgggatttaracaaaaccaacacagaggaaaatgccactacttacatgtggaaaatagggaagactgaaaataagtgaactaaattgacaacataaaaactagacaaggg

SEQ ID NO: 17026 - DNA, 201 bp, Homo sapiens
cacacacacacacacacacacacacacacacacacacactagtgtatgttttaacaagtaacatttctgtggcaggagagggctgaaggagaggggcaggytgccctgatccaagtgagcagatagtctccttattgtttcagggtttcctcccgcactacatgaatcccccaaggctaaaggtgaaccgtacagcggcct

SEQ ID NO: 17027 - DNA, 201 bp, Homo sapiens
ccgacccagatagctatataggcagattctagtaggctttcaaggaatggataattcttatgttaatataagctgttccagagagtagaaaaagataaagmaactcattccagaaaactaacatagccctggtacagaaaccagaaatggagagcgggcacactcacgcaaaaataggaagcagtgagccaaactcacttt

SEQ ID NO: 17028 - DNA, 201 bp, Homo sapiens
aataaattaaaataagtggaaattaaataaatgaataataaaatagatggaaattataagaaccaaggggaaattctggaattgaaagtaaaacatgggcygagcatggtggctcatgcctgtaatcccagcactttgggaggctgagttgggcatatcacctgaggtcaggagttggagaccagccaggccaacatggtg

SEQ ID NO: 17029 - DNA, 201 bp, Homo sapiens
acaggcatgaaccaccgcgcctggccgagtcagcacattctttatctatgtaggttgcattttctctccttggagagcctcagattcaatggtgagcttayggctggcatgccagcagtttcctaaaatgtaatatcatcactattattgttattatatgagggaaggtgaataggaactcatcagaaacctggaaaatgt

SEQ ID NO: 17030 - DNA, 201 bp, Homo sapiens
aaagcatttgatttgcagtttcctgaatgcgaggctccaagtgtagggaccgccacccaaggacgtttttctctgttgggcagactcaaagcactgagggragcttttcagggcccaccatacatgagcaacagatagctctccctacagataccatatttcagggacagccccttccctcctgagcagacactggctgag

SEQ ID NO: 17031 - DNA, 201 bp, Homo sapiens
cagcttcgactttctagatggtgagaggatggggatgctcagagggacagtgaaggcactgaggcagtaactgtggcaaccatagaagaggctggccacgwgctcatagcggccttcctcctgagacacccgggaaggctgagtctacctcacaggtgtgcctgataaaatttttttgggcagtgttttccttggcttcca

SEQ ID NO: 17032 - DNA, 201 bp, Homo sapiens
tctggttgaggctagattccccctgtgcccacagccttggtccactcctgccctgtccctgccccagcctggttccctggctcgccaacagatccctggawctctgccacaagctctggcttccagggaagggagcctatcctgagatgcggtagaacctcatgttttatttatctgctcttagatctcctgtccgggcag

SEQ ID NO: 17033 - DNA, 201 bp, Homo sapiens
tctgtccccttcctttagacatggaccggttactcagctgcagggctgacaactgtaacaccctgtgatataaataaatgctgcctggctggcgtgcagcytccagagcggacgtctttcacaccccaccccgtcccctcctccttctctgccccagacgccctggagtccaaagtggttgggtgcactggcttcctttct

SEQ ID NO: 17034 - DNA, 201 bp, Homo sapiens
gccactcaatcctgccctaaccttcctctcctgtctttctcacagactgtttttgaaaggaattgccgttcagaggactgtgccgcagacctgcagcttcrgggtaaactgctgctctccaggtatgtcggtgtttccttcagagcattgttctcaggctcctttttcttgaccccaggtcccaaacctgaatgtgcagat

SEQ ID NO: 17035 - DNA, 201 bp, Homo sapiens
acattcatccctccttcagagttatagcattagatttacctccagatctttttatttaatatgttttttttaaagcatattgctaaactacacatttgtgytctcccctttcccatagggctacctcacctcccaggagaaaagattcaaaatctaggagattcataatttcaatatattccattgcttgtgactatttat

SEQ ID NO: 17036 - DNA, 201 bp, Homo sapiens
atgaggcaattcatgtagaaggtctttgtaaactgtgaaatgctctacgactgtcagccaggattagtagttaatgcacgtatttgtttattgtttcagcrgagggtgcaggacgtcatcagcccgatcgtgtttgaagcagcctacagcctcagtgagcatgtgactggagaggaggagagggaactgccgcctctgaca

SEQ ID NO: 17037 - DNA, 201 bp, Homo sapiens
tccagggctcctggttttcatttagggttattagcactgggcagacttatcttcttggcttttagcataatggcctgcagatgtctgtgggataacttaascctgcatcaccaccccagatggaccaccccttcgctctgcccctcgtcccagccacagcataccttagaaatgtagatccaggggcaggctgctgctaga

SEQ ID NO: 17038 - DNA, 201 bp, Homo sapiens
cattagaaggcgatgaggctatggaaaaaaagaaagaaaatagagcccagtgaagcgggtttgggagtgcaggcatggggttatgggggtcagggtgaccycactgacgaggtgtgatttgagcaaagcatggaaggaggctggggagttagcacagcgggttcctggaggagggctcagaccagtgtctgagtgtctggt

SEQ ID NO: 17039 - DNA, 201 bp, Homo sapiens
aaaaggagaagggccagatgcccagggtctactttgtgctgctgggagagaccatgggtcaggtcacagagaagctgcagctgacttacatggaggagacrtgtcgtcactatgtggcccatgtgaaggtcagtcctctcctcctttttatcctcaaactttgatctctgcagatgttcacttggagctggtggaaactat

SEQ ID NO: 17040 - DNA, 201 bp, Homo sapiens
agccttcatgtccgacagcgtggttcttctcaggtgagaggccccactcttgctccttgaattgtgctgttcagggtgagggatggagccattcaccattyatgggctctttcctctgtcctgttccttgtaggctggaggtgcttagtaagtggaaatgctaccttattttctcattctaattattctctatcccagagt

SEQ ID NO: 17041 - DNA, 201 bp, Homo sapiens
tccttcccgtggttcctggcaacattgtatttctattaagagtttgactactttagatcttatgtgagtggagtgtggtgttcgtccttttgtgacgaacktacttcatttagcataatgtcctcaaggttcatcatgttgtagcatgtgaccggatctccttcctttttaaaggcagaataatatttcattgtatgaatt

SEQ ID NO: 17042 - DNA, 201 bp, Homo sapiens; identical to SEQ ID NO: 1954

SEQ ID NO: 17043 - DNA, 201 bp, Homo sapiens
aaacagtatagtacatagtgatggagttgatttacattttgtggaaagttccttatttcctcatagggctgtggaccaccctttgaaagcagccagcagamcatcactcctcaacccaagtctggctcttctcctctttctccagggaagaatcggggcacgtcctgcggaaagacctgccgggaagaccgcgatgatgag

SEQ ID NO: 17044 - DNA, 201 bp, Homo sapiens
tcttgccttgtcattccagggacagagattcctgttctctcactttaaaaataacatatttccttgaatccccaaaacagttaaaaaataaaaagggttayggaggggatgacctctggcacagaaaagcagtaaaataggtgtattgacactgaagtcatatttctataatgaaatacatacctatctatttacttattg

SEQ ID NO: 17045 - DNA, 201 bp, Homo sapiens
atctctgcacttgtttggacctgctatccatgcattcaaaaaaatgggaggttttggtcaagtaatgtacaacatgcagcaagaacaagtgtggtgggaakagcctggcaccagagattaagggagtcctagattcagctgtttgatgggtggccctctggcctggagcaagtcttgttcccttttggggcctcagttccc

SEQ ID NO: 17046 - DNA, 201 bp, Homo sapiens
cactttgggaggctgagttgggcatatcacctgaggtcaggagttggagaccagccaggccaacatggtgaaaccctgtctgtactaaaaatacacaaaamttagccaggtgtcgtgggcaggtgcctgtaatcccagctactcgggaggctgaggcaggagaatcgcttgaacccgggaagcagagattgcagtaagccg

SEQ ID NO: 17047 - DNA, 201 bp, Homo sapiens
cctatggggtaaccaccttttatttctttactttcttaataaacttgctttcactttactctctgggcttcctcttgaattctttcctttaggaagccaamacccaccggccctcccaggccaaaccccaatttgggggttcatcctgccacaactgtacagtgtggggtcaaggggaacccttggtctttttcactgaaa

SEQ ID NO: 17048 - DNA, 201 bp, Homo sapiens
acggagtggtcagggacagtttcacggagacctttattcagaagttgcagggaccaaagctatcttacgggagtttgcaatgagaatttctttgcccatgragtccttgccaagtctatgtcttttctgagaattctctcccccttgatttcagccctgtttgatttctgacctttgaaatgccagcccccatgctgccgt

SEQ ID NO: 17049 - DNA, 201 bp, Homo sapiens
caaataaaaattcaaaactgagcagcaaatcctgtgcctcttcatccaacccctcctcatcatgaatcattatcactcaggaagtaaggacctggtttacyatctgagaactttagtcctaataatttctctacaccaacttctagtcctaataatttatccgtataatgctcagaaacactccgagattctcagtaaaaa

SEQ ID NO: 17050 - DNA, 201 bp, Homo sapiens
tcattttcctcattcagacaagaattgcttgtaaggatgttcttaagtgtgctttcaaaaccatggagtataaggcttattttactccttaagtcttcctrtttcctagtcacatctcatttgcatgttatatgccatctcatcaattattgggggacctaagatccacattttctattatttggccctgttgatgctaca

SEQ ID NO: 17051 - DNA, 201 bp, Homo sapiens
ccctgttgatgctacaacttctgcctttcagcttttcagccattgttctccacttcaaaatggacaaggaggaaaggtgaattggggttctaccactcctscctctacaataagaggctccagcatcatgattcattcttgagaatgactcctctgacaggcctcttttcatttgcaggtgggccaagagaagggaaactg

SEQ ID NO: 17052 - DNA, 201 bp, Homo sapiens
ttctctacaccaacttctagtcctaataatttatccgtataatgctcagaaacactccgagattctcagtaaaaaaaaaaaaaaaaaaaaaaaaaaatcarggaaatcttaatggccaaagccataggtccaaaacccggcgttccctcccacccaactttccaggccattttctccaatagcccctcatccctgaccttg

SEQ ID NO: 17053 - DNA, 201 bp, Homo sapiens
gcacacacgagtagcatgaaattagccatgttcatattaaggagcaatctaagatcattattgctgtttctctggccttatattaaatagtgtcattgcarttgaaaaattagagtaaatgaacagagcctgtgagcatccaccctttgtaggttatcctgagtctgcattattacagggtcttgaaatgaatggtgatac

SEQ ID NO: 17054 - DNA, 201 bp, Homo sapiens
gttacagtgagtgaacctgatttgttccagatgtcctaagatttagtgattccggaaactactcctaaagtcaaggctgatgaggatttgaattcctctgytagctgggaaccagcagttcttttcacagttaaacagatgaggcaggaggagggagactgagctgccttgagggacagggaggggcccactgactggctt

SEQ ID NO: 17055 - DNA, 201 bp, Homo sapiens
ggtcaatatgaagaaatactcaatagtaaatcatagcaacatgatttaacatgagatataatttgaagggctctttaaggctgctaagcaaccatgaatcrtggtttgcatttttctagatggataatatgaagctatcttatttatctttctagaactagacaccttaggtcaggctaatcaaccagctggtatcatttc

SEQ ID NO: 17056 - DNA, 201 bp, Homo sapiens
atttggcgtagattattaaagaacagttacctgtgtcatgaaggagaggcccccagactggcactttgaatgcaaattcttctgtgacaaatccaggggaytttggaataactctcagatatggcagtagacttaactgtaaaagctcccagcccacagaggtgagcagaggctgaggagtaaacaccataccaacattct

SEQ ID NO: 17057 - DNA, 201 bp, Homo sapiens
attcacacttcaaacccactacttcatgaagcaaggtcttgccagatcccctagagtgaacaggggattctttatcctctcacaggcctggcaccgtggtrgcttctgaccatgacagctcctttcactgaggctgacccagactctgccaccaagtgatggccactccttgggctcccacagccagggttcctgacagct

SEQ ID NO: 17058 - DNA, 201 bp, Homo sapiens
gagtaaacaccataccaacattctgggacaaaatagcctgaatgctgttgtaccttggaaatgcaatagcagctgccttcctaggtggggaagctgagagyagcctcttacaggagtgcatgccctatagacagaggctcatgaacttgtgcttgctgacatgtatatcttcttcagttggtccctagtgagtctacccaa

SEQ ID NO: 17059 - DNA, 201 bp, Homo sapiens
cacagtttcccagagctccccagcaagattaagttccaggtgctcagggagctgactggcttgatgttgctgcctttgctggttgcctgtccttctgtgtytcactctaccccttccctactggtgttttatggaaccacctctggaataaacaacttgctttcaaacctgtctccagctctgcatctgggggcgcctgca

SEQ ID NO: 17060 - DNA, 201 bp, Homo sapiens
ccatggacactttgggttgtgtctacccttggctactgtgaatagtgctgctatgaacatgggggaacaaatgtctctttgagttcctgctttcagttcaytgggtaataaacccaaaagtataatttttgggttatatgacaattctatgtttaattattttgagaaatgttcatattgttttccaagcagccactcgat

SEQ ID NO: 17061 - DNA, 201 bp, Homo sapiens
gagcaatatattttcagcaggctatatatatgctgtaagataagctttatagaagcagtacactttgtatcttatgttgactactaataatgattttcatwtaaaagcacagcaaagagatccatgtacaaagtaatataacccacttaaaagactgcacaagcaaattaaaataaatggggaaatttctcagggaataaa

SEQ ID NO: 17062 - DNA, 201 bp, Homo sapiens
attctagtaggggatagacagtcctcaaccaaaaagccccacaaacaaatgcataaccacaacttcgataagtgccatgaagggttgatggggcacatggkgggtggggggctcataatgggaggatttatttcacctaggcagggagatcaggaaggatcccctggggacatgatagtcagggggctggagaatgtgggt

SEQ ID NO: 17063 - DNA, 201 bp, Homo sapiens
tgtgaggtttcagaaggatgacatatttgacaacacccaatatcatgctggcacatcacattttcatttcatttctaaaaataactttggaagcagagatrtgctgttttagtcaaagacttttttagctttggagaaagaatgaaaccccagctttgagactcctctaaaaaaaatctgagttcacattctgccctggaa

SEQ ID NO: 17064 - DNA, 201 bp, Homo sapiens
aagaatgcagatgtgagccataagcagcctacacacacatcagccaggagatgggccacagttcacagtgcccactacacatcaaaacacaccctctgggraatgctgccaagaggttttgatttaaaacacgaaccttctttcacaacacaagtgccccaggagagtggcctgtaagtcccactggccattgatacttgg

SEQ ID NO: 17065 - DNA, 201 bp, Homo sapiens
agagggtctgccccctttctgctgatgtgccgccccacctatcttgagattcccccaaaacacgaggatgtcaggatgctgagtggccaaaaataacaacygttcattatacaaacccttatatccttaattacgtcttccattaactggttatccgattaaaactggccactcacatggatttattttgttcaaaggtcg

SEQ ID NO: 17066 - DNA, 201 bp, Homo sapiens
tactctgaggtgtggagaaggctagagaagagtagaagataaggtgaagaggcagggcaggaagctgatggcttctgccttgactgggaagtacagacctrggtcccctcctgacagggaagtggggagaagaggttggcctggggacacagtaaagcatggtattatggtaacttctacataattggtctctagttctag

SEQ ID NO: 17067 - DNA, 201 bp, Homo sapiens
gggcccccatgttttctgagatcagggatgagggacaggtcactgtctacatcaacagaggaaatgtgagtacaatactgggcaatgtgcggatgggtgtsggggagggacatttgtccagccagcagtggccgagcacccctctgggccggcactgggggcaatgttacccagaggagatgaaaatatgtgatatctgtc

SEQ ID NO: 17068 - DNA, 201 bp, Homo sapiens
cccaaaagtataatttttgggttatatgacaattctatgtttaattattttgagaaatgttcatattgttttccaagcagccactcgattttacgttcctmccaacagtgcacaagggtttcaatttctccacattcttgacaattcttgtcttctgtttttttgatagttgccatcctaatagtcatgaagtgggaaaaa

SEQ ID NO: 17069 - DNA, 201 bp, Homo sapiens
cagtctcccctgcccccaggagtgtggctggcccactctgccctcaggaagtttgcttccctcagattagctccggggcaggtcctgtgtcagggtgatargcacacggtgctctcccattgaaggtcacaggaagcgatcagagaggcctctgaaagatttctgggcttttcttcatccaaaaacaatacttggagttga

SEQ ID NO: 17070 - DNA, 201 bp, Homo sapiens
taaacccaaaagtataatttttgggttatatgacaattctatgtttaattattttgagaaatgttcatattgttttccaagcagccactcgattttacgtycctaccaacagtgcacaagggtttcaatttctccacattcttgacaattcttgtcttctgtttttttgatagttgccatcctaatagtcatgaagtggga

SEQ ID NO: 17071 - DNA, 201 bp, Homo sapiens
tgctggctccacgcacagctggcatacactgacatggctgtggtttgcttctctctccttccttgcccctagagtataagaagaagtacggagaggaacayggctcctgccaggctgggatagcgggcttcttcaccgaggtgggtgtctgctgtctgggcatttctgttctcttgtgggtgttcatttccttgcttatat

SEQ ID NO: 17072 - DNA, 201 bp, Homo sapiens
ttcccgtggttcctggcaacattgtatttctattaagagtttgactactttagatcttatgtgagtggagtgtggtgttcgtccttttgtgacgaacttayttcatttagcataatgtcctcaaggttcatcatgttgtagcatgtgaccggatctccttcctttttaaaggcagaataatatttcattgtatgaattcac

SEQ ID NO: 17073 - DNA, 201 bp, Homo sapiens
gggaacaaatgtctctttgagttcctgctttcagttcactgggtaataaacccaaaagtataatttttgggttatatgacaattctatgtttaattatttkgagaaatgttcatattgttttccaagcagccactcgattttacgttcctaccaacagtgcacaagggtttcaatttctccacattcttgacaattcttgt

SEQ ID NO: 17074 - DNA, 201 bp, Homo sapiens
gctgtggtttgcttctctctccttccttgcccctagagtataagaagaagtacggagaggaacacggctcctgccaggctgggatagcgggcttcttcacygaggtgggtgtctgctgtctgggcatttctgttctcttgtgggtgttcatttccttgcttatatgattttggcaacccttagaggtgggacttctggagt

SEQ ID NO: 17075 - DNA, 201 bp, Homo sapiens
  misc_feature (101)..(101): n is a, c, g, or t
actttgtctctgaatttggatactctagacacctcatgtaagttgaatcatacagtatgtgcccttttgtgactggcttgtttcacttagcataatgtccncaaggtgtatccatattgtagcatctgtcagaattttcttcctttttaaaggaaggaatatttaataatattccattgtatgtgtgtgccccacatttat

SEQ ID NO: 17076 - DNA, 201 bp, Homo sapiens
atccgttctgaataccatgacttggcaagtgaagcattcccatgccttccagactcctggctctgcctgtgtgaaacgtactccatttccagagccagctrccgagctttttcccctgggctgactttccaccaccctgacctgcgattcctctctgctaaccctcctctcaccgttctccccagggtgggctgtgggcct

SEQ ID NO: 17077 - DNA, 201 bp, Homo sapiens
aaaagagctccttcagctgcaaagaacacagaggtcaggaggaataaagctaatgagagagcagagagtcctttgtctccccaggtgttattcccagaggscaactagggaaaatggagatggggtataaacatctgaattcactgttaaacactccatgaactgttgataattccctagaagcagcatattcctgaggta

SEQ ID NO: 17078 - DNA, 201 bp, Homo sapiens
atttcagggtcctctgtgcttatttgtttctgaattgacccagtgaggtagtcatctaccctgtccagcatcttgctagcctggacatactttccacagtkaacctatctctcattcctgcaagtctgtcagtggcacagatgtggactttctttagtgaaaagcatcttggaacctttactgacatttttagatttaagc

SEQ ID NO: 17079 - DNA, 201 bp, Homo sapiens
gccaggctgggatagcgggcttcttcaccgaggtgggtgtctgctgtctgggcatttctgttctcttgtgggtgttcatttccttgcttatatgattttgrcaacccttagaggtgggacttctggagtcccagatacttgagcctcgagggagcagattctggtcctcacaccagaggaggctatttctacctgccagga

SEQ ID NO: 17080 - DNA, 201 bp, Homo sapiens
cctgaggggctcaggggaggaattcccactgatttgcaagaaaggaattggccactgtgtactcgtttgccactcaatcctgccctaaccttcctctcctrtctttctcacagactgtttttgaaaggaattgccgttcagaggactgtgccgcagacctgcagcttcagggtaaactgctgctctccaggtatgtcggtg

SEQ ID NO: 17081 - DNA, 201 bp, Homo sapiens
cctgttactgctttcatcatcacctctcactctcattttctaataagcctgaaaagcatgatggagtcataaatcatgtctgtaaaatgaagatgtgtagrctttggtaagatctcacatgtgatgttaataacaataccttacatatctggcctcacacttcacttaaactgtcccatttaatccctgaagtggtctcat

SEQ ID NO: 17082 - DNA, 201 bp, Homo sapiens
taaggactacaatccttagtttcctacctactcaaggttatgttttgtagatgctaacagtgtacattctagagaaaatcagctggagggaggaaaatggyacagttctaaaattctttaagcctcgtttaattttttacctgttactgctttcatcatcacctctcactctcattttctaataagcctgaaaagcatgat

SEQ ID NO: 17083 - DNA, 201 bp, Homo sapiens
gtctttccctttgtttcttcgagggagcttgagtggcaggattattattaagagtactttttaagttcccaacaattagataggaaatgaactgaatgggrgttcacattttatcttcaggaaaatgaccgcaagaaggccttactgtggggtggttaagagcatggcctggctttggaatgcctggattgggaatccttg

SEQ ID NO: 17084 - DNA, 201 bp, Homo sapiens
tttcagcggaatccaaaccatgtgacatggaccattatcattcagctgccacctcctggatcctgccctgtaaacatgcccaggggtctctgaggatggaygcgtgtcattcacacaccaagtgtgttagagacaacagaaaaccttgtttttttcctgtgttctggtgaaagtcttttctgtctttccctttgtttcttc

SEQ ID NO: 17085 - DNA, 201 bp, Homo sapiens
atgtatttagggggtacaagtgcagacttcttatatgaatatattgtatcgtgatgaaatctgggcttttagtgtacccaatagtgaacatggtacccaayaggtaacttttcaaccctcacccccctcccacattttggagtctccaatgtctgttaattccactctttatgcctatgggtacccattacttagctccca

SEQ ID NO: 17086 - DNA, 201 bp, Homo sapiens
ctaccttcctgtttctttgagggtttaaccaaaggtggcatttaagtgtaagctccttgcatgacaggcaagctgggtagatgtaggtggggacaccacargacaccttgcctgtggagcccctcctgccccacaggtagaatgttgaatgcactagttctctgctatctgtttccacgacagaagccaggctgcccttct

SEQ ID NO: 17087 - DNA, 201 bp, Homo sapiens
tggtgtgtcttgcactatagtttcattcagctcatggggtctgaatttcctttttatgtttcattttttcaagagttacaattgggtgtttagtctctagrgtcagtgggatggatatgctttttgccagacttttcacatttaatatgtaactgtttgtttaggttgagacattttgatcctttttgccgttgtgctatt

SEQ ID NO: 17088 - DNA, 201 bp, Homo sapiens
tgtagatcagatgccttctgtggaatgccaggcctagatttgctctacacaattaaacagctttatttatcctcaactctttgtgaacatgtcaatatcartatccaaatatctggctctaactgcttggaaaccacagcacacatcttgcgtgtgttgattactggcaaactccatcatttcccaccatccaccatgatc

SEQ ID NO: 17089 - DNA, 201 bp, Homo sapiens
agaccccagcaattgttgcctgtcgtgttttcattaattgttgcctctctaatggatcattcccattagcttgcaaatatgctatgataattcccatcttrataaaaaagagcaaaaaaactccctggagcccacttcccccaccagctaccatccaatttctctgttctcctttagagaaaaactcctccaaatagttgt

SEQ ID NO: 17090 - DNA, 201 bp, Homo sapiens
taattattcccattgttctggcctgtctgccatattggacaaaattgatccttcctttcttgagactgtcctctgtgaccatgtggatgactcctctctcrattttcctcttccttctctagccatgcttttccagtcttgttggctgacacctcctcatcttcaactcctaaatgtgagtcctcatttctatctatactc

SEQ ID NO: 17091 - DNA, 201 bp, Homo sapiens
gggttggggtagcctaactcttaagcctaaggtaggggttggggtagcctaactcttaagcctaactcttaagctatttgcttttggccaagaaccttccrtaatgtgccataaaaatattttataatttcctgcgggtgctgggaagcactgttcattctgtctcttcatctgtacaccctgcatttgtacctccagtca

SEQ ID NO: 17092 - DNA, 201 bp, Homo sapiens
aattcctcttattctgtatttaggttattcccagtttctatattaagtaaaattgtgagaaatgtcttttatggagattagtaccagtaaatgatcatatycttagctctataacttttcagagggtgtgaagtcacatttttgaccacctactatacaccagggactttttgcatctcgtccgcatcccctcttcactgc

SEQ ID NO: 17093 - DNA, 201 bp, Homo sapiens
cataggctattacctcttccagtttggatttccccaaaagcataccctgatacaatgatacaggtacaggtagtttatttgggggtgggcgatctcagtgktgagtttagacaggaaagagaggaaagacaggaaggcgtgcatttataagcaggttactgccgtaggcaccttgggcttgtcttcctcagaccctccaag

SEQ ID NO: 17094 - DNA, 201 bp, Homo sapiens
gcaactcaggcagaaagatgtgggaagcctttgacctggaggggcatggcttcaggtgaccagaactgtggctggttctggggaatgtgagcgaggtgctrgccacatctgctatagtaaccatgagagcttcctgaaaagtagttatttactgataaactactcaagaatacaaaagtagttgaataaaaagtgtgccac

SEQ ID NO: 17095 - DNA, 201 bp, Homo sapiens
catttttgtttaatgaactactatgtccttaaatctcagcttagggagcccgtgtgcaggctcctcacctggctgcacaggatctgtccacagaatagatrgatggatggatggatgggtgggtgggtggctgaatggttagataggtaggtaggtagatgactggctgggtgactgggtggatgagtgggtggatagtta

SEQ ID NO: 17096 - DNA, 201 bp, Homo sapiens
taatgtatgtaaggtatataaaatgatgttttgatgtacatttacatagtgaaatggctactatggtcaagcaaatgaacatatccattgcctaacatagkttttttttttttttgatagtaagagcacttggaatctactttattgtcaaatttccagtatataatacaatattgtcaacatagtcatcacgctatacat

SEQ ID NO: 17097 - DNA, 201 bp, Homo sapiens
tggctgaatggttagataggtaggtaggtagatgactggctgggtgactgggtggatgagtgggtggatagttatgtggataggtgagtggggatggctgrctgggtggatgagtgggtatgtgggtggatgggcaggtgagtggatgactggctgggtggatgggtgtgtgagtggatggctggctgggtggatgagtgg

SEQ ID NO: 17098 - DNA, 201 bp, Homo sapiens
tgggcgcaccaaaggcagattccaaatacagcccttcagtgaagtctcctggggctgtgtttaagtgccgtgttcacaccaaccctgaccggagatgcacmgaactggacatggctcgaggtgggtgaccattactgctgtggtggaaatgggttctgtacccttataccttgctcttcttcttcccaggatggcctgatc

SEQ ID NO: 17099 - DNA, 201 bp, Homo sapiens
gggtgtttctcctcaactccactcactttaagcagcatctctggcagtagctacttctcctccaccgtcttagctccctcttggcagtcccagtcccagtyacaatcacaacacctcctccctcagtccctccaactctaagggtgtcagcagttgcttctgatctcagcttttccttatcttaccttgtttgctcttctg

SEQ ID NO: 17100 - DNA, 201 bp, Homo sapiens
gtggaatgagtcagtttatttggctggtgaaggaggaacctaggttggagcagggatgagagggtagaagagagcaaaggaggaggggcaggagagaaccyggtaggatggaaagaggctgcccatgttgaacaaagggccagtaacatttctggtggcagggagatgtcaggacattttagaaatctgatgcctgctgtt

SEQ ID NO: 17101 - DNA, 201 bp, Homo sapiens
ggacgcaggcgtggtgagtagcctcccaagcatgctggacaaggaggctctaggaagtcaaagacaatgtgcctgggaaggccacaggtacaagccattgrccactgtagctggccatgggaaaaatgggagcacatcattttgatctctttgccattgaattccagcaacctttgaaacctttgtcacaaggaaccctag

SEQ ID NO: 17102 - DNA, 201 bp, Homo sapiens
aagatgagaagacactactattcatgcctggtcagaaagcacagactggctatgtaacagccccagcagggaagcactgggtgcaagacactggattaaaytgagacaaatgtttgcttctcagaatggcagtgaccatgggtgcttgactgtgggtggggatgacagatttcatgctttcctctttcagaatcatgtctc

SEQ ID NO: 17103 - DNA, 201 bp, Homo sapiens
atgactaataaacacgttttcacgtgcccctcagccattgggacacttattttagcctgttcaagtcttctgcactcccttcttctggggatacttttctyctcctgtgctgtggtacactcctcaccccaattcttctcactcgccactccttttctgcttcctttgttggggtctccttatcttgccaacctttcaaca

SEQ ID NO: 17104 - DNA, 201 bp, Homo sapiens
ctgggagacaggctgggcgcttcctgcggcagtcggcagtgaggaagtggtggagaaacgcagatgtccatttcaaatcacaaggcggcttcagtattccrccgcggggctcagctttcacgtatatgaaaagcttcatttgtgtattcactgcgtttggaaggaaggctatgttttgctttagaaatgtcaacagagctg

SEQ ID NO: 17105 - DNA, 201 bp, Homo sapiens
ctatttggctattgtgtatcattctttaaatatctggctgggttcaacttgctaagattttatttagtatatttgtatctatagtcataaacaagatttcyctgtaattttctttcttgtcaggttttggtgtcagatttctgctagtgtttgcaaaaataagcagaaagcttgcacttttctctgttctctgaagacata

SEQ ID NO: 17106 - DNA, 201 bp, Homo sapiens
tttctctgtaattttctttcttgtcaggttttggtgtcagatttctgctagtgtttgcaaaaataagcagaaagcttgcacttttctctgttctctgaagrcatacaaccaacatagttgcaacagcaggcagtgagagctgacccttactgagagcttgtttatgtgccagaggctgctcaacactttttattaacgtgt

SEQ ID NO: 17107 - DNA, 201 bp, Homo sapiens
ttcctgaaatgtgtccgcaggccaggctggaggactatgcctctgcatatgtacctgtcctgtttgtattcttcaaaaatggtgctgcagacagttttatygcctgtgccatacttgccactgtccatagagccctggtgacagcactggtggctgtaagccactctgatgtttcctttatcctcaacccagatggctgct

SEQ ID NO: 17108 - DNA, 201 bp, Homo sapiens
tgcaaaaataagcagaaagcttgcacttttctctgttctctgaagacatacaaccaacatagttgcaacagcaggcagtgagagctgacccttactgagascttgtttatgtgccagaggctgctcaacactttttattaacgtgtttaaccctcacagcaacccagtgaggtatgtgcagttaccatctcagttttcctg

SEQ ID NO: 17109 - DNA, 201 bp, Homo sapiens
aaatatttcattatctgtggaaggaaaacatttttggtatgcatgtcaagtgctcagataacatatttatgtatcgctttttcactaaagagaatctgacsgcatctggaaattcttttgtgtcactgcctctctcagactacttcccatctgtatcgctttaactccaataaaaggccatccccatgcctgggaaatggg

SEQ ID NO: 17110 - DNA, 201 bp, Homo sapiens
ggggaacaaatgtctctttgagttcctgctttcagttcactgggtaataaacccaaaagtataatttttgggttatatgacaattctatgtttaattattktgagaaatgttcatattgttttccaagcagccactcgattttacgttcctaccaacagtgcacaagggtttcaatttctccacattcttgacaattcttg

SEQ ID NO: 17111 - DNA, 201 bp, Homo sapiens
tggccctaaactttcttttctttttcttttgcattttcttctttctgcacatgtatgaatgcaagctgaatagtcaagttcctgaaatgggtcaggattakgtttgccttaaatctttttctcaacagaagccaaacacttaaaagaagggagatggctgattgaattctggaacaaaagttacattcctaggctcttggt

SEQ ID NO: 17112 - DNA, 201 bp, Homo sapiens
tggctactgtgaatagtgctgctatgaacatgggggaacaaatgtctctttgagttcctgctttcagttcactgggtaataaacccaaaagtataattttygggttatatgacaattctatgtttaattattttgagaaatgttcatattgttttccaagcagccactcgattttacgttcctaccaacagtgcacaaggg

SEQ ID NO: 17113 - DNA, 201 bp, Homo sapiens
agaatgaagattaattttgatacacataagaatgagaactattctagaactctcaaaaagggcaaacgagtaatagtgtctgtgtatgttcatttgacacrtgcttattatgtatccacatgtgccaggcactggagatatagtcctgccctcatggagcttctaaagggagttacaaagagtttctactattttggcctt

SEQ ID NO: 17114 - DNA, 201 bp, Homo sapiens
gttgccttgtcctcagctcagtttctgtgaactgtgggttgtttctctcttccttgagttgcaagagatcagtacttccggatcagtacttctgcagtgasatgaaactttggaggagtaaagttggtgtttgtaaattatctagcacagtgcttggcacacgttgcaggttgaatttatttgcttttccttacttaccct

SEQ ID NO: 17115 - DNA, 201 bp, Homo sapiens
ggcagtaggggagatcatcacctctgtaatggtataatatgaactcaggagttgagattcgtaaagcagtaaggaatgcatagtcagctatactggaaatwtgggaaagggaaatggactatgtgggaaagcgggactcttatccttgcagaagtcactatgaaatgaggctttcagtaaacagaagatgggcatttcatc

SEQ ID NO: 17116 - DNA, 201 bp, Homo sapiens
agtaggggagatcatcacctctgtaatggtataatatgaactcaggagttgagattcgtaaagcagtaaggaatgcatagtcagctatactggaaatttgrgaaagggaaatggactatgtgggaaagcgggactcttatccttgcagaagtcactatgaaatgaggctttcagtaaacagaagatgggcatttcatcctt

SEQ ID NO: 17117 - DNA, 201 bp, Homo sapiens
attgtgtatcattctttaaatatctggctgggttcaacttgctaagattttatttagtatatttgtatctatagtcataaacaagatttctctgtaatttyctttcttgtcaggttttggtgtcagatttctgctagtgtttgcaaaaataagcagaaagcttgcacttttctctgttctctgaagacatacaaccaacat

SEQ ID NO: 17118 - DNA, 201 bp, Homo sapiens
gtgagtggtggggctgggattcaggcacaggcaggctggtacttaatctctctcctacaaataccagcttccttggtgagtattggggctggggttcaggsacaggcaggctgactccagtgtgctctaatgcatcttctttgcataaagaggcttatttacatgtcttttggggtatgctggctgctcacgtggctttgt

SEQ ID NO: 17119 - DNA, 201 bp, Homo sapiens
gttccatgtaaacgacacctccacagaatataatgtgagtggtgtccctggagatgtacagctctatggccctggagtcaaggtaaagcctcattttaatwttttgccctggagccgtttggcacaaaggactttggctcttcttgcctttgtcaaacagccatgaatttgtttggacagcagttgttgaatgcctgctaa

SEQ ID NO: 17120 - DNA, 201 bp, Homo sapiens
gcccaacctgttttcctaagccaggaaatggactcgacaaactcaaaagaatcaaaagatacaaatttaagaggaagaaaaatcactaattagtgaagtcygcttcctattcaatcaggagttttacagctcaccagattacctctcatccttaaagtctgtctggtcctcaggttactgtttagtaacagaattgatgta

SEQ ID NO: 17121 - DNA, 201 bp, Homo sapiens
gcaggcggatcatctgagatcaggagttcaagaccaacatggcgaaacgctgtctctactaaaaaatataaaaattagccagtcgtggtggtaggctcttrtaatcccagctacttgggaactgaggcaggagaatcacttgaaacccggaggcggaggttgcagtgagccaagatcatgccactctgctccagcctgggc

SEQ ID NO: 17122 - DNA, 201 bp, Homo sapiens
tgggaagtagtgatgcctgtcttccctcagaagcacactgataaccccaatatacccacaattcacacttttttccttctctgaggtatgctgttttttgkcaaaacagaaaaaacacactactaggatatgaaaaacttcattctgggcctggttaggtcataaactacagaaccttaggtcatatattctcaccgggcg

SEQ ID NO: 17123 - DNA, 201 bp, Homo sapiens
acagaaccttaggtcatatattctcaccgggcgcttgtttctccactgcaaaaaataattcgtatttgcttggtcctttgtagtactttactgtttataartgtagtacatttatcttcatgatgacccttaaatttaagtaaggtagtattatgctcattttatagaagaaattcaatctcaaagaggatacagtctccc

SEQ ID NO: 17124 - DNA, 201 bp, Homo sapiens
tttatagaagaaattcaatctcaaagaggatacagtctcccaaagatcccacaagcagtaatatattaggcagagctaaactcacacactgtcactcaatwtcctaatattggtacatgccatgctaataagtgtgctaaaatggatgaagcggcaatttctcaggtcccttccaatgatcctgtcctctgcttctacttg

SEQ ID NO: 17125 - DNA, 201 bp, Homo sapiens
cagggagctcaatatatattaagagtatgcgctcagccaggcgcggtggctcacacctgtaatcctagcactttgggaggccaaggcgggtggaccacaargtcaggagatcgagaccatcctggctaacgtggtgtaaccctgtctctactaaaaaatacaaaaaaaaaaaaaaaatgagctgggtgtggtggcgggcgc

SEQ ID NO: 17126 - DNA, 201 bp, Homo sapiens
aactgtatgctttaattaaaaagctgacagttgaacctccagggaaataaacattttattttctcattttatcaattgttgaagttcagatggtcaggtaraaatgagtgtgatggagtcttgattttccacgggcgtccctttggatggagtccttgctttctgatcacaaaactggtagcaaatagaaagataagaact

SEQ ID NO: 17127 - DNA, 201 bp, Homo sapiens
tgatttgcatttctgtaatgaccaatgatgatgagcattttttcttatatttgttggccgcataaatgtcttcttttgagaagtgtctgttcatatctttygcctactttttgatggggttgttttttttcttgtaaatttgttttagttctttgtagattctggatattagccctttgtcagatggatagattgcaaaaa

SEQ ID NO: 17128 - DNA, 201 bp, Homo sapiens
tctcttttcacaaagcaaaagaccatcattcttcagaaggatctcccaaagaatgccattgaaaactcctcattaccttcaaatggggtgatgcacacacragtagcatgaaattagccatgttcatattaaggagcaatctaagatcattattgctgtttctctggccttatattaaatagtgtcattgcaattgaaaaa

SEQ ID NO: 17129 - DNA, 201 bp, Homo sapiens
taaagtttttagactgaaagagatacctaaagacatgcataaaaatgttggtagcaaccttgttcatattaaccccagcctggaaacaacctaaatgcccrgcaacagaataaacatatgacatatttatataacggatattactcaataataaaaagaaactactactgtactcaacgatgtggatgaatgtcacagatg

SEQ ID NO: 17130 - DNA, 201 bp, Homo sapiens
acaccagggcagagaggcagcaaccgcaatcaaaagaactaataccagagggtgcagtaacaaggccaacagaaggcttctgaataagcaagactgatgtyttcagagcaatgcaaaaagacagtgtttccatgaaacagaataaactagagatttgtaaattcaagatattgatcattcaaatgaaacttcaatataagc

SEQ ID NO: 17131 - DNA, 201 bp, Homo sapiens
atgaggcacaatgtgtgtgaattattggaggagcactctcaggagaagaggggcgagggagcagggaggggcaggggatgggctgggagggatgtgctgtygggtcaaagctagccttggtctgatttatgggctgggaagaggtggggaagccctggagcataaatcactctgcagaattgtccccccttgaagctgctg

SEQ ID NO: 17132 - DNA, 201 bp, Homo sapiens
aagtagagctgggtttgtaaccaggtctgactccaaagttcacgtggttcccattgtgctgaattgcacactgctcctgaaagtgctgcccactccctaawcaccagaggcaggctcagtcaataggacagacagatgatgagtagacccccaagaatcacccaccagaggaggagcatcaacaccagggcagagaggcag

SEQ ID NO: 17133 - DNA, 201 bp, Homo sapiens
cctgggaagtgaaaaagaaaagtggttccctgctcattgtcatagttctggtttaaaagttttatagaatgaaatacttgcccaacatgagaggtttagartgttctggtaaaccacagtgttaataagtggaagctaatggaaatagctaacaggttttctacacgtagaatcccttgtgtagatgaaaaaaaaaaatca

SEQ ID NO: 17134 - DNA, 201 bp, Homo sapiens
gagttctcaccaagtgtaatagtctatgagtaaattcctatgcatgtaaaaagaaaagttttagcaggaagaagacaaaatgctgaaagagaatatggtartttcaaagtttgagatttttagatgcatgttagaagtgtttctattttgttgaaatttcccgtcattcagtagttcactttacttcaagttgtgaccttc

SEQ ID NO: 17135 - DNA, 201 bp, Homo sapiens
tatctggtcttagtgggttctgtacaatcccattaagttgaaggaataaacctgtagttggagaaataacagtgtgacttctccaagactgattggctgayttttggaccctctttgtcccatttctagtcaggaattatgtcttctactgttccacaacccacaaaagaagatgtctgttccacttctggcctaagcaat

SEQ ID NO: 17136 - DNA, 201 bp, Homo sapiens
tgtccatggacactttgggttgtgtctacccttggctactgtgaatagtgctgctatgaacatgggggaacaaatgtctctttgagttcctgctttcagtwcactgggtaataaacccaaaagtataatttttgggttatatgacaattctatgtttaattattttgagaaatgttcatattgttttccaagcagccactc

SEQ ID NO: 17137 - DNA, 201 bp, Homo sapiens
gttcagaaaattatttagaagggttcaagtaacacagaccatgtaatgaagagggtatgagtgttgaaagaaggaaaagaagaacaggggttgcacagaakataccaaatgttcttatcaccctctggggaacaaaagaaagaaatctgagggtatgcagcttatccttccagttgtttctctgaaggtaatttttacagt

SEQ ID NO: 17138 - DNA, 201 bp, Homo sapiens
cagggcatctcgtcccactggtgcctaccgtctgagcactgctctgaaggactcgattgccccgtggagcctgctcccacacacctgccttttgtgcagcyggcccatctgttggtgctttttctttcaggaggagatgggcatctcctgtgagctgctggaatcggacttcctcaaatgcagcgtgggatttcctttcat

SEQ ID NO: 17139 - DNA, 201 bp, Homo sapiens
tcaaggactgcaggaggggtgtgctttccatccactttctatattctaaaaattaccgctggattaagcccagtcaagagagaaccaagtatctgtatggwtcaagtatcgctggccacacacacagtatcttttacagaatcgcatgtgctgtgatgccatctccctgtgcagggtgggttggtaggtgggggaaagggg

SEQ ID NO: 17140 - DNA, 201 bp, Homo sapiens
gaggttagcttctaactcatcaggtctagggtggggcctgagaatctgcatttctaacagtgagcatgtccagggaccacactttgagtagcaagaccttsacagcttcaagttgcaaaccagttttgaatgagcagagtagaagggggtttgcaggtgagaaggaactcttcaccatgagtacatttctatgaagatttc

SEQ ID NO: 17141 - DNA, 201 bp, Homo sapiens
agagccaccaacagtagaggcactccaaaactttccaagaagtcatctcagattccctgctgcttcatagcttttaggagctccagggttgagggaggccmcaaaagcaatcaaggactgcaggaggggtgtgctttccatccactttctatattctaaaaattaccgctggattaagcccagtcaagagagaaccaagta

SEQ ID NO: 17142 - DNA, 201 bp, Homo sapiens
gcacatattctgtggcctcaatagtgttgacaggtttgtgccaagcctgcccagcttaggggacagctgaaatgctcagagccaccaacagtagaggcacyccaaaactttccaagaagtcatctcagattccctgctgcttcatagcttttaggagctccagggttgagggaggccacaaaagcaatcaaggactgcagg

SEQ ID NO: 17143 - DNA, 201 bp, Homo sapiens
catccaaatgggttttcccagccatcttctggtgcatttctaacatacccttaaaaggcataaaaaagtggcatagatgatggctggaaagattaagttcyttctggtggcttctttaattttggaataaccagccttccttcaacccccttacatgcattagaaacttctgaactgtttttgttctgtttttaattaggt

SEQ ID NO: 17144 - DNA, 201 bp, Homo sapiens
cattttgctgaaattgcagtgagagggaaggtaccaggtagagaacctctagattttatgagcttgcttccctgactccattccaggtgatcttgatccamaaatgacgaggctgggtggttgccattggtgtcacacccacatcccttgctgtgcaggtgcactgctcccagctgctgtgctggctgctagctgctcaca

SEQ ID NO: 17145 - DNA, 201 bp, Homo sapiens
cctcaggtgaacaagaaggctgccctgtggctcttcacggatgaaaagccaaaggcagctgtggcttcgctttgtccccagtagtcactggccacggtgakacctgggtttaacatgacctgcccataaatcagtttgctgcaattgcagtgagagggaaggtaccttgtagaaaacctctagattttatgagcttgtttc

SEQ ID NO: 17146 - DNA, 201 bp, Homo sapiens
tcccaagtttgttctgagccacctgatataacctcaggtgaacaagaaggctgccctgtggctcttcacggatgaaaagccaaaggcagctgtggcttcgstttgtccccagtagtcactggccacggtgagacctgggtttaacatgacctgcccataaatcagtttgctgcaattgcagtgagagggaaggtaccttgt

SEQ ID NO: 17147 - DNA, 201 bp, Homo sapiens
ggagcatgcacacatgtcctgtgattctttatatcttttatttttatgccatggtacaagttgtgctttacagagcatttgggtgaataactagaaatatrccatagattcttgaggctttgcctggttcactaatgacaggctccagggcgtttctcagggagcgtgttagcatgtttctaggaccagccacatcagcca

SEQ ID NO: 17148 - DNA, 201 bp, Homo sapiens
ctttacagagcatttgggtgaataactagaaatatgccatagattcttgaggctttgcctggttcactaatgacaggctccagggcgtttctcagggagcrtgttagcatgtttctaggaccagccacatcagccagacctggctctgtacagacccaaacctgagaatgccatgtgagacctgtgtgactgcagaatcaa

SEQ ID NO: 17149 - DNA, 201 bp, Homo sapiens
aggtgccaattacatgttgaatttcatcttcaacccaactctacttacctttcagggagtgatgagtagggggcgagaggggaaaatgcagaaagtgttgyttgaggcccacagaaactataaagatgaagaacaggagaaacgtagttaatcatgccctggaaagctggcctgcagaaagaaaaggaatttatctctgag

SEQ ID NO: 17150 - DNA, 201 bp, Homo sapiens
cttacctttcagggagtgatgagtagggggcgagaggggaaaatgcagaaagtgttgtttgaggcccacagaaactataaagatgaagaacaggagaaacstagttaatcatgccctggaaagctggcctgcagaaagaaaaggaatttatctctgagaaggccttcagaaagaaaatgagtaggctccggagacgttcat

SEQ ID NO: 17151 - DNA, 201 bp, Homo sapiens
ctcaaccagagaggcatctttcaacatggcaagcaagattactccaaaaaaatgccacttaccattcctttggtgtactgcttctagaggcaaagtttacygcttttactgtcatgaaatagactgtgacttgttatttatcatttatgtgaccaattatagttacaatcatgttccatgtgacaatagaatctttccccc

SEQ ID NO: 17152 - DNA, 201 bp, Homo sapiens
tactgccattgtgatcatattctcaggccttgtggagacatgggcattgccagctgttacagtaggcatatttgcattgatcagaacataaaagtttccakaaacacagaagtgaatcaaatagtgtggtttaggttcacccactgcctcagactggaagctggcttctggccactccatgacaccagcttggcaacctca

SEQ ID NO: 17153 - DNA, 201 bp, Homo sapiens
gtgtgtgagccctccagccagggtccgcaccaggccatcagccatcccttcactggccagagctcctgccttccccagctcagcctgctacgaccctcacrgccactcccccaaaaccagcagacttctcctcctcctcagtcaatcttctcctttcacaccacctcctttcttactgaaagcgtggatctaacctgggga

SEQ ID NO: 17154 - DNA, 201 bp, Homo sapiens
tctcaggccccattctagactctaattcagaatctgcattttaatagagttcctcatgtgattcttatacacagtaaaatttgagaagcactggtggaggkcccaaattctgtaaagttacctattaacttacggaaggctgataagttataaatgactcttgccagtaaagataaaaatgatttctgtttgactgaaaat

SEQ ID NO: 17155 - DNA, 201 bp, Homo sapiens
tcctcaataataaattaaataaatctttgccacgtattcactatatatttgtatgagaatcatgtttttaactttttgaaaattatgctttgacaaccagstttctgtcatcatttttaatagttctgtggtattctattttgtgattgaccatagtttacttatctattgccctaatgttagacacttaggatattgcta

SEQ ID NO: 17156 - DNA, 201 bp, Homo sapiens
aaaaaagcataaactgacacagacaatattcaataagtgttagagagggatggaagccaggccctaaaaaggttaaataagcagtgctaggcattataacrtcagtattgtgcccagtcactgcttgggcttgagcaaggggctggaccagtgggcttcagcgatcagtgaggcttcttgacagaggattgaactaggttt

SEQ ID NO: 17157 - DNA, 201 bp, Homo sapiens
ccaaaagaatcaggtcagaaccttaaagctcatactcagcacccaaggtggcagctgcacagagcagaaataatggcccaaaagttgagagagccgtgggyctggctgctcaggagaccgcagccaggacacacctcctctctgggtctcccttttctgatctgcaaaatgataaaataaacagtcttaggggttacttgt

SEQ ID NO: 17158 - DNA, 201 bp, Homo sapiens
tctggtttatccacttgtctgtccatggacactttgggttgtgtctacccttggctactgtgaatagtgctgctatgaacatgggggaacaaatgtctctktgagttcctgctttcagttcactgggtaataaacccaaaagtataatttttgggttatatgacaattctatgtttaattattttgagaaatgttcatatt

SEQ ID NO: 17159 - DNA, 201 bp, Homo sapiens
cagagcactggggcaagtacaggtggtccacactcatcagattctgggatgtgcggctgtgtagagaagctttagtgcgatgggtgtatcactcgtatgargtaggagtgagcctgtgcctgattttgtgcagcagcgctggccagctctgaggcgtgcagcactgagtgcggtgcaggaatatgcaaggaatctgcaatc

SEQ ID NO: 17160 - DNA, 201 bp, Homo sapiens
gcttcacaatgtcctttttggtatgatttccatgattgagaaaactggggattgtatgtgtagtacatctggtttatccacttgtctgtccatggacactktgggttgtgtctacccttggctactgtgaatagtgctgctatgaacatgggggaacaaatgtctctttgagttcctgctttcagttcactgggtaataaa

SEQ ID NO: 17161 - DNA, 201 bp, Homo sapiens
ggcttgagctcctggcctcaagttgatccacccgccttggtctcccaaagtgctggaattacaggtgtgatccaccatacccaacctatttattttatttwattttattttggacggggtcttgctctgtcacccaggctggagcgcagtggcacagttacagctcacttcagcctcgatatcccatgctcaaatgatcct

SEQ ID NO: 17162 - DNA, 201 bp, Homo sapiens
aggtttaatggactcacagttccatgtggctggggaggcctcacaatcatggtagaaagcaaagacatgtcttacatgggtggcagcaggcaagagagagracttgtgctggggaactcctcattataaaaccattagatcacatgagacttattcactttcatgaagacagcacaggaaatacctgtccccatgattcag

SEQ ID NO: 17163 - DNA, 201 bp, Homo sapiens
tgctgatagacactgagactgggtaaattacacagaaaaagaggtttaatggactcacagttccatgtggctggggaggcctcacaatcatggtagaaagsaaagacatgtcttacatgggtggcagcaggcaagagagagaacttgtgctggggaactcctcattataaaaccattagatcacatgagacttattcactt

SEQ ID NO: 17164 - DNA, 201 bp, Homo sapiens
ggagggaggagggtctcaaattaaaaagacaagaaacaaacaatctccccaaataagcagaaagtctgagcgtggaactgagctggttggagctggggagsgggtgcgggaggtactttcagcactccctcgtgagatcatggaacagggcaggaaatctgaacctgctgccaaagaaaactcgctttgccttttgtaaaa

SEQ ID NO: 17165 - DNA, 201 bp, Homo sapiens
attagtccatttttacactgctgatagacactgagactgggtaaattacacagaaaaagaggtttaatggactcacagttccatgtggctggggaggcctyacaatcatggtagaaagcaaagacatgtcttacatgggtggcagcaggcaagagagagaacttgtgctggggaactcctcattataaaaccattagatca

SEQ ID NO: 17166 - DNA, 201 bp, Homo sapiens
ttaggtcagttctgaggctcccccagatgtgggacactcctcacggacaagttcagtgttgtatttacttttctggatttattttcacaaatattcagctyagaatgtgccagggaggggaggaacatacctcctatgcggcaggagctgtattgggcacagccacgagtgtcatcccagggaactcatgtgagccctgtg

SEQ ID NO: 17167 - DNA, 201 bp, Homo sapiens
gggtcaccaggcagtcaaggcggagcaggcctgaggcatccttgcaacattagaaccagaacaacatttcattcttttatgttaaacggactctcctgccyggacccaggcccacgttagcatccagagtggcatgcagtggcagaattggagctggaacagccctcatttgttgtcttctctccttgggaaatcttcctg

SEQ ID NO: 17168 - DNA, 201 bp, Homo sapiens
gagaggctgtcaatcagtgcatcatcccctgctcccacagtggatgattggcactttgtcctgcagggaaacgtacctcttggaatgactatatctgagargtgaaggagctggagtgtttgtaccccaattcctgagattcactggttgagggctactctgggttaggtgggtggggacagttagctccctggcacttgc

SEQ ID NO: 17169 - DNA, 201 bp, Homo sapiens
ggcattataacatcagtattgtgcccagtcactgcttgggcttgagcaaggggctggaccagtgggcttcagcgatcagtgaggcttcttgacagaggatygaactaggtttagaaaagactttcccaaaggggaatggacattccaaagagatggcaaagcttggagaaagacctgtggttggccagcctgtctggagcc

SEQ ID NO: 17170 - DNA, 201 bp, Homo sapiens
acctgcaggcataatggagggtggtgagtgctgcgcagtaactgctctggaaactgagaagaaggtgccatgagtccccctcccttgcccccaaggaggasggaggattaaaaggtcacagagaacagtgtggtagatgagagcagctttcaggctgacagctgtgggcagcaatcctgactctcacacttgcctgacatg

SEQ ID NO: 17171 - DNA, 201 bp, Homo sapiens
tgctgcgcagtaactgctctggaaactgagaagaaggtgccatgagtccccctcccttgcccccaaggaggagggaggattaaaaggtcacagagaacagygtggtagatgagagcagctttcaggctgacagctgtgggcagcaatcctgactctcacacttgcctgacatgaggccttaagggggctgcttaccttctg

SEQ ID NO: 17172 - DNA, 201 bp, Homo sapiens
agatagtggtaccacacagtgagtgctaggtgggttactccagggctctggagcagcttccaagaggtggtgttgagaggaatgaggactcacgcattccdagcagagggaaaatgtgagcagaagtatggagaacaggactcccatgaagatctgcaggtgtctggaatgaaggaggcagtcaggagaacacagtgagag

SEQ ID NO: 17173 - DNA, 201 bp, Homo sapiens
tgttaatgggcatattgctggctcagttgatacctcatgatggcatgaggtttaaatcagggagagccgtgaagtatgacacaaggagagtcattagaaargcagaggacatcatgcttctctctcgattctttgagcaccctggctgtgtgctgctttctgagcaagtctctgcttggggctgcagtctcctgccatgga

SEQ ID NO: 17174 - DNA, 201 bp, Homo sapiens
gctaggaagacctgttctttatttattgacttgcatttattgagaactgttgggaataatattgtgcctctagggcatttagaagataacatgcttttttytggttcttgcaaattactttcggtgacttgttctcatgggttgcttattttgagtttttatttttagagaactgatattttttctgttcttgatgaggta

SEQ ID NO: 17175 - DNA, 201 bp, Homo sapiens
aaattatggaagtattggacttgagcaaacttttgacaaatagcgctctctttctctcttgggcgtatgcgtgtgtgcatgcatgtactccagctctctgkgtatgttacacacacacacgtttttcgcataaaacatttttattttgggccaggtgtggtggctcacgcctgtaatcccagcactttgggatgctgaggc

SEQ ID NO: 17176 - DNA, 201 bp, Homo sapiens
aacaagacactctactgccatctgttggaaaacagttataataaacttatacacatacatgatatctgtgatgtgagtggtatcccccagccccttaaatrcagtgtagcacctgcactactgtacctacaactccctagccatgagagtgcattatgttttaagaaatggtcttcagactctaaaaaaaggaagacatac

SEQ ID NO: 17177 - DNA, 201 bp, Homo sapiens
aatcccagctactctggaggctgagacaggagaattgtttgaatctggtaggcggaggttgcagtgagccaagattgtgccactgcactccagcctaggasaccgagcaagactccatctaaaaaaaaaaaaaaaaaatctttattttgaaataatagcagtcttacaaaaaagtcattaggatagcacaaagaaataccg

SEQ ID NO: 17178 - DNA, 201 bp, Homo sapiens
gattgaagctcagaacacaagactcttgccagttgttctaagaaagcttctgctctttcccagtcattcaaactgcaccaccttatcgacttcccctcacrgtgaatgctcaggatctccttggcaacgtgggtgaagatacctgctggctctcttgacagttctcgtctttggcttggccaataaaccccctttagggaa

SEQ ID NO: 17179 - DNA, 201 bp, Homo sapiens
aacaggtgcgtgccaccacacccagctaatttttgtatttttagtagagctggggtttcactatgttggccaggctggtcttaaactcttgacctcaggcracctgcccgccttggcctgccaaagtgctgggattacaggcgtgagccaccacactggcctacttttttttttttttttttcctgctgagggatcttgtc

SEQ ID NO: 17180 - DNA, 201 bp, Homo sapiens
aaataccgtaaattcttcacccagattccctaaatgtcatttgctttgtaattttctatctattcgtacttcttacctgtttgagagtaagtcggagacgygatgcccccttatccctaacatcagggatatttcctgagaacaaggacattcttttacgtaaccatagcacaattattgaaataaggaaattaagtgata

SEQ ID NO: 17181 - DNA, 201 bp, Homo sapiens
cgacttcccctcacggtgaatgctcaggatctccttggcaacgtgggtgaagatacctgctggctctcttgacagttctcgtctttggcttggccaataawccccctttagggaagtagaaagatggtggcaacagacagctcctcagctccacctgccttcccttcttcaggggagcttatgaccatcagggtggctgtg

SEQ ID NO: 17182 - DNA, 201 bp, Homo sapiens
tcagagcagagagccacgaatggggcactcggggccgtgacaggcatcccttagctctggccttctggttgtgggcagactctgctgtgtccggcagcccmtccagcgttggatggcatcagcaacctgaaagccctttcttaggctgaaccagagtctacctccatgtaatcacacactcccctcctatttctgccccgg

SEQ ID NO: 17183 - DNA, 201 bp, Homo sapiens; identical to SEQ ID NO: 1949

SEQ ID NO: 17184 - DNA, 201 bp, Homo sapiens
ggataagtgctggggctcctatggtgggtgtgctgcagtcttcagcagagcttggctacagaggagaaagatctaaactggaccaatttcatatggtcatkgcctctggcttgtggctgatcatcttgttctttggaattgactgtctcatgaaatagtgagtttcttgtcaccagagagatttaagcaagagccatggaa

SEQ ID NO: 17185 - DNA, 201 bp, Homo sapiens
tgagggcatgctgcccctagttatgatattgctcctaggaagaataaaatctgcttcacaatgtcctttttggtatgatttccatgattgagaaaactggsgattgtatgtgtagtacatctggtttatccacttgtctgtccatggacactttgggttgtgtctacccttggctactgtgaatagtgctgctatgaacat

SEQ ID NO: 17186 - DNA, 201 bp, Homo sapiens
ccccctcccttgcccccaaggaggagggaggattaaaaggtcacagagaacagtgtggtagatgagagcagctttcaggctgacagctgtgggcagcaatsctgactctcacacttgcctgacatgaggccttaagggggctgcttaccttctgtgaccctcagtttcttcctctgtaaaaaggagaccatcacctccagt

SEQ ID NO: 17187 - DNA, 201 bp, Homo sapiens
ttcattttgttatgagagatttcagttacaacagtgtgaggtgggtggtcaggaaacattccccctgggctcactttttgcttagaaaagtcctgatggaraggttgaggtgggaagagagtgagggggaagactccatggagcatgacaggcatgctgtgcctgccacagccaagcatggaggtcccaaccataatgtgt

SEQ ID NO: 17188 - DNA, 201 bp, Homo sapiens
gggaagcattgtttgtgatttcacattgcaggggctatttacatgtatgatttgcatcattgattttatgatacattgttgagagtatctgtgattttttkggaagctgaatccttactgagggcatgctgcccctagttatgatattgctcctaggaagaataaaatctgcttcacaatgtcctttttggtatgatttcc

SEQ ID NO: 17189 - DNA, 201 bp, Homo sapiens
aaagtcctgatggagaggttgaggtgggaagagagtgagggggaagactccatggagcatgacaggcatgctgtgcctgccacagccaagcatggaggtcycaaccataatgtgtttttgagacaggatctggctctatcgcccaggctggaatgcagtggtgcaatcttggctcactgcaacctccgcctcccaggctca

SEQ ID NO: 17190 - DNA, 201 bp, Homo sapiens
ctccctaaacatctctatctccaacctcggagatgatgcctatgatgccaacgtgtccttcaatgtttcccgggagctcttcttcatcaacatgtggcagmaggtaaggagggcatccctgtaaaaagagcagttgttccatctggtgcgcttgctgactttcattattgcctggaataggcaatgattctacaagcacta

SEQ ID NO: 17191 - DNA, 201 bp, Homo sapiens
tattttgagaaatgttcatattgttttccaagcagccactcgattttacgttcctaccaacagtgcacaagggtttcaatttctccacattcttgacaatycttgtcttctgtttttttgatagttgccatcctaatagtcatgaagtgggaaaaaatagtttttaaaaagtaacagatggataaacaactaagagaaaga

SEQ ID NO: 17192 - DNA, 201 bp, Homo sapiens
catgtcaaaacctagtagcttaaaacaacattgattagccctcatagtgggttggggattccagagtggttctggctcgaggtctcttatgagactgcagycaggatgttggctggggatgcagttgtctgaaggctccactggaggatctgcttcccttgtggcccctcgcttggctggctgttggccacaggccacaga

SEQ ID NO: 17193 - DNA, 201 bp, Homo sapiens
agtagggaggtgaaacaatggtagggaggtgaagttatataggcaggaggcagtgaatgaaaagtgagctgttaaaccaactactacagtgggcaatgggscttattcctgcagggcaacactaggaagagtaagggagctgggggttttatactcctttccccaagtgtcaagaattgaggtctcctggggctatttata

SEQ ID NO: 17194 - DNA, 201 bp, Homo sapiens
tattagttatctgttgctgtgtcacaaatcacatgtcaaaacctagtagcttaaaacaacattgattagccctcatagtgggttggggattccagagtggytctggctcgaggtctcttatgagactgcagtcaggatgttggctggggatgcagttgtctgaaggctccactggaggatctgcttcccttgtggcccctc

SEQ ID NO: 17195 - DNA, 201 bp, Homo sapiens
atagcagccctaacacccactgtattagttatctgttgctgtgtcacaaatcacatgtcaaaacctagtagcttaaaacaacattgattagccctcatagygggttggggattccagagtggttctggctcgaggtctcttatgagactgcagtcaggatgttggctggggatgcagttgtctgaaggctccactggagga

SEQ ID NO: 17196 - DNA, 201 bp, Homo sapiens
gtgatgggagtagctgcgaagtcaaaactgcaagggatgtagttaaagggagggttggagagtgggcgtttttgcaaactatctaccccaacctctgagcrgtaggtataattatcccagtggttctcaaccaagggtaattttgtctcctaagacacagttcacaacttttggagaaatttttggtttccacaactagtt

SEQ ID NO: 17197 - DNA, 201 bp, Homo sapiens
taacactgccctcaccaaagatgcaagcctggtatctcaaccagagaggcatctttcaacatggcaagcaagattactccaaaaaaatgccacttaccatwcctttggtgtactgcttctagaggcaaagtttactgcttttactgtcatgaaatagactgtgacttgttatttatcatttatgtgaccaattatagttac

SEQ ID NO: 17198 - DNA, 201 bp, Homo sapiens
aaagatgcaagcctggtatctcaaccagagaggcatctttcaacatggcaagcaagattactccaaaaaaatgccacttaccattcctttggtgtactgcytctagaggcaaagtttactgcttttactgtcatgaaatagactgtgacttgttatttatcatttatgtgaccaattatagttacaatcatgttccatgtg

SEQ ID NO: 17199 - DNA, 201 bp, Homo sapiens
caatcagttctctggcaggagggtaggggtgccctgatttgtttgccaaatactcccaccatagcccatttcaaactgccattgcaatgtcactaggtacrgagttaggaagagatgcacagttgcctctcatgagctgatatgagccagttccacataccactgggtttcaggaaaagttgggaaaacttgcctcattgg

SEQ ID NO: 17200 - DNA, 201 bp, Homo sapiens
agaggtgtcccaacctgaatcaaggggctggctgcacccagaggagatgtaaacgttttattctcaattcctgctggcgtaatggctccagtagctcaggrcagtcctctaaaggacaaccacagatgcatcctcagccaggggagacacagggaaatgatgcaaaagaaatgatgcaaaggatctgagcagaacactgcc

SEQ ID NO: 17201 - DNA, 201 bp, Homo sapiens
gccaggggagacacagggaaatgatgcaaaagaaatgatgcaaaggatctgagcagaacactgcccctccccaccccctgaatgtgtgagtgctgagttayggccttcagtatccaagctctctgtttgacagtagatatattgtcagatgcactgtgctgcttagttttgagtgcagtgtgattttctgaaagggcaatg

SEQ ID NO: 17202 - DNA, 201 bp, Homo sapiens
attgtcacttggagcctttagtagacaaaaggcagaaagtgagcatcatttcagaaatgctttagtatgcacacttttagctgatattttgatatatagartaataatatacacagtggagaatattcaaagagtggctgaagggagaatacagagccagtagggccaaaatgaaacttctaggatgtcttctgaattttc

SEQ ID NO: 17203 - DNA, 201 bp, Homo sapiens
gcaatcttggctcactgcaacctccgcctcccaggctcaagccatcctccctcagcctcccgagtacctgggactacaggcgcaccaccaccatgcctgcmtaattttttgcattttttgcagaggcaggggtttcgccatgttgctcaggctggtgtcgaactcaagtgatccacctacctcggcctcccaaagtgctgg

SEQ ID NO: 17204 - DNA, 201 bp, Homo sapiens
gaaggaaactctgacagccagacttctcagtcggaaagtgtctttggtgagccttactatgtgactggctgattcactttgtccgctaagtcttgggagargtgatgtaaccagggactgcaacttctagggaaaggggaaaaatcactgttggccccaccctctagcattggaagcttaacagggctttggcccacagca

SEQ ID NO: 17205 - DNA, 201 bp, Homo sapiens
attgaacaaaataatgtgtgaaggaaaacccagcgagagggatgaagagcagagtgtgctgggctacataggctaaactaagaagtttggattttatttayagtgctctgggaagcagggaagtgacctgatattgtagatattttcaaaaaatcactctgggcctgtggagtgaatggaggacaggagctggagtggaag

SEQ ID NO: 17206 - DNA, 201 bp, Homo sapiens
gggctgccttttaacttacgggtcacctggttattgcctgtgaggctcactgaggaaatgtcttgctggcaaagctgagttcgctcagaatgtggactgtkccatttttctgttgtccaacacttgctttgtttgtgacatttagctccttttcttcctttccatcccaaatccacaccctttcttctgtcttttgcaaaa

SEQ ID NO: 17207 - DNA, 201 bp, Homo sapiens
tcagggtggctcagatgcaggaagtcctcgcctctgctgtcctgctctgccccaccctgtcctgcagaggggaggccctgcccatgggagagtctgcctcyactgggcagtgctggcctggaggaaacttccatgccacccctcctgcccctgggctccagggctctcgatttttggggtaaacagaggtgctgggctctg

SEQ ID NO: 17208 - DNA, 201 bp, Homo sapiens
ctcttctgtgttgggtattgtctctctaagctgcggggaaagggaaggcagcagattggtgtcctggcccatccacttcaggtgagaaggatgcctgctgwcctcgtgtggacacaacttcctctgctctccttggccttgccttggcctctttgctttaggatatgatgcccagaagggctcgaaactggagtctgacca

SEQ ID NO: 17209 - DNA, 201 bp, Homo sapiens
ccactacagcctccaactcctgggctcaagcagtcctccttcctcagcttcccaagtagctgggactacaggcatgtaccattgcacccagctaaattttwaaaaattaagtcttgttgaagagtgagtagaaaccagagtggtgataatttctggttctccctagtcatctccctcaagaatttcccagttacttctcct

SEQ ID NO: 17210 - DNA, 201 bp, Homo sapiens
gattaaaaagagctcaaatgaagggaagataattctaggcagaagaaagagcatgttcaaaggctgtgtgagtgaagaggtgggagagtgtgctgaaaggkgggcagaagcctctctgccctgggggaggggatggtgccagggagctctaattgtattttgctggcactggggagccatggaaatttctgtaggaaggga

SEQ ID NO: 17211 - DNA, 201 bp, Homo sapiens
acatggagaaaatgtcatgagggaggaaatgctgggatttgccttgacctctggctgggggacggggagggatgagaggtccaaggcaagatggataagtrggaataagcagccttgttttggggaaaaagagggacagacctagaatggctggctgggtgaaatggcttgttgtgtctcctaaattagattttacatttt

SEQ ID NO: 17212 - DNA, 201 bp, Homo sapiens
agattctggatattagccctttgtcagatgagtagattgcaaaaattttctcccattctgtaggttgcctgttcactctgatggtagtttcttttgctgtkcagaagctctttagttcaattagatcccatttgtcaattttggctgttgttgccattgcttttggtgttttagacatgaagtccttgcccatgcctatgt

SEQ ID NO: 17213 - DNA, 201 bp, Homo sapiens
agaggggtgattgtgaactcagcagggagaacccagatcctctactcctgatcatgctctagcgcacagagcactgtaagctcgtgaggaatgtgcttcgyacctggcatcggttggccataagtcactgaatttggctaataagatgttgcattgtctctgatctccttgagagactgagatagatggataggccctagg

SEQ ID NO: 17214 - DNA, 201 bp, Homo sapiens
catgtcaccagggcatgtggtggtggaggtggggcaacccttgcccaggccagccatccagacgtctttgatacctcctaccactggctacagtgggcttyattttcctcccccttggcctcacttctgcagacacatgactttgttagaagcaagggaaaaaagttaggaagatctaggttttgttctaggagttgccag

SEQ ID NO: 17215 - DNA, 201 bp, Homo sapiens
aggctggtctcaaactcctgatttcaagtgatctgccctacttggcctccctaggattacagacgtgagccaccacgcctggccaataatcttggtgtccyctattctgcagaaccatgaaagggacgtgacatggacagaaagatgcctctggccctctgtagctaatggagggtgggtgagtgggggctgggttggggg

SEQ ID NO: 17216 - DNA, 201 bp, Homo sapiens
gatttaatgatgcggaggtgtttttgagaggctctgagaattcagagaaaaagaacaaagcaataaaaaaggatgacatgaggactatattgtggaaggtrgaaactggaaaacagcaaagagaaaatggttccagaataattggaacagaagccattccttagacagcaaaggaggatctccatttcctgaaatgggtgc

SEQ ID NO: 17217 - DNA, 201 bp, Homo sapiens
gcaggtggagacacagggcaggggatctggaggaacatcagtggggtctgcgacaacctgtgaccacctcacagacaaggtgacttctggcttctcagtgmctcagccacacttctctttttcactcactcttctttctggtcctcactaagacaaaatacagaatacagagcagcagttcacgggctatagcatttgagg

SEQ ID NO: 17218 - DNA, 201 bp, Homo sapiens
ttggtttccacaactagttcagcgctattagcatctagtgggtatgccagggatgctgctaaataccccacaatgcacaggacagctccccacacaacaargaattatccaacaatgcacaggacagctccccacacaacaaggaattatccaacaatgcacaggacagctccccacacaacaaggaattatccaacaatg

SEQ ID NO: 17219 - DNA, 201 bp, Homo sapiens
aattttttgtatttttattagagacggagtttcaccatgttggccaggctggtctcaaacgcctgacctcaggtgatccacccacctcagcctcccaaatkgctgggattacagtcgtgagccactgagcccggtcaaaatcccttcttacctgtcatttgtattctccccattctgtgtctgacatcttgtaggtgtttg

SEQ ID NO: 17220 - DNA, 201 bp, Homo sapiens
tagccagttttcccagcaccatttattaaatagggaatcctttccccattgcttgttttcgtcaggtttgtcaaagatcagatagttgtagatatgcggcrttatttctgagggctctgttctgttccattgatctatatctctgttttggtaccagtaccatgctgttttggttactgtagccttgtagtatagtttgaa

SEQ ID NO: 17221 - DNA, 201 bp, Homo sapiens
tttccttctaacagtcaggaccctcagctgcaggtctgttggagtttgccagaggtccactccagaccctgtttgcctgggtatcagcagcggaggctgcmgaacagtggatattggtgaacagcaaatgtagctgcctgatcattcctctggaagttttgtctcagaggagtacctggccgtgtgaggtgtcagtctgcc

SEQ ID NO: 17222 - DNA, 201 bp, Homo sapiens
gtgaacagcaaatgtagctgcctgatcattcctctggaagttttgtctcagaggagtacctggccgtgtgaggtgtcagtctgcccctactcggggatgcytcccagttaggctactcgggggccagggacccacttgaggaggcagtctgtccattctcagatctcaagctgcctgctgggagaaccactactctcttca

SEQ ID NO: 17223 - DNA, 201 bp, Homo sapiens
cgatggtgggcgcccctcccccagccttgctgctgccttgcagtttgatctcagactgctgtgctagcaatgagcaaggctccgtgggcgtaggactctcygagctaggcacgggatataatctcctcgtgtgctgtttgctaagactgttggaaaagcgcagtattagggtaggagtgacccgattttccaggtgccatc

SEQ ID NO: 17224 - DNA, 201 bp, Homo sapiens
ggtgatgcctcgccctgcttcggctcacgcttggtgtgctgcacccactgtcctgcacccactgtctgacactccccagtgaggtgaacccagtacctcarttggaaatgcagaaatcgcccgtcttctgtgtcactcatgctgggagcagtagactggagctgttcctatttggccgtcttcgctgttatttttaagaat

SEQ ID NO: 17225 - DNA, 201 bp, Homo sapiens
ggctcacgcttggtgtgctgcacccactgtcctgcacccactgtctgacactccccagtgaggtgaacccagtacctcagttggaaatgcagaaatcgccygtcttctgtgtcactcatgctgggagcagtagactggagctgttcctatttggccgtcttcgctgttatttttaagaataaattttaaaaggacaaagta

SEQ ID NO: 17226 - DNA, 201 bp, Homo sapiens
ccatacccacagacctgccatccctggccctgcctggatgccggtacctggccactgctgctatattccatgcttttggacaagagcatgttcagtattgyccaggagacccagggagctcaagacagagctgagatccagttcctacagccacagttaacaccccagcccccgacacacacacagacttttcaatgcaaa

SEQ ID NO: 17227 - DNA, 201 bp, Homo sapiens
ttagttccctgataactttatatatttttaatttttttaaatgaacctggcatttcaaacataagttccatgataattttaaacaggggtgtgtgtgtgtrtgtgtgtgtgtgtgtgtctgtgtgtgtgtgtgtgtgtgtgtccagcttttcgagttgtccgtgggaggacggtttcagtaagttactctatcattactgg

SEQ ID NO: 17228 - DNA, 201 bp, Homo sapiens
agttccctgataactttatatatttttaatttttttaaatgaacctggcatttcaaacataagttccatgataattttaaacaggggtgtgtgtgtgtatrtgtgtgtgtgtgtgtctgtgtgtgtgtgtgtgtgtgtgtccagcttttcgagttgtccgtgggaggacggtttcagtaagttactctatcattactggaa

SEQ ID NO: 17229 - DNA, 201 bp, Homo sapiens
tcttttaaaagagtcttcaagctgatgaaaattttaaagtagcttataacattttaactgtgatcttatttattatgagtatagagataaaggaaaaggcmtcccacttctgaagatttctcgtttctaggagtgtctacaagattatcataggtgaaagtagggttggatgcagagaaatagtaagaaaggatggaggat

SEQ ID NO: 17230 - DNA, 201 bp, Homo sapiens
ggatgagagggtagaagagagcaaaggaggaggggcaggagagaacccggtaggatggaaagaggctgcccatgttgaacaaagggccagtaacatttctkgtggcagggagatgtcaggacattttagaaatctgatgcctgctgttacaggcctgtcaggactttaccactcataggttctaagaaatctcccctcccc

SEQ ID NO: 17231 - DNA, 201 bp, Homo sapiens
ctttggctcttcttgcctttgtcaaacagccatgaatttgtttggacagcagttgttgaatgcctgctaaatgctagggactgttccagccacaaggagamacaaagatctagtccctgctcccagggagctcatggcctattggggccaaaggcatgtcagtaagcaattaaagcacaaggtgccagctgctctacagag

SEQ ID NO: 17232 - DNA, 201 bp, Homo sapiens
gggtcgtggtggtctaggagaccagtgatggtccctggctttgacttgttcttttgagaggtttctcatcctctcccctctatgaggcttggtagcctttycagaggagagccttggaagcatgtgcctctgggtctgcagtgatgctggatcacactgcacctgatgcctttctcagtggtctactacaaattagctcat

SEQ ID NO: 17233 - DNA, 201 bp, Homo sapiens
atgtggaaaaagcccttgccatctctatcctccaacacagagctttggtgtccgagacacatccaagtgacaggcccaagagggcctctgaatgaagacgkatgagccgtgtggacacagccacactatgttttcgtgaaggcataagaccatgggccaactttctgggcatccagggctggctgcagaggctggagtgag

SEQ ID NO: 17234 - DNA, 201 bp, Homo sapiens
actggaaatttgggaaagggaaatggactatgtgggaaagcgggactcttatccttgcagaagtcactatgaaatgaggctttcagtaaacagaagatggrcatttcatcctttctcattactgagccttcctcaagacctccttaacatcctaacattataaatacaataattttagaaattacttagtcaataaaaaat

SEQ ID NO: 17235 - DNA, 201 bp, Homo sapiens
tgttccccttcctgtgtccatgtgttctcattgttcaattcccacctatgagtgagaacatgcagtgtttggtttttttgtccttgcgatagtttgctgaraatgatggtttccagtttcatccatgtccctacaaaggacacgaagtcatcattttttatggctgcatagtattccatggtgtatatgtgccacattttc

SEQ ID NO: 17236 - DNA, 201 bp, Homo sapiens
atgtgccacattttcttaatccagtctatcgttgttggacatttaggttggttccaagtctttgctattgtgaatagtgctgctataaacatacatgtgcrtgtgtctttatagcagcatgatttataatcctttgggtatatacccagtaatgggatggctgggtcaaatggcatttctggttctagatccctgaggaat

SEQ ID NO: 17237 - DNA, 201 bp, Homo sapiens
tgggtcaaatggcatttctggttctagatccctgaggaatcgccatattgacttccacaatggttgaactagttgacagtcccaccaacagtgtaaaagtsttcctatttctccacatcctctccagcacctgttgtttcctgactttttaatgatcaccattctaactggtgtgagatggtatctcattgtggttttgat

SEQ ID NO: 17238 - DNA, 201 bp, Homo sapiens
ttctggatattagccctttgtcagatgagtaggttgcagaaattttctcccattctgtaggttgcctgttcactctgatggtagtttcttttgctgtgcakaagctctttagtttaattagatcccatttatcaattttggcttatgttgccattgcttttggtgatttagacatgaagtccttgcccatgcctatgtcct

SEQ ID NO: 17239 - DNA, 201 bp, Homo sapiens
ccccagagagttgactcctaattaattgctagttggtctcagctgctgaaacagagggtatggaactaaatgaaacaatcatgggaagtcctggctggtcygtgtgctgggaagggagcaatgctgtccttggactggtcacctgaaggtcctttatccctcctcctcagctgagcataccaatggtgatgacagaggccc

SEQ ID NO: 17240 - DNA, 201 bp, Homo sapiens
tagaacctggagcagacccagacaacccaccgacctctgacttacagaactgtgagataatagatttgtgttattttgagcagctgaactccggtaacttrttactgcagcaatagaaaataatagacacacaatacagcccacacctccagaaccccggggcttctttcctccctgggctctctggggaaggagcacagg

SEQ ID NO: 17241 - DNA, 201 bp, Homo sapiens
cttgtccccaaattaatgcttgaacaatcaacaaccaataatttctggtatccagggactcagacatgacaaccagaattagggaagctgcacttgtattrttaatgtggctttttaacccatagctgtttttttaccctcagatgtggccattggtgcacccaaggaggatgacttcgcaggggcggtctatatctatca

SEQ ID NO: 17242 - DNA, 201 bp, Homo sapiens
acttttttttttttttttttcctgctgagggatcttgtccccaaattaatgcttgaacaatcaacaaccaataatttctggtatccagggactcagacatracaaccagaattagggaagctgcacttgtattattaatgtggctttttaacccatagctgtttttttaccctcagatgtggccattggtgcacccaagga

SEQ ID NO: 17243 - DNA, 201 bp, Homo sapiens
ggagatcccctcagctgaggatggttctctagagaagaatgcagatgtgagccataagcagcctacacacacatcagccaggagatgggccacagttcacwgtgcccactacacatcaaaacacaccctctggggaatgctgccaagaggttttgatttaaaacacgaaccttctttcacaacacaagtgccccaggagag

SEQ ID NO: 17244 - DNA, 201 bp, Homo sapiens
agtgttagagtggggcatagagcttgcaaggctgtttcagccaggggtgggtgggggtgattttcaggcctaatgctgacaccactccactgagagaaagragcttgcttccgggtgcctgcaagagatgacagtgccttcaccttgttgttagcaagaattgcatacataaaaacttgagcacatgaaagccacatgtaa

SEQ ID NO: 17245 - DNA, 201 bp, Homo sapiens
cctccatccagcagaagcctgggtgagatgtactgccattgtgatcatattctcaggccttgtggagacatgggcattgccagctgttacagtaggcatayttgcattgatcagaacataaaagtttccagaaacacagaagtgaatcaaatagtgtggtttaggttcacccactgcctcagactggaagctggcttctgg

SEQ ID NO: 17246 - DNA, 201 bp, Homo sapiens
ccagctgttacagtaggcatatttgcattgatcagaacataaaagtttccagaaacacagaagtgaatcaaatagtgtggtttaggttcacccactgcctyagactggaagctggcttctggccactccatgacaccagcttggcaacctcaggtacgttaaattctacagaagcaggcagggtgccagtgtctggacctg

SEQ ID NO: 17247 - DNA, 201 bp, Homo sapiens
aagataggacacagatgcaaaagcagatcgctacagctggatctgggtaaaggtggcagtgacgcgtcggtgcagagaattcctgttttgaggaaagattmggagccagctaaggttttctgagggcccgtcatgtctcagactgtcacacttattcctctgtcatgtatgcttaagtctgttttagatgaccccttgtaa

SEQ ID NO: 17248 - DNA, 201 bp, Homo sapiens
aggcagctgcggctcagtccttctctgtcacccgctctccagagaatttacctgcagattaccctcaaaacatgagacaggttcagagcgaggtgggcggytggaatggagccttcacagacagcttgaccacacacagggagctcaggaagcagctttgttggaaaaatgcagggcacttaaactgccacaccaggaggg

SEQ ID NO: 17249 - DNA, 201 bp, Homo sapiens
ttacagtaggcatatttgcattgatcagaacataaaagtttccagaaacacagaagtgaatcaaatagtgtggtttaggttcacccactgcctcagactgsaagctggcttctggccactccatgacaccagcttggcaacctcaggtacgttaaattctacagaagcaggcagggtgccagtgtctggacctgtctcaaa

SEQ ID NO: 17250 - DNA, 201 bp, Homo sapiens
ggggctctcaagccatgattctttacttaaccttcatctataaaatgaaaacactgatagaatctatctcacaagatcattttgaggtaaatgcacatgtrcctaatgcatagtaaattctcagtagaaaataacattttatgtattttgcatgtttctcataaactgattgtgcattctaattatttagtttggaaaatg

SEQ ID NO: 17251 - DNA, 201 bp, Homo sapiens
gtgctcatcgctggaagaacatctactatgaagccgaccacatcctaccccatggcttctgctacatcatcccctccaacctccaggccaaaggcaggacrctgatcccttgctatgaaggtgagcatggattgatttttcctcatccccctacccacctcatgccctaagcccgccttcccacctctatgcaccaccagc

SEQ ID NO: 17252 - DNA, 201 bp, Homo sapiens
tcctgcctgctgaaggcttgctgttgttcaaggctcagtccacaggttttggacatcctcagtggcagctactgtcctaggccctggggatgccactgtcrtcttcctgacttcttggagcttgttccatgctgcctgactcctgctttggggatacttgtcaggcagaaccttgttggagtgactaattgggttagctgg

SEQ ID NO: 17253 - DNA, 201 bp, Homo sapiens
tgcctttcagttccttaggaaacaaattggccatttgcccaaagagactaatccaggactagaacacaggcactgagtttcaacctcaggctccccagtgygtgactcaggtctcttgattccatggtgtattgtttttttacctattaaacaattgcattcctagcctatggaaggtcttacctaagccaagactttggc

SEQ ID NO: 17254 - DNA, 201 bp, Homo sapiens
gtttttttacctattaaacaattgcattcctagcctatggaaggtcttacctaagccaagactttggcagggattggattgtgcagcccatttttgttaayagcattgcccaagttagggaaggccattaggttggctgagtattctggtattctattgctgcataacaaactctgaaatttagtagcttaaaataacatt

SEQ ID NO: 17255 - DNA, 201 bp, Homo sapiens
ttacatagtgaaatggctactatggtcaagcaaatgaacatatccattgcctaacatagtttttttttttttttgatagtaagagcacttggaatctactytattgtcaaatttccagtatataatacaatattgtcaacatagtcatcacgctatacattcaatctctaaattttttcatgctacctaaccaaaactttg

SEQ ID NO: 17256 - DNA, 201 bp, Homo sapiens
caccatccattaattaagcttcatggtgttcactcagtcacactgttgtcgctctcatttgccaatgttaaatagtgatgcacagtgcctaagacaaaatygctatcactgcaagctcctacccctggctaaatgctaatctggatttatgggacagtgacgagtgctattattttcattttataaatgaggaaactgagt

SEQ ID NO: 17257 - DNA, 201 bp, Homo sapiens
accaggaaatcagtggcagaattaaaatatgttatagtcaggaaagagcagaatcagcagaacagaaaattgatttaatgatgcggaggtgtttttgagargctctgagaattcagagaaaaagaacaaagcaataaaaaaggatgacatgaggactatattgtggaaggtagaaactggaaaacagcaaagagaaaatgg

SEQ ID NO: 17258 - DNA, 201 bp, Homo sapiens
acccctgcaccctttcccagtcagttcctctgcccttggtgagtgaacaactattctgacataggctttctcttgcccttgacttttatcagaagctgtaygaagatttttgttataaaagcgtaagctcaagaggggaaagtaatactagctgccgcttatggagggcttcatttgggtcacatgctgcaaagctgaggg

SEQ ID NO: 17259 - DNA, 201 bp, Homo sapiens
gagctcctggcctcaagttgatccacccgccttggtctcccaaagtgctggaattacaggtgtgatccaccatacccaacctatttattttattttatttwattttggacggggtcttgctctgtcacccaggctggagcgcagtggcacagttacagctcacttcagcctcgatatcccatgctcaaatgatcctcctgc

SEQ ID NO: 17260 - DNA, 201 bp, Homo sapiens
cccgccttggtctcccaaagtgctggaattacaggtgtgatccaccatacccaacctatttattttattttattttattttggacggggtcttgctctgtmacccaggctggagcgcagtggcacagttacagctcacttcagcctcgatatcccatgctcaaatgatcctcctgcctcagctccccaaatagctgggacg

SEQ ID NO: 17261 - DNA, 201 bp, Homo sapiens
tcccatttgtcaattttggcttttgttgccattgcttttggtgttttagacatgaagtccttgcctatgcctatgtcctgaatgatattgcctaggttttmttctagggtttttatggttttaggtctaacatctaagtttttaatctatcttgaattaatttttgtataaggtgtaaggaagagatcccgttttccatca

SEQ ID NO: 17262 - DNA, 201 bp, Homo sapiens
tttaattagatcccatttgtcaattttggcttttgttgccattgcttttggtgttttagacatgaagtccttgcctatgcctatgtcctgaatgatattgyctaggttttcttctagggtttttatggttttaggtctaacatctaagtttttaatctatcttgaattaatttttgtataaggtgtaaggaagagatcccg

SEQ ID NO: 17263 - DNA, 201 bp, Homo sapiens
gagtgctgcaataaacatatgtgtgcatgtgtctttatagtagaatgattcataatcctttgggtatgtatacccagtaatgggatggctgggtcaaatgrtatttctggttctaaatccttgaggaattgccacactgttttccacaatagttgaactaatttacactcccaccaacagtgtaaaagcattcctatttct

SEQ ID NO: 17264 - DNA, 201 bp, Homo sapiens
tcaaatggtatttctggttctaaatccttgaggaattgccacactgttttccacaatagttgaactaatttacactcccaccaacagtgtaaaagcattcytatttctccacatcctctccagcacctgttgttttcttgactttttaatgattgccattctaactggcgtgacatggtatctcattgtggttttgatttg

SEQ ID NO: 17265 - DNA, 201 bp, Homo sapiens
tgcagaagctctttagtttagttagatcccatttatcaattctggcttttgttgccattgcttttggtgttttagtcatgaagtctttgcccatgcctatrtcctgaatggtattgcctaggttttcttctagagtttttatggttttaggtcttacgtttaactctttaatccatcttgagttaatttttgtataaagtg

SEQ ID NO: 17266 - DNA, 201 bp, Homo sapiens
ggtccttcacatctcttgtaagttggattcctaggtattttattctgtttgtagcaattgtgaatgggagttcactcatgatttggctctctgtttgtctrttattggtgtacaggaatgcttgtgatttttgcacattgattttgtatcctgagactgctgaagttgcttatcagcttaaggagattttgggctgagact

SEQ ID NO: 17267 - DNA, 201 bp, Homo sapiens
ccttcacatctcttgtaagttggattcctaggtattttattctgtttgtagcaattgtgaatgggagttcactcatgatttggctctctgtttgtctattwttggtgtacaggaatgcttgtgatttttgcacattgattttgtatcctgagactgctgaagttgcttatcagcttaaggagattttgggctgagactatg

SEQ ID NO: 17268 - DNA, 201 bp, Homo sapiens
tttacttccaattacatggtcaattttagaataagtgtgatgaggtactgagaagaatgtatattctgctgatttggggtggaaagttctgtagatgtctrttaggtctgcttggtccagaactgagttcaagttctgaatatccttgttaattttctgtctcatgatctaatatttgacagtggagtgttaaagtctccc

SEQ ID NO: 17269 - DNA, 201 bp, Homo sapiens
aggagatgggcatctcctgtgagctgctggaatcggacttcctcaaatgcagcgtgggatttcctttcatgaggtcaaagtcaaaggtaagggacacagaygggacccttcctcagcagcaggcccccagcccttccaccagccactgattccgccgcctccctgaggtgaggagtcctcccaccccctgcctcccatagc

SEQ ID NO: 17270 - DNA, 201 bp, Homo sapiens
gaagaatgtatattctgctgatttggggtggaaagttctgtagatgtctgttaggtctgcttggtccagaactgagttcaagttctgaatatccttgttarttttctgtctcatgatctaatatttgacagtggagtgttaaagtctcccactattattgtgtgggagtctaagtctctttgtaggtctctaagaacttgc

SEQ ID NO: 17271 - DNA, 201 bp, Homo sapiens
taaagtctgttttatcagagactaggattgcaacccctactctcttttgctttccatttgcttggtaaatattctaccatccctttattttgagcctataygtgtctttgcacatgaaatgggtctcctgaatacagcacactgatgggtcttgactcttcatccaatttgccagtctgtgtcttttaattgggtcattta

SEQ ID NO: 17272 - DNA, 201 bp, Homo sapiens
gatggccagacacgagaaagccaagcagggattttcagttacaggtgagcatccgatctgcagccagggctttttctaccgggcacatctttgtgcgcagsctggtttgagctgatctgcacataaacaggcactctgggtgtggatgggggcatctgtgtactctttatggctatatttccagaatatgcttttaaagac

SEQ ID NO: 17273 - DNA, 201 bp, Homo sapiens
ggatggccagacacgagaaagccaagcagggattttcagttacaggtgagcatccgatctgcagccagggctttttctaccgggcacatctttgtgcgcascctggtttgagctgatctgcacataaacaggcactctgggtgtggatgggggcatctgtgtactctttatggctatatttccagaatatgcttttaaaga

SEQ ID NO: 17274 - DNA, 201 bp, Homo sapiens
cacactgggtcttgtttggagaatggacaggaaaggagcaggagagcaagcagagagtctgaggtgcaagaaatgccctgtcctcccagcagactggagcraattctaattctgcctctgctacttcattcctatgcaactttgggcaggtttcctaatctctctgcctctcaactgttcacccctcataaaatgaggaca

SEQ ID NO: 17275 - DNA, 201 bp, Homo sapiens
cccttttttttttttttttttttttaatggagacaagcagcaattaggtaggcttctaggtcaggtggccagttaggggtgccagggttcccaggtccagytttcttcgggtcatagagtgagggtgggaatcaagtcactcagatatttctcccgaattgaaatgcgtgtcttcctttggctgggcagatgaggtcccct

SEQ ID NO: 17276 - DNA, 201 bp, Homo sapiens
ggtaggcttctaggtcaggtggccagttaggggtgccagggttcccaggtccagctttcttcgggtcatagagtgagggtgggaatcaagtcactcagatwtttctcccgaattgaaatgcgtgtcttcctttggctgggcagatgaggtcccctcttctccatctctgctgctgggtcctggtgcaagcccttactctct

SEQ ID NO: 17277 - DNA, 201 bp, Homo sapiens
tttagtttgcaatttctgtagcctgttttcaaggttcttagcatccttgaattgggttagaacatgctcctttagctcagaggagtttgttattacccacyttctgaagcttacttctgtcaattcatcagactcattctccatccagttttgttcccttgctggtgaggagttgtgatcctttggaggagaagaggcatt

SEQ ID NO: 17278 - DNA, 201 bp, Homo sapiens
tcacggtgaatgctcaggatctccttggcaacgtgggtgaagatacctgctggctctcttgacagttctcgtctttggcttggccaataaaccccctttakggaagtagaaagatggtggcaacagacagctcctcagctccacctgccttcccttcttcaggggagcttatgaccatcagggtggctgtgatgcttccct

SEQ ID NO: 17279 - DNA, 201 bp, Homo sapiens
ctagtggaaaccagggtctgaatttggttggcaaaggcatagtggctccaagcagaggtaaactgctttggttatcattgagctctcttgattcattcttstctgggatggaatgtgccctcctttcttgttcaagccaggcaagtgctaggcactgggctgcagaagtgagcagtatgtgagccctgctctcctgctgtg

SEQ ID NO: 17280 - DNA, 201 bp, Homo sapiens
accactcaccttcccataggacaggtgttcttaacctggagtctatgtcctcttgctgatctgtgaacccggataaggaaatgattgcattttgttttcastaacttcacactgaaatttaacatcatattcaattatgaatgtaggaaacagactacagtaatattaccaggacctgtgactctgtcccaaatagaaatc

SEQ ID NO: 17281 - DNA, 201 bp, Homo sapiens
tattccattgcttgtgactatttatggccgtatttggttcctgagctagaaacagaaaagttatggccatgacagaattacttgtcaagggactatgatgrccctgctaacctgggctttcttgagctgtctgccccgctagctttgatgaaatgcacatacactgcttgcattttctgtgcaatggccaagtgtaacagg

SEQ ID NO: 17282 - DNA, 201 bp, Homo sapiens
gtaactcactcccagaggaagttaaaacatgtatacatacatatagaatgttctgtttaatattattggtttatgcagtatttgaatatataaatatgaayataaagccacgtacagttatggatttaaaacaaaagcagaacttaattaatgttgctgtttggatttttttcaagtgtatttgaatgcagacaagtatcc

SEQ ID NO: 17283 - DNA, 201 bp, Homo sapiens
aggctcccttgcagataagcttcttgggaagttcagccagtggcatcactggtgtgagattggagaaagggaggaggagaaaagtcagggtgtttctcctyaactccactcactttaagcagcatctctggcagtagctacttctcctccaccgtcttagctccctcttggcagtcccagtcccagtcacaatcacaacac

SEQ ID NO: 17284 - DNA, 201 bp, Homo sapiens
atttgagagtatgactccatgagttttgaccactgcatacgctgtgtgactaccaccccaccacaataaagaatacttctgtcaccccagatagtttcctygtgcctctgtctggtcatacccctctcctgatagacaaccactgttctgacttctatcaccatagatccatcttgcccattctagaatttcacattggtg

SEQ ID NO: 17285 - DNA, 201 bp, Homo sapiens
ctaatacatagtgggtttgaatcctggtactgccactagttactaaataagttattaagttgtctaccttatttagtcctcaatgtctttgcaaaatgggraggaggttggtctgtaatgaattctgagatcccttgaagctttgaaaatccgtgagtctctaaattttgatctcataatacatattcatgaaatgagtgt

SEQ ID NO: 17286 - DNA, 201 bp, Homo sapiens
tgcaaatatgctatgataattcccatcttaataaaaaagagcaaaaaaactccctggagcccacttcccccaccagctaccatccaatttctctgttctcytttagagaaaaactcctccaaatagttgtctgtcctcattgcttccatttgttctcctcctacatctctgaaactctctccagttaggctttcctcccat

SEQ ID NO: 17287 - DNA, 201 bp, Homo sapiens
gagggtcactgctttggcctgtgctttggattatttatttatttattttttgagacaagtctcgctctgtcacccaggctggagtgcagtgccacaatctyggctcactgcaacctccacctcctgagttcaagtgatcctcccacctcatcctcccgagtagctgggactacaggtgtgcacctggctaatttttgtatt

SEQ ID NO: 17288 - DNA, 201 bp, Homo sapiens
cctcagggtggcaggaaaaggaagggaaaagaaacagaaactacccttccaggactccagccacgctgcaaggttgataaacagcggatgtaaatggcatyacccagcaccgggtaggattctgacaggacccagtggctagtgaggggcaccaggagagcccccccaacctgcttaacaacccacaggcctaacaggacc

SEQ ID NO: 17289 - DNA, 201 bp, Homo sapiens
aatcttaaaatcaaaattgatggctttatttttctaaaaatgggaaaatatctccaaaacattgttcaaaaacaaaacaaaacaaaaaaaaaatgtttgtycttatatcccatcagtttattcaactaacattcactgtggactttttataaggcagtaactgttttatgaataggagatataaaactgggtgaaacagtg

SEQ ID NO: 17290 - DNA, 201 bp, Homo sapiens
ttttatagttctctgcctcatatcatttcagtctatttagaaacctgctattttagcacaaaacaatatcaaggagaggagtgaatgtggtttgcagcagraaaaataacaatagattgttttctgtagtttaatgtcatacgacaagaggcagaatgtgggcaagctcaggttttgagagtcattctgagtgtgtcctct

SEQ ID NO: 17291 - DNA, 201 bp, Homo sapiens
gagatgtgccatgatgagagtgatgatggtgatggtggcagacaagagcatgtcacatttagaaatactgtaactggttgctgaggttttacatatattcyttctgagcttgttttgtctaatattgcctgtgccaacagtattttaccagaattgaatgaaaagaaaggtaccagcagatttttttagatgttctaattg

SEQ ID NO: 17292 - DNA, 201 bp, Homo sapiens
gcagtatggagtgattatttacttagtgatatattttttatagttctctgcctcatatcatttcagtctatttagaaacctgctattttagcacaaaacartatcaaggagaggagtgaatgtggtttgcagcagaaaaaataacaatagattgttttctgtagtttaatgtcatacgacaagaggcagaatgtgggcaag

SEQ ID NO: 17293 - DNA, 201 bp, Homo sapiens
ccttgtaaggtttagccatgtatagtcatgtgccagtcacctagggctgagaaaggggagcaagcagagagggagaagaggaagaagccaaatgagatggktcgtaattgattagtggaagttaaatcatgttaaggataggaggcttgtcccctccatcatgatttagtatatcatccttcccaagagaagttttgagaa

SEQ ID NO: 17294 - DNA, 201 bp, Homo sapiens
tgatttacccacaaattagataacaataagtgattcaagtttgcgagccataagaattgagtcagaactttaaaaatcaattatttagcagtatggagtgrttatttacttagtgatatattttttatagttctctgcctcatatcatttcagtctatttagaaacctgctattttagcacaaaacaatatcaaggagagg

SEQ ID NO: 17295 - DNA, 201 bp, Homo sapiens
gatgactttgtccatggaatgcctggtgaatgagtgccagccctgggcaggccttccaggcacctctcaatgtctgcatatcttgggctgagtttgttatyaagacggctgcatttgggcagagcaatacacagatacctgtggtgggctaggtactgctgtcagaagtggtatcttctgtggtatttatctgctgctgtc

SEQ ID NO: 17296 - DNA, 201 bp, Homo sapiens
gaagtctcctggggctgtgtttaagtgccgtgttcacaccaaccctgaccggagatgcaccgaactggacatggctcgaggtgggtgaccattactgctgyggtggaaatgggttctgtacccttataccttgctcttcttcttcccaggatggcctgatcattcactcacccatccatccttccctccttccctccctcc

SEQ ID NO: 17297 - DNA, 201 bp, Homo sapiens
tggcaggaaaaggaagggaaaagaaacagaaactacccttccaggactccagccacgctgcaaggttgataaacagcggatgtaaatggcatcacccagcmccgggtaggattctgacaggacccagtggctagtgaggggcaccaggagagcccccccaacctgcttaacaacccacaggcctaacaggaccaacatggg

SEQ ID NO: 17298 - DNA, 201 bp, Homo sapiens
aacctgctagacaaattctaaaagagccataacactcagagcggggattttaacttcatcttctgcttcagggaccacattgttcccagtgtgtttaaacmcctggctggtttttcacttggggttctcattcagattcgtgattctgtttactgagagatgatgtcccagttactctagctctgtaacaaatgactccaa

SEQ ID NO: 17299 - DNA, 201 bp, Homo sapiens
caagaatataaaacatagaatgtatgtcagggggtgataactcttccttttaagccaaaaattatcagtcattgtcttaatgaaggattgagagagagagwgagtgtgtgtgtgtgtgtgtgtgtgtgtgtgtgtctacatactgtaaaaaaaaatagagacagtgttaaactgacatctcttaatttaatgagttgcttg

SEQ ID NO: 17300 - DNA, 201 bp, Homo sapiens
agaatataaaacatagaatgtatgtcagggggtgataactcttccttttaagccaaaaattatcagtcattgtcttaatgaaggattgagagagagagagwgtgtgtgtgtgtgtgtgtgtgtgtgtgtgtgtctacatactgtaaaaaaaaatagagacagtgttaaactgacatctcttaatttaatgagttgcttgta

SEQ ID NO: 17301 - DNA, 201 bp, Homo sapiens
ctgctcctgtgcctgttaagccatacagccccgccccgtcagtcttagattacattggcttgttggtgcctttggtggggtgtgaggctgcgcagtacagrctcgtatgcaaacactgtcaggcctttgaatgcctgtgattggtgtttttatacctgctggggacagggcatcttctctcgggcctcttcttgctaggtc

SEQ ID NO: 17302 - DNA, 201 bp, Homo sapiens
gtagttgggaatacaggcatgcaccaccacacctgggtaatttttgtattttctgtagagatgggggttttgccatgttgcccaggctggtcttgaactcytgagctcaagtgatccacccacctcagcctcccaaagtgctggagattacagagtgagccaccacacccggcctggaatgactttttattcattgattca

SEQ ID NO: 17303 - DNA, 201 bp, Homo sapiens
tgtattttctgtagagatgggggttttgccatgttgcccaggctggtcttgaactcctgagctcaagtgatccacccacctcagcctcccaaagtgctggrgattacagagtgagccaccacacccggcctggaatgactttttattcattgattcatacctagtaactgcagcagtgcctggatgtgtggtaggatctca

SEQ ID NO: 17304 - DNA, 201 bp, Homo sapiens
aaacgacacctccacagaatataatgtgagtggtgtccctggagatgtacagctctatggccctggagtcaaggtaaagcctcattttaattttttgcccyggagccgtttggcacaaaggactttggctcttcttgcctttgtcaaacagccatgaatttgtttggacagcagttgttgaatgcctgctaaatgctaggg

SEQ ID NO: 17305 - DNA, 201 bp, Homo sapiens
tgccatgttgcccaggctggtcttgaactcctgagctcaagtgatccacccacctcagcctcccaaagtgctggagattacagagtgagccaccacacccrgcctggaatgactttttattcattgattcatacctagtaactgcagcagtgcctggatgtgtggtaggatctcaatctttgttgaataaactaatggatg

SEQ ID NO: 17306 - DNA, 201 bp, Homo sapiens
ggcttattttactccttaagtcttcctatttcctagtcacatctcatttgcatgttatatgccatctcatcaattattgggggacctaagatccacatttyctattatttggccctgttgatgctacaacttctgcctttcagcttttcagccattgttctccacttcaaaatggacaaggaggaaaggtgaattggggtt

SEQ ID NO: 17307 - DNA, 201 bp, Homo sapiens
ttcaattattgttttatattacaccagtaatttttaagtagtgttaaaaactagtaaacaatgtaggggtttggagaaaaatgctaattccttatctcccrgaaaagggaaaccatcaggaatcagaaatggagaaatgcttcccccacctggtgattgcatcttgctgtatgggatcaggcctgaaaagtgagttaagtc

SEQ ID NO: 17308 - DNA, 201 bp, Homo sapiens
acacacttcagatttgttctatttactatatttgttacacctccatttttaaaaagtgcaggtattgaagatggaatgacaatgcttttccaaagcctccttttttttatctttggttacatttctctaagctccttatttcagccctggcacatctcacctttatcatttcctttctcattcttttctcctgttggagaa

SEQ ID NO: 17309 - DNA, 201 bp, Homo sapiens
gagcctgtttgtagccatggctgccaacatgcatgagccacttagaagggcttagggtggtgagggtacaggtctacctgtgaagctgagtgatagtcacrgtaattacagtcacctactatagcctcacaatgagccattataaaaatgaggaaactggggctccagaaagatttctcagccccaggacggtgcagccag

SEQ ID NO: 17310 - DNA, 201 bp, Homo sapiens
gtgattttatagttacgactctgtctggctgaaaattttgccgtatagatgaaacatcatcaaggtatgtatacgcattttggaacctatcatataaaaamgaaaacttttgtaacttaaatttgggatttatgtttttggttttttgtttgtttgtttgttttgagatggagtcttgctctgtcgcccagggtggagtgc

SEQ ID NO: 17311 - DNA, 201 bp, Homo sapiens
ggcccaacaaaggacactgaggctactcagtaattattaaatgagagcatgaacaaaggaatgtaagatgtaacagaaaacatacgtgtctcacacatgakaattattgtgtagaagctgtttcccatttgagacaaaataagaaacacttgttgaacgagtagatgggcttcctctgggagcacagcaggtaggcaccca

SEQ ID NO: 17312 - DNA, 201 bp, Homo sapiens
tgccgtatagatgaaacatcatcaaggtatgtatacgcattttggaacctatcatataaaaaagaaaacttttgtaacttaaatttgggatttatgttttyggttttttgtttgtttgtttgttttgagatggagtcttgctctgtcgcccagggtggagtgcagtggcatgatctcggctcactgcagcttctgcctctc

SEQ ID NO: 17313 - DNA, 201 bp, Homo sapiens
ccgcctatgacagttcgccataggcgaactgtttctctggttaggaactttctctggctacaggagtgtgctgcacccgagtcaggagggctggaagtgcrggatagttaacgtccccagtacagttttctaccaaggagagaccggtgagatggatagatgccccagctttctcacccgttgatgacacacttcactacc

SEQ ID NO: 17314 - DNA, 201 bp, Homo sapiens
agatggagtcttgctctgtcgcccagggtggagtgcagtggcatgatctcggctcactgcagcttctgcctctcgggttcatgcagttctcccgcctcagmctccccagcagctgggactacaggcggccaccactatgcctggctaacttctgtattttttgtagagacagggtttcaccatgttggccaaactggtctt

SEQ ID NO: 17315 - DNA, 201 bp, Homo sapiens
ttacaggcgtgagccactgcgcccagccgagatttacgtctctattgtaacttttgtgttttcttgaggaagtgtcacatgacttcttagccctcttattyacctacctaataaataggcatgaaagtatatttgccactacacaggtggaagtcacataatgtaggaaacgtgtctgtgttcaaaactcataagaatgct

SEQ ID NO: 17316 - DNA, 201 bp, Homo sapiens
atgaatgtgttttaaataaggtatatagtgagaaaagtgagcattggagtctatttcagttatgtgttacaataataatgctgcagaacaaactcaaaacytcagtggcatataatacaaagcatatagtttgtgcagctgggattagcagtggcttggctagctggctctgctgatttgggcagggcttgttcatatagc

SEQ ID NO: 17317 - DNA, 201 bp, Homo sapiens
aaaaaggtaagccctaatgaaccgcacttgtggatgcatttagaagcatttgaattgttgacatctgattttgggtaaaaaaaaggaaaaaggaaagcatytgaattggtgtcctcatgacaatctggctgcccccccttttggctgtctacaagagactgtttttatttttatgtatttagggggtacaagtgcagactt

SEQ ID NO: 17318 - DNA, 201 bp, Homo sapiens
taaataaggtatatagtgagaaaagtgagcattggagtctatttcagttatgtgttacaataataatgctgcagaacaaactcaaaacctcagtggcatayaatacaaagcatatagtttgtgcagctgggattagcagtggcttggctagctggctctgctgatttgggcagggcttgttcatatagctaggggtcagct

SEQ ID NO: 17319 - DNA, 201 bp, Homo sapiens
gtgggggcccatcctgtgccagactcctcgtctgcttggcctgtaacgttggcaattatcatcatcattatcgttattaatatccaagtttatttttattyattttaatgtttttatttaaaaaaatatttttagagacaggatcttgctctgtcacccagatgggagtacagtggctcaatcatagctcactgcagcctc

SEQ ID NO: 17320 - DNA, 201 bp, Homo sapiens
gaaacccggaggcggaggttgcagtgagccaagatcatgccactctgctccagcctgggcaacggagtaagactccgtctcaaaaaaacaaaaaacaaacaaacaaaaaaaaaaaaaccaatagtaataatgcttaggacctcaataaaacttcagtcctgtccgtttttggtgagcaagagatgagaacatcagggagtc

SEQ ID NO: 17321 - DNA, 201 bp, Homo sapiens
cggaggcggaggttgcagtgagccaagatcatgccactctgctccagcctgggcaacggagtaagactccgtctcaaaaaaacaaaaaacaaacaaacaamaaaaaaaaaaccaatagtaataatgcttaggacctcaataaaacttcagtcctgtccgtttttggtgagcaagagatgagaacatcagggagtctgggat

SEQ ID NO: 17322 - DNA, 201 bp, Homo sapiens
gggtacagcatttcaggtgcggaagatgaaaggttctggaggtggatggtggtgatggttgcagaataatgaaaatgtacttaatgccatagaactggacrcttgaaaatggtgaaagtgatacatcttatattgctctccctgccccatcacaaatagattgctaggctcactccttatagattctgattctgtacctct

SEQ ID NO: 17323 - DNA, 201 bp, Homo sapiens
ctgactgtattagtcagctattgccacataacaaactgccccacaactccatggcacacatcaagaagcatttatgttctcatggatctgtgggatggttrgacagttctgctgcaggtctgcacgttggctggggaagctgttctccatgtctcttatctttctagaaccagttggctactggggcaggttcttctcatg

SEQ ID NO: 17324 - DNA, 201 bp, Homo sapiens
tcagtcgatataatccaaagctaaagagtaaagaaattactcctgaataactgacccccccaaaaaaatgaataccatttattgctgtcccaaggctttartagcctttttcatgtgctgtcaaatttaatccttatggcaccttcataaggtaagatcagcatcccaagttgaggaaccaagcttcaaggatttgcccaa

SEQ ID NO: 17325 - DNA, 201 bp, Homo sapiens
tgttgcctgccgggcaaggaaccagcaaagcctcactacagagtgacaattcctggggtgccctgtgggagcagtgagagggagctcctggggccgggggrtgctgcatggttaaaaaggagcataaggaagaatagataaccactgcatcacaccagggtcaccattcacactgggttccatgtaaacgacacctccaca

SEQ ID NO: 17326 - DNA, 201 bp, Homo sapiens
agaaaaagaacaaagcaataaaaaaggatgacatgaggactatattgtggaaggtagaaactggaaaacagcaaagagaaaatggttccagaataattggracagaagccattccttagacagcaaaggaggatctccatttcctgaaatgggtgcagcagacaccaggcaaaaatatttaaaacattttaatgtctacaa

SEQ ID NO: 17327 - DNA, 201 bp, Homo sapiens
taaggcaaaggaaaagagtgatagaaaataaaaataacttgattcattagatggaattcaacttgaattcttagtttgttgactaagaatttgcagcctcygaggaaattttttttaattgaagaaaaactaatttttaaaaatctgaaaataattcgtttgtgactatttaacagaaggaaaaacttcctgagtgagcat

SEQ ID NO: 17328 - DNA, 201 bp, Homo sapiens
atcttcagcaagaaaccctgagaatattgaacgtctttgccagacaaggaaaagtgggactggggaaaaggccagttatgtgaatcctcttaaaatagggwctaaaattttataataaaaatgtattttaaaagttttgattgagactttgcctgaaatgtgaaactgaaaattacgaaattaggtttattttatcctgca

SEQ ID NO: 17329 - DNA, 201 bp, Homo sapiens
tcaccggatcccagcccttgcagggtgctgcaggatggtggggcaggtttggaaatagacaatgactgttcaccttagtaagtgggggccagaggtgtgtktacagagctggaagcacagagagggaggatgcctgtcaggggtactagagaaggcttcctcagggtgggaacatttgagctggctgttgaaaggtcgacg

SEQ ID NO: 17330 - DNA, 201 bp, Homo sapiens
gtcaaagctaattaaactgaggtttcctcgagttccagagtacatttttgaagacatttatttcacacatgcaaaaactgaagaagtctttggggcaatamatctttttgatttcttttttttttttttttttttttgagacagagtcttgctctgtcaccaggctggagtgcagtggtgcgatctcggctcactgcaacc

SEQ ID NO: 17331 - DNA, 201 bp, Homo sapiens
ggtcactaagggcttgctttatgaatctgggtgctcctgtattgggtgcatatatatttaggatagttagctcttcttgttgaattgatccctttaccatkatgtaatggccttctttgtctcttctgatctttgttggtttaaagtctgttttatcagagactaggattgcaacccctgccattttttgttttccgtttg

SEQ ID NO: 17332 - DNA, 201 bp, Homo sapiens
tccggcagaatcactaattttatcactcaataattttatgtattaaaaatgctcatcccagaccctgcagtctctgtgtctactcagaaaagactcatgcwgtgcaattagagtgtggcccaggaatctgcattttatttatttatttattttttagacggagtctcgcactctcgcccaggctggagtgcagtggcacca

SEQ ID NO: 17333 - DNA, 201 bp, Homo sapiens
tataattttttttgttaaccatgtgaaagttgcagaaatcatgcctcttgattcataaatacttcagtgtgcattcccaagaatgaggctgttctcttaakaaactgtagtatagttatcacattcaggaaattgaacattgacactatgctattagctaatccgcagtttatgttctgattatgccagttatcccaataa

SEQ ID NO: 17334 - DNA, 201 bp, Homo sapiens
cgccattgttgggcagacccatcaatgtgctctcttggtccttccacacctgaggcagcctgtatgcctgggaaggaatgtgacatggaagagatttcccwtgtcaaaatagaagacacttcctgcctccacctaattcagggctaatcataacagtcagagagggcagggaaccagtattgcaattgtgaaaggttcatt

SEQ ID NO: 17335 - DNA, 201 bp, Homo sapiens
cttccattataggactagactgtgggatccaggaaaatgttgcttaacatctcgttgttggattccaagtcatctgtactcccccaaaataccacttccawtaattactgttccattttgagcactatggtgatattttcattatcaagagttcttgggaagaggccgagaggttttttttagcactcctaagaaaaaatt

SEQ ID NO: 17336 - DNA, 201 bp, Homo sapiens
aagaacaccccctatgtacattaacagtgctgcatagcttcaggaagccctaggatctgtagcttcaataatataaaaatttctagtttcttaaatcacaratgttaagatgaccatattatcttctaagcacacaccagaatatttcagatgctcatttcttttcaggcattggtgaagatatggtctgactgccccgga

SEQ ID NO: 17337 - DNA, 201 bp, Homo sapiens
tattttttctctctttcaactagcattaacatccgaaactgtatatcatcaccacatttcatttaccatggttttttaatttaattattctttaaattttyctatttccatgttaaatccagagaaattgttactttttggaaagtttctactgctgcctgcctctgaaggccacgggacttacctgtttgtttgtcaaag

SEQ ID NO: 17338 - DNA, 201 bp, Homo sapiens
tctattcgtacttcttacctgtttgagagtaagtcggagacgcgatgcccccttatccctaacatcagggatatttcctgagaacaaggacattcttttaygtaaccatagcacaattattgaaataaggaaattaagtgatacattactgttagcttatctgcagaactcactcaaatatcaccagttatcttcatgtcc

SEQ ID NO: 17339 - DNA, 201 bp, Homo sapiens
ggctggcttgcccaggcacacaggcatcatttccagcaagtccacttggtgtagactgtggacctcatgaaggacactgtttcttctcttagttgggggtsagcaaactttttctgaaaagagccatggggtaatttaggctttgtgggccatttggcctctgcagcatctattcaaccatacttctgtagttcaaaggca

SEQ ID NO: 17340 - DNA, 201 bp, Homo sapiens
agaaatgcccaacattttgtaaacactaatttttttataactgtaaagatgattattccatacttaaaaccaattcaaaataaaataaatcctcaatactycttattccctggggtagtaattttaattagattctattgattcattattttctcctgtgtgcctttatttgggaaatactgttagtttaccttgctatcg

SEQ ID NO: 17341 - DNA, 201 bp, Homo sapiens
ggtggctcacgcctgtaatcccagcactttgggatgctgaggcaggcagaccatctgaggtcgggagttcaagaccagcctggccaacatggtgaaacccygtttctactaaaattacaaaaattagctgggcatggtggtgggtgcctgtaatcccagctactctggaggctgagacaggagaattgtttgaatctggta

SEQ ID NO: 17342 - DNA, 201 bp, Homo sapiens
tttagatacggggtttcaccacgttgcccagctggtctcaaacatgcctgcctcccaaggcttattttacttagcataatgacctccagttccgtccttgytgttgcaaaattttggaacatttcaatcacccccaaaagaaatttcggccttttggccagaaccaccatcttccagtaattcgccaaaatgtcgaacaca

SEQ ID NO: 17343 - DNA, 201 bp, Homo sapiens
gaaaagtcagggagctcaatatatattaagagtatgcgctcagccaggcgcggtggctcacacctgtaatcctagcactttgggaggccaaggcgggtggrccacaaggtcaggagatcgagaccatcctggctaacgtggtgtaaccctgtctctactaaaaaatacaaaaaaaaaaaaaaaatgagctgggtgtggtgg

SEQ ID NO: 17344 - DNA, 201 bp, Homo sapiens
tctaagtccccttgttcaaccctatcttttgggtctcagatttggcttcccccccgctttttttttttttttttttgagaccgaatctggctctgttgccyaggctggagtgcagcggcatgatcgtggctcactgcaacctctgcctcccagactcaagccatcctcccacctcagcctcctgagtagctgggactacag

SEQ ID NO: 17345 - DNA, 201 bp, Homo sapiens
attttgactggatttattggatagtgtaattgtttccatttaaaacaatggaaaagatttcatttaaatttattgagatcttatttttcaccctcattccrtgcacatttgggattctgttcgccagcccctctgcactctgaagatgcacagcagcctctctgtactctgaagacgcatgaattgctgactgttgggctt

SEQ ID NO: 17346 - DNA, 201 bp, Homo sapiens
atgggaaggagcctgagctgctggaacctgttccctatgaattcatggcataataggtgtctaaaaaatgaaagacctctggactgtttaaaaaaaaaaaraaaaaagaaaaatccttaacccattgacatagcttcttgtattaatttcttattgctgctgtaacaaattactacaacatttgtggcttaaaacaacaca

SEQ ID NO: 17347 - DNA, 201 bp, Homo sapiens
atcctagcactttgggaggccaaggcgggtggaccacaaggtcaggagatcgagaccatcctggctaacgtggtgtaaccctgtctctactaaaaaatacmaaaaaaaaaaaaaaatgagctgggtgtggtggcgggcgcctgtagtcccagctactcgggaggctgagacaggagaatggcgtgaacccagaaggcggag

SEQ ID NO: 17348 - DNA, 201 bp, Homo sapiens
tcgcatactggtgagtattgggcttctagcatgtttgttaataagttggtcatatcactcaagtcatgcctgatacacagatgtttgattatcagagtctkttttctttcttgtttcctgtggctttttaagttgatgaataataggaaagtaaatttgtggggtcagttaaaccaccagacgacagcttttatgtttgta

SEQ ID NO: 17349 - DNA, 201 bp, Homo sapiens
tcctagcactttgggaggccaaggcgggtggaccacaaggtcaggagatcgagaccatcctggctaacgtggtgtaaccctgtctctactaaaaaatacamaaaaaaaaaaaaaatgagctgggtgtggtggcgggcgcctgtagtcccagctactcgggaggctgagacaggagaatggcgtgaacccagaaggcggagc

SEQ ID NO: 17350 - DNA, 201 bp, Homo sapiens
aggctttgcccgccttaagtccttttttgaaatggagctgatttaaatatgtaagtatggtcacagcattgacacttcagtggttatcgtaagcttatttstacagtatgtgagatgcagtttgtagcaattgctatgggtaaaatttttattttaagaggtgactttctatttacagttattcatttacactgggttcat

SEQ ID NO: 17351 - DNA, 201 bp, Homo sapiens
caaggtcaggagatcgagaccatcctggctaacgtggtgtaaccctgtctctactaaaaaatacaaaaaaaaaaaaaaaatgagctgggtgtggtggcggscgcctgtagtcccagctactcgggaggctgagacaggagaatggcgtgaacccagaaggcggagcttgcagtgagctgagatcacgccactgcactccag

SEQ ID NO: 17352 - DNA, 201 bp, Homo sapiens
ctttgtgcccttggcaggctctcctggtctgtaggtagcatagatggcctgaatgtttggtaaggggtgctggaaactagggcaagaaaagaggggaaggytgggatgcatagaactgatgtgtgggaaactaccttcatcatccagctcaggtgtgaagccgctgctcatgcgatatgctctgctcacacagatggcact

SEQ ID NO: 17353 - DNA, 201 bp, Homo sapiens
tgtctctactaaaaaatacaaaaaaaaaaaaaaaatgagctgggtgtggtggcgggcgcctgtagtcccagctactcgggaggctgagacaggagaatggygtgaacccagaaggcggagcttgcagtgagctgagatcacgccactgcactccagcctgggtgacagagtgagactccgtctcaaaaaaaaaaaaaaaaa

SEQ ID NO: 17354 - DNA, 201 bp, Homo sapiens
ttaaaacttaacagagtgcacacctaaaattagtgaatgttatgtatgtaaattatatctcaatcaaacttattttgttaaaaaaagtttcgtggagattrttccatattggtgcatatagagctttcctgttctttttcagtagttctttttcactattccttgatttatttaacctgtccaggtggtcttctatatgtc

SEQ ID NO: 17355 - DNA, 201 bp, Homo sapiens
tctcacaatgagagcattaaacatttggtaattaacataatttaatatgccaaaaatgagaaaatagtcaggatgagggatgaggagtacacataggaaakttttgtgattttcttcattttgattgtattgctttcttgtcttcaggagggaagattttgacttcaaaagtaacaaaatatttaagaagggaattcacat

SEQ ID NO: 17356 - DNA, 201 bp, Homo sapiens
ctaagatcgtggttgtagcggttgtatggttgcatttattaaaacttaacagagtgcacacctaaaattagtgaatgttatgtatgtaaattatatctcartcaaacttattttgttaaaaaaagtttcgtggagattgttccatattggtgcatatagagctttcctgttctttttcagtagttctttttcactattcct

SEQ ID NO: 17357 - DNA, 201 bp, Homo sapiens
aatcaacatacacatcttttagaaatggcagcagcttgtcatctttatgagcaatctctcccttaatttctggatagagactaatctgctctcacaggagkctgttggtagaggggtgcctgggagcaggagagggcttcatcttgctgatttcccattctgctcggttctctcggttggaatgcctgatcctgcgagtca

SEQ ID NO: 17358 - DNA, 201 bp, Homo sapiens
agcggccagggtttgggggaagggctgatgatgattgacttcaaagagggatgagacaactttctggggcgatgaacatattctaagatcgtggttgtagyggttgtatggttgcatttattaaaacttaacagagtgcacacctaaaattagtgaatgttatgtatgtaaattatatctcaatcaaacttattttgttaa

SEQ ID NO: 17359 - DNA, 201 bp, Homo sapiens
ttctttatctggaaaataacatgctaaatctccgggtcatcttgagaaatcaaagaaatagctaagaaaaaaacagttgcagggtttggcaaaaggggacrccaaccttagatatgaggtcttctgaaaacttttaaaatttgtttattttttgaatcagtagtgtgtatagttaaaatttttaaatggttataaaagttg

SEQ ID NO: 17360 - DNA, 201 bp, Homo sapiens
aggggccagatgcctctctcctcacactgaccgtgagagcgagtgctcctcatcaacaacgtggggccaggcttgagtcagcagcactgactttatgtgayctagtgcagctcgccagcccacgctgatgtgtgttaatggagggggtgccccttataggagggtggtgtgggctataatttcttctgcattctctgccta

SEQ ID NO: 17361 - DNA, 201 bp, Homo sapiens
agtgtgtttggggaaaagtgaggtataataatacaggaattagtattaaggaatgtagtaattaaactccttttgaaaatgattttaaaagaattcccatratattcaggtaatagcgataaaagcagctaacactaatcgagcatttagtatgtgctggttactgtgagtcactacatgtgagatagttactgtttttat

SEQ ID NO: 17362 - DNA, 201 bp, Homo sapiens
tcaaattttggaagcagcaagatttctctgcaatcctctctagtagataatagtgtgtttggggaaaagtgaggtataataatacaggaattagtattaargaatgtagtaattaaactccttttgaaaatgattttaaaagaattcccatgatattcaggtaatagcgataaaagcagctaacactaatcgagcatttag

SEQ ID NO: 17363 - DNA, 201 bp, Homo sapiens
atctgtttctggtttatgtgttcttacctggatgacagctgtgctcatcctctaatcctgtacaataccttgagagcacaggccttttgtgagatcaaatrcctatgcatgacaggcaaataagcaggctcttcaggaccagggaaacgatggcaacagttctgagtctgatgcagggatggcagagaagcccaggcagag

SEQ ID NO: 17364 - DNA, 201 bp, Homo sapiens
gaattggtgtgtgacacttgcacaggtgccagtgttttctgtgtgggagcactttcctgtatgcattattttcttcttaataatggcacctcctgagagtwtccaggtctcagatcccttctggtgacacagccttgccttgtaagtcaactgtttgctggcgttaaacaagttggggcagatggctctgctgactaggaa

SEQ ID NO: 17365 - DNA, 201 bp, Homo sapiens
atcttaaaaaatgaaggtttttgagcttagtggtctccaggattgcctcaaagctttgccagtctgaatctacccttttcttgctattgtccccattggarttggtgtgtgacacttgcacaggtgccagtgttttctgtgtgggagcactttcctgtatgcattattttcttcttaataatggcacctcctgagagtatc

SEQ ID NO: 17366 - DNA, 201 bp, Homo sapiens
gcaggctcagtcaataggacagacagatgatgagtagacccccaagaatcacccaccagaggaggagcatcaacaccagggcagagaggcagcaaccgcartcaaaagaactaataccagagggtgcagtaacaaggccaacagaaggcttctgaataagcaagactgatgtcttcagagcaatgcaaaaagacagtgttt

SEQ ID NO: 17367 - DNA, 201 bp, Homo sapiens
tcagatggttctgatgttttgctgaaatttgagaaccactggactagattatgatgtctgagttctcaccaagtgtaatagtctatgagtaaattcctatrcatgtaaaaagaaaagttttagcaggaagaagacaaaatgctgaaagagaatatggtaatttcaaagtttgagatttttagatgcatgttagaagtgttt

SEQ ID NO: 17368 - DNA, 201 bp, Homo sapiens
gcagaaaaaaaaatttgatgaaatatcgttccaaaacagtggcagtgtataaactcttcaataaatgatatgaagacaattggctatccatttgggaagamattagagaaagcctgtacctcacagaaaaaaacaaacaaacaaaaaacaggtgaattaaagttagatgttaaaaaaaatatttgcagaactgaatatttt

SEQ ID NO: 17369 - DNA, 201 bp, Homo sapiens
tttagacattgagagaggtgattatgaaagtacgatagcttgctcaccacctctctcctctgctcctgggagcacaggggagtttcaactctggggaaggygatcatttgggtcattagtagcgctttgagtaccatggtgtctgcagggagttcccagttcttactgctgtctgagaataaaacataatatctttggtct

SEQ ID NO: 17370 - DNA, 201 bp, Homo sapiens
aaaaatgagtacttgtgcttcccagaaaagacatgaaaaaggatgctcacagaaatgttaaaatagctgaaagctgagaacaatgcagatatccatcaatwggagaataagtaagcaattgtggtatatccatacactggaatattacacagtaatgaaaaataacaaactactgctaatgaatgaatctcacagacagaa

SEQ ID NO: 17371 - DNA, 201 bp, Homo sapiens
gcatgagggagcctgcttagatgctggaaatgtcctacatcctaatcagggtggtagtcctccaggtataaacacatgtaaaaatttttaaagacaggccrggcacggtggctcatgcctgtaataccagcacttagggaggctgagggggtggatcacctgaggtcaggagtttgagaccagcctggccaacatggtgaa

SEQ ID NO: 17372 - DNA, 201 bp, Homo sapiens
gctcatgcctgtaataccagcacttagggaggctgagggggtggatcacctgaggtcaggagtttgagaccagcctggccaacatggtgaaaccctgtatytactaaaaatacaaaaattagctggatgtggtagtgggcgcctgtaatcccagctactagggaggctgaggcaggagaatcggttgaatcagggaggcag

SEQ ID NO: 17373 - DNA, 201 bp, Homo sapiens
cctgtatctagctttgggggctgtgaagaacatctccctaaacatctctatctccaacctcggagatgatgcctatgatgccaacgtgtccttcaatgttycccgggagctcttcttcatcaacatgtggcagaaggtaaggagggcatccctgtaaaaagagcagttgttccatctggtgcgcttgctgactttcattat

SEQ ID NO: 17374 - DNA, 201 bp, Homo sapiens
ttgtagttgttgttgttgaactgtttagtaatagtctggctgccccttttgaaacttttccagcaagtgccattggtaattttgctggtagataatgccarggtaaaataccagacccttgctactcaaagtgtggtccgaggaccagcagcatcagcatcacctgagagtttcttagaaatgcagaatcctgggctccac

SEQ ID NO: 17375 - DNA, 201 bp, Homo sapiens
ctgaagccagaaactcccccaaggcaaatcaagactttatggaatcagctctgttactgcaagacatcccctcaaactcccgtctcagtctgtgtgagaascgtgcatgaattcttgctattttcttgatattttcaaatagcagaatacatgataaacttgtaagtccacagatgagtcggtaagctgctgccatatgga

SEQ ID NO: 17376 - DNA, 201 bp, Homo sapiens
gatattttcaaatagcagaatacatgataaacttgtaagtccacagatgagtcggtaagctgctgccatatggagcatgcaccagactgaggtctttggtracagctggaaagactggctctgtctcatttcagcagaatcagaatggattcgaaggctatccagtggaagtgctcagaattgcgctggaaggctggagaa

SEQ ID NO: 17377 - DNA, 201 bp, Homo sapiens
ccattttcatatccaacaaaatgcgttgggaccatggcttcaatcacattacatgctgtgagtttagagtgttggatgctggttttcagaggtgatcaaamctttttttttttcttgtttaagaaacagatagttaagaaagggagattaagttggagttaataagaactctgagaaagaggagaaagaaaaacagcaaaa

SEQ ID NO: 17378 - DNA, 201 bp, Homo sapiens
attccctactcagtgaggagaatgagtgttccatgcagacttttatgctctacccacaagataagttgtccaagcactatttttgtttgtttgtttgtttstttgtttgtttgagacagggtcttgctttgtcacccaggctggagtgcactggtgcaatcatggctcactgcagcctccacctgttggctcaggccaggc

SEQ ID NO: 17379 - DNA, 201 bp, Homo sapiens
aagattactccaaaaaaatgccacttaccattcctttggtgtactgcttctagaggcaaagtttactgcttttactgtcatgaaatagactgtgacttgtkatttatcatttatgtgaccaattatagttacaatcatgttccatgtgacaatagaatctttccccccttgaacctcacattatgctgagatgtaggatga

SEQ ID NO: 17380 - DNA, 201 bp, Homo sapiens
gatcataccctgggatctgcccaggtgttttggcctgtttccattttcatatccaacaaaatgcgttgggaccatggcttcaatcacattacatgctgtgrgtttagagtgttggatgctggttttcagaggtgatcaaacctttttttttttcttgtttaagaaacagatagttaagaaagggagattaagttggagtta

SEQ ID NO: 17381 - DNA, 201 bp, Homo sapiens
tccctcagaagcacactgataaccccaatatacccacaattcacacttttttccttctctgaggtatgctgttttttgtcaaaacagaaaaaacacactamtaggatatgaaaaacttcattctgggcctggttaggtcataaactacagaaccttaggtcatatattctcaccgggcgcttgtttctccactgcaaaaaa

SEQ ID NO: 17382 - DNA, 201 bp, Homo sapiens
tctacaaggaagctgagactggcagatgagaaggaattcgcttgccaagcatgaggaagagtgtctcagttggggaggagagctgtatggagccccaaaargcttggcctcttcaaggcactgaaagaccaggtagcaggaagctggttagcagtgaagagaaccatggtagacctaggcagggtccatgccaggtaacac

SEQ ID NO: 17383 - DNA, 201 bp, Homo sapiens
ggtgggacatcaccctggccaccaggtctcctgagagatcataccctgggatctgcccaggtgttttggcctgtttccattttcatatccaacaaaatgcsttgggaccatggcttcaatcacattacatgctgtgagtttagagtgttggatgctggttttcagaggtgatcaaacctttttttttttcttgtttaagaa

SEQ ID NO: 17384 - DNA, 201 bp, Homo sapiens
caaaggctttcactagatgctagttatacccccagtaactatgaacaagatgaaatttttaccctcaagacttccacagccccaaacaggtcaacacacayacacacacacacacacacacacacacacacacacacacacgtgcacacacatcacacccctgcagcactgtatgcatacgtgcccagagtatctgtgctg

SEQ ID NO: 17385 - DNA, 201 bp, Homo sapiens
aggctggcttgagctcctggcctcaagttgatccacccgccttggtctcccaaagtgctggaattacaggtgtgatccaccatacccaacctatttatttwattttattttattttggacggggtcttgctctgtcacccaggctggagcgcagtggcacagttacagctcacttcagcctcgatatcccatgctcaaatg

SEQ ID NO: 17386 - DNA, 201 bp, Homo sapiens
aagtggctgcagctccttccttgcttttgtgggcagatgctcatcctggcctggcgaagggtgggacatcaccctggccaccaggtctcctgagagatcayaccctgggatctgcccaggtgttttggcctgtttccattttcatatccaacaaaatgcgttgggaccatggcttcaatcacattacatgctgtgagttta

SEQ ID NO: 17387 - DNA, 201 bp, Homo sapiens
ttgggaaaacttgcctcattggaacatgggctccaattgctgtggctcccatgggaaactacagtacagcctctcgaacgagtttctccaatgtgctaggscctaccatgagacccaagacagactgtgtcctaactctagtggggtccacagtctactggggaaactggcattaatcaaataattcctctaagtgacaca

SEQ ID NO: 17388 - DNA, 201 bp, Homo sapiens
gctcttcaggaccagggaaacgatggcaacagttctgagtctgatgcagggatggcagagaagcccaggcagagtgcaggggcagtgatgtcattccctaytgtgaggatcagtgacaccctctagaggcatttagggaactttttttgaacagaaccatgtgtcagacactgtcaagaaggccaataacggtattattgt

SEQ ID NO: 17389 - DNA, 201 bp, Homo sapiens
caaaaaaagttgtaaaacaccaggagttcacatcccagaaataaccatgatgagcatagtattgcctcattttgacctttttctctgcatatatagatatmgaccaggcattctcataacatcaacttatttttgaatagtgtattagttaaattttacagtaatatactcagcatattttcaggtgaagtacctctaaat

SEQ ID NO: 17390 - DNA, 201 bp, Homo sapiens
ccctgggccccagctcttgtcatgacctgcccctttcctcctggaacctgctccttacacttctttgccttggttcttatgctcacagaagtcagaggccyggtttgtgtcatattcatgtagaaccatctaccacctgcatgatttttacatttttttggtcttaaactcatactgcctgtgatattttctttcatattt

SEQ ID NO: 17391 - DNA, 201 bp, Homo sapiens
ttgcacaaatctttcattatgtcgttaggttgaaagcctagaaatagaattgccatcaaaaggagtgtatattttaagctttttaaaaattatatttattwttttattttgagatggagttttgctcttgtctcccaggctggagtacagtggagtgatctcagctcactgcaacctccccctcccgggttcaagcaagtc

SEQ ID NO: 17392 - DNA, 201 bp, Homo sapiens
ttcttgctttggctgagaagttatcctttgttcctagttaccaagggtactggctatgagatgccacgtagagtggcaatagtgaagtgcaggccagaggmagggctgtttctatggtggccctgagggttactgggaaggatcagggttgcgcaaggggttggtcctgctactttctgatatctagggttgccagactta

SEQ ID NO: 17393 - DNA, 201 bp, Homo sapiens
aaaggagtgtatattttaagctttttaaaaattatatttatttttttattttgagatggagttttgctcttgtctcccaggctggagtacagtggagtgayctcagctcactgcaacctccccctcccgggttcaagcaagtctcctgcctcagcctcctgaatagttgggattacaggcgtctgtcaccacaaccagcta

SEQ ID NO: 17394 - DNA, 201 bp, Homo sapiens
agtctgctcagcagctgcctccaccacattggttcacccaactgtggcctctggcttgtcttccagcaatgtgtatctgtagccatgactttgcttaagcraacttggaaattcacttcatttaaatgtaatctttcttacttcagggcagttgttcagggaagttgtgatcagtagaaagtaaattggctagagttcagt

SEQ ID NO: 17395 - DNA, 201 bp, Homo sapiens
gctcacatttctcgaacgcttactttgccccagtccttgctttgcctggactaggcactgggatgcagcaataactgtgcccttccctgcacttgaccgcstcaccacctagcaatagacctgcaggcataatggagggtggtgagtgctgcgcagtaactgctctggaaactgagaagaaggtgccatgagtccccctcc

SEQ ID NO: 17396 - DNA, 201 bp, Homo sapiens
cctcaggagaagagatgcaggtactggcagttgcaatttgggccggacagcagagaaatggtaaaagccaagaggatatgggtgggggagcaataccatcmgttccatcttcctgtgttcctttccacccaggttttctctgagctcagctagttcatctctggtaagatagtccagtctcgctgttctctccattgtctc

SEQ ID NO: 17397 - DNA, 201 bp, Homo sapiens
cactgtgggcagctggagctcagtcctgctggggaaccctggcagtcagtgtagaccgtgccccagaattaccccacatcaaggggcaagggagctggggmcctgcattatggagggctgctctggggacttgagttccctggcactcctggcttgccaggcacatggacagagccactagagaaagccctcaggagaaga

SEQ ID NO: 17398 - DNA, 201 bp, Homo sapiens
cattttgcactcagacccagtgctcctgtgtttccatggttagcctgaaactcgggaaggagaatttgttagaatttcacagctgaaatcttgttctgacrgagagcaggaattaatcaaaacttgctgggagagaccagagctagagttgatgagagacagctggctccctcctggcccaggcccgtgcaggggggctcc

SEQ ID NO: 17399 - DNA, 201 bp, Homo sapiens
tcaaggttatacttcgggttaaccacttccttggggttatcagaacctatgagcttggagaaggggccctgcggagctaggacctgaacctctgaggaggrggctggtgctgctgatctctctgagggagtgcaatgaggctggctctgggagaatggggggaaaattgaaaactacaattaactgctgttggggccagct

SEQ ID NO: 17400 - DNA, 201 bp, Homo sapiens
aggtggggcccattcagcaccagtgtaccctcccattaatttctcttccctatcctccatctgccacatgggttcatagataaagtcaaacatccctttayactctaagggtgtgtttccccgataatcaggcttaaaggggatggtaactggagaattttgatatctcagtataataaggcaatgcagaaaattattcat

SEQ ID NO: 17401 - DNA, 201 bp, Homo sapiens
cccatctagcatgagcctttcacagactgctaagcacaattagaatgaaggtctaggcttagccatagccccagaagtgttggggtaaagtggaagaggcyggcagttggatggcatcttgtactgtaccttgtgggcaatgcgaagcaacctggcttatatctgacattaggtggggcccattcagcaccagtgtaccct

SEQ ID NO: 17402 - DNA, 201 bp, Homo sapiens
ggttcgttcttgtgatagcattgtcctttaggatgccatcattatgtgaatgtttcctgctatgattgtccaaagggaaaatggtctggaagtacacccaygtcaacagagttggatttccactgtggagccaggactatttatatctttcttagacctttcctaagacagaccacatctgccttacccgtcacattactc

SEQ ID NO: 17403 - DNA, 201 bp, Homo sapiens
aaataatgttggaccccaagcattctttttgcaaatatgagggctagactgaagcctcattggaccacaggtcctatgggactggtggagatatagtgccyggagcctggcccttagggaacattcgagcagttagaaagcagaagtgacaggactttggaggctccttattgagcttgtagcatcagccagatgtcaggg

SEQ ID NO: 17404 - DNA, 201 bp, Homo sapiens
acaacattttctctagcaattatgggggttttatctcccagatgtgatttatgccatattacactccaagaagggaacatgaagaatgtttgtggctaaaraagtctcaacacaaggaaactacaggtgaaacgtaacaatagtaattgccttactttatttgcgaaggggtggtgaacactaatatgcctgactccatag

SEQ ID NO: 17405 - DNA, 201 bp, Homo sapiens
ctggatggggctacaacattgcagttcatgctcataatggcagcaaatgcttgagggaatccctgagtatgcatctatttcttgaatcatggcatctgctmtaggaaatcctcttaaatgtattcttatctccctaataaaatggaaattggtacttaattggtaaaattttaaataattacccagcatctggtggttcat

SEQ ID NO: 17406 - DNA, 201 bp, Homo sapiens
tgccccttaatcttgttatgtcaccccagtggtgtgaaggccagggctccttagaggtaaaagggtctctttgtgaggcctggaggggagaaggttgagcrgtagcttaggtgaatgctgcctgagcagatgtctgcagtgggagcagaatggtgtgatttactctttgtttttgtgggatgtccttggggagcccaagga

SEQ ID NO: 17407 - DNA, 201 bp, Homo sapiens
tcctcccttgtcattaaattattactaatctatgaccagaggaagcagccactgcatacgtgggtgtatttttaaaaattgtgacacatcatcaagatggrtatacttgcccctttaattcaacaggcacctgttgaatgcctgtgcatgcaaacatgatgctgggctgagccctggggcttaccctgaagagctttggag

SEQ ID NO: 17408 - DNA, 201 bp, Homo sapiens
ggaaagactaaggtgttggccttctttcaggcactgctattgtctgacttccgtttgtcctgtggccagatttgctctggaagtcccgcagttccactgcmtctgttatcactactctctgttgaccccatctcccagcatggtggcagcagtggagtcccctcaccctatctgtgcctcgtgtctcttcacttcctttgt

SEQ ID NO: 17409 - DNA, 201 bp, Homo sapiens
ggctaagtgcgcagaacatgtgaaatttaagtagatttgtggaaacagaaacacatttttatttagtcgtgagcgtcacttggagtataaatagagccctytatgattcgtgtgctggtctttcttcctggagggcttcagtattatctcatgctgtcatctttatgttgtattggaaaaatctgggattctttttccctt

SEQ ID NO: 17410 - DNA, 201 bp, Homo sapiens
aggaccaggcctgacttagagcaccactggccatcctctgattccataagggaggctggaaaaccccacgtctggagaagtaccttcctgaaatgtgtccrcaggccaggctggaggactatgcctctgcatatgtacctgtcctgtttgtattcttcaaaaatggtgctgcagacagttttattgcctgtgccatacttg

SEQ ID NO: 17411 - DNA, 201 bp, Homo sapiens
gtatatttgtatctatagtcataaacaagatttctctgtaattttctttcttgtcaggttttggtgtcagatttctgctagtgtttgcaaaaataagcagraagcttgcacttttctctgttctctgaagacatacaaccaacatagttgcaacagcaggcagtgagagctgacccttactgagagcttgtttatgtgcca

SEQ ID NO: 17412 - DNA, 201 bp, Homo sapiens
tcagctggctatgttaagtaggggcttggctcagcctggcctaactgatgttagattttgagttactttaggttttgggtgggactagaaaagcagggagrgctaggagaccacgcatgtgcaagcacacatagatatatattgcccatcgttcctaaccctcctaagggcaggaggccagaggtatgtgggttaggaatg

SEQ ID NO: 17413 - DNA, 201 bp, Homo sapiens
cagttacgttcaggtcctaactccagtaatgaatttcaagcttcttgttattgtttttcttcctgaaagacaaagggagttttatgccatggtattttgasgacaatgttgaatcaattgttatcaaatgggaagatttctgaatgctgaatagtttgtaatatccttcaaaaaaccaaaccaagaacccacccacccatt

SEQ ID NO: 17414 - DNA, 201 bp, Homo sapiens
cctgcaggatttcatcgttgttagtgctgctgctgcctgaattgcaggctgttgtatcataccagctagctatgctgcatacaaactgcccccaaattgartggcttttcacaaccattacatctgacaaatttctgggtcagggatccaggaagggtttggcggggtgattcttccgtcccacatgacattgagtgaggt

SEQ ID NO: 17415 - DNA, 201 bp, Homo sapiens
ggctgttgtatcataccagctagctatgctgcatacaaactgcccccaaattgaatggcttttcacaaccattacatctgacaaatttctgggtcagggayccaggaagggtttggcggggtgattcttccgtcccacatgacattgagtgaggtcacttagtggcatttacctggtggctaagctggtcttcagagttca

SEQ ID NO: 17416 - DNA, 201 bp, Homo sapiens
ctctggaggctgggaatcaagctggcagttctgggctttcaccagagtgtgaaacgaaaaccaggaaggggcgctctctgagtgattgcattttgcactcwgacccagtgctcctgtgtttccatggttagcctgaaactcgggaaggagaatttgttagaatttcacagctgaaatcttgttctgacagagagcaggaat

SEQ ID NO: 17417 - DNA, 201 bp, Homo sapiens
tgagtttttatttttagagaactgatattttttctgttcttgatgaggtaatcaggcagtctctatgttacatgagttaagagtcctagacttacttagcyagtcctcaattctgacacttattataagacatctgatccagagctgcatgttcaactccatcaagccttgcctactttcctcatcggtaaaattgacctt

SEQ ID NO: 17418 - DNA, 201 bp, Homo sapiens
cagggatgttgcatctaactgtgggatggaggcacagaggtagctacagggagcaggatgaggcaaagaaagcagctgtcactcagagttcgcttatgagytttatcaaaagcagcaagaaaagcagtcttgggtgggttttatcacttattaacagccatttatgaggcccctgctgtgtgtcaggcactgtgcaaggtg

SEQ ID NO: 17419 - DNA, 201 bp, Homo sapiens
cattcttggcctgggaacagcctgtggccccttggagcctcctggctagcataggtgaaggtggtgaatgctttgcccaaggggaccctgcccctcacccrtggacggtgcttgtacctactcactggccaggctgaagcctaaacttgcttgtcaatctctggaggctgggaatcaagctggcagttctgggctttcacc

SEQ ID NO: 17420 - DNA, 201 bp, Homo sapiens
cttgttcataatgccatgttttctttaatgaatcatttaggattcttaggtgatatttctggaacagcaccatcaacagctttggccacatgcacttagarcaactaacttgcctcctgccggggtgtaggtgcgttggtgacagtgtagaagggtgattcgcaggcccatgttctgcccaccagcaaagccccactggag

SEQ ID NO: 17421 - DNA, 201 bp, Homo sapiens
gctgctaggaataggaagcagggaggaaggagcgagttcctttgccctctccagccttgcaggctccctccgatgctccatattagcagagcctcacagcragcctctggcaaaacaagtgaggtttgcagggtcccagctccagtgtcacagtgcagggtagagaagggtgggttggagctgaggacaacagcttcataa

SEQ ID NO: 17422 - DNA, 201 bp, Homo sapiens
gaacagcaccatcaacagctttggccacatgcacttagagcaactaacttgcctcctgccggggtgtaggtgcgttggtgacagtgtagaagggtgattcrcaggcccatgttctgcccaccagcaaagccccactggagaagggtagactcctgtgggcagtctcagagctgggacctatttgcttctgcttgattctgc

SEQ ID NO: 17423 - DNA, 201 bp, Homo sapiens
gggataagctgctaggaataggaagcagggaggaaggagcgagttcctttgccctctccagccttgcaggctccctccgatgctccatattagcagagcckcacagcaagcctctggcaaaacaagtgaggtttgcagggtcccagctccagtgtcacagtgcagggtagagaagggtgggttggagctgaggacaacagc

SEQ ID NO: 17424 - DNA, 201 bp, Homo sapiens
taaatggtatggattccttattatcagtagacttctttcacatgtgcctgccagttactaagcatttttccagaagcattttgataacattcttacacatwtacaaatattgtattctcttaggttttcactctccttcatctgtctattaatagttatgttcttgttcatattccacatgctgttcatttatgtgttttt

SEQ ID NO: 17425 - DNA, 201 bp, Homo sapiens
agctgccgtgagaaactgttgctgggataagctgctaggaataggaagcagggaggaaggagcgagttcctttgccctctccagccttgcaggctccctcygatgctccatattagcagagcctcacagcaagcctctggcaaaacaagtgaggtttgcagggtcccagctccagtgtcacagtgcagggtagagaagggt

SEQ ID NO: 17426 - DNA, 201 bp, Homo sapiens
agaagttactcttgtagccatgttggttttggtgggttttggctggcttctttataacagcctgttttaacaaggtttttatgacctgtatcttgtgccamccccctgtctcatcctgtgacaggatgcctaacctcctgggaatgcagcgcagtagctctcagccttattttacccagcccctattcaagatggagttgc

SEQ ID NO: 17427 - DNA, 201 bp, Homo sapiens
tgactttgtccatggaatgcctggtgaatgagtgccagccctgggcaggccttccaggcacctctcaatgtctgcatatcttgggctgagtttgttattargacggctgcatttgggcagagcaatacacagatacctgtggtgggctaggtactgctgtcagaagtggtatcttctgtggtatttatctgctgctgtctt

SEQ ID NO: 17428 - DNA, 201 bp, Homo sapiens
gttactcttgtagccatgttggttttggtgggttttggctggcttctttataacagcctgttttaacaaggtttttatgacctgtatcttgtgccaacccsctgtctcatcctgtgacaggatgcctaacctcctgggaatgcagcgcagtagctctcagccttattttacccagcccctattcaagatggagttgctctg

SEQ ID NO: 17429 - DNA, 201 bp, Homo sapiens
tgatgactttgtccatggaatgcctggtgaatgagtgccagccctgggcaggccttccaggcacctctcaatgtctgcatatcttgggctgagtttgttaktaagacggctgcatttgggcagagcaatacacagatacctgtggtgggctaggtactgctgtcagaagtggtatcttctgtggtatttatctgctgctgt

SEQ ID NO: 17430 - DNA, 201 bp, Homo sapiens
tcagatggaggaaagatgggcacttccaggacacagataccctccactcccatccaagctcagcagagggtgctggccaactctgtcatttccaggcctcygcctcaggaacccacagctgagacactgggttaccagccttcctactctttgtgctggcagctgcagaggaaccatgtggatgatgactttgtccatgga

SEQ ID NO: 17431 - DNA, 201 bp, Homo sapiens
aaggtcagtcttcagatggaggaaagatgggcacttccaggacacagataccctccactcccatccaagctcagcagagggtgctggccaactctgtcatytccaggcctccgcctcaggaacccacagctgagacactgggttaccagccttcctactctttgtgctggcagctgcagaggaaccatgtggatgatgact

SEQ ID NO: 17432 - DNA, 201 bp, Homo sapiens
attcagcaaggaaggcagcctcttggctctgcacagttgggaaggtcagtcttcagatggaggaaagatgggcacttccaggacacagataccctccactyccatccaagctcagcagagggtgctggccaactctgtcatttccaggcctccgcctcaggaacccacagctgagacactgggttaccagccttcctactc

SEQ ID NO: 17433 - DNA, 201 bp, Homo sapiens
aatgcaccaatttgagagtatgactccatgagttttgaccactgcatacgctgtgtgactaccaccccaccacaataaagaatacttctgtcaccccagakagtttccttgtgcctctgtctggtcatacccctctcctgatagacaaccactgttctgacttctatcaccatagatccatcttgcccattctagaatttc

SEQ ID NO: 17434 - DNA, 201 bp, Homo sapiens
cttctaagggaaccagcttgccccgggtaacattaaatcttgaattattaaagaggcagaagagccttgaggttgaatgtgaactcaggggccaggtggcygggttccagccctgactctgcccttactaggtgagtttcctgggcaagtcccctgacctttctgtttcaggattctcctctgttggccaggacagcaata

SEQ ID NO: 17435 - DNA, 201 bp, Homo sapiens
ttctctaaattttatagtcatcttgcttttgagaaatatttctttccactaaaatttaagaaaactaacgcagtcttgtatgaggacaccacattgtgtawttttgtacagataggagttttggaaattcctcaagacaacagagccaggaggaagtaagggaatagaaagaagtcagtgttgaagcttttgtcccaagaa

SEQ ID NO: 17436 - DNA, 201 bp, Homo sapiens
gaaagtcaaagtgagcccctagatagctgtaaacctggttctattgtactttgaaaacaaagcatttctcttgtcctccacagtgaggacatcaggaagtragcctcccctgggggaccatgcagataaaggcagaaggagtaggtcagaccccagaagatgggacttttctgattcaagaagttcagtatctttgtgagg

SEQ ID NO: 17437 - DNA, 201 bp, Homo sapiens
gcaggtaaatgcaagtacaacttctacatgaataattgtccttggcagatagagataaactagttaagggtggagggttggttggttgtcattcgtgcctyagatcccctctctactggcctcctgctgagctcagtgcctcacctgcaggagacagggctttgggaggcgctgcgaagaggagggactgttttttgggtg

SEQ ID NO: 17438 - DNA, 201 bp, Homo sapiens
agattgacttttgagagtgtacgcgtgtgtgtgtgtgtgtgtgtgtgtgtgtgtgtgtgtgtgtgtgtcttgggaggcatggaggcatatgtacctaatgyctaggtctgtttggacagcagtgttcctcacagcctcttggcctctctctctggcttgtttgagcctcttcacctcgctgcatacacagcatacagacgt

SEQ ID NO: 17439 - DNA, 201 bp, Homo sapiens
ctgcactccagcctgggctacacaatgagactctgtctctaaaaaaaataaaatatctgggagggaaggtgcttattggtacctgttgcaggaactcttgkcacctgcatacccactgacattccaggaagtcagggcagggtgcagggagaaatgaaggggacattaaataaatgagtgctgtgggcattcagtggtgcc

SEQ ID NO: 17440 - DNA, 201 bp, Homo sapiens
gagccgtgatcatgccactgtactccagcctgggtgacagagtgagaccttgtcaatcagttagtcaacaagccaacaagcaaggtgcagtggtggttgcytaggaggctgaggcgagaggatcccttgagcaccggagtttgaggtggtagtgagctatgattgcaccactgcactccagcctgggctacacaatgagac

SEQ ID NO: 17441 - DNA, 201 bp, Homo sapiens
tcagaaatatgccaaatacatagaaaatgtgaataacagctctctggatagatgtttagttttatctttatccaaatagtgagaatataatttcatatttwaaaaaatcgaagtgtactgttaagcagtggctgagatgctaggtatcccagttgggagagggcagaggtttagctataactaagtgggcagatgccagaa

SEQ ID NO: 17442 - DNA, 201 bp, Homo sapiens
ctaatttaaatgagaagtaaaagccagtcaacaaccctcacaaagcaagaaagggtgactgaactatcccaaaaatacaatggacttaatgatggttaaawggaactggtgaagaaattagcaaaatgattatgcccctgcccaatcttccttcccatgggcgcacacacacttttatatgctaacccattcattggccca

SEQ ID NO: 17443 - DNA, 201 bp, Homo sapiens
atttatttcacacatgcaaaaactgaagaagtctttggggcaataaatctttttgatttcttttttttttttttttttttttgagacagagtcttgctctrtcaccaggctggagtgcagtggtgcgatctcggctcactgcaacctccacctcccaggttcaagtgattctcctgccgcagccttctgagtagctgggac

SEQ ID NO: 17444 - DNA, 201 bp, Homo sapiens
ttcatatcaaaaccaatgggatttagacaaaaccaacacagaggaaaatgccactacttacatgtggaaaatagggaagactgaaaataagtgaactaaaytgacaacataaaaactagacaagggacaatgaaataaacccaactcaaagaaagtaaaatgaaggtattattaaagacaaagcatatcctgaaatagaaa

SEQ ID NO: 17445 - DNA, 201 bp, Homo sapiens
tttgaaataaagtgtttattttctttctctttttcctcttttgggaggaagagcaatccttataccttgaaatgtgtcagattctaatatttggagtgggmcaaggccctccttcccctttcttatgattagttgaaatctgagtttgagcaagtcttgctgttttcagagaatgctctccttctcctgttcttccctcac

SEQ ID NO: 17446 - DNA, 201 bp, Homo sapiens
tgttggccaggctggtctcgaactcctggccttgtgatccacccgcctcccaaagtgctgggagtacaggcgtgagtcaccatgcccggccttcttctttwatttttttttaaagtagaggttgcaaactgacagcctttggaaagaatacagcctacaaatacttttgtttggcttgcacagtatttgtttattgttttt

SEQ ID NO: 17447 - DNA, 201 bp, Homo sapiens
gagacattcatgtctttctgacttctccattacctcctacaaaaggacatgaccccaggctttcaaaggatgcctttagatttatccctatgtccagagtyacatagacaggagggttctaactcagcaaaccaccggttcacttctgcttccgtttggctagaatttggtcagatagttctgtatcctggcttcctataa

SEQ ID NO: 17448 - DNA, 201 bp, Homo sapiens
gggagctgtgggggtaatttggaggtcttggtggaggccttagtgggatctgggaagaagcataggatgtctgggacatgggaggaggccatgtgcctccycaattctgttcctgccgagttagaactgctgtacgccagcctaggatccttccatgttgttctcccattcaagtagacctttttgcaattttaacaatcc

SEQ ID NO: 17449 - DNA, 201 bp, Homo sapiens
tgatcgtctttgcagtggcgatgcatagttcacatgaacatgctaaaggctctaaaaagttccacagtcaaagaatttacttaatgtttaactccacattycccaaatgaaactcatttttacccaggcagatcacatgactctaatattacgtgaaatcactttgggaaactgctttgtctacagtactcatctccacct

SEQ ID NO: 17450 - DNA, 201 bp, Homo sapiens
agacctcataatcttttaaaatattattaaattctgttttatttgtttctttcaaaaattaacagatttttaaaaattgaaaattgaattttcaaaaaatytctcaaaaatctttgagaaaaattgagatgggacaaagactctgtgccttgttcccccttagtgtgagtcctgagtacccagctgtgtggcccacagtct

SEQ ID NO: 17451 - DNA, 201 bp, Homo sapiens
tttaattccagtgcttcctggcttaacaaacctgccaccattactaatgctaattaaataggtttctctgaggttgcccaacctgttttcctaagccaggraatggactcgacaaactcaaaagaatcaaaagatacaaatttaagaggaagaaaaatcactaattagtgaagtctgcttcctattcaatcaggagtttta

SEQ ID NO: 17452 - DNA, 201 bp, Homo sapiens
agttaaatgtcagtgatcgtctttgcagtggcgatgcatagttcacatgaacatgctaaaggctctaaaaagttccacagtcaaagaatttacttaatgtytaactccacatttcccaaatgaaactcatttttacccaggcagatcacatgactctaatattacgtgaaatcactttgggaaactgctttgtctacagta

SEQ ID NO: 17453 - DNA, 201 bp, Homo sapiens
ttaaataggtttctctgaggttgcccaacctgttttcctaagccaggaaatggactcgacaaactcaaaagaatcaaaagatacaaatttaagaggaagaraaatcactaattagtgaagtctgcttcctattcaatcaggagttttacagctcaccagattacctctcatccttaaagtctgtctggtcctcaggttact

SEQ ID NO: 17454 - DNA, 201 bp, Homo sapiens
ttgatttaatggagctaggtccagtctcagatatctttgaggctttattcatgccccaaattattctcgtatttatttccccagtgtttgagaaggaacaytgggttcccaagactggttcagcccaaaggctggactggaaatatgtgggtctggctttccctaaactatagtatctgccaaaaaacccaccccctggat

SEQ ID NO: 17455 - DNA, 201 bp, Homo sapiens
ttgcccaacctgttttcctaagccaggaaatggactcgacaaactcaaaagaatcaaaagatacaaatttaagaggaagaaaaatcactaattagtgaagkctgcttcctattcaatcaggagttttacagctcaccagattacctctcatccttaaagtctgtctggtcctcaggttactgtttagtaacagaattgatg

SEQ ID NO: 17456 - DNA, 201 bp, Homo sapiens
gaacagacataggctgtctttgcttgtgtagatgacaattacaagactcttttctttaatttatgccctaaatgctataattctggattgaaagcgaagcwaaatttaggaaggcctaatgatgacacacaatgctctttcgcactcatgatacataacttacagggaaaggccctgactccctttttgcatagcgtcact

SEQ ID NO: 17457 - DNA, 201 bp, Homo sapiens
ctgttttcctaagccaggaaatggactcgacaaactcaaaagaatcaaaagatacaaatttaagaggaagaaaaatcactaattagtgaagtctgcttccyattcaatcaggagttttacagctcaccagattacctctcatccttaaagtctgtctggtcctcaggttactgtttagtaacagaattgatgtaagaatta

SEQ ID NO: 17458 - DNA, 201 bp, Homo sapiens
ctgtttagtaacagaattgatgtaagaattacttagagctcaggctgcactatcagaccgactggcagctatccatcagcaaagccacctgtccctaagakcatgtccgttcactctatgtatacatgcaactaaagtgtgtataatgagatattgccatccctgagctgaaatctaaggctgcctgctgccaaatctctg

SEQ ID NO: 17459 - DNA, 201 bp, Homo sapiens
ggcccagggtgggaaataagggatggatggggctggcatgtggagtattggggtgtaagagcagccccttagaaaaatgggggactaaattgaaagtttcygtagttcttggccctgtaagaggagaggggtagaagatgctgagtatttttctagaagactggactggacgggtggggctgggaggatgccggccgtagt

SEQ ID NO: 17460 - DNA, 201 bp, Homo sapiens
agatcttcctccatccctttattttgagcctatgtgtgtctctgcacgtgagatgggtctgctgaatacagcacactgatgggtcttgactctttatccartttgccagtctgtcttttaattggagcatttagcccatttacatttaaggttaatattgttatgtgtgaatttgatcctgtcattatgatgttagctggt

SEQ ID NO: 17461 - DNA, 201 bp, Homo sapiens
gccatagggtaccattaggacattgacttcaatatggcatgaataccaacatctgttagaatattccaagttggtgccaggactcatattttagtaaactrtaaaatcttccctccccatgcttgtacagtagacagggctacccatgatgtacgatgggtatcccacaatgagtcagttgatgtgggaacttcaattaat

SEQ ID NO: 17462 - DNA, 201 bp, Homo sapiens
agatcgagaccatcctggctaacaaggtgaaaccccgtctctactaaaaatacaaaaaattagccgggcgcggtggcgggcgcctgtagtcccagatactsgggaggctgaggcaggagaatggcgtgaacccgggaagcggagcttgcagtgagccgagattgcgccactgcagtccgcagtccggcctgggcgacagag

SEQ ID NO: 17463 - DNA, 201 bp, Homo sapiens
tctcccctacccataatcatcccgagtgtaccacctctcagaggaagtgaacaggcttccctgcagacaacaagggggaacaagtggacaaaagtcgactstgctctacccagtgttgctctaactgctgatagctgttcagctgggactgcttgcagctttttaatatttacagcattgaacggggttgccttgttcttt

SEQ ID NO: 17464 - DNA, 201 bp, Homo sapiens
atagctggtagaagccactgcggtattaacactcgttgatggcttagcaggcatggtgttctgtagaaagctatcagttgtttaccctcctaatcctatarctgactgggacctgcagctcactcccactgcccagcatcacaggaagtattgtaccacatattgctaccctgggaaaagcttttgaaataaaaaatttga

SEQ ID NO: 17465 - DNA, 201 bp, Homo sapiens
tagtaacagaattgatgtaagaattacttagagctcaggctgcactatcagaccgactggcagctatccatcagcaaagccacctgtccctaagatcatgkccgttcactctatgtatacatgcaactaaagtgtgtataatgagatattgccatccctgagctgaaatctaaggctgcctgctgccaaatctctgctttg

SEQ ID NO: 17466 - DNA, 201 bp, Homo sapiens
tggtggtgaaggttgcataacatgcatatacttaatcccccgaactgcacagttacaaatggttaagatggtaaactttctgttatgcatatttacaattmcacacacacacacacacacacccttcagtgcacgcaaaccctgctggactccaaccttcagagcttccgatttagcagggctgagtgggacctgaggatt

SEQ ID NO: 17467 - DNA, 201 bp, Homo sapiens
gaggatgaattcaccggatcccagcccttgcagggtgctgcaggatggtggggcaggtttggaaatagacaatgactgttcaccttagtaagtgggggccrgaggtgtgtgtacagagctggaagcacagagagggaggatgcctgtcaggggtactagagaaggcttcctcagggtgggaacatttgagctggctgttga

SEQ ID NO: 17468 - DNA, 201 bp, Homo sapiens
cagctgtcttgcccagtggagaaccttccagggcaagaagacagtcttgtctcaaccagtcattaacggccctgagtgtgagagtgtgaagggccgggccmcagccagctctgattccctggtgacatgctgctgttcaggaaatggtctcctgataacttctattgtgatttgttcagggaaaatgttgtttttacattt

SEQ ID NO: 17469 - DNA, 201 bp, Homo sapiens
tctgtttcttcctcgagtttcatgttcagctttttcctctccctccttgctcttactggtctctgtgacctccatctttttcctcatttctcaggaaatgrttgacttctgaagacagaaaatggagaaatgctagggaaaacaagagaggcaaagttttatagaaccaaatgctgagacagaagaggggtacagttgtgc

SEQ ID NO: 17470 - DNA, 201 bp, Homo sapiens
ccaccccaggctccagataagtctgggaggtagatctacagttccaggatgggatacttttttaaaaagtaaatgtaaatgtattgccatatttctcttgaaaaaaaattatcacaagaaaccaacaagaagatatcaaggctttttcttagatctgccagaagtctgtaatttgctctatcccttggattttagtgttca

SEQ ID NO: 17471 - DNA, 201 bp, Homo sapiens
ttttagtgttcacttgctgctttcagatgtggaaggaaaacctcagtccttttgccttgcctccttctccagttgcctcccctcagtgtgtctgccaagacctgagccccaggccagggcagcagcctctgacctttcactccctaacacacaagctggggaccaatgtcactccaaggttggaccctgcccccgtgcctc

SEQ ID NO: 17472 - DNA, 201 bp, Homo sapiens
aaaggagaagggccctgaaaggaaaagggcttcttcggagggcatttgtgtctgctcttggccttgcagataaaataccataatctactcttgcaaatcargccatcctggggtgcatggtcccccaaacactttcatctgccttttccttttgtgcctcatcactgccttgggagggggatcatgcatttgttattatcc

SEQ ID NO: 17473 - DNA, 201 bp, Homo sapiens
ataattatctttggatacaaggatcagtgacaagggtggcaccagtttgaggttggatagagagttgctaggtagatttcctcacagaaggtgtgagtgtgtgtgtgtgtgtgtgtgtgtgtgtgtgtgtgtaaggttgtgatggcctttgtgcaagattgtgtttttgcagatttttttgtgctagttcttgttatcagt

SEQ ID NO: 17474 - DNA, 201 bp, Homo sapiens
agctggtgaccctggagacacgcccttcaggtcaagtctctgtaaaacagcttattctggcaactaggaaattgagctcactcttgagctcagattatacraataactaatacatgtttagcgttttatggttaggaaatgctgtcctgagaagctcatcaataggtttattagttattggtatccttgttttattgattt

SEQ ID NO: 17475 - DNA, 201 bp, Homo sapiens
tttagcgttttatggttaggaaatgctgtcctgagaagctcatcaataggtttattagttattggtatccttgttttattgatttactaaaattacacagytgttcgggcctgggagttaaattctcttcaccagatgccaaatcctacgtttttcttaccacatcatggtgccacaggttaaggaatacagtgcagggtt

SEQ ID NO: 17476 - DNA, 201 bp, Homo sapiens
tgatccacccgcctcagcctcccaaagtgctgggattacaggcgtgagccaccgcgcccggccgctaccagcttcttaagaaaaaaaaagcactgaaagcrcttgtggtgctgtccttgggtgctcctttgcttttatctcagaggctggcacatttgtaggcaggactgtgagacacagtctcccctgcccccaggagtg

SEQ ID NO: 17477 - DNA, 201 bp, Homo sapiens
ggaggccagaggtatgtgggttaggaatgctatgggctgcagctaagagaaaacctggctgaggctttcaactatatgacctcaaattagctccctggagrtaggtggccccagggctggcttagtaacctaacaatggcaccagtggcaccaggggtgaaggctctttatctgtccttgccttgcagaaggccaaggcac

SEQ ID NO: 17478 - DNA, 201 bp, Homo sapiens
ttagatcttatgtgagtggagtgtggtgttcgtccttttgtgacgaacttacttcatttagcataatgtcctcaaggttcatcatgttgtagcatgtgacyggatctccttcctttttaaaggcagaataatatttcattgtatgaattcaccatgttttctttattcatctattgacggacatttaggttggttctatct

SEQ ID NO: 17479 - DNA, 201 bp, Homo sapiens
gcctaactgatgttagattttgagttactttaggttttgggtgggactagaaaagcagggagagctaggagaccacgcatgtgcaagcacacatagatatrtattgcccatcgttcctaaccctcctaagggcaggaggccagaggtatgtgggttaggaatgctatgggctgcagctaagagaaaacctggctgaggctt

SEQ ID NO: 17480 - DNA, 201 bp, Homo sapiens
ttttgtggtttaaactagacctactatggcttttaaggccaccattatttcctcaatgtggagaaactcagtaatgcaagttctctgttccacgttagggrtcacattatggttaaagacaatgggaagattttagagtttgacaggacctttcagataccacctagaacagcctcctgtctttcatgaggtccagagagg

SEQ ID NO: 17481 - DNA, 201 bp, Homo sapiens
taattatctttggatacaaggatcagtgacaagggtggcaccagtttgaggttggatagagagttgctaggtagatttcctcacagaaggtgtgagtgtgtgtgtgtgtgtgtgtgtgtgtgtgtgtgtgtaaggttgtgatggcctttgtgcaagattgtgtttttgcagatttttttgtgctagttcttgttatcagtt

SEQ ID NO: 17482 - DNA, 201 bp, Homo sapiens
aattatctttggatacaaggatcagtgacaagggtggcaccagtttgaggttggatagagagttgctaggtagatttcctcacagaaggtgtgagtgtgtgtgtgtgtgtgtgtgtgtgtgtgtgtgtgtaaggttgtgatggcctttgtgcaagattgtgtttttgcagatttttttgtgctagttcttgttatcagttg

SEQ ID NO: 17483 - DNA, 201 bp, Homo sapiens
attatctttggatacaaggatcagtgacaagggtggcaccagtttgaggttggatagagagttgctaggtagatttcctcacagaaggtgtgagtgtgtgtgtgtgtgtgtgtgtgtgtgtgtgtgtgtaaggttgtgatggcctttgtgcaagattgtgtttttgcagatttttttgtgctagttcttgttatcagttgt

SEQ ID NO: 17484 - DNA, 201 bp, Homo sapiens
ttatctttggatacaaggatcagtgacaagggtggcaccagtttgaggttggatagagagttgctaggtagatttcctcacagaaggtgtgagtgtgtgtktgtgtgtgtgtgtgtgtgtgtgtgtgtaaggttgtgatggcctttgtgcaagattgtgtttttgcagatttttttgtgctagttcttgttatcagttgtt

SEQ ID NO: 17485 - DNA, 201 bp, Homo sapiens
gattgtgtttttgcagatttttttgtgctagttcttgttatcagttgtttatgcatgaaaacctttccttcatggcgtcccacagctctatttgtcagggttttttttttttttttaaacataagtgactccattttgattctgacaacttttgcaattctaaggatctatgagctcttgggtgctgccaggagttagaac

SEQ ID NO: 17486 - DNA, 201 bp, Homo sapiens
cacctgaggtcagaagttcaagaccggccttaccaatatggtgaaaccccatctctactaaaaatataaaaattagcggggcgtggtggcgtgtgcctgtrgtacccagctactagggaggctgagacaagagaattgcttgaacccgggaggtggaggttgcagtgagcggagatcgccgcactgcactccagcctgggt

SEQ ID NO: 17487 - DNA, 201 bp, Homo sapiens
gtggtaggaggaggagagggagacagaagagaaatagcgtttctaaattttctatttgttactgaaatgtaacacatccaggaaagtgtccatatcatatrcagttatcacaaatttgtataatgtcactgaggttgaatgacaacattatccgcacccccagcaattcccctccctaattgcaaccctgctttctcctct

SEQ ID NO: 17488 - DNA, 201 bp, Homo sapiens
cccacctcggcctcccagtgctgcatagaattctgttgtattgctgtaccatgatttacctgtccactctagcactgatgggcctttaggtttcttcttgtttttttttttttttttttgatattacatatgcagctttgaacattttgcatgtctcctggtagaaatgtatgcatctctattaggtatagtcctagaaat

SEQ ID NO: 17489 - DNA, 201 bp, Homo sapiens
ggaactagctatcatgtccacattccaagccaaaaatagaagaggacaaaatgacatatgccccctcccttttaactattcttcctagaagttccatatamcgctggccagaaattaattatgtatgtagatatacccacccactaaggaggctggggaatgcattattaaggaataagaggagggtaagtgttaagagac

SEQ ID NO: 17490 - DNA, 201 bp, Homo sapiens
aaatgcccatggtttggaggcaggaatggtgttccaagagtagtagggagcctcgggactagagtttggaggatgagcggggagagtgggaggagatagtrggaaagtctgtggagccagttccctgaggggcctggtgggccatgctcagtgggggtttcatttgacgagccatgggaaggcttccagcaatgggggatg

SEQ ID NO: 17491 - DNA, 201 bp, Homo sapiens
ccacctcggcctcccagtgctgcatagaattctgttgtattgctgtaccatgatttacctgtccactctagcactgatgggcctttaggtttcttcttgtttttttttttttttttttgatattacatatgcagctttgaacattttgcatgtctcctggtagaaatgtatgcatctctattaggtatagtcctagaaatg

SEQ ID NO: 17492 - DNA, 201 bp, Homo sapiens
ttttgggtattacattttaactagggaaagatatgatcagatggatgtttttaaaagctcactttgcgctgggcatggtggctcatgactgtaatcccatyactttgggaggctgaggtgggcacattgcttgagcccagaagttcaagaccagcctgtgcaacatggtgaaagcctatctctactaaaaatacaaatatt

SEQ ID NO: 17493 - DNA, 201 bp, Homo sapiens
gtgtggtagtagcatgacttttggctggtagtacatttttagggactgttttcttgtgtcattcttacttactgtaagtttgcccttcgtatcagttcctyctctctcaaacactttcatgactgcctgctggcactgtctatccatgtggttgctcaggccaaaaaaagagtactttttacttctaattcatctgcagtc

SEQ ID NO: 17494 - DNA, 201 bp, Homo sapiens
gcttttattactattacaatcacctccattatcaccatcatgcttctagaaaggccaccaccatcacctggaggtacactggccctgattggtcttcttaygtctattatgcttttttaaaaattgtggtaaaagatgcataatataaaagtcaccactttaaagtgtgattcagtggcattagtgcattcacagtgttgt

SEQ ID NO: 17495 - DNA, 201 bp, Homo sapiens
gccttttacaccctcaccagcaatgtataagagtttgagttggtccccatccttgtatattcagtattgtcagtcatttttattttagccattctggtgtrtaattgtgtttctttgtgatttagagctgcatctcccatatgactaataaacacgttttcacgtgcccctcagccattgggacacttattttagcctgtt

SEQ ID NO: 17496 - DNA, 201 bp, Homo sapiens
tttgccgcagcagctggcaagtcaggcattgggctgagtggaggcagggagtggtaggaggaaccggcggggcaggagtgtggaggggaagtccaggtagytgtgcaagctcagggtgaccagaagaacagaagacctgctgaaatccaggctttgggatttagaacctgagggaaacatggggtgtcagcatgtgctggc

SEQ ID NO: 17497 - DNA, 201 bp, Homo sapiens
cgtgggctcgtctctgcagagggagatcaacctgaaaagatctgtttctgaaatatatgtgggtgaccaagggacggggtgcaggggaattctgaaggctyaggggaaggtcaggtgggtttcagcagtgagagacttgacctgcacagcatctgttatccccatgagccttcatgaccagtatctttggagttttgtcta

SEQ ID NO: 17498 - DNA, 201 bp, Homo sapiens
agtcagatctaaaaccagggaggtttgggaggcccaggtgggaggatcacttgaagccaggagttcaagaccagcctggccaacatggtgaaaccctgtcyctactaaaaacacacaaaaaaattagcctggtgtggtggtgcttgcctgtggtcccagctgaggctgaggtgggaggattgtttgagcccaggaggtgga

SEQ ID NO: 17499 - DNA, 201 bp, Homo sapiens
caggggcaggctgctgctagagttcttggacttcagagccaagagggtctgcttcaaaacgtggcttttaagaaatgtgcagacacacgtacatgtttgtktagacagagccatgtgggatgtagggctttgcctgttagtgtgaaacatttcttcagtgtttcctacagtgttctgatttgtactttggtgcttggacat

SEQ ID NO: 17500 - DNA, 201 bp, Homo sapiens
tgtagggctttgcctgttagtgtgaaacatttcttcagtgtttcctacagtgttctgatttgtactttggtgcttggacatttcctgttggatggcttaayggaggatggcaagcagccttctctgatcacttctaggagggttatttgcagttatcagctgctgggggtcagggggcatctctcgtgcctccatctgtag

SEQ ID NO: 17501 - DNA, 201 bp, Homo sapiens
aggataaggaaagaaagtcaaagtgagcccctagatagctgtaaacctggttctattgtactttgaaaacaaagcatttctcttgtcctccacagtgaggrcatcaggaagtaagcctcccctgggggaccatgcagataaaggcagaaggagtaggtcagaccccagaagatgggacttttctgattcaagaagttcagt

SEQ ID NO: 17502 - DNA, 201 bp, Homo sapiens
tcaatctttgcagtagaaagagaaatgtagaaatctgccagaaaatgtgctggcagtgaaatggagagtttggggagggaaaaatgggcaggccttatggwaatgtgataggaaatgaggtggaggtgaaaggtcaggtaactgtgggggcccagctctgggtgaggtgtcctagaattcagcaaggaaggcagcctcttg

SEQ ID NO: 17503 - DNA, 201 bp, Homo sapiens
ataacattcacaggttccacagatgaggacatggacatctttggggggcctgtcatgctgcctgtcctactccctattcttcctgctccccagccctaggsaaccgctaatctactttctgtctctagagatctactcactttttttattcctctgcatattctgtttcttcctcgagtttcatgttcagctttttcctct

SEQ ID NO: 17504 - DNA, 201 bp, Homo sapiens
ggcctagtagaccattgaaaggacttggcttttactcattgcaaagtacggaggggacaaatgacatgaccttctgcatctcctcccacgccttgggcccrcaggctgcctctgcactgttagtcctccctgacttcctgccccaggctcactgcccccatccatgttgcacacccctctctacctgcagccgccatcccc

SEQ ID NO: 17505 - DNA, 201 bp, Homo sapiens
gtggcttatgcctataaccccagcacttcgggaggttggggtgggcggatcacttgaggttaggagtttgagaccagcctggacaacatggtgaaaacccrtctctgctaaaaatatgaacattagtgggatgtggtggcgcacacctgtaatcccagctacttgggaggctgaggcagggcaatcgcttgaacctgggag

SEQ ID NO: 17506 - DNA, 201 bp, Homo sapiens
tcttttcacatagtcccatatttcttggaggctttgttcgtttctttttattcttttttctctaaacttctcttcttgcttcatttcattcatttgatctkccttcactgatatcctttcttctagttgatcgaattggctactgaggcttgggcattcgtcacgtagttctcgtgccatggttttcagctccatcaggtc

SEQ ID NO: 17507 - DNA, 201 bp, Homo sapiens
tgaaggaggtaaggggagagaaccatgtggagggatctgggagaagagcattccaggcagcggaaacagccggtgcaaaggccctgaggcaggagtgcctrttgttccagggacagtcaggaggccagtgtgtctagagcagaatgagggtgtaggtattaagagacgaggtcagagacatgacagaggcctgaccgtgta

SEQ ID NO: 17508 - DNA, 201 bp, Homo sapiens
gcagaggttttgtttttgtcaatttttcctttaagcttttctatgaggtataatactaaagcacttaacacacccagctgtgagtgcacagcccgatgggttttcacgcatgtacacttatgcatccccattgccagtactccggaaggacccctgcaccctttcccagtcagttcctctgcccttggtgagtgaacaact

SEQ ID NO: 17509 - DNA, 201 bp, Homo sapiens
gggaggctgaggtgggcatatcacaaggtcaggaattcaagaccagcctggccaacatggtgaaaccccatctctactaaaaaatacaaaaattagcctgrcatggtggtgggcacctgtagtctcagctactcgggaggctgaggcagaagaatcgcttgaacctgggaggtggaggttgcagtgagccaagatcgtgcc

SEQ ID NO: 17510 - DNA, 201 bp, Homo sapiens
tagggagttggcaaaatgggttgctaagttctaggtaaagggaacgctttaaagattacaaaactccttttttggtaatattaaaaaattattggccaggygtggtggctcatacctgtaatcccagcactttgggaggctgagactggcagatcacctgaagtcaggagttcgagaccagcctgaccaacatggtgaaac

SEQ ID NO: 17511 - DNA, 201 bp, Homo sapiens
gggaggggcaggggttcttattcctgttgcaggtagcccctactgctgtgtcgttcccctatttcctggggttcaactgcatagtctgagctaattccaaytggctgttttaaagagagcagactacgatcctgagtggcggggtgagtagtttggtgggaagggtggttacagaacaggtgactcaggatgatttgggtc

SEQ ID NO: 17512 - DNA, 201 bp, Homo sapiens
tcctgttgcaggtagcccctactgctgtgtcgttcccctatttcctggggttcaactgcatagtctgagctaattccaactggctgttttaaagagagcagactacgatcctgagtggcggggtgagtagtttggtgggaagggtggttacagaacaggtgactcaggatgatttgggtcagagcaagtgaccaggggtga

SEQ ID NO: 17513 - DNA, 201 bp, Homo sapiens
ctgttgcaggtagcccctactgctgtgtcgttcccctatttcctggggttcaactgcatagtctgagctaattccaactggctgttttaaagagagcagastacgatcctgagtggcggggtgagtagtttggtgggaagggtggttacagaacaggtgactcaggatgatttgggtcagagcaagtgaccaggggtgact

SEQ ID NO: 17514 - DNA, 201 bp, Homo sapiens
gatggagcaggtaaccagggtgacttaggttaaagcaggtgaccaggggaacagatctgaactactgattagaactggcgggaaagttgtttactgaaackagaggcaagggggccaaagagaaccaggaagttaaactttaaaatggaaaatcaaagaataagagagctgaacatattgacatactgattctttgaagag

SEQ ID NO: 17515 - DNA, 201 bp, Homo sapiens
cccagactcaagccatcctcccacctcagcctcctgagtagctgggactacaggtgtgcaccaccgcatccagctaatttttgtatttttgtagagatggsggtctcactttgttccccaggctgattttcaactcctggactcaagtgatctgcctgcctcggcctcccaaagtgctgggattacaggtgtcagccaccg

SEQ ID NO: 17516 - DNA, 201 bp, Homo sapiens
atgttttctgttttcagtggcatagaactagataaaaggtggcagtgcagaggatggaagtggtattgctcagtgggaaagggaaggcattttaggtttgrgacatattacaatattgccttttagcgtagaaaagccctccttcctgatgctcttgctagtgctgggtggaaagattccctttcaactcaacatgtgtga

SEQ ID NO: 17517 - DNA, 201 bp, Homo sapiens
aggaatgggtttctaagtccaagctgaggtagaatcctggcattgccatttactagagctgtgtgaccttagacaattcacttaacctctctgagcctcartattcttacctgttaacaagtggggatatgggttcccagggatgagggaccggtgaaatgatatgcctggagacagctaacacaatgcctggaaaatgct

SEQ ID NO: 17518 - DNA, 201 bp, Homo sapiens
cagtacttctgcagtgagatgaaactttggaggagtaaagttggtgtttgtaaattatctagcacagtgcttggcacacgttgcaggttgaatttatttgyttttccttacttaccctgtgttaatatgggttctccccaaaacagagcctgggtcaaggatctgagtgcatgtggttgatacacaaatgatcccaagagg

SEQ ID NO: 17519 - DNA, 201 bp, Homo sapiens
tgacatctagattggtgcttgaccagattctgggtactgtggcccagccaagttgacacataaaattagccatcagagcagccaaatagagggtgtcttaytgagcaggttaccactgtgggcagctggagctcagtcctgctggggaaccctggcagtcagtgtagaccgtgccccagaattaccccacatcaaggggca

SEQ ID NO: 17520 - DNA, 201 bp, Homo sapiens
cagcaggcgctggcagggtggaagacctggcagtgcctgatgctgcaggaatggccagacactgacccatgggcagggtcagagagcggaggaggtggaakaatgcacttaatccaggccacatggtgggtggaatgagcatgggttttggagacacatagatccagtgtgtatccagctggacacataattgtgacctct

SEQ ID NO: 17521 - DNA, 201 bp, Homo sapiens
cagactttgttccattcaccgtattggagggcacctccggagggtataggattttgtgataaggcacatcctcctgaggggagggcaggtactttctcacrgcctcactgtggtcagcagagctgaggcagctccagccacttccttggcttctctgcctcagagttcacacaccccggcttatcttccctcttccccgag

SEQ ID NO: 17522 - DNA, 201 bp, Homo sapiens
agttctttttcactattccttgatttatttaacctgtccaggtggtcttctatatgtcagttccagactaacctgatctgatgcttgtagactagttatcytagtttgcttctccagaagaggctcctcttctctcccctagatccatagtatcctggctgaggacccctgagagggcagcatggaggggccctggtgctc

SEQ ID NO: 17523 - DNA, 201 bp, Homo sapiens
cttggctttatgccttcatataccttttctctctactcatgtagaaactcttcttcagcttcatgttttaataatggaagaacttagtgatgtttcatatstagagatttttctctaggtccttctcatcgataagacctgtttcaagatatggcaagccctagttctgatctctggggtcctcaccatttatagacttcc

SEQ ID NO: 17524 - DNA, 201 bp, Homo sapiens
agagctgggatttttttttgtggaggaataggggagacttttctggtaaagaccagaaaacctgctagacaaattctaaaagagccataacactcagagckgggattttaacttcatcttctgcttcagggaccacattgttcccagtgtgtttaaacacctggctggtttttcacttggggttctcattcagattcgtga

SEQ ID NO: 17525 - DNA, 201 bp, Homo sapiens
atcacttcacatgggaatcctaggactccatattatattcttatcctgttgaaaatttgaccttttaaagatttatttatatttagctcaggccttaaaarttccatgtactatctaaaaagggaaaagttcatcccagtcaatgtcctgtcttgcttatgtttaagttggataggaagaaaaaaatccacaccaggagaa

SEQ ID NO: 17526 - DNA, 201 bp, Homo sapiens
atttcttttattggatgggtcagtggtttttcttacgagcataaggtagaaacttttttggaactaaattcttctcagtcagcttctatagttttcactgkacttttttttttttttttttttttttttgagatggagtctcactctgtttcccaggctggagtccagtggcacaatctcagctcactgcaacctccgctt

SEQ ID NO: 17527 - DNA, 201 bp, Homo sapiens
ctgggctacataggctaaactaagaagtttggattttatttacagtgctctgggaagcagggaagtgacctgatattgtagatattttcaaaaaatcactstgggcctgtggagtgaatggaggacaggagctggagtggaagcagatagcccagctaggaggcaagaacagtggacaagacggctggactagtgtggtca

SEQ ID NO: 17528 - DNA, 201 bp, Homo sapiens
ggggaggaagatggctaaatgtatatggtatttcttgttttctgctcttactcttcctacctccaaccccattccaaatttcctcttaagaaaaggaaggrgagtttgtttttctcagtagagtaagtagtgactgcctaggtggcaggattttggatggtagtggtgatgttacttattgatggcacatttgatgactgt

SEQ ID NO: 17529 - DNA, 201 bp, Homo sapiens
cttttttttttttttttttcctgctgagggatcttgtccccaaattaatgcttgaacaatcaacaaccaataatttctggtatccagggactcagacatgrcaaccagaattagggaagctgcacttgtattattaatgtggctttttaacccatagctgtttttttaccctcagatgtggccattggtgcacccaaggag

SEQ ID NO: 17530 - DNA, 201 bp, Homo sapiens
attttatccccattcatggaggggaagctgaggtacagaggcattattgcccaagttacatggctaatgagttgtcgagcacaggcctgtgcctttgcccmcccaggctgactgcctgtcaggaagtcaagaatccgagtttgggggcttcagggcgctcaaacatctgtcttgtgaagttctgttctgcctgctttcctg

SEQ ID NO: 17531 - DNA, 201 bp, Homo sapiens
tgcagaagataacaaatgggtgaatgtatctagcatggaaacaatctccctcttcccttcaaatgtacctgggtttgaaagcctaaaggtaaaggattcctttttttttttttttttgagacagagtctcactatggcatgatcttggttcactgtaacatctgcctcctggactcaagccatcctcctacctcagcctcc

SEQ ID NO: 17532 - DNA, 201 bp, Homo sapiens
ttttttttttttttgagacagagtctcactatggcatgatcttggttcactgtaacatctgcctcctggactcaagccatcctcctacctcagcctcccargtagctcggaccacagacatgtgccaccatgcccagcaaatttttgtatttttttttgtagagatggggtttcaccatgttgcccaggctggtctcagac

SEQ ID NO: 17533 - DNA, 201 bp, Homo sapiens
gtatagcctctccagcgccgctgcgcggggtggggctccccaggggcagggtgtctgggatccactggggcgcactggagcccagagccccggcgcccccsccccccccagctcctacaagaccctgggtggaagtggagcggagaagctcctaggatatagggaagaggaaggtgagggagcacttcccagtgacaccgc

SEQ ID NO: 17534 - DNA, 201 bp, Homo sapiens
ctgtaacatctgcctcctggactcaagccatcctcctacctcagcctcccaagtagctcggaccacagacatgtgccaccatgcccagcaaatttttgtatttttttttgtagagatggggtttcaccatgttgcccaggctggtctcagactcctgggctcaagggatccacccaccttggcctcccagagtgcgggatg

SEQ ID NO: 17535 - DNA, 201 bp, Homo sapiens
ctaccatgttgatggggaaatgagtgaggagagaattagaaacccagacatcttctgcctgattatagcagcagctagattgacttttgagagtgtacgcktgtgtgtgtgtgtgtgtgtgtgtgtgtgtgtgtgtgtgtgtgtcttgggaggcatggaggcatatgtacctaatgtctaggtctgtttggacagcagtgt

SEQ ID NO: 17536 - DNA, 201 bp, Homo sapiens
gttggccaggctggtcttaaactcttgacctcaggcgacctgcccgccttggcctgccaaagtgctgggattacaggcgtgagccaccacactggcctacttttttttttttttttttcctgctgagggatcttgtccccaaattaatgcttgaacaatcaacaaccaataatttctggtatccagggactcagacatgac

SEQ ID NO: 17537 - DNA, 201 bp, Homo sapiens
actcttgacctcaggcgacctgcccgccttggcctgccaaagtgctgggattacaggcgtgagccaccacactggcctacttttttttttttttttttccygctgagggatcttgtccccaaattaatgcttgaacaatcaacaaccaataatttctggtatccagggactcagacatgacaaccagaattagggaagctg

SEQ ID NO: 17538 - DNA, 201 bp, Homo sapiens
aaaaattttaaatgatgacgtttggccaagacaagtaataataaaggagtgtgtggccttcaactgcctgctaaagacttgctgatcacattaggattactttttttttttctttcaacaactttaagaccaagtgtcctagggaagctggaataaagcagtcacagttcttatttgtgactgtggtcttttcctgtgact

SEQ ID NO: 17539 - DNA, 201 bp, Homo sapiens
tcatctttgctctcttcattatcctgagcatcttactttggtttgtcaggattcttctcaaataaaacacactcctcaacttttacagttgaaaacaggctttttttttttcttcttttctttttttgagatggagtcttgctctgtcacccgggctggagtgcaatggtgtgatctcagctcaccacaacctccgcctcc

SEQ ID NO: 17540 - DNA, 201 bp, Homo sapiens
tcctcaacttttacagttgaaaacaggctttttttttttcttcttttctttttttgagatggagtcttgctctgtcacccgggctggagtgcaatggtgtratctcagctcaccacaacctccgcctcctgggttcaagtgattctcctgcctcagcctcctgagcagctgggatcacaggtgcacaccaccacacctggc

SEQ ID NO: 17541 - DNA, 201 bp, Homo sapiens
agtagtatgtaatggttccagtttgtccacatctagtccagcatttgttattgtttgtctttttgattgtagccattctaatgagtaggaagtagcatctytttgtggttttgatttagatttccctgaaggttaatgatgttgagcatcttttcatgtgattattggccatctgtatgtattttttggaaaaactattca

SEQ ID NO: 17542 - DNA, 201 bp, Homo sapiens
ggggccaggccacgtggggcctagcaggccagggcaatgtgctggaattttattctgtgtgtgagtggggaggccactgaaatcaattttgggtattacaktttaactagggaaagatatgatcagatggatgtttttaaaagctcactttgcgctgggcatggtggctcatgactgtaatcccatcactttgggaggctg

SEQ ID NO: 17543 - DNA, 201 bp, Homo sapiens
caggctggggccaggccacgtggggcctagcaggccagggcaatgtgctggaattttattctgtgtgtgagtggggaggccactgaaatcaattttgggtrttacattttaactagggaaagatatgatcagatggatgtttttaaaagctcactttgcgctgggcatggtggctcatgactgtaatcccatcactttggg

SEQ ID NO: 17544 - DNA, 201 bp, Homo sapiens
ccaatggccagttctaattattcccattgttctggcctgtctgccatattggacaaaattgatccttcctttcttgagactgtcctctgtgaccatgtggrtgactcctctctcgattttcctcttccttctctagccatgcttttccagtcttgttggctgacacctcctcatcttcaactcctaaatgtgagtcctcat

SEQ ID NO: 17545 - DNA, 201 bp, Homo sapiens
gcctgtgtcttactgatttcttttaccaaagctcagatggggagattggcaaggccactgaaatagtgactggcaactcggtttctttcctcctcaccctytgtgatttcaaccctttcctgctccgttctcctttgagaatgggtaatcagaggggaggaagatggccttggcatatcactggggaaggatttctgagcg

SEQ ID NO: 17546 - DNA, 201 bp, Homo sapiens
ttccagggacagagattcctgttctctcactttaaaaataacatatttccttgaatccccaaaacagttaaaaaataaaaagggttacggaggggatgacytctggcacagaaaagcagtaaaataggtgtattgacactgaagtcatatttctataatgaaatacatacctatctatttacttattgactctgaaataac

SEQ ID NO: 17547 - DNA, 201 bp, Homo sapiens
tgccatgtttaaatgttcttaaatttgggattgttgaagtctgaattttactgtgctttaaaattgtgatggaaaaacttcctatggattccaaagatttstgtaccactctattatcagggaatgactggcttttatttctagtgtgtgtttgcatttcctaggacagtgatcatttccagggaaggaaatagattaccc

SEQ ID NO: 17548 - DNA, 201 bp, Homo sapiens
ctgagacatagtagcctttagttatttttgtctaattcttctttccctgatacagtgcccaccataaatccccagtcatggtgctgacctggcatgtgaarctggctgggaggaaagagatttttctctcccagcaaagtagtaaacaggctctctcaagcattcatccatctggggagcttggcacacaggacagatcct

SEQ ID NO: 17549 - DNA, 201 bp, Homo sapiens
acaaaggcagggagacaggcccagcagggccggcagagcctgtagtgacggaggggagcagccttatctccgggaacccgagcgccccgtgcgcggcgggragggggcagttcggggcgccccggcgggtcccaggggctgactcccgcccgggaagtgcgcgcagggctcacggcccgcagggggcgctgccgcgccgtc

SEQ ID NO: 17550 - DNA, 201 bp, Homo sapiens
ggaaagagagacaaaggcagggagacaggcccagcagggccggcagagcctgtagtgacggaggggagcagccttatctccgggaacccgagcgccccgtscgcggcggggagggggcagttcggggcgccccggcgggtcccaggggctgactcccgcccgggaagtgcgcgcagggctcacggcccgcagggggcgctg

SEQ ID NO: 17551 - DNA, 201 bp, Homo sapiens
aggtgcacaccaccacacctggctaattttttaatatttttagtagagacaggtttcaccatgttgatcaggctggtctcgaactcctgacctcgtgatcygcccacctcagcctcccaaagtgctgggattacaggcgtgagccattgcgcctgacccaacaggccctcttaaaaccggggccatctggctgaaggtcca

SEQ ID NO: 17552 - DNA, 201 bp, Homo sapiens
ccctctcctgatagacaaccactgttctgacttctatcaccatagatccatcttgcccattctagaatttcacattggtgggaatatacagtatggactcttgtttctggcctcttttaatcagtgtgatgcatttgagattcgttcatgttggtgtgttgcttgtttttccccttactgagtagcactccattgactgaa

SEQ ID NO: 17553 - DNA, 201 bp, Homo sapiens
ctagatcagtgattaggccaagaacgtctttgagccattttctggtctcccaagtcccttaccctcttggaagagatcagaggtggtcaccctcagcttcrccctcatctatgtgaaccctgatgccctaaccctgtgcctacacccaagggtcctggagaggttgaagagacaagagggaggatgggaggctgctccagg

SEQ ID NO: 17554 - DNA, 201 bp, Homo sapiens
taattcccacatgctgtgggagggacctggtgggagataattgaatcatgggggtgattttccccatactgttcttatggtagtgaataagtctcatgagktctgatgcttttataaggggaaactcctttcacttggctctcattctctcttgtctgctgccatgtaagatgtgccttttgccttccaccatggttgtga

SEQ ID NO: 17555 - DNA, 201 bp, Homo sapiens
gccctcatctatgtgaaccctgatgccctaaccctgtgcctacacccaagggtcctggagaggttgaagagacaagagggaggatgggaggctgctccagrgatgagggatggggggatgaggttggtgagagtgatggaatctggtacatgggctgggggcgaggggccctcatcttctgagccaggccccaagatagga

SEQ ID NO: 17556 - DNA, 201 bp, Homo sapiens
ggctctttatctgtccttgccttgcagaaggccaaggcaccttgagcaacatgtcaaagggcatcccaactggttgtattatttaccttgaagtgaagtgwcaggatttgaactgtcagccctcagggagaagtgttccagctaccaggtttttttttttttttttttttttttttttttttttttttttttttttttttt

SEQ ID NO: 17557 - DNA, 201 bp, Homo sapiens
ctctttatctgtccttgccttgcagaaggccaaggcaccttgagcaacatgtcaaagggcatcccaactggttgtattatttaccttgaagtgaagtgtcrggatttgaactgtcagccctcagggagaagtgttccagctaccaggttttttttttttttttttttttttttttttttttttttttttttttttttttga

SEQ ID NO: 17558 - DNA, 201 bp, Homo sapiens
cccgcctcagcctcccaaagtgctgggattacaggcgtgagccaccgcgcccggccgctaccagcttcttaagaaaaaaaaagcactgaaagcgcttgtgrtgctgtccttgggtgctcctttgcttttatctcagaggctggcacatttgtaggcaggactgtgagacacagtctcccctgcccccaggagtgtggctgg

SEQ ID NO: 17559 - DNA, 201 bp, Homo sapiens
agtgttcaggaccagctcattagcgggacacaagctgctgtagcctctgtaaatactgtaggaaatacagactttctctgtaggaggtgaatctgccttgscctctgaaacaggcagagtccagtcaggaaaacaaaaaccataccagttattttaacagaggaaatttagcactgggaatgggttaaacaggtcatggac

SEQ ID NO: 17560 - DNA, 201 bp, Homo sapiens
acaattaactgctgttggggccagctgccgtgagaaactgttgctgggataagctgctaggaataggaagcagggaggaaggagcgagttcctttgccctytccagccttgcaggctccctccgatgctccatattagcagagcctcacagcaagcctctggcaaaacaagtgaggtttgcagggtcccagctccagtgtc

SEQ ID NO: 17561 - DNA, 201 bp, Homo sapiens
gttctagagatgaaatgcttccagaatgattgcacttggtgaattggataatgcggtatgtctgtgattgtatgttttaacattttagagaaatctgaaagtttaatgtgctggcatgcacacaccccgctggagaggagcagcagttgccttgtcctcagctcagtttctgtgaactgtgggttgtttctctcttccttg

SEQ ID NO: 17562 - DNA, 201 bp, Homo sapiens
gagagggagccaggagagtggagcacaggagggcagcaaggcaggctggggccaggccacgtggggcctagcaggccagggcaatgtgctggaattttatyctgtgtgtgagtggggaggccactgaaatcaattttgggtattacattttaactagggaaagatatgatcagatggatgtttttaaaagctcactttgcg

SEQ ID NO: 17563 - DNA, 201 bp, Homo sapiens
gttattaagcactgggatacaccagtgaacaaaaaaaacaaggatgctgccatccctagtcccataaattagtgggcaaaagagatattaagacaagtaaytgagagagaaaagaccagagggaaggtgagtatttgatttaatctagataggagggtcaagaaaggtctgggacctttcgacatgattagaaggatgcgt

SEQ ID NO: 17564 - DNA, 201 bp, Homo sapiens
tatatttcttccctgacaggttactgtgggccaccagcctccttggtgacttctgttttgcagatggggaatttgttgattgtagtgagtacgctgtgtgyggcagaaaggattctgtcacctacagagagctagggaagcgcccaggctgaggaaacccaccccttcgaagcagccatccataggtagcctgggggtctt

SEQ ID NO: 17565 - DNA, 201 bp, Homo sapiens
ggaagaggaagttctcagcttcattgttactgctcagaggtaaggggggggtttaaacacttttttcaaagatgagagatttatgggaccaggaaaggatrtgtcctggttaagctttgatgaatcccaggatgctgaggaggaagaaatggttactcagtgataaagccttgagccgcaaagtggaattggatttcttgg

SEQ ID NO: 17566 - DNA, 201 bp, Homo sapiens
acccatctactaatgcatcttcagctcacctccagccaggcgagaacagtcattcatcagaccccagcaattgttgcctgtcgtgttttcattaattgttrcctctctaatggatcattcccattagcttgcaaatatgctatgataattcccatcttaataaaaaagagcaaaaaaactccctggagcccacttccccca

SEQ ID NO: 17567 - DNA, 201 bp, Homo sapiens
tctgactcagcaaaccattttgtgtcctggtaattaatggtaatttctgttagtttgttttttagggtttctaatttaaatgagaagtaaaagccagtcarcaaccctcacaaagcaagaaagggtgactgaactatcccaaaaatacaatggacttaatgatggttaaatggaactggtgaagaaattagcaaaatgatt

SEQ ID NO: 17568 - DNA, 201 bp, Homo sapiens
gtgtttgacctactactgcccagcagtctaacatttctttgaacacctactttgtagcaggcactatgatgggtgttttataaacattcttttgcttaaaycttacaagaaaccttcttaggtacacttttattcctcctgttttacagaagaggaaaactgaggcttggagtgtttaagacacttgtctaagagacacag

SEQ ID NO: 17569 - DNA, 201 bp, Homo sapiens
atttctccatgcagcttattgacgtaacctaagatgagaagacactactattcatgcctggtcagaaagcacagactggctatgtaacagccccagcaggraagcactgggtgcaagacactggattaaattgagacaaatgtttgcttctcagaatggcagtgaccatgggtgcttgactgtgggtggggatgacagatt

SEQ ID NO: 17570 - DNA, 201 bp, Homo sapiens
gctgctggccgtgctgctctggaaggtgagtctggtgattgcaggtccccctggggtccccactcatagatgcccagctctcctgcctttccagggaagamggagtatcctgttagagcttccttcatggcaccggtacagtgaaggacagtgacccttcaggcagggagtggaatcttggctccccttgaggccattcac

SEQ ID NO: 17571 - DNA, 201 bp, Homo sapiens
catagtattgcctcattttgacctttttctctgcatatatagatatagaccaggcattctcataacatcaacttatttttgaatagtgtattagttaaatyttacagtaatatactcagcatattttcaggtgaagtacctctaaatttaaaagcagtgggttcctttttttttttaagtatggggtcttgttctgtcacc

SEQ ID NO: 17572 - DNA, 201 bp, Homo sapiens
cagtctcgctgttctctccattgtctcccttcctgagggaaggcagccattcacctgggaaggaggctggtcaggggaccccgaggagagtctgctcagcrgctgcctccaccacattggttcacccaactgtggcctctggcttgtcttccagcaatgtgtatctgtagccatgactttgcttaagcaaacttggaaatt

SEQ ID NO: 17573 - DNA, 201 bp, Homo sapiens
tcttaatcttctgcatttggacacttgccacagaggacattgtgattagcaaaggaaggcacaaaaattctaatccaaaggctttgcccgccttaagtccktttttgaaatggagctgatttaaatatgtaagtatggtcacagcattgacacttcagtggttatcgtaagcttatttgtacagtatgtgagatgcagttt

SEQ ID NO: 17574 - DNA, 201 bp, Homo sapiens
ctaatcgagcatttagtatgtgctggttactgtgagtcactacatgtgagatagttactgtttttatcctcatcttactgtttcaaagacaaggcatagargagtgaagggacttgctcacaaccttacagttgacaagtagcagaggtaggatttaaacccgcaagtctggctcctaagacttgggtttaaaccactaca

SEQ ID NO: 17575 - DNA, 201 bp, Homo sapiens
ctgagacaggagaattgtttgaatctggtaggcggaggttgcagtgagccaagattgtgccactgcactccagcctaggagaccgagcaagactccatctaaaaaaaaaaaaaaaaaatctttattttgaaataatagcagtcttacaaaaaagtcattaggatagcacaaagaaataccgtaaattcttcacccagattc

SEQ ID NO: 17576 - DNA, 201 bp, Homo sapiens
tagagaagagagggggaccaagggctgagctgtggacactccaacactaagagcatcttttcctcctacccctaaaatggctctggggctccagccattgtatgtgtttttcatgcaggaagaagtgggacatgcaaaggggctctttataatctggtctgaggcccctgtaaagagcctccagtgacttctgcttataac

SEQ ID NO: 17577 - DNA, 201 bp, Homo sapiens
agagaagagagggggaccaagggctgagctgtggacactccaacactaagagcatcttttcctcctacccctaaaatggctctggggctccagccattgtatgtgtttttcatgcaggaagaagtgggacatgcaaaggggctctttataatctggtctgaggcccctgtaaagagcctccagtgacttctgcttataacg

SEQ ID NO: 17578 - DNA, 201 bp, Homo sapiens
acatggtctcaggcaagttgcttcacctttactgctgagcttcagtgtcctcagctgaaatggggagcagaatactgacttcttagtaggggtctggtaamcactgggccccttttcccttctgctctaccctgcaaatcttttcctctttctaactgcctctgcatttggaaggggtcaagactcgtttcatagtttttt

SEQ ID NO: 17579 - DNA, 201 bp, Homo sapiens
ggttcaaaaagggtaaataagttgtccaagaccacacagccattgtttggcagagctggggcaaaggtctatactgctgcaaagcttgtgatttttggctrctaccctctaatgttctgtgagggtggaacacctaacctagaatttccctgtggatcactcacccccaatgatggcatgtcttgctctggacccatgata

SEQ ID NO: 17580 - DNA, 201 bp, Homo sapiens
gttgcttcacctttactgctgagcttcagtgtcctcagctgaaatggggagcagaatactgacttcttagtaggggtctggtaaacactgggccccttttyccttctgctctaccctgcaaatcttttcctctttctaactgcctctgcatttggaaggggtcaagactcgtttcatagttttttgggggattaaaaaatg

SEQ ID NO: 17581 - DNA, 201 bp, Homo sapiens
catcaacaacgtggggccaggcttgagtcagcagcactgactttatgtgacctagtgcagctcgccagcccacgctgatgtgtgttaatggagggggtgcmccttataggagggtggtgtgggctataatttcttctgcattctctgcctattgcttgaaggacagtgttgtcagcagtcaactgactgagcttgactttt

SEQ ID NO: 17582 - DNA, 201 bp, Homo sapiens
tgtgctgatgtaaatttggagttggtgggaatttttggactctgctgtgtggccctggggtttttgagtggaagaggtattttatgctccccaggtcttaraacctgacctgtggaaaggctgaggatgtttcagcagtttagacagggcaaactgctaattcttctcacctgtgaaaacagctggtcttatgaagcgcaa

SEQ ID NO: 17583 - DNA, 201 bp, Homo sapiens
ttgctggatggtggcctaggtacagagcagtgctgggctgcggaggaagccacgatgttctgtaaacacatagatacaagcacattcccgcgtgccacctygtgagtgtcatgcatgtgtgtgcatgcccccttatctctagcctgattttccattgcacaggatttgggaaaaacctttcatctgaccagctgatcagaa

SEQ ID NO: 17584 - DNA, 201 bp, Homo sapiens
cccctgcaatcctcttgggacatcattttagcaggggagactaccattgaacatgtaatgataaaattgattagttatgattgagatgagcagtaggaggraaaagtgtgtggaactgtgagagctcacgatgggcctgaacttgcccagggactcagagaagtggtctggatttgcttgttgaagggtgagaggacatgt

SEQ ID NO: 17585 - DNA, 201 bp, Homo sapiens
aagcattcatccatctggggagcttggcacacaggacagatcctttctcttaagtgtcccaaggccaaccctgaaccatggaagccttcatttaccatcastttttctttcaaaacttctgcaagggcataaaaatgggggactaaatagggaccaaataagtgagtccatgctttggaaatgatgacctgagagtgtgag

SEQ ID NO: 17586 - DNA, 201 bp, Homo sapiens
aagagttaacgtattgaacttgaaaggagagatttttttccctcttgtaataaatcaaacttttctgaatctggaaaagtgatggatgaaactatgtgagmacacacacacacacacatatacaccccataaccattttgaggtcatttaataagggattgctttctggataatctcgctccttgggtataaatctaatgt

SEQ ID NO: 17587 - DNA, 201 bp, Homo sapiens
caacacagagctttggtgtccgagacacatccaagtgacaggcccaagagggcctctgaatgaagacggatgagccgtgtggacacagccacactatgttytcgtgaaggcataagaccatgggccaactttctgggcatccagggctggctgcagaggctggagtgagtggctttcaaggcaagactgataatgaaagtc

SEQ ID NO: 17588 - DNA, 201 bp, Homo sapiens
ctgtgtccaagtgatgtcattgttcaagtcccacctatgagtgagaacatgtagtgtttggttttctgtccttctgatggtttgctgagaatgatggtttycagcttcatccgtgtccctgcaaaggacatgaactcatccttttttatggctgcatagtattccatggtgtatatgtcccgcattttcttaatccagtct

SEQ ID NO: 17589 - DNA, 201 bp, Homo sapiens
gccatctctatcctccaacacagagctttggtgtccgagacacatccaagtgacaggcccaagagggcctctgaatgaagacggatgagccgtgtggacasagccacactatgttttcgtgaaggcataagaccatgggccaactttctgggcatccagggctggctgcagaggctggagtgagtggctttcaaggcaaga

SEQ ID NO: 17590 - DNA, 201 bp, Homo sapiens
aagtctttgctattgtgaagagtgctccaataaacatatgtgtgcatgtgtctttatagtagcatgatttataatcctttgggtatatacccagtaatggrattgctggatcaaatggtgattctagttctaggtccttgaggaattgccacactgtcttccacaatggttgaacgaatttacactcccgccaacagtgta

SEQ ID NO: 17591 - DNA, 201 bp, Homo sapiens
cctgggcccagcctgccgcggcactcgtgggaagtggctggctggctctgctggctccacgcacagctggcatacactgacatggctgtggtttgcttctmtctccttccttgcccctagagtataagaagaagtacggagaggaacacggctcctgccaggctgggatagcgggcttcttcaccgaggtgggtgtctgct

SEQ ID NO: 17592 - DNA, 201 bp, Homo sapiens
gcatgcagttatgtctgggttacgtgtgaaacgtacatctggtgaactgtatacttggctcaaacttctcaaaatttagaggtgctggaaaggattgtcasttggagcctttagtagacaaaaggcagaaagtgagcatcatttcagaaatgctttagtatgcacacttttagctgatattttgatatatagaataataat

SEQ ID NO: 17593 - DNA, 201 bp, Homo sapiens
tgtatagtgtaagtgctgacctgagggcctgtggctctcctgtagtgagggaggatccaactggagtatgacttccacctctgcatggccagcctggtgaygtgaagcacatttcttatgtcaggttcccagtttcctcttctgtaaaatggaggcagcatgggattgtaatgaggattaatggagctcatttacctgaac

SEQ ID NO: 17594 - DNA, 201 bp, Homo sapiens
ctagtgtctgtccatcaggaagccaggttgtaatgatcatgaaaataatagaggggaagaatgacagacctttctagtctatctgaaatagcaaaattacyagtaacaaatcattcttgatttgttcacaaacactggctcagcaagtacctattacgtgccaggctccaaggagaggaataagtcccacatctgccccag

SEQ ID NO: 17595 - DNA, 201 bp, Homo sapiens
aggcaccattctaacctctttacccaagttgtctctgctagtcctcaccacagccctgggaagtgtgtgctgtcatatacccatgaagaaactgaggccaygaaaggaaagcagctctgcccaaggtgttataagcagagagcaccgagacaggacccaagcccaatttgtgttgactggggaatcagtactcagttctct

SEQ ID NO: 17596 - DNA, 201 bp, Homo sapiens
gaaaccttggtggaaatgaattctgtttttggtggagtgcgtgaagttatttccctccattagtttgtaggccagaggttgaaaactagtggcccgcaggmtgagtcttcctcaccgtcccactttgcttgcctggcaaagtgttaacctatacaattgccaatattggaaaactgggatactttgtttacaaatctttat

SEQ ID NO: 17597 - DNA, 201 bp, Homo sapiens
aatagtaattgccttactttatttgcgaaggggtggtgaacactaatatgcctgactccatagagcagtgtatttggttttcttaagcaggaagaaggggsccccccccaattttaatttactgaatgagtttaagaaccatggtgtatttcccaagcttcgctagtgaagatggtattttgttaaaaattgagattccca

SEQ ID NO: 17598 - DNA, 201 bp, Homo sapiens
ataaagaagagcgatgatgccaaaaaacaacactagaaatactttttaaagaagtaccatacttatatgaagatttaaaatttataacatcttttgagctgggcatggttggctcatgcctgtaatcccaggactttaggaggctaaggcaagaagatccttgagcctaggagttcaagaccagcccagacaaggaagtaa

SEQ ID NO: 17599 - DNA, 201 bp, Homo sapiens
atagtaattgccttactttatttgcgaaggggtggtgaacactaatatgcctgactccatagagcagtgtatttggttttcttaagcaggaagaagggggccccccccaattttaatttactgaatgagtttaagaaccatggtgtatttcccaagcttcgctagtgaagatggtattttgttaaaaattgagattcccat

SEQ ID NO: 17600 - DNA, 201 bp, Homo sapiens
gggaaagggaaggcagcagattggtgtcctggcccatccacttcaggtgagaaggatgcctgctgtcctcgtgtggacacaacttcctctgctctccttggccttgccttggcctctttgctttaggatatgatgcccagaagggctcgaaactggagtctgaccaggggcaagcaggctgcctcttgctcctccccagaa

SEQ ID NO: 17601 - DNA, 201 bp, Homo sapiens
ttcacagacagcttgaccacacacagggagctcaggaagcagctttgttggaaaaatgcagggcacttaaactgccacaccaggagggggtttggagaggytggaaagagcatgccattggacacagacactctgggttcaaatcccagctctgccacttactggtggtgtgacccaacatctctgaatggaaaacacatg

SEQ ID NO: 17602 - DNA, 201 bp, Homo sapiens
caagcctgggctgctttctgcccagtaagggatgcggacaattcctggggtttccccgtggtggacacacagtgaagaatttgactcatgtaaccaaaacrtgggtccctggggaagctttggctttgggatcaaatgctgaaagcaaacctaatgggtttaaagtttttaatccccagttgctgtccttgatctggctat

SEQ ID NO: 17603 - DNA, 201 bp, Homo sapiens
atttctgttctttttacttcctacttgcaaagactctggaaatgtaatgatggttcagagtgttctgctataaatcctaacagcttaaacaatctcctggratcatattggcaaactctaagatgatacaagtatagacttagtttgtctgagcccgaggttcagtgtttggagaaaaataatacctatgtcgagataata

SEQ ID NO: 17604 - DNA, 201 bp, Homo sapiens
aagtggccaaggttgcagtttgcaagaaatggagcttggaccccctctgaccttgaactggctgacatcaaagttgtcgctttgcctggtcctgtcacctstcttcctcagatgtctagtgtttattagacctccatagtatcttcaccaactgagaaggtgccccatcagcctgaggaactcccagggtcacccctctac

SEQ ID NO: 17605 - DNA, 201 bp, Homo sapiens
gtagaattggcagatgccttgaggacaattgtggcgtacagtaaacatacctcaatatacttatttctgtttgggattttcgcccctcaagtcctcattgygttattagccctgagctcttaagttttgtcttcacagagtcataagacttccagaaattcagcttagaaactcaagaacttagctttttagccactgctt

SEQ ID NO: 17606 - DNA, 201 bp, Homo sapiens
agaaatttttggtttccacaactagttcagcgctattagcatctagtgggtatgccagggatgctgctaaataccccacaatgcacaggacagctccccayacaacaaggaattatccaacaatgcacaggacagctccccacacaacaaggaattatccaacaatgcacaggacagctccccacacaacaaggaattatc

SEQ ID NO: 17607 - DNA, 201 bp, Homo sapiens
caggcctaatgctgacaccactccactgagagaaagaagcttgcttccgggtgcctgcaagagatgacagtgccttcaccttgttgttagcaagaattgcrtacataaaaacttgagcacatgaaagccacatgtaagagtgagttcaggtgctctaaatcctttccagattgttaacacactgtctatgtcaaatcctta

SEQ ID NO: 17608 - DNA, 201 bp, Homo sapiens
agagaacagaagctaatttacttgcctgggtcaccaggcagtcaaggcggagcaggcctgaggcatccttgcaacattagaaccagaacaacatttcattmttttatgttaaacggactctcctgcctggacccaggcccacgttagcatccagagtggcatgcagtggcagaattggagctggaacagccctcatttgtt

SEQ ID NO: 17609 - DNA, 201 bp, Homo sapiens
aaataacagtttttcgtttaataatggcattttgtattaccaagaccttgcttcacattaggtgttttgtatacattatctcatttaatcaaaaccagcastctatatcatgggtgccaccattcctctgatttttgctaaggaggaaactgaggttcaaaaagggtaaataagttgtccaagaccacacagccattgttt

SEQ ID NO: 17610 - DNA, 201 bp, Homo sapiens
ggaaagggaaggcagcagattggtgtcctggcccatccacttcaggtgagaaggatgcctgctgtcctcgtgtggacacaacttcctctgctctccttggccttgccttggcctctttgctttaggatatgatgcccagaagggctcgaaactggagtctgaccaggggcaagcaggctgcctcttgctcctccccagaaa

SEQ ID NO: 17611 - DNA, 201 bp, Homo sapiens
gaaagggaaggcagcagattggtgtcctggcccatccacttcaggtgagaaggatgcctgctgtcctcgtgtggacacaacttcctctgctctccttggccttgccttggcctctttgctttaggatatgatgcccagaagggctcgaaactggagtctgaccaggggcaagcaggctgcctcttgctcctccccagaaag

SEQ ID NO: 17612 - DNA, 201 bp, Homo sapiens
aaagggaaggcagcagattggtgtcctggcccatccacttcaggtgagaaggatgcctgctgtcctcgtgtggacacaacttcctctgctctccttggccttgccttggcctctttgctttaggatatgatgcccagaagggctcgaaactggagtctgaccaggggcaagcaggctgcctcttgctcctccccagaaagg

SEQ ID NO: 17613 - DNA, 201 bp, Homo sapiens
aagggaaggcagcagattggtgtcctggcccatccacttcaggtgagaaggatgcctgctgtcctcgtgtggacacaacttcctctgctctccttggccttgccttggcctctttgctttaggatatgatgcccagaagggctcgaaactggagtctgaccaggggcaagcaggctgcctcttgctcctccccagaaaggg

SEQ ID NO: 17614 - DNA, 201 bp, Homo sapiens
gaaagcttcttagagcaaatttaaactctacaaactttggtcagggatttgaacacatatttccttccccctcagtttctctcacacagacactgctgatytcagtaatggccctaaactttcttttctttttcttttgcattttcttctttctgcacatgtatgaatgcaagctgaatagtcaagttcctgaaatgggtc

SEQ ID NO: 17615 - DNA, 201 bp, Homo sapiens
agggaaggcagcagattggtgtcctggcccatccacttcaggtgagaaggatgcctgctgtcctcgtgtggacacaacttcctctgctctccttggccttgccttggcctctttgctttaggatatgatgcccagaagggctcgaaactggagtctgaccaggggcaagcaggctgcctcttgctcctccccagaaaggga

SEQ ID NO: 17616 - DNA, 201 bp, Homo sapiens
gtcttatggttgttttaagaaaagaatgataattggtgcataactcccaagtcacatatacagaccagggtccctgtgtgccccaggaaggtctttgtggkttctttggcagagatgagcaaagggtacccttggaactgttttctgtggagtcctctaccttcctgtttctttgagggtttaaccaaaggtggcatttaa

SEQ ID NO: 17617 - DNA, 201 bp, Homo sapiens
ccatagcaattagaatcttaaaatcaaaattgatggctttatttttctaaaaatgggaaaatatctccaaaacattgttcaaaaacaaaacaaaacaaaamaaaaatgtttgttcttatatcccatcagtttattcaactaacattcactgtggactttttataaggcagtaactgttttatgaataggagatataaaact

SEQ ID NO: 17618 - DNA, 201 bp, Homo sapiens
attcagctatttctactaacagaaagtgagtttatgggataccaatgcaaacaaacatagatttagtggaaaatgactcaaccaagtaagatttacaaaamaaacaaaactgttttcatcatctttggttgtagttttataaagaatgctggttcatggactccagacacttcattgaaactgtgtgaatcattttaaaca

SEQ ID NO: 17619 - DNA, 201 bp, Homo sapiens
cagagctacttaatattgtatttaccccagaggaagattatttttttcattctctaaattgtttaattaaaactcatagttcatgttaaatttgttcaaastttccatctaatggtgaggtggtaaaggaaataaaacttaccaaaatagaagagggagaaatgaaaaggaaatatgatcaatgatttctgttctttttac

SEQ ID NO: 17620 - DNA, 201 bp, Homo sapiens
ttaatttgagcttggctagagggagaaagcgtgtgtgtttctgtgcacaagttacactcaacacacaccctctggaaggtgggggtaagcttcagtcccgrctgtccgtacagagtgtggttcagaggctgccctttaacctgtgtggccagagagaataaatcaagccagcagtgctgtctccctgctgactgaaggcgc

SEQ ID NO: 17621 - DNA, 201 bp, Homo sapiens
tttgatgaaagtattggaattttgatgaccttttttattacaggtttgggagcaactactttcttcactctctaaactgcaaatcattcagggtaattgtsctggttcagttagcccccaagctgagaagacaggcccactgtggtttgagtaacttggaaatcttgtggggtcagtgttttgactctcttcattttggtc

SEQ ID NO: 17622 - DNA, 201 bp, Homo sapiens
cggctgtccgtacagagtgtggttcagaggctgccctttaacctgtgtggccagagagaataaatcaagccagcagtgctgtctccctgctgactgaaggygcccggccttatcaaggagcccaaatgtcttgtgctcacagctgctgtgacatctggaagcattaacactttgttgccagcatgtaggctagttgaatgc

SEQ ID NO: 17623 - DNA, 201 bp, Homo sapiens
ttttgtgagtggctctaaaaatgggggcaaaacatgaccctgaggaggcctggggctgatctgagccttaagacttatttgtggagaccttgtgctgttctttttttttttttttaattatactttaagttttagggtacatgtgcacaacgtgcaggtttgttacatatgtattcatgtgccatgttggtgtgctgcacc

SEQ ID NO: 17624 - DNA, 201 bp, Homo sapiens
tggtacagagcttgtgcccaaccccagcagagaagcactaagggggggttggtgccctccttggccacatcctctggaccagagggtataaacagccacayagtggtcacttcttgataggagagagagttaggctgcgggaagttcccccgttcaaggtcgtgcctcatgggggcccaggtgacagccaggccggggttg

SEQ ID NO: 17625 - DNA, 201 bp, Homo sapiens
gccagatgcccagggtctactttgtgctgctgggagagaccatgggtcaggtcacagagaagctgcagctgacttacatggaggagacgtgtcgtcactaygtggcccatgtgaaggtcagtcctctcctcctttttatcctcaaactttgatctctgcagatgttcacttggagctggtggaaactatttttattatgta

SEQ ID NO: 17626 - DNA, 201 bp, Homo sapiens
ctcttgcctgcaggctctatcctcctctctctattttttttctttaggtacttctggcttttgcagacacttgctccctgagaattcagtggtgactttakgaattgtcctcagaaattctaaatctctgcggcaggatctagcctccagggacttgtcagagccagcagcttctgccagtgcgtgggctcgtctctgcag

SEQ ID NO: 17627 - DNA, 201 bp, Homo sapiens
tttagaaatctgatgcctgctgttacaggcctgtcaggactttaccactcataggttctaagaaatctcccctccccacctcattctgttttgtttttagyccattctggatttctgcactcatgcatgcctcatgtgaccagggataggcagggagaaaaactcaaggggctggggttatgtgtacatcttcatggtatt

SEQ ID NO: 17628 - DNA, 201 bp, Homo sapiens
ttgcttgttttcgtcaggtttgtcaaagatcagatagttgtagatatgcggcattatttctgagggctctgttctgttccattgatctatatctctgtttyggtaccagtaccatgctgttttggttactgtagccttgtagtatagtttgaagtcaggtagcgtgatgcctccggttttgttcttttggcttaggattga

SEQ ID NO: 17629 - DNA, 201 bp, Homo sapiens
tgtggtttttgtcgctggttctgtttatatgctggattatgtttattgatttgcgtatgttgaaccagccttgcatcccagggatgaagcccacttgatcrtggtggataaggcttttgatgtgctgctggattcggtttgccagtattttattgaggatttttacatcgatgttcatcagggatactggtctaaaattct

SEQ ID NO: 17630 - DNA, 201 bp, Homo sapiens
tcttttcttcattagtcttgctagcggtctatcaattttgttgatcttttcaaaaaaacagctcctggattcattgatttttttgaagggttttttgtgtytctgtttccttcagttctgctctgatcttggttatttcttgccttctgctagcttttgaatgtgtttgctcttgcttctctagttcttttaattgtgatg

SEQ ID NO: 17631 - DNA, 201 bp, Homo sapiens
gactctttatccaatttgccagtctgtcttttaattggagcatttagcccatttacatttaaggttaatattgttatgtgtgaatttgatcctgtcattakgatgttagctggttattttgctcattagttgatgcagtttcttcctagccttgatggtctttacaatttggcatgtttttgcagtggctggtaatggttg

SEQ ID NO: 17632 - DNA, 201 bp, Homo sapiens
ataaatattttccatccacaatgtactatatatgcctaaatatagggcaagccccaaatagcacatcctccatttccctaattagataaatttaactctcttttttttttttgccaacttaataggaatcagaactatgattgcctttgaggtggggggagtgggcagtgggaattgactggcaagggactggtgggaact

SEQ ID NO: 17633 - DNA, 201 bp, Homo sapiens
tatttcctgaatttgaatgttggcctgccttgctagactggggaagttctcctggataatatcctgcagagtgttttccaacttggttccattttccccgycactttcaggtacaccaatcagacgtagatttggtcttttcacatagtcccatatttcttggaggctttgttcgtttctttttattcttttttctctaaa

SEQ ID NO: 17634 - DNA, 201 bp, Homo sapiens
gggacatttaagtctgcagaggtttctgctgccttttgtttggctatcccctacccccagaggtggagtctacagaggcaggcagacctccttgagctccrgtaggctccactcagttcgagcttctcagccactttgttaacctactcaagccttggcgatggtgggcgcccctcccccagccttgctgctgccttgcag

SEQ ID NO: 17635 - DNA, 201 bp, Homo sapiens
gaaatgatgattaagataggacaattggacaaaaaggctgggccttcttaggtgggtattgagtgggaagtgattcaagaggccagacattctgtctggayattagctggaagtggggctggacaagatgaactagagccctcttgtggtcccatcattcaggcctgtagctttcatttgagaccagtggttcttaaactt

SEQ ID NO: 17636 - DNA, 201 bp, Homo sapiens
tccaggtgccatctgtcacccctttctttgactaggaaagggaatgccctgaccccttgtgcttcccaggtgaggtgatgcctcgccctgcttcggctcaygcttggtgtgctgcacccactgtcctgcacccactgtctgacactccccagtgaggtgaacccagtacctcagttggaaatgcagaaatcgcccgtcttc

SEQ ID NO: 17637 - DNA, 201 bp, Homo sapiens
ccttatgggaggcatctcagcagaggccctttttgggggcaggagggattgcatagcaatactgcctacccagagttgttgttcccaggctagggtccaamtcagggcagggagatctactggaggcagcgtatcacacactagttgtccaagagatggagagagagtgcaaaatctgagctgtgcttatgggaagctcgg

SEQ ID NO: 17638 - DNA, 201 bp, Homo sapiens
gcccaatcaaagccagagatggagggacagattagtattgaaatgatgttcttggtcacttctggttccagatggccaaccaagcacaaatgttgatgtctgtgccttggtaccccattgcaatgattataaatgagtagatcggaacagggaggacaacactgtgaaagaaagggcatcagctaataataagagtccagt

SEQ ID NO: 17639 - DNA, 201 bp, Homo sapiens
ttgctattcttaaatattgagtgtccaaaagattcgtgaactgcatctcagctgggtgggaccctttgggacaggagtaggggaataatgccgtcgttaaytgcaaagaggagttttgggaccaggttgtcttataggtttattttgaacaactgataggcttggtattgctggaagtggatagatttgggttgcctgtgt

SEQ ID NO: 17640 - DNA, 201 bp, Homo sapiens
cgacgcccgcattccgcccgtgtccaggcgcagagctcccgccccggggagcttcctggccgtcggcgggccccgcggcccgcgcgctcggcgccctgctygccgggcagaggggaaggcggcggccggctggggatgggcggcccggctgcgccgaggggcgccgggaggctccgcgcgctgctgctggcgctggtggtc

SEQ ID NO: 17641 - DNA, 201 bp, Homo sapiens
cccaatcaaagccagagatggagggacagattagtattgaaatgatgttcttggtcacttctggttccagatggccaaccaagcacaaatgttgatgtctgtgccttggtaccccattgcaatgattataaatgagtagatcggaacagggaggacaacactgtgaaagaaagggcatcagctaataataagagtccagta

SEQ ID NO: 17642 - DNA, 201 bp, Homo sapiens
tgcagctgccttgagaatgcatatcattgaataatgttagtgggaggttttaaactatctgaagatcacacaactgtgagagcccagctcccctgaaatgygtagggttggtcagtgattttgctatgcgccaaagcagctgccttgatccctcagagccccggcatttctgcccggggtttggccacccctggccttggc

SEQ ID NO: 17643 - DNA, 201 bp, Homo sapiens
aatcaaagccagagatggagggacagattagtattgaaatgatgttcttggtcacttctggttccagatggccaaccaagcacaaatgttgatgtctgtgccttggtaccccattgcaatgattataaatgagtagatcggaacagggaggacaacactgtgaaagaaagggcatcagctaataataagagtccagtaatt

SEQ ID NO: 17644 - DNA, 201 bp, Homo sapiens
ttatttcatgccccaaattatttcaaatattgtataaagttacctttataggtcatgtgtagaaggtgtatataaacataaatgaatatgaagtttagccyttagtcccatcctcaaagtatctctttattatatggagatatttcaaaatctgaaaaaatccaaaatctgaaagacttctggtcccttatatttcaatta

SEQ ID NO: 17645 - DNA, 201 bp, Homo sapiens
aagtcaaaatagtacaatagtccccccttatccattgggaatacattctaagacccctagtagatgcctgaaactgtgggtagtcctgaaccctttatctrctgttttttcaatctgataactgagacagctagtaagggattaatgggtagtagtgtaatagcatggatgtgccggacaaaggtgtgattcccatcctgg

SEQ ID NO: 17646 - DNA, 201 bp, Homo sapiens
ttgaagctgcagtgagctggactactgtacttcagcctgggagacagagaccctgtctccaaaaaaaaaacaaaaaacaaaaaacaaaatttccaaattaytagacacttaaattttaaaggacagtaagtcccaaactgtgagaaacttttataggcaacatcctcttttctaatagtttaacttgaggatataaacctt

SEQ ID NO: 17647 - DNA, 201 bp, Homo sapiens
tgatcactctgtgttctcaagacaagcaatgggtaagaagacaaggccacggaggtcaaagatacagaaagataattgccatatatgctatgcagccagtkcccctacctcatgtgattgtagagtggttcttacactagggtggcatagaatcacctgaagggcttgtttaaacagatcatgggtggtgggtacagcatt

SEQ ID NO: 17648 - DNA, 201 bp, Homo sapiens
cggtggcgggcccgacgcccgcattccgcccgtgtccaggcgcagagctcccgccccggggagcttcctggccgtcggcgggccccgcggcccgcgcgctsggcgccctgctcgccgggcagaggggaaggcggcggccggctggggatgggcggcccggctgcgccgaggggcgccgggaggctccgcgcgctgctgctg

SEQ ID NO: 17649 - DNA, 201 bp, Homo sapiens
gacacatcatcaagatggatatacttgcccctttaattcaacaggcacctgttgaatgcctgtgcatgcaaacatgatgctgggctgagccctggggcttmccctgaagagctttggagcccacagcagaactcccagccaggctcatccaccactacagccacaaccatccctacctggagaaaggggctaaaagaagcc

SEQ ID NO: 17650 - DNA, 201 bp, Homo sapiens
tcttcataccagcatttcccaaagcattttttcaaaggatagtaacgacttttatgtcaaaaaacaaaacaaaattttgaattcaaattaattttggaacrtaattgaatttaacgcaggctttttattgcaggacttcatggagctttagaagcccaggcacgcaaggaggatgcactgtttggcatttcctaaatgtac

SEQ ID NO: 17651 - DNA, 201 bp, Homo sapiens
atgttatcttttacatttagattagtgatccattttgagttaatttttgtgtgttgtccaggatagtttcaaacagttgtgcaaaacaattctgtttgttkgttatcatgggtagactaatacctgtcagatcatataacccgacagtcagctggaaacacttggtcacatgagattgcctatctacattttaaatttggc

SEQ ID NO: 17652 - DNA, 201 bp, Homo sapiens
gagcgtggcctcagcctgatgctgcaagggggatcagaggtgtgagttacgccaaggtactgttccatctccagcttaggaagctgagttttgttctcccrtaaacaccagtcattggttaagggccacttagggaggaataagtggtagaaagtggtcctaggcactttccacccaggggtgaagtgtagacagtggggc

SEQ ID NO: 17653 - DNA, 201 bp, Homo sapiens
ttggagccaaacgaagactgaagccacagtgtgcatgtaaagggagtccaaggagcattgggtggggcattgaaattgtttgctacagtcggtttaccttyaactggtttccttcttgttctgaaggatatattacaagcatattgacaaaagtctttgaactcttgaggtgtttgtatgatattctgtgtcagttgcaca

SEQ ID NO: 17654 - DNA, 201 bp, Homo sapiens
acctgagagaggtagtttgtgagtgtgtatccctgagatacgtagcagaactggggaaggactgcccagtgagtctactcccttcagtatttgtcagatcytgctcaattataagatgatctttatctgtccgccttatctatcttcactgacgtgtatttcttattttcacaaaatgaagccatttcaacgatgttgtca

SEQ ID NO: 17655 - DNA, 201 bp, Homo sapiens
gaaggcaaatatatagagtgggttttggagccctgaacttagtcatgggtggataggggtgggctgaggagggggtgcaacctctgccttccctccccacrcccccatattctgagatggtagagaaccctttcattcctccagcctgtctctttcatccctctatggactgagacatctccctttacaccagttttttac

SEQ ID NO: 17656 - DNA, 201 bp, Homo sapiens
agaccaaggacatgcagatcttattaatataaaagggaaggtgattccagatggtggtaggtgctgtgaggattctaaggcagggttacttggtcaggcartggtgtcaaagtcagcaggaagggccaagcagagtgaggcctgagacttgttggaggtggcagggggaggtcaggggtgcccttggctgtggtggctcta

SEQ ID NO: 17657 - DNA, 201 bp, Homo sapiens
attttagccattctggtgtgtaattgtgtttctttgtgatttagagctgcatctcccatatgactaataaacacgttttcacgtgcccctcagccattggracacttattttagcctgttcaagtcttctgcactcccttcttctggggatacttttcttctcctgtgctgtggtacactcctcaccccaattcttctcac

SEQ ID NO: 17658 - DNA, 201 bp, Homo sapiens
agtgcctggtttaactgcttaataaatcttagcaagtttgatgtaaattgggttaaatttgcctccctaaaattctgcttctcagtcttgtgtcttttatrtagcaaccctttagtatctgaagggggcaattgtgtcccccaagtggtgacttcactaagataaggcctccctggttcctgtaattatttcccatgtgac

SEQ ID NO: 17659 - DNA, 201 bp, Homo sapiens
ctcctcaattctgttcctgccgagttagaactgctgtacgccagcctaggatccttccatgttgttctcccattcaagtagacctttttgcaattttaacwatccgaataggtacacttagtgtataattgtcattatcttttgaataaaaaatgcatcaccaaacttggttttgcatttttcctcagaatggctctgcct

SEQ ID NO: 17660 - DNA, 201 bp, Homo sapiens
atcaaagccagagatggagggacagattagtattgaaatgatgttcttggtcacttctggttccagatggccaaccaagcacaaatgttgatgtctgtgccttggtaccccattgcaatgattataaatgagtagatcggaacagggaggacaacactgtgaaagaaagggcatcagctaataataagagtccagtaattt

SEQ ID NO: 17661 - DNA, 201 bp, Homo sapiens
tcaaagccagagatggagggacagattagtattgaaatgatgttcttggtcacttctggttccagatggccaaccaagcacaaatgttgatgtctgtgccttggtaccccattgcaatgattataaatgagtagatcggaacagggaggacaacactgtgaaagaaagggcatcagctaataataagagtccagtaatttt

SEQ ID NO: 17662 - DNA, 201 bp, Homo sapiens
caaagccagagatggagggacagattagtattgaaatgatgttcttggtcacttctggttccagatggccaaccaagcacaaatgttgatgtctgtgcctyggtaccccattgcaatgattataaatgagtagatcggaacagggaggacaacactgtgaaagaaagggcatcagctaataataagagtccagtaattttc

SEQ ID NO: 17663 - DNA, 201 bp, Homo sapiens
gactggtcagttatttttttggtagcaaaactctggctttagagttggaccatgagcagtcctgcttgctgctcattccctttctctagaaggacccctawggagttttacagcaccgtgggggctttctagaatggttgaaaacctctggcagcagatcatccatcaggcttggtcccaagttccagacctgggttcttg

SEQ ID NO: 17664 - DNA, 201 bp, Homo sapiens
aaagccagagatggagggacagattagtattgaaatgatgttcttggtcacttctggttccagatggccaaccaagcacaaatgttgatgtctgtgccttggtaccccattgcaatgattataaatgagtagatcggaacagggaggacaacactgtgaaagaaagggcatcagctaataataagagtccagtaattttct

SEQ ID NO: 17665 - DNA, 201 bp, Homo sapiens
aaaaattataaagacacacacttcagatttgttctatttactatatttgttacacctccatttttaaaaagtgcaggtattgaagatggaatgacaatgcttttccaaagcctccttttttttatctttggttacatttctctaagctccttatttcagccctggcacatctcacctttatcatttcctttctcattcttt

SEQ ID NO: 17666 - DNA, 201 bp, Homo sapiens
agccagagatggagggacagattagtattgaaatgatgttcttggtcacttctggttccagatggccaaccaagcacaaatgttgatgtctgtgccttggtaccccattgcaatgattataaatgagtagatcggaacagggaggacaacactgtgaaagaaagggcatcagctaataataagagtccagtaattttctgg

SEQ ID NO: 17667 - DNA, 201 bp, Homo sapiens
gccagagatggagggacagattagtattgaaatgatgttcttggtcacttctggttccagatggccaaccaagcacaaatgttgatgtctgtgccttggtaccccattgcaatgattataaatgagtagatcggaacagggaggacaacactgtgaaagaaagggcatcagctaataataagagtccagtaattttctggt

SEQ ID NO: 17668 - DNA, 201 bp, Homo sapiens
aaattcaaacccttgttttgctcctcatcagcgacagtggtagggaagatgcccacggcacggaggttcagtggttgttttcattctttcctgttagccaktttcctcaaattggtcagtataatcctacctcttggagcgatagctggctggattcttctgccattttggcagttatatattggtctggatttaaaagtg

SEQ ID NO: 17669 - DNA, 201 bp, Homo sapiens
ccagagatggagggacagattagtattgaaatgatgttcttggtcacttctggttccagatggccaaccaagcacaaatgttgatgtctgtgccttggtaccccattgcaatgattataaatgagtagatcggaacagggaggacaacactgtgaaagaaagggcatcagctaataataagagtccagtaattttctggta

SEQ ID NO: 17670 - DNA, 201 bp, Homo sapiens
tattcctctttagttgaccttttagatacttttctaaccatgccccctccccgctgccccgaaagatcagggaaaataagaagaaattcaaacccttgttktgctcctcatcagcgacagtggtagggaagatgcccacggcacggaggttcagtggttgttttcattctttcctgttagccagtttcctcaaattggtca

SEQ ID NO: 17671 - DNA, 201 bp, Homo sapiens
cagagatggagggacagattagtattgaaatgatgttcttggtcacttctggttccagatggccaaccaagcacaaatgttgatgtctgtgccttggtaccccattgcaatgattataaatgagtagatcggaacagggaggacaacactgtgaaagaaagggcatcagctaataataagagtccagtaattttctggtat

SEQ ID NO: 17672 - DNA, 201 bp, Homo sapiens
aatcttttgtagagataggatgtttccccaggctggacttgacctcctagcctcaagtgatcctcccacttcagtctctcaaagtgctgggattacaggcyttaaccatcgtgcctggcccaagattattgttattattcaagattgaaaatacagcatatcctgatacataaaaccccaactttataaaactgttaaatt

SEQ ID NO: 17673 - DNA, 201 bp, Homo sapiens
tagttcattttggaacttattccactattgaattatccgtattctttggttttatacctttattcctctttagttgaccttttagatacttttctaaccawgccccctccccgctgccccgaaagatcagggaaaataagaagaaattcaaacccttgttttgctcctcatcagcgacagtggtagggaagatgcccacgg

SEQ ID NO: 17674 - DNA, 201 bp, Homo sapiens
agatggagggacagattagtattgaaatgatgttcttggtcacttctggttccagatggccaaccaagcacaaatgttgatgtctgtgccttggtaccccattgcaatgattataaatgagtagatcggaacagggaggacaacactgtgaaagaaagggcatcagctaataataagagtccagtaattttctggtatgag

SEQ ID NO: 17675 - DNA, 201 bp, Homo sapiens
ggctggacttgacctcctagcctcaagtgatcctcccacttcagtctctcaaagtgctgggattacaggccttaaccatcgtgcctggcccaagattattrttattattcaagattgaaaatacagcatatcctgatacataaaaccccaactttataaaactgttaaattggtaaaagattatttgttgcttaaaattat

SEQ ID NO: 17676 - DNA, 201 bp, Homo sapiens
gtgttgaagtcagggaataagaatttcctctgtgccacaaataatgctccccacctgtatagaatgcctgggaaatgcaacactggccatccttcagctcytctgcttacagctgttgtgctggtgggtctcctcctattctcagagcagagagccacgaatggggcactcggggccgtgacaggcatcccttagctctgg

SEQ ID NO: 17677 - DNA, 201 bp, Homo sapiens
ggtttgttacataggtatacatgtgccatgttggtttgctgcacccattaactcatcatttacattagatatttctcctaatgctgtccctccccttgccyccaaccccacgacaggcccccatgtgtgatgttccccttcttgtgtccaagtgttctcattgttcaattcccacctatgagtgagaacatggggtgtttg

SEQ ID NO: 17678 - DNA, 201 bp, Homo sapiens
tggagggacagattagtattgaaatgatgttcttggtcacttctggttccagatggccaaccaagcacaaatgttgatgtctgtgccttggtaccccattgcaatgattataaatgagtagatcggaacagggaggacaacactgtgaaagaaagggcatcagctaataataagagtccagtaattttctggtatgagtga

SEQ ID NO: 17679 - DNA, 201 bp, Homo sapiens
gttctggaggttggaagtccaggatcaggtgtccacaggtttggtttctcctgaggcctctcttcttggcttgtagatgactgccttttccctgtgtcccygcatggtctttcctctgtactcatatctctggggtttctgtgtgtccacatttcctcctattctaaggactccggtcagattggattagggcacaccctg

SEQ ID NO: 17680 - DNA, 201 bp, Homo sapiens
cagtactttggttttcccagaagatgacatgttgtgacagggacacatgatggtccctgatgattcctctatatataccacaagcacaaggacagccctcygaagagggaggtggagttcaatgtccatgtgtacgcaggtccacgaggctcataattctgcattactttctattaagtagctgtggatcatcagtaggcc

SEQ ID NO: 17681 - DNA, 201 bp, Homo sapiens
ctctctgctaaccctcctctcaccgttctccccagggtgggctgtgggccttctggtgctgagctccctcacatctgagctgtcttagcaccttctttccrcctgtatttgtgttacttggatatttgtgttttatcttctgtaccagagcataggttattttaaagcagggagcttatggcattcaacactgtcaccctg

SEQ ID NO: 17682 - DNA, 201 bp, Homo sapiens
ttatatctgtattgtcccaaacagaagaagaacaaacttcatcttaaaaatagaggatgatataatcaatcaagagtggagggatcgttggtttcagaaaygcaaagcatgtgtcaagcctgggtttccactgccccagtttactcctcctttttcctaaggaagaaaaaggaaaagcctctggaacaaccggtggggcag

SEQ ID NO: 17683 - DNA, 201 bp, Homo sapiens
ctctatttcactctcaagtgttccgatttggatggcaccctatttattgagtgctcattgtgtgccagacactgtgctgggcccggggcagatggagactygtaagccataaccgctgcctcccaggagctagtctgctggggcatccgttctgaataccatgacttggcaagtgaagcattcccatgccttccagactcc

SEQ ID NO: 17684 - DNA, 201 bp, Homo sapiens
tgcagtgtcctatgtacaggtgtgcctgggacagtcctggtttatgcctgttgtcccagcataatcattaatagttctctatttcactctcaagtgttccratttggatggcaccctatttattgagtgctcattgtgtgccagacactgtgctgggcccggggcagatggagactcgtaagccataaccgctgcctccca

SEQ ID NO: 17685 - DNA, 201 bp, Homo sapiens
cactctcacacaaccaaaacatgaagaaagttaaaagtctccttcaaaatctcccccatagtgcctcatcctcttactaagcttgcttttctttaagcagktcattctttttttttttcatttttcttgagatggattcttactctgtcacccaggctggagtgcagtggcacgatctcggctcactgtaacctccgcctc

SEQ ID NO: 17686 - DNA, 201 bp, Homo sapiens
ttcggggcactgtcttacttggcctagtcccacacttgtccctcccaccccttgcttctctattttcaattcacttctgtttctacacacatcagtgatgyagtgtcctatgtacaggtgtgcctgggacagtcctggtttatgcctgttgtcccagcataatcattaatagttctctatttcactctcaagtgttccgat

SEQ ID NO: 17687 - DNA, 201 bp, Homo sapiens
tccctccttggcctcccaaagtgctgggatgacaggtgtgagccactgcacctagccggacatactatttgtttgttgctggttgtcttagtcctcctacyggaattaggttaggtttctacatataatatgcaatgacttttttgagacaaggtctcactctgttgcccaggatagagtgcagtgacatgatcttggctc

SEQ ID NO: 17688 - DNA, 201 bp, Homo sapiens
gacatgatcttggctcactgcaacctccacctcccaggctcaagcgatcctcccagcctccggagtagttgggaatacaggcatgcaccaccacacctggstaatttttgtattttctgtagagatgggggttttgccatgttgcccaggctggtcttgaactcctgagctcaagtgatccacccacctcagcctcccaaa

SEQ ID NO: 17689 - DNA, 201 bp, Homo sapiens
atgcacaggaaaagagctctgcctcccggaaggttccaggtgttggggtaaatagagatcctgctgctgcctctactcccttactggtctccctggggacrtatttgaacatattttactcataaattctcatctcagggtctgtttctaaccagacctaaaacagacaggtcccccccttttttaatcagtaactttggt

SEQ ID NO: 17690 - DNA, 201 bp, Homo sapiens
atcagaattttcacttataaaagtaccatttacacatttcgtcactgctgacagtcattagctagtggatagatccaagctttaaatctgaatcttgtcayaggaggatggaagctcaagttgttaaaggcctaaaaggttgcatgttacatatagaacaaggccctgggaaaggaaatggtctgttgaaagtcacaaggc

SEQ ID NO: 17691 - DNA, 201 bp, Homo sapiens
tgggtgcttggattttctgaaccatgactccctctatcaagataactcatatatgcactttgcaaaacagttttataaacttgtaccaaaaggcacaggaragaaaaaatagaaaaatgtatacccttttaaaacaacattggggaaaaagtgctatgccttaaggacgtggagagcacatgggggaaaggtgggtaggga

SEQ ID NO: 17692 - DNA, 201 bp, Homo sapiens
caaagtagtaaacaggctctctcaagcattcatccatctggggagcttggcacacaggacagatcctttctcttaagtgtcccaaggccaaccctgaaccwtggaagccttcatttaccatcagtttttctttcaaaacttctgcaagggcataaaaatgggggactaaatagggaccaaataagtgagtccatgctttgg

SEQ ID NO: 17693 - DNA, 201 bp, Homo sapiens
ggttgaggacggctctgctgcacttctgcccctttagcctcaggcctgtcacttggcctctcagtgggagtcgatgctgtgatgcctccactgcatttacygctttgggttatggtgaggagctcccgagaaaactcaggtgaaagtgctcagcaaggccacccattgttctataactgtggcctcatggtaagtctccat

SEQ ID NO: 17694 - DNA, 201 bp, Homo sapiens
accagcagctctggaagtgactggattaaaaccccaccaactgaagacagtggcgtgggatgatggctcgctgatgggagacagaatttctgtctctcctstcagaagccctttgaagaactcagctgtctggacaacaaaagtgggagcttttgttgtctagaagttcatgtgacctttcctttcaccttttagtgctgc

SEQ ID NO: 17695 - DNA, 201 bp, Homo sapiens
ggtcgtgcctcatgggggcccaggtgacagccaggccggggttgattttattgtgtattcaccagcctgagcgtccttaggggtggcaggcagggaggtcraggtcactgatgctggtgctctcagcatgtagttatgcaggagagtcactgctctgtattggacagaggctgatggaaaagggtggtttgtggatcgcag

SEQ ID NO: 17696 - DNA, 201 bp, Homo sapiens
caggacagtcacaggggtggaacaaatgcaggagccatggagccaaactgaactgggttggaatcccagtttcagccacttaatagttacatggatattgscaagtagcctgagttctcagaggcttgatatcctcatctgtaaggtgggaagtataagacctacctcacggtgtcagtgttaaataagacagggcaaaat

SEQ ID NO: 17697 - DNA, 201 bp, Homo sapiens
tgatgaaggtactctgtaaatgtatgtccattccttcctcctcctctgggttccttttcagcacttcctcaccacagcaccattcttaagttttctagccycatttattttagaaggggaactggaggcagcttggagggaggtaacatctggatgtcgcagtgacagctggtggctggtgaggagtccacaggtcagggg

SEQ ID NO: 17698 - DNA, 201 bp, Homo sapiens
gagatgagacatcatgtaaaaataatttgttaggaagtgttctcaggggaatgggaagtagagcttcaaagggaaggaggccaaacaaggatgtgatatcmagcaaagtccccaggagacagaaagaaggtgggtgactttggcaccgtctaaagtataggtcacatctcactgtcccaatcagggacaaaagagcatggc

SEQ ID NO: 17699 - DNA, 201 bp, Homo sapiens
gtggtttccttgctaagatttttgcagtttattctgtgtggctgtgtgtgttggtcccttgccaataatcctagactcacccatcccggcacaggcttgtwactgtgggccaagccaaattctgaagcagcgcagttgtttgttgtctgaactcagtcttccccaacacatacttttcttgttgtcctgcacacaccctct

SEQ ID NO: 17700 - DNA, 201 bp, Homo sapiens
gtgtggtttccttgctaagatttttgcagtttattctgtgtggctgtgtgtgttggtcccttgccaataatcctagactcacccatcccggcacaggcttkttactgtgggccaagccaaattctgaagcagcgcagttgtttgttgtctgaactcagtcttccccaacacatacttttcttgttgtcctgcacacaccct

SEQ ID NO: 17701 - DNA, 201 bp, Homo sapiens
tgagagctccatccatgaaaaccagtcttccagaggaggatccccaaacccagagagctatttagagtttgaaacaaattgttctccttctcaaaagtggkagaatggttagaatcatcaactgcacagcctaggtcagaagtgaagtttgtcctgttttatgaagggaaagacacccttgtttagtgagcactgaccaag

SEQ ID NO: 17702 - DNA, 201 bp, Homo sapiens
ttgaagtctggtccatgccttcagcccaccagcatgtgttgagtacctgttgggtacacagctctgtgtctggtggaggggaaacaaagattaaaaagacygggccctgtcctccaacagctcaggttatttcatgcctgcattcggggcactgtcttacttggcctagtcccacacttgtccctcccaccccttgcttct

SEQ ID NO: 17703 - DNA, 201 bp, Homo sapiens
gcaggtggatctcctgaggtcaggagttcaagaccagcctgaccaatatggtgaaaccccatctctactaaaaatccaaaaagcttagccaggcatggtgrcgtgtgcctgtaattccagctactggggaggctgaggcaggagaattacttgaacccaggaggcagaggtttcagtgagccaagatcgcaccactgcact

SEQ ID NO: 17704 - DNA, 201 bp, Homo sapiens
cttccctgcctgtctgtggcctctgcagtttaaacaatgactgtcacttaaacctcttctgaagagcttgaagtctggtccatgccttcagcccaccagcrtgtgttgagtacctgttgggtacacagctctgtgtctggtggaggggaaacaaagattaaaaagactgggccctgtcctccaacagctcaggttatttca

SEQ ID NO: 17705 - DNA, 201 bp, Homo sapiens
ggacagacactggacagacaactcacagctcctgccacagtacagcatggagcctcccaaggcactagtcacacagatcaagccacacagccaaatggaawtacaaataatagattgaggtcacattgactgtttcacgttgtacttagacatgctgattaaaacctgagttgcaagtgtgccatggaacataatctctcc

SEQ ID NO: 17706 - DNA, 201 bp, Homo sapiens
taccagctagacatcttataaatcctatcactatagagttttgctctccagcagaactttctgtgatgaaggaaatgttccgtatcagcactgtccaatattggtggccagtgaccacatatgactgtgagcacttaaaatgtggctagtgccaataaggcattgactttttacttttctatacttttaattaatataaat

SEQ ID NO: 17707 - DNA, 201 bp, Homo sapiens
gcttataacgcattgaccatccatattttaaaagaggttggaagatgtctaagtaccagctagacatcttataaatcctatcactatagagttttgctctscagcagaactttctgtgatgaaggaaatgttccgtatcagcactgtccaatattggtggccagtgaccacatatgactgtgagcacttaaaatgtggcta

SEQ ID NO: 17708 - DNA, 201 bp, Homo sapiens
agtggtcaaattctgcgtgcattttgaagggggatcctacagcatttcctgagggtttgattgtcagttgtgagggaataagatatcaagggtcactccargcttttcagcctgagtacctaaaaggatggagttgtcactggtggtgttttcaacggaaggtgcaggtgagcaggttgaaagggggaagatctggagttt

SEQ ID NO: 17709 - DNA, 201 bp, Homo sapiens
ccaggcaaggtggagaccagctcttcatggtacttctgtccatctgtgaggctttggacactcgtggttttcagtctcctaggctggagtaaaatttgtayttatttaacaagggtgtttgcacatttattatgggaacgagaggatgaattcaccggatcccagcccttgcagggtgctgcaggatggtggggcaggttt

SEQ ID NO: 17710 - DNA, 201 bp, Homo sapiens
gggctgtagcagaggactgggcaaatggcagagtgcacccgtaggatgagtgctaatggcctagctagctgtccacagaggaggcagcaggcaccgccccrgcttactggctgtgggaacacagctatggaagctgaggcaggaagcaaggatgaggggaaggggagtggcagccgggccacctcctggagcaggaactgg

SEQ ID NO: 17711 - DNA, 201 bp, Homo sapiens
gcatgaataccaacatctgttagaatattccaagttggtgccaggactcatattttagtaaactgtaaaatcttccctccccatgcttgtacagtagacarggctacccatgatgtacgatgggtatcccacaatgagtcagttgatgtgggaacttcaattaatttatagtgggactgctcacatccctatgaagaaaat

SEQ ID NO: 17712 - DNA, 201 bp, Homo sapiens
ccgcaaggaggaggagtcccagatcactggttgaccttcagcgggcatttaacagcatattccatcaggcctcacctactagtgttttgttgaggctgctrtgtaactttgactttctctgctgtctcctatttaagagtaaataaaggtagtgacagtcacaaaaatagcatcaatgatgacaactagcgtttactgagt

SEQ ID NO: 17713 - DNA, 201 bp, Homo sapiens
aatgttgcttgttaacaacctttgaaggctttttagcaaaaacaaagtgtcatattgggattcatctgtggcagtttgcagaacatatcaggggagagagstgtgtgcaaggcatccaccaggaggccgttttgtgctggtctaggtaagaggagattggagctgacctgttgaagcaacaaagagaaagggaggaaggat

SEQ ID NO: 17714 - DNA, 201 bp, Homo sapiens
aacgtgcaggtttgttacatatgtattcatgtgccatgttggtgtgctgcacccattaactcgtcatttatcattaagtatatctcctaatgctatccctsccccagccccccaccccacaacagtccccagtatgtgatgttccccttcctgtgtccatgtgttctcattgttcaattcccacatatgagtgagaacatg

SEQ ID NO: 17715 - DNA, 201 bp, Homo sapiens
ctgcacccgagtcaggagggctggaagtgcaggatagttaacgtccccagtacagttttctaccaaggagagaccggtgagatggatagatgccccagctktctcacccgttgatgacacacttcactaccctctcctggagctccctgagatcactgcccatacaaactaattgcaccccaatgcttgtcccaaagtctg

SEQ ID NO: 17716 - DNA, 201 bp, Homo sapiens
tcctgaaatgggtgcagcagacaccaggcaaaaatatttaaaacattttaatgtctacaaatagcttcatgaaatttttaattttaaggatatgaaaatgwtactattaacacttagcagaaaacaaagaaaccagtttctacagacttttctgtaacattaatgtccaaaattagaacagtatattccattgtgaatttt

SEQ ID NO: 17717 - DNA, 201 bp, Homo sapiens
gagggcatcatgaggaaggtggtcttcgtggggtgaatatcatgtttcctccagggagggctcagtgacatggagcagtgcttctcaaatgtccatgttcrcagaggttagcttctaactcatcaggtctagggtggggcctgagaatctgcatttctaacagtgagcatgtccagggaccacactttgagtagcaagacc

SEQ ID NO: 17718 - DNA, 201 bp, Homo sapiens
atcagagcacagaagaagcctggtccctggaatctctcccatatgcatcctggtggataccaagtgcctggcagaagtcataggcaactcccaaccagagygctctccactgacatgttgcttagagctggggacagcttagattagccatatctccccaaaatttgtatttttaattgaattgattttttaaattgaatc

SEQ ID NO: 17719 - DNA, 201 bp, Homo sapiens
ctaacagtgagcatgtccagggaccacactttgagtagcaagaccttcacagcttcaagttgcaaaccagttttgaatgagcagagtagaagggggtttgyaggtgagaaggaactcttcaccatgagtacatttctatgaagatttctggccaggattttagtaagtacctgagccccttcaaacatttgactcccgcat

SEQ ID NO: 17720 - DNA, 201 bp, Homo sapiens
tgtgtgctgctttctgagcaagtctctgcttggggctgcagtctcctgccatggaagggtaggtatcatatgagatgtgcatgtgatcctgtgacaaggamaagaggtggcctcatcacagtgtgtcggtcctttctgacattttgacctctcatttattggcaggcctgaattatgttctgatggctgacgtggccaaaa

SEQ ID NO: 17721 - DNA, 201 bp, Homo sapiens
tttgcaggtgagaaggaactcttcaccatgagtacatttctatgaagatttctggccaggattttagtaagtacctgagccccttcaaacatttgactccygcataaccttttcatccaaacaccattcatgagttgtttttatgccatgaggttaaattctttcctatcatttcaggggaggtccccacttgttgagttt

SEQ ID NO: 17722 - DNA, 201 bp, Homo sapiens
gctcacatcaaggaagggaatgccactcagcctctgggcacacagctgcaacttcccctggtgctgtctctcttggtgctaccctatactagccttgtccygaaacatctaccccattcatttcaccctctctgctactatgtcactgcctctcccatcacagtattccacccaaatgaggcaaattcttatcctttcaag

SEQ ID NO: 17723 - DNA, 201 bp, Homo sapiens
gggtggcaccctgctatgagctcttggaacaatttatttataagttccttatagcctggatcgtattcaaccaatagtttttccccctctattaaaatgcrttaatttggagtctttgcttactaaatgctgtctcctttttttttgagacagagtttcgctcttgttgcccagcctagagtgcaatggtgcaaactcggc

SEQ ID NO: 17724 - DNA, 201 bp, Homo sapiens
tgatttcttattgagcctttggaaagttccttgccgtttcacagccatttcccgtcagagtggggaatattgactgtgcaaaccacttaaggtcacaggcrccacagctgtgtttcttctttgcagaaggggggtttctttgggtggggctgtgctcagcccttccgggtggtgaaggtctgaggtcacactgggagagca

SEQ ID NO: 17725 - DNA, 201 bp, Homo sapiens
accacagccctgggaagtgtgtgctgtcatatacccatgaagaaactgaggccaagaaaggaaagcagctctgcccaaggtgttataagcagagagcaccragacaggacccaagcccaatttgtgttgactggggaatcagtactcagttctcttagtctttggctgttttgttgagtgcccaggtcatcctggtagaag

SEQ ID NO: 17726 - DNA, 201 bp, Homo sapiens
tgaaactctgtgacttcttcccgtgtgatgatggctaagtgcgcagaacatgtgaaatttaagtagatttgtggaaacagaaacacatttttatttagtcrtgagcgtcacttggagtataaatagagccctttatgattcgtgtgctggtctttcttcctggagggcttcagtattatctcatgctgtcatctttatgtt

SEQ ID NO: 17727 - DNA, 201 bp, Homo sapiens
ctattttctcattttgcattacaatagcatctagtaacattcaagcctcaattaattgaaccaataattattatattaaaaatggtatgtatgccccaggrcagaggttaggctatggtgggcatttgagaccttagggccatagaccccgaaacatgcattctccagaactgagtatgcaactgtttgctttcgacctta

SEQ ID NO: 17728 - DNA, 201 bp, Homo sapiens
agtagctgggattacaggcatctgcccaccacgcccagctaattttttgtatttttattagagacggagtttcaccatgttggccaggctggtctcaaacrcctgacctcaggtgatccacccacctcagcctcccaaattgctgggattacagtcgtgagccactgagcccggtcaaaatcccttcttacctgtcatttg

SEQ ID NO: 17729 - DNA, 201 bp, Homo sapiens
actcatgtagaaactcttcttcagcttcatgttttaataatggaagaacttagtgatgtttcatatgtagagatttttctctaggtccttctcatcgatargacctgtttcaagatatggcaagccctagttctgatctctggggtcctcaccatttatagacttccattagtcctgttgtgacttaattgttttgttata

SEQ ID NO: 17730 - DNA, 201 bp, Homo sapiens
tgagaatgaatgatctgttaggaaggctggatggcatggtgacaagtgcatggctttgaggttgcttattctggactactgcttagacaaatgacttatcktcttattttctttatctgtcaaatgtgaataatgtctgtcccaaggtgctgagatgtgactattgaaaaataaaacatatgtgaaaagtgctttgtacat

SEQ ID NO: 17731 - DNA, 201 bp, Homo sapiens
tcccctacccccagaggtggagtctacagaggcaggcagacctccttgagctccggtaggctccactcagttcgagcttctcagccactttgttaacctastcaagccttggcgatggtgggcgcccctcccccagccttgctgctgccttgcagtttgatctcagactgctgtgctagcaatgagcaaggctccgtgggc

SEQ ID NO: 17732 - DNA, 201 bp, Homo sapiens
ccattagaagcatcaaaaatacgccctgtggcaggtgcagaatgcccattcaggtcaccttcctctctgcctgttcatacctcccctggtggctgatcccwttgatgtcattaaaagccggagccttccctaatgcctgacttcacttacttaaatgccagtgggctcggggctacttgttactgatgcaaagcccccaga

SEQ ID NO: 17733 - DNA, 201 bp, Homo sapiens
tgggaaaaaatagtttttaaaaagtaacagatggataaacaactaagagaaagaaggaaggagtgaaggatggacggatggacagacttggctgccctatrctattatcctagtcatcattgttaaatatagttgtggttggtagatacaataccgataataataatgatggtgtaatgagaatttttttaatgcaaatat

SEQ ID NO: 17734 - DNA, 201 bp, Homo sapiens
gtgactcagccacacttctctttttcactcactcttctttctggtcctcactaagacaaaatacagaatacagagcagcagttcacgggctatagcatttraggagattaaatacaggcctccaaccacacaggccatctggaagctttggcctccagatgaggacataacgaggtcatctctgctttcagggagctctca

SEQ ID NO: 17735 - DNA, 201 bp, Homo sapiens
aatgtctgtgtgagacagtggcagcctctgatgggttcctgccgattggcaaggtggttagagctgtgtattgagaggtcttctccaaggtatcagttttyctctgggagggttaaagaaggaccttgcaaagcccatggcctttgaatagagagctctgttctgtttgcagtgactcccctcaaaaggcagaatgcaatt

SEQ ID NO: 17736 - DNA, 201 bp, Homo sapiens
tggtggggactcacaaatgggcatgctgcctgccagcaagggtctcctggccagccctaaaggcccgggctgctctgcttacagccacacggctgtttctragctgaggatgaccctccaggtggctgagattccctccaatctttttatttctggttgggaaaccctacacagaccagtgtctgtctcacggtttaaaag

SEQ ID NO: 17737 - DNA, 201 bp, Homo sapiens
ttcctttttcctctccatgctttgatctggatatttcctattgagagaatacactgaggcccagtgtgatttcattcacaatcctataaattaaaaagcaracaacttctgggtcactggtcgtcttttctgctgtgttcaatctccagtaaaatatgtcagcaccttaaccactgtcctctgcctggtttcttagtctca

SEQ ID NO: 17738 - DNA, 201 bp, Homo sapiens
ctcaataaatgacaacttttctcttctagttattgaatccaaaatccttgaagcagtccttgactcctcttttcctaacacccttcatccagtccatgagraaaatctgttggcatgacctttgaaatgtgtccagaatatgaccccttctcaccccctcagctgccatcaccctggccttcacgttcatcttctcacacc

SEQ ID NO: 17739 - DNA, 201 bp, Homo sapiens
gtctttcccatctcaataaatgacaacttttctcttctagttattgaatccaaaatccttgaagcagtccttgactcctcttttcctaacacccttcatcmagtccatgagaaaaatctgttggcatgacctttgaaatgtgtccagaatatgaccccttctcaccccctcagctgccatcaccctggccttcacgttcat

SEQ ID NO: 17740 - DNA, 201 bp, Homo sapiens
caatagtaattgccttactttatttgcgaaggggtggtgaacactaatatgcctgactccatagagcagtgtatttggttttcttaagcaggaagaagggsgccccccccaattttaatttactgaatgagtttaagaaccatggtgtatttcccaagcttcgctagtgaagatggtattttgttaaaaattgagattccc

SEQ ID NO: 17741 - DNA, 201 bp, Homo sapiens
atcagttcagcaagaggacataacaattgtaaatatatatgcacccaacaccagagaaactaaatatataaagcaaatattaatagatcttatgagagagwtagattgcagtacattaatattagggaatttcagtaccccactttctgcaatggacagatcatccagacagaaaatcaataaggaaacatcagacttaaa

SEQ ID NO: 17742 - DNA, 201 bp, Homo sapiens
gaaatgggttctgtacccttataccttgctcttcttcttcccaggatggcctgatcattcactcacccatccatccttccctccttccctccctccttctstccaacaagcatgtattgagtacgtaatagttattaagcactgggatacaccagtgaacaaaaaaaacaaggatgctgccatccctagtcccataaatta

SEQ ID NO: 17743 - DNA, 201 bp, Homo sapiens
cgctaagtcttgggagaggtgatgtaaccagggactgcaacttctagggaaaggggaaaaatcactgttggccccaccctctagcattggaagcttaacarggctttggcccacagcacatggaagtttgagctgtgttttgtaattcttttttaaatgttcgccagagcatccattattcttcctcattttctcttctcc

SEQ ID NO: 17744 - DNA, 201 bp, Homo sapiens
ccgctaagtcttgggagaggtgatgtaaccagggactgcaacttctagggaaaggggaaaaatcactgttggccccaccctctagcattggaagcttaacsgggctttggcccacagcacatggaagtttgagctgtgttttgtaattcttttttaaatgttcgccagagcatccattattcttcctcattttctcttctc

SEQ ID NO: 17745 - DNA, 201 bp, Homo sapiens
gctatgttggctattctctacttcccctctccagatccattctccaccattatccctcctgctttgtgcccttgggaggctgaccttcccctctgcctttwagttgggttcagtcagaggggagcactggaaaaagagggtggaagagtggccagccatagtgaccatggctctctacggaaggccatagcttctgtcagg

SEQ ID NO: 17746 - DNA, 201 bp, Homo sapiens
gtttgcttcctattccttgtaaggtttagccatgtatagtcatgtgccagtcacctagggctgagaaaggggagcaagcagagagggagaagaggaagaasccaaatgagatggttcgtaattgattagtggaagttaaatcatgttaaggataggaggcttgtcccctccatcatgatttagtatatcatccttcccaag

SEQ ID NO: 17747 - DNA, 201 bp, Homo sapiens
aggaaacattccccctgggctcactttttgcttagaaaagtcctgatggagaggttgaggtgggaagagagtgagggggaagactccatggagcatgacargcatgctgtgcctgccacagccaagcatggaggtcccaaccataatgtgtttttgagacaggatctggctctatcgcccaggctggaatgcagtggtgca

SEQ ID NO: 17748 - DNA, 201 bp, Homo sapiens
cgttcactctatgtatacatgcaactaaagtgtgtataatgagatattgccatccctgagctgaaatctaaggctgcctgctgccaaatctctgctttgcytcaaagtccaaattattttatattttattttaaatcagttttttaatcctaaaaattaaacctcaataaagggataactactatcctttgaagacaacca

SEQ ID NO: 17749 - DNA, 201 bp, Homo sapiens
gtctttctcagcaccctcaaggttgcctcatggtctgagatgactaccagggaactagctatcatgtccacattccaagccaaaaatagaagaggacaaartgacatatgccccctcccttttaactattcttcctagaagttccatataacgctggccagaaattaattatgtatgtagatatacccacccactaaggag

SEQ ID NO: 17750 - DNA, 201 bp, Homo sapiens
actaccagggaactagctatcatgtccacattccaagccaaaaatagaagaggacaaaatgacatatgccccctcccttttaactattcttcctagaagtkccatataacgctggccagaaattaattatgtatgtagatatacccacccactaaggaggctggggaatgcattattaaggaataagaggagggtaagtgt

SEQ ID NO: 17751 - DNA, 201 bp, Homo sapiens
ctgacctcaggtgatccacccacctcagcctcccaaattgctgggattacagtcgtgagccactgagcccggtcaaaatcccttcttacctgtcatttgtrttctccccattctgtgtctgacatcttgtaggtgtttgttagatgattggtgagtgaattaatgaatgtacagatggatgatgtataagtcctttcagag

SEQ ID NO: 17752 - DNA, 201 bp, Homo sapiens
ctctacctagcattgagcataagcaggtcactgaccacaaagatattctgttcccaaagagcaccatattcgtggtcaagtaaggccagagtctagactgrcatcaaatgcttgtatgattgggaggaaggagcccgaaggccaaagaggctcactaatttcattattcgattcttccaaccactgcacgttacaaacagg

SEQ ID NO: 17753 - DNA, 201 bp, Homo sapiens
cactgaatacctattgtttttacaccatcagaaagttgaaaaatcttaagtagaaccatcataagtcagggactatctgtatggtagtagaaatttttaaytgaatcttctgtaatcttcagcaagaaaccctgagaatattgaacgtctttgccagacaaggaaaagtgggactggggaaaaggccagttatgtgaatcc

SEQ ID NO: 17754 - DNA, 201 bp, Homo sapiens
aatatattagaataataagatatgtataattggataatttaagtagatatattatggtaaatgctcacatgtttttaccagttggacacaaaataaaaatrtttttcatccacctgtctagatgccttgaaatgttagtctgagctgagatgtgagtcctggaaattggaggacctctgtaccttctcttccaaaatctgt

SEQ ID NO: 17755 - DNA, 201 bp, Homo sapiens
tcacataacctgcaaagtgccctgagatctggttctgcatgaatcttctctaccctattgctgcctatcaacttgacttcccacctttgggagtcagatgmagtccgctggacagcccatgccctctccatgtggctataccacccctgccttgcccctgctctctgcctgatgtcctactgtcttttgactgtgcccagg

SEQ ID NO: 17756 - DNA, 201 bp, Homo sapiens
aaatgctcacatgtttttaccagttggacacaaaataaaaatgtttttcatccacctgtctagatgccttgaaatgttagtctgagctgagatgtgagtcytggaaattggaggacctctgtaccttctcttccaaaatctgtaaacatactgtttccgcttggcagtcttgatttgctttcagtgactctgagaagccct

SEQ ID NO: 17757 - DNA, 201 bp, Homo sapiens
ctgagatctggttctgcatgaatcttctctaccctattgctgcctatcaacttgacttcccacctttgggagtcagatgcagtccgctggacagcccatgscctctccatgtggctataccacccctgccttgcccctgctctctgcctgatgtcctactgtcttttgactgtgcccaggggcatttcctctgggaagcct

SEQ ID NO: 17758 - DNA, 201 bp, Homo sapiens
ttcatccacctgtctagatgccttgaaatgttagtctgagctgagatgtgagtcctggaaattggaggacctctgtaccttctcttccaaaatctgtaaayatactgtttccgcttggcagtcttgatttgctttcagtgactctgagaagccctgtggtttgtgaagagcctcttggctttcctttgaccttggttggaa

SEQ ID NO: 17759 - DNA, 201 bp, Homo sapiens
ttgagaggctctgagaattcagagaaaaagaacaaagcaataaaaaaggatgacatgaggactatattgtggaaggtagaaactggaaaacagcaaagagraaatggttccagaataattggaacagaagccattccttagacagcaaaggaggatctccatttcctgaaatgggtgcagcagacaccaggcaaaaatatt

SEQ ID NO: 17760 - DNA, 201 bp, Homo sapiens
tttgggggctgtgaagaacatctccctaaacatctctatctccaacctcggagatgatgcctatgatgccaacgtgtccttcaatgtttcccgggagctcytcttcatcaacatgtggcagaaggtaaggagggcatccctgtaaaaagagcagttgttccatctggtgcgcttgctgactttcattattgcctggaatag

SEQ ID NO: 17761 - DNA, 201 bp, Homo sapiens
caggaaacattccccctgggctcactttttgcttagaaaagtcctgatggagaggttgaggtgggaagagagtgagggggaagactccatggagcatgacvggcatgctgtgcctgccacagccaagcatggaggtcccaaccataatgtgtttttgagacaggatctggctctatcgcccaggctggaatgcagtggtgc

SEQ ID NO: 17762 - DNA, 201 bp, Homo sapiens
agagcaggtggtttagggctgaggctgtaaaccacaggggattacctatgtttatctggggcaagttgcaggataaccacaggacaagactagtagttggmcagaaataccaatttttattattctagaatagattaaaatataaaataaaattagattttctctaatatatttagaattgaacctttttgggtacaatat

SEQ ID NO: 17763 - DNA, 201 bp, Homo sapiens
tcaggaaacattccccctgggctcactttttgcttagaaaagtcctgatggagaggttgaggtgggaagagagtgagggggaagactccatggagcatgamaggcatgctgtgcctgccacagccaagcatggaggtcccaaccataatgtgtttttgagacaggatctggctctatcgcccaggctggaatgcagtggtg

SEQ ID NO: 17764 - DNA, 201 bp, Homo sapiens
caggcaccattctaacctctttacccaagttgtctctgctagtcctcaccacagccctgggaagtgtgtgctgtcatatacccatgaagaaactgaggccwagaaaggaaagcagctctgcccaaggtgttataagcagagagcaccgagacaggacccaagcccaatttgtgttgactggggaatcagtactcagttctc

SEQ ID NO: 17765 - DNA, 201 bp, Homo sapiens
gtggacaaaagtcgactctgctctacccagtgttgctctaactgctgatagctgttcagctgggactgcttgcagctttttaatatttacagcattgaacrgggttgccttgttctttatgttaaaatggaaccaaaatcactttctgtggaaaaccttcactctgcccaccgatgagcactgggcatacattgagcaggt

SEQ ID NO: 17766 - DNA, 201 bp, Homo sapiens
ggacacagacgggacccttcctcagcagcaggcccccagcccttccaccagccactgattccgccgcctccctgaggtgaggagtcctcccaccccctgcytcccatagcagctggggcggccactgaagccctgacatgctcctgtccctggctgtgtacaccggggtatactccggaggggctgcatcatatggtcttt

SEQ ID NO: 17767 - DNA, 201 bp, Homo sapiens
gttagggtcaatgttgttcagtgctgtgttcacatatcacccaagataatctcatgaaccacctaaaataatcttagtgtaccactcccagtgtgaacatmctgtgatttgggtaacactgccccaaacaaatggtgttcaccatatacatatcaggcacgtgtgggaatgtgggaggaacccctgggtaggggttatagg

SEQ ID NO: 17768 - DNA, 201 bp, Homo sapiens
tttttaacccatagctgtttttttaccctcagatgtggccattggtgcacccaaggaggatgacttcgcaggggcggtctatatctatcatggtgatgccrgtgggatagtccctcagtactcaatggtaattagtgtgagagtgatatggcaactgttcatacattcattcagcaaacatgtatggaaccttcattatgc

SEQ ID NO: 17769 - DNA, 201 bp, Homo sapiens
ccctctgaggttcctccccttctatttcctgcttatcaacatgtttctaatgtcacacaacctccagctctaggacaaataatgttggaccccaagcattstttttgcaaatatgagggctagactgaagcctcattggaccacaggtcctatgggactggtggagatatagtgcccggagcctggcccttagggaacatt

SEQ ID NO: 17770 - DNA, 201 bp, Homo sapiens
gggttatacatttcagactaatgatgatatccattactatatgtgcaattgcttataaactaatatatagtcatattaaaatctctaatctgattgagaarttttcagaaacaaggtacactgattttctcaccacttatttcctgctctcatgacagaatttctggagttctttgaattcacctggtttttggagctctg

SEQ ID NO: 17771 - DNA, 201 bp, Homo sapiens
ttaactggaaaacttgcaacagtttccatttcattttaaactccagcctatatcacatatcagacctaagatgtgtctttctctctctagtggagtgttamattttgtcaaatttttgtttgtttgagagggagtctctctctgtcgcccaggctggagtgcagtggcgcaatcttggctcactgcaacctccgcctccca

SEQ ID NO: 17772 - DNA, 201 bp, Homo sapiens
tctaatctgattgagaaattttcagaaacaaggtacactgattttctcaccacttatttcctgctctcatgacagaatttctggagttctttgaattcacmtggtttttggagctctgtcaagtcaatatttataactgaactagttcaaacagttcaagcattgtctcttcctttctggttgaagttctgtcttagaaga

SEQ ID NO: 17773 - DNA, 201 bp, Homo sapiens
gatctcctcccagtgctgactctacaccagtcaagaccctgcctctctcttccttcttgtcctcttcccgccctgtctccatgcctgccccccaccccacwgtaagctgaccagtcccacagcaacagaaatttctgtctagaaagagatgtccatgttcactgtagatgatggtccattgtaatggaccaatgtccgttg

SEQ ID NO: 17774 - DNA, 201 bp, Homo sapiens
gacccctggatggagctccatgatgtgggatttacatcccgcccatactctgctgtgagagagatggtatgcagccagtccagccatctgaagcagaacgraaaaatggtatggaaagcaaggcacctgaaaaaattttcaaagggagaaaaagaatgagcaaaactatcctgtagaggagagagacattgaaaatgacat

SEQ ID NO: 17775 - DNA, 201 bp, Homo sapiens
tacactagataattttagatggttcatgaaattatcgtgggtgatacgtggacgcagcactgaacaacattgaccctaacagtgacccttttcaccttagycagttcagtcatctataacaaattaccctgggctgggtggtttaaacaacagacatgtatttctcacagttcttaaggctgagaagttcaaggtcatggt

SEQ ID NO: 17776 - DNA, 201 bp, Homo sapiens
tagtcagttcagtcatctataacaaattaccctgggctgggtggtttaaacaacagacatgtatttctcacagttcttaaggctgagaagttcaaggtcawggtcccggcagattcagttcctggcgagagttctcttcctggttcataaacagaaccttctctatgtgtgcccatctggctttcccttggtgtgtgtgca

SEQ ID NO: 17777 - DNA, 201 bp, Homo sapiens
aacacttctctatcaccagcaaatctcccttttcaacaaagatggagtagaccttaggctcagaggcttccaaaggcaacagagttcagcattgctctgtkttcattgtgttcatttttacaactaccttctctttttggcaagtgatcctggattcccatctatgacagtgatataaattgttcttttaaaacaatcttt

SEQ ID NO: 17778 - DNA, 201 bp, Homo sapiens
tcctttttcactagtatgaattcagcgtgatctttgatacaagccacctgtctggggaagaggaagttctcagcttcattgttactgctcagaggtaaggsgggggtttaaacacttttttcaaagatgagagatttatgggaccaggaaaggatgtgtcctggttaagctttgatgaatcccaggatgctgaggaggaag

SEQ ID NO: 17779 - DNA, 201 bp, Homo sapiens
tttatgggaccaggaaaggatgtgtcctggttaagctttgatgaatcccaggatgctgaggaggaagaaatggttactcagtgataaagccttgagccgcwaagtggaattggatttcttggggatggtggttgcctagtgctgcttgcatagccgccactgcagattgaactgagaggaactgggcatcagccactcaga

SEQ ID NO: 17780 - DNA, 201 bp, Homo sapiens
gtttatgttctgattatgccagttatcccaataatgtctttttagccgcttctttttactggtccacaagacttggttattttctattgacactattttcragatcacataatttacatcacataaaacatgactgtgatctaatagaagcctatgcaaagcatagatagggtagacttcattcccattgcacaaaatcca

SEQ ID NO: 17781 - DNA, 201 bp, Homo sapiens
ccatattgacttaattttttcttagattgtgttctccccttgatttctgttctcatgctgttgttttcaagtattttcctccccatccttttttctctttscctttttcccagtattctttgtcttagaccttgaatgtattttttgctgtatgtatgcttgaatgtgttttttacccaggcttggtaaactatggccttt

SEQ ID NO: 17782 - DNA, 201 bp, Homo sapiens
aacatttctgtggcaggagagggctgaaggagaggggcaggctgccctgatccaagtgagcagatagtctccttattgtttcagggtttcctcccgcactrcatgaatcccccaaggctaaaggtgaaccgtacagcggccttctgtttcctctttgccaaccttttattttagacttcatttaggatgaaggtgctggtc

SEQ ID NO: 17783 - DNA, 201 bp, Homo sapiens
tgaagaggttgaattgtctttctactcataaaacaccgcagggcctgatctatatttagggctgggggttcaacaatgaaaactttttgctcacaatctgkcaggtgagaaaattgtggggttctagttgtgtgtctcaaatgaaatttaagatctaggctctgatgggggagaggcttgtcctcaggcaggcatgagttg

SEQ ID NO: 17784 - DNA, 201 bp, Homo sapiens
tcctattattaaataaaggtttatgccctcctgcctccacacacacacacacacacacacacacacacacacacacacactagtgtatgttttaacaagtwacatttctgtggcaggagagggctgaaggagaggggcaggctgccctgatccaagtgagcagatagtctccttattgtttcagggtttcctcccgcacta

SEQ ID NO: 17785 - DNA, 201 bp, Homo sapiens
tgattcatcctattattaaataaaggtttatgccctcctgcctccacacacacacacacacacacacacacacacacacacacacactagtgtatgttttwacaagtaacatttctgtggcaggagagggctgaaggagaggggcaggctgccctgatccaagtgagcagatagtctccttattgtttcagggtttcctcc

SEQ ID NO: 17786 - DNA, 201 bp, Homo sapiens
atgaaaaagtgggcagctggaagggggctggagacggcctggtcagggcatctcgtcccactggtgcctaccgtctgagcactgctctgaaggactcgatygccccgtggagcctgctcccacacacctgccttttgtgcagccggcccatctgttggtgctttttctttcaggaggagatgggcatctcctgtgagctgc

SEQ ID NO: 17787 - DNA, 201 bp, Homo sapiens
gtgggcagctggaagggggctggagacggcctggtcagggcatctcgtcccactggtgcctaccgtctgagcactgctctgaaggactcgattgccccgtrgagcctgctcccacacacctgccttttgtgcagccggcccatctgttggtgctttttctttcaggaggagatgggcatctcctgtgagctgctggaatcg

SEQ ID NO: 17788 - DNA, 201 bp, Homo sapiens
ttgatgtttgacgtctttatctcaactcttcaacttagctcattctggagcagtcacacgatgacagatgagacggttgggcctaagccggccaaacaaayggcagggcaagacctggcaggatgctggggtgggggcgggagtgggccaggatggtgttaacccatccacaggggagtcgcctttggcctgcccacagca

SEQ ID NO: 17789 - DNA, 201 bp, Homo sapiens
gaatccccgttctgtgctttctcacccggaggccttatgtggatgtattttagaatcacctggggagctttcaaaaatatcgatgcctgatctacccccakagacttgctatagccagggtctatagcgagagcttccatgatgtttatagtggtaggtttggtcagggcctctttcctgggcttggctgtccatggatga

SEQ ID NO: 17790 - DNA, 201 bp, Homo sapiens
ggcacctgatcctgctgcttttgcaaactgtggatgcccctgagggactgatgtcaccccatgtaggaagacagatgaggagccagggcagagactgtggscctatggggtcagcgtcacacagcaccattgtttcagaacaataggagggagaaggagaggggatgtgagagctatttaagtgctgttgccattcagcac

SEQ ID NO: 17791 - DNA, 201 bp, Homo sapiens
acaggaggaccactttctgattagctccacaggcagtgctggctttgcttgtttctgttaactccctctgcagagccagaggtggcttttcctgatgtctrtaatggtctggaatgggcagggaaccatcccatcggccacactgtctgtctgggtcaagtccacggtcattcagtgccgctggcattgttggaaagcagg

SEQ ID NO: 17792 - DNA, 201 bp, Homo sapiens
taaaataaaattagattttctctaatatatttagaattgaacctttttgggtacaatattcttttttagtatttcttggtgatttttttttttacaacaamaaatagagcaatacctttcttggttagtaaaataaatccctaaatatttgccacaatctctagaatcttctaaatcaggaaattttaatgattttcacag

SEQ ID NO: 17793 - DNA, 201 bp, Homo sapiens
tcaaaggcacagcaagaatatacccagaaccaagccctatccttggggacaaagagaaaacattctccccaccacccccagacacttgatcatgtaatcaktccttagaggaccttgttgggaggtgttaacagcccctgatgaagccatcagttaaacaaatgagtcaacctctgatctctccaggaacctaaaacagct

SEQ ID NO: 17794 - DNA, 201 bp, Homo sapiens
ccatttggtaatgctgggaactcactaccttactaaaataatgcactaaacattgaaaatggatgagttgttgtctattcggacttagtctcaaaaatctkccattgttgtgtttaggtgagtgagtggcctccagcatctagaagtcgatatttgtctgggagtgtcagtcagagctttgtttcttctcaggaatgtgtt

SEQ ID NO: 17795 - DNA, 201 bp, Homo sapiens
ttctcacctcttatgtagcctccgaaatccaagggaaaatgctatcaatgaacggattcagctttcaaatgcctaacttctagtcatcttggcagtctgayaaatttaagttttttaagtgaatttgtcatagagtggggtttaggatgccaaatacataactcatttatatttattttttaaaagcttatgatcatcttc

SEQ ID NO: 17796 - DNA, 201 bp, Homo sapiens
tcgatgcctggtactctgctgtgcaggcccctctgctttttcaggatttggaaggacaggtccacgtcatgaatgccagttttccccaagaagccctctgygtggtggaggcctcagccaatgtcccagcccagatgaccccatgaggacccctttctgttctccatcattccccaccttctgggcagggctgcctcagag

SEQ ID NO: 17797 - DNA, 201 bp, Homo sapiens
tcctcctgagattttcttgccagctcatccaggagcccactcctcctgcaggggaacagcctttcggaagggcagttttataagaacagaggagtgtgagyccctgtgagcccccacgggaggcacgctgctccctcactgagccatggctggcttgcccaggcacacaggcatcatttccagcaagtccacttggtgtag

SEQ ID NO: 17798 - DNA, 201 bp, Homo sapiens
gcggatcacctgaggtcaggagtttgagaccaacctggccaacatggtgaaatcccgtctctactaaaatacaaaaattagccggggatggtggcagccayctgtaatcccagctactcaggaggctgaggcagggagaattgttcgaatccaggaggtggaagttgcagtgagccgaggttggcccactgcactccagcc

SEQ ID NO: 17799 - DNA, 201 bp, Homo sapiens
gactgtaatcccatcactttgggaggctgaggtgggcacattgcttgagcccagaagttcaagaccagcctgtgcaacatggtgaaagcctatctctactwaaaatacaaatattagctgaacgtggtgatgcatgcctgtagtcccagctactcaggaggccgaggcaggaggatcacttgaacccaggaggtcaagggt

SEQ ID NO: 17800 - DNA, 201 bp, Homo sapiens
tggaggaccgatcccccagctcctgtcattcatcatggagaaccattccctgggcatgaactctctggcacttccagccttctctaagtaggtccacactscctggggccaggaagcaactcaggcagaaagatgtgggaagcctttgacctggaggggcatggcttcaggtgaccagaactgtggctggttctggggaat

SEQ ID NO: 17801 - DNA, 201 bp, Homo sapiens
gtggagacggggtttcgccatgttggccaggctggtctcgaacttctggcctcaagtgaaccgcccacctcagcctcccaaagtgctgggattacaggtgygagccaccatgcctggccaagatcttctaattattttttaaataaagagttattgtgattttctttagcagaaaaagaggtttgtgaactgtttgttact

SEQ ID NO: 17802 - DNA, 201 bp, Homo sapiens
cactggggaaggatttctgagcggccactacaaagccctcctgtgaccctgttagctgcaggaaatagattggagtgtcctctacctctctccctcaaackccctgggtcagctgccaacaaactccaacagtaaaagaaaaggcttgttcatgtccatcaacccaggggccttttattagaaaacatttattttaaaaga

SEQ ID NO: 17803 - DNA, 201 bp, Homo sapiens
ctgttagctgcaggaaatagattggagtgtcctctacctctctccctcaaactccctgggtcagctgccaacaaactccaacagtaaaagaaaaggcttgktcatgtccatcaacccaggggccttttattagaaaacatttattttaaaagaataatgctttttctctttcttttcttttcttttcttttcttttctttt

SEQ ID NO: 17804 - DNA, 201 bp, Homo sapiens
tggaaagagatttgttgcagcaaagagcattgatgagcctgacacttatgacaatggtccagtgagtaatttcaagcattttaattccagtgcttcctggsttaacaaacctgccaccattactaatgctaattaaataggtttctctgaggttgcccaacctgttttcctaagccaggaaatggactcgacaaactcaaa

SEQ ID NO: 17805 - DNA, 201 bp, Homo sapiens
gactcaaccaagtaagatttacaaaacaaacaaaactgttttcatcatctttggttgtagttttataaagaatgctggttcatggactccagacacttcaytgaaactgtgtgaatcattttaaacaggtttgtccttgggccccagatagtacattggcatttgtgaatcattttagatgagtttgtcctcagtacaaat

SEQ ID NO: 17806 - DNA, 201 bp, Homo sapiens
gtacatttccactgaggaattttggtgggtggggggaggttgtgctgcctcacaatgtcacgtgtattaaagtctaagcagtcacttctgattcacttgcmctgtttgggaaatgtcaggtttacaaaaacatacatgtttggaataaaaaatggctgcaaacaattcagaagttcaatctgtaatttacttgctaataag

SEQ ID NO: 17807 - DNA, 201 bp, Homo sapiens
tatggcaactgttcatacattcattcagcaaacatgtatggaaccttcattatgcaccatgccctggaggtacaaagaaaaacatttttcttgccttggcmttcctacccttttgtgaaagatacaattaatattgcttattaaatactaaaaaaagcattcttagaatcccaagttcgctaacactcagggatgcatttt

SEQ ID NO: 17808 - DNA, 201 bp, Homo sapiens
ctgatgcatccatgtacatttccactgaggaattttggtgggtggggggaggttgtgctgcctcacaatgtcacgtgtattaaagtctaagcagtcacttytgattcacttgcactgtttgggaaatgtcaggtttacaaaaacatacatgtttggaataaaaaatggctgcaaacaattcagaagttcaatctgtaattt

SEQ ID NO: 17809 - DNA, 201 bp, Homo sapiens
aaatgaatctggagctttatgcatattactaggtgcttcatttttatttaaaaggctgatttaataatagaaagaaaaactccaggcaaacaaaaacactmacggacctgaacctactgacgttcttagatatttttaatgtcatgagtgactccttttgctactcacagtgtagcccctggcctagcattgtcagcatca

SEQ ID NO: 17810 - DNA, 201 bp, Homo sapiens
ttccagaatattatttgaaaattctacagtatgttctactttctccccttcctgcttccatggtttcactgtggaatcctataagatattctcctgagcaktattatttcagtttccttcagcttttagttgaatcttcaatgtggttttaaccaactgttcagagaactgaaatggtttttaaatatgaaaaaggacctt

SEQ ID NO: 17811 - DNA, 201 bp, Homo sapiens
atgaatctggagctttatgcatattactaggtgcttcatttttatttaaaaggctgatttaataatagaaagaaaaactccaggcaaacaaaaacactaasggacctgaacctactgacgttcttagatatttttaatgtcatgagtgactccttttgctactcacagtgtagcccctggcctagcattgtcagcatcact

SEQ ID NO: 17812 - DNA, 201 bp, Homo sapiens
ctgctggaatcggacttcctcaaatgcagcgtgggatttcctttcatgaggtcaaagtcaaaggtaagggacacagacgggacccttcctcagcagcaggyccccagcccttccaccagccactgattccgccgcctccctgaggtgaggagtcctcccaccccctgcctcccatagcagctggggcggccactgaagccc

SEQ ID NO: 17813 - DNA, 201 bp, Homo sapiens
ttgcaagagatcagtacttccggatcagtacttctgcagtgagatgaaactttggaggagtaaagttggtgtttgtaaattatctagcacagtgcttggcmcacgttgcaggttgaatttatttgcttttccttacttaccctgtgttaatatgggttctccccaaaacagagcctgggtcaaggatctgagtgcatgtgg

SEQ ID NO: 17814 - DNA, 201 bp, Homo sapiens
ggatttcctttcatgaggtcaaagtcaaaggtaagggacacagacgggacccttcctcagcagcaggcccccagcccttccaccagccactgattccgccrcctccctgaggtgaggagtcctcccaccccctgcctcccatagcagctggggcggccactgaagccctgacatgctcctgtccctggctgtgtacaccgg

SEQ ID NO: 17815 - DNA, 201 bp, Homo sapiens
ttcccttcttcaggggagcttatgaccatcagggtggctgtgatgcttccctggatgtttggctcacagtgaagaagcatgaggacaaatacacagacaayaaaaacatttgatgtgcccatgacagctgggtttgcttcacgatttgtgtaggacacgtcttatatgtgcatgcactgttggcagcagactgcagagagt

SEQ ID NO: 17816 - DNA, 201 bp, Homo sapiens
gcaagagatcagtacttccggatcagtacttctgcagtgagatgaaactttggaggagtaaagttggtgtttgtaaattatctagcacagtgcttggcacmcgttgcaggttgaatttatttgcttttccttacttaccctgtgttaatatgggttctccccaaaacagagcctgggtcaaggatctgagtgcatgtggtt

SEQ ID NO: 17817 - DNA, 201 bp, Homo sapiens
tgaattcaaagacctcataatcttttaaaatattattaaattctgttttatttgtttctttcaaaaattaacagatttttaaaaattgaaaattgaatttycaaaaaatttctcaaaaatctttgagaaaaattgagatgggacaaagactctgtgccttgttcccccttagtgtgagtcctgagtacccagctgtgtggc

SEQ ID NO: 17818 - DNA, 201 bp, Homo sapiens
gcattatctcaatgtttataattttgtgcactattccaatactaaataacttgaaggtaaaagctctgtgtattattccttgatatagaaattttagtaamtattaagaattaaaagacacataggaaaaggtagataaaataatgaagtgaagaataaatggtgtgttatatgctctgacaaattttccttattggaaag

SEQ ID NO: 17819 - DNA, 201 bp, Homo sapiens
gatatatctttatcatataataggttatgttgaccactttagcttattcccccagccttaaggtatagtttacacccacacacacacacacacacacacayatacatatatttatagtatgcaatgtgatgcttttatataggtataaactgtgaagttatcaaacaaaatgaatttacatatccatcacctcacataatt

SEQ ID NO: 17820 - DNA, 201 bp, Homo sapiens
aagttcttggaaaacagctgatattgtgaggctgatgaatgatgttagccctattttaattagatgtttcaattattatgagtattgctggaaacctccaycatatttcttcaaatatttatcctcagttccctatcaaggggaaaccctctatataaatgaagagacgttcaaaactttaccttctcagtacaactgtct

SEQ ID NO: 17821 - DNA, 201 bp, Homo sapiens; identical to SEQ ID NO: 1968

SEQ ID NO: 17822 - DNA, 201 bp, Homo sapiens; identical to SEQ ID NO: 1961

SEQ ID NO: 17823 - DNA, 201 bp, Homo sapiens
tatatctttatcatataataggttatgttgaccactttagcttattcccccagccttaaggtatagtttacacccacacacacacacacacacacacatayacatatatttatagtatgcaatgtgatgcttttatataggtataaactgtgaagttatcaaacaaaatgaatttacatatccatcacctcacataattat

SEQ ID NO: 17824 - DNA, 201 bp, Homo sapiens
catctcctgtgaactttaagaattttttgaaacttgcccttgtgtacttgggactgggatctccttcttcataccctgctttaggaaaattgatcagtaayagttacgtggataaataacattgataaataacagtacttacattaataagtgacagttctccaagaaaaaaaaaaacaaagcttttttcttcaacaatga

SEQ ID NO: 17825 - DNA, 201 bp, Homo sapiens
tcgcactcctcaaaacctgcttacttttggagacaataacacattcctgtggactaaaagcagagttattcatgagaataaaaattgtcccatataagggwagatatgcaggagaaagaagaacagtataaatggtaaatataaaggaatattgactaagcaataaaaatcacgggtgctagggtttcagatatcacactc

SEQ ID NO: 17826 - DNA, 201 bp, Homo sapiens; identical to SEQ ID NO: 1965

SEQ ID NO: 17827 - DNA, 201 bp, Homo sapiens
gtgaaccacacaccaggccagttttattggaatttatcttctctttcctcttccctttccactcgcactcctcaaaacctgcttacttttggagacaatamcacattcctgtggactaaaagcagagttattcatgagaataaaaattgtcccatataagggaagatatgcaggagaaagaagaacagtataaatggtaaa

SEQ ID NO: 17828 - DNA, 201 bp, Homo sapiens
ctgcccaccccagcctgccaaagtgctgggactacaggtgtgaaccacacaccaggccagttttattggaatttatcttctctttcctcttccctttccamtcgcactcctcaaaacctgcttacttttggagacaataacacattcctgtggactaaaagcagagttattcatgagaataaaaattgtcccatataaggg

SEQ ID NO: 17829 - DNA, 201 bp, Homo sapiens
catactacttcctctctcagaaatctaaaatttctcccttatcgactacttaataacaaaataattccttaccttagaatataataatctcaagtagtccyatcttttcttatttttatttttatttcattatgacagggtctggctctgtcgcccaggctgcagtgcagtggcacaatctcggctcactgcaacctccgc

SEQ ID NO: 17830 - DNA, 201 bp, Homo sapiens
cctctatgatgccttcagggctggctttctaaaactggggtatgtcacatactacttcctctctcagaaatctaaaatttctcccttatcgactacttaayaacaaaataattccttaccttagaatataataatctcaagtagtcccatcttttcttatttttatttttatttcattatgacagggtctggctctgtcgc

SEQ ID NO: 17831 - DNA, 201 bp, Homo sapiens
aaactcccaacctcaggtgatgcgcccgtcttggcctcccaaagtgctgggattacaggcgtgagccaccgcacccggccctattaattcttaaacttatyctcatgattcagcaaaatagcatggtgaatggcacataaatcaagcatcattgtgtattattagtaaatgtttggtgttctaaagtaagtaaacagaatg

SEQ ID NO: 17832 - DNA, 201 bp, Homo sapiens; identical to SEQ ID NO: 1969

SEQ ID NO: 17833 - DNA, 201 bp, Homo sapiens
cacttatgttatatataacatattatatataactttactgtatatgtatatgtaatgtcatgttgttatatatatcataaactgttatatatataaccttrgatatatgttatataaccttggatatagaactgttatacatatatgttatatatatcataaactgttatatatatgtatatatgcaatgtttcattatat

SEQ ID NO: 17834 - DNA, 201 bp, Homo sapiens
gatcaccaaaaagctgaaaggggtctgttatcttataaatttatctcaagaagctttgacgtcagatttatgattaagatgaaatgaccagaccagaaccrcttactatttgaaaacatattcaacacatagtattttttaaattagttaatatcacttcagttcagatctttcaaagattctaatatttgaattaaattt

SEQ ID NO: 17835 - DNA, 201 bp, Homo sapiens
tgagttccttaaattatattttatggttgaaagaaaaattataacaacattagttggtataaaaaaactatacattgtgatgtaataaaaatgctatacayaagttagaatccttaaaaatcttaaagaaaacatcagaaaatcaataaatgaaaagcagagaaataaaagacagaagaaacaaacacaaaacaaattaaa

SEQ ID NO: 17836 - DNA, 201 bp, Homo sapiens
ttatgattaagatgaaatgaccagaccagaaccgcttactatttgaaaacatattcaacacatagtattttttaaattagttaatatcacttcagttcagrtctttcaaagattctaatatttgaattaaattttaagaatcaactatcttgtctatattttcctcttccaaatcatctcgtattcaaaataaaaatccat

SEQ ID NO: 17837 - DNA, 201 bp, Homo sapiens
tgaaataaagttaggttgagagagtgagaatgccaaaactgaggctacataataaaaatatacaatatacaacacatcttataacaagttggaagaaatayatcatttgctgtgattagtaaagcatatttttacaatatatttccacaattatgaaaacatgttggaattttgtcttacaaatacatctggagcagttgt

SEQ ID NO: 17838 - DNA, 201 bp, Homo sapiens
attaactaaattattgaggtatgtaataatttgtattacagctccattggatatatatgcatatccagaatatatacatatgtgtgtgtatatatatatatgtgtgtgtgtatttagacaagttttaagtgaaaatgatatcaaaatatttgaaggcattttgaaaatatttttcttctcaaccactggcttcagtttgag

SEQ ID NO: 17839 - DNA, 201 bp, Homo sapiens
agttaaaggcagccagaaaagcactgatccccaagataactgattccactaaaacaagcatgtttgccaggtgcatggactggcacaacagggcccccatyggtgagatatcacagtaatactggttaactcgatcaggcttgcagaaagacaggcagagggtagacactacgtggaggaggaggaaatttagaaacccag

SEQ ID NO: 17840 - DNA, 201 bp, Homo sapiens
ccaatgtacacaaatagaaatatacatatacatataaatagatataactgaagttatatgtatatgtattttctataaatttatacgcctatgtaggtatrcattctatatatcaatagaaaattactttttctatgaattaaaagtggaacattgagtcattctattatattttaaattatggtttctataaacatgttc

SEQ ID NO: 17841 - DNA, 201 bp, Homo sapiens
aattaactaaattattgaggtatgtaataatttgtattacagctccattggatatatatgcatatccagaatatatacatatgtgtgtgtatatatatatatgtgtgtgtgtatttagacaagttttaagtgaaaatgatatcaaaatatttgaaggcattttgaaaatatttttcttctcaaccactggcttcagtttga

SEQ ID NO: 17842 - DNA, 201 bp, Homo sapiens
gctggtcttaatacctaggtgatgggttgataggtgcagcaaaccaccatggcacatgtttacctacataacaaacctgcacatcctgtacatgtaccccrgaacttaaaaaaaaaaaaaaagtctactttggctgataaatgttaagttcccaatgtacacaaatagaaatatacatatacatataaatagatataactg

SEQ ID NO: 17843 - DNA, 201 bp, Homo sapiens
tattttgtgttttgcttgaaagtatatagtagagaggtgaatagcaaattttttggagtcagatgatctaggtgttaatcctggcacttatgagacacacaatctacctactattatttttactcccatgcattgtttgcttatcaactacataaagataaaaatattaaagactcaatgtgcttgtgaggacaaaattgt

SEQ ID NO: 17844 - DNA, 201 bp, Homo sapiens
aaaataaaaatccatattctttcagatctgtcttatatttcttagtttttgtgtacacttgccatattattttgtgttttgcttgaaagtatatagtagaraggtgaatagcaaattttttggagtcagatgatctaggtgttaatcctggcacttatgagacacacaatctacctactattatttttactcccatgcatt

SEQ ID NO: 17845 - DNA, 201 bp, Homo sapiens
acacacactaggacctgttgggtggagggtggcgtagagagggagagtatcaggaaaaaaagctaaggcatgctggtcttaatacctaggtgatgggttgrtaggtgcagcaaaccaccatggcacatgtttacctacataacaaacctgcacatcctgtacatgtaccccagaacttaaaaaaaaaaaaaaagtctactt

SEQ ID NO: 17846 - DNA, 201 bp, Homo sapiens
ttattttgtgttttgcttgaaagtatatagtagagaggtgaatagcaaattttttggagtcagatgatctaggtgttaatcctggcacttatgagacacacaatctacctactattatttttactcccatgcattgtttgcttatcaactacataaagataaaaatattaaagactcaatgtgcttgtgaggacaaaattg

SEQ ID NO: 17847 - DNA, 201 bp, Homo sapiens
tgtgaggacaaaattgtatcatctctgcagaggacctaacatagagcctgtcacatgtcaaagacccaaataatggtggctgtaacattccttcagtatgrgtaaattaatactaaagctagagattctgaaatggattatggattagacaaaagctctatttttttcttccagtttaaagagttaaagatgaatttatca

SEQ ID NO: 17848 - DNA, 201 bp, Homo sapiens
tttagtagaggcagggtttcgctatgttagccaggctggtctcaaactcctgtcctcaggtaatccacctgcctctgcctcccaaagtgctgagattacargtgtgaggcaccgcgcccagcctaagacaggcctattttaaacatcttataccagtgtaattactactaacagttcctgatttattctgaaaaagtctac

SEQ ID NO: 17849 - DNA, 201 bp, Homo sapiens
agctctatttttttcttccagtttaaagagttaaagatgaatttatcagtagctaaaatttggttaacaaattattgaggctacaaggcatgagagagcaraacagactagatttgtggacgcacactcaaaaacactttttatttatgtctctgtttagataccagaggtacaatatgatctctgaaaacttaaagaaca

SEQ ID NO: 17850 - DNA, 201 bp, Homo sapiens
caagtgattctcctgcctcagcctcccaagtagctgggactacatgcaccaaccaccacatctggctaatttcttgtatttttagtagaggcagggtttcrctatgttagccaggctggtctcaaactcctgtcctcaggtaatccacctgcctctgcctcccaaagtgctgagattacaggtgtgaggcaccgcgcccag

SEQ ID NO: 17851 - DNA, 201 bp, Homo sapiens
tggtggaaacactgtatacccactctcttagtatttttaagagtacagtatatatggttttctacagagataggaaagccacaatgtcatacaggaaaaarcaaattttgtacaaagagaaataattacaatatactatatttctctcatgagttccttaaattatattttatggttgaaagaaaaattataacaacatta

SEQ ID NO: 17852 - DNA, 201 bp, Homo sapiens
gacatctttttgagatcaacttgcattcatttttttgtaattcaaaaataattgacataaaatttatgtattattgtttacagcctaacattttgaagtayagatgcattgtggagtgactacatttagttaattaacatatgatatgcattacctcacataattatcattttcatggtggaaacactgtatacccactct

SEQ ID NO: 17853 - DNA, 201 bp, Homo sapiens
gatttgtatgcaggtattgactctccttaatctccgccaccttttctctttttacaatttattatactgccttcacactgatcttcctttcctacctctcygatcacttcgaaacctagaaaattaagaagtagctactttcacttcttttctagtacttcaacagtgaagctaagctgaagagaatgtaacattctcctt

SEQ ID NO: 17854 - DNA, 201 bp, Homo sapiens
gaagaaatatatcatttgctgtgattagtaaagcatatttttacaatatatttccacaattatgaaaacatgttggaattttgtcttacaaatacatctgragcagttgtgtccatcatcagataaattgataaagaaaatgataaaacatttcatgttttacacgtataacattttgttttataattataacattttgtt

SEQ ID NO: 17855 - DNA, 201 bp, Homo sapiens
gtggcaaaacttggacaatccctggctaaccaagtggttgattatcctttgtagggtagggccatgatttgtatgcaggtattgactctccttaatctccrccaccttttctctttttacaatttattatactgccttcacactgatcttcctttcctacctctctgatcacttcgaaacctagaaaattaagaagtagct

SEQ ID NO: 17856 - DNA, 201 bp, Homo sapiens
gaccaactttcccaggttgcctgagactgacaggtctcctaggatgtgggtctttcagtggcaaaacttggacaatccctggctaaccaagtggttgattrtcctttgtagggtagggccatgatttgtatgcaggtattgactctccttaatctccgccaccttttctctttttacaatttattatactgccttcacact

SEQ ID NO: 17857 - DNA, 201 bp, Homo sapiens
tttcagacaggaattgcattggcttcagatgtcctagggtgaccaactttcccaggttgcctgagactgacaggtctcctaggatgtgggtctttcagtgrcaaaacttggacaatccctggctaaccaagtggttgattatcctttgtagggtagggccatgatttgtatgcaggtattgactctccttaatctccgcca

SEQ ID NO: 17858 - DNA, 201 bp, Homo sapiens
agaataaaatgctttcagacaggaattgcattggcttcagatgtcctagggtgaccaactttcccaggttgcctgagactgacaggtctcctaggatgtgrgtctttcagtggcaaaacttggacaatccctggctaaccaagtggttgattatcctttgtagggtagggccatgatttgtatgcaggtattgactctcct

SEQ ID NO: 17859 - DNA, 201 bp, Homo sapiens
gctgaaataactgagaatgtatattacattttctacatcgtcataatctaatagcataatgattagcataaactgtggcctttaaatatttaatgaataaagtcacctttattataattattatagaattaattgaattatcttttattgccctaacccaatctggttattcttaaattattataatatttattcaatctt

SEQ ID NO: 17860 - DNA, 201 bp, Homo sapiens
tgctgaaataactgagaatgtatattacattttctacatcgtcataatctaatagcataatgattagcataaactgtggcctttaaatatttaatgaataaagtcacctttattataattattatagaattaattgaattatcttttattgccctaacccaatctggttattcttaaattattataatatttattcaatct

SEQ ID NO: 17861 - DNA, 201 bp, Homo sapiens
ataacaaaataattccttaccttagaatataataatctcaagtagtcccatcttttcttatttttatttttatttcattatgacagggtctggctctgtcrcccaggctgcagtgcagtggcacaatctcggctcactgcaacctccgcctcccaggctccagcgattctcctgcctcagcgtcccaagtagctgggatta

SEQ ID NO: 17862 - DNA, 201 bp, Homo sapiens
atgttagtcaggctggtctcaaactcccaacctcaggtgatgcgcccgtcttggcctcccaaagtgctgggattacaggcgtgagccaccgcacccggccstattaattcttaaacttatcctcatgattcagcaaaatagcatggtgaatggcacataaatcaagcatcattgtgtattattagtaaatgtttggtgttc

SEQ ID NO: 17863 - DNA, 201 bp, Homo sapiens
aggtatgtaataatttgtattacagctccattggatatatatgcatatccagaatatatacatatgtgtgtgtatatatatatatgtgtgtgtgtatttaracaagttttaagtgaaaatgatatcaaaatatttgaaggcattttgaaaatatttttcttctcaaccactggcttcagtttgagtcatcaatggaggaac

SEQ ID NO: 17864 - DNA, 201 bp, Homo sapiens
tgtgccaccatgcccagctaattttgtatttttattagagatggggtttctccatgttagtcaggctggtctcaaactcccaacctcaggtgatgcgcccrtcttggcctcccaaagtgctgggattacaggcgtgagccaccgcacccggccctattaattcttaaacttatcctcatgattcagcaaaatagcatggtg

SEQ ID NO: 17865 - DNA, 201 bp, Homo sapiens
tagtatacagtattagtttaatgcatgcattttcaagtttattaaggtatttacatatttgatatttctgaaaatagaatactattggtttattttttagrctattttgttaggttcatataatttgttgatattgtgttctcattttatttattctttatgacatctttttgagatcaacttgcattcatttttttgtaa

SEQ ID NO: 17866 - DNA, 201 bp, Homo sapiens
agtagctggattacaggcatgtgccaccatgcccagctaattttgtatttttattagagatggggtttctccatgttagtcaggctggtctcaaactcccracctcaggtgatgcgcccgtcttggcctcccaaagtgctgggattacaggcgtgagccaccgcacccggccctattaattcttaaacttatcctcatgat

SEQ ID NO: 17867 - DNA, 201 bp, Homo sapiens
gtaaaactacagaagaagtcatagcatgttatgtcaacaaaaaggagaagtatcaataacaacaaacatagaagggtgatcaatgcacaggctttacttcycaacagtttcaccagatagccataaatgggtattttattccatttacacaggttacaaataatataatgaaaatactgtcatttaaatcttacatatttg

SEQ ID NO: 17868 - DNA, 201 bp, Homo sapiens
cagagtttcgctcttgttgcccaggtcggagtgcaatggcgcgatctcggctcactgaaacctccgcctcccaggttcaagcaattctcctgcctcagccycttgagtagctggattacaggcatgtgccaccatgcccagctaattttgtatttttattagagatggggtttctccatgttagtcaggctggtctcaaac

SEQ ID NO: 17869 - DNA, 201 bp, Homo sapiens
aatatttacctatatgtgcatgtgcacatcatacatgcaaatatcacaaaacattttgtgtattttgtgccatttatttgttggtatgtgaatgtgagctrgagagaagtagtgtgtgtgataaattttcccttgcttaataggctgggttcattcacttacagcattgtgataatgaggtatctactctggggttgaacc

SEQ ID NO: 17870 - DNA, 201 bp, Homo sapiens
tcacataaatatatgtcataatatatattccaacattttccaaaaatatgtacataacttcgaatacttatatatgcatatacacaaatatttacctataygtgcatgtgcacatcatacatgcaaatatcacaaaacattttgtgtattttgtgccatttatttgttggtatgtgaatgtgagctggagagaagtagtgt

SEQ ID NO: 17871 - DNA, 201 bp, Homo sapiens
attaggaaggtgtttgcatttctgaaacactagtagtttcaacatgcaacatcacttctgtactccagaaccatcttctagagcatctcagattttactgrtttttcatacttacctccactccaattttcccttccctcttattcctgccttcttcctagcagtctcattgtctccaaaattctgtactctttatgtgaa

SEQ ID NO: 17872 - DNA, 201 bp, Homo sapiens; identical to SEQ ID NO: 1964

SEQ ID NO: 17873 - DNA, 201 bp, Homo sapiens; identical to SEQ ID NO: 1966

SEQ ID NO: 17874 - DNA, 201 bp, Homo sapiens; identical to SEQ ID NO: 1967

SEQ ID NO: 17875 - DNA, 201 bp, Homo sapiens
ccactggcttcagtttgagtcatcaatggaggaacatacatcagagaatgggattagtctggaaaacagagtatattgcctggaatacagaactccatcawatgggaattcctgctgcaaagttgtgtccaatcaagaattaagtccctaagtacacacactcctcatgttatctcctaacaacacagggattctttccat

SEQ ID NO: 17876 - DNA, 201 bp, Homo sapiens
gaatatacagcctcaaaatactaggttgggcatttttcatctgaaatatcctcactataattagccctgtcagcttgtattatttcaagtatctttgctcrtgtatatctcaaggacacctaaatgtaccatgcaattaactaaattattgaggtatgtaataatttgtattacagctccattggatatatatgcatatcc

SEQ ID NO: 17877 - DNA, 201 bp, Homo sapiens
agctactttcacttcttttctagtacttcaacagtgaagctaagctgaagagaatgtaacattctccttaaacgatgcttgaactagaatcacctctgacktagccctacctaatagaaagtggcctagaatgaaactgtctgacagaagtcattcaggaatatgagagtacgaggaaatttgtatcactctgtccccata

SEQ ID NO: 17878 - DNA, 201 bp, Homo sapiens
caatatcagaaaaatttccaacatagatatatctttatcatataataggttatgttgaccactttagcttattcccccagccttaaggtatagtttacacmcacacacacacacacacacacacatatacatatatttatagtatgcaatgtgatgcttttatataggtataaactgtgaagttatcaaacaaaatgaatt

SEQ ID NO: 17879 - DNA, 201 bp, Homo sapiens; identical to SEQ ID NO: 1962

SEQ ID NO: 17880 - DNA, 201 bp, Homo sapiens
atggtctaagttttttctgtatgtagttttatatcactttcattttattctggcaattctatatcactttcattttattctggcaattcattattataaawaaatcctattgttaaacttaaattgataatgttctacaaaccaggtggtgcctgtaaacacagtctccatttaagatggacaaatactgtctccctgtga

SEQ ID NO: 17881 - DNA, 201 bp, Homo sapiens
aaaaaaatcctattgttaaacttaaattgataatgttctacaaaccaggtggtgcctgtaaacacagtctccatttaagatggacaaatactgtctccctstgaattcatcctctatgatgccttcagggctggctttctaaaactggggtatgtcacatactacttcctctctcagaaatctaaaatttctcccttatcg

SEQ ID NO: 17882 - DNA, 201 bp, Homo sapiens; identical to SEQ ID NO: 1963

SEQ ID NO: 17883 - DNA, 201 bp, Homo sapiens
gatatttatttcaatttattcaatgtttagaaataataaatccaaatcttacagagcttaaatggccaatctatagctatgatgaaatgaagacacaaccytacattttatatttttaaatccaattatcttgccattatataacagcaaaacaaatagctggtccagtgaattttggcaatgtgcttctcaaaccgatga

SEQ ID NO: 17884 - DNA, 201 bp, Homo sapiens
ttagaaatcatggctctgtctctctaacatctgatatttatttcaatttattcaatgtttagaaataataaatccaaatcttacagagcttaaatggccartctatagctatgatgaaatgaagacacaaccctacattttatatttttaaatccaattatcttgccattatataacagcaaaacaaatagctggtccagt

SEQ ID NO: 17885 - DNA, 201 bp, Homo sapiens
acataaagataaaaatattaaagactcaatgtgcttgtgaggacaaaattgtatcatctctgcagaggacctaacatagagcctgtcacatgtcaaagacycaaataatggtggctgtaacattccttcagtatgggtaaattaatactaaagctagagattctgaaatggattatggattagacaaaagctctatttttt

SEQ ID NO: 17886 - DNA, 201 bp, Homo sapiens
atcctggcacttatgagacacacaatctacctactattatttttactcccatgcattgtttgcttatcaactacataaagataaaaatattaaagactcartgtgcttgtgaggacaaaattgtatcatctctgcagaggacctaacatagagcctgtcacatgtcaaagacccaaataatggtggctgtaacattccttc

SEQ ID NO: 17887 - DNA, 201 bp, Homo sapiens
gacagttctccaagaaaaaaaaaaacaaagcttttttcttcaacaatgaaagctcagtttatatttgagtgcctgtttttggtgattaagatcaccaaaargctgaaaggggtctgttatcttataaatttatctcaagaagctttgacgtcagatttatgattaagatgaaatgaccagaccagaaccgcttactatttg

SEQ ID NO: 17888 - DNA, 201 bp, Homo sapiens
tttaagaattttttgaaacttgcccttgtgtacttgggactgggatctccttcttcataccctgctttaggaaaattgatcagtaacagttacgtggatamataacattgataaataacagtacttacattaataagtgacagttctccaagaaaaaaaaaaacaaagcttttttcttcaacaatgaaagctcagtttata

SEQ ID NO: 17889 - DNA, 201 bp, Homo sapiens
tttcagatatcacactcatgtttttggttagtattttcattattttatccaagaccaaattaagtgttctatgttactatataaaattgttttataactcyaatgattttctcatggtcccaaagaatattagtttattgttcattgttttatcactgatgctgaaataactgagaatgtatattacattttctacatcgt

SEQ ID NO: 17890 - DNA, 201 bp, Homo sapiens
ttgactaagcaataaaaatcacgggtgctagggtttcagatatcacactcatgtttttggttagtattttcattattttatccaagaccaaattaagtgtkctatgttactatataaaattgttttataactctaatgattttctcatggtcccaaagaatattagtttattgttcattgttttatcactgatgctgaaat

SEQ ID NO: 17891 - DNA, 201 bp, Homo sapiens
agaacatttctgatacttcagaaacccacaggaataattaaagtcataacatggattttcataaaggaaatccaaaagaaaaaagtaacctctactttgtraagttgtattctgattagtaaagccactagcctgtatggcaccattgcgcagattccaaaaagtttcccttgaatgtaagctggattttagctcctattc

SEQ ID NO: 17892 - DNA, 201 bp, Homo sapiens; identical to SEQ ID NO: 1970

SEQ ID NO: 17893 - DNA, 201 bp, Homo sapiens
atccctgccccccagcaaaaaaaaaaaaaatgagtatgtttgtaatattaatatatgcttggaggttacagaaaaatttcttttttttttcttttcttttytttttttttttttttgagacggagtctcgctctgtcgcccaggctggagtgcagtggcgcgatctcggctcactgcaagctccgcctcctgggttcacgc

SEQ ID NO: 17894 - DNA, 201 bp, Homo sapiens
tggcagatcgattgaactcaggagtttgagaccagcctagccaacatggtgaaaccccaactctttaaaagatacaaaaaattaggcggtcatggtggtgygcaccttaggtcccagctacttgtggggctgaagtgggaggatccaccaggaggtggaggttgcagtgagctcatatcacaccaccgcactccagcctgg

SEQ ID NO: 17895 - DNA, 201 bp, Homo sapiens
gtattttatctagatgctggagaagtttggcgtaatatgacttgtataaacttaggaaacaaggttaaaaaagtaatcaaacattttctttttctttgtgktttttttttttttttttttgagacagagccttgcttcatcacccagacttgaggacagtggcactatctcaggtcactgcaacctccacttcctgggttc

SEQ ID NO: 17896 - DNA, 201 bp, Homo sapiens
aaatcattactataattgctacgtttgtaatgtcatcaggtgtacacggcatagtgaaaatgtttaataggttgatatatactctcagaactataatagakaatctagttgggagacaacacttgtcaggaaaaaatcttaatcaagcctgtttaattacaaattgattttttttttaatgcttgcccatgtcaggtcaag

SEQ ID NO: 17897 - DNA, 201 bp, Homo sapiens
cacagggaggggaacatcacacaccagggcctgttgggggttgggggagtaggggagggctagcattaggagaaatacctaatatagatgacagggtgatkggtgtagcaaaaccaccttggcacgtgtatacctatgtaacaaacctgcacattctgcacatgtatcccagaacttaaagtattttaaaaaaaaaaagat

SEQ ID NO: 17898 - DNA, 201 bp, Homo sapiens
gatatggcagatacatatggttcagtctaatcaaaagccttacctgagtctgtgatctcctggctccatatctaccaggactttagagaaagtgggggaasggggcattctcccattacaagcttatttccccttctaattagtgtcctgaaatctgactaatcccaaccagtagtagagtgggggagatagatgatagaa

SEQ ID NO: 17899 - DNA, 201 bp, Homo sapiens
aagacagtgcggcaattcctcaaggatccagaaccagaaataccatttgacccagcaatcccattactgggtatatacccaaaggattataaatcattctrctataaagacatatgtgcacgtatgtttattgcagcactatttacaataacaaagacttggaagtaacccaaatgtccatcaatgatagactggataaag

SEQ ID NO: 17900 - DNA, 201 bp, Homo sapiens
taaaaccttaactatatttgatcactaaatatgttcattttaaaagtaaagtagaatactttttagtaaaatagtaaagtagaatatgattgtattgacarttagcatattcagtttatatttgctttttcttgttaaactgaatttatcatataagataaatacatttctttgctcttagtgaatcaggtcccagtaata

SEQ ID NO: 17901 - DNA, 201 bp, Homo sapiens
acttcctataggcatgaaaatgcatgtttttaatccaataggtaaatattaattctcatttaaaaccttaactatatttgatcactaaatatgttcatttwaaaagtaaagtagaatactttttagtaaaatagtaaagtagaatatgattgtattgacaattagcatattcagtttatatttgctttttcttgttaaact

SEQ ID NO: 17902 - DNA, 201 bp, Homo sapiens
tggctttatgttagtggttgacaaatttgagttcagctaagattttaccagttactgtacaactgttacatcaaagtaaatggcatcctatatgatttcaygtgttgatattaatgttgtggcgtaacagagccagtgtttttcagccacttctacatagccatctcaaatatataggagcaaatctagaaatggtgtcca

SEQ ID NO: 17903 - DNA, 201 bp, Homo sapiens
aaaaggcctaatttgttgttgtatgcctcttggaggtagccaaactcaaggttaaaggcacagtcctccagactaagttggcccaagatttctgacaccarctgtaactttacggatttcccaaaaccactctctagttcagtaattttctagaacaactcagagaactcagaaaagcactgtgcttaggattacaatttt

SEQ ID NO: 17904 - DNA, 201 bp, Homo sapiens
cctcagtggcataaattatcaggtgtggtcccaaagggcccaccatgaataacaaagacacttttatcactggggaaattccaagggtttagaggtcgccyctcaagagctaagagaaagtcctaagcctctttaggttaggtcaaattccttactacacatatgccaattaagtgttttattcatccaacatgtatttat

SEQ ID NO: 17905 - DNA, 201 bp, Homo sapiens
agtagtcttatcttagatatatcctccccaaccacccccctaccagttctcctcactctcttttaattgctactagggtattttagttttgttttccaatstcttatattggcagagtgctagacttttttcaagttggtctgcaaggagagattgctttgagggacgtctttgttgaatatgtacgtttactaagttata

SEQ ID NO: 17906 - DNA, 201 bp, Homo sapiens
atcaactgcattttttaactctagaatttctgattgattctttttaactgtttcaatctctttgttaaatttatctgatagaattctttttttttttttttgaggtggagtcttgctctgtcgcccaggctggagtgcagtggcatgatctgcaagctccgcctcccgggttcatgccattctcctgcctcaccctcccaa

SEQ ID NO: 17907 - DNA, 201 bp, Homo sapiens; identical to SEQ ID NO: 17896

SEQ ID NO: 17908 - DNA, 201 bp, Homo sapiens; identical to SEQ ID NO: 17898

SEQ ID NO: 17909 - DNA, 201 bp, Homo sapiens
ttgttactggatgctttttgttctgttaactcttgggggaggcttgttattttacagttactgcagttactgaactaattacttcctcacgagccatagtraagatgacctatatcatttgcttataatgcatctaagtttttaattctttgaatgttagtcgttaaacaattaaatcaaaactaatgttttcaaactttg

SEQ ID NO: 17910 - DNA, 201 bp, Homo sapiens
gataacagctcttataaatgtttcagtaagcgctaagtagacagttatgtgcactctcattccacgcttatttgcttactgtaataaactgataaaatatrtgtggtttgtctctgtgtatctacaggcatcatgagtcacatagatttcctttagaaataatgttgtgtctgcagaattgattgcttattttcataaacc

SEQ ID NO: 17911 - DNA, 201 bp, Homo sapiens
gaggaaacaccatccctcataccacttttataagggcaataatcccattcatgagggtagaacccctataacctaattacctactaaaggccccaccataktctggattaggtttcaacacgaattttggagggacataaatgttcagaccatagcacaaaccttcttgttattcttgttattcttgtcattcttgtcttc

SEQ ID NO: 17912 - DNA, 201 bp, Homo sapiens
tgttacaaggaaaactaacaaacagaaaggaatagcatcaacatcaactaaaaggatatccacaccaaaaccccatctctaggtcaccaacatcaaagacsaaaggtagtataaaaccacaaagatagggagaaaccagagcagaaaagctgaaaattctaaagaccagaggacctcttctcctacaaaggattgcagctc

SEQ ID NO: 17913 - DNA, 201 bp, Homo sapiens
ccttttaattatatattcagaacacagagattttaaaaaataatgcctgacaaacattattatcattataaggaaaggctttagtttttttaataactctrtaataaatattatttataaacacagcatgttttagtcttgccagagactggccattggccaacagatagctctattgagggaacattttatttcctgctg

SEQ ID NO: 17914 - DNA, 201 bp, Homo sapiens
tctctgtataatatgtgcatgtcttcccagacaggatacagcatatcataggtaaaaacaatagcgtttgaatcagatagaactggcttaatgtctgagcrtctgccacatagtatatgtaccaattctttatgagttttaggctccagatttgtagggtttataatatctaatttatacatttgctgtttgtgtcgagag

SEQ ID NO: 17915 - DNA, 201 bp, Homo sapiens
gtggctagatcaaaaaatatgttaactgtataccttcaacattctttttcctcagaaattcacctaattatattcaaaattaactagatttaaaagccatmaacttggagcagctttgtgtttttaagccaaacaatatctaagtgttcggtaaaactggataggtaatatccagtaaaatatgtaagctagatcccatat

SEQ ID NO: 17916 - DNA, 201 bp, Homo sapiens
ggctaatttttgtatttttagtagagatggagtttcaccatgttggccaggctggtctctaactcctgatctcgtgatccacccacctcggcttcccaaartgctgggattacaggcgtgagccactgtgcctggccttttttttttttttttttttaagatggaatgttgctcttgttgcccaggctggagggcaatggc

SEQ ID NO: 17917 - DNA, 201 bp, Homo sapiens
atgaatttcatatcattttaatgttacaatcatattacttttgatttttcaaccatttagaaatgtgaaagtcattattagtgaacaggcattgcaaaaayagacagtggaccagatttggcctctaagcatggtttgctggtgcctgcttaataccgagcatgaaataagatgctcattaaatatttgttcattatgtgt

SEQ ID NO: 17918 - DNA, 201 bp, Homo sapiens
ttagagttttggtttattttcaggtgatgggggcatttcatttaggaagagaatgtagatggcattctttcaaagtccttgcctgtcggaacaggtttctwtttttttttccatgggaaaatagattacttaagaatagtattgttgggttgcaatgttttcttttccttagatttttgtagatttcattcttgattttgt

SEQ ID NO: 17919 - DNA, 201 bp, Homo sapiens
gatctcgtgatccacccacctcggcttcccaaagtgctgggattacaggcgtgagccactgtgcctggccttttttttttttttttttttaagatggaatkttgctcttgttgcccaggctggagggcaatggcgcgatcttggctcactgcaacctccgcctcatgagctcaagcaattctcctgcctcagcctctcgag

SEQ ID NO: 17920 - DNA, 201 bp, Homo sapiens
ttgtgtatctaaacgtatctaaacatagaaagttacagtaaagatacagtattataatcttacaataagattatatatgtggtccctccttgaccaaaacrtggcacgactgtaatttaaaaataacacaaaattcagtcattgtaatataccacattaacagaaggaaagggaaaaatccctcacaatcatctcaattta

SEQ ID NO: 17921 - DNA, 201 bp, Homo sapiens
atttttaaaatataatttatttaaaaatgtaatatgtttttaaaagattcatcttttatggcagttttgtcatcttcggtgaaaatatgtaaataaatgartttctgaaattctatcttttaaaaaacagttcatagtctgaaattatgcatttaaaaaaggcagttcatagtcacacaaatttgatggaattttgtgtga

SEQ ID NO: 17922 - DNA, 201 bp, Homo sapiens
attggcttaagcaaatatgtgccagtttgtcctaactggcggatagtactcataatgttagttgttagtattttagtaaaattccccacagtgacaaatcygctgaatcagatgctaattatagttattaatgaactagcaattatttgtggcaaaaaacccaggtcacccaaaaaaacaaaggaaacatgcacacagatc

SEQ ID NO: 17923 - DNA, 201 bp, Homo sapiens
ttgctaaattccacatttccaccttttttcctctgtaccattataacttaaaacctaaaagagttactttcaatatttgacacagcttaagatttagatayctgaactactcttctcctttagcaagaagtagaaggatgattttcatagtccgtactcttcgccgtttgctttccttgaattaccattgaggaccatcac

SEQ ID NO: 17924 - DNA, 201 bp, Homo sapiens
agagaagataaaatgtatattatgtttttgccaaattctgtagctagatatagctagtgtacaaaatgtatgttttgggggagagagaagtagctactggytgaaagccatattgtgaaacagttgaaaggagttctgaagattttagagcaggttattgatagtgatcagatctttgttttataaagttgtgtgaaagat

SEQ ID NO: 17925 - DNA, 201 bp, Homo sapiens
ctttagaattatatactaaatcaatctttgtatataccgtatgtggtaaactccttagaattatttaattaatgaactgcatttatatgtcctgtaaaatsttatttgctccatggtaggtcttttgcttcttagatggtgcaaacttagtccatccttcattccatgcttaattttcttaaattctcaattagagttcag

SEQ ID NO: 17926 - DNA, 201 bp, Homo sapiens
atgattaaaatgtccttaattttaaatgtaggtaagatcaaataaaaagtaggcacaatcctagctttggatttttggtagaaaatatgaaaagcaaaacmgattgattcccctgagtgaatgatggtaagttgtcgagttttcacctgttcctagaggcccgtttagtttaaattttgttccagggacttaattttaaga

SEQ ID NO: 17927 - DNA, 201 bp, Homo sapiens
agttcaattactgggtatccttgttaaatttctgtctcgttgatctgtttaatgttgacagtagggtgttaaagtctcccattattaatgtgtgggagtcyaagtctctttgtaggtcactcaggacttgctttatgaatctgggtgctcctgtattgggtgcatatatatttaggatagttagctcttcttgttgaattg

SEQ ID NO: 17928 - DNA, 201 bp, Homo sapiens
tgcgcagaactttagtgggcagaggaagaatgtttagtgaaggcaactttgaaaagcaatggttgcagaagtagggtaacctatgaaaagaaagcaaaggktcacataattagttggttcaaagtaacattcatccctctctcaattcccccattgcaaatgcagtacatctttaatgtcagatcctggaaaatagaaaat

SEQ ID NO: 17929 - DNA, 201 bp, Homo sapiens
aggttaataggttctcaacgtggccgggcgcggtggctcacacctgtaatcccaacactttgggaggccgaggcaggtgggtcagctgaggtcaggagttygagaccagcctggctaacatggtgaaaccccgtttctactaaaaatataaaaaattagcctggggtggtggcgtgtgcctgtaatcccagctacttggga

SEQ ID NO: 17930 - DNA, 201 bp, Homo sapiens
accaaagagccactttacgtttttatgttagcaagaagttgtccgattgtagaataattacatacctttaaattttgttctgacatttataatttttaaayacaaaatagtttaagagtttgcatagtgggtaagaaatactatatgctaattgagacaaatgttgattcaggaaaacattttatataaccatacagaagt

SEQ ID NO: 17931 - DNA, 201 bp, Homo sapiens
aagtaattcttttgttccaaataacacctataacaaaattacttttagtaattccttattttaagtgatttcacatactttacacaatgtaaaggggaaawttttttttatatgaaacagtggagagaaaattcagtgatgtagaccacattgtgtcaggaagagattcacatttatatcactttatcctgtttttgacca

SEQ ID NO: 17932 - DNA, 201 bp, Homo sapiens
gatactgattataattaagatcacattcaaaaaagtttccatgctagttctttccacctctctccttgaaggagagaaaaaaatctccccatgagcttgcrtgactgacctttactttcctttatcataaggaccattttgtgtttattgaaaaaggaattatagcttattgcttgacagaaatgacactgaagaatatta

SEQ ID NO: 17933 - DNA, 201 bp, Homo sapiens
taatctcagtttatggatttgtttttaaaagttatttgttaaggatactgattataattaagatcacattcaaaaaagtttccatgctagttctttccacytctctccttgaaggagagaaaaaaatctccccatgagcttgcatgactgacctttactttcctttatcataaggaccattttgtgtttattgaaaaagga

SEQ ID NO: 17934 - DNA, 201 bp, Homo sapiens
atcctgaggaagtaaagaagtgtaaaatattgtctcaaggtgtggttgtcccctgtgatgtagcattcagacttccccttagattcctttgccttatgatrtatgcttatgaaattatcacttgaaatccactttcagacatgcagtttattaaataactgatattttaaagacaattctaatctcagtttatggatttgt

SEQ ID NO: 17935 - DNA, 201 bp, Homo sapiens
tctagtagaaattttattaacaaataatcctgaggaagtaaagaagtgtaaaatattgtctcaaggtgtggttgtcccctgtgatgtagcattcagacttscccttagattcctttgccttatgatgtatgcttatgaaattatcacttgaaatccactttcagacatgcagtttattaaataactgatattttaaagaca

SEQ ID NO: 17936 - DNA, 201 bp, Homo sapiens
atctcttaacatgagaaacctgacctaaacatggaagatgttatgatatttacaaaacctttatttctcttcgaaggaagagaaacgaatttagctgtagratacatgtccaatgaacactaagaattgattaccactgacaagagagtatggagtaaaaacaagtacagtatataaccctaatatcaaagaaaagtaaaa

SEQ ID NO: 17937 - DNA, 201 bp, Homo sapiens
tacatatatatttaaaattgttatatcctcttgctgaattgactcctttatcatatagtgaccttctttgtctcttcttatagtttttgtcttgaagtcttattttgtttggtattgtatagcaactcctgctcttttttcatttccattgggatggaatgtcattttccatacctttgttttcagctgatatatgttttt

SEQ ID NO: 17938 - DNA, 201 bp, Homo sapiens
ttggtttttttgtggtgaaagggtcttgccgtgttgcccaggctggtcttgaactcctgggctcaagcaatcctcccacctcagcctcttgagtaactagkactgtaggtgtatgccaccaagtccaactaatttttggattttttgtggagatagtgtctttgttatgttgcctaggctggtcttgaactgctgagctca

SEQ ID NO: 17939 - DNA, 201 bp, Homo sapiens
tcaaaatctttatctgttacatatacaaaccaaagtatttactgatgaaataatacatggaatttgcttttcaataattcagaagttgagtaaaagattasattaaacaagattggctaatgttggtaattttgaaatttagtgctcagtatctagttgttcatcatatcagtgtccctgctcctgtatacatttgaaaat

SEQ ID NO: 17940 - DNA, 201 bp, Homo sapiens
tgagttaattccttacaattagtataaaagtgggattctgtcattttggtactgaaggtaggtatctagtagaaattttattaacaaataatcctgaggargtaaagaagtgtaaaatattgtctcaaggtgtggttgtcccctgtgatgtagcattcagacttccccttagattcctttgccttatgatgtatgcttatg

SEQ ID NO: 17941 - DNA, 201 bp, Homo sapiens
gagaagttttatgtcatgatagggtcaaccaactccatggatggtaaggaattgttaagaccatgacctatgaaaagaaaacttaaattctgcttttgcaragtagttaagaaaggtcgtatgaaggtaggcccttcaagctacatttaaacgtcgtttctaatgagttcatctttcgaatgcttatttcattttgtcaat

SEQ ID NO: 17942 - DNA, 201 bp, Homo sapiens
ttagggacagggtcttgctctgtcactcatgttgaagtgaaatggtgcgatcttggctcactgccgcctcagcttcccagactcaagtggtcctcctaccwcagcctcctgagtagctgggactaaaggtgcatgccaccatgcctgactaattttttggtttttttgtggtgaaagggtcttgccgtgttgcccaggctg

SEQ ID NO: 17943 - DNA, 201 bp, Homo sapiens
tacatattttcactgaagatttgacattcatgcttcatagaatatgtgacctgacaaaatatcttgtaaatataaactagtacatcaaagtttacattcakttcaggctgttagctatgaaattagggaacaggattctagagtcccttccagctctaaaatttctagaaatctaaagaaagtaagtggagagacttcaaa

SEQ ID NO: 17944 - DNA, 201 bp, Homo sapiens
cttttattgaactttctgcagtttaaaaatcagtttcacatatatggtctcatttgatcctcaagacaactcagtgaaacagacaggatatgtatgattarccccattttacagaagaggaaaacagaagctctgaggttgtggtttagctaaggtctcaccatttaatatgtggctgagttcaaactataacccagatca

SEQ ID NO: 17945 - DNA, 201 bp, Homo sapiens
atgtggcctgctgaataaattctttgaatctcatttttccttatgcccaactttggaaactaactagcataaacttatagaaatgtttaaaactagttatrtgatcaacctattagcatcttttcctagagtatttgttttatttgctaccttaagttactgttttcaaggttgttctataatcagagaacttttctaata

SEQ ID NO: 17946 - DNA, 201 bp, Homo sapiens
gggaagggattacttttgtaaaggcctttggatggtactatcaataaatacagcaatgttgttataaaagcatttttccaatggtgattcagctttttgayatgtacttttaatctcaggaccctgcgttatctgacagattggtgttttaacgtgggctgaaaactcaatttactaataatccaaataatgccttttatt

SEQ ID NO: 17947 - DNA, 201 bp, Homo sapiens
cttttcttaacatgttttaaaaataaaaatacaatggcttatttaaaatgtccctatgcatggtgaaatgttaaataccaagtggatgaatggttctcaamtatattgtaatggagaattattcacatgcatctattgtttaaactaataagtaaaatagacttcctttttctgttctgttttaaatgtgcactaaaatta

SEQ ID NO: 17948 - DNA, 201 bp, Homo sapiens
ttaaaaatgacatcttttatcactgtgatttgtgactccttttaagcatccataactagcattgattgaagttgtttcagtgtaatgagttccccaaacamtacattatggttcaaaatgaagcagttgtgtaagagcctcataatacatttataaatcctcaagtatgaggcaacttctttctgagggataattttaggg

SEQ ID NO: 17949 - DNA, 201 bp, Homo sapiens
tggtggtttgctgcagtatcaacccatcacctaggtattaagcccagcatgcattagctatttatcctgatactccccctcctcccgtgccccctgacagrccccagtgggtgttgttccattccctgtgtccatgtgttctcattgttcagctcccacttataagtgagaacatgcggtgtttggttttctgttcctgtg

SEQ ID NO: 17950 - DNA, 201 bp, Homo sapiens
gccaactttatattaattgtaacattaactctaagttttttaatagaaaagagacaaaatgtgccttggggctgtgccaccctgaaattcaaacaacagtrcttttgtgttcctattcaggcataatctccttctctatggtcccaaggcacaagtgttaagtaaataaagggactaataagactattgtttacataatta

SEQ ID NO: 17951 - DNA, 201 bp, Homo sapiens
gcctcaaagtattgggctccagtgatcctcccacctcagcctcctgagcagctaagactatgggtacatacccccatgaatggctgagttttgttttattwttttacttgtagtagaggcaaggttttgctctgttgcccaggctggtctagaactcctggccttaagtaatctttctaccttggccttaagtaatctttc

SEQ ID NO: 17952 - DNA, 201 bp, Homo sapiens; identical to SEQ ID NO: 17891

SEQ ID NO: 17953 - DNA, 201 bp, Homo sapiens
cagaagtaaccaaactgcacagctgatttttactttaaaacattctctatttaagttttatttaagttcaccatttaatgtcctctaatgcaacaattttrctaatgggaatctgtaactgtttcacgtaaaaatgaaagaaaggtattcttgatgcttttccttctggtttgacaattttgtaaggaatcaaagagaatg

SEQ ID NO: 17954 - DNA, 201 bp, Homo sapiens
atcctggcctcaccttttgttactgcatttttgttaacctgctgaaagctctactgagcttttaggcctctcagcttcctcttgtctaattaacacatcctttttttttttttttttttttttggggaaaagcaattccaaaagccaatcagaattctaggtttctagatttactacttcttctgggtcttgtctgcataa

SEQ ID NO: 17955 - DNA, 201 bp, Homo sapiens
tgtgtagtcttcctgcaatctgaacagccttgctaagattaacagttatacttctttttatcccttatcttattctgcctccctgcagtatttggcacacrccttttttcctgaccactcttcctccagtctcttctgcaagttgcttttcttctgtttttacttaaatacaggtcttcaccagatttgcgctttatcctt

SEQ ID NO: 17956 - DNA, 201 bp, Homo sapiens
gtaaattatatattgtgttagagaaggtattaagtgtctataaaaaaggaaaaaggaaatcagaagggagggatgccaatgggttaagccttactaagatrgtaatatttgagcagacatactagagctgagccatgtgggtctctggagaaagtgccttccaggtagagggtcccagggaataacctatagtgggactgt

SEQ ID NO: 17957 - DNA, 201 bp, Homo sapiens
ggccaggaaaactttcatgtgattctctgtgaaatatccaggaagggtttaggaaggaggtttgtgttcaatgtcgtggaaactgaggtgccttgcttttrttacattgcatgtcctctgataacagcacttatgagtaagtgcagtggccaaaaagcagaaaacaaaaaacatgtagctccgaaatcgctaaggtttttc

SEQ ID NO: 17958 - DNA, 201 bp, Homo sapiens
gtgcagtggccaatctcggcttactgcaatctctgcctcccaggttcacgccattctcctgcctcagcctcccgagtagctgggactacaggcacccaccaccatgcctggctacttttttgtatttttttagtagaggcggggtttcaccgtgttagccaggatggtctcaatctcctgacctcgtgatccacccgcctc

SEQ ID NO: 17959 - DNA, 201 bp, Homo sapiens
aattagtcattttgcctattgtctttgaatttggaggtctttccaagtgatttgaatggctcattttcctctcaaaatttgttcctaagaagattcaactrttgccttcttttactctaaatagaatttcccattacaagcagaagaattcaaaattatttctttagccttacatcaatccttacgtaattctttaaaaga

SEQ ID NO: 17960 - DNA, 201 bp, Homo sapiens
tttatttgaagtaatatttgctggaagattcaaatatatttcttcgagtctgtgcttatatgtaagagttaaccaaatttgccgtttacttttttaaatcytattctaggtcaatactaggttaatgctagcctcaatgaaatggattgaaggtaaaatcaagacccactttctacagtttataggataaatgagacaata

SEQ ID NO: 17961 - DNA, 201 bp, Homo sapiens
tttagtattaaaaaccatttatttgaagtaatatttgctggaagattcaaatatatttcttcgagtctgtgcttatatgtaagagttaaccaaatttgccstttacttttttaaatcctattctaggtcaatactaggttaatgctagcctcaatgaaatggattgaaggtaaaatcaagacccactttctacagtttata

SEQ ID NO: 17962 - DNA, 201 bp, Homo sapiens
aaaatttatatacataaggaagaagttatctttagtattaaaaaccatttatttgaagtaatatttgctggaagattcaaatatatttcttcgagtctgtkcttatatgtaagagttaaccaaatttgccgtttacttttttaaatcctattctaggtcaatactaggttaatgctagcctcaatgaaatggattgaaggt

SEQ ID NO: 17963 - DNA, 201 bp, Homo sapiens
ttctttgttttccttttttgggatagagtctgtctctgtcacccaggctggggtgcagtggtgcgttcttggctcactgcaacctcttgcctcctgggttsaagcgattcgtctgcctcaacctcccaagtaggtggaattacagacatgtgccaccacacccagctaacttttgtatttttagtagagatggggtttcgg

SEQ ID NO: 17964 - DNA, 201 bp, Homo sapiens
aattctaaaccacaatgcctaatatatctattgaaaaacataattttacacttgatgaacttttagtggggtctttaaaagtaactttcttttacaaaaaygtaaagtttattttataccttgaagagtctttttctctttcattttatacttatctctttctgtgaacctctatagagataaagctaaaattattaagtc

SEQ ID NO: 17965 - DNA, 201 bp, Homo sapiens
gcagtatttggcacacgccttttttcctgaccactcttcctccagtctcttctgcaagttgcttttcttctgtttttacttaaatacaggtcttcaccagwtttgcgctttatcctttttgtggtatcctcttttcctatatgatttttatctactcataaggcttcagctcttccctacaccatttacaccattcttact

SEQ ID NO: 17966 - DNA, 201 bp, Homo sapiens
ataaaaaccatagggattattagaaaaatgcagttagagtggcaacactcaaaaactatattggtgacatattttttaaaaaggaacctaaaaaaaaaaamcagaagtacaattttacacgtgttaaatggttaacaaataaatactacaatgatactgctctttatattgaaaaagacttgaggtttgcttatggaagaa

SEQ ID NO: 17967 - DNA, 201 bp, Homo sapiens
aatcagtatgcagtaagggcatcagttttatcacactgcatgaatagatttttaatagcacttagacctttttctaattgcacaagtatatggatttcttstgtctcaccaaacatgctaaataataatttaaagacatgctgttacactgttttaaaatatatacctttttatttaaaagcttttttgatcatctcattc

SEQ ID NO: 17968 - DNA, 201 bp, Homo sapiens
ctttagcccaatttaaaataatagattgggagtaaggtcttaatgcagtgtaacctttggaacgttagaaataacctcttttctttccagaaatcagtatrcagtaagggcatcagttttatcacactgcatgaatagatttttaatagcacttagacctttttctaattgcacaagtatatggatttcttgtgtctcacc

SEQ ID NO: 17969 - DNA, 201 bp, Homo sapiens
ttaaaaaaacaaaatactgagaagttgtggtagaatacattctttacaatgcaataagagcagttttttgtgcactgttttaagtaactgttgacaaaggrttcaacatataatttaaggtgaaactaaggaccatgatctaatattgaaataatgtctcctctcttcccattggttatgaagcatttatcgtaaagattc

SEQ ID NO: 17970 - DNA, 201 bp, Homo sapiens
aaacaaggagacccctgttctggaagtggtcattaaatctctcttgagtccacattttctcatttataaaaccgtaatattacttgccttttaaaaaatcraatgacaaagtttatataaaaaacttaaagcttaccctattcctcacctctggtttttaatggtttactctgatgaaatagtttcaagtttacaaaaaag

SEQ ID NO: 17971 - DNA, 201 bp, Homo sapiens
acccactggtcattcaggagcatattgtttaatttccatgtgtttgtatagtttccaaaattccttttgttattaatttctagttttattctattgtgatyagagaagatgcaattatttcaattttttgaacgcttttaagacttgttttgtgacctaacatatggtccatccttgagaaagatttatgtgttgaggaaa

SEQ ID NO: 17972 - DNA, 201 bp, Homo sapiens
tgcttctcagatcacagatcagccattgaaaaagttgcatgcatacaaactatactataaactctgaagataggtttcacaacataagaattcagaacagkggttttcaactaggcaccgcagttacctttattagtttccagtcactgatgtaacacattaccacaaacttagtggcttaaaacagtgcaaatttattat

SEQ ID NO: 17973 - DNA, 201 bp, Homo sapiens
gtttggaaagaagaaaaagaagggtggaaaggctggatggactctaaaatcaaggttaggaaatgaattgtaagttatttactcagggtacagaggatgtmagtgtgaaagaggggctcttcataaaatgtcgagtttgtcaatgggtgataatatgcagttggaagcttcatgccagccttgcgcgctgacagtgctgct

SEQ ID NO: 17974 - DNA, 201 bp, Homo sapiens
cttcaagggccaatctcacttggctttaaatccccagatattcacacactacataggatcaaggttgtattcagtgtttattgaattgataaataaattgkatttattggtttgccttcaacaatccacatatggaaaaaatataaggccacttacaagaatacaatacataatagcataaaataaaagtcgattttatgt

SEQ ID NO: 17975 - DNA, 201 bp, Homo sapiens
tagcatcgttcctgaaaaaatatatagtgctatttgaagattatgtagcctgtgatatgcaaaactataagcaccgaactgctattactgtggaaatgagytgtaggtataatatagatttacttgatgaaatgatctttattttgttgttaagctgacaagtgctggagaatttgctttatgtatacattgtgggaaacc

SEQ ID NO: 17976 - DNA, 201 bp, Homo sapiens
ccttaaatccatttttcttatagaacgtattcctaaaactccttttccacctagtgttaattagaaagttgacaagtgtcattttcaactttattatgttwacatattttatcatttttaaaaaaaattaagctcagtactatattttatgcagatcctgtttattttttatttgatgtacactttaacctcattgatcca

SEQ ID NO: 17977 - DNA, 201 bp, Homo sapiens
cagtggaccagatttggcctctaagcatggtttgctggtgcctgcttaataccgagcatgaaataagatgctcattaaatatttgttcattatgtgttcamgtatttccacaaatatatttttaatatatattattaccaaaataagaggtgagaaagtcttgtgtgctttataatgtatagtgattactaaaataaaata

SEQ ID NO: 17978 - DNA, 201 bp, Homo sapiens
gtatgtggtgtccttcaggagtgttgggaagaagagtttctattaaaaagaataaacaagtaattcaaaagtgttgtaaataatgatgtaactcagtggtyccctaacttttgaaattgtttacctctattagtaaaaatattttgagtatgtactctgtagaagtttatttgtaattatatatgtgtgtgtatatatatg

SEQ ID NO: 17979 - DNA, 201 bp, Homo sapiens
aaaatattcatacttttcaattcagcaatttcacttttagtgtatcaagcctagagaagtatttgtgcttgtacggaaatagatctagccaagtataagcrttgtttataatggagaaaaattggaaatgataatctgtgggggaataatgaaataatgatatatccctattacatatgtaggttttgagtacttcctgtg

SEQ ID NO: 17980 - DNA, 201 bp, Homo sapiens
gaaggtagagaaaaacatgtactcttgtatgctgtttgtgggatcttaaattggcaatatctgtaaaatattcatacttttcaattcagcaatttcacttwtagtgtatcaagcctagagaagtatttgtgcttgtacggaaatagatctagccaagtataagcgttgtttataatggagaaaaattggaaatgataatct

SEQ ID NO: 17981 - DNA, 201 bp, Homo sapiens
gaaaagaagagacaaaattataatttttttttttttttgagatggagtctcgctctgttgcccaggcgctctcagctcactgcaacctccgcctccttggwtcaagcgattctcttgcctgcctcagcctcccgagtagctgggactacaggcacgcaccaccatgcccgactaattgtagtattttcagtagagacaggg

SEQ ID NO: 17982 - DNA, 201 bp, Homo sapiens
aggaaaaagcatggcaaatataaaacaaaaaaaggtggctggagaggccatgcacaccacacatactagttttcacaattcacgtcagagattaaatcctrcttttactaaacaggtaaaaaacaaaatttaacatatgctatttatgagaaacctccctaagagagaatggcacagaaaagttgagattagatagatgaa

SEQ ID NO: 17983 - DNA, 201 bp, Homo sapiens
ctttcctgttggcatggtgtctttttcagtaaactcctaaggaaaacaaacaaaaagtactacaagttgatgataaggtgggtgggcaatatcctgtataraaatgaaactatgttctagaagagttggatttatttctggacaccgacctttttaaaagcaatgcatcattctccatccaacaaatgctgccatagccaa

SEQ ID NO: 17984 - DNA, 201 bp, Homo sapiens
caagaggaagaggaaaaagcatggcaaatataaaacaaaaaaaggtggctggagaggccatgcacaccacacatactagttttcacaattcacgtcagagattaaatcctacttttactaaacaggtaaaaaacaaaatttaacatatgctatttatgagaaacctccctaagagagaatggcacagaaaagttgagatta

SEQ ID NO: 17985 - DNA, 201 bp, Homo sapiens
aacagtgggaagaaatagattaataaagactacagaagaggagctaaaagttagaatttgccataaattggatggagagttcactgaagcaaacctcagtygattgtggaactagattcatgccgtgggaaatctcggaatgacttagccgtgacttctttcctgttggcatggtgtctttttcagtaaactcctaaggaa

SEQ ID NO: 17986 - DNA, 201 bp, Homo sapiens
tttatgagaaatgaaaaaaacatatgtatcattatagttatttaccctacagtaaagcctgtttgctagagatttagggagcaagtcttctagtatttgartggcatcctggaaaatgttaggtttgtaaacaaatgaaattcaaactagaatcagcaaactaacatacataccactgagcaaatagcattttaattatta

SEQ ID NO: 17987 - DNA, 201 bp, Homo sapiens
gactttgtgtcttaaaccaaacgggcgacttcatttttcccctccctgggaactaagtgtggaaaggaaccctaagggtccactgctgtctcctagtggaytaaactaaaatgagaggaacagtgggaagaaatagattaataaagactacagaagaggagctaaaagttagaatttgccataaattggatggagagttca

SEQ ID NO: 17988 - DNA, 201 bp, Homo sapiens
tttttcaaagattactgtctatcagactttgtgtcttaaaccaaacgggcgacttcatttttcccctccctgggaactaagtgtggaaaggaaccctaagkgtccactgctgtctcctagtggactaaactaaaatgagaggaacagtgggaagaaatagattaataaagactacagaagaggagctaaaagttagaattt

SEQ ID NO: 17989 - DNA, 201 bp, Homo sapiens
tctccctggctagttctttttttcaaagattactgtctatcagactttgtgtcttaaaccaaacgggcgacttcatttttcccctccctgggaactaagtrtggaaaggaaccctaagggtccactgctgtctcctagtggactaaactaaaatgagaggaacagtgggaagaaatagattaataaagactacagaagagg

SEQ ID NO: 17990 - DNA, 201 bp, Homo sapiens
cataagtttaacaaagtccaaatttagaattttgtttaaagtatttttaaggtaagttcttaagtttttcagtggtagccataaaataacttatcaaaatscaaaatttataaatgtagttttttgatgagcaattttctgtaggtacagaggtacttcagggaagtacttcatgaactccacatccagatcctgtcttaa

SEQ ID NO: 17991 - DNA, 201 bp, Homo sapiens
ctgttagtggcatcaattgtaaactgaaaggaaactctgacactggggcctgctaggaatgtttttaattgcatgaatctagctttttacaactgaacttkctctgggagatgagaggttttcaagaattatcaaaatattttacttcagtgatttggaagttaaaactctaaatatttaccattattttttagaatatga

SEQ ID NO: 17992 - DNA, 201 bp, Homo sapiens
gtcagggagaagaccgattgactttaaatttacatattaatgagaagatttgttaagagggtgcttgactatagaaaataacggcgtatttatagggcacracattttataaataaagctgatgcaggaaaatggaaattaaaccttttaggttaataaattcaagagactgctaaaatgcacatttgcatttttattttc

SEQ ID NO: 17993 - DNA, 201 bp, Homo sapiens
aaacctgggatcaagagaaaggtgtggctgggttaggataaagggctgtagaaaccaagattcttatgaagtctcttaggtggctgcctttagagacaatrgatggcaaatgtttcctattcaaatctttaaaagtgctggactctcagttaatctctttagaattgttagagcctggaaggggaaactctgtagagatcc

SEQ ID NO: 17994 - DNA, 201 bp, Homo sapiens
tgtatctgataatccgataagttaaagatatgctgtttgagcacaaaggagattcatttaaaccgctattgctatagattatgcctatgatgcatttttaygaggaaccagtaaattatataaaaagatataggcagaaagttaatataaaaatatgaaatactaaaaattttctaaggaaaagagaaaagaggaagtagg

SEQ ID NO: 17995 - DNA, 201 bp, Homo sapiens
caacatggcaccattgccgtctagcctgtgccacacagcaagactctgtctcaaaaaaaaaaaaaaaaaaaaagaaaaagaaaaaaatcattctgaagaayagagattgaaaagaacagagccttggagttttgttggttcattctaaaggtctaacgtatgcatcattagaacagcagaaggagaggagaaagagattgg

SEQ ID NO: 17996 - DNA, 201 bp, Homo sapiens
gttcaattactgggtatccttgttaaatttctgtctcgttgatctgtttaatgttgacagtagggtgttaaagtctcccattattaatgtgtgggagtctmagtctctttgtaggtcactcaggacttgctttatgaatctgggtgctcctgtattgggtgcatatatatttaggatagttagctcttcttgttgaattga

SEQ ID NO: 17997 - DNA, 201 bp, Homo sapiens
actgccgcctcagcttcccagactcaagtggtcctcctaccacagcctcctgagtagctgggactaaaggtgcatgccaccatgcctgactaattttttgktttttttgtggtgaaagggtcttgccgtgttgcccaggctggtcttgaactcctgggctcaagcaatcctcccacctcagcctcttgagtaactaggact

SEQ ID NO: 17998 - DNA, 201 bp, Homo sapiens; identical to SEQ ID NO: 17902

SEQ ID NO: 17999 - DNA, 201 bp, Homo sapiens
ctctaaatctctgaatgagaattcatttatatttactttatttgtttaaacaggcaaaagaatggaccccagcaggaaaagcaaagcaagagaattctgcyaagaagttttattctgaatctgaggaagaggaggactcttctgatagtagcagtgacagtggtgggttttataatttattggcatatattatttacatag

SEQ ID NO: 18000 - DNA, 201 bp, Homo sapiens
caagtgagttctgtgtgcaagattggcaaaaagtaaggggagcactaaaatttaggattaaaatacagtgtgtttagagggctgtacatttagatgttttraaggcttattttttcatcaaagtgttatggatctatgaaatcctgttcttaaaatgaagggacacttttctgaaaatacccagctcaagaagagacggga

SEQ ID NO: 18001 - DNA, 201 bp, Homo sapiens
ttcttcttaatccaatattgttttcgtttatttgttctgttaactggaatctcttcaatatgttatctgagtaggcaaggatgaaaattaatttattgaartagacaattgccctcccccatccagagatttattgttaaagaatgttttaaaaattggctagtatttgtcttgccttatttcacattttcttgcatatat

SEQ ID NO: 18002 - DNA, 201 bp, Homo sapiens
tttcctcatctgtaaagcagacatgctagtacctaccttacttctttcaagtgttatgttaaaaataaaatatgaaagatcaatgtaacacactatgtaaytataaaacaacagttttaacatttttaaaaattccataaaagatcaacagtattggagaacatcaaatgctaaaagtaacctaaattttttggtaactct

SEQ ID NO: 18003 - DNA, 201 bp, Homo sapiens
agcattcttttcattctcccagatctgaagccccagaattatctctgactactctgtcattctgtatgtttagatagttaccaactcctatatgttctgtrcgttatttctcatgtctgtttcttctttccctactgccactattctagattagctcttcattacctgcatagaccattgccattggtcatcctctgacca

SEQ ID NO: 18004 - DNA, 201 bp, Homo sapiens
gagcgctgtcccactcattatgctttcacttttttttttaaacttacattcctcctcattctttttttattttctattttttatttttgagatggagtctygctccgtggcccaggctggagtgcagtggtgtgatctcagctcactgcaacctccgccttctgggttcaagcaattcttctgcctcagcctcccaagtag

SEQ ID NO: 18005 - DNA, 201 bp, Homo sapiens
aaaattatgtgaacagatggtgaaaaaatttatttaaaataatgcttttaaagtttccaggatttttatccttcatgaaacctaggcttcagtgttcttayaactacccagtatattagagtgctcctccacaccatagttatttcagctacgttgttagtccactattcgcaccttattcatgatgcaatattctagtta

SEQ ID NO: 18006 - DNA, 201 bp, Homo sapiens
ttcagctttaagaaggaatggaattctgatgcatgctacaacatggatgaaccttacttaagtcattatgctgagtcaaataagccagacacacacacacaaaaaattgtatgattccacttttatcaggtacctagaataatcaaactcatagagacaaaaagtggaatggtggttgccagcagctagggggaaagcgag

SEQ ID NO: 18007 - DNA, 201 bp, Homo sapiens
ctgcctcaagtcctatatgcatttacccaggttctgtctctattaccaagatgaattgcaaatggagaaatgtttgatggaatagagctcttaacttcttygtttagaattcagaattttatttttatagtagatcctttaagtatgaaaatgttttgaacttactatggattttttaaaatgaaaaatgaaatataagag

SEQ ID NO: 18008 - DNA, 201 bp, Homo sapiens
gttctgtgttatatgtgacctgatatgtatttaatagatattgttacacactcttggctgtgaagtagaaattaaggtatagacttgccttcagctttaaytttatcttgatttgataggtttctaatttttcaggtggggaggttacagttccataaagacagtcatgcaccattgtagcttataggaagctacacccat

SEQ ID NO: 18009 - DNA, 201 bp, Homo sapiens
tgtatgaatattttctaagatattctcttcgaaatcaattttaatgagatttcctatgtgtttattttttgataactgacgaaaattcataaatacaggawtaattcctagatatacattaaattaattaatagctgtaaaacttttgtaatagttaaaaccttttctatgttaatattagagtatgattaacttacttct

SEQ ID NO: 18010 - DNA, 201 bp, Homo sapiens
ggcagtaattgaaggcttcatgtacagagtacaaaaaaaaaaaagttttagcctgagtgggtcattgtcacagcttctggtaaccagtagaacagaaagcmcaagaaaattgaactcagaatagaaaaatcagaaaccaggaagactatccaagagaagaaaaagcatgtcttagagctgttgcattaagtatagcaaatc

SEQ ID NO: 18011 - DNA, 201 bp, Homo sapiens
gagtcagggactagagtcagaaaccttagaagtctacctagtgttctgttgtattgcagccgagctggcactcaaaccacaaggtgcaatgcttcccactyttcctcccctttctgaaggcagaggagcctcaacctgtagccaccaccaccccaggccacaaagagtactgccagagtacccccatagtcccttaacgcc

SEQ ID NO: 18012 - DNA, 201 bp, Homo sapiens
ttgaacccaggagggagaggttgcagtgagccaagatggtccactgcactccatcctgggcaacagagggagactccatctcaaaaaaaaaaaaaaaaaaragagagatacagaattatggtcattgcgtcaatctgctgttttccaaattacagttaacgcatgataaggagtattacaaaaatgagaagttccatcatc

SEQ ID NO: 18013 - DNA, 201 bp, Homo sapiens
gaattggtgcttggtgccttatttagtttgattggtgaggtcgtattttcctggatggtcttgatgtttgtagatgttcatcagtttttgggcattggagmgttaggtatttattgtagtcatcactgcctgggcttgtttatgcttatctttcttgggaaggctttctagtattcataggaacttgggccccaagcccaa

SEQ ID NO: 18014 - DNA, 201 bp, Homo sapiens
attcagctttaagaaggaatggaattctgatgcatgctacaacatggatgaaccttacttaagtcattatgctgagtcaaataagccagacacacacacacaaaaaattgtatgattccacttttatcaggtacctagaataatcaaactcatagagacaaaaagtggaatggtggttgccagcagctagggggaaagcga

SEQ ID NO: 18015 - DNA, 201 bp, Homo sapiens
gcttgaacccaggaggcagaggttgcagcgagccaagatcatgccactgcactccagcttgggtggcagagtgagaccgcgtctcaaaaaacaacaacaaccggtggctcatgcctgtaatcccagcactttgggaggccgaggtgggcagatcacgtgaggtcaggagttcgagaccagcctggtcaacacagtgaaacc

SEQ ID NO: 18016 - DNA, 201 bp, Homo sapiens
ttctatgtttttctgtgtacttactattaccagttagttttgtaccttcaggtgattatttattgctcattaatgtcattttctttctgattgaagtactycctttagcatttcttgtaggacaggtctggcattgatgaaatccctcagcttttgtttgggaaagtttatttcttcatgtttgaaggatattttcactgg

SEQ ID NO: 18017 - DNA, 201 bp, Homo sapiens
agttaatagatgggtgagcaggtaaagacactagcaatggagttttttgtttctattcactgttgcatttattaagtggaggctttgtgccaaaagttttycccctatattacctcatgacttaaaaatttcttacttattatgtttgttgtttcttttacttaatagaatgaaatccctatgagggcaagggtttttctg

SEQ ID NO: 18018 - DNA, 201 bp, Homo sapiens
tgcttgaacccaggaggcagaggttgcagcgagccaagatcatgccactgcactccagcttgggtggcagagtgagaccgcgtctcaaaaaacaacaacaaccggtggctcatgcctgtaatcccagcactttgggaggccgaggtgggcagatcacgtgaggtcaggagttcgagaccagcctggtcaacacagtgaaac

SEQ ID NO: 18019 - DNA, 201 bp, Homo sapiens
ttgcttgaacccaggaggcagaggttgcagcgagccaagatcatgccactgcactccagcttgggtggcagagtgagaccgcgtctcaaaaaacaacaacaaccggtggctcatgcctgtaatcccagcactttgggaggccgaggtgggcagatcacgtgaggtcaggagttcgagaccagcctggtcaacacagtgaaa

SEQ ID NO: 18020 - DNA, 201 bp, Homo sapiens
caaagaaactgagtgaatctcttaggtgctctaacgatcagtcactaggatttgactggtgtctgaatgtcagtaaatgttaagatttgccttaataaaakattttggcaataaagatcttttatttgaaagattcttggggataaagtaaatttggcatgtggtgtgaaataaatcatggataagagtgaaaggaacaat

SEQ ID NO: 18021 - DNA, 201 bp, Homo sapiens
ataaagttggtatcctaatactcaaagctagaaagctacaggtaactaggtaaatgaagacacaggtaaattaaaaatgaatatatttgaaacaactattgttttcagcaaagagttgaggaaaatattgctaattcagcattattttgactcaaatattgatatttaacaaaatagtatctaagatttatgcagtaatac

SEQ ID NO: 18022 - DNA, 201 bp, Homo sapiens
ggctcactttttgtgcttctcttctttcaaggatcatggccccttaagagtacttgtgtgtgtgtatatgtatatgcatacatatatgtgtgtatatgtawgtatttcagcttttatagttattttctatggcaggtttagttttttgtaagctacagtgtcatggacagatatggaagtccctacagtatattctgaatg

SEQ ID NO: 18023 - DNA, 201 bp, Homo sapiens
ttcctgaccatgttaattgtaattattttaaaatccctgtgtgataactctggtatctgagtcactcatggatctgctcctggttttttttttttttttttcctttttttcttttttgggcgggggtaatttcatcctgtttttagtatgtctcgtaagttttgatcagatgctaggtatttaggataaaaatgattgatg

SEQ ID NO: 18024 - DNA, 201 bp, Homo sapiens
tactataaatgcaaaacatgttagtctgttttattaaattcttcttgtatctttattattttattacttgtactttgagttcaatttgctgttttttttttcctagcattctgagatggaaacttagatcattgatttttaatctttctgattttgtattgtaattagaaatataaatttgcttctttttttttttttagg

SEQ ID NO: 18025 - DNA, 201 bp, Homo sapiens
ttgttcttgctctgttatcttgtatgatttctttggttgtctccttgtacttcgagacctcagatcacttatccgtggaggtcttttgtgatcacccagtyttactttattgcattccttattttaattgtttgtgtactacttatctgatctttctttatgtttttgttcctccctgctttcttccttctctgccttgct

SEQ ID NO: 18026 - DNA, 201 bp, Homo sapiens
attgcaggcatgagtcacagtgcccggccattgaaatatattcttaatatagtcagctttatagcagaaattgacagcgtagtatggtgaataggaagaaygttgaatttcaaaacaagattgaaatttaattccttgctttgccatccctggttttatgatgatatacataaaaggcatgtgattttagaatttctcaca

SEQ ID NO: 18027 - DNA, 201 bp, Homo sapiens
ttaaccagcatgatgtcatttcaattcttatattaataatttctgcagagatcccacttccaaataagatcagattctgaggatagtattgggcactgggrgtgggggacacttcttcaactcactacgaagagtaacattccattttacgtcacaggaatttgtaggacttagaggaaataatgtgtaggaatggatttt

SEQ ID NO: 18028 - DNA, 201 bp, Homo sapiens
ttgattgtcttgtgcctctgactttggagaactttgtatacagtgacttgaagctgaaattttaaatttcatactgagttcatttgtaatttatatatatrtattccatgtatgtatacatacatcttcttctagtccttcaccagtgtttacatgtttctcttaatgtgactgtgtcttcccctccatcaggtttggtct

SEQ ID NO: 18029 - DNA, 201 bp, Homo sapiens
agagaagatatcttttgagatatacatacatgttatcttgagattcttaagtggaatattattgatgccatcagtacctaaaactcacacatttttttttycctttttacatccatttacaaactgctttgataaaagtcaaaagagaacatttatgcagttggcaaaggtttcatagctgaatgctgttcagaagagctt

SEQ ID NO: 18030 - DNA, 201 bp, Homo sapiens
ccggctaattttgtgcttttagtagagatacggttttgccgtattggtcaggatggtctcgagctgctgacctcaggtgatccacctgccttggcctcccraagtgctggaattacaggcgcgagccactgcgcccggccgagaattgtttttaagtgatagcatactttaaaataatcacataaaacttaagtgatttgc

SEQ ID NO: 18031 - DNA, 201 bp, Homo sapiens; identical to SEQ ID NO: 1970

SEQ ID NO: 18032 - DNA, 201 bp, Homo sapiens
gattcagaatgcaagggttttccaattcagtagaaatgaccattatctattgctaatgttatatttcagtcactggttatttgctgttctcagaaagtcartgaaattctgtccttttgaaagccttttttctctctgttctaggcttctaataagagattatgccaatttcacatgcagctctgttctgtgttatatgtg

SEQ ID NO: 18033 - DNA, 201 bp, Homo sapiens
ggaggtggaggttgcaatgagcggagattgcaccattgcactccagcctgggtgacacagtgggactccatctcaaaaaaaaaaaaaaaaaaaaaaaaaargaatatatcagacacattgttactcaaatcattcagggaatataattatatacagcttttataagcctatcagtaagtgtttttccttaaatttgcagct

SEQ ID NO: 18034 - DNA, 201 bp, Homo sapiens
cctcctgaggcatgtgccaccacgcccggctagttttgtatttttagtagagatggggtttctccatgttggtcaggctggtctcgaactcctaacctcargtgatccacctgtctcagcctcccaaagtggtgggattacaggcatgagccaccgtgcccggtgaagaactatctttaaaaaaattttttttttccattt

SEQ ID NO: 18035 - DNA, 201 bp, Homo sapiens
tcctaggttcaagcgattctcctgcctcagcttcttgagtggctgggattacaggcatgcaccaccatgcccggctaattttgtgcttttagtagagatasggttttgccgtattggtcaggatggtctcgagctgctgacctcaggtgatccacctgccttggcctcccaaagtgctggaattacaggcgcgagccactg

SEQ ID NO: 18036 - DNA, 201 bp, Homo sapiens
ggctggagtgcagtggcacgatctcggctcactgcaatctctgcttcctaggttcaagcgattctcctgcctcagcttcttgagtggctgggattacaggyatgcaccaccatgcccggctaattttgtgcttttagtagagatacggttttgccgtattggtcaggatggtctcgagctgctgacctcaggtgatccacc

SEQ ID NO: 18037 - DNA, 201 bp, Homo sapiens
gggataattaactatagatgagaactgttttttttttttttttttttttgaggcagagttttggtcttgttgcccaggctggagtgcagtggcacgatctyggctcactgcaatctctgcttcctaggttcaagcgattctcctgcctcagcttcttgagtggctgggattacaggcatgcaccaccatgcccggctaatt

SEQ ID NO: 18038 - DNA, 201 bp, Homo sapiens
tctgtaaaataagaataaatacttgtttattgagttgtgaggataaaatgagttaatttatgtaagacatttagaacagtgtctgacatgtagttaatgcwacctataaggatttgctattattaccatattatgtccattctaagacatatgtttgctattttaaagtttctgcagttgggatttaacttaacaactggt

SEQ ID NO: 18039 - DNA, 201 bp, Homo sapiens
attttatataatatgttaaaaaatatatatttttcttttgtagagattaggtctccctatgttgcccaggctgttcttgaactcctgggctgaagcgatcytcctgcctccgcatcccaaagtcttgggattgcaggcatgagtcacagtgcccggccattgaaatatattcttaatatagtcagctttatagcagaaatt

SEQ ID NO: 18040 - DNA, 201 bp, Homo sapiens
cttccagagctagttgttattcctgttaatttatttaggggccagtaaagtttagtgcctatatatataaaaatatatatttgtgtgcgtgtgtgtgtgtrtatatatatgtatatatatatgattccatctttaaaataatgtatttattgatttaatgatttagtttttatttttatacattcagcttacttagtaaaa

SEQ ID NO: 18041 - DNA, 201 bp, Homo sapiens
tatatatatttatatatatatatttaagtcatatatatatatttaagtcatatatatatatatttaagtcctatatatatttaagtcctatatatatatayacacctatatatacatatataggacttaatatataatatatataaattttatataatatgttaaaaaatatatatttttcttttgtagagattaggtctc

SEQ ID NO: 18042 - DNA, 201 bp, Homo sapiens
tcaacctcctggtctgatcctcccacttcagcctcctgagtagctgggcccacaggtgtacaccaccatgcctggctaatatatatatatatatatatatatttatatatatatatttaagtcatatatatatatttaagtcatatatatatatatttaagtcctatatatatttaagtcctatatatatatacacaccta

SEQ ID NO: 18043 - DNA, 201 bp, Homo sapiens
tagaataaccttgcaaaagaatgaatactaatgatgttagatagtagcactgatgaggactttccacacatacctgtgtataccaggcagacagaatagcrtatacctaggtttagagctgtaatgttcaatatagtagcaactagccaaatgtagctatttaaatttaatttaattaaatttaatttctccaccactcta

SEQ ID NO: 18044 - DNA, 201 bp, Homo sapiens
ttaactttacggattaatatttgttctgccttgttcactggatattgtgagactgaaatgagaaaaagatgctttgaaaagtaatgtcacagctgggtgtygtggcacacgcctgtaatcccagcagtttgggaggccaaggtaggaagattgcctgagcctaggagttagcgaccagcctggacaacatggggagatccc

SEQ ID NO: 18045 - DNA, 201 bp, Homo sapiens
aacattaaatttactatcttaaccatttttgagtgtacaattcagtagtgttaactatattcacattgttgtgctacagatgtctagaactgtttcatctrcaatactgccctgtgactttttaaaaactaatttttttattgagatttccaagtgcatcagggacaaaggcagacattgcatattggtttcctgaattcc

SEQ ID NO: 18046 - DNA, 201 bp, Homo sapiens
acagtcaagatggattcttccctgggatgcaaggctggttcaacatatgcaaatcaataaatgtaatctatcacataaacagaaccaacgacaaaaaccayatgattatctcaatagatgcagaaaaggcctttggcaaaattcaacagcccttcatgctaaaaacacgcaataaactaggtattgatggaatgtatctca

SEQ ID NO: 18047 - DNA, 201 bp, Homo sapiens
tttgtaggactttttttctgtttctggttctacatagccttcatcaggaaacttggtgggaccatgtgactttaaaaaattgtggtaaaaaacacataacrttaaatttactatcttaaccatttttgagtgtacaattcagtagtgttaactatattcacattgttgtgctacagatgtctagaactgtttcatctgcaa

SEQ ID NO: 18048 - DNA, 201 bp, Homo sapiens
ctcaccataatgtagaatcagtgggagccctgagcttgttttcttacaactagatggtcccatctggggtgtgatgggagacagtgacagatcatcaggcrttagattctcataaggagcacgcagcctagatccctcttgtgtgcagtttacaatagggtttgtgctcctatgagaatctaatgctgctgttgatcttac

SEQ ID NO: 18049 - DNA, 201 bp, Homo sapiens
acccactgccaatatcatactgaatgggcaaaaactggaaacattccctttgaaaactggcacaagacaattatgccctctctcaccactcctactcaacrtggtgttggcagttctggccagggcaatcaggcaagagaaagaaataacgggtattcaattaggaaaagaggaagtcaaattgtccctgtttgcagatga

SEQ ID NO: 18050 - DNA, 201 bp, Homo sapiens
ttctattcctgtcaagtacaaatttgtaggactttttttctgtttctggttctacatagccttcatcaggaaacttggtgggaccatgtgactttaaaaaattgtggtaaaaaacacataacattaaatttactatcttaaccatttttgagtgtacaattcagtagtgttaactatattcacattgttgtgctacagatg

SEQ ID NO: 18051 - DNA, 201 bp, Homo sapiens
tgaaaactggcacaagacaattatgccctctctcaccactcctactcaacgtggtgttggcagttctggccagggcaatcaggcaagagaaagaaataacrggtattcaattaggaaaagaggaagtcaaattgtccctgtttgcagatgacatgattgtacatttagaaaaccccatcgtctcagcccaaaatctcctta

SEQ ID NO: 18052 - DNA, 201 bp, Homo sapiens
cttactcctgggctctagtgatccttctgcctcagcctcctgagtagctgggactgcagacatgtatcaccatgcctagctatttttttttttttttttttggtagagacaagtcttactatgttgtccacgctggtcttgaactcctgggctcaagccgtcctcctgccttggcctcccaaagtgctaggagtacaggca

SEQ ID NO: 18053 - DNA, 201 bp, Homo sapiens
tttcatttgtttagattcaaagagctaatttagatccaagcaaagtactgcatgctttcctgtagtcagtaatacaacccagtgtatttggattgcatcawtaaagcctgacttattttttaacttaaatcttattcattgtcaactttacaatatcaaacatgaaaattctattacattcattcttaacctttaatatca

SEQ ID NO: 18054 - DNA, 201 bp, Homo sapiens
gagagctacccttttgcagatttaccaattaaaaaaaaaatgctacattgcttgcttactctctctgccactcactctccccatgcatattcaggcacatrtacgtattcatgttattatgtcttctgaaccattggagactcagttgtacacatcatgttcttttacaatgaaaatcttaatgtgtaatttttaagaaca

SEQ ID NO: 18055 - DNA, 201 bp, Homo sapiens
cttttaaaaaatcgaatgacaaagtttatataaaaaacttaaagcttaccctattcctcacctctggtttttaatggtttactctgatgaaatagtttcargtttacaaaaaagttgcaacaatgacacagagagctacccttttgcagatttaccaattaaaaaaaaaatgctacattgcttgcttactctctctgccac

SEQ ID NO: 18056 - DNA, 201 bp, Homo sapiens
aaaaagccatcaaaatatgtataccttttgaccaggtaatctcatgtctagattcttcttctaaggaaataattagaattacacagatttatgtgcatggktgttcaaacctaaatgtctagtgatagtagtgatggttacaaaaagtatgcaaaaacaatttaaggaattttgtacaattattaagatgtttttattaca

SEQ ID NO: 18057 - DNA, 201 bp, Homo sapiens
tctgttcacacagactagcagaaatgcaaacatgtaaagacacaaatttgtattacatgagaagtacagttatagaagtttgttcaagtatatctgtggamcaaagaaggcacatataagctgtttgcaggtgagccagagagtgttttccttttaaagggtagcttgccagatcgaagttgcaagatgagcaaggcagag

SEQ ID NO: 18058 - DNA, 201 bp, Homo sapiens
taatgtattttattcaaatggtttagaaacaccaaaaattaatgttattgtctgttcacacagactagcagaaatgcaaacatgtaaagacacaaatttgyattacatgagaagtacagttatagaagtttgttcaagtatatctgtggaacaaagaaggcacatataagctgtttgcaggtgagccagagagtgttttcc

SEQ ID NO: 18059 - DNA, 201 bp, Homo sapiens
tttaacattaaccattgctttatgtttttaattttcaaattttcatcaaacttcagtttttctgaattatatttcacaagtgtttgaaacaactaaatatrtttacttttaatggcaaaaactgcagttacttttgcaccagcttaatacaaagtacctttaatgtgcaccacataaaaataaatgaaattaataagccct

SEQ ID NO: 18060 - DNA, 201 bp, Homo sapiens
aggggctcctcacttctcagacggggcagttgccgggtggagggtctcctcccttctcagatggggcggctgggcagagacgctcctcacctcccagacgkagtcgcggccgggcagaggcgctcctcacatcccagatggggcggcggggcaaaggcgctccccacatctcagacgatgggcggccgggcagagacgctc

SEQ ID NO: 18061 - DNA, 201 bp, Homo sapiens
gctaggagtacaggcatgagccaccatgcctggcctgttttatttttaatatgatgtactttttaagctattataattttagaattattgttaattttaayattaaccattgctttatgtttttaattttcaaattttcatcaaacttcagtttttctgaattatatttcacaagtgtttgaaacaactaaatatgtttac

SEQ ID NO: 18062 - DNA, 201 bp, Homo sapiens
tctctgtgttgctcactgctattcctagtgtacagagtggctcctggcagttagtgggcacccagtaaatattgcttgaattaataaaacatataagggcwtatacaaaaatttcattgcagcattgttcagtggttagctctggcctccttgtgatgtaggactaacctgggaacagacaagaataagactttcatttta

SEQ ID NO: 18063 - DNA, 201 bp, Homo sapiens
cattgagtggaaagtgtgtgtgcggcatgtgaagagaaggccagtgaggaatcttagtaaagtctacattgaagagagtaggagaattggaacttacttasaaaactaagaagggagaattcagtttggggaaaccatgaaagttgattgtacaagtttttgaattgtgtttaaggtataaggaaagggcgaaacttaatt

SEQ ID NO: 18064 - DNA, 201 bp, Homo sapiens
aacatctggtttcatttgtgatgaatattgacagttacaggtgtccgtgtgtctaattaaatgactataaatctaagaacatctggttctgtttttcagakagtgaatctggaagtgaaagtggagaacaaggcgaaagtggggaggaaggagacagcaatgaggacagcagtgaggactcctccagtgagcaggacagtg

SEQ ID NO: 18065 - DNA, 201 bp, Homo sapiens
tcaacatctggtttcatttgtgatgaatattgacagttacaggtgtccgtgtgtctaattaaatgactataaatctaagaacatctggttctgtttttcasagagtgaatctggaagtgaaagtggagaacaaggcgaaagtggggaggaaggagacagcaatgaggacagcagtgaggactcctccagtgagcaggacag

SEQ ID NO: 18066 - DNA, 201 bp, Homo sapiens
gtgatttttgcacattgattttgtatcctgagactttgctgaagttgcttatcagcttaaggagattttgggctgagacgatgggttttctagataaacartcatgtcatgtgcaaacagggacaatttgacttcatcttttcctaattgaatgccctttatttccttctcctgcctaactgccctggccagaacttccaa

SEQ ID NO: 18067 - DNA, 201 bp, Homo sapiens
tccacaatagttgaactagtttacatttccaccaacagtgtaaaagcattcctatttcttcatagcttcgccagcatctgtcgtttcttgactttttaatygccattctgactggcatgagatggtatctcattgtggttttgctttgcatttctctaacgatcagtgatatggagctttctttcatgtttgttggccaca

SEQ ID NO: 18068 - DNA, 201 bp, Homo sapiens
ccttgcaaaagaatgaatactaatgatgttagatagtagcactgatgaggactttccacacatacctgtgtataccaggcagacagaatagcatatacctrggtttagagctgtaatgttcaatatagtagcaactagccaaatgtagctatttaaatttaatttaattaaatttaatttctccaccactctagtcacatt

SEQ ID NO: 18069 - DNA, 201 bp, Homo sapiens
aattattttataaaaagtatccctctatatttaaactggtttttcaaagagggaagttgacttacgtgtcccagctttttaaaaggagtaattaagtattktaccaccttacaagtagccattccagttggaatcaaatagttacataccttggttttcatattgtttcttatttaatgttcttattttaaagcgataaaa

SEQ ID NO: 18070 - DNA, 201 bp, Homo sapiens
atttttctcctttgcaggtgacttgattttttttttctgcatgctaaaaaaacctgtttaaaaagtctttgagaattaatcaggttacatctcaacgtgarttattccatatgatctccaggttcacttcttccttttattttagggaattttcttttctttttgtaattttaaaaattcgatgtttacattttttttctg

SEQ ID NO: 18071 - DNA, 201 bp, Homo sapiens
ctgtgaagaaatctgaagatagccaaagatttttctcctttgcaggtgacttgattttttttttctgcatgctaaaaaaacctgtttaaaaagtctttgaraattaatcaggttacatctcaacgtgagttattccatatgatctccaggttcacttcttccttttattttagggaattttcttttctttttgtaatttta

SEQ ID NO: 18072 - DNA, 201 bp, Homo sapiens
aaatatgtgattctcagctgaggctgtatcttttaaaatgttttgaaaatacctttgtacagaaagcaacactggccacacctaagaaagcgatgcttccmctccccctccttgccctcacttctctttcccctctcacacagtccctttctctcaaagccattccccatgtctccacctcaatggcctgtggtagtttag

SEQ ID NO: 18073 - DNA, 201 bp, Homo sapiens
tacatttccaccaacagtgtaaaagcattcctatttcttcatagcttcgccagcatctgtcgtttcttgactttttaatcgccattctgactggcatgagrtggtatctcattgtggttttgctttgcatttctctaacgatcagtgatatggagctttctttcatgtttgttggccacataaatatcttcttttgagaag

SEQ ID NO: 18074 - DNA, 201 bp, Homo sapiens
catgattgtacatttagaaaaccccatcgtctcagcccaaaatctccttaagttgataaacaacttcagcaaagtgtctcaggataaaaactcaatgtgcraaaatcagaagcattcctatagaccaagaacagacaaacagaaagccaaattaatgagtgaactcccattcacaattgctatgaagagaataaaatacct

SEQ ID NO: 18075 - DNA, 201 bp, Homo sapiens; identical to SEQ ID NO: 1977

SEQ ID NO: 18076 - DNA, 201 bp, Homo sapiens
atccatttggtgattgcacagtcctctgtgagcttaagggaattcgttgcaaaccatctcatggcaggcatacttctgccattaaaaatatctacacactrtatatttagtgtgccctttcttatataattatcaatcatagaaaacaaatttagcatcaaagggaaggcctgcagaccttaaaaaacatttttttaagtt

SEQ ID NO: 18077 - DNA, 201 bp, Homo sapiens
tctaaaacttagaaatttttctgaatttttttatgttatttggtttgccttttagtagttaattacagctgattagcctaaagtaagtgctatctactgcyttcaccaaaatttagatagattctaataaagccacaaattatttagcctacagtttttaaatattttcccagtgattttacctttattatatatgaacag

SEQ ID NO: 18078 - DNA, 201 bp, Homo sapiens
aagcagtcctcccactttggtttcccaaagtgttgggattacaagcatgcgccactgtgcctggccaacttgttccatatctaggccttaaactcacccasttaatcactgttattgcatacctgtttgaaggttgttaataggggaaatactggtacacattatttttggtatcctaaaaagatctataatgtgtagctc

SEQ ID NO: 18079 - DNA, 201 bp, Homo sapiens
agctccaagtagtaccaccagagaagcttccagggattagaaacatttggctattgacctgcagtctaatggaattgtacagaaacaaggagacccctgtkctggaagtggtcattaaatctctcttgagtccacattttctcatttataaaaccgtaatattacttgccttttaaaaaatcgaatgacaaagtttatata

SEQ ID NO: 18080 - DNA, 201 bp, Homo sapiens
tccttctccttctccttctttcttcttctttctgctttcttcttcttcttcttttagatggaattttgcccttgttgcccaggctggagtgcaatggcatratcttgacccactgcaacctccacctccggggttcaagcgattctcttgccttagcgtcccgatagctgggattgcaggcatgtgccaccatgcccagct

SEQ ID NO: 18081 - DNA, 201 bp, Homo sapiens
ggtttgtgaacatctacgatgttttctcttagatttttgtcagatttggggccaggcactgcggctcacgcctgtaatcccagcactttgggagggtgagktgggcggatcgcttgaggccaggagttcgagaccagcctggccaacatggtgaaaccccgtctctactaaaaatacaaaaattagccgggcgtggtggct

SEQ ID NO: 18082 - DNA, 201 bp, Homo sapiens
gagtgttttccttttaaagggtagcttgccagatcgaagttgcaagatgagcaaggcagagaagtaggcaaacagagtagaatataaaaggctccaagacrtagaacaagatcttgggaactattatcccatagagctagtgcataacaatgctgaaattggagataagctggacctgaatagtccagtatggcggccaca

SEQ ID NO: 18083 - DNA, 201 bp, Homo sapiens
ttgatgatccattgttctagaacaagtacggagcttgttgcctctactattagcaaaatgtttagactgaattaacctgtatatcggcatcaatctgtttygcaaattaatttacttttatggtttgtgaacatctacgatgttttctcttagatttttgtcagatttggggccaggcactgcggctcacgcctgtaatcc

SEQ ID NO: 18084 - DNA, 201 bp, Homo sapiens
actttttatctttctgtaagaatatacagtgttagaattctaaggcagtaagggcctcaagtcccttcttgtcaatgctctcatttttttattttttttttagtgataaaaataaagttttacctatttcatccaggaatatatgctttgtatcttatacgtaatattccagagaaaaagaaagttacctatacctctttt

SEQ ID NO: 18085 - DNA, 201 bp, Homo sapiens
tttattttataccttgaagagtctttttctctttcattttatacttatctctttctgtgaacctctatagagataaagctaaaattattaagtctctatayactataaaaaaatcaaactaaaggttgagggtaactatatgcagtgaaaagaatgcttaataggaaggatttagaggccctggcttttacctatgcaaat

SEQ ID NO: 18086 - DNA, 201 bp, Homo sapiens
tagtgtagtccttttttggtggtagacttttggcaacgtttccaattctcttctatagttatttagtttattcaggtttcctgcaactttttgaatcaatwttttttttttttttttttttttttttgagacagagtctcgcttcttcgcccaggctggagtgcaatgcaccatctcagctcactgcatcctctgcctccc

SEQ ID NO: 18087 - DNA, 201 bp, Homo sapiens
ctttcttttacaaaaacgtaaagtttattttataccttgaagagtctttttctctttcattttatacttatctctttctgtgaacctctatagagataaakctaaaattattaagtctctatatactataaaaaaatcaaactaaaggttgagggtaactatatgcagtgaaaagaatgcttaataggaaggatttagagg

SEQ ID NO: 18088 - DNA, 201 bp, Homo sapiens
ttagtgtagtccttttttggtggtagacttttggcaacgtttccaattctcttctatagttatttagtttattcaggtttcctgcaactttttgaatcaawtttttttttttttttttttttttttttgagacagagtctcgcttcttcgcccaggctggagtgcaatgcaccatctcagctcactgcatcctctgcctcc

SEQ ID NO: 18089 - DNA, 201 bp, Homo sapiens
agagtatgattaacttacttctaactatgtaatctgcttctcatattaggttcctgttgctagagcaagtattctttggctaattggagaaaactgtgaaygagttcctaaaattgcccctgatgttttgaggaagatggctaaaagcttcactagtgaagatgatctggtaaaactgcagatattaaatctgggagcaaa

SEQ ID NO: 18090 - DNA, 201 bp, Homo sapiens
tttcatttaaaaaatctcccagttaaatgtaccaggtctaatttatttccacattttgaaaaggaatttatttgttgccagcagcagttttttgggatcaytattacgatgatgacattggtgttgctgctgatacatatacatttgaaagatgttgatctattaaactttcttcatttaacctctgttgattttgaggca

SEQ ID NO: 18091 - DNA, 201 bp, Homo sapiens
tttgtagtatctaaattgatgacatatttttaaaaggataaataaaataattatttgaaaatgttgtcaatattgtaaaaactttttattgactacatggrggaaaagctaaatatttgggtttgaaatattgacagtttttaacataaaagcaaggattggtactattcttcattcagtaggattttctctgagattaca

SEQ ID NO: 18092 - DNA, 201 bp, Homo sapiens
acatagattttatcatattgagggctttgttttaattggttatttagtaataattgaaaatataaaaactaaagtttaaatgtattttacattttgaattyggtcaaatcaaatagatttatgtctgtaatacagtcaacttacatgttctgattgtgagtattctgtcctttggcgtatccttcatttatgataaatact

SEQ ID NO: 18093 - DNA, 201 bp, Homo sapiens
ttttattcttttggttctttttctacctttctttaataccccttttaaaattttcattcagtaattttattcgaagggcaccttgcaatttagtcttcacrtctgattatttttgctctcttgatttctttcctgttgtcaatcaatcctgatttcttttgttaatttataactttaaaaaatttataatttatatttata

SEQ ID NO: 18094 - DNA, 201 bp, Homo sapiens
agtgtgggatcagaaccggtctcaacagcttgctgaccagtattcttcctagtttaccacactcattttgtcgctacccagtgatccagtatgaattttgkattcagatttggagttctgatcctagttccaccactaaccagctgtgagatgtgggcaagtttcttaactcatttgttacctagtttcctcatatgtcta

SEQ ID NO: 18095 - DNA, 201 bp, Homo sapiens
ttttatctttgaaatatagtacttttgcaaggtacttcaggattacttgatatgggtcaattgttttgccttggtactcagtgagtcctttcaaaatgtasattcagaatttttattatctctggcaaagtgtttttttttaagattataattttaaatattaattctgttattttttttctttttcagggattcctattt

SEQ ID NO: 18096 - DNA, 201 bp, Homo sapiens
cagatataagtaagaaaattaagtaatcaaaaacttatttagtaaatatagctaaaaccttatatctcttgaacagataatacccacttttaggagtatakccagtgaatattttcaaaaaatcaagaatgtatttaggcataaaggaagcttaaagattttgcattctttgaccttaagcaatgaaatgagacttaaata

SEQ ID NO: 18097 - DNA, 201 bp, Homo sapiens
atttcaccttgaactgctgctttggcctgcttctccctccggttctttcactgcaggtctcagacacccttttcagcaacctgcagcagctactggatccsctgagactgactggccatgacagcaccaactctgaggcagaagcaagcagcctaaatctctctctctttttttttttagagaatgaatcatatctgcaaa

SEQ ID NO: 18098 - DNA, 201 bp, Homo sapiens
tttttgaatttttattcattttcttcttgtgaattaaattacaaatctaaaacttagaaatttttctgaatttttttatgttatttggtttgccttttagyagttaattacagctgattagcctaaagtaagtgctatctactgccttcaccaaaatttagatagattctaataaagccacaaattatttagcctacagtt

SEQ ID NO: 18099 - DNA, 201 bp, Homo sapiens
atatgcaacatgatctatcactttttctcagttgtgtttagggtttcatggctaaacttttttatatatatataataagattggtagtcaaagtggtaaaygaaagattagattattctacgtattgacggttatgtatataagcctccatcagaagcatgatttattcattgctatgagtttcaagcattgcagaattag

SEQ ID NO: 18100 - DNA, 201 bp, Homo sapiens
cctcagcctctaagcatgctcaggtttctttaggtgttattcctttgcttcttcattctcaggaagcttctgctttctgttccttcttccattgccaatcytcccttcacccttcaactcactgcattgtgtagtcttcctgcaatctgaacagccttgctaagattaacagttatacttctttttatcccttatcttatt

SEQ ID NO: 18101 - DNA, 201 bp, Homo sapiens
ataattgatattgacacaagaaccaatgaaaccagagaatttagaaatgtagaaattttgtatgtcataaaggtgacatttcaaatccgtggggaaagaayagaccatgcagtaaatggtgtgaggaccattatttggaaaaaatcaaggtagcttcctcccacaaattataccaaaacaagttccatgtggatttattat

SEQ ID NO: 18102 - DNA, 201 bp, Homo sapiens
aaaaaatgcacaagaaaagtcaacatttttagtgaaaaaagtctttctctataataatttaaaaatattccttaaagccacaagaatatttttattctgtrtaattgatattgacacaagaaccaatgaaaccagagaatttagaaatgtagaaattttgtatgtcataaaggtgacatttcaaatccgtggggaaagaac

SEQ ID NO: 18103 - DNA, 201 bp, Homo sapiens
ctcaaaaaaaaatcagagacagagaaaaacatagaattaataaaacagtagtgagcaaagcattctacgaaatttatcaacgtataaaaataattgttgayataatgtgaaaaataaatattaacaataaattggaaccaaaatccccacagagacaagtgcaaggaggagtgatggtatactagggttcttgttatgtct

SEQ ID NO: 18104 - DNA, 201 bp, Homo sapiens
taaaatatgagaaattatcataaatttgtatatcaaaatttatatacataaggaagaagttatctttagtattaaaaaccatttatttgaagtaatatttsctggaagattcaaatatatttcttcgagtctgtgcttatatgtaagagttaaccaaatttgccgtttacttttttaaatcctattctaggtcaatactag

SEQ ID NO: 18105 - DNA, 201 bp, Homo sapiens
tgatttttcaaccatttagaaatgtgaaagtcattattagtgaacaggcattgcaaaaatagacagtggaccagatttggcctctaagcatggtttgctgktgcctgcttaataccgagcatgaaataagatgctcattaaatatttgttcattatgtgttcaagtatttccacaaatatatttttaatatatattattac

SEQ ID NO: 18106 - DNA, 201 bp, Homo sapiens
gaatgggtgaacttaagtcaattgagattatctagtctagggagtagaaagtcaaaaagcatgaagatgaacagagctcaagagacttaagaggcctgtgygatgacatcaagtgcaccaacacacataatacatattccaggaggaaaggagagagagaaaggggcaaatagaatggctgaagaaaaaaatggctgaaaa

SEQ ID NO: 18107 - DNA, 201 bp, Homo sapiens
aaaaaaaaaaaaaaaaaaaaaaaaatgaagtaatgctgtgaaaaataggctcggcaggaatttgcacgtcttgcatccaagtatgtctcttccttgtgtcrtattctgtgctgaagaaaacattagcatgccatgaactgaagccaaatatcagtgggttaagccatctctcatcttgttctttgccttctcttctttaag

SEQ ID NO: 18108 - DNA, 201 bp, Homo sapiens
taagttttcttgggttgatgtccttcagaaacaccaatttttcttagataagtaacttcatacattttcatataaagtacatagaaaaaccattcctagtrtagtagagctatattctgaaaaaaaaaatttttttagacaaaataaatcccctttcctcttcaccctccatccccatgattctgtgtatgtcctgctgaa

SEQ ID NO: 18109 - DNA, 201 bp, Homo sapiens
ctcttcaccctccatccccatgattctgtgtatgtcctgctgaaaattcatgtacttgtctagcatggggcttatagtatgctgtatgtaagcactaggtratggtgctggttagttatccatttgacatgctgaccattttctaatttgaacagttctagccatgttgttggaattaaaaatttagggccagacattgac

SEQ ID NO: 18110 - DNA, 201 bp, Homo sapiens
atagctaatgaactagcacagagaactctagatggaagaagacaaagaagagagatatataggtgactgtatatttacacatgattatgaggttggtgcaraaataattgtggtttttaccacaatggcaaaaacctcaattcctttgcaccaacctaataaatgtatagcaatagactaggaatgtctaaccaaagtgct

SEQ ID NO: 18111 - DNA, 201 bp, Homo sapiens
ccactctgggcaaggcatagctgaacacaaggcagcagacaactgcagacatcagtgtacctgtctgacagctctgaagagagcagtggttctcccagctyggtgtttgagctctgagaacagacagatggcctcctcaagtgagtccctgacccccgtgtagcctaactgggagacacctcccactaggggccgacagac

SEQ ID NO: 18112 - DNA, 201 bp, Homo sapiens
ccgggcagaggggctcctcacttcccagtaggggcagctgggcagaggcgcccctcacctcccggacggggcggctggccgggtggggggctgaccccctmcctccctcccggacggggcggctggccgggcggggggctgaccccccaacctccctcccggacggggcggctggccgggcggggggctgacccccccacc

SEQ ID NO: 18113 - DNA, 201 bp, Homo sapiens
taacaacgtttgtctcttctgaaagtgaatgttttagagcaaagtgaaaagctatattttattctgattttttttttcactagcattagggtggttggtamacatagcagagagagacctatttttatataagataggttcagatatattaaactcactgctttcttaaaaataaaaataagctttattttttggagcagt

SEQ ID NO: 18114 - DNA, 201 bp, Homo sapiens
tagggccagacattgacctttgcttttttaacatttcctttagtggttagctactgccttcctcaacccagtggagaccttgacagattccctattacaartaattgcttccagagctagttgttattcctgttaatttatttaggggccagtaaagtttagtgcctatatatataaaaatatatatttgtgtgcgtgtgt

SEQ ID NO: 18115 - DNA, 201 bp, Homo sapiens
ctcactgtcatgagaacagcatgggggaaaccacctccatgatccagtgacctcctaccagatccctcccaagacacttggagattgtggggtttatgggktttaaaatttcagatgagatttgggtggggacacagagccaaaccatattgatacctatttacatatatataataataataagaaaatttacttttattt

SEQ ID NO: 18116 - DNA, 201 bp, Homo sapiens
attgtattagggcccaccctaatggcctcattttaatgtaaacacctctttaaaggccctgtctccaaatatagtcatatttggaggttaaggcttcaacrtaagaatttagggttggggggcacagtttggcccataacaaccaagctgtaaaccttacagtgacatatggagattttgtttgctccacatcctcaccaa

SEQ ID NO: 18117 - DNA, 201 bp, Homo sapiens
catatatataataataataagaaaatttacttttatttctggattattaattttttctttaaatcagaagagctgataaaatattatgaaatgatttccartatctatcattatgtttcttaatgttcaaagattcttttatcatataacaaaacgtattggattattttgtttttcatttagcatttgtttagtattgag

SEQ ID NO: 18118 - DNA, 201 bp, Homo sapiens
aaaattagctgggtgtggtgatgcactcctgtaatcccagctactcaggaggctgaggcaggagaatcacttgaatccaggaggcggaggttgcgtgagcsgagatcacactactgcattccagcctgggtgacagagtgagactctgtctcaaaagaaagaacaaacaaacaaaaacataataaaattaaagaaaaataa

SEQ ID NO: 18119 - DNA, 201 bp, Homo sapiens
tgttctgggtaaaagagtacaaggggaccaggaacagggtttttacctaaagcagaagggagagagggtgggagaagtatgttatttgagtggataaggargaatactgagaaggactgcccgctttcaaactgaggttcaaggagtctaagagcttctttgctggtttcttcctttcttcatgttgggaaaagggcttgt

SEQ ID NO: 18120 - DNA, 201 bp, Homo sapiens
acagtgtatgaggcctgtatctggcaaaccctaggctttcttggaagaaaactttcttctatttgagtatattcatgtccagggatacagaagatactttygatgtgtaaactttctttttctcgctcattctctctctttccctttttttttttaatggagtcttgctctgtcaccctggctggagtgcagtggcgcaat

SEQ ID NO: 18121 - DNA, 201 bp, Homo sapiens
ctcccacctcagcctcttgagtaactaggactgtaggtgtatgccaccaagtccaactaatttttggattttttgtggagatagtgtctttgttatgttgyctaggctggtcttgaactgctgagctcaagtgatcctcctgccttggtctaccaaaatgctgggattacaggcatgagtcacctcccccagcctaaattt

SEQ ID NO: 18122 - DNA, 201 bp, Homo sapiens
aaaattatgaggcataggtgaagcttgtcttagtattatcaggaatagagtctcttagtagcaataggaataattgctaacattaaaaaaacctgtctgascaaggttattagtgccttgcatagatctactccgttttatcctcacaaataaccctgtggggctgtttctgtcattacttgtattttatatatgaggaca

SEQ ID NO: 18123 - DNA, 201 bp, Homo sapiens
caggctgtgtcatctaagttgctgattcattccaatttttaaaatttgttgtggaaatgttcacattaaaaaaaatcagctcatactgacctttgtgaaaygctttaaagaactctgttaaaaaatgttagttaaaaataagttttcttgggttgatgtccttcagaaacaccaatttttcttagataagtaacttcatac

SEQ ID NO: 18124 - DNA, 201 bp, Homo sapiens
aattttatttctcacatttttggaggccaggaagtccaagattgagtcacaggcaggtttagtttcctggtgagggctgctctttgcttctaagatggtcygttgttgccacatcctctggaggggagtaatgctgtgtccttactgggcagaaggtggaagggcaagagaatggaagactgtgaagcctcttttgcaagg

SEQ ID NO: 18125 - DNA, 201 bp, Homo sapiens
gattcagttatttacttgagaagaattgagcatggattttggtatagcaaatactgagttttaaattttcactctggctatgaataaatgattttttttttaacagatcaagaagttggtatatgtttacctggttcgatatgctgaagaacagcaggatcttgcactcctgtccataagcacttttcagcgagctctgaa

SEQ ID NO: 18126 - DNA, 201 bp, Homo sapiens
gtttttatatttccagcaccaattccagctatctccaactttttcccctcatttcttgtgttctttgagtatataactttttttttaattttaaatttttwaaatttttgagacagagtctctttccagttgcccaggctggagtgcagtggcacaatcctgcctcactgcagcttcgacctcccaggctcaggtgactct

SEQ ID NO: 18127 - DNA, 201 bp, Homo sapiens
tagattttgtttttaaggttttgtggagccattcaacattgaagagtaattggaaaaaggttttttcatttcatttataactctacccgtatagtatagadggattgatatcaacttaaaatggttgtgtttaacatatttatcaatgatgaagatgtacaaagtttgtttgctcattaagttttcatttgtacttatgaa

SEQ ID NO: 18128 - DNA, 201 bp, Homo sapiens
ttagtgccatcactacagttgtgttcaatagtagtggagatggtgggcattcttgccttgtttcagtctaaaggaaatgcttacattgtgtttgcattaaraaagatgctggccctgaagattttatctttgaaatatagtacttttgcaaggtacttcaggattacttgatatgggtcaattgttttgccttggtactca

SEQ ID NO: 18129 - DNA, 201 bp, Homo sapiens
atctgtgtaaaattggaatgtctgtttccaaaatacaccagaaagtaaaaaatattgaatacttgttcatcacaggtatttaatatttgttgaatgactgttgaattaatttgttacattcttggtgatagtaattaagtgtgtagtatcgtttttaatgtctccctcacccccctgcagtggtttcatgctcagtgttca

SEQ ID NO: 18130 - DNA, 201 bp, Homo sapiens
atattaatatagttattgtgctttcccttgattaatattagcatgctatgtatttttccatctttttacttttaacctgcctttatctttatgtttatggkgaatttcttataggcagcacatagttgagtcatgggttttaatctactttgccagcctttgtcttttaatcagcatactgatttacatttaatctaatta

SEQ ID NO: 18131 - DNA, 201 bp, Homo sapiens
tatctgtgtaaaattggaatgtctgtttccaaaatacaccagaaagtaaaaaatattgaatacttgttcatcacaggtatttaatatttgttgaatgactgttgaattaatttgttacattcttggtgatagtaattaagtgtgtagtatcgtttttaatgtctccctcacccccctgcagtggtttcatgctcagtgttc

SEQ ID NO: 18132 - DNA, 201 bp, Homo sapiens
ttcatgttgccgtttcatagccaaaccgactttattccacatgtttaaccttactcccaacccttaacccctggcaactgctaatctttctgtttccatarttttgttatttcaagaatgttatataaatggaattatatggtatataaccttcattgtagattatccattttgtcattctataatgtccttctctgttgt

SEQ ID NO: 18133 - DNA, 201 bp, Homo sapiens
aagtcacttttaaacattttgcaagagtctcaggccacagcaggttgcagagattgtttcatcctggtgtaaatcttgagatggcactagcacccttcaggctgccttggaattcagaaggcaagtgggtatattcagtgtcttttatgtgactactctaaatgccaaggtaataaaggtgagaggtgacaggataaagaa

SEQ ID NO: 18134 - DNA, 201 bp, Homo sapiens
tattaatatagttggattttaagctgtcattttacttgcttttatatgtttcatgccttttttgttccttatttctcctttattgctttttcttagattargtgaatatgttctagtgaacattttaattcttttcatggtttttttactatatatttttgaaaatattgtcttatacatggagattatacttgtagtttc

SEQ ID NO: 18135 - DNA, 201 bp, Homo sapiens
taatgtcttgcaaaactctaatacagtattacaaccaggatattgacattgatacagtcaaaactgagaacatttccatcacagggaatcttcatgttgcygtttcatagccaaaccgactttattccacatgtttaaccttactcccaacccttaacccctggcaactgctaatctttctgtttccataattttgttatt

SEQ ID NO: 18136 - DNA, 201 bp, Homo sapiens
tcctctcttccaccatatgaggtagctgtccacacaccaggaggagggccttcaccatgaattgaatcacctgccccttgatcttggacttttcagcccckagaactgtgagaaataaatgtctcttgtttcaggcacctaccctgtggtattttgttataacagcctgagttgactagtgcagtgtcttagattatgtgg

SEQ ID NO: 18137 - DNA, 201 bp, Homo sapiens
tctgaaaaaaggcaagttgagaaaaaaatctttaacctgtggctaagtggttaacatggtaagatcaaggaatagaggtgacctatgggggatgtgagttrctagtgtactagtatcttagatggggcttttgtacccactttatatttctcaaaactactgaggaaaaggattccagctcatcttaggatgctatcatca

SEQ ID NO: 18138 - DNA, 201 bp, Homo sapiens
tgcatttttattttcttaaatttaccttactctttgcagtccatgtgggttgttttttattctaggtcaagtttgtataattttcaaggatataaaattgyttaagtattttatttgtcattcaagcctattatgggagatttcttgaagcataaacctagatctctaagactaaagttgcttttgtaaaattaatcgatt

SEQ ID NO: 18139 - DNA, 201 bp, Homo sapiens
gggacactttgataggctattgctattgtgaactggactattaaaatgcttactttaaaagcttttcctgttgtacttattatcccacaaaatattatttktattttacaatctaacatgtgaccagattcagttatttacttgagaagaattgagcatggattttggtatagcaaatactgagttttaaattttcactct

SEQ ID NO: 18140 - DNA, 201 bp, Homo sapiens
ttttacaatctaacatgtgaccagattcagttatttacttgagaagaattgagcatggattttggtatagcaaatactgagttttaaattttcactctggytatgaataaatgattttttttttaacagatcaagaagttggtatatgtttacctggttcgatatgctgaagaacagcaggatcttgcactcctgtccata

SEQ ID NO: 18141 - DNA, 201 bp, Homo sapiens
ggtgcattgttaacaatataccaaagatctctgatgttacatggaatgttatagaccacagaggcttgttttattcgctcttttaggtaggctgctcttayactaagtaaatccagtgactgtatgatggtatttccccctgctgcaaatgttccttacacatctttaatttcgttttggctatagagaccctatgcaggt

SEQ ID NO: 18142 - DNA, 201 bp, Homo sapiens
atagtctatctcatgtacacatatgcttgtattattagaaaattgagatttttttttcctgtttagggtagaatcttaagtgtctgatcctctcaactcasttatatgtgttttcctttcttccatctttgttcctgctcctcccttcgttgtctaattcttttccagagctattttattaagtaattttaaaaagtgtag

SEQ ID NO: 18143 - DNA, 201 bp, Homo sapiens
aaattgagatttttttttcctgtttagggtagaatcttaagtgtctgatcctctcaactcagttatatgtgttttcctttcttccatctttgttcctgctsctcccttcgttgtctaattcttttccagagctattttattaagtaattttaaaaagtgtagtgatttgaaatatagtgtgctataccatatctgtgtgat

SEQ ID NO: 18144 - DNA, 201 bp, Homo sapiens
tgtgctataccatatctgtgtgatattttagaaatgttatgcaatattatacaatgccctgatctctgtggaaaatttactgtccaaatagaattgtctayaacaatttggtattattttcagctatcatttattcctcaagctttttgagactctcttctgtttctggtgttgtattcacagtattgtgctatgtgtatt

SEQ ID NO: 18145 - DNA, 201 bp, Homo sapiens
tctttatgagttttaggctccagatttgtagggtttataatatctaatttatacatttgctgtttgtgtcgagagaaagaactattgtatataaaaccctyagcacagtgcctaacaccacatgggatgtgattaaaaattccaaataagaaataagtactcaaaaagatgtaaagatacaatatctgtgtaaaattggaa

SEQ ID NO: 18146 - DNA, 201 bp, Homo sapiens
agtagttgtattattgttttagtttgctacagttgccatgacaaaataccacagattgggtggcttaaacaacagaaatttattttctcacagttctgatrtctagaagtgcaagatctcaaggtgttggcaggtttggtttctcttgaggcctctgtcctttgcttacaggtggccatcttctcactgtgtccgcatatt

SEQ ID NO: 18147 - DNA, 201 bp, Homo sapiens
catattcctatgttaactgccagacaaggttttatcatgcttctcactcaccttttctccttagaaacttatgggataagatccatgctcactctaacggyttaaaagtccttctatcattgggcaccagtatattccagcctcaatgcttgcctctccttgccttgagcttatagtctgttagtattctatctcaaatgt

SEQ ID NO: 18148 - DNA, 201 bp, Homo sapiens
ttaggaacattcttgcacaaatctttttatgtttttgtatatgttgggtcaatacctagatatagaattattggatcataaggtggatatattttggttcygcaagaacctgtcagtctttttcccaaagtagttgtattattgttttagtttgctacagttgccatgacaaaataccacagattgggtggcttaaacaac

SEQ ID NO: 18149 - DNA, 201 bp, Homo sapiens
gaacgcatggagtggcttgtatgctctgctaagtagtatggaccttgtcctgcagaggaaagggaaaccacttttaatagtagtataatttaccagatttkcagtttagaatattcattttttaagtccattgactttttgagcagctgttaataagaggaatcatttttgcttccatgtacgaaatagggacttttccta

SEQ ID NO: 18150 - DNA, 201 bp, Homo sapiens
tttttccaacagacaaaattgcttacccagtacatattaaatctcggcaagtatgatcaaaactacgacatcagagaccgtacaagatttattaggcagcktattgttccgaatgaaaagagtggagctttaagtaaatatgccaaaaaaatattcctagcacaaaagcctgcaccactgcttgagtctccttttaaaggt

SEQ ID NO: 18151 - DNA, 201 bp, Homo sapiens
atagagattgctgatattattgtggattattgggaagggcagtcttcagggattgatggactttcagggtcctaagtgggttgatgtcatctgtagatgcrtggtcatgtgggtgagactgctcttgattgattggcactcagaggtgggtgtatgggagtgcagttgttcctgactggctaactttcacaagcaagaggc

SEQ ID NO: 18152 - DNA, 201 bp, Homo sapiens
aactcaggcaatctgcctgcctcagcctcccaaagtgctgggattacaggcgtgagccactgtgcctggctgagtacataacttttaggtatatactgtgytggtatcttagaagggtaatcaggaatgtgaagatatttgagaaggtagatacaggctataaatagtgctagaaggaagcaatggataaatttcaactca

SEQ ID NO: 18153 - DNA, 201 bp, Homo sapiens
tctagaccatcggtttttgctgtatgaatattttctaagatattctcttcgaaatcaattttaatgagatttcctatgtgtttattttttgataactgacraaaattcataaatacaggattaattcctagatatacattaaattaattaatagctgtaaaacttttgtaatagttaaaaccttttctatgttaatattag

SEQ ID NO: 18154 - DNA, 201 bp, Homo sapiens
gggcagctagactggcttctagaatttgttcgtctctgatagaatctagattctagaccatcggtttttgctgtatgaatattttctaagatattctcttygaaatcaattttaatgagatttcctatgtgtttattttttgataactgacgaaaattcataaatacaggattaattcctagatatacattaaattaatta

SEQ ID NO: 18155 - DNA, 201 bp, Homo sapiens
gtactgtttttatatttccagcaccaattccagctatctccaactttttcccctcatttcttgtgttctttgagtatataactttttttttaattttaaawtttttaaatttttgagacagagtctctttccagttgcccaggctggagtgcagtggcacaatcctgcctcactgcagcttcgacctcccaggctcaggtg

SEQ ID NO: 18156 - DNA, 201 bp, Homo sapiens
ctgcctattcaacattaagaaatgtggctctggccacgcaccattgttcatgcctgtaatcctagcactttgggaggccaaggtggatggattgcttgagyccaggagttcgagaccatcctgggcaacatggtgaaaccttgtctctacaaaaaaaaaaaaagaaacaaacaaacaaacaaaaaaacaagaaacagggct

SEQ ID NO: 18157 - DNA, 201 bp, Homo sapiens
gaactggcttaatgtctgagcatctgccacatagtatatgtaccaattctttatgagttttaggctccagatttgtagggtttataatatctaatttatamatttgctgtttgtgtcgagagaaagaactattgtatataaaacccttagcacagtgcctaacaccacatgggatgtgattaaaaattccaaataagaaat

SEQ ID NO: 18158 - DNA, 201 bp, Homo sapiens
tgagaaggaagacttaagctgaaatttgaaagaattaaaaagtttgtccagataattataatgtttagtaataaatgtgtatgtttgtagaaagtgaaacytcatattcctatgttaactgccagacaaggttttatcatgcttctcactcaccttttctccttagaaacttatgggataagatccatgctcactctaacg

SEQ ID NO: 18159 - DNA, 201 bp, Homo sapiens
aatatttttacaatttagttaatattcttatatgagatctgctcagggattttttattcccttcaagaggaagggacactttgataggctattgctattgkgaactggactattaaaatgcttactttaaaagcttttcctgttgtacttattatcccacaaaatattatttttattttacaatctaacatgtgaccagat

SEQ ID NO: 18160 - DNA, 201 bp, Homo sapiens
cttgaacccaggagttccagaccagcctgggcaacatagtgagaccttgtctctataaatgaaaatgggaagaaaaaacaaaaaacactgggcccagagtyagaagacctggatttaagttgatgttttccatttgtagtagtgcttccttgttcaagttgctgatctcttcaaacctcagtttcctcatttctagacggg

SEQ ID NO: 18161 - DNA, 201 bp, Homo sapiens
tatctaatttatacatttgctgtttgtgtcgagagaaagaactattgtatataaaacccttagcacagtgcctaacaccacatgggatgtgattaaaaatyccaaataagaaataagtactcaaaaagatgtaaagatacaatatctgtgtaaaattggaatgtctgtttccaaaatacaccagaaagtaaaaaatattga

SEQ ID NO: 18162 - DNA, 201 bp, Homo sapiens
cctcatttctagacgggatgtgataatacttgcctcttttgtgaggatctcatgagatggtgtacttcaaagtgatttctaaactaggatattaactaacsctatttgggaaagttggtgaagacttcactgaggtagtgacactttagatcttaaagcctgaggtttttgccagggggaggaaagatggattctttaggc

SEQ ID NO: 18163 - DNA, 201 bp, Homo sapiens
tttcctagttttagttggcagattttataatgcatgtctctatcagtgaactagtatgatataaaattcttatttggaaattctccatatttgtttttggsaagtatgtatgcatagtaaaataatgactgctatctagttatttttttcctcccagttgaaaagagtttgtggtttatctacttacagtcgctttcttga

SEQ ID NO: 18164 - DNA, 201 bp, Homo sapiens
ttatgaatagtaggtagtaaagtatgggaatggatgaaatcacccagggaagacttttcttgttagacgagaaggcagtttggacaaaacccaggggacamcaggatataaagtatgaatggaagaactagaaaaagagactgagctcagaagggtgggaaaacacaggaaggtttaaaaaagaagatgctaacaggaaaa

SEQ ID NO: 18165 - DNA, 201 bp, Homo sapiens
tatattccagcctcaatgcttgcctctccttgccttgagcttatagtctgttagtattctatctcaaatgttttaagcttattactacctcttatttttcytagttttagttggcagattttataatgcatgtctctatcagtgaactagtatgatataaaattcttatttggaaattctccatatttgtttttgggaagt

SEQ ID NO: 18166 - DNA, 201 bp, Homo sapiens
tagaaatgcagctgagtgagattcatttacttagagggatgttattgaatatactttcttaaaaatacaattttattaatagtaacgcattatatttgacmtacctcaaagagtcattgtgtctcactatgggttctaaacttgtttgtgtttaagtccattttttattaatacttaattttatctagtgtctgtaccata

SEQ ID NO: 18167 - DNA, 201 bp, Homo sapiens
tatctcattgtgtattttcagtttatgtagttgctcagtgaatatttcttaaatatttatatagataaatcgttcacacattctgctcatattaaagactrtgatttgtgtgaaggtgcctagcaaagtgtttggctcataattttgcttaataaaatattttcagatccttttactcaattcagtgatttagattccatt

SEQ ID NO: 18168 - DNA, 201 bp, Homo sapiens
aatattttcagatccttttactcaattcagtgatttagattccattaacatttgctctctcattagccaatgttgttaaaaaatgaagcatgactgattcygtggaccctatacagaaggaaaccctcatctggtatctccattgtattgtagtacagcatcaccctgaagctaattttgtgtagttcacttgggtctttg

SEQ ID NO: 18169 - DNA, 201 bp, Homo sapiens
aactcaagaagtatgttaaatgtgttaattaaatttaactgaaaaaattataaataaggaacatggggaatatggttctattttcattctaaagatatacgtaactgaaaagtgtacagtattaaataaaagtggttctaacagagtattacattttagattaatattttttaaaacaaaagttttatttctaatatgcaa

SEQ ID NO: 18170 - DNA, 201 bp, Homo sapiens
gggttccatttatgatttaattcttgaaatatatttcaaattaaataagattttactacattgaatagaaatttgatgaaatactgcctgtaaacagagtsttactttccaacagattataaaaccttttatcttattttgctttgcttgcatatctccttgaaggagagttggttctgacttctacattttgtcttaata

SEQ ID NO: 18171 - DNA, 201 bp, Homo sapiens
ggcatggtagctggacaaatgagagaagaatgaataaggccctgtctcagtttgttttatgctgctataacaaaaaacctgagactgggtaatttctaaakaatataattttatttctcacatttttggaggccaggaagtccaagattgagtcacaggcaggtttagtttcctggtgagggctgctctttgcttctaaga

SEQ ID NO: 18172 - DNA, 201 bp, Homo sapiens
atgtatttgttatactactctagtaagagcttagcttatttccacaaaagatacctagaaatctctcactaacggaaaagcctaaatcagaataaaaatcygtttcctcagattttatcaatgcaaaattctggaaggtaaaatgcaagtaaatttaaggggtgtgtgtgtgtgtgtgtgtgtgtgtgtgttacaccagct

SEQ ID NO: 18173 - DNA, 201 bp, Homo sapiens
ctcacatttttggaggccaggaagtccaagattgagtcacaggcaggtttagtttcctggtgagggctgctctttgcttctaagatggtccgttgttgccrcatcctctggaggggagtaatgctgtgtccttactgggcagaaggtggaagggcaagagaatggaagactgtgaagcctcttttgcaagggccttaatct

SEQ ID NO: 18174 - DNA, 201 bp, Homo sapiens
ctgcaggaatgcaagcagaaaccatggaaagaaattttaataagccaactggaaaaattacaattgatctatgatgcttaaaatttttgtcaaaacaggaraattagctgagtcaggtggtatactgttttgagttaatgactgtaataaatagttttgtataaatctttccagacggactgtttatcccttgttctttcc

SEQ ID NO: 18175 - DNA, 201 bp, Homo sapiens
catggtagtgcaggtctatgccctgcaggaatgcaagcagaaaccatggaaagaaattttaataagccaactggaaaaattacaattgatctatgatgctwaaaatttttgtcaaaacaggaaaattagctgagtcaggtggtatactgttttgagttaatgactgtaataaatagttttgtataaatctttccagacgga

SEQ ID NO: 18176 - DNA, 201 bp, Homo sapiens
attaaaaaaacctgcctgtaataccgaattcatttaaatccagcagttttctctcagatactaagagaaaatgtgaaaaataatactgtgatgctttatayttaatggcttatcatttttgctgtactttcttttcttctttgttttccttttttgggatagagtctgtctctgtcacccaggctggggtgcagtggtgcg

SEQ ID NO: 18177 - DNA, 201 bp, Homo sapiens
agcagaggcattcctgagagtttacctctcttttttatccttttaccatcaacacttgaatgtgttgtttcatggaatcatccaagtagaaatgtcttcaytctagccctccattcccttttacctacaggcagaagtcacttacataaatgctatataagcaccattttatgatgaattaagggccattttaccttgaag

SEQ ID NO: 18178 - DNA, 201 bp, Homo sapiens
atgattttgttttactgagaaactttggagtgagcagtgtagccatttatagtcttcagtgctttctgatctaggcttgatgttgcttccaactttttagygactacacatggtagttttagctttagaagttggcagacgaggccgggcgcggtggctcacgcctgtaatcccagcactttgggaggctgaggcgggctt

SEQ ID NO: 18179 - DNA, 201 bp, Homo sapiens
gtacatgttcccttctcgtaacctcttggttgacgccttagaggcaattattggtaactgtttaatttcagttactctggtggttataaattttactttgrataaaacattttgctttatttattaatttaagttgatatcagttgacctcaattcaaggaaaaattattcatcgattgtgtaagtgctatttgagggtct

SEQ ID NO: 18180 - DNA, 201 bp, Homo sapiens
aattttaatacttctttatccacaagacagtaatactgattttcatctcacttttaatattaacaaaatgatgattatgttatccatcttaaaaattgaartatgttttgaattattaatatgtaagtcttatgttacataatgctcttaaattgatgaaattttactatccttgtcaactttaattttataaagttaatt

SEQ ID NO: 18181 - DNA, 201 bp, Homo sapiens
tattagaactattaaaattattctttgacgaatagtcaccataaagtttgttattcaaacatgaacattcattttaattgaatgactgaatactttaataytgattggcatgaaactgattactataatgcctgagtaagacctttgatgtaggggagaaacattttttaataagttactatttctttcttttctagttgg

SEQ ID NO: 18182 - DNA, 201 bp, Homo sapiens
gtgttgaaatttaacctggtgaaataaacacatcagaatttacttctcttcagaatagtattttctagacatattagaactattaaaattattctttgacraatagtcaccataaagtttgttattcaaacatgaacattcattttaattgaatgactgaatactttaatactgattggcatgaaactgattactataatg

SEQ ID NO: 18183 - DNA, 201 bp, Homo sapiens
ctgaggaaaagggtggcattggtgattcaggactgttacttttaatctcttctgtgcttctttcagtgatatgaagttcaaaccaagtcctgtgagtgctsccctgatttttggttcttatgaaggtgtttttttctgtgtagatagttgttaacttttttgtcctcggggggacgattggtggagctttctattgcacca

SEQ ID NO: 18184 - DNA, 201 bp, Homo sapiens
gtttagattcaggttatgtatccttggctgggatactaccataggtgatgcatgcttcttgaactattacatttggaggcataggttgtccatcttcatgrtgttaattttcctagtcacagggttgtccagtttctctgtggtgtcatttctgttttttttttttttttttttcaaattatctgtggggagacactgaga

SEQ ID NO: 18185 - DNA, 201 bp, Homo sapiens
cacacctcaaatttggaagcgcactcatggttatgctttcacatagtcttttaaggcttgtattaaatagaatgtttttctaatttaagtttacattttaygaagcatattgcatttgaattgaattatacatatttagtatgaataatttctatctttttcagaaatagttgttgctgaaagtgtggttgttataaagaa

SEQ ID NO: 18186 - DNA, 201 bp, Homo sapiens
ccggtggattaagatgtatatgatttgaaagtgttcttctattaaaatttatgaatttctcatatactttttaacataagttcattttagaatgattgtcsttctcattttaaactgacacaatgtgagctttgttattgtcttgattctttttctgaatattatgaacaaagtactgaatttttagattagaatttaggt

SEQ ID NO: 18187 - DNA, 201 bp, Homo sapiens
tgatcaatctcctgaacctgtcttttccacaatggctgcaaaatggtaatgtttcagctgcaactccctctgctgttctgctctttggcttcttggcctaragctctgtgttcactgatccttcactaaccatctcaatgatgcctaggtacttcctagtcatagtattatcggcaatttttgttttctgaatttaatctt

SEQ ID NO: 18188 - DNA, 201 bp, Homo sapiens
ttatttatcaatattatttatcttctcctctcttcaaacagaagcagaattagatggctttatgaaagtagatcctatacctaatttattggctaaaaagkcctgtgtattagattattggcttcaagattttcaatttctttatttaaaatgtaaagaacttatttttgtactcttattttttattttttgagacatgtc

SEQ ID NO: 18189 - DNA, 201 bp, Homo sapiens
agagatggggtcttgccatgttgcccaggctagtcttgaactcctaggctcaagcaatccgcctgcctcatcctcccaaggtgctggaattggaggcgtgyaccactgtgcttggccccttccttctttttaaaatattctcaacttttattttctgtttttttctaagttgtttttcttcatttaaaaaaaaacttcttt

SEQ ID NO: 18190 - DNA, 201 bp, Homo sapiens
agttaataatatgttataaacacgacatgttagcggtgagttagtcaatgatgtggaaaggatataacttccaatcccatatctcatacctcccattcatstgtaactacaaagaacaagttcttatgtatcctttcagaaattttttaaaaaaattaaacgatcatatatatactattctctatgtatcttgctttccac

SEQ ID NO: 18191 - DNA, 201 bp, Homo sapiens
cgtggctaaataagttaataatatgttataaacacgacatgttagcggtgagttagtcaatgatgtggaaaggatataacttccaatcccatatctcatamctcccattcatctgtaactacaaagaacaagttcttatgtatcctttcagaaattttttaaaaaaattaaacgatcatatatatactattctctatgtat

SEQ ID NO: 18192 - DNA, 201 bp, Homo sapiens
acagcttctctgggcatagagattgctgatattattgtggattattgggaagggcagtcttcagggattgatggactttcagggtcctaagtgggttgatrtcatctgtagatgcgtggtcatgtgggtgagactgctcttgattgattggcactcagaggtgggtgtatgggagtgcagttgttcctgactggctaactt

SEQ ID NO: 18193 - DNA, 201 bp, Homo sapiens
gaatttacattaatattgttgtcacccaaagtccacagtttacattagggttcatccttggtgttgtacattcttcggattttgtctgatatatgataacwtgaatacaccattgtgttttatcatacacaatagttttgctgccctaaaaattctctatgctctacttgttcatccctccctccccaccagctcctggca

SEQ ID NO: 18194 - DNA, 201 bp, Homo sapiens
aattaaaaatgaatatatttgaaacaactattgttttcagcaaagagttgaggaaaatattgctaattcagcattattttgactcaaatattgatatttarcaaaatagtatctaagatttatgcagtaatacatgttaactgatcatatttgaatctacgtaatgaagaaggtagacctaaaagaacttaataaaagtta

SEQ ID NO: 18195 - DNA, 201 bp, Homo sapiens
atgtttgttgtttcttttacttaatagaatgaaatccctatgagggcaagggtttttctgtcatttttgttcattgctgtgtcacaaatgcgaatggagamccagatgagaatagagctacagaatcaaaaggaggagggaatttcaagatgaaagagtagtggtcatgggtatcagatgtcaacagaaagagccaaagtt

SEQ ID NO: 18196 - DNA, 201 bp, Homo sapiens
acctaaaagaacttaataaaagttaatgtattttgagggtaaagtaggtgttatggtattaactttcctaaatctttactgttttggtgacaggcaaagargaatttgggaagaaacatgtaatttatatcagaattttaaatagatccttatgacatacgtgagaagctgcatattacatcaggttgaaacagtgcctag

SEQ ID NO: 18197 - DNA, 201 bp, Homo sapiens
ataggtgcacactatcatgcccagctaattttttaaaaatattttttgtagagactgggcctcactatgttgtgcccaggctggtcttgaactcctggccktaagcaatcctcttgcattggcctcccaaagtgcttgattataggcatgattcaccatgctcagcctctggatgcttttaagatttttctcattgtttct

SEQ ID NO: 18198 - DNA, 201 bp, Homo sapiens
ttccctgaacctcagaattattagtttctcttcctatattaatgcagtatttgttgttgaagactagcttttctgttaaccatgaagagcaaaacctttayctttaatattgagattctgttttcttgtttttagtttcagagagcaggtgcttgttctgggcactctgggaatttgggctttagatgagcaaaccaagtt

SEQ ID NO: 18199 - DNA, 201 bp, Homo sapiens
ctatgaagcggattgttggggtaggtaaaatactcatttacttcaattttggaaaaatggacaagcagtgatcatattattatatatatatataaaaataygttaaataccaagtctaatattctgtttgcccttaatattaacttagaatttcctgtccaaaaatgttaaagaaaaaagtacattattgaagtgtcaaaa

SEQ ID NO: 18200 - DNA, 201 bp, Homo sapiens
atatataaaaatacgttaaataccaagtctaatattctgtttgcccttaatattaacttagaatttcctgtccaaaaatgttaaagaaaaaagtacattaytgaagtgtcaaaaatcaagaaacttaggttttaattttatcttttctctgttttaatttccctgtatctaatttcaaggtatttctactatgagaatgag

SEQ ID NO: 18201 - DNA, 201 bp, Homo sapiens
taaagaatgattttttttgtcctttcacagcctaaatgttctgagcatactttcatctgttttttaaattctcttactaccaatagaaacactttattcastttagaagcctagaacttctaataaatattattaaatataagagcattcaccagtgttcagctgtaaagcaaaacataaacaattgattaataagttatg

SEQ ID NO: 18202 - DNA, 201 bp, Homo sapiens
ctcttttcctttcttgatatattaaagtccaaataacaggtatcagcatgctctgttaaaaagtgaggtggtatgaaaatcaaatatattaaagtcaagtwctaattgtatctgtaggacatctgtaagtgacttgatccttgctttcatgtttatgtcatttggcagtataggggcaattttgaggattccattgtaaat

SEQ ID NO: 18203 - DNA, 201 bp, Homo sapiens
tatgaaaatcaaatatattaaagtcaagtactaattgtatctgtaggacatctgtaagtgacttgatccttgctttcatgtttatgtcatttggcagtatrggggcaattttgaggattccattgtaaatttttgatttgttaatgttatgctctatacataggagtatttatgggcaggcagttcttgctttgcatggct

SEQ ID NO: 18204 - DNA, 201 bp, Homo sapiens
gcgattctcctgcctcagcttcttgagtggctgggattacaggcatgcaccaccatgcccggctaattttgtgcttttagtagagatacggttttgccgtrttggtcaggatggtctcgagctgctgacctcaggtgatccacctgccttggcctcccaaagtgctggaattacaggcgcgagccactgcgcccggccgag

SEQ ID NO: 18205 - DNA, 201 bp, Homo sapiens
ggtttactcatctattaaatgggaacaataatagctacacacgcttcatagagactttgtgatactaaaataagacagtgttataaacttcagaaaataawaccactaccacgtggctaaataagttaataatatgttataaacacgacatgttagcggtgagttagtcaatgatgtggaaaggatataacttccaatccc

SEQ ID NO: 18206 - DNA, 201 bp, Homo sapiens
atattctgagacttggtttactcatctattaaatgggaacaataatagctacacacgcttcatagagactttgtgatactaaaataagacagtgttataarcttcagaaaataataccactaccacgtggctaaataagttaataatatgttataaacacgacatgttagcggtgagttagtcaatgatgtggaaaggata

SEQ ID NO: 18207 - DNA, 201 bp, Homo sapiens
atgaagaggcacgggctccttcctcattgtgaattcctttctcttgtgctcaggagttcagggttgctgctatgaaaatatgcttcagacatgattttgtyagcatactgttatacatctgatcatctttagttatgaagatttaaatctcttgtgttctaataattccaggtttgataactgatctgtcttgtttattat

SEQ ID NO: 18208 - DNA, 201 bp, Homo sapiens
tcccagtcttcaaaggcatctttacctcccagtcttggattattccatatgtatggttcattcctctgtgttttcaccataaaaatgcataacaattatarggtctttatcttgtttttaagaaactcagactttatttggagagattaggctaatgtgaactaaccgtcagtaattcaagtatacaattagtgttaaatt

SEQ ID NO: 18209 - DNA, 201 bp, Homo sapiens
gtgggagttgtgggagtttggggcgaatgtgtgtaggggtctctagtagttttcaaactttagtgaaaaggaaaccacttggtgagcttagatcccacccstgaagacactgattgaattggacttgggctgggctcaggagtctgaattttgagcatcgtcttctagtttatttaccgttcgccggatcagactttaata

SEQ ID NO: 18210 - DNA, 201 bp, Homo sapiens
acttaaaaatttcttacttattatgtttgttgtttcttttacttaatagaatgaaatccctatgagggcaagggtttttctgtcatttttgttcattgctrtgtcacaaatgcgaatggagaaccagatgagaatagagctacagaatcaaaaggaggagggaatttcaagatgaaagagtagtggtcatgggtatcagat

SEQ ID NO: 18211 - DNA, 201 bp, Homo sapiens
aggccctaaactgggagcatgcctgggacgtttggaggaacagtaaggcatggccagagcagatcaggcaagagggtgagcagcaagaggtgagagaggcrggcgacggggacagttgtggaggggcagtcatgaaaggatggttgtattgggctgtgcagactgttgtagggacttcggctttttctctgagtaaaatgg

SEQ ID NO: 18212 - DNA, 201 bp, Homo sapiens
cgcaccacttggatagtagcatcttttattggagtggttctctatgcctaaagaggtgcctgtgttttggaattttttggtagggctccataaaggtccarccttcccttcgttgaatatttttatacatccttttttgggcatgtatctctgattggaaattgctattccttatcacttttccagtccatgatttcctgg

SEQ ID NO: 18213 - DNA, 201 bp, Homo sapiens
acttggatagtagcatcttttattggagtggttctctatgcctaaagaggtgcctgtgttttggaattttttggtagggctccataaaggtccagccttcmcttcgttgaatatttttatacatccttttttgggcatgtatctctgattggaaattgctattccttatcacttttccagtccatgatttcctggatgtaa

SEQ ID NO: 18214 - DNA, 201 bp, Homo sapiens
ttttttttaaaaaaagatagggtctcacccaggctgagtgcagtggtgtaatcatagctcactgcagccttgaactcctgggctcaaacaatcctcttgcstcagccttctgagtagctaggattataggtgcacactatcatgcccagctaattttttaaaaatattttttgtagagactgggcctcactatgttgtgcc

SEQ ID NO: 18215 - DNA, 201 bp, Homo sapiens
gcaagaccctatctcaaaaaaaaaaaattaccattatgtgagcactttttagtttttattttattttttaagtattggtttctatttagattccacatacyctgattcttatacctttcaaatttgttgaaaccttatatagtctattttggtaaatgtcctatgtacaattgaaaagaatgtttattctgcagttgttgg

SEQ ID NO: 18216 - DNA, 201 bp, Homo sapiens
aaggtattactttatagttcttgaaatatattctttttttttttttttttgagacagagtctcaccctgtcgcccaggctggagtgcagtggcacgatctyggctcactgcagcctcaacctcctggtctgatcctcccacttcagcctcctgagtagctgggcccacaggtgtacaccaccatgcctggctaatatatat

SEQ ID NO: 18217 - DNA, 201 bp, Homo sapiens
ccctattttctcctctctcctattcctacatacacacagagtcccatctattttgatactttgtatattacttaaataattttggatgatagtgactgcaratgatttttttcttagcattcttagtattgtaaaacggtttttcattcatgtagcaaaactataaaaaaagtttcaatatagtttggtcaataggatatg

SEQ ID NO: 18218 - DNA, 201 bp, Homo sapiens
tagagtagtttctcttttatttttaattatggtaaaatacacctgaataactttatcatcctaaccattttttcccctatttgacaaggtatcaagcaacytaaccattgttaagtgtgcagttcagtggcattaaatatagtcatattgttaggcaatcgttaccaccatccctctccagaactctttttatatgcacca

SEQ ID NO: 18219 - DNA, 201 bp, Homo sapiens
ttatatccaactttttccccatataatttattcatacttctccagtgggtccatttcttttgaactgtggaatgtttttatatgccctgttatttttttcytccttaagtcatcctcagaaagcattagagttatttatctttatttttccagaatttctgtttgaaattggttctgttgtaggctctaaattcataagat

SEQ ID NO: 18220 - DNA, 201 bp, Homo sapiens
gcctcccgggttcacgccattctcctgcctcagcctcccgagtagctgggactacaggcgccctccaccacgcccagctaattttttttgtatttttagtwgagacggggtttcaccgtgttagccgggatggtctccatctcctgacctcatgatctgcccacctcggcctcccaaaatgctgggatttacaggcgtggg

SEQ ID NO: 18221 - DNA, 201 bp, Homo sapiens
actcactgcaagctccgcctcccgggttcacgccattctcctgcctcagcctcccgagtagctgggactacaggcgccctccaccacgcccagctaatttkttttgtatttttagtagagacggggtttcaccgtgttagccgggatggtctccatctcctgacctcatgatctgcccacctcggcctcccaaaatgctgg

SEQ ID NO: 18222 - DNA, 201 bp, Homo sapiens
ggctggagtgcagtggtgtgatcttggctcactacagcctcgacctcctgggctcaagcgatcctcccgcctcagccccacaagtagctgggactacaggygcttacaaccatgcttggctagttttttatatttttttttttgtagagacagggtttcgccatgtggcccaggctggtcttgaactcctgagctcaagca

SEQ ID NO: 18223 - DNA, 201 bp, Homo sapiens
acattcctggagtaattgtgtcaaataatacaaataggtcaagtaagatgattactgagaagggagttttggatttgtcactgggtggactttggtgaccktgacaagcagtttaggtgcactggtggggctgaaagcctcatgagtgggctcaagagagaaggaagaagaagaattgtggttagtatttttttttttttt

SEQ ID NO: 18224 - DNA, 201 bp, Homo sapiens
ggtagagtagaaatcaatgaaattgagtagagaaaaccagtagagtaaaatcagtgaaatgaaaaactagtccttggaaaagatagataaaattgataaayctgtagacagagtgaccaagaaaaaacaggacaaattatcaatatcagaaatgcaagaccctgttgacatttaagggataattagggaatattttaggca

SEQ ID NO: 18225 - DNA, 201 bp, Homo sapiens
atttattttctcccttttctgtcagtctgccagttctctcttagccttcctattatgtgtgtattatattttttggatccatcctctgtttgcctctgtcwtctcccctgtcaaattgacctctctaacctttcctgtcatttttaggattttttttgagctggcattgaagtcagtttagaatttttgacattatccttt

SEQ ID NO: 18226 - DNA, 201 bp, Homo sapiens
tgattcctccctctgttttgtctcttaatatttttgactccttatcaacatctggcattagccatcctttgggaggtacctagtattggcatatttttttyttttatgttttagttatgggtagaaatgacgaagtccttagaaattggtggtaaagtagctagttccctgaggacttctagttcttgttgtaaacagaaa

SEQ ID NO: 18227 - DNA, 201 bp, Homo sapiens
gtttgtctgctatttattttctcccttttctgtcagtctgccagttctctcttagccttcctattatgtgtgtattatattttttggatccatcctctgtytgcctctgtcttctcccctgtcaaattgacctctctaacctttcctgtcatttttaggattttttttgagctggcattgaagtcagtttagaatttttga

SEQ ID NO: 18228 - DNA, 201 bp, Homo sapiens
cagacagatggttggttgaaatgttcttttttgctgcatgaaaagttataaatgctcatagaatgacaaatgtattacagtgaaataatttgacagtattkcacttgtgtatataaatgaactactgacaaaaacaaattgcctgcagtccaaattcaaaatttaaaatgaagagcttaaagtagaataatcaagaaggaa

SEQ ID NO: 18229 - DNA, 201 bp, Homo sapiens
tgtgtatatatataacatgttctttatccacatgttgattgatgggcatttgggctggttccatatttttgccattgcaaattgtgctgctataaacgtgygtgcaagtatcttttttgtataatgtcttcttttcctctgggtagatacctactggtgggattgctggatcaaacagtagttctacttttacttttttaa

SEQ ID NO: 18230 - DNA, 201 bp, Homo sapiens
ggagtgcattgtgcaatctcggcttactgcaacctctgcccctggggttcaagcttctcctgcttcagtctcctgagtagctgggattacaggtgcccccsctccccagccccaccatgcccagctagtttttgtatttttaatagagatggggtttcaccatgttggtcaggctggtctcgaactcctgatctcaggtga

SEQ ID NO: 18231 - DNA, 201 bp, Homo sapiens
cccgcctcggcttcccaaagtgctgggattacaggcatgagccactgtgcccggctgacaatgtgatttttaaaagtagaaataaactttcaattaaatgyctgtactctattaaattcatcttgctacctttgttttaaaatgtttactttctcttttctctactatagcttgaaattttgacaaacttggcaaatgaag

SEQ ID NO: 18232 - DNA, 201 bp, Homo sapiens
cgaagatgaaataaagactaagagtatccatttctaacatgtttactttaatgaaatgttaatagacgttgtgtaggctgaagggaaatgataccagatgkatatttaggcggaccaatcaaaatggtaaatacgtataaaggactaattttattcttaagttatcccactatctgagaggtttttaatatgggtggctaa

SEQ ID NO: 18233 - DNA, 201 bp, Homo sapiens
ttctggaagatagaacaggacctttttttattcccagtgcttaatacataataggtgctcatcaaatgtgtttggaatgaattaacccttcctattttccagagtcatcagtatagaacccattaacactgctgtcagtttaaagaactccattggtgtttgagtgtttatttatttttattttatttattttaagttcca

SEQ ID NO: 18234 - DNA, 201 bp, Homo sapiens
gtgatccacgctcctcggcctcccaaagtgctgggatgacaggcgtgagccaccgcacctggccacaatttctacttttaggattgtactatgtcttgtcrctcagtctacttctctgtctgtatgccctcctgtagtgatctcatccctttccaaatgcatattgctaaccagtgctgtctcctgtattctgtagccttt

SEQ ID NO: 18235 - DNA, 201 bp, Homo sapiens
atttacaaggtttcctcaataagatcaacagctagtttctcattagaaaccatggggccagaaggtagttgaagaaccatgtttgaagtgttgaaagaaayaaaaaagtcaacaagtaagttcttctttggcaaaactttccttcaaaaatggagaaatcggtacatgcctgtattggtataaacagtccaatgttttaga

SEQ ID NO: 18236 - DNA, 201 bp, Homo sapiens
atgattttgttagcatactgttatacatctgatcatctttagttatgaagatttaaatctcttgtgttctaataattccaggtttgataactgatctgtcwtgtttattatgtttagctaattgaaatttatggtcattagatctggtactagagctgttaacatatttgcttgctacatatgtaaactggatcctacttt

SEQ ID NO: 18237 - DNA, 201 bp, Homo sapiens
agttcagggttgctgctatgaaaatatgcttcagacatgattttgttagcatactgttatacatctgatcatctttagttatgaagatttaaatctcttgygttctaataattccaggtttgataactgatctgtcttgtttattatgtttagctaattgaaatttatggtcattagatctggtactagagctgttaacat

SEQ ID NO: 18238 - DNA, 201 bp, Homo sapiens
cataagcatgacatgaagaggcacgggctccttcctcattgtgaattcctttctcttgtgctcaggagttcagggttgctgctatgaaaatatgcttcagwcatgattttgttagcatactgttatacatctgatcatctttagttatgaagatttaaatctcttgtgttctaataattccaggtttgataactgatctgt

SEQ ID NO: 18239 - DNA, 201 bp, Homo sapiens
actcagactttatttggagagattaggctaatgtgaactaaccgtcagtaattcaagtatacaattagtgttaaattgtgtaattcaacttttcagtgtgrcatacctattgaaaattatttgttataagcctttgtttgtgtaaacagtgatttactgaagaaaatggaaatgctggaattttgaaatgttaaggacatt

SEQ ID NO: 18240 - DNA, 201 bp, Homo sapiens
cccagtcttcaaaggcatctttacctcccagtcttggattattccatatgtatggttcattcctctgtgttttcaccataaaaatgcataacaattataakgtctttatcttgtttttaagaaactcagactttatttggagagattaggctaatgtgaactaaccgtcagtaattcaagtatacaattagtgttaaattg

SEQ ID NO: 18241 - DNA, 201 bp, Homo sapiens
cttaattacaatagtaaagctactaaatttgtaaatctcttttcctttgagagcatcttggtgtattagaaggaagactgaggctcggaatggtggccccytgcctgtaatcttagcattttgggaggcccaggcaggaggattgcttgaacccaggagttccagaccagcctgggcaacatagtgagaccttgtctctat

SEQ ID NO: 18242 - DNA, 201 bp, Homo sapiens
gactaattaatttttcttaattacaatagtaaagctactaaatttgtaaatctcttttcctttgagagcatcttggtgtattagaaggaagactgaggctsggaatggtggccccttgcctgtaatcttagcattttgggaggcccaggcaggaggattgcttgaacccaggagttccagaccagcctgggcaacatagtg

SEQ ID NO: 18243 - DNA, 201 bp, Homo sapiens
tttttcccaagcatttttttcctcaagtacagtttccagtccaagataatatatttaatttagttgccatgtctctttaatcttctttaatctgggatagktccttagccttttttgtctttcatgaatttgacatatctaaggattgcaaagcctattattttattttatgttaatcagtttttgggtttgctggtgttt

SEQ ID NO: 18244 - DNA, 201 bp, Homo sapiens
tgagtcattttcatttaatagttttccattggaaagcatctttacttctgtctggatttttggagatacacattaccttggaatatggatacaatgctgtmatagaaatatgtttcagactttgagtactcattcacatgatttagcatagtcacttagaattattttgtaaggaagatctgtcatttctccctcatttat

SEQ ID NO: 18245 - DNA, 201 bp, Homo sapiens
cctgtaatcccagcactttgggagggtgaggtgggcggatcgcttgaggccaggagttcgagaccagcctggccaacatggtgaaaccccgtctctactamaaatacaaaaattagccgggcgtggtggctcgtgcctgtaatcccagctactcgggaggctgaggcaggagaatcgcttgaacccgggaggcggaagctg

SEQ ID NO: 18246 - DNA, 201 bp, Homo sapiens
gggagcttgcagtgagcgagatcacgccactgcactccagccagggtgacagagcgagactctgtctaaaaaaaaaaatatatatatatatatatatatatataaaaatatatacaaatatttaaaaatatgtaaatatataaatatttaaaaatatatatgtaaatatataaatatatataaatatgtatatatttgagg

SEQ ID NO: 18247 - DNA, 201 bp, Homo sapiens
gcaaaatgtttagactgaattaacctgtatatcggcatcaatctgtttcgcaaattaatttacttttatggtttgtgaacatctacgatgttttctcttasatttttgtcagatttggggccaggcactgcggctcacgcctgtaatcccagcactttgggagggtgaggtgggcggatcgcttgaggccaggagttcgag

SEQ ID NO: 18248 - DNA, 201 bp, Homo sapiens
gagcttgcagtgagcgagatcacgccactgcactccagccagggtgacagagcgagactctgtctaaaaaaaaaaatatatatatatatatatatatatawaaaaatatatacaaatatttaaaaatatgtaaatatataaatatttaaaaatatatatgtaaatatataaatatatataaatatgtatatatttgaggat

SEQ ID NO: 18249 - DNA, 201 bp, Homo sapiens
gtcaagaaggatgtgggggaaattaattagtaaaatatgagggcagagagataaggggcagagtggaaggcggagacctgattgtgtagggccttgtaaartcattgttaaggtctttgattttactctgagtgagaagggatgccatttggagagttttgagcagaggggtgaaatgattgtttaccctttaaagggaca

SEQ ID NO: 18250 - DNA, 201 bp, Homo sapiens
taatttcatttctattgagagtgtatttataaaacattatctttgctttaaagaaactgcaaagccttctccagtataaattggtccccatttttttaaattttttttttttttggtttggtccagcttaaatgtatatttttaaagaaactaaaaaaagtattctatggtagtatttcatttcatacatgtacatatttt

SEQ ID NO: 18251 - DNA, 201 bp, Homo sapiens
aagcgattctcctgcctcagcttcttgagtggctgggattacaggcatgcaccaccatgcccggctaattttgtgcttttagtagagatacggttttgccrtattggtcaggatggtctcgagctgctgacctcaggtgatccacctgccttggcctcccaaagtgctggaattacaggcgcgagccactgcgcccggccg

SEQ ID NO: 18252 - DNA, 201 bp, Homo sapiens
tgcagtggcacgatctcggctcactgcaatctctgcttcctaggttcaagcgattctcctgcctcagcttcttgagtggctgggattacaggcatgcaccrccatgcccggctaattttgtgcttttagtagagatacggttttgccgtattggtcaggatggtctcgagctgctgacctcaggtgatccacctgccttgg

SEQ ID NO: 18253 - DNA, 201 bp, Homo sapiens
agccttcccaaatacaataagcacaaacaagcccagactgtgaagactacaataaatacctaacttcaatgcccagagactgatgaacatctgtaagcatsaagaccatccaggaaaatatggcctcaccaaacaaactacataaggcgtcaggggccaatactagagaaacagagagatacgtgacccttcagacagaga

SEQ ID NO: 18254 - DNA, 201 bp, Homo sapiens
tgatatgaagttcaaaccaagtcctgtgagtgctcccctgatttttggttcttatgaaggtgtttttttctgtgtagatagttgttaacttttttgtcctyggggggacgattggtggagctttctattgcaccatcttgctctgcctctgagattgctttttctctttctcttttagagaatctgtttcaactgtctgga

SEQ ID NO: 18255 - DNA, 201 bp, Homo sapiens
cacacctcaaacgggccgggagccgggcagttagccacccgctgcctccccttccgcagtccggctcgcagccgctcagctacctctaaagcccggagcargaaagtccgcgcaggcctggatggcccgggtggtaatctagcaggcctgcacactgcgcatgcgcagggggtggactgccaggtcggctcagggagccgt

SEQ ID NO: 18256 - DNA, 201 bp, Homo sapiens
aatgtttcttccagttggaagtgtgactttttttcctctgtcagaaaacttcatggctatataaaagatttttcagttctggagatatgggaaagctggaycacagcccatggagttattactttttatctttctgtaagaatatacagtgttagaattctaaggcagtaagggcctcaagtcccttcttgtcaatgctct

SEQ ID NO: 18257 - DNA, 201 bp, Homo sapiens
aaataaatatgtaaaggaaaaatctattcaaaatgtgaggagaaattgataaaatagttacaatgtgtgactgtaatgtatttctctcatattagatattyctagtagacagatataagtaagaaaattaagtaatcaaaaacttatttagtaaatatagctaaaaccttatatctcttgaacagataatacccactttta

SEQ ID NO: 18258 - DNA, 201 bp, Homo sapiens
cacctgtaattctggtggtatagcacagagttccttccagcctccttcctttttatatttgaaactgcctattcaacattaagaaatgtggctctggccasgcaccattgttcatgcctgtaatcctagcactttgggaggccaaggtggatggattgcttgagcccaggagttcgagaccatcctgggcaacatggtgaa

SEQ ID NO: 18259 - DNA, 201 bp, Homo sapiens
aatcccggctactagggaggctgaggcaggagaattgcttgaacccaagaggtggaggttgcagtgagccgagattgcaccactgcactccagcctgggcracagagtgagactctgtctcaaaaaaaaaaaaaaaaaaaaaaattaaattagctaggcatggtggcatgtgcctgtagtcccagctatttgggaggctga

SEQ ID NO: 18260 - DNA, 201 bp, Homo sapiens
ggagcatttagcccatttacatttaaagttaatattgttatgtgtgaatttggtcctgtcattatgatgttagctggttattttgctcgttagttgatgcwgtttcttcctagccttgatggtctttacattttggcatgttttttgcagtggctggtactggttgttcttttccatatttagtgcttcctttaggagctc

SEQ ID NO: 18261 - DNA, 201 bp, Homo sapiens
ttgtgcttacttgacttgaatcttagttcttctatttaatagatacggtactttagtcaagttacttaccctgtctgtgtttcattttcttatctgtaaartaagaataaatacttgtttattgagttgtgaggataaaatgagttaatttatgtaagacatttagaacagtgtctgacatgtagttaatgctacctataa

SEQ ID NO: 18262 - DNA, 201 bp, Homo sapiens
tgtatctctttttcttaattaggttttgttacttgaggatcttgaacttttttgtctctcacttgctacctttcagaataaatatttgttgttaactttayggattaatatttgttctgccttgttcactggatattgtgagactgaaatgagaaaaagatgctttgaaaagtaatgtcacagctgggtgtcgtggcacac

SEQ ID NO: 18263 - DNA, 201 bp, Homo sapiens
accataagcaatcatatttgatgccccttaattagagcacctttttttctttccaggttctttttccacctcagcaatcgagacaatacatttgcttaccrtgctgctctcctaagtgttcttttgcatgtaaattaatcttgattcagtttacactgtcatgctgagtggtacaaattgcctataacaataaaacagcat

SEQ ID NO: 18264 - DNA, 201 bp, Homo sapiens
tttgttttttactttttctatatatcttgtatgtttttggtttgaggttaccatgaggcttgcaaatactatcttataatccattattttaacctgatagkaatttaacactatttgcataaacaaacaagcaaaaagaaaactaataaaaactccgtgctttaacttcgtctcctcactttttaaccttttgttgtttct

SEQ ID NO: 18265 - DNA, 201 bp, Homo sapiens
tatgccagggacagtatctcttcataaaacacacctcaggagaagcagtttgccagccccctaatactttctgatgttttgatgtcctgcatatttttccrattaagttttgagtgccatgtttttagttgtatttccacattcattattctcacgtagaccccttcagcgggtttgccatatatgattatttttttaatg

SEQ ID NO: 18266 - DNA, 201 bp, Homo sapiens
tggcatataatggatgttgaataaataaatgtgctaggcccagtgataagtgctttatgattttattaagtcttcatgacaacctatttgaaatagacatsagcttttagttctgttgatttttctctattgtagttttgtttcatagaggctttgtgatactaaaataagatacaagcttcagaaaataataccaggtag

SEQ ID NO: 18267 - DNA, 201 bp, Homo sapiens
aagtgttgaacagtcttccactttcaagtatactaagagaatggatgagctttttaaaacttgggcaaaaaattaggagtagtaaactagagaaatctgcrtatttaaggaagactcatttgtctcttgttcttttactaaagcaggcaaccaatataaatgcaagcataattatccattattttggcactgattgataca

SEQ ID NO: 18268 - DNA, 201 bp, Homo sapiens
tggttgtctccttgtacttcgagacctcagatcacttatccgtggaggtcttttgtgatcacccagtcttactttattgcattccttattttaattgtttstgtactacttatctgatctttctttatgtttttgttcctccctgctttcttccttctctgccttgctctctccctctttacttccctcccttctcctttt

SEQ ID NO: 18269 - DNA, 201 bp, Homo sapiens
cctggctaatttttttgtatttttagtagagatggagtttcaccatgttggccatactggtctccaactccggacctcaggtgatccgctcgtctcagcckcccaaagtgctgggattacaggtgtgagccaccgtgcctggccacaaggatatattttcaatgtcatacagatttatttaattttgtatagtggctgaat

SEQ ID NO: 18270 - DNA, 201 bp, Homo sapiens
tacattttttaactcaatataggatatagtgtttctctttgtttttaatacccaagtgctatttctttaaaaatctttcatagtcctgcttttgtcagaamcgacacttgaaactctcttgttaacaagtcagttcagcctgtgttttctggattgtctgctaagtgcaaggtactttagtaggtgctgtaatagataaat

SEQ ID NO: 18271 - DNA, 201 bp, Homo sapiens
ccattttattggcagatgatgaagctcattaacaaataacagaaacattctaatccagggaacatggttatggtgacagagaaagtgcacaagcattcttrcacgggcaagtgtgagagcgtaaggaggatgggtgtgtgatttcagagggttcgctaattttgtagttatgattttattttccatgcatagtatggtcat

SEQ ID NO: 18272 - DNA, 201 bp, Homo sapiens
gtacagatttgtagcctaggagcaataggctatatcagtagtccccaacgtttttggcaccagggaccagtactgtggaagacaatttttctctggacccrgggtgggtaggatggcttcaggatgattcaaaagcattacatttatggtgcactttatttctattattattacattgtaatatatgatgaaataattata

SEQ ID NO: 18273 - DNA, 201 bp, Homo sapiens
agctgaggtgggggatcacttaaacctgggaggtcgaagctgccgtgagctatgattgagccactggactctagcctgggagacagagtaggatctgtctaaaaaaaaaaaaaattacttataacccagttagccagagaaaactagtaaaatatttaaatatatatcttaagttactaaatatttcttgtttattgtgtc

SEQ ID NO: 18274 - DNA, 201 bp, Homo sapiens
tgcagtggcatgatcgtggcttactgtagccttgacctcttgggtttaggtgatcctccttcctcagcctcctgagtggctgggactacaggtgcatgccrccatgtccagctaattttcatattttgaacagagacagggcttcaccatgttgcccaggctggtttcgaactcccaggctcaagcaatctgccaaccttg

SEQ ID NO: 18275 - DNA, 201 bp, Homo sapiens
ttgtccaacgacgcatttctcagaacattgttaagcaatgcatcactggattatagcattttaaggataggtactttaaacctactttttttttggagacrgggtctcgctgtgttgcccaggttggagtgcagtggcacgatcttggctcactacaacctctgcctgccgggttcaggtgattctcctgcctcagcctcc

SEQ ID NO: 18276 - DNA, 201 bp, Homo sapiens
aatttttaaaatttgttgtggaaatgttcacattaaaaaaaatcagctcatactgacctttgtgaaacgctttaaagaactctgttaaaaaatgttagttaaaaataagttttcttgggttgatgtccttcagaaacaccaatttttcttagataagtaacttcatacattttcatataaagtacatagaaaaaccattcc

SEQ ID NO: 18277 - DNA, 201 bp, Homo sapiens
aaatagttcttataaactcaattagactaagttggataagccaaaatcaaaacagttgtattcttgtggccagtttatgaattagattaaattagtactgkatttaaatgacttgataaaccatactttctttgtagatttcttgagtaaaatcaattttacttatgattaatttagtagatatttattaaacactatgtg

SEQ ID NO: 18278 - DNA, 201 bp, Homo sapiens
gtccttcagaaacaccaatttttcttagataagtaacttcatacattttcatataaagtacatagaaaaaccattcctagtatagtagagctatattctgaaaaaaaaaatttttttagacaaaataaatcccctttcctcttcaccctccatccccatgattctgtgtatgtcctgctgaaaattcatgtacttgtctag

SEQ ID NO: 18279 - DNA, 201 bp, Homo sapiens
gtagatttcttgagtaaaatcaattttacttatgattaatttagtagatatttattaaacactatgtgcttgttatatataattctgaattgataattttyaactactctccctttgacaccttatggccatgatatctgagcttctaatttgatatgtttattagttttatggcctgtggtataagaaagtccaaatatc

SEQ ID NO: 18280 - DNA, 201 bp, Homo sapiens
tgatattgaactggatccttttattatacatcattgagacagttattgaaacttacgtgcatagtgacaattgtgtgaaagtaatgcatcagtttaatgayctgattttcttcgttgtactgtagtctgtggaacatgtccttgtttataggaaatatacatagaagtttttggggataatgtagcatcagattggcatct

SEQ ID NO: 18281 - DNA, 201 bp, Homo sapiens
taaatgatttgtactcagaatatgtaaagaactcctcctacagtctttgccttctaattggagcgtttagatcatttgctgttttattttttttgtttttktttttttttcagtaggtttttggtgaacaggtggtgtttggttacatgcataagttctttagtggtgatttctgagatttcggtgcacccgtcacccaag

SEQ ID NO: 18282 - DNA, 201 bp, Homo sapiens
  misc_feature (101)..(101): n is a, c, g, or t
agcctatcagctggaaagacttaatagatctacaaaagtgaacagtttatagccaatatctgtttattgatggactgattatttatattgctgataggaancagcctaattagaagtccactgtctttaattcagctgagtgagttggcatggtagctggacaaatgagagaagaatgaataaggccctgtctcagtttgt

SEQ ID NO: 18283 - DNA, 201 bp, Homo sapiens
agatcctagatgtagcactctaatgggaaatgtcttaatttttttcagtctacagttggtctggaatgtgatccagctgataaatattgagcttttactayatgccaagcaatgtaataagtccttgcaatatacagatgaataagaaatggttgttgtactaaatagcctcaagttcacttccaggcagatgggataaat

SEQ ID NO: 18284 - DNA, 201 bp, Homo sapiens
gttacttcacttagaataatagtctccaattctatctagtttctgtgaatgccattattttgttccttttttatagctgagcagtattccatggtgtgtakgtgtgtgtgtgtgtgtgtgtgtgtgtatatatataacatgttctttatccacatgttgattgatgggcatttgggctggttccatatttttgccattgca

SEQ ID NO: 18285 - DNA, 201 bp, Homo sapiens
gaatatgatgatttacagtaaagaaactagtctagttactgacaaaaagtgtattcttattaggaaaaaaaactactgatttgggtttatcctactgagaytttctaagtaggatgctgaaatctccccgcccctcttttttttcagtctgtgaagaaaaaaatggttagaaataagtatcaagagtagaaaacactctta

SEQ ID NO: 18286 - DNA, 201 bp, Homo sapiens
aattctatctagtttctgtgaatgccattattttgttccttttttatagctgagcagtattccatggtgtgtatgtgtgtgtgtgtgtgtgtgtgtgtgtrtatatataacatgttctttatccacatgttgattgatgggcatttgggctggttccatatttttgccattgcaaattgtgctgctataaacgtgtgtgca

SEQ ID NO: 18287 - DNA, 201 bp, Homo sapiens
aacaggccacctacagaatgggagaaaaattttgcaatctacccatctgacaaagggctaatatccagaaaaaacaagaaaagagcaaccccatcagaaamtgggcaaagtatatgaacagacacttctcaaaagaagacatctgtgcagtcaacagacacatgaaaaaatgctcatcctcattggtcatcagagaaatgc

SEQ ID NO: 18288 - DNA, 201 bp, Homo sapiens
ggccaaacagggtgaatatgaaaaactatgaaaaagatcacgtcctggtgaatttttgataaggagaagaatatcctattatcttccaaagcagagaaaamagcagtttacctaaaaatggacaagaatgagaatggaatcaaatttcacatcagtactcttatcagttctggaagccagaaggtaaaggaaatgaccttt

SEQ ID NO: 18289 - DNA, 201 bp, Homo sapiens
aatcaactgctgatatattgatatatatttgatatattgactgctgttaatcagtcaaccacgtgttaattgctttctaccattgctgtattcttaggaastttaaatctagttgaggaaaaagtcatctatcctcaaatagttagagaagcgcttctaaaactgatctaagaatttgaaaaacttatatttacacttaaa

SEQ ID NO: 18290 - DNA, 201 bp, Homo sapiens
cttctaaaactgatctaagaatttgaaaaacttatatttacacttaaatataatctgaaacattaagtatagtttgaatcatttggtttccatcttatacmtatatttgtattcttgtgtaacatcacttggttccaagtgatcatttaaaggaacagtgtttcacaaatatgtgtattttgggtttgaaaaattctgaag

SEQ ID NO: 18291 - DNA, 201 bp, Homo sapiens
gtgtgtgacagagtttcagtcttgtttcccaggctggagtgcaatggcgcgatctcggctcactgcaacctctgcctcctgggttccagcaattctcctgytcactgcaacctctgcctcctgggttccagcaattctcctgcctcagcctcccaagtagctggaattacaggcatgcaccaccatgcaccaccatgcccg

SEQ ID NO: 18292 - DNA, 201 bp, Homo sapiens
atgcaccaccatgcccggctaattttgtatttttagtagagacagggtttctccatgttggtcaggctggtcttgcactcccagcctcaggtgatccgccygcctcggcttcccaaagtgctgggattacaggcatgagccactgtgcccggctgacaatgtgatttttaaaagtagaaataaactttcaattaaatgtct

SEQ ID NO: 18293 - DNA, 201 bp, Homo sapiens
catcctcattggtcatcagagaaatgcaaatcaaaaccacaatgaaataccatctcacaccagttagtatggcgatcattaaaaagtcaggaaacaacagrtgctggagaggatgtggagaaatagaaacacttttacactgttggtgggactgtaaactagttcaaccattgtggaagacagtgtggtgattcctcaaga

SEQ ID NO: 18294 - DNA, 201 bp, Homo sapiens
aaggctagtaaaacatgtgctatgtataaaaccaatttcagctcaaatctgtatagtttcaaagccctgtgtttcccaccacacctcactgctgagtgtakgaaggagttacaactccaagagaattattttgtgtagcagcttgtggtacagctcagagtaaaacgaacctaatgacgggggcaaattagagagacctcg

SEQ ID NO: 18295 - DNA, 201 bp, Homo sapiens
attaagagactctttctttattttagttgcagatttaaaatctcagcactcaaatggactttagagttaaccaagttgtaaattctaactccacatttgagaaaactaatgattaagtggatttcccaggtttttccagcaaattaattacatggtttagtgtaccacattttcttttaagttggttttgaattgtattcc

SEQ ID NO: 18296 - DNA, 201 bp, Homo sapiens
aagtccacagtttgaggctgcctggaattatcaagctgtaatgccacatgacacatttcaaaatattttttcctatgtttatatgttttattttttactgrttagtcagtaagggatgccagtagatgagatgtttggtttaatttttcttacacatatcccagagtgctccagcaagacagtgtattgtccattacggga

SEQ ID NO: 18297 - DNA, 201 bp, Homo sapiens; identical to SEQ ID NO: 1983

SEQ ID NO: 18298 - DNA, 201 bp, Homo sapiens
gtcttgccttaggaattgcagccaacattttgcacacagatttttgtgtaccttgtctctggttccctcctctgtaattttgtccttcaagtctcagtcaytgtggcagccctggaattcaacatttgtctcctcaagttattaagactgtgacttctccttgggttctgttctcccacatggcaatttgggaaatgtact

SEQ ID NO: 18299 - DNA, 201 bp, Homo sapiens
tgaaaccccatctctactaaaaatacaaaaaaaattagccgggcacggtggcgggcacctgtagtcccagctacttgggaggctgaggcaggagaatggcrtgaacccaggaggcagagcttgcagtgagccgagatcgcaccactgcactccagcctgggtgtctcaaaaaaataaataaataaataaataaaaataaaa

SEQ ID NO: 18300 - DNA, 201 bp, Homo sapiens
  misc_feature (101)..(101): n is a, c, g, or t
ccttaggatgtatacatttaagatttaaggtaattttaaaccagtttaaataaatccttaaatgttgtaagaatagcacattcattctagtcttttgatgncttatctttttaaaatacagtattatagattttaaaaaccaatttgtgtaaaaaaaaaaaagatttttaaaaagctcctgttatatcaaagtggtctgta

SEQ ID NO: 18301 - DNA, 201 bp, Homo sapiens
aagtgaagctatttgttttctttgtgcagattaacattagaagtacgccttattcttttttttaagtatgccttattcttttcatcatattgacaatttaraaaattttatcatataacttgtaattaagatccttaggatgtatacatttaagatttaaggtaattttaaaccagtttaaataaatccttaaatgttgta

SEQ ID NO: 18302 - DNA, 201 bp, Homo sapiens
ttccttttccttacaatgataatgtggtcttttagtcataaaggaccacaatacaaattaagatacttttattgttcgtctttggccttttaaaacctgawactccatagaattcatggccatgtcaagaaaaaatgcacgtttgagcatagaagtctggttttccgaaattgttgatttagtgttattaaattaatccaa

SEQ ID NO: 18303 - DNA, 201 bp, Homo sapiens
cttggaaagttgttgttgttgtttttttaaagaatttaaaaattaatctagctttgagttggcatatcttattaacacagttgtagaaaacttatatttcstctactatagtttatgaatttcttggagaaaaatctaatactaatactcaaacttgatgcacaaacggattctttggcatgtttgtgtgtatgcccatct

SEQ ID NO: 18304 - DNA, 201 bp, Homo sapiens
atagaattcatggccatgtcaagaaaaaatgcacgtttgagcatagaagtctggttttccgaaattgttgatttagtgttattaaattaatccaacaaackttttatcagacctcagagaaatatgtttggatttaagaaaaatatggacttcagagtttaccaaatataagagagctttgtttatagaatactatctttg

SEQ ID NO: 18305 - DNA, 201 bp, Homo sapiens
agaagtctggttttccgaaattgttgatttagtgttattaaattaatccaacaaacgttttatcagacctcagagaaatatgtttggatttaagaaaaatrtggacttcagagtttaccaaatataagagagctttgtttatagaatactatctttgtagacagaagcattttaaataaatataaaagaaagccatactgc

SEQ ID NO: 18306 - DNA, 201 bp, Homo sapiens
ttcagagtttaccaaatataagagagctttgtttatagaatactatctttgtagacagaagcattttaaataaatataaaagaaagccatactgctgatcktatataagcatcttattcaaatatattcaagcttctctttttaagcaacataccttaaaccctctagatcagtggttttatttttatttgcttttattta

SEQ ID NO: 18307 - DNA, 201 bp, Homo sapiens
taattggaaaaaggttttttcatttcatttataactctacccgtatagtatagatggattgatatcaacttaaaatggttgtgtttaacatatttatcaaygatgaagatgtacaaagtttgtttgctcattaagttttcatttgtacttatgaattgagaaatagtttggattataaaattatcatctcaaattatctta

SEQ ID NO: 18308 - DNA, 201 bp, Homo sapiens
agaatataactccaaaatatatgttatctaaaaaattatgacaagatgttgccatttctaatgtgcttaaaatttatctcttaggaaatataaatgattcrcatatataaatatataagaacagcatgctttctactcattcatctgctctcaaaagcaagttttatattaaagtttatatttttgtagaccttatttact

SEQ ID NO: 18309 - DNA, 201 bp, Homo sapiens
ttaacagggtgccaagatgtgttgaatctaaattgttgacaatttctgtagataaatggaagattttgcctttcatttaaaataattttaaaaaaattccrtgaggacagttggattttgatttggtcagcagtacatttggaaaaggtgtatggttttaatcaagaattagtcatatctgtggaagtacctcatctggag

SEQ ID NO: 18310 - DNA, 201 bp, Homo sapiens
aagatgtgttgaatctaaattgttgacaatttctgtagataaatggaagattttgcctttcatttaaaataattttaaaaaaattccgtgaggacagttgrattttgatttggtcagcagtacatttggaaaaggtgtatggttttaatcaagaattagtcatatctgtggaagtacctcatctggagcaagttcttatct

SEQ ID NO: 18311 - DNA, 201 bp, Homo sapiens
aagttcttatctagtttgttctgtttagactttatttgtagtttgtagtgtcacgctgaaaaaaattggagtgagtttaggaaggagcaaacaggatggtrgaggaactaaagctgttatgtttcacgagaaattagggtacaaggaaggaaggtcatgacagttgtctctaaagtagtccagattggttagtatgactgg

SEQ ID NO: 18312 - DNA, 201 bp, Homo sapiens
attacaagggaattaggtagcctgattagagtggagaataaaatagatataggatttgaacatctttcaagacttctaattccactgcagcattctcttgraagcggttgttattcttatgatagtctggaaaaaaaatgtttctttacttttttagggagattactgggtgataaatgttagtgataatgttatgtgata

SEQ ID NO: 18313 - DNA, 201 bp, Homo sapiens
ttgacgaatagtcaccataaagtttgttattcaaacatgaacattcattttaattgaatgactgaatactttaatactgattggcatgaaactgattactrtaatgcctgagtaagacctttgatgtaggggagaaacattttttaataagttactatttctttcttttctagttggtagctggcagtgttgtgatggctt

SEQ ID NO: 18314 - DNA, 201 bp, Homo sapiens
actcctgtacacccatggagctgtcatctttgcctccagtgccacaggtgtttgtgtaagcatatgttttcatttctgtagggttctatagtaagcatgtkcccttccccgtcttacctccagtggttactctccaaaggcaaacagatctcttttggctttgtcttctactggttatcttcatattttaaaaaataactt

SEQ ID NO: 18315 - DNA, 201 bp, Homo sapiens
gcttcgacctcccaggctcaggtgactctcccatctcagcctcccaggtagctgggactacaggtgcatgccactgtgcctggctaattttttttttttttgttttactagaaatgggatttcaccatgttgcccaggctggtcctgaactcctgaactcaggcaatctgcctgcctcagcctcccaaagtgctgggatta

SEQ ID NO: 18316 - DNA, 201 bp, Homo sapiens
taatgtctttttacgtctttgacataaaaatgtactttatttacatagtatcatttaccattatatattttatatagttgtatttattgatttcaaaatgstataaatattaatggcacacaggactatttttaaagaacaaaaattttcatgtaatgagaaagactgcatttggagttttagatcgttatgtgtttcttc

SEQ ID NO: 18317 - DNA, 201 bp, Homo sapiens
atctcttgtggaacttttggttctttttggaatcaaaaattgcttcattttaaatttgcttactttatcatgtcactatatgaagcattccaagttctccrttggaatattaaatattctccaaatattattttatgtgcagttgttgtgatacttcttgtctacccaatgtcagttctacccctcccacttatttaaata

SEQ ID NO: 18318 - DNA, 201 bp, Homo sapiens
tgcagttgttgtgatacttcttgtctacccaatgtcagttctacccctcccacttatttaaataacaggatcctgattttgttcagagtagttatatgccyaatgaaaaataatcaacgtactaaattcctttagagtcagaaatgggtccacatctggaaattgggattctggggaagctattgtttttctgacagactt

SEQ ID NO: 18319 - DNA, 201 bp, Homo sapiens
tcttgtctacccaatgtcagttctacccctcccacttatttaaataacaggatcctgattttgttcagagtagttatatgcctaatgaaaaataatcaacrtactaaattcctttagagtcagaaatgggtccacatctggaaattgggattctggggaagctattgtttttctgacagacttatttgacatatgtatatt

SEQ ID NO: 18320 - DNA, 201 bp, Homo sapiens
ttcctggagtcttcaccctctgttctaatctgattgcttactaggcctgcacagttccaatctgtttttctagaacttaatttcatgtctcttctgtgttraatcctatttcttaggctttcttcttctctctctctttctctctctgtctctctgtctctgtctctgtctgtctctctcctttcttttggttttcctggc

SEQ ID NO: 18321 - DNA, 201 bp, Homo sapiens
catgtttattgctttaatataaaaaatacataaatggaaaactgcatttgaatttgatgagctcattgctggttttgttggagtgatttattttttccctkatatgaaaagctactattgacacagtgagatggaagttaactgtctgttttttggaaaccagtatttttggttttaaaatctgagtagatcatttaattt

SEQ ID NO: 18322 - DNA, 201 bp, Homo sapiens
cctcccaagtagctgggactacaggcacctgccatcatgcctggctaatttttttgtatttttttgtatttttaatagagatggggtttcaccgtgttagycaggatggtctcgatctcctgatctcatgatccgtccgccttggcctctcaaagtgctgggattacaggcatgagccaccgtgcccggccagatgtttgt

SEQ ID NO: 18323 - DNA, 201 bp, Homo sapiens
caaaggaagaatttggtaacttttaggtagataactgagatttgcaccggaatgattatctggatagtggtacccagttaaccaagatagaaaataaggargaggaaaggacaatgacattgaaattttctttggaacatgttactctgaggtgcttttggaacatcaagttagagatgtccagtaagaaggtaaaatcca

SEQ ID NO: 18324 - DNA, 201 bp, Homo sapiens
aacttttagtggggtctttaaaagtaactttcttttacaaaaacgtaaagtttattttataccttgaagagtctttttctctttcattttatacttatctytttctgtgaacctctatagagataaagctaaaattattaagtctctatatactataaaaaaatcaaactaaaggttgagggtaactatatgcagtgaaaa

SEQ ID NO: 18325 - DNA, 201 bp, Homo sapiens
aaataattcactggtttttaaaaaacagcaattaaaaatatctcaatttagtaagtgagtctgtgtgtgctaatggagcatttgtttgtttacacaccaartgacatgtaatggatagttggaagtacagtgtggaatgtaagctatagatttagagacctaatgtctgagaagtaatacctaaatatatttcagccttcc

SEQ ID NO: 18326 - DNA, 201 bp, Homo sapiens
tttacttcgtagcaataggtaggtcatgattttatatatattttttcttttgtattccttcaaaagtaatgtttgaacaaatgtaatctttcaggcatttmatatataactctgactatattttaatcaatcgatcagtaagatttcatacttaaggggattattataaaagtctttatgcatttatctcaaacttaatga

SEQ ID NO: 18327 - DNA, 201 bp, Homo sapiens
tgtaggtggttatggcagttgctcagctgtattggcacatatcaccaaaatctgaagctggcataatttctaaatcactagtgcgtttacttcgtagcaayaggtaggtcatgattttatatatattttttcttttgtattccttcaaaagtaatgtttgaacaaatgtaatctttcaggcatttaatatataactctgac

SEQ ID NO: 18328 - DNA, 201 bp, Homo sapiens
aatagatttaccttgtactgttttttttttttttaagttgctcaagaggtctcatgctttcatttcttttttgttgttgttgagacagtcttactctgtcrcccaggctggagcgcagtggcgcgatctcggctcactgcaagctccgcctcccgggttcacgccattctcctgcctcagcctcccgagtggctgggacta

SEQ ID NO: 18329 - DNA, 201 bp, Homo sapiens
aataaaaatccgtttcctcagattttatcaatgcaaaattctggaaggtaaaatgcaagtaaatttaaggggtgtgtgtgtgtgtgtgtgtgtgtgtgtgttacaccagctttaaccgatttttctaccttgaataaagtggatttacataattaatatcttatttcatatgacacattttaaaactcaagaagtatgtta

SEQ ID NO: 18330 - DNA, 201 bp, Homo sapiens
gaataaaaatccgtttcctcagattttatcaatgcaaaattctggaaggtaaaatgcaagtaaatttaaggggtgtgtgtgtgtgtgtgtgtgtgtgtgtgttacaccagctttaaccgatttttctaccttgaataaagtggatttacataattaatatcttatttcatatgacacattttaaaactcaagaagtatgtt

SEQ ID NO: 18331 - DNA, 201 bp, Homo sapiens
cagggggctgacccccccacctccctcccagacggggctgctggccaggcggggggctgaccccctccacctccctccgggacgggatggctggccgggcrgggggctgaccccccacctccctcccggacggggcggctggccgggcagaggggctcctcacttcccagtaggggcggccgggcagaggcacccctcacc

SEQ ID NO: 18332 - DNA, 201 bp, Homo sapiens
ccggacggggcggctggccgggcagggggctgacccccccacctccctcccagacggggctgctggccaggcggggggctgaccccctccacctccctccsggacgggatggctggccgggcagggggctgaccccccacctccctcccggacggggcggctggccgggcagaggggctcctcacttcccagtaggggcgg

SEQ ID NO: 18333 - DNA, 201 bp, Homo sapiens
agaaaatctgtaaaaacagtccaatcagctttttgaattcagaaaatagtcaaaggtttacagcaaccattcaaacatttaagaaaatggggcctgaaacycaggagaaaagatttgtggcatttaaacttaccctcactctatcctcccttctctgcctcagtgacaggggctggatggaacagagtagattctgttcgc

SEQ ID NO: 18334 - DNA, 201 bp, Homo sapiens
atagaacgtattcctaaaactccttttccacctagtgttaattagaaagttgacaagtgtcattttcaactttattatgtttacatattttatcatttttwaaaaaaattaagctcagtactatattttatgcagatcctgtttattttttatttgatgtacactttaacctcattgatccaagcttttataggtgtcgta

SEQ ID NO: 18335 - DNA, 201 bp, Homo sapiens
cagtggtgcgttcttggctcactgcaacctcttgcctcctgggttgaagcgattcgtctgcctcaacctcccaagtaggtggaattacagacatgtgccascacacccagctaacttttgtatttttagtagagatggggtttcggcatgttggccaggctggtgttgaactcctgacctcaagtgatctgccctcggcag

SEQ ID NO: 18336 - DNA, 201 bp, Homo sapiens
tcaataaaaagaaaaaaagaaacaagaatggctgatattgaattttttccttgaaatacattatacaaatcgatacataaaattatgggtaataacagcayatttgataagaagccttcagaaatgctgggaacatggaccaaaagcctgtcagatactcttttattagttagaataaaaagaatagagtaaaatgatcct

SEQ ID NO: 18337 - DNA, 201 bp, Homo sapiens
atcaagatgtaatacatctattacccaaaaagcaatacttgtaaaatagaaatggaaagcacatatatgaatgacgaggattcctttttatttgtttgggkctttttcctttccttttccttttcctcttccttttctcttcttttctttttttttttttttttttttttttgacagggtctggctctgtcgcccaggttg

SEQ ID NO: 18338 - DNA, 201 bp, Homo sapiens
aaacaaaatgaaattaatctacatcatcacttggtcctcatattgtgcttatgagaagtttatgtattctggaattcttatatattgacaaagtttaatayaatcggagttttggttaactcaataataccagtgtgtaaactaattgaaataatatcttttagacctatgtgaaaagccaggataaacaatttgcagcag

SEQ ID NO: 18339 - DNA, 201 bp, Homo sapiens
agaataaaaatccgtttcctcagattttatcaatgcaaaattctggaaggtaaaatgcaagtaaatttaaggggtgtgtgtgtgtgtgtgtgtgtgtgtgkgttacaccagctttaaccgatttttctaccttgaataaagtggatttacataattaatatcttatttcatatgacacattttaaaactcaagaagtatgt

SEQ ID NO: 18340 - DNA, 201 bp, Homo sapiens
tcttttaaggcttgtattaaatagaatgtttttctaatttaagtttacattttacgaagcatattgcatttgaattgaattatacatatttagtatgaatratttctatctttttcagaaatagttgttgctgaaagtgtggttgttataaagaaattactgcaaatgcaacctgcacaacatggtgaaattattaaacat

SEQ ID NO: 18341 - DNA, 201 bp, Homo sapiens
caacttcttttcagttttctcatcagtaaatttgaaataacagaagctgtctcttaagatcctttttaggctttatttaagtaaaaaacacacagtaaatscttaaaaaaaatcaaaatcctgcctagactattaatttagactcctaactgatgtatctgcctttgatttctcccttactccaccttacatactgccact

SEQ ID NO: 18342 - DNA, 201 bp, Homo sapiens
caaatttggaagcgcactcatggttatgctttcacatagtcttttaaggcttgtattaaatagaatgtttttctaatttaagtttacattttacgaagcayattgcatttgaattgaattatacatatttagtatgaataatttctatctttttcagaaatagttgttgctgaaagtgtggttgttataaagaaattactg

SEQ ID NO: 18343 - DNA, 201 bp, Homo sapiens
aactttgggaggccaaggcaggaggatcacttgaggccaggagttcaagatcagcctgggcaacatagtaagactctgtctttacaaaaaaaaaaaaaaaaggccaggcgcagtgactcacacctgtaatcccagcactttaggaggccaaggcgggtagataacttgaggtcaggagttcgagactagcctggccaacat

SEQ ID NO: 18344 - DNA, 201 bp, Homo sapiens
ttctagaccatcggtttttgctgtatgaatattttctaagatattctcttcgaaatcaattttaatgagatttcctatgtgtttattttttgataactgaygaaaattcataaatacaggattaattcctagatatacattaaattaattaatagctgtaaaacttttgtaatagttaaaaccttttctatgttaatatta

SEQ ID NO: 18345 - DNA, 201 bp, Homo sapiens
atttgctttaatattcttagtttgaaatttttaagccatcattacatttcacagtttcaaccaagctacaaacattacctaaattttcagtgtttagtttrcctctttttcacatcctctgtgttttcatgtctaaattatcttatttcctagactctcttgagcctgagggatccattacagtttcaatgggtattgact

SEQ ID NO: 18346 - DNA, 201 bp, Homo sapiens
acatttatttccttctcattttcagtacctatagagataatattagaaaacatgacatttctcaggaagatatgtatttctgaaacaaatgggtataatgygttcattggtgtatgcgcagaattaatttgtgaaaaagaaaaccttgaaacagaatagttaggttactttgtaatttgctttaatattcttagtttgaaa

SEQ ID NO: 18347 - DNA, 201 bp, Homo sapiens; identical to SEQ ID NO: 17893

SEQ ID NO: 18348 - DNA, 201 bp, Homo sapiens; identical to SEQ ID NO: 17894

SEQ ID NO: 18349 - DNA, 201 bp, Homo sapiens
aaattgcttacccagtacatattaaatctcggcaagtatgatcaaaactacgacatcagagaccgtacaagatttattaggcagcttattgttccgaatgwaaagagtggagctttaagtaaatatgccaaaaaaatattcctagcacaaaagcctgcaccactgcttgagtctccttttaaaggtattatcagaatataa

SEQ ID NO: 18350 - DNA, 201 bp, Homo sapiens; identical to SEQ ID NO: 17895

SEQ ID NO: 18351 - DNA, 201 bp, Homo sapiens
attaaaaatcatctttatttgggtcataaggttttttttgtttgttcgacacctttttgtttatataaccatttatattttagaagaatacatgtgcacawtacaaaattagaaattacaggctagcaaaactaaaaagaaaattaaaacatcacattctcaacactcagaaatcacttatgtcttagtgtattttcttcc

SEQ ID NO: 18352 - DNA, 201 bp, Homo sapiens; identical to SEQ ID NO: 17897

SEQ ID NO: 18353 - DNA, 201 bp, Homo sapiens
tatctaatgcattgcatcttttaaagcctgtcaagtcttgcagaatgtccttctgggtttgtctgattgctgctgcttctttttattttgttattttgttygctatacctactggaatgggatggttgcatcttttatagtgtcatttaattcttttatattctgtgtttcctgttaactggcagttatatccaaaggctt

SEQ ID NO: 18354 - DNA, 201 bp, Homo sapiens; identical to SEQ ID NO: 17899

SEQ ID NO: 18355 - DNA, 201 bp, Homo sapiens
ctttcaactgttggatttctaaataccgaggaaaaagaggctcatttagtccttttggattttggagtaccctaatatattagaacagatggcatgccaartggcagctagaattttaaagacattgacatgtataggaagtacagtttgctttcttgccagtaggattggacttttatttgtaagggaaaaggatttact

SEQ ID NO: 18356 - DNA, 201 bp, Homo sapiens
gaatcgctcgaacccgggaggcggaggttgcagtgagccaagattgtgccactgcgttccaggctgggcgacagagtgagatactgtcttaaaaaaaaaaattctgaaagaaattaggattgggtgacacagtggcccaggtgttaggagatggctgtagcaagggagaaggagtaaaatttgatgatgctttagatagaa

SEQ ID NO: 18357 - DNA, 201 bp, Homo sapiens
acagtgttagaattctaaggcagtaagggcctcaagtcccttcttgtcaatgctctcatttttttattttttttttagtgataaaaataaagttttacctrtttcatccaggaatatatgctttgtatcttatacgtaatattccagagaaaaagaaagttacctatacctcttttttgaagaatagatattcttaatatc

SEQ ID NO: 18358 - DNA, 201 bp, Homo sapiens
tttcactgtgttagccaggatggtctcgatctcctgacctcatgatccacccgtctcggcctcccaaagtgctgggattacaggcatgagccaccgcgccyggtgtctttcatttcttagtttttgacaagctctatctatctcacataggatggtgataaaataagaaaatggatgtaaggtcatgatacagaccaccac

SEQ ID NO: 18359 - DNA, 201 bp, Homo sapiens
ttgatgagcttgcagcccggctcagtcgtggctgacagcactgattggggcgcagtacgctctctgctccttttattacagacagtaattaaagcagctckccctgccacttccataacaaacacagcataatgccctaattatgactttattaatttaagtcaggatttaatgattttaaaagtgatttatattgttttt

SEQ ID NO: 18360 - DNA, 201 bp, Homo sapiens
tataggcatgcactaccatgcttggctaattttttgtatttttaatagagaggggtttctccatgttgcccaggctggtctcgacctcctgggctcaagcsatccacccacctcagcctcccaaagtgctgggattacaggcatgggcaaccgtgcccagccacacacactaaattctaatcccagtggaatatttgtggt

SEQ ID NO: 18361 - DNA, 201 bp, Homo sapiens
gccgggcagaggggctcctcacttcccagtaggggcggccgggcagaggcacccctcacctcccggacgaggcggctggccgggcggggggctgacccccyacctccctcccggacagggcggctggccgggcagggggctgacccccccacctccctcccggacggggctgctggccgggcggggggctgacccccccac

SEQ ID NO: 18362 - DNA, 201 bp, Homo sapiens
tgggaggcggaggttccagtgagccaagatcacaccactgcactccagcctgggtgacagagtgatattccactacaaaaaaagaaaaaagaaagaaaaaragaatcagtcaagctgttagaggcatgaggggagggtatactaggcagaataaagttatggaggagggaaagagcttgctactaccagaaataatgattg

SEQ ID NO: 18363 - DNA, 201 bp, Homo sapiens
gactccttttaagcatccataactagcattgattgaagttgtttcagtgtaatgagttccccaaacaatacattatggttcaaaatgaagcagttgtgtamgagcctcataatacatttataaatcctcaagtatgaggcaacttctttctgagggataattttaggggggaaactttttttcatatttggcatctaggga

SEQ ID NO: 18364 - DNA, 201 bp, Homo sapiens
agctatttttcatatgtttcttggctgcatgtatatctttttttgagaagtgtctgttcataccatttgcccactttttaatggggttgttagtttcttgwaaatttgcttaagtttcttgtaggttctggatattagccctttgtcagatggacagattacaaaaatgttctcccattctgtaggttgtctgtttgctct

SEQ ID NO: 18365 - DNA, 201 bp, Homo sapiens
agaattggaacttacttagaaaactaagaagggagaattcagtttggggaaaccatgaaagttgattgtacaagtttttgaattgtgtttaaggtataagraaagggcgaaacttaattcctacttccgtaggaggaagacagccgataaatggtttattgtgtggtttgttgagacagtgtggtatgacggttagacaca

SEQ ID NO: 18366 - DNA, 201 bp, Homo sapiens
tgtttatccagagttatcgataatcataaataactgtattctcatcttgatctgtttttttccaacagacaaaattgcttacccagtacatattaaatctyggcaagtatgatcaaaactacgacatcagagaccgtacaagatttattaggcagcttattgttccgaatgaaaagagtggagctttaagtaaatatgcca

SEQ ID NO: 18367 - DNA, 201 bp, Homo sapiens
atatctttttttgagaagtgtctgttcataccatttgcccactttttaatggggttgttagtttcttgtaaatttgcttaagtttcttgtaggttctggawattagccctttgtcagatggacagattacaaaaatgttctcccattctgtaggttgtctgtttgctctgatgatagttttgtttgcggtgcagaagctct

SEQ ID NO: 18368 - DNA, 201 bp, Homo sapiens
ctatatttattccttgacatttgaggtaatatgccaattaccttgagctctgattatgattgttctctgttatatacagctcatattgtttattttatatktttccctatttttaatagatagagatcatttccagcttggcaccttatctcatactctcaacattaaagctactgggtacctggaattatctaattggcc

SEQ ID NO: 18369 - DNA, 201 bp, Homo sapiens
tataggccgaaggataggaagaagcaaccccatttgtaatccacttgaatttgggcacccagagtggtacaaagaaaagccacaaagcaaatgtagcttcygcagtttttatcatttgtcctatcaggttccttatcaaaggaatatgggaaattggctagcaagtagtcttacggatttttgctattgtcgaaaattggc

SEQ ID NO: 18370 - DNA, 201 bp, Homo sapiens
gaagtcataagggagcaaaagatcggaagggacaccaaattgttatggttacctgagggggacttttcttttctttctttttttttttttttttttgagayggagtcttgctctatcaccaggctggagtacaatggtgcaatctcggctcactgtaacctccgcctcccaggttcaagtgattctcctgtctcagcctcc

SEQ ID NO: 18371 - DNA, 201 bp, Homo sapiens
catggcctagcttttctctgggaatctccatttggatcttgaagtcctgttgtaaatctgttcagcatggccccattcataatggctgataattctgtcttgacgaaatcattgttactaccaagattgtttgtgtgaagctcacctgttccttttaggccattctgttttcatcctcattttccttcctcttatggggcc

SEQ ID NO: 18372 - DNA, 201 bp, Homo sapiens
agaattataataacatttttttttttgagatggagtctcactctgtcgtccaggctgcagtgcaatggcgcggtctcggctcactgcaacctccgcctccygggttcaagcgattctcctgcctcagcctccggagtagctggggttacaggtgcctgccaccacgcctggctaatttttgtatttttagtagagatgggg

SEQ ID NO: 18373 - DNA, 201 bp, Homo sapiens
tagaatcagaattataataacatttttttttttgagatggagtctcactctgtcgtccaggctgcagtgcaatggcgcggtctcggctcactgcaacctcygcctcccgggttcaagcgattctcctgcctcagcctccggagtagctggggttacaggtgcctgccaccacgcctggctaatttttgtatttttagtaga

SEQ ID NO: 18374 - DNA, 201 bp, Homo sapiens
aggccttaagcttgcttttgaattcagttatgttgttaatgattaagtttgccagaactctaaatctctgaatgagaattcatttatatttactttatttrtttaaacaggcaaaagaatggaccccagcaggaaaagcaaagcaagagaattctgctaagaagttttattctgaatctgaggaagaggaggactcttctg

SEQ ID NO: 18375 - DNA, 201 bp, Homo sapiens
acctcgtctctactaaaaatacaaaaattagccagtggtggcatcaggtgcctgtaatcccagctactcgggagactgaagcaggagaatcgctcgaaccygggaggcggaggttgcagtgagccaagattgtgccactgcgttccaggctgggcgacagagtgagatactgtcttaaaaaaaaaaattctgaaagaaatt

SEQ ID NO: 18376 - DNA, 201 bp, Homo sapiens
gtgcgggggcgggaatcccactcatccagactgcccggattcctcagagctagcgaggggaaggactaagtgcactgatccaccaagaccatggctgcccytccccagagtggctttgttccagggagatcagagttctgtccctaaacccctggctggagttgctgaaattcctgcagggaggcccagctcagtgaggag

SEQ ID NO: 18377 - DNA, 201 bp, Homo sapiens
ctaagaagttttattctgaatctgaggaagaggaggactcttctgatagtagcagtgacagtggtgggttttataatttattggcatatattatttacatrgtagattacattctatatctcagaaacaaggcctaatccataatattcagcaggtagttttaagtgaagtttgtattatcaaaataatccctttcattta

SEQ ID NO: 18378 - DNA, 201 bp, Homo sapiens
gccgggctggtcacaaactcctggcctcaagtaatctgccagccttggcctcccaaagtgccgggattacaggcagtagttcttcttaattcatgtccctyctttcttatatcatatataatctattttcagaataaatcccaaatctagcccattctcactgtgctcactatctttcctctgcataattgctgtagcctt

SEQ ID NO: 18379 - DNA, 201 bp, Homo sapiens
tattttgcatttgctgaggagtgttttacttccgatgatgtgatcgattttagagtaagtgccatgtggcactgagaagaatgtatattctgttgttttgsggtggagagttctgtagatatccatcagatccacttgatccggagctgagttcaagttctgaattatcttcttaaattttgtgtctcgatgatctgtcta

SEQ ID NO: 18380 - DNA, 201 bp, Homo sapiens
agagaattctgctaagaagttttattctgaatctgaggaagaggaggactcttctgatagtagcagtgacagtggtgggttttataatttattggcatatrttatttacatagtagattacattctatatctcagaaacaaggcctaatccataatattcagcaggtagttttaagtgaagtttgtattatcaaaataatc

SEQ ID NO: 18381 - DNA, 201 bp, Homo sapiens
ctaggacttccagtggtatgttgaataacagagatgacagtgggcaaccttgtcgtgttccagagcttataggaaagactttcagttttttcccattcagwatgatactagctgtgaggtttgtcatatatagtttttattatgttgatgtatgttccttctattcccagttttttgagggtttttatcatgaaaggatgt

SEQ ID NO: 18382 - DNA, 201 bp, Homo sapiens
cgttttgtcaaagatcagatggttgtagatttatggtcttatttctgagttctccattttgttccattggtctatgtgtctgtttttgtaccagtaccagkctatttgggttactgtagccttgtagtatagtttgaagtcaggtagagtgataccgccagctttgttctttttgcttaggattgtcttggctatacgggc

SEQ ID NO: 18383 - DNA, 201 bp, Homo sapiens
aacacagaatatttttccattttttggtgtccttttcaatttccttcttcagtgttttatagttttcactatagagatagttcacttctttggttaagttwattcctgggtatttaattttgtgtgtggctagtgtaaatgggattacttttaaaatttctttttcaccttgttcactgttggcatatagaaatgctcctg

SEQ ID NO: 18384 - DNA, 201 bp, Homo sapiens
caaagtgctgggattgcaggtgtgagccacggtgcccaatcacatttaagtttttattccatcttgagttaatttttgtataaggtgtaaggaaggggtcyagtatcaattttctggatatggctagccagttttcccagcaccttttattaaatagggaatctttccctattgcttgtttttgtccgttttgtcaaagat

SEQ ID NO: 18385 - DNA, 201 bp, Homo sapiens
agagtctgaccttcctaggttaataggttctcaacgtggccgggcgcggtggctcacacctgtaatcccaacactttgggaggccgaggcaggtgggtcarctgaggtcaggagttcgagaccagcctggctaacatggtgaaaccccgtttctactaaaaatataaaaaattagcctggggtggtggcgtgtgcctgtaa

SEQ ID NO: 18386 - DNA, 201 bp, Homo sapiens
ccatagtggttgtactaatttatattcccaccaacagtgtgcaggggttcccttttctccacatcctcaccagcatttgttgttgcctgtctttcttttgrgtataagccattttaactggggtgagatgataactcattatagtttagatttgcatttctttgatgatcagtgatgttcagcatcttttaatatgcctgt

SEQ ID NO: 18387 - DNA, 201 bp, Homo sapiens
caggtgtggtggtgggtgcctgtaatcccagctgctcgggaggctgaggcaggagaattgcttgaacccaggaggcagaggttgcagcgagccaagatcaygccactgcactccagcttgggtggcagagtgagaccgcgtctcaaaaaacaacaacaaccggtggctcatgcctgtaatcccagcactttgggaggccga

SEQ ID NO: 18388 - DNA, 201 bp, Homo sapiens
ggggctgttgcttgcatcttttaaaaaattattgggttggaaattgtttaaaagaccaagatttttctgcagtattagtgtgcatcaggatgaattcctgrttatcaggcctgaggttttactggtgatgtgacacctatagaactttagtgggttttctatcagctttgctccaatgtagtctctggaatacaaaataag

SEQ ID NO: 18389 - DNA, 201 bp, Homo sapiens
caagccatccttctacctcagcctcctgagtagctgggactacagccacctgccaccacaccctaatttttatatttttgttggtagatatggctaatttrttggctaattttttaatttttgttggtagagctagggtttcaccatgttgcccaggctggtctcaaactcctgggctcaagtgagccaccacactcaacc

SEQ ID NO: 18390 - DNA, 201 bp, Homo sapiens
tacatggttatctgctaccctactgtaaggtaattcactcttcttttctctgtcttccttatcaaaaatctttgtttttagtatctgataaattaatctgkgatacattacctgtaatttctttcattgtttatagcataagccagttatctgacttaatatgtatgtgcgtgtaacttggatattaccacaaatctaaaa

SEQ ID NO: 18391 - DNA, 201 bp, Homo sapiens
ttgtacatctcctaagacatacttctttccttatcgccaggacctcttctaggtgacatccgcatccttcatcaaggggaatccatgtccctaagtcacarttcacttaaatgcaaggcaacacagccagcttttagaggccacagtcccatctctgaaatatgtagaacagcttacggtttccctcatacaattttgtaa

SEQ ID NO: 18392 - DNA, 201 bp, Homo sapiens
aagtcacaattcacttaaatgcaaggcaacacagccagcttttagaggccacagtcccatctctgaaatatgtagaacagcttacggtttccctcatacamttttgtaaggttcatggcctagcttttctctgggaatctccatttggatcttgaagtcctgttgtaaatctgttcagcatggccccattcataatggctg

SEQ ID NO: 18393 - DNA, 201 bp, Homo sapiens
aggcggaggttccagtgagccaagatcacaccactgcactccagcctgggtgacagagtgatattccactacaaaaaaagaaaaaagaaagaaaaaaagartcagtcaagctgttagaggcatgaggggagggtatactaggcagaataaagttatggaggagggaaagagcttgctactaccagaaataatgattgtctg

SEQ ID NO: 18394 - DNA, 201 bp, Homo sapiens
tttctctgggaatctccatttggatcttgaagtcctgttgtaaatctgttcagcatggccccattcataatggctgataattctgtcttgacgaaatcatygttactaccaagattgtttgtgtgaagctcacctgttccttttaggccattctgttttcatcctcattttccttcctcttatggggcccattccatcttc

SEQ ID NO: 18395 - DNA, 201 bp, Homo sapiens
cggcgcgcgcctgccatcgcaggcactcggcaggctgaggcaggagaatcaggcagggaggttgcagtgagccgagatggcagcagtacagtccagcttcrgctcggcatcagagggagaccgtggggagagggagagggaaagggagagggacagggacacaagctttttaaaaaaatcaagtttttaagaattgaaatg

SEQ ID NO: 18396 - DNA, 201 bp, Homo sapiens
tcttgatctgttcaattctaataacttcacctccactgaacttcagtttttcgtcctttcaattctgaaatcttaactcactcccttacttgtgcctatcmtgctcctcaggcccttcatgcctccagctgtttatgtttagcctagattaaaacaaccctgaaagataggtgctagtgtccccatttcacagacttgaaa

SEQ ID NO: 18397 - DNA, 201 bp, Homo sapiens
caccattgagcactaagtgaaccagacactgtctgcaatcccggcacctctggaggccaaggctggcggatcactcgcggttaggagctggagatcagccyggccaacacagcgaaaccccgtctccaccaaaaaaatacgaaaaccagccaggcatggcggcgcgcgcctgccatcgcaggcactcggcaggctgaggca

SEQ ID NO: 18398 - DNA, 201 bp, Homo sapiens
aacaaccctgaaagataggtgctagtgtccccatttcacagacttgaaaattgagatcccttcagcttcagtaacttttctggtgttacaaggctagtaaracatgtgctatgtataaaaccaatttcagctcaaatctgtatagtttcaaagccctgtgtttcccaccacacctcactgctgagtgtatgaaggagttac

SEQ ID NO: 18399 - DNA, 201 bp, Homo sapiens
aggccaaggcaggtggctgggaggtggaggttgtagcgagccaagatcatgccactgcactccagcctgggcaccattgagcactaagtgaaccagacacygtctgcaatcccggcacctctggaggccaaggctggcggatcactcgcggttaggagctggagatcagcccggccaacacagcgaaaccccgtctccacc

SEQ ID NO: 18400 - DNA, 201 bp, Homo sapiens
cagtaacttttctggtgttacaaggctagtaaaacatgtgctatgtataaaaccaatttcagctcaaatctgtatagtttcaaagccctgtgtttcccacsacacctcactgctgagtgtatgaaggagttacaactccaagagaattattttgtgtagcagcttgtggtacagctcagagtaaaacgaacctaatgacgg

SEQ ID NO: 18401 - DNA, 201 bp, Homo sapiens
tcctcacttcctagacggggtggcggccgggcagaggctgcactctggacgctttgggaggccaaggcaggtggctgggaggtggaggttgtagcgagccragatcatgccactgcactccagcctgggcaccattgagcactaagtgaaccagacactgtctgcaatcccggcacctctggaggccaaggctggcggatc

SEQ ID NO: 18402 - DNA, 201 bp, Homo sapiens
ccagacgatgggcggccaggcagagacgctcctcacttcctagacggggtggcggccgggcagaggctgcactctggacgctttgggaggccaaggcaggyggctgggaggtggaggttgtagcgagccaagatcatgccactgcactccagcctgggcaccattgagcactaagtgaaccagacactgtctgcaatcccg

SEQ ID NO: 18403 - DNA, 201 bp, Homo sapiens
ctggagtgtagtggcactacctcggctcactgcaacctccaccttctgggttcgagcagttctcctgcctcagcctcctgagtagctgggactaccatcaygcccagctaattttttgtatttttttttagtagaggcgggtttcactgtgttagccaggatgatcttgatttcctgacctcgtgatccacccacctcggc

SEQ ID NO: 18404 - DNA, 201 bp, Homo sapiens
atttcaaaatttactattatgtgtagtgattctgaagatggggagaaggaaaatgaaaaatctaaaacttcagattcttcaaatgacgaatctagttcaawagaagacagttcttccgattctgaatcagagtcagaacctgaaagtgaatctgaatccagaagagtcactaaggtaagagattatacatttgttgtaatt

SEQ ID NO: 18405 - DNA, 201 bp, Homo sapiens
tacctcattaatgtattctggaatttaaaaacaatttttttataaactgcttatataaaggagttaaagttcatatttcaaaatttactattatgtgtagygattctgaagatggggagaaggaaaatgaaaaatctaaaacttcagattcttcaaatgacgaatctagttcaatagaagacagttcttccgattctgaat

SEQ ID NO: 18406 - DNA, 201 bp, Homo sapiens
aggatagaattgaatttgaatgggttctaatttatttggttatgggtaataccttttttattacctcattaatgtattctggaatttaaaaacaatttttktataaactgcttatataaaggagttaaagttcatatttcaaaatttactattatgtgtagtgattctgaagatggggagaaggaaaatgaaaaatctaaa

SEQ ID NO: 18407 - DNA, 201 bp, Homo sapiens
catcttagacattgtttactcatttgagaaatggagagagggacaaatactgtttcgttcatttttaaataaggaatgaaaattaaaacaactagatgatrtggagtgttcagtgataaaaataattactttgaagaataaaattagtgcctttttaagtgtattaataatgtatattattatgtggtccttgaagtttct

SEQ ID NO: 18408 - DNA, 201 bp, Homo sapiens
tttccagaacacacatccaatcttcttgaatttttattacgttaaattggtattcatagtcacacattattcttactggactgaaaatatcatgtaatgcrtgttgaaatgtgagtattaccataaaaatcagagttagggctctggactcttttaacagatgaggaaacaagttcccataacatatagttagtggcctgg

SEQ ID NO: 18409 - DNA, 201 bp, Homo sapiens; identical to SEQ ID NO: 17900

SEQ ID NO: 18410 - DNA, 201 bp, Homo sapiens; identical to SEQ ID NO: 17901

SEQ ID NO: 18411 - DNA, 201 bp, Homo sapiens
aatattggacaaatttatccctgtttcttttgttgaccaaataatagactgggattcatgattttataagcagaccttgatgatcttatcagtttgatatrtttccagtgttgtagatgctaatacataaagagcaaaaacagttttgatttggaatcatagtacctaattgatctgtttctttttctgtattatctgtgg

SEQ ID NO: 18412 - DNA, 201 bp, Homo sapiens
tttttggctttgaggaccatatggtcttcactgtaactatttctgccattatagcacaaaagcagcaacagataatggagaaacaaataggtatgggcagstagactggcttctagaatttgttcgtctctgatagaatctagattctagaccatcggtttttgctgtatgaatattttctaagatattctcttcgaaatc

SEQ ID NO: 18413 - DNA, 201 bp, Homo sapiens
gtgggagtgacccgattttccaggtgccgtctgtcacccctttctttgactaggaaagggaactccctgaccccttgcgcttcctgagtgaggcaatgccwcatcctgctccggcttgcgcacagtgcgctgcacccactgtctggcactctctagtgagatgaacctggtggtacctcagatggaaatgcagaaatcacc

SEQ ID NO: 18414 - DNA, 201 bp, Homo sapiens
gtacaatggtctgaaagtttatatcccccaaagttcatgtggtgaaacctgatcacccatgtgatggtattaggaggtaggacctttgggaggtgattagrtcataagggtggagcctttataaatgaactttatgctcttagaaaagagatccctgagagctagcttgctgcttctgccatgtgaggacacagtgagaag

SEQ ID NO: 18415 - DNA, 201 bp, Homo sapiens
tcgtcaacgtcattctccgtccagctttgttctgttgctggtgaggagctgcgttcctttggaggaggagaggcactctgctttttagagtttccagtttytctgctctgttttttccccatctttgtggttttatctacttttgatctttgatgatggtgatgtacagatgggtttttggtgtggatgtcctttctgttt

SEQ ID NO: 18416 - DNA, 201 bp, Homo sapiens
tcgtctaatttttttttaaagtttttaacttatttgccattggtttgtatttcctcctgtagcttggagtagtttgatcatctgaagccttcttctctcarctcgtcaacgtcattctccgtccagctttgttctgttgctggtgaggagctgcgttcctttggaggaggagaggcactctgctttttagagtttccagtt

SEQ ID NO: 18417 - DNA, 201 bp, Homo sapiens
aacatattatgttcgtttcacctgtccaattcaacagagacaaattaatttctttttcattttgctgattatatttatgaaattaataattggtaacttasagagaatcattataactgattgaacatggtttgataaaactgtcactgtctgttgatgccatgcagaaaacagcttcagtctattggactctgagacaat

SEQ ID NO: 18418 - DNA, 201 bp, Homo sapiens
gtatttcctgaatccgaatgttggcctttcttgctagattggggaagttctcctggataatatcctgcagagtgttttcccacttggttccattctacccrtcactttcaggtacaccaatgagacgtagatttggtcttttcacatagtcccacatttcttggaggctttgttcgtttctttttgttcttttttctctaa

SEQ ID NO: 18419 - DNA, 201 bp, Homo sapiens
ctctcctctggcttgtagagtttctgccaagagatcagctgttagtctgatgggcttccctttgtaggtaacccgacctttctctctggctgcccttaacrttttttccttcatttcaagtttggtgaatctgacaattatgtgtcttggagttgctcttctcaaggagtatctttgtggcgttctctgtatttcctgaat

SEQ ID NO: 18420 - DNA, 201 bp, Homo sapiens
tcagcatttgcttgtctgtaaagtattttatttctccttcacttaggaagcttagtttggctggatatgaaattctgggttgaaaattcttttctttaagmatgtggaatattggcccccactctcctctggcttgtagagtttctgccaagagatcagctgttagtctgatgggcttccctttgtaggtaacccgacctt

SEQ ID NO: 18421 - DNA, 201 bp, Homo sapiens
ttagtgcttcctttaggagctcttttagggcaggccgggtggtgacaaaactctctcagcatttgcttgtctgtaaagtattttatttctccttcacttakgaagcttagtttggctggatatgaaattctgggttgaaaattcttttctttaagcatgtggaatattggcccccactctcctctggcttgtagagtttct

SEQ ID NO: 18422 - DNA, 201 bp, Homo sapiens
gtgtcttttaattggagcatttagcccatttacatttaaagttaatattgttatgtgtgaatttggtcctgtcattatgatgttagctggttattttgctygttagttgatgcagtttcttcctagccttgatggtctttacattttggcatgttttttgcagtggctggtactggttgttcttttccatatttagtgctt

SEQ ID NO: 18423 - DNA, 201 bp, Homo sapiens
gatgggtcttgactctttatccaatttgccagtctgtgtcttttaattggagcatttagcccatttacatttaaagttaatattgttatgtgtgaatttgrtcctgtcattatgatgttagctggttattttgctcgttagttgatgcagtttcttcctagccttgatggtctttacattttggcatgttttttgcagtgg

SEQ ID NO: 18424 - DNA, 201 bp, Homo sapiens
aaagtctgttttatctgagactaggattgcaacccctgcctttttttgttttccatttgcttggtagatcttcctccatccctttattttgagtttatgtrtgactctccacgtgagatgggtttcctgaatacaacacactgatgggtcttgactctttatccaatttgccagtctgtgtcttttaattggagcatttag

SEQ ID NO: 18425 - DNA, 201 bp, Homo sapiens
cacagtttcaaccaagctacaaacattacctaaattttcagtgtttagtttgcctctttttcacatcctctgtgttttcatgtctaaattatcttatttcytagactctcttgagcctgagggatccattacagtttcaatgggtattgacttttgtgattctactcagactgccagtttccagttgtggtaagttcaatt

SEQ ID NO: 18426 - DNA, 201 bp, Homo sapiens
ttttcatgtctaaattatcttatttcctagactctcttgagcctgagggatccattacagtttcaatgggtattgacttttgtgattctactcagactgcyagtttccagttgtggtaagttcaattgttcttctattttttatataacctgtaaaggatagcagatcaaaaactaagctttcaacagcttttgtgtgtgt

SEQ ID NO: 18427 - DNA, 201 bp, Homo sapiens
gggggggttttgctgaaggggaagtgaaaggaagtcacaaaaatagtattgagcaaagaattataagtgtacatacatcataagaaattgagactattcaytttttaaaaatattgggcattttgcataatagagtgtgttttaaggcttcaattaaagagtatacattctttagttagtaagaatttgcgtagccattta

SEQ ID NO: 18428 - DNA, 201 bp, Homo sapiens
aaggtctctcttttttctcttccaggtttgcagctaaaactgtgcacagtgggtcattgatgctagtcacagtggaactgaaggaaggctctacagcccarcttatcataaacactgagaaaactgtgattggctctgttctgctgcgggaactgaagcctgtcctgtctcaggggtaacctgcttacatctggactttag

SEQ ID NO: 18429 - DNA, 201 bp, Homo sapiens; identical to SEQ ID NO: 1986

SEQ ID NO: 18430 - DNA, 201 bp, Homo sapiens
gttacaggtgtccgtgtgtctaattaaatgactataaatctaagaacatctggttctgtttttcagagagtgaatctggaagtgaaagtggagaacaaggygaaagtggggaggaaggagacagcaatgaggacagcagtgaggactcctccagtgagcaggacagtgagagtggacgggagtcaggcctagaaaacaaaa

SEQ ID NO: 18431 - DNA, 201 bp, Homo sapiens
attttcactctggctatgaataaatgattttttttttaacagatcaagaagttggtatatgtttacctggttcgatatgctgaagaacagcaggatcttgyactcctgtccataagcacttttcagcgagctctgaaggtaaataatggagtgagtaggcaaatagctacaaggtttctgcagagttgaaagtgtgtcagt

SEQ ID NO: 18432 - DNA, 201 bp, Homo sapiens
tactaatgattagaatgatgaattttgtttatattcttaaacggagctttataaaaaatacatttcagtgaaaaagagtaggccgggcatggtggctcacrccggtaatcccagcactttgggaggccaaggcgggtggatcatgaggttaggagtttgagaccagcctgaccaatatggtcaaaccccgtctctactaaa

SEQ ID NO: 18433 - DNA, 201 bp, Homo sapiens
ttttcactctggctatgaataaatgattttttttttaacagatcaagaagttggtatatgtttacctggttcgatatgctgaagaacagcaggatcttgcmctcctgtccataagcacttttcagcgagctctgaaggtaaataatggagtgagtaggcaaatagctacaaggtttctgcagagttgaaagtgtgtcagtt

SEQ ID NO: 18434 - DNA, 201 bp, Homo sapiens
attttagtagaaactttagttttggtctgtgattgagaaaatttaatgtaaaaaatagtatagattagaaagataaactttgactcaattatatttaacgycctactctttgttggcctttagttgtttgtaatgcacttaatactgttttctttttaaaagatttacaaattttttctgaatatctaaccaaactgtgaa

SEQ ID NO: 18435 - DNA, 201 bp, Homo sapiens
agataaactttgactcaattatatttaacgccctactctttgttggcctttagttgtttgtaatgcacttaatactgttttctttttaaaagatttacaawttttttctgaatatctaaccaaactgtgaacagttcaggcttaggggcactgtattctagttcatggatatatacattttgtaagtacagtagaccgaat

SEQ ID NO: 18436 - DNA, 201 bp, Homo sapiens
gtacacaaaattcattttaaaatcttttgctttagtaatttatacttgtttgctaaatagtcatccataccttataacttctacattgtgaaatgtggatyatggggattgacacatgtaacttaaggaggtagaggattaaggaatgtaaataaaaatggaaaggacatcaccatcttccacttggcacaatttcagtag

SEQ ID NO: 18437 - DNA, 201 bp, Homo sapiens
taaatagtcatccataccttataacttctacattgtgaaatgtggattatggggattgacacatgtaacttaaggaggtagaggattaaggaatgtaaatmaaaatggaaaggacatcaccatcttccacttggcacaatttcagtaggaatggaaatgggttacaaagcctttggaggccagtttggctatacctctcag

SEQ ID NO: 18438 - DNA, 201 bp, Homo sapiens
gaatacgttagactgggtaatttataaacagcagaaattagttgttcgtagttctggaggctgggaagtccaagatcaaggtgccagcgtatttgatgatwggtgagggctagctctgcttcagagatagtgacttctgtttcctcatgtgacagaaggaggaaacaccatccctcataccacttttataagggcaataat

SEQ ID NO: 18439 - DNA, 201 bp, Homo sapiens
gctcactgctattcctagtgtacagagtggctcctggcagttagtgggcacccagtaaatattgcttgaattaataaaacatataagggcatatacaaaartttcattgcagcattgttcagtggttagctctggcctccttgtgatgtaggactaacctgggaacagacaagaataagactttcattttatattttgtat

SEQ ID NO: 18440 - DNA, 201 bp, Homo sapiens
gaaaaacagataaactggcaattagattgccgcattatagatgaaatgaggagaaatgcacaaaatactgttcagtatcaaggttcctaatccacctagcrgtatcaaaatttaacttttgagttgagtttaagaaagcatcagttggccaggcctggtggctcacacttgtaataccagcactttgggaggccgaggcgg

SEQ ID NO: 18441 - DNA, 201 bp, Homo sapiens
atatcaatatgctttctatgtttcaggcatattttatattcctggaaattaaacaatatattttaggaccccataccatgtgctctcagtaggacgatcayaaatcagtgatcatattctagtgttcttttataggaaatgtaaacctatgtcattacattgttagtacaactgacagtgaaatatttaaaaaatctctgt

SEQ ID NO: 18442 - DNA, 201 bp, Homo sapiens
ttgtctataaaattgggatggtacaaatacttttgggagtcatttaattctcaaaggatgaaatgacttgatatacgtaaaagcatttagaactgtgcctracacatgataggcattactgggtttagtgatgatgctggtgctgatgatgccaatgatgcagatgatgcagcaaattacaaattaaataacaacatatta

SEQ ID NO: 18443 - DNA, 201 bp, Homo sapiens
ccaaacaccccaggttaacattctgacatatcagtttagattctcttcatatgcaaatccccccttccaaattggattctactgagaaactgttttatcayttgctttctcctctgtttaaagtacatgttcttagttggtgtggtggctcatgtctataatctagcactttggaggccaaggcgggaggattgcttaagc

SEQ ID NO: 18444 - DNA, 201 bp, Homo sapiens
gggtgctcctgtattgggtgcatatatatttaggatagttagctcttcttgttgaattgatccctttaccattatgtaatggccttctttgtctcttttgrtctttgttggtttaaagtctgttttatctgagactaggattgcaacccctgcctttttttgttttccatttgcttggtagatcttcctccatccctttat

SEQ ID NO: 18445 - DNA, 201 bp, Homo sapiens
ggacttgctttatgaatctgggtgctcctgtattgggtgcatatatatttaggatagttagctcttcttgttgaattgatccctttaccattatgtaatgrccttctttgtctcttttgatctttgttggtttaaagtctgttttatctgagactaggattgcaacccctgcctttttttgttttccatttgcttggtaga

SEQ ID NO: 18446 - DNA, 201 bp, Homo sapiens
tgtcaattttggatctttcctgctttctcttgtgggcattcagtgctataaatttccctctacacactgctttgaatgtgtcccagagattctggtatgtkgtgtctttgttctcgttggtttcaaagaacatctttatttctgccctcattttgttatgtacccagtagtcattcaggagcaggttgttcagtttccatg

SEQ ID NO: 18447 - DNA, 201 bp, Homo sapiens
agtttgtatttctgtgggatcagtggtgatatcccttttatcattttttattgcatctatttgattcttctctcttttcttctttattagtcttgctagcrgtctatcaattttgttgatcttttcaaaaaagcagctcctggattcattgatttttttgaagggttttttctgtctctatttccttcagttctgctctga

SEQ ID NO: 18448 - DNA, 201 bp, Homo sapiens
tgttttggtaccagtaccatgctgttttggttactgtagacttgtagtatagtttgaagtcagatggcatgatgcctccagctttgttcttttggcttagrattgacttggcgatgcggactctttcttggttccatatgaactttaaagtagttttttccaattctgtgaagaaagtcattggtagcttgatggggatgg

SEQ ID NO: 18449 - DNA, 201 bp, Homo sapiens
gatttgcatttctctgatggtcagtgatgacgagcattttttcatgtgttttttggctgcataaatgtcttcttttgagaagtgtctgttcacatccttcrcccactttttgatggggttgtttgtttttttcttgtaaatttgtttgagttcattgtagattctggatattagccctttgtcagatgagtaggttgcaaa

SEQ ID NO: 18450 - DNA, 201 bp, Homo sapiens
ctccagcacctgttgtttcctgactttttaatgattgccattctaactggtgtgagatggtatctcattgtggttttgatttgcatttctctgatggtcaktgatgacgagcattttttcatgtgttttttggctgcataaatgtcttcttttgagaagtgtctgttcacatccttcgcccactttttgatggggttgttt

SEQ ID NO: 18451 - DNA, 201 bp, Homo sapiens
ccaagtctttgctattgtgaatagtgccgcaataaacatacatgtgcctgtgtctttatagcagcatgatttataatcctttgggtatatacccagtaatsggatggctgggtcaaatggtatttctagttctagatccctgaggaatcgccacactgacttccacaatggttgaactagtttacagtcccaccaacagtg

SEQ ID NO: 18452 - DNA, 201 bp, Homo sapiens
gtagtaatatgtaaaaatatgagaagcaattacatgtctatccctccttgcagctgagtttgttgatttttactcaaatctgcatactcttaagtactctycaaaagagttgccttatttgtgcaattttttttttttttttttttttttgagacagagtcttgctctgtcacccaggctgcagtgcaggggcatgatctt

SEQ ID NO: 18453 - DNA, 201 bp, Homo sapiens
aggggagtaatgctgtgtccttactgggcagaaggtggaagggcaagagaatggaagactgtgaagcctcttttgcaagggccttaatctcattcatgaarggaggagccctcatgactaaatcttaaaggccccacctcttaatgctatcatattggccattaagtttgaacatctgaattttggagaggacacattgaa

SEQ ID NO: 18454 - DNA, 201 bp, Homo sapiens
gggtagatagatgtacaaaggaatgaataaacatgcatttagaacttacctgaaaagttacgtgttgcatgggaaggcaacatattatgatccaagttagmagaagcagtttctaattctatagtggttctaccattcactttttatgaccttgtcaatattaatctccctgtggctcagtttccagtgtcttcaatatta

SEQ ID NO: 18455 - DNA, 201 bp, Homo sapiens
ccccttagtttttcaatttcctacctctcagcctttgtttatagcattctgttatccaacaattaactggcttctttctttcctcttattcaaatctcacycttacttaaaaattggacttcattccctcctgttcatgaagcctcctcttccactccttctccagtgatccttgttttgcccctgactctgtgacacttg

SEQ ID NO: 18456 - DNA, 201 bp, Homo sapiens
cttgctcatttgcagctaggcttcttgggaagctttatgctctgtgtcctatctatttttctctaattttcacttttcctctgactcttacttttgccttkgtgattttttttctccacctcccctctctttgtttttgtccccttccccaaaactctttctgcctagatatctctctgacatccttcatcccttcgtgcc

SEQ ID NO: 18457 - DNA, 201 bp, Homo sapiens
aacaaattaataacaatttaaaagttaatgaataaaagatgcttttgattttaaactctaatagtatgtcatcttttaaatgtagtgataagtgctataarttaatgtttttcttagctcattttgatttttagttatgaaatattgcaaacctatggaaaagtacataatagcataaatacatatgtgtatatctaccac

SEQ ID NO: 18458 - DNA, 201 bp, Homo sapiens
aaaaaaaacttcgtattttatatgaaatgttctaggattgagtaattttaagcacgttgtccaacgtgtttaacgtgtctaatgagacagttgaatgttartagtttcattttctcatagtaggaaacagagcttttgtgagggacatggtacagtctgtatcgtcaggatctgccctattcattactacgaacatctagc

SEQ ID NO: 18459 - DNA, 201 bp, Homo sapiens
cccaaagtgcttgattataggcatgattcaccatgctcagcctctggatgcttttaagatttttctcattgtttcttgttttcagcagtttgactatgctstacctggtgtagttttatgtttgtcctttttttctaagatttttaaatatgtgggtttatgtttttcataggttcagaacaattcttaaccattatctct

SEQ ID NO: 18460 - DNA, 201 bp, Homo sapiens
ctctgtgtatctgtcagtggttacagaaatgtcacgttcaccatggttaacagttactttagatggaatggtttcagaatgacttgttgattgttttggtwcttttctgtaatgtttaaatgttttataataatataatgataactttttaaaacaaattattactataaaaatgagcaaaaggacaagaactggaaaaat

SEQ ID NO: 18461 - DNA, 201 bp, Homo sapiens
cttgttgattgttttggttcttttctgtaatgtttaaatgttttataataatataatgataactttttaaaacaaattattactataaaaatgagcaaaasgacaagaactggaaaaattaatttatggtataacaaatcagaatagtgcttactcgtaggagaattagtgcttataaggaaatacaagagtagcttctgg

SEQ ID NO: 18462 - DNA, 201 bp, Homo sapiens
ttgattgttttggttcttttctgtaatgtttaaatgttttataataatataatgataactttttaaaacaaattattactataaaaatgagcaaaaggacwagaactggaaaaattaatttatggtataacaaatcagaatagtgcttactcgtaggagaattagtgcttataaggaaatacaagagtagcttctggggtg

SEQ ID NO: 18463 - DNA, 201 bp, Homo sapiens
gatggttacaaaaagtatgcaaaaacaatttaaggaattttgtacaattattaagatgtttttattacatattttaataagataaaatatggtataatgtmagatggaaaaaaggatacaaaatgttatatatataatctaaattttgtaaaattgtacaattgtactgttttcaaatacaaggaaattgaaagagtagaa

SEQ ID NO: 18464 - DNA, 201 bp, Homo sapiens
atttttgttggtagatatggctaatttattggctaattttttaatttttgttggtagagctagggtttcaccatgttgcccaggctggtctcaaactcctrggctcaagtgagccaccacactcaaccagattcctttttattgacccatctgatatctgtctttctagatcaccactactaattaattgggtgatattga

SEQ ID NO: 18465 - DNA, 201 bp, Homo sapiens
ttgacttaggaagtcttattatggtgtaaaagctactataataagttgttcccttacataaataaataaatgaccaatattactagaggctataagcagcwtgggggaaaaatggaagaagtcttttatcctagttttcagagggcatcagcagcttgcttttatgaaaaagtaacagctaaatgcactgcaaataatttg

SEQ ID NO: 18466 - DNA, 201 bp, Homo sapiens
gaattgtctttagctctgcctaacttgattgattttattttttatctgcttctaatgtgcataaaatcttctaatctaaagtaaatgatttagtgtttctyggtttatttttcccatatattatgaattctatttggcttatagttaaaattgtacacatgtagccttcttgttaaaactatgctttttcaataaaataac

SEQ ID NO: 18467 - DNA, 201 bp, Homo sapiens
cttaggctttaatgcatattgagtccagatacagagtattagatctgatttgctgttggtatgcagtttgcttagatgtctactgattttgcctttgacaratttaaataaatgaaattgatgtttttgtagggtttactttggactgttgcactgtgcagtgggctggtgttgaaacacaatagcttttaaattgaactg

SEQ ID NO: 18468 - DNA, 201 bp, Homo sapiens
aagcagaagggagagagggtgggagaagtatgttatttgagtggataaggaggaatactgagaaggactgcccgctttcaaactgaggttcaaggagtctwagagcttctttgctggtttcttcctttcttcatgttgggaaaagggcttgtggggtgtctgtataaactggccataaaaatatgggacaataagttgtgg

SEQ ID NO: 18469 - DNA, 201 bp, Homo sapiens
tttgaggttgtagtgagcaatgattgcaccaccgcactccagcctggatgacagagtaagaccctgtctttaaaaaacaacaacaacaacaaaacaacccrtactacctgtggattgctctgacaggatttcacataatgtttaatgggacagatgggatttcatatcttaacaactgaaagatgttattctgtaaaaact

SEQ ID NO: 18470 - DNA, 201 bp, Homo sapiens
cctgaaaacttgtcttcctttctcaccttttatctagagagtcaccttcaaagggcagaatcgctggtactgcagctttttcaaatatcaggaacttcaaycaaataaaatgaaaaaggacatattctcctatgctttccacctatgaaccttacttttccctcagggcccaaatgtggctcccctcaattcctatgctcc

SEQ ID NO: 18471 - DNA, 201 bp, Homo sapiens
gagcccaggagtttgaggttgtagtgagcaatgattgcaccaccgcactccagcctggatgacagagtaagaccctgtctttaaaaaacaacaacaacaamaaaacaacccatactacctgtggattgctctgacaggatttcacataatgtttaatgggacagatgggatttcatatcttaacaactgaaagatgttatt

SEQ ID NO: 18472 - DNA, 201 bp, Homo sapiens
cccaggagtgtcattctaaaacactgcaattttaggaaaagccagtctgtccaatatctaaggacaatgggtcaatattgagcatgttttccttcagtgcytgagccactttattagggcagaatcctgggtccatctttcttctggaaggagagagaacagaagtgatagcaagacctcttcccacctggccaccttacc

SEQ ID NO: 18473 - DNA, 201 bp, Homo sapiens
accatcaaacccaggagtgtcattctaaaacactgcaattttaggaaaagccagtctgtccaatatctaaggacaatgggtcaatattgagcatgttttcyttcagtgcctgagccactttattagggcagaatcctgggtccatctttcttctggaaggagagagaacagaagtgatagcaagacctcttcccacctggc

SEQ ID NO: 18474 - DNA, 201 bp, Homo sapiens
cagaagataaccattaatagatacaaaaatatggtgagaattcagtattcacaaaggaaaataaaggaacaaatagcagttttacaaagccagaaaaaaawtaagaaagaaagaaaacaaatgtaaaataaataataagtatttaaaagtaataaagatggaagaaataaaatcaaatatttctcatcttgaatatgaatg

SEQ ID NO: 18475 - DNA, 201 bp, Homo sapiens
ttttccccaatgttttgttgtagtagtttcatggttggaggtcttagatttaagtctttaatccattttgattttatatttgtatatgctgagagataggkatctaattttgttttcctgcatatggatatccagttttcctagcaccatttattagagactgtcttttcctcagtgtatgctcttcgcatctttctcagt

SEQ ID NO: 18476 - DNA, 201 bp, Homo sapiens
tgtatgaacctaagatggaatttcaaattaatgaaaataatttcactgggataatttgaataagtttgttaaaataaagagatgaaacttttttagtttawatgatgactttctagtccatctataatttttatttattctagtaaatgttatttgttttccttatgtatattagattttttcaattaacaaaatatttac

SEQ ID NO: 18477 - DNA, 201 bp, Homo sapiens
ttgcttaaacccggaaggcggaggttgcagtgagccaagatcgcgccactgcactccagcttgagcaacaagagcgaaactccgtctaaaaaaaaaaaagsgttcccaaggcaatccccaaatgtcataataccataatggagatatactatctgtgattctttaacacctaataacaagtcagaggttttctgtggaaat

SEQ ID NO: 18478 - DNA, 201 bp, Homo sapiens
aggtggaattacagacatgtgccaccacacccagctaacttttgtatttttagtagagatggggtttcggcatgttggccaggctggtgttgaactcctgwcctcaagtgatctgccctcggcagcctcccaaagtgctgggattacaggcgtgagccaccatgcctggcctgtactttcttacatagtattccatttgcc

SEQ ID NO: 18479 - DNA, 201 bp, Homo sapiens
aggaggaaggattcagtcaaaattgggattgacagggtagagaggctccaaggcctttatgttcagtaataacatagggttgatgtcacctattccatttytttcccttcctcccgccctcaaattggatactagaactatgcaggaaaagcgactcagtgaaacaaaaaacataaggtcctcaggaagcaccaggatctg

SEQ ID NO: 18480 - DNA, 201 bp, Homo sapiens
ctgggcatagtagcgcatgcctgtaatcccagctactcgggaggctgaggcaggagaatcacttgatcccaggagacagaggtttcagtgagctgagatcrcgccattattctccagcctgggcaacaagagcaaaactcatctcaaaaaacaaacgaacaaacaaacaaaaaaagaaaacttcctatttggacaatacat

SEQ ID NO: 18481 - DNA, 201 bp, Homo sapiens
gaactatgcaggaaaagcgactcagtgaaacaaaaaacataaggtcctcaggaagcaccaggatctgcagaatcagggactgaaaaacccttattgtacasaaaggattattgcttagtctgcccagcaaagttggccatttttgtactgggcatatctaaatcaggcagaagtcactgcacgccaaacctgaaagcttgt

SEQ ID NO: 18482 - DNA, 201 bp, Homo sapiens
atcaaagagagacggtacctttggtgaaaccattgtttagctggttttcacttcatccagttaccagccaatcaaaagtttttccaccgatcatattttcrtaccattgattgtattaacctagtttaaatcaaatctaaaatatgtgtgcttattacaattattgaatggttgcatgtgagggttgttgggttttgtaaa

SEQ ID NO: 18483 - DNA, 201 bp, Homo sapiens
atgttcaccgacacattgtaagagcaaaaaaaaaagaaaaagaaaaaaaaaaaagaaaattggaaactacatctatcactagaatagatacataaattgtrgcatgcatatacaatggaatactgtgccagttgttaaaatgaatgaactggaaatacctgttagacaaatctcaaaaacaatagtaagaaacatcacagg

SEQ ID NO: 18484 - DNA, 201 bp, Homo sapiens
gcaactggcgaacaccaaatccaaattctggttacctctgatgccagaagcaaaaaggaaagcaatctgggatgggtatacttgtgattgtcattcagatktttaaagttttactcatgatgctcgatgggggagggatgttggattttgtttttgttttaatctattctttatacttctttgcctgaattattttatata

SEQ ID NO: 18485 - DNA, 201 bp, Homo sapiens
gtccgggttttgtgcttccaaattctattccttttcttccatatctttctgctttcctttagaattatatactaaatcaatctttgtatataccgtatgtkgtaaactccttagaattatttaattaatgaactgcatttatatgtcctgtaaaatcttatttgctccatggtaggtcttttgcttcttagatggtgcaaa

SEQ ID NO: 18486 - DNA, 201 bp, Homo sapiens
ttagccatgtagttgattgtggatggtacctttttaaaaaacattcagtaagaagaattgacagtattctaacatgagtttaaagcaggatttgcctttgrcaaagccagacacagatggtctgactttcagatggtggaatactagctgtattacttaaggcttgcattttgcaatgtattcatgaatatagtcaataaa

SEQ ID NO: 18487 - DNA, 201 bp, Homo sapiens
gacaaagatctcttagagaagatatacatatgtaaccttggaactgagtctggaagatgagtttgcctaggtggctggagtagaagaatgacgctcctagmagaggaactagtatacctgaaggcttggggtgtggaagaactggagtattgctgaaacagtatttcaatgtagggtttaagtataacatgtgtaaccaga

SEQ ID NO: 18488 - DNA, 201 bp, Homo sapiens
ctagagcaagtattctttggctaattggagaaaactgtgaacgagttcctaaaattgcccctgatgttttgaggaagatggctaaaagcttcactagtgargatgatctggtaaaactgcagatattaaatctgggagcaaaattgtatttaaccaactccaaacaggtgagaggcaaatgttagtcaacctatctaatac

SEQ ID NO: 18489 - DNA, 201 bp, Homo sapiens
atttctttcttttctagttggtagctggcagtgttgtgatggcttttgaagaagtatgcccggacagaatagatctgattcataaaaattaccgcaagctrtgtaacttactagtggatgttgaagagtgggggcaggttgtcataatccacatgctaactcgatatgctcggacacagtttgtcagcccttggaaagagg

SEQ ID NO: 18490 - DNA, 201 bp, Homo sapiens
gcatatttaaggaagactcatttgtctcttgttcttttactaaagcaggcaaccaatataaatgcaagcataattatccattattttggcactgattgatrcatatttattggtgtaagtatatacacttttagtttgatactggcaagaggcccttgttaggaggagcagcatgacacagtgtttacagtgacattgcca

SEQ ID NO: 18491 - DNA, 201 bp, Homo sapiens
ttttttgggcgggggtaatttcatcctgtttttagtatgtctcgtaagttttgatcagatgctaggtatttaggataaaaatgattgatgaagctttgggwgatagcttcttccatacagggctgggtttttgtttttgtttttttttccagccaagcaaatagaatgtaagcagatcattctgatcttgtcaaagctcag

SEQ ID NO: 18492 - DNA, 201 bp, Homo sapiens
aagccacgttacgtagggttaaattaaaatccatctgatgagaatttatggtttgtagggcaggactcctcaggccccttaggaatttgggcaagagagaraaaagtcagagtttagtcctcacaagtacagaggaataatctgaaactattcatgagattttaccttggatttttaaattaagacgttgtttgttaccct

SEQ ID NO: 18493 - DNA, 201 bp, Homo sapiens
tatttttgtactcttattttttattttttgagacatgtcttactctgttgcctaggctggagtgcagtggtgtgatcatggctcactgcagcctcaaccayctgggctcaagtgatccttcccacctcaggcttccgagtagctgggactacaggtgcatgctaccatgcccagctaatttttgtatttattgtagagatg

SEQ ID NO: 18494 - DNA, 201 bp, Homo sapiens
caacctcccaagtaggtggaattacagacatgtgccaccacacccagctaacttttgtatttttagtagagatggggtttcggcatgttggccaggctggygttgaactcctgacctcaagtgatctgccctcggcagcctcccaaagtgctgggattacaggcgtgagccaccatgcctggcctgtactttcttacatag

SEQ ID NO: 18495 - DNA, 201 bp, Homo sapiens
tggctcactgcaacctcttgcctcctgggttgaagcgattcgtctgcctcaacctcccaagtaggtggaattacagacatgtgccaccacacccagctaayttttgtatttttagtagagatggggtttcggcatgttggccaggctggtgttgaactcctgacctcaagtgatctgccctcggcagcctcccaaagtgct

SEQ ID NO: 18496 - DNA, 201 bp, Homo sapiens
cttggctcactgcaacctcttgcctcctgggttgaagcgattcgtctgcctcaacctcccaagtaggtggaattacagacatgtgccaccacacccagctracttttgtatttttagtagagatggggtttcggcatgttggccaggctggtgttgaactcctgacctcaagtgatctgccctcggcagcctcccaaagtg

SEQ ID NO: 18497 - DNA, 201 bp, Homo sapiens; identical to SEQ ID NO: 9407

SEQ ID NO: 18498 - DNA, 201 bp, Homo sapiens; identical to SEQ ID NO: 2009

SEQ ID NO: 18499 - DNA, 201 bp, Homo sapiens; identical to SEQ ID NO: 2010

SEQ ID NO: 18500 - DNA, 201 bp, Homo sapiens; identical to SEQ ID NO: 2011

SEQ ID NO: 18501 - DNA, 201 bp, Homo sapiens
aaactgagaagacaaaattcttttcaagtttccaacatgacagttcttgctattaggggaaaaagggggggagctatagataagaacatgagttatagatwagaacattagaaagtttttcgaataagataccctggggaatgcaaatccccaaaatactggttgacatgcttgcaaatgctgtttctgggtatttggggc

SEQ ID NO: 18502 - DNA, 201 bp, Homo sapiens; identical to SEQ ID NO: 2013

SEQ ID NO: 18503 - DNA, 201 bp, Homo sapiens
tgtcttggactctggttgtggaagagatgataagtacttggagttgggatcagttgcaagtcttaccaaggttattgaatgttgcagattaaaggagaccygcctggtgccttgattagcagcctcagattttgcctttttagtgttggctcaaatatttttggatcatatctcatatgtaactcctaaattctgacttca

SEQ ID NO: 18504 - DNA, 201 bp, Homo sapiens; identical to SEQ ID NO: 2014

SEQ ID NO: 18505 - DNA, 201 bp, Homo sapiens
caccctaataactgcttacggtataatcagtatgatgatgagattgagggggtctaaatttaagttccttatctcctgagttatgtgaaaatatccctcartacaaaacatttgtgtgtttcacagatgactctcttgttttgccgtaatgctaccaagtttatggaaactagtcaactgaaggatttttctgttgtgtta

SEQ ID NO: 18506 - DNA, 201 bp, Homo sapiens
taaaaataaactttgtaagcagattttaatttagtctttgtacttgaagacccactgtgttggagggcaattgtcttggcttcatgtagagaaaaaacaargtttctggtactgtgagtgatcactttggtatggctaaatcatagcagaatttggtgaccttctcctcacaaattggtattctgcaagctttggaaaatg

SEQ ID NO: 18507 - DNA, 201 bp, Homo sapiens; identical to SEQ ID NO: 2016

SEQ ID NO: 18508 - DNA, 201 bp, Homo sapiens
tttaagtgactttttcaagaattaaacattttcacttgttccccattaaattttgatctgtgtgtgcaagatacatctcctattcatcagtcaatctcagrctttagaacagagttgggcatacatgaatacagtagagtaagcccctttcattaaatgaacaaattcattagcaaaggaacaaacattgtaaacccttta

SEQ ID NO: 18509 - DNA, 201 bp, Homo sapiens; identical to SEQ ID NO: 9411

SEQ ID NO: 18510 - DNA, 201 bp, Homo sapiens
tactggagacgggctaaagctgcttttcccttaaagtaagtttcctacagataaggtatttatgagcactgagaaagtcaggacatgtactctaaatcacwcagaatgttaattccacaggaaggcaatgccagacattgaaagaggatcacattcaacttttaatagtagttcaataacaaaaccttagcttttcaggaa

SEQ ID NO: 18511 - DNA, 201 bp, Homo sapiens
tttgaaatgttcttctacaaatgaaaaagatgtttaaaaacgttacaagggaagctatgccttctgaagtctatccttagttgaaacagaaaataaacacmaaggtacaagatccttaaattattttgaaccacagaggttgaaattgttttgtgatcttcagcagaaataaaatctgtacatgattttcttttatgcctt

SEQ ID NO: 18512 - DNA, 201 bp, Homo sapiens; identical to SEQ ID NO: 9414

SEQ ID NO: 18513 - DNA, 201 bp, Homo sapiens; identical to SEQ ID NO: 2019

SEQ ID NO: 18514 - DNA, 201 bp, Homo sapiens
agatactgaggactgacaatccgatgtgggtgtttaacccatctgtttatataattatttgacactaatgttgactgagtgctatttatttatttattttrccagtgtacccatcagtggaaccaggatggttaaaggcaacttatgaaggcaaaacaggactagttccagaaaattatgttgtcttcctctaatactatt

SEQ ID NO: 18515 - DNA, 201 bp, Homo sapiens; identical to SEQ ID NO: 2021

SEQ ID NO: 18516 - DNA, 201 bp, Homo sapiens
aatacaaattttaaaaatatatagtataacaactatttacatagtatttacattgtaaaaggaattacaaataatctagaaatgatttaaagcatacaggrggatgtccctagggtatatgcaaatattacatcattttatatcagggacatgagcatgcacagtttctggtatccacaaggggtcctggaactaatcccc

SEQ ID NO: 18517 - DNA, 201 bp, Homo sapiens; identical to SEQ ID NO: 9415

SEQ ID NO: 18518 - DNA, 201 bp, Homo sapiens; identical to SEQ ID NO: 2023

SEQ ID NO: 18519 - DNA, 201 bp, Homo sapiens
aagccatttagccaaccaggttggaaatgctattgtcttggactctggttgtggaagagatgataagtacttggagttgggatcagttgcaagtcttaccmaggttattgaatgttgcagattaaaggagacctgcctggtgccttgattagcagcctcagattttgcctttttagtgttggctcaaatatttttggatca

SEQ ID NO: 18520 - DNA, 201 bp, Homo sapiens
gcattctctggatcagcctgtgctagagggaggaaaacaaaaatacgtatttctaaccctcatagatgtttatattcatcacatcacctatttacagaccttttttttttttttttcaaagaatgggtgcaattacccaattcaaatagctttcaaaagtatttttggagcaactggaacagaatcattttcttcgaataa

SEQ ID NO: 18521 - DNA, 201 bp, Homo sapiens
ttttattgtgtctaggggagaagataaaaatatcagcaataataacaaaataccagatactaacaccatgcagacttgaagcaggaagatatgatagttcyctgggcagctatttcagagaaggcctgaccttcagcaaagttcttgaaatttaagatgaacctgaagtacatggccatgtgaagatcaagaggaaaacat

SEQ ID NO: 18522 - DNA, 201 bp, Homo sapiens
agatagtctttgggaaccccagtttaaatggctggacctcattctggaagtgtagggttaagatccagggttgagctccaacagggaaatgaaattataaygtaatgctgctgctttgggagagctgtggatgcaaatgctgctgacgctgctttgcaggtatagtgctgggaccccaaggaggatagataaggtgccctg

SEQ ID NO: 18523 - DNA, 201 bp, Homo sapiens
cagttaaaaatatgagtcaagctgctagcctcagtgcctacatgtgtgctgaagaatggcctgcacttcacccatgcaggtccacagctgctttttttttytttttttttttttttttttttctgagacagtctcgctctgtcacccaggctggagtgcagtggcacagtctcggctcactacaacctccccctcctggct

SEQ ID NO: 18524 - DNA, 201 bp, Homo sapiens
tctctaaaaccaacctatattgttataagccagggattaccctggagagcattgcctagaaacacaagaaaggtttctagtgtgctagtaatccttgattkcttgatctggtaatatgattgtgttcagtgcaaaaagcaccgatgtacactcatatatgcactttatgtacattatgttccaattacaagtaaaaattaa

SEQ ID NO: 18525 - DNA, 201 bp, Homo sapiens
ctttttcaagaattaaacattttcacttgttccccattaaattttgatctgtgtgtgcaagatacatctcctattcatcagtcaatctcaggctttagaamagagttgggcatacatgaatacagtagagtaagcccctttcattaaatgaacaaattcattagcaaaggaacaaacattgtaaaccctttaataatttaa

SEQ ID NO: 18526 - DNA, 201 bp, Homo sapiens; identical to SEQ ID NO: 2012

SEQ ID NO: 18527 - DNA, 201 bp, Homo sapiens
taaacattttcacttgttccccattaaattttgatctgtgtgtgcaagatacatctcctattcatcagtcaatctcaggctttagaacagagttgggcatrcatgaatacagtagagtaagcccctttcattaaatgaacaaattcattagcaaaggaacaaacattgtaaaccctttaataatttaaagaatacggttgt

SEQ ID NO: 18528 - DNA, 201 bp, Homo sapiens
gtcaatctcaggctttagaacagagttgggcatacatgaatacagtagagtaagcccctttcattaaatgaacaaattcattagcaaaggaacaaacattrtaaaccctttaataatttaaagaatacggttgtgggcttgtgtttttatgtctgtcaattctcccaggaacagtgaaatcattcttcaacatccatgaat

SEQ ID NO: 18529 - DNA, 201 bp, Homo sapiens
agactgttgagctcatgaaaaataggtaaatactgagcaaatgtcacagatcagaggagacttaggagacagggcaactaaatgtaatgtggaaccctggrctggatcctggaacagaaaggagaaaataatagcgggcgtggtgcctcgcgcctgtaatcccagcactttgggaggccgaggcgggtggatcacctgagg

SEQ ID NO: 18530 - DNA, 201 bp, Homo sapiens
tttcaagtttccaacatgacagttcttgctattaggggaaaaagggggggagctatagataagaacatgagttatagataagaacattagaaagtttttcraataagataccctggggaatgcaaatccccaaaatactggttgacatgcttgcaaatgctgtttctgggtatttggggcaaatgagccaagcatagcatt

SEQ ID NO: 18531 - DNA, 201 bp, Homo sapiens; identical to SEQ ID NO: 2015

SEQ ID NO: 18532 - DNA, 201 bp, Homo sapiens
ccagttaaaaatatgagtcaagctgctagcctcagtgcctacatgtgtgctgaagaatggcctgcacttcacccatgcaggtccacagctgcttttttttyctttttttttttttttttttttctgagacagtctcgctctgtcacccaggctggagtgcagtggcacagtctcggctcactacaacctccccctcctggc

SEQ ID NO: 18533 - DNA, 201 bp, Homo sapiens
gtgatccgcccacctcagcctcccaaagtgctgggattacaggcgtgagccaccgtgcccggccaggtccacagcttctggcatctccatggaacgcttaragcttttcagagcaaggttaccaaataattcagtccaagcctctcattgtgctaattaggaagctgaagaccacattaacatagtttcagcagaatggtg

SEQ ID NO: 18534 - DNA, 201 bp, Homo sapiens
ccaagtttagagaggaaagaaagagaggattagagaaggcttcacacacaaaaggaaccatcctaactagaccctgaaggacagaacaccaacagaaaacraaggcagcaaaggcccagagacttcaacagagtttctgatggattaaattaattctgagtggccaggggtttggctgcttgctcaagcatgttggcctgt

SEQ ID NO: 18535 - DNA, 201 bp, Homo sapiens
cacctcagcctcccaaagtgctgggattacaggcgtgagccaccgtgcccggccaggtccacagcttctggcatctccatggaacgcttagagcttttcaragcaaggttaccaaataattcagtccaagcctctcattgtgctaattaggaagctgaagaccacattaacatagtttcagcagaatggtgagctcttatc

SEQ ID NO: 18536 - DNA, 201 bp, Homo sapiens
ctcaatgagtgacctttcgacctcttaaaagctgtttagttgcagaatctcagaccttctgaatcagaatctgcatgttaacaagctccccagatgatatstataaacgatgaggtttaagaagcacaggtttagcagaactatgaacgagttctttggggctacctgagggcaattttgagatgtttgagggcaagatat

SEQ ID NO: 18537 - DNA, 201 bp, Homo sapiens; identical to SEQ ID NO: 9410

SEQ ID NO: 18538 - DNA, 201 bp, Homo sapiens
aataatggctccagtgtatatgatacatagccattaatcaagtgtttcccatgcactgtgtcacagcaaactccagtcctcccaactaccagataccgtcrctggatgtctcctctgctctttttatttttccaggaaagaaaactaaggctctgacaggtgaatttatctggcttattcattatcatatcattggtatat

SEQ ID NO: 18539 - DNA, 201 bp, Homo sapiens
gtgagcgccttatcgtgtgaataagtgttagacctgagcgtcattactcaatgagtgacctttcgacctcttaaaagctgtttagttgcagaatctcagamcttctgaatcagaatctgcatgttaacaagctccccagatgatatgtataaacgatgaggtttaagaagcacaggtttagcagaactatgaacgagttct

SEQ ID NO: 18540 - DNA, 201 bp, Homo sapiens
aaagaggtatttggcaaactcgaccttctccagaagaaagatgaagatggtgagcgccttatcgtgtgaataagtgttagacctgagcgtcattactcaaygagtgacctttcgacctcttaaaagctgtttagttgcagaatctcagaccttctgaatcagaatctgcatgttaacaagctccccagatgatatgtataa

SEQ ID NO: 18541 - DNA, 201 bp, Homo sapiens
tgagctactgtttaagaatgttggttaagactgttggcctggaatcccctataactgatattttagaattaaaaatgaattaacttccagtggccaaagcyggaatgatttgagcaacaaaataatgcagtattgaatgattggcttataaaacaaagtataaaatgaatatccatgaatccacatggatatcaatgacaa

SEQ ID NO: 18542 - DNA, 201 bp, Homo sapiens
tttctgagctgaaaccttaacaaatagggaatttggcagggaagacacctgggtttttaattcagaaccctatttatatactgttaaaatttgaggtactrtagtttatataaaagtcggatgttaagatattatatttcagtactaggagcttctttgcagtcattaacatgacaaattaagtaataaatataaaagtga

SEQ ID NO: 18543 - DNA, 201 bp, Homo sapiens; identical to SEQ ID NO: 2018

SEQ ID NO: 18544 - DNA, 201 bp, Homo sapiens; identical to SEQ ID NO: 2020

SEQ ID NO: 18545 - DNA, 201 bp, Homo sapiens; identical to SEQ ID NO: 2022

SEQ ID NO: 18546 - DNA, 201 bp, Homo sapiens
acaaaataaataaataaataaataaataaataaataaataaataaataggccaggcgcggtgactcatgcctgtaatcccagcactttgggaggccaaggygggcggatcatgaggtcaagagattgagaccatcttggccaacatggtgaaaccctgtctctactaaaaatacaaaaattacccgggcatggtggtgtgc

SEQ ID NO: 18547 - DNA, 201 bp, Homo sapiens; identical to SEQ ID NO: 2024

SEQ ID NO: 18548 - DNA, 201 bp, Homo sapiens; identical to SEQ ID NO: 9417

SEQ ID NO: 18549 - DNA, 201 bp, Homo sapiens
aggagatgctacttggaggtccccagagagcagggagacaaatgaacccagaacacaaatggcaaagaagaaaaatgagagaatttgtaaaagacagcatkcgaacatgccgaacaagagcagggtactggtgttcaaacacctgtatctcccccgtgtaacccgtcaactaatatctttccatatttgctccagatttgt

SEQ ID NO: 18550 - DNA, 201 bp, Homo sapiens
aaacacctgtatctcccccgtgtaacccgtcaactaatatctttccatatttgctccagatttgtctttagaaataaaacccacgttctgaagtcctgttygtatgtggccccagtcctgttgcctccgcctcctgtcctgaagtcgatttctgcccttctcatctatggttagttttgttttgtatgttggcatgttttc

SEQ ID NO: 18551 - DNA, 201 bp, Homo sapiens
aggaaagttattggaacatcatacttttcaccctaaagtcccaggcacaggaatctttggttattgggaaaatacacacaaacacacatttgtttgagtgkgtttatattacataatactgtactcacagatacattttaaaaaaatatcttaactaagatggcagtatatgatcattaactaatactttcaggcacaaca

SEQ ID NO: 18552 - DNA, 201 bp, Homo sapiens
gtccttttatggtttcctttggtcattgtcatggtgattatcaactgtcacggtgctggtgggaatgtcatttagcatggaaagtagattataatgaagtyagaagttcttcagaggtcaagtgagctgccttcttggatctcagtgtttggtcatgtggggcaccttctgaccacaggtatcctgtttcctaaaggtaag

SEQ ID NO: 18553 - DNA, 201 bp, Homo sapiens
cggctgggcacacagtaggtgctcagtgtcccacctaggaccacacagcagagccccaacagaagcagggctggagcccaggtcccggctcccaggctggraagggtgccgggcctcaggtgcagcactgtgccacctctggaggtgggagggggcgggatgctggtggtgtgctgtcctgggcagcaggggacaggcagg

SEQ ID NO: 18554 - DNA, 201 bp, Homo sapiens
tgagggtagataacttggctggacatagatagcaccaaatactaacacagatagactatcccagaaatgcctctgaatgtattttttctattgagaaacargtttctgctgccatatacgtttttaaaatgtcctgcatgaaaacaaaagaaaacttcagatagtaataaaatactttatctgtgagctgtgctactgact

SEQ ID NO: 18555 - DNA, 201 bp, Homo sapiens
gctgggtcttagctctggttctccagggtgtgggctggggccaggacacagctgggaagccagttgggggttgggggagtgccccaggcagggcccacccrtctccctgggctaactcccctgcctcacccatacccccacagtaccctggcgtggcccagagcatcaacagtgatgtcaacaacctcatggccgtgttga

SEQ ID NO: 18556 - DNA, 201 bp, Homo sapiens
tcatcactggccagctggctgcactgagctgcagggggcctctgtgggtggacgggagagacgggcacccctgggctgtgctgcccttggcctgagcgccsttcccttgaggacagccctctggctgaagccacttggccccatgtgcaaatgcatgccgaccccacaggtgcagcgggcctttgtgcagtgccctgggtg

SEQ ID NO: 18557 - DNA, 201 bp, Homo sapiens
agtccctagggtagggtgggtaaaacaggaggcaggggcttctctggccccagtctcccagggcaccaggcagtgtggtgctgcctgacacagacccttcrcgctgtccacagatctgctacaacatcctggttctgtgcctgagggagctgttcgagttccacttcatgcaaacagaccccaactggtccaacttcttct

SEQ ID NO: 18558 - DNA, 201 bp, Homo sapiens
acatgtgctgaccacagagctggtgtctggcttccccctggaccaggccgaagggctcagccaggagattcggaacgaggtttgtctgtgccagcagacasgtggggccagggtggccctgctgtgtggctgtttggtgacctaatagtgtgagctggggacttggagccctgaggtgctccctgggggtgaggggcagtg

SEQ ID NO: 18559 - DNA, 201 bp, Homo sapiens
cagagcccctccctggccctgcccttcagaaaactctcaacaacgacctgggccccaactggcgggacaagttggaatacttcgaggagcggcccttcgcygccgcatccattgggcaggtgcacttggcccgaatgaagggcggccgcgaggtggccatgaagatccaggtaggcggcctgatgcgcagtgcctgtccct

SEQ ID NO: 18560 - DNA, 201 bp, Homo sapiens
tctggcctcacccgtgctcctggtggggagggtgtggtggccagggcatcccaggagtgtgcccgcccaggtcctgggcgcacactttaatccccaggttygccctgtgtcattctcctgccttccagatgatgcctttatcaacccccacctggctaagatcttcgagcgggtgcggcagagcgcggacttcatgccact

SEQ ID NO: 18561 - DNA, 201 bp, Homo sapiens
ggggcagggtgggccccgggagggttgagcctgtcagcccccagccccacctgtgctctgggagtgtcagccagctgggccgcatttgcatggggttccaygtaagtggcgtccctggggtgatgaggctgttcatacagacagattgacctgctttagagggggtgaggctggaggcccttcctcctcccagcccaaagt

SEQ ID NO: 18562 - DNA, 201 bp, Homo sapiens
tcgaaggcccttcccactgagcctgctgagcctccgccaaggcctggcctcatttttctccttcagtttgctgagggtctctgcactcctgactgggggcyctcctttccttggtggcagctggcacagcccttccaagaacagcttcatctccagcctctctctcatccctgtgccatctaggggaggagatgacctttt

SEQ ID NO: 18563 - DNA, 201 bp, Homo sapiens
cccgggagggttgagcctgtcagcccccagccccacctgtgctctgggagtgtcagccagctgggccgcatttgcatggggttccacgtaagtggcgtccstggggtgatgaggctgttcatacagacagattgacctgctttagagggggtgaggctggaggcccttcctcctcccagcccaaagtggccacccagcccc

SEQ ID NO: 18564 - DNA, 201 bp, Homo sapiens
ggaagggtcagcttgagaccaaggctcacaggaggtgtgctcgcccctaggtgggctccagcctgtggaggacagtgcaggggagggtgaggagtgtacckgccccagcgtggctgagcacacagcctccaggccgaggacccagctgacagctttgcgcagtgatgataccctcgaggtggttgtgatgacatcagattt

SEQ ID NO: 18565 - DNA, 201 bp, Homo sapiens
attttaattattatatgggaggcaggggagctttaagagtaaagccccagaggcagaaagccaagggaagagttggagaaatggcccaggtaagttggagyacaagttctagaagttgctgctaaggcaagaaatgtttccccaatacaaagatatctcagagttcagataacacctgaggaactaggataataaagtcag

SEQ ID NO: 18566 - DNA, 201 bp, Homo sapiens
cacagtgacaccgacaggtgttagtagcacagggccaggggaccatcatgggagtgatggggcagaaggagggccctgcccaggctccctcactgtcaagscttccctgggggctctgtgaatttaaatatgacttctgtggttttttattttttatttttttgagatggagtcttgctccattgctcaggctagagtgca

SEQ ID NO: 18567 - DNA, 201 bp, Homo sapiens
aaccccccatgctttgtgttctagcagacagcttcctgcaaagagccatcttcccagagcacttaggcctcttagatgtctcccttgtttaattatgacargagcacacacacagaccctccaaattcccattcttagtcttctaaatgattagctgagctgcttttccccactgattaatcggaataaaatgctcattaa

SEQ ID NO: 18568 - DNA, 201 bp, Homo sapiens
tgtgatgaatgactccccgtgctcacccattcacactgagacatggggcatgagaacatggcaaatcatggcttgattttcccagggtctgtgtcttcgtrtccctaacatctagtgaagggctggacaccacacaacaaaaaaatatttgttactgtaggctttggcggttactcataaggacaaaacactaaaccatag

SEQ ID NO: 18569 - DNA, 201 bp, Homo sapiens
ttcttttgtacctattttgatttttacagtattgtgatgaatgactccccgtgctcacccattcacactgagacatggggcatgagaacatggcaaatcayggcttgattttcccagggtctgtgtcttcgtgtccctaacatctagtgaagggctggacaccacacaacaaaaaaatatttgttactgtaggctttggcg

SEQ ID NO: 18570 - DNA, 201 bp, Homo sapiens
ccaggccagccccagccagggctctcacagtctcctcttcctcttgaacaacaagccaaacaagtcaagcagcagcatgcggggggaagggagaggagaasaacagcagccagcatttgcttccccaggaaccacgaccataactgctggaacaggagaagttttctaagggaaaactggaatgtggtttgtgtgtcctaa

SEQ ID NO: 18571 - DNA, 201 bp, Homo sapiens
agaggggagttgaaagcttcaggagaattgaacatcattcttacccgagctaaggaagaaattaagaaagtcctagattaaaccacaggggcaaactaacyccatgtccttttacggcataaagaagcagcctggatgaggaaggaggccagcagaaagaagagaagtgacaggcggagaggtggcacctttctctatttc

SEQ ID NO: 18572 - DNA, 201 bp, Homo sapiens
actggttcagcgtgaggcccttggccctgaacctggaaggctcagccccgttccctgtaagaagggaggtgggaggggtggagaacaggaggagaggttgyggtgtcactgccccagcccccgggaggctgtaccacactgctgaagctgctgtacctggtgatggtggcaactgggaggacagtgacacctgccagcacg

SEQ ID NO: 18573 - DNA, 201 bp, Homo sapiens
gtcttgtttaagtgacacaaaatcaaactgctcccacattcacactgtcagggccactcaggaaacctcacgcagccagggtttggtcttgtggaccgaartaacagcaacagcgaagttctggccagaagaggggagttgaaagcttcaggagaattgaacatcattcttacccgagctaaggaagaaattaagaaagtc

SEQ ID NO: 18574 - DNA, 201 bp, Homo sapiens
tgtattctggagaatgacgacccgtatcttctagctcgtggtggtggttcttttctgacctgacggtcagcaggttcagtgtcacagcccatttgcaaggkttgggactggttcagcgtgaggcccttggccctgaacctggaaggctcagccccgttccctgtaagaagggaggtgggaggggtggagaacaggaggaga

SEQ ID NO: 18575 - DNA, 201 bp, Homo sapiens
ccacccctggaccttccctgtatgttcttagatgaaccattctaactccagaaaagcagtaacagtccgtcttgtttaagtgacacaaaatcaaactgctyccacattcacactgtcagggccactcaggaaacctcacgcagccagggtttggtcttgtggaccgaagtaacagcaacagcgaagttctggccagaagag

SEQ ID NO: 18576 - DNA, 201 bp, Homo sapiens
tagctgccaccagttcaggagttcctttaaccccacccctggaccttccctgtatgttcttagatgaaccattctaactccagaaaagcagtaacagtccrtcttgtttaagtgacacaaaatcaaactgctcccacattcacactgtcagggccactcaggaaacctcacgcagccagggtttggtcttgtggaccgaag

SEQ ID NO: 18577 - DNA, 201 bp, Homo sapiens
gctcctcacaggcgctgtgaatttttgtacaagtcttgtaattatcgaatcaacaacttgtttcaatttaataaaaatgctcatgggaagtgctttggcgygtgtaccctcttctgtattctggagaatgacgacccgtatcttctagctcgtggtggtggttcttttctgacctgacggtcagcaggttcagtgtcacag

SEQ ID NO: 18578 - DNA, 201 bp, Homo sapiens
aaaaaaaaaggctcaggcaatggcttagagtgttttgttcagccttgcaaatggtgcggactatgcagaatcgtaatgatttggggcctaatgttgagcawctcaaaggaaaagtgaaccaggcagaatgggcacctccctcagagccagtgtgttatctaagacaaagtttttcaacctgtggactaatgacattttgga

SEQ ID NO: 18579 - DNA, 201 bp, Homo sapiens
cttccttccccaggcttatgtgaagaagcccacgcccactctcaacaaaacagactcctccttgggaagcatctccagccctgggacagacacctcgctgygacttagggagggacaggattagcccaggaataaaagcatttttagaaattgttttctgcaccttcagaagctacaacactccttgtaacctttcagatg

SEQ ID NO: 18580 - DNA, 201 bp, Homo sapiens
cagaaaagggttgccaagccctgttctaaagcactgcacagctgacactacagtaaaccaacataacagtatcagccacaaatgtcaattccatgggccaytggaaccggaagtattctccgaataactacttagctgccaccagttcaggagttcctttaaccccacccctggaccttccctgtatgttcttagatgaac

SEQ ID NO: 18581 - DNA, 201 bp, Homo sapiens
gaagggtggacagaaggggtgcgagctggtcacgagcaccaagcagggggccggctggctgactcccttctctcacgtgaggtgctgaggacaaggatctmccaagtcatatgacaatgatccaactaaagggccaacccttggtattcaggtgagaaaagtatttttatacttcattctaaaaagcagaaagatttggga

SEQ ID NO: 18582 - DNA, 201 bp, Homo sapiens
aagaggtgacaatatattagttttttaaagaaaaaactttttataattaattgccacttgccagagtttgagattttcttaagaattcaggttaaacttamaaaatcatttttaatacagaaatcaatgaaaaatgatccaaagacattagtttcatgcattggtaatcgttaccaaaagccttacagtgtgcaattttgt

SEQ ID NO: 18583 - DNA, 201 bp, Homo sapiens
aaggttgatgctccagtgtccagaaggttttctttttgcccacaagtatatcagggatgggatggtggacccaggctcctccaccaccagactgccttacmtgagccctgctggccccaaagatatagaaggcaccctggttccctgtgctcacctggaccactgcctgcatcagctgggtcaggggaggatgggcagccc

SEQ ID NO: 18584 - DNA, 201 bp, Homo sapiens
tacagcagagcacggcccaccatggcgtcaccttgcacagttgccagcagcttccctgacagtcaaggagacagggtggggggtgtttgtgtgcctgttgygcgtgtgcacctgtgtgtgtgcgcttaggcatgtgtgcattggaggttgtgtcgcagcttctctccttccacgtctgttctgtggatggctgatttctgg

SEQ ID NO: 18585 - DNA, 201 bp, Homo sapiens
catgagcaacatgcttccagaaggtctgaggctaggtggttgggtcaagggcaggagtgggtggcaggcatctgtgttgggttctggggaccagagggggwcctccctgcagagcccccttcctcgctgatgccctcctccctggcccaggcctgttccccgagcacctgatcgacgtgctgaggcgggagctggccctgg

SEQ ID NO: 18586 - DNA, 201 bp, Homo sapiens
atcagggagttaatgtttaaacggggactgtgtctcccagctctgagcccagggctttctacagcgagagaaagagctgatgtacctgccaggcacccccrtcccaacacagcagacatctgtaccatgtgtgttgtcactcctgagggccaggaggctcagcttatcctgccccatgctgcccagtacggagccgccagc

SEQ ID NO: 18587 - DNA, 201 bp, Homo sapiens
cccggtccttaaagcggcggcaccctccacgccccgcagtcgcgtctgcttggtccacagcctcccctcccaggcccgcgcagaggcccagcaagcaccartctggaggcaacaagcacgcaggggtgcctttgcggccacgcacactgcatcgcagtgaaaaaggctcccgttctcaaggcgcatgcgcgcaggccagca

SEQ ID NO: 18588 - DNA, 201 bp, Homo sapiens
atgctggcctttgctccctgcagggtcaggataaacatgaagaatattttgctgagaacttcggcggcccagaaggggagttccacttctcagtcccgcakgcagccggagcctccacagacttctcttcagcctccgctcccgaccagtcagcgcccccatccctgggtcatgcccacagcgagggcccagctcctgcct

SEQ ID NO: 18589 - DNA, 201 bp, Homo sapiens
ccccagccagggctctcacagtctcctcttcctcttgaacaacaagccaaacaagtcaagcagcagcatgcggggggaagggagaggagaacaacagcagccagcatttgcttccccaggaaccacgaccataactgctggaacaggagaagttttctaagggaaaactggaatgtggtttgtgtgtcctaagtctgagag

SEQ ID NO: 18590 - DNA, 201 bp, Homo sapiens
caaaggctcctcacaggcgctgtgaatttttgtacaagtcttgtaattatcgaatcaacaacttgtttcaatttaataaaaatgctcatgggaagtgctttggcgcgtgtaccctcttctgtattctggagaatgacgacccgtatcttctagctcgtggtggtggttcttttctgacctgacggtcagcaggttcagtgt

SEQ ID NO: 18591 - DNA, 201 bp, Homo sapiens
gccccagccagggctctcacagtctcctcttcctcttgaacaacaagccaaacaagtcaagcagcagcatgcggggggaagggagaggagaacaacagcagccagcatttgcttccccaggaaccacgaccataactgctggaacaggagaagttttctaagggaaaactggaatgtggtttgtgtgtcctaagtctgaga

SEQ ID NO: 18592 - DNA, 201 bp, Homo sapiens
agccccagccagggctctcacagtctcctcttcctcttgaacaacaagccaaacaagtcaagcagcagcatgcggggggaagggagaggagaacaacagcagccagcatttgcttccccaggaaccacgaccataactgctggaacaggagaagttttctaagggaaaactggaatgtggtttgtgtgtcctaagtctgag

SEQ ID NO: 18593 - DNA, 201 bp, Homo sapiens
caggtgtcaccagttccagccaaaggctcctcacaggcgctgtgaatttttgtacaagtcttgtaattatcgaatcaacaacttgtttcaatttaataaaratgctcatgggaagtgctttggcgcgtgtaccctcttctgtattctggagaatgacgacccgtatcttctagctcgtggtggtggttcttttctgacctg

SEQ ID NO: 18594 - DNA, 201 bp, Homo sapiens
ctggggggagttggaagaaaccttagaagccttttaaataaaggggaacggtctgtgctggtgccgcctgaagccacccacaaagtggcattttccgcttsctgcttgacagtggggaaggagttaaagaaatccaggtcaagccttgggtctgccgtctcataggagtgtcatttgaggcttgtcagtatctctgagccc

SEQ ID NO: 18595 - DNA, 201 bp, Homo sapiens
ggatggagaggcctgggtggcgtccgtgaggctgcctggctagcagcggcgcccagcaccactgtcagatccctggctgaaactcttgtggccctcttcttaagggtatttgctgttgtctagcaaactcctctgcagcactcagatctgaagccatcgccctgcagagtaaacagcaggggaagaacccaggccagcccc

SEQ ID NO: 18596 - DNA, 201 bp, Homo sapiens
tggcccctttccacgtagctgcctgcatgtgtgggcagatgcgggtcttctccgaggctcctcttccgggcccgcagggcctccattctcagggcggcccrccccaccctggtttctcaggggccaggctgcacccggctccggggcagagggcagtggcacggtcacctctctcttcccctgctggggacctggctccgt

SEQ ID NO: 18597 - DNA, 201 bp, Homo sapiens
gtgccgcctgaagccacccacaaagtggcattttccgcttgctgcttgacagtggggaaggagttaaagaaatccaggtcaagccttgggtctgccgtctyataggagtgtcatttgaggcttgtcagtatctctgagccccccttatctcagctgtaagcgctcagcgggcagcagctctctcccgcctcttccttatgg

SEQ ID NO: 18598 - DNA, 201 bp, Homo sapiens; identical to SEQ ID NO: 2031

SEQ ID NO: 18599 - DNA, 201 bp, Homo sapiens
aggatggagaggcctgggtggcgtccgtgaggctgcctggctagcagcggcgcccagcaccactgtcagatccctggctgaaactcttgtggccctcttcttaagggtatttgctgttgtctagcaaactcctctgcagcactcagatctgaagccatcgccctgcagagtaaacagcaggggaagaacccaggccagccc

SEQ ID NO: 18600 - DNA, 201 bp, Homo sapiens
aagtttctgctgccatatacgtttttaaaatgtcctgcatgaaaacaaaagaaaacttcagatagtaataaaatactttatctgtgagctgtgctactgaytcctctgaatggtcattatgttttctttgcctagaacccactccctgtcttttcacatcattcttctcagaagcttctggaggtaacaggcttcatattt

SEQ ID NO: 18601 - DNA, 201 bp, Homo sapiens
catgtgtgttgtcactcctgagggccaggaggctcagcttatcctgccccatgctgcccagtacggagccgccagccgcacggggccttggaaatgcggcyggtccacagtgggatgtgctgagtataaaacacacatggtgtttggagactttgtgcacacacacaagtgcaaaatatctctaataatatttattttgat

SEQ ID NO: 18602 - DNA, 201 bp, Homo sapiens
tggccgggggccctgtgcagggagaggatgagggtggggtgggctcgggtgtggcacttggctccctgggatgtcgggagctgagcttttcatgctgcccwcggtcccctcctgtgcctctccccagatcatcagggctgctgccgacagggacagggagactgtgcgggcgaaatccatagagatgaagttcctcaccgg

SEQ ID NO: 18603 - DNA, 201 bp, Homo sapiens
caggatggagaggcctgggtggcgtccgtgaggctgcctggctagcagcggcgcccagcaccactgtcagatccctggctgaaactcttgtggccctcttcttaagggtatttgctgttgtctagcaaactcctctgcagcactcagatctgaagccatcgccctgcagagtaaacagcaggggaagaacccaggccagcc

SEQ ID NO: 18604 - DNA, 201 bp, Homo sapiens
gacacatttcaggatgtaaaccttgctgatgtctcatattgagtgactattgatttaacaaaaaaggagttattgatttggggcagtgttcttctctgctrtctctcagcttcctaggcagtaagaagaaaggactggagcctgagtcagacaggtgtggaagggtccagcatcccacagctttggcccttaggagattgc

SEQ ID NO: 18605 - DNA, 201 bp, Homo sapiens
agattcggaacgaggtttgtctgtgccagcagacaggtggggccagggtggccctgctgtgtggctgtttggtgacctaatagtgtgagctggggacttgkagccctgaggtgctccctgggggtgaggggcagtgaagtagcaccagtgggacttagggggacacaggggagctgctgccttccctggcccaagtaacac

SEQ ID NO: 18606 - DNA, 201 bp, Homo sapiens
ccctcagagccagtgtgttatctaagacaaagtttttcaacctgtggactaatgacattttggacccataattcttcgttgtgggagacctggcctatacrttgtaggatgtgtagcagtatccctggcttctgtctactagactagcaccgctccccaccccttctagccgttgtgaccatcaaaagtgtttccagacat

SEQ ID NO: 18607 - DNA, 201 bp, Homo sapiens
cacactctaccctctacacacccgcccaccttacactccacacacccgcccacctccttaccctccacacacctgcccacctccttacacaccctccacayacctgcacacctccttacatcttccacacacccacctcatacctgcacacctccttacacacccacctcacacccgcatacctccgtacacacccacctc

SEQ ID NO: 18608 - DNA, 201 bp, Homo sapiens
aaacatgcaagcagatgccagtttccttgcgccttaaacagagcgtcctggtgtgagccctctcccccaacagccccctgctgcgatgttgcctggctgcmgggcagtggggctgtggcgctgcgatgttgtctgactgcggggctgtgggactgcgatgttgcctggctgtggggctgcgggactgcggggctgtgggac

SEQ ID NO: 18609 - DNA, 201 bp, Homo sapiens
ccctccacacccaccaaatacctgcacacctccttacacatcctccacacacccaccgaacacccactgaacactgcacctccttaccctccacacacccmccacagccacacaccaccttacacactctccacacactctaccctctacacacccgcccaccttacactccacacacccgcccacctccttaccctccac

SEQ ID NO: 18610 - DNA, 201 bp, Homo sapiens
gtattggtgaggagtcttttgtgacattttttaccatcccaccttaaatatttctgtgcaaaagaatccacatcattgtttggtagcagaggatctcttawaaagttccctaagacactgagggcataaaaccaaacaaaataaaataaggagtgataggctaaagcagtatcttcccctccatccacatttgtcagcatt

SEQ ID NO: 18611 - DNA, 201 bp, Homo sapiens
ttttcataaaagtcatgcataatcactgtagagaatttggaaacatgcaagcagatgccagtttccttgcgccttaaacagagcgtcctggtgtgagcccwctcccccaacagccccctgctgcgatgttgcctggctgccgggcagtggggctgtggcgctgcgatgttgtctgactgcggggctgtgggactgcgatgt

SEQ ID NO: 18612 - DNA, 201 bp, Homo sapiens
ctgcctgtctgtcagtgggcagcgccttggcctggcactgggctggtcggtcctgagggacgtgtggggcctgaggcctcctctgtggaatgttcttttgktcatttgtttaataacaggtccttgccagtggagagctgtgtgcctgaaagtggccagagaacagtttgaggggggtcctgatggagggtgatgaggggg

SEQ ID NO: 18613 - DNA, 201 bp, Homo sapiens
ttggctggaaaaccaaatagatgggctccttttagttgtatctcatagccttaaagctgtgctccctaggaaataacagaaatcactaagtgtgttggggrtgtgtataaatacatacataataacaaaaaatgtaagatctactttagcaatcatttgacaagaagcaagacttttgtttttggcaaaaagaatatatat

SEQ ID NO: 18614 - DNA, 201 bp, Homo sapiens
tcacccaggctggagtgcagcggcgtgatctcggctcacagcaacctcaggcaattcccatgcctcagccactcgaatagctggaattacaggtgtgtgcygccatgcccggctaatttttgtagttttagcggagacagggttttgccatgttggccaggctgttcttgaactcctggcctcaagtgatccacctgcctc

SEQ ID NO: 18615 - DNA, 201 bp, Homo sapiens
ccccagaggggctatagggcttcccttcccccaccagtccagttctgggaacagagggacagatcctgagaacctgtgagagcagccgctaggaactcctytcgccttcccgtgccccttcctgccatgctgggggctgcagccccctccccaggccccctgtcctcccctgaggctgggggcagctggaggatgccaggt

SEQ ID NO: 18616 - DNA, 201 bp, Homo sapiens
gtgttttaagtgtagactgataatcttacaatgagaatatttagtccatttacatttaaatgcaattgtggatgtattggagtttatatctactaccttartttttgtttgtttactatttgacctgtctgttatgtccccctttttctcacctgttttgccttcttttaaattaatcaaggacttaaaattatagtcatg

SEQ ID NO: 18617 - DNA, 201 bp, Homo sapiens
tattattcctatttcattgagatattaaacctgaagtaaaagtgttttgaaagattaagaatataaaaccgaggccaggcacggtgactcacacctataawcccagcactttgggaggccgaggtgggcagatcacttgaggtcgggggttcgagaccagcctgagcaacatggtgaaaccctgtctctactaaaaataca

SEQ ID NO: 18618 - DNA, 201 bp, Homo sapiens
ctatccacaagtggttcttcaaggagatgctttattcatcctcactttttgctcagacagctctgtgtcttgtgatgtgggaggggctgggcctgcatctkcagggagtgagtggctgggtgcatttcaaacatacgtatgtgtatttttacacagcagcgtggacatgggtatgatttgtggagttcttttgtagttgct

SEQ ID NO: 18619 - DNA, 201 bp, Homo sapiens
tccaggatcctgtctccctccagcccctcaaggttgcttccacattcattcagcagatacttactgagtccgggtcccttcggggccctggggaccccccyactggccttgggcttccacagtgacaccgacaggtgttagtagcacagggccaggggaccatcatgggagtgatggggcagaaggagggccctgcccagg

SEQ ID NO: 18620 - DNA, 201 bp, Homo sapiens
ttccctgacagtcaaggagacagggtggggggtgtttgtgtgcctgttgtgcgtgtgcacctgtgtgtgtgcgcttaggcatgtgtgcattggaggttgtrtcgcagcttctctccttccacgtctgttctgtggatggctgatttctggacaaaggtcaccgccctcctgcaggctgtgaggccgtcgcagcccccaggc

SEQ ID NO: 18621 - DNA, 201 bp, Homo sapiens
gcctcagcctcccaagtagctaggaccatgcgccaccatgcctggctgattttttgtatttttagtagagacagggtttcaccatgatggccaggctggtstagaatccctgacctcaggtgatctgcccgcctcggcctcccaaaatgctgggattaccggcgtgagccacagcgtctggccctatatgcttttttcaat

SEQ ID NO: 18622 - DNA, 201 bp, Homo sapiens
ttaaattaatcaaggacttaaaattatagtcatgcgtctctctttttttttggagacagtctcgctcggtcacccaggctggagtgcagcggcgtgatctyggctcacagcaacctcaggcaattcccatgcctcagccactcgaatagctggaattacaggtgtgtgccgccatgcccggctaatttttgtagttttagc

SEQ ID NO: 18623 - DNA, 201 bp, Homo sapiens
ccaccataattgtgaggcctttgcagccatgtggaactgtgagtgcattaaaactctttcctttataaattacccagtctcggttagcagcgtgagaacaractaatagagggcaccacccctagagctgggtgagaccaatgccactcaaattgatggtgactacacaatggggaggagaatgggtgataaacattccca

SEQ ID NO: 18624 - DNA, 201 bp, Homo sapiens
aaaattagctaggtgtggtggcatgtgactgtaatcccagctactcgggaggctgaggcacaagaattgcttgagcccaggagggagaggttgcagtgagytgagattgcgccactgcactccagtgggggcgacagagtgagactctgtctcaaaaaacaagttaaacagaatggaattcaatagaaaagattagaatta

SEQ ID NO: 18625 - DNA, 201 bp, Homo sapiens
accttaatatttggcatccactgtacttagccattcaggaatttagtatgaagtgtcatctatgtgacagccaagagtatttgcttatttccttttcctgrggtaacatttcaagcagtccctcatagaatatcacacctccctgagttctgctgtcagaatgagtttgagaatcactgccttggtggcctctagtggtcc

SEQ ID NO: 18626 - DNA, 201 bp, Homo sapiens
agtcgtgtgatcatagctcactgcagcctcaaatccctgggctcaagcgatcctcccacctcagccttctgagtagctgggactacaggtgcagcaccacrcctggctaatttttttgtttgtagagatggggatgtccctgtgtttcccgggttggtcttaaactcctggcttcaagcaatcttcccaccttggccttcc

SEQ ID NO: 18627 - DNA, 201 bp, Homo sapiens
tgactttttattttggtttcatgcctggctagtggacactcccaaacatgagcacctgtctcccacccccactgctttatcatttatggtcactcttttgrctgcccctcctcagaggagagcaggcaggcacacggaggccttcaggaggctgctgtaccaaggaggcacagagcccaaacacttcatttcagttactca

SEQ ID NO: 18628 - DNA, 201 bp, Homo sapiens
gcccaggaataaaagcatttttagaaattgttttctgcaccttcagaagctacaacactccttgtaacctttcagatggaagggatcagaggtgacagaaycgtgtatttctacatttatctgcggaagataaaatacaataaaaagtgagaagtgttcaaattccaccactaggaaaagaaacatcttgggtagagatga

SEQ ID NO: 18629 - DNA, 201 bp, Homo sapiens
cagagaaggctccagacagacaactaacagtgtttgatacaataactttcttatgtttctgtaacttaaggtccattttgtctattgctagcatatataakcttaatgcctgctagattctgttgtttacactgtcctcttctccctggagtagtaccgagggtgagggagcctgtggcctctgtaatatcaggacataga

SEQ ID NO: 18630 - DNA, 201 bp, Homo sapiens
cctagaaggcaagttgagccctggaaactccctttcttacaaggcatgacccactgggacatccagaggctgtgggtacagacctgtgtgagggccatggygagctcagacctctctgccagggcagacaggccagcgtatgtggctcaccaggaggccaccaacgccctgcagtcagaagggactctatgtggggcatgg

SEQ ID NO: 18631 - DNA, 201 bp, Homo sapiens
caaatagatgggctccttttagttgtatctcatagccttaaagctgtgctccctaggaaataacagaaatcactaagtgtgttggggatgtgtataaatayatacataataacaaaaaatgtaagatctactttagcaatcatttgacaagaagcaagacttttgtttttggcaaaaagaatatatatgtatgtaatttta

SEQ ID NO: 18632 - DNA, 201 bp, Homo sapiens
taaatctatcagttttttgcttgtatggcttatgccattgaatcttgttttaagagatccttccctaccctcaaggttttctaaatttttattttcataayaagatttttagttcatctgaaatgtatttttatgattgtatttagtagggacctaattttgtttttctttgtaaccaggtgtcccagcactgtttactga

SEQ ID NO: 18633 - DNA, 201 bp, Homo sapiens
atggtgggctggttctgctgctcacaaaatgaaaacatctgtgaaactggtttcattcatgggggagaatgtcagtgcctagttgcttgctttttttttttaagaaaaaattagcagtatgggattcagtgcctgctttcaacaagctcttgtttatgttattagcacaagaatgtataatttttaaacagttcaaagaaa

SEQ ID NO: 18634 - DNA, 201 bp, Homo sapiens
gagcccagagcctggcatatactaaacccagcaaaagcagctgtagttatcattggcatggtgggctggttctgctgctcacaaaatgaaaacatctgtgraactggtttcattcatgggggagaatgtcagtgcctagttgcttgctttttttttttaagaaaaaattagcagtatgggattcagtgcctgctttcaaca

SEQ ID NO: 18635 - DNA, 201 bp, Homo sapiens
ggagtgtgccacttagatccttggcgtgcacagttcacaatggggttcgagctcctatgagaatccgatgccactgatttgacaggaggcggagctcaggkggtaatgctcatctccaccgcttaccacctgctgtgcagcctggttcctaataggctatagactggtactggtccatggcctgggggttggggacccctg

SEQ ID NO: 18636 - DNA, 201 bp, Homo sapiens
tgggttttatatatatgtctacatacatgtctacaggtagaggagccatttgagcaacgcgttggcatgatgaacgtgggtttttttatagggagaggaayctggcaggagagtgttccatggctcggagctggggagcttgtgggagttagaggggttttcttcccaactgcctctccctgaatgtacctggacaaaagc

SEQ ID NO: 18637 - DNA, 201 bp, Homo sapiens
tgctggtgggcaaggcggctgccacgggcagcggggactggaataccacgctggcctgcttcgtggccatcctcattgtgagtggctggggatgcgtccarctgcctcgtggtgggggcccccagggtcctcattgtggtgggggcaggtctcaggatccctagggatttttcatttcttctcttccctctgagggacaag

SEQ ID NO: 18638 - DNA, 201 bp, Homo sapiens
catctttgtgctaagtagaacactgagcccagagcctggcatatactaaacccagcaaaagcagctgtagttatcattggcatggtgggctggttctgctrctcacaaaatgaaaacatctgtgaaactggtttcattcatgggggagaatgtcagtgcctagttgcttgctttttttttttaagaaaaaattagcagtat

SEQ ID NO: 18639 - DNA, 201 bp, Homo sapiens
tccatggtttgtgtttattgcataaccatttttattgtctacagtgagcaaagttatcctataaacaagtgtcagggaccattgcactaaagaaaacaaaygagagcattttggaagctctaatttcctgatcagtaatgggtagactaattcccagttatatttacctgttgtaaggtgaaaggttcttcagaggacctc

SEQ ID NO: 18640 - DNA, 201 bp, Homo sapiens
aagtaggacctgcagagtggagtgcgctcacatggctcgcgcgtagctggaggctggaaaggaggccgggggcctgatttcgatgcctgggacttcaggcrcaggagtttgggttttatatatatgtctacatacatgtctacaggtagaggagccatttgagcaacgcgttggcatgatgaacgtgggtttttttatagg

SEQ ID NO: 18641 - DNA, 201 bp, Homo sapiens
cacagctttggcccttaggagattgctcagccttgatgagctttaattatcctatcaatgagtggggataatacctcaccaggtctttgtaagaactagargtaatataaagtgacaggcagacagaggggaataataaatggtagctgttcttgttattattcctatttcattgagatattaaacctgaagtaaaagtgt

SEQ ID NO: 18642 - DNA, 201 bp, Homo sapiens
cgtctgcctctttccactatttatgtttaagatcaaactggctctggaaccaagctttgcctctagtgggtaggatcactggtgctgagaattgtgatacmctcagtcctggcagctgacaaactttccagagcagggagtttggccagatggcctttgagagcccagctggccccagaatttttatgactcaattttctg

SEQ ID NO: 18643 - DNA, 201 bp, Homo sapiens
attatgaagctggcttggaaactcatctggcttttgctcctgtaaaaatcactttttgaacagggtgctgctgccatttctgtggctgtgcatgttggggrttcaggttcccctggtgctcagcctcctcggtggtctcttcagtcctgggctctcgatgagggagctcaggaagccacggagcctgggtgcctgggtcct

SEQ ID NO: 18644 - DNA, 201 bp, Homo sapiens
agtatgggcccaatatagagaaagtcaacaggactccgtcattaagaacaggaatgcactgagctgtctgtggggtagtctaccacccagcttggtgcctsgcacttggttggcattcagtagtatttgtggagtgaccaaagttaatttagaagaatggtctggaaattattctagaatacagcccctctccccaaccca

SEQ ID NO: 18645 - DNA, 201 bp, Homo sapiens
gaacgtaaatatggaagagctgggaatcaagggcctgaataggaatacgttcttgaatttatatggtgctttaacacatttcaaagtatatccacccaccyctccatttatattggacaatataataacttataccatcatttcgaggagaggaaacaggtcagagatggttcgagaatatgcctggagcagcccagctgg

SEQ ID NO: 18646 - DNA, 201 bp, Homo sapiens
gcctgaataggaatacgttcttgaatttatatggtgctttaacacatttcaaagtatatccacccacccctccatttatattggacaatataataacttayaccatcatttcgaggagaggaaacaggtcagagatggttcgagaatatgcctggagcagcccagctggtcagggcagagctgattcccagccccaaggcc

SEQ ID NO: 18647 - DNA, 201 bp, Homo sapiens
catgaagatccaggtaggcggcctgatgcgcagtgcctgtccctatgggggctgcaaggggcagagctggggcctggctcatggaggcctctacaccccaygtcccgcagggcaccctctctcctggcagggccatatgtggtgtcttctggccccagtgcctggacggcaccagaagcttgggaagtatttgctaaatga

SEQ ID NO: 18648 - DNA, 201 bp, Homo sapiens
catgccactgaagcagatgatggtgaggagccaggggctctgcccactctctgtggcctcggcccccactgggtggaggggacagacttggggcttctccsggtggcccaggcagggcatgctcagagcccctccctggccctgcccttcagaaaactctcaacaacgacctgggccccaactggcgggacaagttggaat

SEQ ID NO: 18649 - DNA, 201 bp, Homo sapiens
ggagctgaaactgctccacctcaggtcatcaggcattagattctcatgtggagtgtgccacttagatccttggcgtgcacagttcacaatggggttcgagstcctatgagaatccgatgccactgatttgacaggaggcggagctcaggtggtaatgctcatctccaccgcttaccacctgctgtgcagcctggttcctaa

SEQ ID NO: 18650 - DNA, 201 bp, Homo sapiens
ataactcggtgcacaattttatccaccagcgtatatgagtatcagtgaaggactttgtcaaatgccttgtaaaaagcaagatggcctagaaatatgtggcwctgccctgctctaccagcctcatgatttttttttcctagaaaatagggtgtgtttttttttctatttgtagaagtcatacatacctactgtggcaaaatg

SEQ ID NO: 18651 - DNA, 201 bp, Homo sapiens
tggccagcctggacccatcagaatgtaaccctgagtctcaagggggagagtggatgccagaatgaaatcagagttccatccactttccattagaaagaaargaatgggagaggagcagagaaggctccagacagacaactaacagtgtttgatacaataactttcttatgtttctgtaacttaaggtccattttgtctatt

SEQ ID NO: 18652 - DNA, 201 bp, Homo sapiens
gataatcacctgtgcctggggaggttgaggctgcagtgagctgtgatcatgccactgaattccaacctaggcaacagtaagaccctgtctcaaaaaaaaawatatatatatatctatctgcctggcatgtagtatgggcccaatatagagaaagtcaacaggactccgtcattaagaacaggaatgcactgagctgtctgt

SEQ ID NO: 18653 - DNA, 201 bp, Homo sapiens
tcccaatgctttgtccatgatgtccttgttattttattgcctttagaaactgagtcctgttcttgttacggcagtcacactgctgggaagtggcttaatastaatatcaataaatagatgagtcctgttagaatcttggagtttggtccgttgtaaatgttgacccctctccctgcatcttgggcacccctgggataactt

SEQ ID NO: 18654 - DNA, 201 bp, Homo sapiens
tggagcctgagtcagacaggtgtggaagggtccagcatcccacagctttggcccttaggagattgctcagccttgatgagctttaattatcctatcaatgmgtggggataatacctcaccaggtctttgtaagaactagaggtaatataaagtgacaggcagacagaggggaataataaatggtagctgttcttgttatta

SEQ ID NO: 18655 - DNA, 201 bp, Homo sapiens
gagggccaggggtgggggcttgaagagccttaggtgcctcagcatcctttgaggagttgtaccctgagagagagagagagagagagagagagagagagagwgagagagagagagagagagagtgagagagagagagtgagagagagagagtgagagagagagagtgtgtgtgtatgtgtagaagggaggcaggaaggtagg

SEQ ID NO: 18656 - DNA, 201 bp, Homo sapiens
ggtatgcaccactatgcctggctcatttttttttttttttttagtagagacagggttttgccatgttggccaggctggtcttgaactcctgacctcaggtrttccacccacctcagcctcccaaagtgctgggattacaggcgtgagccactgtgcccggcctgtttttattcttaaccatgtttaattaatgccccaaat

SEQ ID NO: 18657 - DNA, 201 bp, Homo sapiens
agtggaaattgtcgagccgactttggctcatacgttccttttctcgttaaggagggagtgacggggcaaatctgcgtgctgctggtggcggtgcctcccarggctgctcggcggggacgccgagggctgcacccgagctccatcccgtgttggctgcgcgccctccaaaaccccggctgtcagcgactgcgggcacctgca

SEQ ID NO: 18658 - DNA, 201 bp, Homo sapiens
aatgtttattgtggcactattcacaatagcaaagacttggaaccaacccaaatgtccatcagtgatagactggattaagaaaatgtggcatatatacaccrtggaatactatgcagccacaaaaagtatgagttcatgtcctttgtaggacatggatgaagctggaaaccatcattctcagcaaactattgcaaggacaaa

SEQ ID NO: 18659 - DNA, 201 bp, Homo sapiens
atccgcccgcctcggcctcccaaagtgccttgtttttttaaaaaaactttttattatagagaattggaaacatatataggcaataatataatgaacccccygtagactcatcattcatcttccactattatcaacttgttaccaacaaagctggtcccccataaaatggagtctttccctctttggtgtcccaaagccaat

SEQ ID NO: 18660 - DNA, 201 bp, Homo sapiens
aatcactgataccctttcttccagttgatcgaatcgggctactgaaattgaccacatagttggaagtaaagtactcctcagcaaatgtaaaagaacagaawttataacaaactgtctttcagaccacagtgcaatcaaactagaactcaggattaagaaactcaaaaccgctcaactacatggaaactgaacaatctgatc

SEQ ID NO: 18661 - DNA, 201 bp, Homo sapiens
tggcgcgatctcggctcactgcaagctccgcctcccgggttcacgccattctcctgcctcagcctcccgagtagctgggactacaggcgcccgctaccacrcccggctaattttttgtatttttagtagagacggggtttcaccgtgttagccaggatggtctcgatctcctgacctcgtgatccgcccgcctcggcctcc

SEQ ID NO: 18662 - DNA, 201 bp, Homo sapiens
taactgcattaccctatacctgcttgtggagtttgtctccaaccaattaattttcccctacaattctgctatacatcagcagttgtattttggagcccacrtgaaaggaaactatacttacatctgttccagttcatctgtttaggtctggcttgttgttcagcctgtgacaatcatctgggagtggcgatcattctcctt

SEQ ID NO: 18663 - DNA, 201 bp, Homo sapiens
gtgcagtggcgcgatctcggctcactgcaagctccgcctcccgggttcacgccattctcctgcctcagcctcccgagtagctgggactacaggcgcccgcyaccacgcccggctaattttttgtatttttagtagagacggggtttcaccgtgttagccaggatggtctcgatctcctgacctcgtgatccgcccgcctcg

SEQ ID NO: 18664 - DNA, 201 bp, Homo sapiens
gctgtttctttacagtggctacgtcatcttaccttccccccaacagtgtacaaggattccaatttccccacatccttgccaacatttgttattttctggtyttttttgatagtggcaatcctaataggtgtgaggtggtatctcattgtggtttcatgaggtttaagttgagcatcttttcatatgcttttagaccattcg

SEQ ID NO: 18665 - DNA, 201 bp, Homo sapiens
ggctggagtgcagtggcgcgatctcggctcactgcaagctccgcctcccgggttcacgccattctcctgcctcagcctcccgagtagctgggactacaggygcccgctaccacgcccggctaattttttgtatttttagtagagacggggtttcaccgtgttagccaggatggtctcgatctcctgacctcgtgatccgcc

SEQ ID NO: 18666 - DNA, 201 bp, Homo sapiens
atgctgtttctttacagtggctacgtcatcttaccttccccccaacagtgtacaaggattccaatttccccacatccttgccaacatttgttattttctgkttttttttgatagtggcaatcctaataggtgtgaggtggtatctcattgtggtttcatgaggtttaagttgagcatcttttcatatgcttttagaccatt

SEQ ID NO: 18667 - DNA, 201 bp, Homo sapiens
aggcaggagaattgctggaacctgggaggcagaggttgcagcaagctgagattgcaccactgcactcctggcaacagagcgagactctcaaaaaaaaaaaattagtcgggcatggtgatggacacctgtaatcccagctacttgggaagctgaggcaggaaaatcacttgaacccagggagtggaggttgcagtgagcaga

SEQ ID NO: 18668 - DNA, 201 bp, Homo sapiens
agtctcgctctgtcgcccaggctggagtgcagtggcgcgatctcggctcactgcaagctccgcctcccgggttcacgccattctcctgcctcagcctcccragtagctgggactacaggcgcccgctaccacgcccggctaattttttgtatttttagtagagacggggtttcaccgtgttagccaggatggtctcgatct

SEQ ID NO: 18669 - DNA, 201 bp, Homo sapiens
tttttttttttttttgagacggagtctcgctctgtcgcccaggctggagtgcagtggcgcgatctcggctcactgcaagctccgcctcccgggttcacgcsattctcctgcctcagcctcccgagtagctgggactacaggcgcccgctaccacgcccggctaattttttgtatttttagtagagacggggtttcaccgtg

SEQ ID NO: 18670 - DNA, 201 bp, Homo sapiens
aaggaatgggagaggagcagagaaggctccagacagacaactaacagtgtttgatacaataactttcttatgtttctgtaacttaaggtccattttgtctrttgctagcatatataatcttaatgcctgctagattctgttgtttacactgtcctcttctccctggagtagtaccgagggtgagggagcctgtggcctctg

SEQ ID NO: 18671 - DNA, 201 bp, Homo sapiens
aatctgagagttccccaactctataatacttggtgtcatcagacttttcatcttgtctgattggatgggtgtcatttcctttaggttttataattatcttytcatatgtgtattggctgtacaaggttccttctctgttcattattattaatttttttagacagagtctcgcgctgtcgcccaggctggagtgcagcagcg

SEQ ID NO: 18672 - DNA, 201 bp, Homo sapiens
ttgcagatacctttttttttttttttttttttttttttgagacggagtctcgctctgtcgcccaggctggagtgcagtggcgcgatctcggctcactgcargctccgcctcccgggttcacgccattctcctgcctcagcctcccgagtagctgggactacaggcgcccgctaccacgcccggctaattttttgtattttt

SEQ ID NO: 18673 - DNA, 201 bp, Homo sapiens
gggtgagggagcctgtggcctctgtaatatcaggacatagaggatagggttgccggggggcacatgtggtcccttgattgccacgtttctattttggtttyttttctttaaaagaaaactacttttattttatagataaggtctcattctctcacccagggtggagtgcagtggcgtgatctcggcctactgcagccttgg

SEQ ID NO: 18674 - DNA, 201 bp, Homo sapiens
tctgtaatatcaggacatagaggatagggttgccggggggcacatgtggtcccttgattgccacgtttctattttggttttttttctttaaaagaaaactwcttttattttatagataaggtctcattctctcacccagggtggagtgcagtggcgtgatctcggcctactgcagccttggcctcccaggctcaagcaatc

SEQ ID NO: 18675 - DNA, 201 bp, Homo sapiens
ggcacagggtgctgggaggcatgttggggaagccttcccagaagaggtgatgttggtgctgagatccgggaggaggagaggaggtgtgccccctctgcacrggcctgcaggaggaagcctctctggttccaggagtgggttggcctggctggaacctaaaggcagtggagggaagggcagagccatggtgaacggttgctg

SEQ ID NO: 18676 - DNA, 201 bp, Homo sapiens
tgagagcctttggaggtctgctctgtgggtcacggtctctaagctcattcacttttgatttcctttttctgtttcttgaagaataatggaaaaagaagggrcaggtggaagacttccgcctaagggcaaagccagactcttgggaagagggtttcagggggagactcttaggaaagggtctctgtggaggcatcctgcctg

SEQ ID NO: 18677 - DNA, 201 bp, Homo sapiens
ccgcatccattgggcaggtgcacttggcccgaatgaagggcggccgcgaggtggccatgaagatccaggtaggcggcctgatgcgcagtgcctgtccctaygggggctgcaaggggcagagctggggcctggctcatggaggcctctacaccccacgtcccgcagggcaccctctctcctggcagggccatatgtggtgtc

SEQ ID NO: 18678 - DNA, 201 bp, Homo sapiens
gctgccaggcgtggtgtcacagcactggccgggggccctgtgcagggagaggatgagggtggggtgggctcgggtgtggcacttggctccctgggatgtcrggagctgagcttttcatgctgcccacggtcccctcctgtgcctctccccagatcatcagggctgctgccgacagggacagggagactgtgcgggcgaaat

SEQ ID NO: 18679 - DNA, 201 bp, Homo sapiens
tatgttggcatgttttcttaactttacagaaatggtatcatactgtacatatttgataattttttaaaatattgcattctggaggcatgtataaatgtagytccagttcatttattttatttattttttgagatggagttttgctcttgtcacccaggctagagtgcaatggcgtgatgttggctcactgcaacctctgcc

SEQ ID NO: 18680 - DNA, 201 bp, Homo sapiens
cttcaggctgggtgttctttgcagatacctttttttttttttttttttttttttttgagacggagtctcgctctgtcgcccaggctggagtgcagtggcgygatctcggctcactgcaagctccgcctcccgggttcacgccattctcctgcctcagcctcccgagtagctgggactacaggcgcccgctaccacgcccgg

SEQ ID NO: 18681 - DNA, 201 bp, Homo sapiens
acattattagtgttatcttcaggctgggtgttctttgcagatacctttttttttttttttttttttttttttgagacggagtctcgctctgtcgcccaggytggagtgcagtggcgcgatctcggctcactgcaagctccgcctcccgggttcacgccattctcctgcctcagcctcccgagtagctgggactacaggcgc

SEQ ID NO: 18682 - DNA, 201 bp, Homo sapiens
cccaggcaggagggggcacatcccttctattatcttggattctaccacccccttagagggagactacagacccccggactcttcccagagacccattgccrgcacttcattctgttgatctcctcttgcacttctgcctcccccagcctggaaagagttttaaacatcttgtccctggcaaggaaaccctggctcagccag

SEQ ID NO: 18683 - DNA, 201 bp, Homo sapiens
tcttcttgttcaccctgcccacattattagtgttatcttcaggctgggtgttctttgcagatacctttttttttttttttttttttttttttgagacggastctcgctctgtcgcccaggctggagtgcagtggcgcgatctcggctcactgcaagctccgcctcccgggttcacgccattctcctgcctcagcctcccga

SEQ ID NO: 18684 - DNA, 201 bp, Homo sapiens
gagccaccgcgcccggcctattcactgttttcttcttgttcaccctgcccacattattagtgttatcttcaggctgggtgttctttgcagatacctttttwtttttttttttttttttttttgagacggagtctcgctctgtcgcccaggctggagtgcagtggcgcgatctcggctcactgcaagctccgcctcccgggt

SEQ ID NO: 18685 - DNA, 201 bp, Homo sapiens
gcccgccacctcacccggctaattttttgtatttttagtagagacggggtttcaccgtgttagccagaatggtctcgatctcctgacctcgtgatccgccygcctcggcctcccaaagtgctgggattacaggcgtgagccaccgcgcccggcctattcactgttttcttcttgttcaccctgcccacattattagtgtta

SEQ ID NO: 18686 - DNA, 201 bp, Homo sapiens
gcctcagcctcccaagtagctgggactacaggtgcccgccacctcacccggctaattttttgtatttttagtagagacggggtttcaccgtgttagccagratggtctcgatctcctgacctcgtgatccgcctgcctcggcctcccaaagtgctgggattacaggcgtgagccaccgcgcccggcctattcactgttttc

SEQ ID NO: 18687 - DNA, 201 bp, Homo sapiens
ttggctggacatagatagcaccaaatactaacacagatagactatcccagaaatgcctctgaatgtattttttctattgagaaacaagtttctgctgccayatacgtttttaaaatgtcctgcatgaaaacaaaagaaaacttcagatagtaataaaatactttatctgtgagctgtgctactgactcctctgaatggtca

SEQ ID NO: 18688 - DNA, 201 bp, Homo sapiens
tactgaggttaacaagaatagtaatgactgttcttcactgttttattttttattttttaattttttttgagacggactctcgctgtcacccaggctggagygcagtggcgtgatctcggctcactgcaggctctgccccacggggttcacgcgattctcctgcctcagcctcccaagtagctgggactacaggtgcccgcc

SEQ ID NO: 18689 - DNA, 201 bp, Homo sapiens
attgagaaacaagtttctgctgccatatacgtttttaaaatgtcctgcatgaaaacaaaagaaaacttcagatagtaataaaatactttatctgtgagctktgctactgactcctctgaatggtcattatgttttctttgcctagaacccactccctgtcttttcacatcattcttctcagaagcttctggaggtaacagg

SEQ ID NO: 18690 - DNA, 201 bp, Homo sapiens
agatctatccttgcccttgccttgtactgaggttaacaagaatagtaatgactgttcttcactgttttattttttattttttaattttttttgagacggastctcgctgtcacccaggctggagtgcagtggcgtgatctcggctcactgcaggctctgccccacggggttcacgcgattctcctgcctcagcctcccaag

SEQ ID NO: 18691 - DNA, 201 bp, Homo sapiens
aaatgaaaccatgtctaaagaacaaaataaaagtataaaaattttgtctcacaaaatagggaatatcaataaaaacatataaattatttttaagatcatcraacaggtattctggagttgaaaaatataataactgaaatgaaaaatctagtggggctcaacagcacatttgagcaggctggagaaagaataagcaaaatt

SEQ ID NO: 18692 - DNA, 201 bp, Homo sapiens
tattaaagttaactagttgattttgggtgtgcaaaatgtgagaatttcatatatgtatattatctgtggagcagtaacatcatgatgactttacaaattasgaaagtcactaaacaaagaacaactataacaaggagcaataactacaaaccctggggagggagtagagtctgatttccagagatgtacattatattattt

SEQ ID NO: 18693 - DNA, 201 bp, Homo sapiens
gttcagttgtctttgaaaactggtagcaggtgaggatatttcaggacctactgacagagaccctgaagctggacctcgcgagatagaagccgggagttgcycgagatgtttgagtgatgctccctggtgtgtgatcataaagactgaggtgaaggttacatctaaagagactcatggagtttggttcagaagtttgaagtc

SEQ ID NO: 18694 - DNA, 201 bp, Homo sapiens
atgggtagccagagggagcctgggttagtggagttgaagccctagtcttgggtgctttgtagcatcagaagcctctggagcctttgctgacacctgcctgwtgtacggagccatctgtgggtgtctgtgtgctggaggattgcccacagctatgattcagagatgctcatgttgttgcccaagcaattgacagatgatgtt

SEQ ID NO: 18695 - DNA, 201 bp, Homo sapiens
gggccctgtgcagggagaggatgagggtggggtgggctcgggtgtggcacttggctccctgggatgtcgggagctgagcttttcatgctgcccacggtccsctcctgtgcctctccccagatcatcagggctgctgccgacagggacagggagactgtgcgggcgaaatccatagagatgaagttcctcaccggctacgag

SEQ ID NO: 18696 - DNA, 201 bp, Homo sapiens
ctgacctgacggtcagcaggttcagtgtcacagcccatttgcaagggttgggactggttcagcgtgaggcccttggccctgaacctggaaggctcagcccygttccctgtaagaagggaggtgggaggggtggagaacaggaggagaggttgcggtgtcactgccccagcccccgggaggctgtaccacactgctgaagct

SEQ ID NO: 18697 - DNA, 201 bp, Homo sapiens
tccctggaaggctgagtttgacgtgtttcaggactggtgcagtcctcacttcggagtctttgtggggtggggagaagcggtagagctaatgcaggctgttwgggaaaagtggtcagaatgaaagtcttgatggtgaattagaatctggtggagcaccacgaagtcctggcgaaggaggcagtagtcagacccttttgggtg

SEQ ID NO: 18698 - DNA, 201 bp, Homo sapiens
gttcctgttaaagtgccatctcctttgctgtggtacactctaagttagttactgggattgcatttctttaacactcagctgtcctcagtaggttctccagrtgatataattaatggaagccacagttttggtggcttgatttggaccctgaccttgggtgagtggttagttccagggctgtaggcagcagaggtctgagtg

SEQ ID NO: 18699 - DNA, 201 bp, Homo sapiens
gggctgttcagcaactcagcagggctttctttccccctgggaccagacatttagggagcccatttgctgggtccccacaggcctgcggctcatgagtggartgacaagatgccatggcctccagctgctgctgtttaaagccgtttgtctgtactttggggggttgagttgtcattgtgcccagtacacatgcgctctttt

SEQ ID NO: 18700 - DNA, 201 bp, Homo sapiens
tgctgccatatacgtttttaaaatgtcctgcatgaaaacaaaagaaaacttcagatagtaataaaatactttatctgtgagctgtgctactgactcctctraatggtcattatgttttctttgcctagaacccactccctgtcttttcacatcattcttctcagaagcttctggaggtaacaggcttcatatttaagggtg

SEQ ID NO: 18701 - DNA, 201 bp, Homo sapiens
ctcccaggttgaagtgattctcctgcctcagcctctggagtagctgggattacaggtatgcaccactatgcctggctcatttttttttttttttttagtaragacagggttttgccatgttggccaggctggtcttgaactcctgacctcaggtattccacccacctcagcctcccaaagtgctgggattacaggcgtgag

SEQ ID NO: 18702 - DNA, 201 bp, Homo sapiens
gctaatgtccatatgctacagtgtgttgaaaagaaaaataataccctattgagaaggtagacatgtactgcaagcataagctatgaaaacagagaaaagcygcagacattgttaacggactgagctgggatgtttccagttgtggggattctgagcctcttttgtaatgtgcttaatcacttctaattgtacagtcagcta

SEQ ID NO: 18703 - DNA, 201 bp, Homo sapiens
cccggggagtgccggctgaggtgctcatcttctggagttgcctccagtgctggctggttctaatggagggcagaggctggcctgggttcctgagcaatgcrctgagtctggggcgggagggcctcagtttattctgggttcactggtgcaggagctcgtgaggccaaggtcagggttgctggccagctgggctggtttctg

SEQ ID NO: 18704 - DNA, 201 bp, Homo sapiens
tcaacctagaatagttgcctggggagagggagctggggggcagtgattggaaagagacatgagggaactttttggagggataaaattgttctatattttgrtttaggtgttagttacaggatattttcatttgtaaaatttatgaactgtagaccttagatctgtgcattttaccatatataaattatatctcaatttaag

SEQ ID NO: 18705 - DNA, 201 bp, Homo sapiens
accatgcctggctgattttttgtatttttagtagagacagggtttcaccatgatggccaggctggtctagaatccctgacctcaggtgatctgcccgcctyggcctcccaaaatgctgggattaccggcgtgagccacagcgtctggccctatatgcttttttcaattcaatggctacttgcctaattttgaatggccaaa

SEQ ID NO: 18706 - DNA, 201 bp, Homo sapiens
ctttgcatgtttagtgcttccttcaggagctcttgtaaggcaggcctggtggtgacaaaatctctcagcatttgcttgtctgtaaaggattttatttctcyttcacttatgaagcttagtttggctggatatgaaattctgggttgaaaattcttttctttaagaatgttgaatattggcccccactctcttctggcttat

SEQ ID NO: 18707 - DNA, 201 bp, Homo sapiens
tttaaccttcttggtcattggcaaaatctgtgtccttagtctgtcctcaccttgaagttgaaattcttttatttgcagccacttagaccctgccttgatgrcatttcctgcccacagcaggctctgaactaagtcttgctgtctgttttggacacatggtgactctctttctgagatggagtctcgctttgtcgcccaggc

SEQ ID NO: 18708 - DNA, 201 bp, Homo sapiens
agaaagtgggagattttccttgctggctgtcccccaacccccctatgggcttcccccttgtgcaccctttcctggccacacatacccccctggggttcgtsgggtggaggcacctctctgaaatgcttggcatctttctctggtgcaaggaaagaaaataaaacccaaagttcagacaccactgggacattctattctact

SEQ ID NO: 18709 - DNA, 201 bp, Homo sapiens
tttagagacagtgtctcactctgatggagtgcagtggtatgatcccagctcactgtaacctctgcctcctgggttcaagtgattctcctgcctcagcctcmtaagtaactgggactataggtgcccgccagcatacccagctgatttttatatttgtagtagagatgggctggctcatctggccaggctggtctcaaactc

SEQ ID NO: 18710 - DNA, 201 bp, Homo sapiens
ataaacgggagttcctctgcacaaactctcttgcctgccactgtgtaagacatgactttgctcctcattctccttctgccatgattgtgaggcctcccacsccgtgtggagctgtgaatcaattaaacctctttcctttataaattacccagtctcgggtatgtctttagtagcagcatgagaacagactaatatggtaaa

SEQ ID NO: 18711 - DNA, 201 bp, Homo sapiens
atattagttcacatggctgaaaagttaagtgttagggcagccttctaataagctttaatcagggctccagttccatttctaattctgtctgccttgccctkttgtggccagattccttttcgggctggcttattcacagttgcaagatgtctgtgaacagcaactcagccaacaacaactcgtctaaggagagaggagcta

SEQ ID NO: 18712 - DNA, 201 bp, Homo sapiens
tgagcctcttctcatttctcgttgcgtgtgtggttgttgtctgtctaggattgccccttgtctgggttaactgggtgattttaaaagctatcgaggttttrcatacacatgtagtgcctaagggttgtgtgtgacctcagggcagaacatgtttatttaacttccataccagtgatgtgtgcatgtccacacctggcctgt

SEQ ID NO: 18713 - DNA, 201 bp, Homo sapiens
gagaattgaacatcattcttacccgagctaaggaagaaattaagaaagtcctagattaaaccacaggggcaaactaaccccatgtccttttacggcataargaagcagcctggatgaggaaggaggccagcagaaagaagagaagtgacaggcggagaggtggcacctttctctatttctcagactttcaagtggggggaa

SEQ ID NO: 18714 - DNA, 201 bp, Homo sapiens
agcaccgctccccaccccttctagccgttgtgaccatcaaaagtgtttccagacattgccacgtgtcccctggagggcaaaatctcccttgattgagaacyactgaggtaaaactctaaaaagagttgtcctgtgctgccaggggtccctctgggacctgcccgtgagtaggtgagaggtttaggcaaagggtagtgttat

SEQ ID NO: 18715 - DNA, 201 bp, Homo sapiens
gtgcagagaggagcacccaacagccgaccagtgcccagccacagacgccacaaggcacagtctccattctccttggaagaaaggcctcccctacccctaggaagaacggagcctgacacagagcttgtgttcgcccatatcacacacacttagaattctgttcttgggaactcaggcagatctctggggagccgatggggg

SEQ ID NO: 18716 - DNA, 201 bp, Homo sapiens
ggagggaacagcataaccgtgtaagggaacagttactgtaggaggaagcaacggccacccttgaaaggccttgaggcttggtctttttctcctatgtggaraaagggagccagctgacctaatcaaggcaagttgtcaactgtttggggcagttacttgaaactttagccaaaataactccttaattgtcctttaaaattt

SEQ ID NO: 18717 - DNA, 201 bp, Homo sapiens
ggaaattcagtatctccttcgtggggctcccccaactccttgtgttcaacccaacgctttacacagtccaaagagggagcagggccagtctgactttcacrtgcaggcagaggccactggtctcttgtcagtctggtggacaacacgcatccccaggtctctgtggcttctcagggaggacagtatcactcatgtcacttt

SEQ ID NO: 18718 - DNA, 201 bp, Homo sapiens
gatcaaactttggtctccacaaccccttatcataatccagacattcctttctattcataataactctttcaaccaattgccaatcaaaagttttaaatctrcatagaacctagaattcccctcacttcaaattgtcccacctttctggactgaagcaatgtatatcttacatttttatgtctcatgtctctaaaatgtata

SEQ ID NO: 18719 - DNA, 201 bp, Homo sapiens
ctgctgcttttatatcacccccaaccctgcccagctcccaacccagtgctcaccacagggcaactcacccagggaatcctaagaatatcttaatcttccartggatggagaatggaggtttgcagcctgggacatcaaaaacacactgttttgctctttttctcctcttacctgttaaacaggttgcctagctcctgagcc

SEQ ID NO: 18720 - DNA, 201 bp, Homo sapiens
tcccctacaattctgctatacatcagcagttgtattttggagcccacgtgaaaggaaactatacttacatctgttccagttcatctgtttaggtctggctygttgttcagcctgtgacaatcatctgggagtggcgatcattctccttcagcccatgtcctctgtgaaactgataaacctgccctagagcagcactttcca

SEQ ID NO: 18721 - DNA, 201 bp, Homo sapiens
tcattatagccaattctagttctgaaaataccactggaagaaaaacacttgagttctcagtatggtttgaccaatatagcttggaactatcactttccttrttctgaacattatacttcactagttcagctcgagatctcattattttgggtaactgcattaccctatacctgcttgtggagtttgtctccaaccaattaa

SEQ ID NO: 18722 - DNA, 201 bp, Homo sapiens
atggagggtttgctctatgccaggcactgtgatatgcacaaggcatgtattatctcactttattcataacaacactaagaagtagtgctatcatcttttayggatgaaaaaataggcttagaagactaagtaacttggccaaggtcacataccaagaaatcgtcagcatgcaaactcaggttggcctggctctggaattca

SEQ ID NO: 18723 - DNA, 201 bp, Homo sapiens
ctgaagtcacaacacaagggttcaaatccgaccctcccggctcctggtctgtgctctctcccccttactgtaatgccaacttcactttggtttttaccccygcaaatattcatcattgtgttgagtcaacacaatgatacataaaaaatcagcagtctctgataaagtgtggcctactggttaagaggagcagggctttga

SEQ ID NO: 18724 - DNA, 201 bp, Homo sapiens
tttcccaaaactaaggcctcatttattttttattttttatcagaacaagtcatggacatctctagcaatgaaagcaaagccctgcagtcatttaacatagrcatactctctacatcctgttagccagcggctcctacgacttctcccaacaatcttaaagcaacctggcatgaaggagctggctcaaatgctggtcagtgg

SEQ ID NO: 18725 - DNA, 201 bp, Homo sapiens
tggcctcccaaagtggtgggattaccgatgtgagccaccgtgcccgacctcacctcctgggttttcagcaattctctctgcctcagcctcccaagtagctrggattacaggtgcccgccaccatgcctggctaatttttgtgtttttaatagagacggggttttgccatgttggccaggctggtcttgaacttctgacctc

SEQ ID NO: 18726 - DNA, 201 bp, Homo sapiens
tccacctcaggtcatcaggcattagattctcatgtggagtgtgccacttagatccttggcgtgcacagttcacaatggggttcgagctcctatgagaatcygatgccactgatttgacaggaggcggagctcaggtggtaatgctcatctccaccgcttaccacctgctgtgcagcctggttcctaataggctatagactg

SEQ ID NO: 18727 - DNA, 201 bp, Homo sapiens
ctggctcagccagtattcttacctaatttttctgcctcgtgtccaaagtgcagctgtattaaatgtattaaataaaaggaaaaacttgggccagaagcggyggctcatggccagcactttaggaggccaaggtaggtggatcatctgaggtcaggagttcgagaccagcctggccaacatggtgaaatgccgtctgtacta

SEQ ID NO: 18728 - DNA, 201 bp, Homo sapiens
ggctcaagcaatccttccaccttagcctcttgagtagctggaactacaggtgcacaccaccgtgccaggctaattttttatttttattttttgtagagacrgggtcttgctgtattgcccaggctagatttgaactcctggcctgaagtaatcctcccaccttggcctcccaaagttctgggactacaggtatgagccacc

SEQ ID NO: 18729 - DNA, 201 bp, Homo sapiens
cagccttggcctcccaggctcaagcaatccttccaccttagcctcttgagtagctggaactacaggtgcacaccaccgtgccaggctaattttttattttyattttttgtagagacggggtcttgctgtattgcccaggctagatttgaactcctggcctgaagtaatcctcccaccttggcctcccaaagttctgggact

SEQ ID NO: 18730 - DNA, 201 bp, Homo sapiens
gttggagcaccaatgccgtgagtggtcccttggaccttgcagggaagttctttgggaattggatgctcctctcccaacaggcagttttggtccagagggawgaaccctagactgggagtctgtgcgcctgactcaagtcctggttctgctgcgaatcatgaatcacgccacctgtctgtgcctcaggttttccgtagggtg

SEQ ID NO: 18731 - DNA, 201 bp, Homo sapiens
gactttggaactgagtaacaggcagaggttggaacagtttggagggcttggaacttcctagagacttgttgaatagctttgaccaaaatgctgatagtgayatggacaagtaacatctaggctgaggtggtctcagatggaaatgaggaacgtgttgggaactggagtaaaggtcactgttgctatgcaaagtggctggtg

SEQ ID NO: 18732 - DNA, 201 bp, Homo sapiens
cccacgccgtgtggagctgtgaatcaattaaacctctttcctttataaattacccagtctcgggtatgtctttagtagcagcatgagaacagactaatatrgtaaattggtaccagtagtggggtgctgctgtaaagatacccaaaaatgtggaagcgactttggaactgagtaacaggcagaggttggaacagtttggag

SEQ ID NO: 18733 - DNA, 201 bp, Homo sapiens
agattataatgaagttagaagttcttcagaggtcaagtgagctgccttcttggatctcagtgtttggtcatgtggggcaccttctgaccacaggtatcctstttcctaaaggtaagccagggtagaaattcacctgtcacataggcatgtaatgtaaagaaacccatggcctgttcacttcccccgtcctgtaatattttg

SEQ ID NO: 18734 - DNA, 201 bp, Homo sapiens
ttttcccattatgacaaaactctgagagttcctggggtgtggagtggacacagtagacagccatggagagcaggtgtccaggctgtgacttggttgattarggatctttctgcttgaaaacacctcttcttgtgcttgtacagttataatttgtttttattcttttttttttttttttttttgagatggattctcactctg

SEQ ID NO: 18735 - DNA, 201 bp, Homo sapiens
atgtaatcttccagggatatgctctgagcttgggaggaaattcacttcttcatgccggggaacgtatgacccactttggtgtattccaggcaatgtggagrtacagaaatgaaaagactcagttctcaaggggcttgaagtctgattcgctgaaataatttttagtttccagaaccacaagacagacccaagagggctgtg

SEQ ID NO: 18736 - DNA, 201 bp, Homo sapiens
gttcacttctgtgggcctgtttctcatatttataaagtgaagggtttaaaacacattcatgattcccaaactagggatttggagagtagtaaagattatcsaaatagtcttataatagtttttaagagctatgacaaggccactcaagctattagctgattactgcagggaatggaggagtggagcagaatatggtgccgg

SEQ ID NO: 18737 - DNA, 201 bp, Homo sapiens
ctggaaactccctttcttacaaggcatgacccactgggacatccagaggctgtgggtacagacctgtgtgagggccatggtgagctcagacctctctgccrgggcagacaggccagcgtatgtggctcaccaggaggccaccaacgccctgcagtcagaagggactctatgtggggcatggggtggaggcagcagcgtgcg

SEQ ID NO: 18738 - DNA, 201 bp, Homo sapiens
ccaacaccccaaatctgctcctccagtgtttaacacccccaaaaagcttgtctaagtagtttctccagaattcttcttagaaagggagctactgctgggcrcagtggctcacgcctgtaatcccagcactttgggaggccaaggtggatggatcacctgaggtcaggagttcgagaccagcctggtcaacatggtgaaacc

SEQ ID NO: 18739 - DNA, 201 bp, Homo sapiens
agcgagactctcaaaaaaaaaaaattagtcgggcatggtgatggacacctgtaatcccagctacttgggaagctgaggcaggaaaatcacttgaacccagrgagtggaggttgcagtgagcagagatggcgccactgcactcaggccagggagacaacatgagactctgtctcaaaaaaaagaaaatgtatctttctaaag

SEQ ID NO: 18740 - DNA, 201 bp, Homo sapiens
ctctgctcacttggtatctcttccacttaggtgtctcaaaacactgttcttctctcccaccaacaccccaaatctgctcctccagtgtttaacacccccaraaagcttgtctaagtagtttctccagaattcttcttagaaagggagctactgctgggcgcagtggctcacgcctgtaatcccagcactttgggaggccaa

SEQ ID NO: 18741 - DNA, 201 bp, Homo sapiens
cctacctttcagtcagacatctctgctcacttggtatctcttccacttaggtgtctcaaaacactgttcttctctcccaccaacaccccaaatctgctccwccagtgtttaacacccccaaaaagcttgtctaagtagtttctccagaattcttcttagaaagggagctactgctgggcgcagtggctcacgcctgtaatc

SEQ ID NO: 18742 - DNA, 201 bp, Homo sapiens
gtttactcccctattaaaaaaacaaaaccagaaaacgtgtttgcctagatcttgagactctggaagatcttaacagtcagaggttccccctatttgcaatratctcctttcctgccccttcctatccttgcaataatccttttgaataaagtctctccttactaaatccagttcctaaaaattaatttttttagagacagt

SEQ ID NO: 18743 - DNA, 201 bp, Homo sapiens
gggtggggtgtccactgagccaagggtctgtcagtgagagctggggaggctgggctggcttgcaagcacctgttataaccaaaccaggaaatcaggttccragtcttgccagcaagggcctacagctgccagcagagatggacagccaggagaccccaattggccacccagagccaccctcctctgcctaccccaccctcc

SEQ ID NO: 18744 - DNA, 201 bp, Homo sapiens
gacaccttaggaaggacctcgagacagtggttgtggactctgtagagagtaacagtgacagtagcaaacccttacccagtgccaaccttgtgctaggctcrcactaaatgagtttaccttcaattctcgtaacaataggaggtaactactattctaatttccattttatagatgaggaaactaaggcacagagatcactga

SEQ ID NO: 18745 - DNA, 201 bp, Homo sapiens
cccttccattccacttccccacatctgttctttctggtcgtgtttactcccctattaaaaaaacaaaaccagaaaacgtgtttgcctagatcttgagactstggaagatcttaacagtcagaggttccccctatttgcaatgatctcctttcctgccccttcctatccttgcaataatccttttgaataaagtctctcctt

SEQ ID NO: 18746 - DNA, 201 bp, Homo sapiens
ttgctcatgggaatgcagcagggaaaaactgattgtctcctctgtcactgttattaagggagaagtttgaagatcagaggaaagttattggaacatcatasttttcaccctaaagtcccaggcacaggaatctttggttattgggaaaatacacacaaacacacatttgtttgagtgggtttatattacataatactgtac

SEQ ID NO: 18747 - DNA, 201 bp, Homo sapiens
ctcttcccagagacccattgccagcacttcattctgttgatctcctcttgcacttctgcctcccccagcctggaaagagttttaaacatcttgtccctggsaaggaaaccctggctcagccagtattcttacctaatttttctgcctcgtgtccaaagtgcagctgtattaaatgtattaaataaaaggaaaaacttgggc

SEQ ID NO: 18748 - DNA, 201 bp, Homo sapiens
tcacctcttgagatctgatagttttataaaggggagttctgcacaagctcttttgcctgccctcatgtaagacatgactgcttctcattggccttccaccrtaattgtgaggcctttgcagccatgtggaactgtgagtgcattaaaactctttcctttataaattacccagtctcggttagcagcgtgagaacaaactaa

SEQ ID NO: 18749 - DNA, 201 bp, Homo sapiens
agagctccctgaaggcagccagggagatacttgtcagtacatgtgactaatggccaactgaatataagcagaagtgctgtgttgctgtgtgcaacactggmcaccttaggaaggacctcgagacagtggttgtggactctgtagagagtaacagtgacagtagcaaacccttacccagtgccaaccttgtgctaggctcgc

SEQ ID NO: 18750 - DNA, 201 bp, Homo sapiens
gtggtgggagtcagtaagggttaggtcactgcagtggtttaaacaagatgggctagaatcctttcacaggcacaggcagcttggagagggtgcaatagtgsatggtatcaggggtcagatgcctctttttcctttgagatcagtaagtggctttcacctcatgacctaggctggctgctgtgtgctagccgtcaagtcaca

SEQ ID NO: 18751 - DNA, 201 bp, Homo sapiens
ggaagtattggaattcccccaattgactggacattcccaattaccctccaagtatgtgtctgtttatccttccatccgcaatctgagagttccccaactcwataatacttggtgtcatcagacttttcatcttgtctgattggatgggtgtcatttcctttaggttttataattatcttttcatatgtgtattggctgtac

SEQ ID NO: 18752 - DNA, 201 bp, Homo sapiens
gaggaagtattggaattcccccaattgactggacattcccaattaccctccaagtatgtgtctgtttatccttccatccgcaatctgagagttccccaacyctataatacttggtgtcatcagacttttcatcttgtctgattggatgggtgtcatttcctttaggttttataattatcttttcatatgtgtattggctgt

SEQ ID NO: 18753 - DNA, 201 bp, Homo sapiens
tgtttatatgctattgatcgacctgtaggggttttgcagtgtttctgtattacagctgtgctgcagtgagcatcccatcacattgtgtggatttgaggaartattggaattcccccaattgactggacattcccaattaccctccaagtatgtgtctgtttatccttccatccgcaatctgagagttccccaactctataa

SEQ ID NO: 18754 - DNA, 201 bp, Homo sapiens
aaattagccaagcatggtggcatgcatctgtagtctcagctactctggaggctgaggtgggaggatcacttaagcccaggaggctgaggctgcaatgagcsgagatcaagcaggtgttaggtatatcagacagctgagaagacgcaagtgtgccctggggttcaaactggtacccctgtctccctgttccaggaataacat

SEQ ID NO: 18755 - DNA, 201 bp, Homo sapiens
ttaacgtgaccagatacacataatggggagacgtcctgccgtgacttcatctcagagatttcgctgtcacgttagaggaggaggagcgtctgagccgtgcrcttggcatctgccccttagtgaaaaccctgggcatggcatgattaaggttgatgctccagtgtccagaaggttttctttttgcccacaagtatatcaggg

SEQ ID NO: 18756 - DNA, 201 bp, Homo sapiens
actgagctactgaggaggggggaagaggttgagccacacgctgggcagcggcagctggtgggtatgggcctggagtctcacgtcccggctccaggtcgtcrcttccactctgcctccgatcctggcgtgtcagcatcagttggcccctagctgtctccctggtgtctgtgcccattatagaggtacgggcatgccacgctg

SEQ ID NO: 18757 - DNA, 201 bp, Homo sapiens
accttgttccccacttttcaaaatgctggtgtggcagcgagggcccctggtgcaagcggtgtctgtgtggtgctgccccaggccttgtgggtgggcgagcrggtggccccagccctgcgtgagcactgagtgcccgccccctcctccttgcaggtctggccgtgggcctgggcttcggggcactggcagaggtcgccaaga

SEQ ID NO: 18758 - DNA, 201 bp, Homo sapiens
ttagggggagccaaaagtgttctcactctcaccaccaagtgctttgtatgcctgtggcaacacctttcctgttccagtgaattagggaagtctaggtgatkggaggctcttcagacagacctgaagcgggtggttgtgttctcagggtgccctgtgtggtcggggtgacgttggtctgtggaccatccctggtccgtcttc

SEQ ID NO: 18759 - DNA, 201 bp, Homo sapiens
tgtttactcccctattaaaaaaacaaaaccagaaaacgtgtttgcctagatcttgagactctggaagatcttaacagtcagaggttccccctatttgcaaygatctcctttcctgccccttcctatccttgcaataatccttttgaataaagtctctccttactaaatccagttcctaaaaattaatttttttagagacag

SEQ ID NO: 18760 - DNA, 201 bp, Homo sapiens
gggccaagccgggggcgctcttagaatgtggatctgagcagggagaggtgtgaggtgtcctgagggctgtgggggtgccgagtggggtcccacgaggaccyggggagtgccggctgaggtgctcatcttctggagttgcctccagtgctggctggttctaatggagggcagaggctggcctgggttcctgagcaatgcgct

SEQ ID NO: 18761 - DNA, 201 bp, Homo sapiens
agccccctgctgcgatgttgcctggctgccgggcagtggggctgtggcgctgcgatgttgtctgactgcggggctgtgggactgcgatgttgcctggctgyggggctgcgggactgcggggctgtgggactgcgatgttgcctggctgcggggctgcgggactgcggggctgtgggactgcgatgttgcctggctgcgggg

SEQ ID NO: 18762 - DNA, 201 bp, Homo sapiens
cccaacagccccctgctgcgatgttgcctggctgccgggcagtggggctgtggcgctgcgatgttgtctgactgcggggctgtgggactgcgatgttgcckggctgtggggctgcgggactgcggggctgtgggactgcgatgttgcctggctgcggggctgcgggactgcggggctgtgggactgcgatgttgcctggct

SEQ ID NO: 18763 - DNA, 201 bp, Homo sapiens
ctgactttgtcagtttattttctcactgacaagaagtggagtagggtggctctgggtttgatttatccagcagttcaattccatctttgatttttttttttccattctttccattttcctctctggcattctttcctctcccgcattctcacttacataaagccaagtgcagggggagagagaggagagagactcttcctg

SEQ ID NO: 18764 - DNA, 201 bp, Homo sapiens
tatgagaatgacttttaaaatgaccaaaaaggggaagataacattaattcttgaagagaaggcctctgagaaaaatacagttgtagcaagctgctactttkcaaatgacccatgcattttaattttcccctaaggaaggccaaggaagagtcttatcacctcagggcaggagatgtagggacttgggtcatttaataagag

SEQ ID NO: 18765 - DNA, 201 bp, Homo sapiens
gggtggagaccacattcagaggtaaaggcagaaattgggggcccttaagtagacagcgagggaggaagaaatgaaggggcctggtgatggttagggtgaartgttaagactgagaaaacaaggacatgtgagaagacgagggaagagcattggagagaacaaagacactggaggagatgctacttggaggtccccagagag

SEQ ID NO: 18766 - DNA, 201 bp, Homo sapiens
gctcgcccctaggtgggctccagcctgtggaggacagtgcaggggagggtgaggagtgtaccggccccagcgtggctgagcacacagcctccaggccgagsacccagctgacagctttgcgcagtgatgataccctcgaggtggttgtgatgacatcagatttgcagaaaagaaaattgcttaagggccttgcccatgggc

SEQ ID NO: 18767 - DNA, 201 bp, Homo sapiens
cttgctgtgttcaagaaggcgctgcccgccctccccatctccatcacgttcgggctcatcttttacttctccacggacaacctggtgcggccgttcatggmcaccctggcctcccatcagctctacatctgagggacatggtgtgccacaggctgcaagctgcagggaattttcattggatgcagttgtatagttttacac

SEQ ID NO: 18768 - DNA, 201 bp, Homo sapiens
tggagggtttgctctatgccaggcactgtgatatgcacaaggcatgtattatctcactttattcataacaacactaagaagtagtgctatcatcttttatrgatgaaaaaataggcttagaagactaagtaacttggccaaggtcacataccaagaaatcgtcagcatgcaaactcaggttggcctggctctggaattcag

SEQ ID NO: 18769 - DNA, 201 bp, Homo sapiens
atatcgtattccagttattagaacctcatttcaccttctaaggacaatgttgaaaatacaaacttcacattaagataaaaatgggttttattactttaaayactaataaagaggtgacaatatattagttttttaaagaaaaaactttttataattaattgccacttgccagagtttgagattttcttaagaattcaggtt

SEQ ID NO: 18770 - DNA, 201 bp, Homo sapiens
ccagcgtgctgccagtgctggggggcagggcttacactccttatctagcagaagtgcacagagaactctggacttgagtaacaaagtcataaggaaagagrttttaaaatgggctccatgaaatgcagctcatctagttcagggctgggccagagagacgggggagtggagtgcccaattcattccctgttgtgctcacca

SEQ ID NO: 18771 - DNA, 201 bp, Homo sapiens
gctagcagaaggcaagaaataactaagatcagagcagaactgaaggaaatagagacacaaaaaacccttcaaaaaattaatgaatccaggagctggttttktgaaaagatcaacaaaattgatagactgctagcaagactaataaagaagaaaagagagaagaatcaaatagacgcaataaaaaatggcaaaggggatatc

SEQ ID NO: 18772 - DNA, 201 bp, Homo sapiens
cattcgggactgctctattatgactgatgagattacttgccattgcagtggaaaaatcaaagagtgccatggtgcaatccatggggtgaatatggacaagycgcccagttagcctggcaacctagacaagcctcagtagctctctctctctgccctgttgggaggctgaagagtatgacccatagcagtggagctagactt

SEQ ID NO: 18773 - DNA, 201 bp, Homo sapiens
ttcatcattgtgtgaacatcatagagtgtacttacacaaacctagatggtatagcctgctacatgcctaggctgtatggcatagcctgttgctcctaggcyacaaacctttacaacatgttactgtactgaatacagtagataactgtaatacaacggtatttgtgtacctaaacatagaaaaggtatagtaaaaatatga

SEQ ID NO: 18774 - DNA, 201 bp, Homo sapiens
tttgaggaggaatttagacttccaaagggtggagaatagaagtttcatccagtcttatctagggaagctcccgctgacatccaaattacataataaacacrgccagtaaaatactactgctactactatcataaaataaaataaggaattaagtagataggtcaggaatttggccccttaaaacactgaggccagagagat

SEQ ID NO: 18775 - DNA, 201 bp, Homo sapiens
ctggattgcaaatgactttaatccccaagtaaagctggctctgaagctggccacacatacttattcttttgtacctattttgatttttacagtattgtgakgaatgactccccgtgctcacccattcacactgagacatggggcatgagaacatggcaaatcatggcttgattttcccagggtctgtgtcttcgtgtccct

SEQ ID NO: 18776 - DNA, 201 bp, Homo sapiens
tttgaatggctgagtttggcagaaggaatggtagagaaatagatgactctacagaataaatggggaaggatttggagttctggaagcaatataaaagggamggggtaaagaggagagatgggaagatgaggagccagctggatcactctgtaaggggagctagcctaaaatcctaatgggaccggatggctcaagagcttt

SEQ ID NO: 18777 - DNA, 201 bp, Homo sapiens
atctgaccaacaggttcccctagcggtacataattagatccaaaatggtgcttctctttatcattttctctgctttctgagaaatggaattgtcattttgkcaagaatttggcagaaattgtatttcagattttaatacaattgagaaaaaaccattcataaccacagttgtctggtacgtaatgaaggtagatcttgccg

SEQ ID NO: 18778 - DNA, 201 bp, Homo sapiens
ctttctctcactctcatctgaccaacaggttcccctagcggtacataattagatccaaaatggtgcttctctttatcattttctctgctttctgagaaatkgaattgtcattttggcaagaatttggcagaaattgtatttcagattttaatacaattgagaaaaaaccattcataaccacagttgtctggtacgtaatga

SEQ ID NO: 18779 - DNA, 201 bp, Homo sapiens
aggcagcctcagcccctgtgggtttgggttggagcaccaatgccgtgagtggtcccttggaccttgcagggaagttctttgggaattggatgctcctctcycaacaggcagttttggtccagagggatgaaccctagactgggagtctgtgcgcctgactcaagtcctggttctgctgcgaatcatgaatcacgccacctg

SEQ ID NO: 18780 - DNA, 201 bp, Homo sapiens
tgtgagtctctgcccgccttctgccctggcctccctcctgagaactggccagacttttgaggaggaatttagacttccaaagggtggagaatagaagtttsatccagtcttatctagggaagctcccgctgacatccaaattacataataaacacggccagtaaaatactactgctactactatcataaaataaaataagg

SEQ ID NO: 18781 - DNA, 201 bp, Homo sapiens
gttctcaggttatctggctcctattccttgtgtcctcagtccttgcctgggaagagagtgcagtgagcagggtagctcctcaccccctctcctcaggtacyaggtgctcctgggccctcaagggctcagctcttccctccgcagctcctgcaggggctgttgggtttatcagagactggttctgtcaaagagctgagctca

SEQ ID NO: 18782 - DNA, 201 bp, Homo sapiens
tagctcctcaccccctctcctcaggtaccaggtgctcctgggccctcaagggctcagctcttccctccgcagctcctgcaggggctgttgggtttatcagwgactggttctgtcaaagagctgagctcaggggaacattttgggggagtgaggttcctaccaccttggagatagctttttccaaacaaggggaagcatttg

SEQ ID NO: 18783 - DNA, 201 bp, Homo sapiens
actgagctggggccctttctacggacctgtgagcagttgaaagtgcatctgcagaatgcacaggcccaaaagaggctttgagaggtataggctttcagggytcttaaagaaagaaaatatagtttctgaaatttgggattgccgagtagcagacccagtgggctccgggacaggatggagaggcctgggtggcgtccgtga

SEQ ID NO: 18784 - DNA, 201 bp, Homo sapiens
gaatctttggttattgggaaaatacacacaaacacacatttgtttgagtgggtttatattacataatactgtactcacagatacattttaaaaaaatatcwtaactaagatggcagtatatgatcattaactaatactttcaggcacaacaatcagagtgaggtactccatgaatgaaatctatgtttcaaatgttttctt

SEQ ID NO: 18785 - DNA, 201 bp, Homo sapiens
ggaatctttggttattgggaaaatacacacaaacacacatttgtttgagtgggtttatattacataatactgtactcacagatacattttaaaaaaatatmttaactaagatggcagtatatgatcattaactaatactttcaggcacaacaatcagagtgaggtactccatgaatgaaatctatgtttcaaatgttttct

SEQ ID NO: 18786 - DNA, 201 bp, Homo sapiens
tttagtccatttacatttaaatgcaattgtggatgtattggagtttatatctactaccttagtttttgtttgtttactatttgacctgtctgttatgtccmcctttttctcacctgttttgccttcttttaaattaatcaaggacttaaaattatagtcatgcgtctctctttttttttggagacagtctcgctcggtcac

SEQ ID NO: 18787 - DNA, 201 bp, Homo sapiens
cagggttttgccatgttggccaggctgttcttgaactcctggcctcaagtgatccacctgcctcaaccttccaaagtgctgggattaaaggcatgagccaycgcacctggccctcatgtgtgtcttaacaaggattcagtccgagaaatgtgtcgttaggcagtttcatcattgtgtgaacatcatagagtgtacttacac

SEQ ID NO: 18788 - DNA, 201 bp, Homo sapiens
gggttttgccatgttggccaggctgttcttgaactcctggcctcaagtgatccacctgcctcaaccttccaaagtgctgggattaaaggcatgagccaccrcacctggccctcatgtgtgtcttaacaaggattcagtccgagaaatgtgtcgttaggcagtttcatcattgtgtgaacatcatagagtgtacttacacaa

SEQ ID NO: 18789 - DNA, 201 bp, Homo sapiens
ctggccccaaagatatagaaggcaccctggttccctgtgctcacctggaccactgcctgcatcagctgggtcaggggaggatgggcagcccccacacctgsttcccaggggcaggttgcctggcggctctgattcccttggtgccagctgctgagaaccttactgccatttcagttgagcccacctagctctcatataaat

SEQ ID NO: 18790 - DNA, 201 bp, Homo sapiens
ctgcagggaatggaggagtggagcagaatatggtgccgggcaaagaacacagaactcttggcatgtggaaggtgggccctggagcacctgctgagctcccygctcagccccagctataggaccttcagccgactgtcccaggctcagcaccatgtgccttgagggtagggcagaggggcttagggggctcagccagcagtc

SEQ ID NO: 18791 - DNA, 201 bp, Homo sapiens
gtatggcttatgccattgaatcttgttttaagagatccttccctaccctcaaggttttctaaatttttattttcataataagatttttagttcatctgaartgtatttttatgattgtatttagtagggacctaattttgtttttctttgtaaccaggtgtcccagcactgtttactgaacagtctctcctttctcgctgg

SEQ ID NO: 18792 - DNA, 201 bp, Homo sapiens
gaccagatacacataatggggagacgtcctgccgtgacttcatctcagagatttcgctgtcacgttagaggaggaggagcgtctgagccgtgcgcttggcrtctgccccttagtgaaaaccctgggcatggcatgattaaggttgatgctccagtgtccagaaggttttctttttgcccacaagtatatcagggatgggat

SEQ ID NO: 18793 - DNA, 201 bp, Homo sapiens
ggccaaaattagttttattataagagatgcaactcaggaccagccaaatgaagagacagtgaagaagtaatgctgatggatcacacctggtgggggaaggmggacagctggggccaggagcaggagggacacctgcagggctggaagggcaggggaggtgggcctccatggtttgtgtttattgcataaccatttttattg

SEQ ID NO: 18794 - DNA, 201 bp, Homo sapiens
gaagctctaatttcctgatcagtaatgggtagactaattcccagttatatttacctgttgtaaggtgaaaggttcttcagaggacctctgtcttggtgttrtatgggcttttgaatgtactgaaattaaattccctaaaaatctgtgattcagacttcatactaaattgtacagcagtgcccagcccaaggccttgcattt

SEQ ID NO: 18795 - DNA, 201 bp, Homo sapiens
tttcccactggccactgatttggggaggcagctgtccatgtccccagtccacatcttagcttctagaggccaggtggggtgggctgggctgggcaagagcrgctgggccttctgggccagagtttctcttctttttccattctgtgcacgcctcttcagtacgggttactgtctctcctcacacagggggcgtgaagcttg

SEQ ID NO: 18796 - DNA, 201 bp, Homo sapiens
cattgggacaccacagggtctgaatctggggcactaggggtggccccgttactgtgaaccacagcagtgaaatgtggaggccctgtagtcagttaacgtgrccagatacacataatggggagacgtcctgccgtgacttcatctcagagatttcgctgtcacgttagaggaggaggagcgtctgagccgtgcgcttggcat

SEQ ID NO: 18797 - DNA, 201 bp, Homo sapiens
cctgtgctcacctggaccactgcctgcatcagctgggtcaggggaggatgggcagcccccacacctgcttcccaggggcaggttgcctggcggctctgatwcccttggtgccagctgctgagaaccttactgccatttcagttgagcccacctagctctcatataaatacatgttccctgagggcatcttaccatcccatg

SEQ ID NO: 18798 - DNA, 201 bp, Homo sapiens
ttcatcaccagactttggctcccgctttggggagcgcctcgcttcacggacaggaagcacagcaggtttatccagatgaactgagaaggtcagattagggyggggagaagagcatccggcatgagggctgagatgcgcaaagagtgtgctcgggagtggcccctggcacctgggtgctctggctggagaggaaaagccagt

SEQ ID NO: 18799 - DNA, 201 bp, Homo sapiens
atttttatgtctcatgtctctaaaatgtataaagaaggttgtgccccgaccaccctggggacatgttctgagggtctcctgagggctgtgtcttgggtcaytggtcactcatatttggctcaggataaatctcttcaaatattttacagagtctgactctttttgtccacaacaccatgtggtacaatagatctcttgaac

SEQ ID NO: 18800 - DNA, 201 bp, Homo sapiens
aaactcaaacccagaagactccttagagtttctcccaggaggtagggaaggggccgcatccatggagagaggaggatgtgacttagagcagtggtccccartctttagggaccagggactggtgtcatggtagacagtttttccacagataggggttggggggatgatttggagctgaaactgctccacctcaggtcatca

SEQ ID NO: 18801 - DNA, 201 bp, Homo sapiens
taagaaaacatcttgatgagaagcatcaagtaaaaggtgaagccctaagggcatgtatcagaaaattaaatgaatagatacactgctttgtattggaacargattttgaggctaggggatgtaaggagaagaaagtgtttcttgtagctggatattgcaataatttcacatctgtttccaggtaaataagctgggagcaga

SEQ ID NO: 18802 - DNA, 201 bp, Homo sapiens; identical to SEQ ID NO: 2033

SEQ ID NO: 18803 - DNA, 201 bp, Homo sapiens
tgccctggggttcaaactggtacccctgtctccctgttccaggaataacatgagtgccgggacaatgcatctttattatgagaggaatgagaattgtgtakcttgacatttgacaggagcttgctttcccccaggctgtttgaggaagggcagaggaaaatgtggtgccctaagaaggaaggacagaggaggccgaacact

SEQ ID NO: 18804 - DNA, 201 bp, Homo sapiens
acacctcgctgtgacttagggagggacaggattagcccaggaataaaagcatttttagaaattgttttctgcaccttcagaagctacaacactccttgtamcctttcagatggaagggatcagaggtgacagaatcgtgtatttctacatttatctgcggaagataaaatacaataaaaagtgagaagtgttcaaattcca

SEQ ID NO: 18805 - DNA, 201 bp, Homo sapiens
tctctcgcaggccaatgcctcaccaggtgattgaagcagagaaacttaggtggtgaaaggagaagatggggcctgtcctgagagtttctgttcctgagatkctagaggcagagggtatgtaaatctgaagttacactggatctcctaaaacagtataaagctacagaagtataatagtgtggaatggtggtgggagtcagt

SEQ ID NO: 18806 - DNA, 201 bp, Homo sapiens
gggctagaatcctttcacaggcacaggcagcttggagagggtgcaatagtgcatggtatcaggggtcagatgcctctttttcctttgagatcagtaagtgkctttcacctcatgacctaggctggctgctgtgtgctagccgtcaagtcacactccatccagcatgaaaggaggttagaaaagggtgcatttcctcttctt

SEQ ID NO: 18807 - DNA, 201 bp, Homo sapiens
agagagatggggtttcaccatgttggccaggctggtctggaactcctgacctcaagtgattcacccacctaggtctcctaaaagtgctgggattacaggcktgagccaccgtgcctggcctggtcttcttttatgttattaatagaaacccctatctggttaaactattatagttgggtttctagtacgtgcagccacatg

SEQ ID NO: 18808 - DNA, 201 bp, Homo sapiens
gttggctcactgcaacctctgcctcctgggttcaagcaattctcctgtctcaatttcctgagtagctgggattacagttgcccgccaccatgcctggctarttttgtattttagtagagacggggtttcaccacgttagccaggctggtctcaaactcctgactgcaggtgatccacgcaccttggcctccaaaagtgctg

SEQ ID NO: 18809 - DNA, 201 bp, Homo sapiens
cgttcctcattgcattcctcattatcttgggatgcatcttaagcaatggcaacagagttctccaaagcttcatccttggtgggaatagcgtctccatcccygagtcacaggtggtggttttctcagacactgcatcatcacaaaccatgaactttcacccctgcatgggacggtgatcactcaccccctcccacaaaagga

SEQ ID NO: 18810 - DNA, 201 bp, Homo sapiens
gctgtacagaaagttggcattggacaacccctcccagccccccaggcctgtcccttcatgagcagcacttaggggccaccctggcctggataatacagtamcaggtggcttgcctttctctggcttcacctgggggcctgtgggtgttgggcagctctgtgtctggcgaggtgagcccatttctcagggtcaggagcagaa

SEQ ID NO: 18811 - DNA, 201 bp, Homo sapiens
gtgagcctcctgaagcgacaggaggagggaggagagctgtacagaaagttggcattggacaacccctcccagccccccaggcctgtcccttcatgagcagyacttaggggccaccctggcctggataatacagtaacaggtggcttgcctttctctggcttcacctgggggcctgtgggtgttgggcagctctgtgtctgg

SEQ ID NO: 18812 - DNA, 201 bp, Homo sapiens
aattccatctttgatttttttttttccattctttccattttcctctctggcattctttcctctcccgcattctcacttacataaagccaagtgcagggggrgagagaggagagagactcttcctgtgtcatttttttaaggtcaatgaaaaccattcttaggagcccctgggcagatttctccctgaatctcattggccag

SEQ ID NO: 18813 - DNA, 201 bp, Homo sapiens
agagtgagaccctgtctctacaaacaccaccaccaccaacaaaaaaaaaattagttgggcatggtggcacatgcctgtggcacatgcctactcaggagccygaggtgggagagtcacttgagcccaagaggtcgaggctattagtgagccatgatcacaccactgcactccagcctgggcaacagagcaagaccccatcaa

SEQ ID NO: 18814 - DNA, 201 bp, Homo sapiens; identical to SEQ ID NO: 2027

SEQ ID NO: 18815 - DNA, 201 bp, Homo sapiens
accccttgctggccttaggctgtgtgttcacctctcagagctttccctgtcttttgcgccctggtttaccatctccaaagccctggaggccttcttggccytgttttataggtgaggaacccgctgcgggcgtagtgtgcacttggcctggccccggctgggcacacagtaggtgctcagtgtcccacctaggaccacaca

SEQ ID NO: 18816 - DNA, 201 bp, Homo sapiens
gaggccctggactgccccttgtcctgggaaagtcagcagagagctcagggctctgggagtggggatcctcactgccctctgttgcacccccttcccggccycacacacccgcaccatggagcaccagggccaaacttctcctggtgtctctgtccccaggtggctcttttggattttggggcaacgcgggaatatgacaga

SEQ ID NO: 18817 - DNA, 201 bp, Homo sapiens
ctcccagggcaccaggcagtgtggtgctgcctgacacagacccttcgcgctgtccacagatctgctacaacatcctggttctgtgcctgagggagctgttygagttccacttcatgcaaacagaccccaactggtccaacttcttctatgacccccagcagcacaaggtgagccccagggtgggggcacccgcagccaggc

SEQ ID NO: 18818 - DNA, 201 bp, Homo sapiens
agctctgaggggcagagggctggggttgcagcctgggccgaggccatatcctgcctggggtgaaggagggccctctgcctggttggggggtgtgtgtgggbggggggacggtgtggagggcctgtggctagggcgtgacctccctcccctacccagggacctgctgaagggccaccccttcttctatgtgcctgagattgt

SEQ ID NO: 18819 - DNA, 201 bp, Homo sapiens
ccagctctgaggggcagagggctggggttgcagcctgggccgaggccatatcctgcctggggtgaaggagggccctctgcctggttggggggtgtgtgtgkggggggggacggtgtggagggcctgtggctagggcgtgacctccctcccctacccagggacctgctgaagggccaccccttcttctatgtgcctgagatt

SEQ ID NO: 18820 - DNA, 201 bp, Homo sapiens
aggttgcaggtgggcatcgacctcttggtggtctggcgcagcctccctgcctggggccgtctgccttgggctcgtcactgcccaaggatcagatgagctgmtggaggaggaccctgagccagagttagttcttagcttaaactctacagccgtgcttctcaaagtgtggtcctgggggcccatgaagtcaaaactattttg

SEQ ID NO: 18821 - DNA, 201 bp, Homo sapiens
gccctgggaggatgaggtgtgggtggtaaggtcagtttgggacgtacttcctataggaggtacctataggtggttggggtgctaggcttgcagcagacagmtgccctggggaaggcttctcagcgtggactctccctgactcccactctccctggctcccgcttttcctggttcactctccctggctcccactctccctgg

SEQ ID NO: 18822 - DNA, 201 bp, Homo sapiens; identical to SEQ ID NO: 2029

SEQ ID NO: 18823 - DNA, 201 bp, Homo sapiens
caccatgctttgctggggaggagctggtttataatgctgtgctctgtatttacggaggagattgaacagtggcttggtaatgcagatgacgtccctggccwgctgtcatagaggagatgagtgacagacagtgagttttggctgtgaaggggggacttggagtgtataagggatcctcagagtaaaattccttccttctgg

SEQ ID NO: 18824 - DNA, 201 bp, Homo sapiens
ggtacgtaatgaaggtagatcttgccgaatggaacatccttctctgcaacttggtgggtttgaatggctgagtttggcagaaggaatggtagagaaatagrtgactctacagaataaatggggaaggatttggagttctggaagcaatataaaagggaaggggtaaagaggagagatgggaagatgaggagccagctggat

SEQ ID NO: 18825 - DNA, 201 bp, Homo sapiens
gttatgaaagaggcacaagacttagtccaagcttataaggagctaggcctctagagaaaaaactcaggcttgccaaagcagcaagtaaacaaacaggttgraaaattttgaaacaaagttgtaaataaggtcaaggcatggaaccagtcaagaaaagtcaatatcgtattccagttattagaacctcatttcaccttctaa

SEQ ID NO: 18826 - DNA, 201 bp, Homo sapiens
agattccttttcgggctggcttattcacagttgcaagatgtctgtgaacagcaactcagccaacaacaactcgtctaaggagagaggagctattgtttccyacagccgttgcatagaagtcctgagcttccttctgattggaccaccccaggaccagtcattgagggcgtgccatgtgctgactggctgagattcaaaaac

SEQ ID NO: 18827 - DNA, 201 bp, Homo sapiens
aaaaagaactgaatgcatagtaaggccatttgtataaaatataaaagtataggtttgtatttgcttgtttatgtataaagaaactgaaaagagataagaamcaataacagggaagatgtttatgtgggagggcaagggaatttggggcatgaaagttgggaagtgggtgggaaagggatggaattaggcaagacttcactg

SEQ ID NO: 18828 - DNA, 201 bp, Homo sapiens
ggaccagtcattgagggcgtgccatgtgctgactggctgagattcaaaaacctatcatcttgtcaagtggattgggattgacttatatcgggggcatgatrtggtttggttgtgtccccacccaaatctcatcttgagttgtagctcccatcccacgtgtcatgggagggaactggtgggaggtaattgaatcatggagag

SEQ ID NO: 18829 - DNA, 201 bp, Homo sapiens
tcttgtctattagatgaggattgttggatgcctcagtaaaagctgggcttagcgcagcgcctggtttatagtttgctgctgtttagctgtatctttacccyttgctggtagagaaactcccccgagcccttctctgtaaacaggcctagtttctggcaggtaaagccaaagccccaaggaactttacttactcacccctgc

SEQ ID NO: 18830 - DNA, 201 bp, Homo sapiens
ttatgttattagcacaagaatgtataatttttaaacagttcaaagaaaaaccccagtagtctgggagcaactttcaagggaacttgaagtccttagcctasaaggcaagttgagccctggaaactccctttcttacaaggcatgacccactgggacatccagaggctgtgggtacagacctgtgtgagggccatggtgagc

SEQ ID NO: 18831 - DNA, 201 bp, Homo sapiens
tttttggccattgtgaataatgctgtaatgaatgtgggagtgccgatatctcttggacatactgatttcattttctttgtatgtgtatatattatagtagyggaattgctggatcatatggtagtcctgtttttaatttctgctttttatattttctttatattttaaaaattttaagaatttttataagtatttcttaca

SEQ ID NO: 18832 - DNA, 201 bp, Homo sapiens
ggtggaggttgcagtgagctgagatcacaccattgcactccagcctgggtgacaataatgaaactccatctcaaaaaaaaaaaaagctgtatttatttaaraaaacatcttgatgagaagcatcaagtaaaaggtgaagccctaagggcatgtatcagaaaattaaatgaatagatacactgctttgtattggaacaggat

SEQ ID NO: 18833 - DNA, 201 bp, Homo sapiens
aaaacattggtttggtgaatagttgaagctgagggtgggctgaccctgaggggtcagggaggggctctggttgtcccttggtctatggatatccgtcacargcctcactgggcagagcaatggtggctgggcagggacaggcagcctcagcccctgtgggtttgggttggagcaccaatgccgtgagtggtcccttggacc

SEQ ID NO: 18834 - DNA, 201 bp, Homo sapiens
acagtgtctcgctttgtcacccaggctggaatgcagtggcatgatcatagctcactgcaacctcgaattcctgggctcaagcaatcctcctgcctcaactraggctacatgcatgcaccatcatgccttgctaattttttttaatttttgtcgagacagggtcttgctatattgcccaggctggtctggaactcctggcct

SEQ ID NO: 18835 - DNA, 201 bp, Homo sapiens
cagggcttgtgtctgaccctcctgctgcttgctgtgttcaagaaggcgctgcccgccctccccatctccatcacgttcgggctcatcttttacttctccayggacaacctggtgcggccgttcatggacaccctggcctcccatcagctctacatctgagggacatggtgtgccacaggctgcaagctgcagggaattttc

SEQ ID NO: 18836 - DNA, 201 bp, Homo sapiens
  misc_feature (101)..(101): n is a, c, g, or t
gggctcccgggaagctgagtggccgagggcgtgtgtgcgagggctcctgtctttctggcctcacccgtgctcctggtggggagggtgtggtggccagggcntcccaggagtgtgcccgcccaggtcctgggcgcacactttaatccccaggttcgccctgtgtcattctcctgccttccagatgatgcctttatcaacccc

SEQ ID NO: 18837 - DNA, 201 bp, Homo sapiens
ggaggctggggctcccgggaagctgagtggccgagggcgtgtgtgcgagggctcctgtctttctggcctcacccgtgctcctggtggggagggtgtggtgsccagggcatcccaggagtgtgcccgcccaggtcctgggcgcacactttaatccccaggttcgccctgtgtcattctcctgccttccagatgatgccttta

SEQ ID NO: 18838 - DNA, 201 bp, Homo sapiens
acagacagattgacctgctttagagggggtgaggctggaggcccttcctcctcccagcccaaagtggccacccagccccttctttttggctgcctgcacayccacacgccttctgcacacctggacaccttacacaccccctgcacacccactgaacacccacacacaacccctgcacacccaccgaacacccgcagacct

SEQ ID NO: 18839 - DNA, 201 bp, Homo sapiens
aaaagtgttctcactctcaccaccaagtgctttgtatgcctgtggcaacacctttcctgttccagtgaattagggaagtctaggtgattggaggctcttcwgacagacctgaagcgggtggttgtgttctcagggtgccctgtgtggtcggggtgacgttggtctgtggaccatccctggtccgtcttcccatttgtgctg

SEQ ID NO: 18840 - DNA, 201 bp, Homo sapiens
gagacaccatcatggtggctaaaggccttgtcaagctgacccaggcggccgtggaaacccacctgcagcacttgggcatcggaggggagctgatcatggcrgccagggccctgcagtccacggctgtggagcagattggcatgttcttggggaaggtgcaggtaagggggcctggcagtgggaggggtgctggcaggaaga

SEQ ID NO: 18841 - DNA, 201 bp, Homo sapiens
cctgacttggcctcctctcttccagccctgaaggatggctgccatattgggagacaccatcatggtggctaaaggccttgtcaagctgacccaggcggccrtggaaacccacctgcagcacttgggcatcggaggggagctgatcatggcggccagggccctgcagtccacggctgtggagcagattggcatgttcttggg

SEQ ID NO: 18842 - DNA, 201 bp, Homo sapiens
ctcccctgacttggcctcctctcttccagccctgaaggatggctgccatattgggagacaccatcatggtggctaaaggccttgtcaagctgacccaggcrgccgtggaaacccacctgcagcacttgggcatcggaggggagctgatcatggcggccagggccctgcagtccacggctgtggagcagattggcatgttct

SEQ ID NO: 18843 - DNA, 201 bp, Homo sapiens
tcagtcactcggaggtagggctgagtgacgagccacaccacccaggaggcacgggagcagggtaggcaccggagcagggtggctgcccgcagtgcgctgcbattcactccctcagtgcttcgcttttccgtgtctcccttctcgcgaggggaggaaggtcacggactccaggatcctgtctccctccagcccctcaaggtt

SEQ ID NO: 18844 - DNA, 201 bp, Homo sapiens
ttaccatgatgtaatccagtttacagcagagctttgaatgagaactcagcgccccgggcactgtgggaggaacccgggctggtggagggctctggtgtctsgccgccatttatccttcctctcttgccccaggtcatggaagacgcccacttggatgccatcctcatcctgggggaggccttcgcctctgatgagcctttt

SEQ ID NO: 18845 - DNA, 201 bp, Homo sapiens
ccatgatgtaatccagtttacagcagagctttgaatgagaactcagcgccccgggcactgtgggaggaacccgggctggtggagggctctggtgtctcgcygccatttatccttcctctcttgccccaggtcatggaagacgcccacttggatgccatcctcatcctgggggaggccttcgcctctgatgagccttttgat

SEQ ID NO: 18846 - DNA, 201 bp, Homo sapiens
cagcagagctttgaatgagaactcagcgccccgggcactgtgggaggaacccgggctggtggagggctctggtgtctcgccgccatttatccttcctctcytgccccaggtcatggaagacgcccacttggatgccatcctcatcctgggggaggccttcgcctctgatgagccttttgattttggcactcagagcaccac

SEQ ID NO: 18847 - DNA, 201 bp, Homo sapiens
gctctggtgtctcgccgccatttatccttcctctcttgccccaggtcatggaagacgcccacttggatgccatcctcatcctgggggaggccttcgcctcygatgagccttttgattttggcactcagagcaccaccgagaagatccacaacctgattcccgtcatgctgaggcaccgtctcgtccccccacccgaggaaa

SEQ ID NO: 18848 - DNA, 201 bp, Homo sapiens; identical to SEQ ID NO: 2028

SEQ ID NO: 18849 - DNA, 201 bp, Homo sapiens
gtatcacatcagcccagtccatgttaccctcgtgttcccggcccctgtgggtttgagtttatgcccattaccatgatgtaatccagtttacagcagagctytgaatgagaactcagcgccccgggcactgtgggaggaacccgggctggtggagggctctggtgtctcgccgccatttatccttcctctcttgccccaggt

SEQ ID NO: 18850 - DNA, 201 bp, Homo sapiens
tgaacatgagcaacatgcttccagaaggtctgaggctaggtggttgggtcaagggcaggagtgggtggcaggcatctgtgttgggttctggggaccagagkgggtcctccctgcagagcccccttcctcgctgatgccctcctccctggcccaggcctgttccccgagcacctgatcgacgtgctgaggcgggagctggcc

SEQ ID NO: 18851 - DNA, 201 bp, Homo sapiens
gggtcattaaaggaaactgaacattgaaaaaaaaaaaaaaaaaaaaaagactggatccaattgctgaaaggacttgaaaagaattatagatgcattttttwaaaagtatcatatatgtttagattttactcatccttgttgctttcttaccatttattctagatagtttaatattatatgctttagtgaaagctaacttat

SEQ ID NO: 18852 - DNA, 201 bp, Homo sapiens
ttactatttatggagaataagttggtattctaattactagtttcattaaaacagttcccctaaggacccctacctgataacacttttaagactggatccakcctttctttgcggaatcaccatggcggctgggaccctgtacacgtatcctgaaaactggagggccttcaaggctctcatcgctgctcagtacagcggggc

SEQ ID NO: 18853 - DNA, 201 bp, Homo sapiens
ctttctttgaggaataagaatttcctcacatttcctaagaatactcaggatcaagtataagtttaggaatcttggactttcttatttgatcctgaactcaratttatagcccagaaattttggtggctaagtgggtcaaaagattcctaggcaaaccttaaagaagacccttggactagccaaagcatttgtttagaatat

SEQ ID NO: 18854 - DNA, 201 bp, Homo sapiens
ttttttttttttttgtgagatggagtcttactctgtcgcccaggccggagtgcagtgatgtgatcttggctcactgcaacctccgcctcccgagttcaagygattctcctgcctcagcctcctgagtagctgggattgcaggtgtgcaccaccatgtctggctaatttttgtatttgtagtagagacagggtttcaccatg

SEQ ID NO: 18855 - DNA, 201 bp, Homo sapiens
ctgtgtggtgctcgatatatttgtggtaatcattacatgattcatatcaaatcatcacatagttcaccttgaatatatatgattctatttgtcaattataycttaataaagctggaaaaaccaaactgcttaatctcttttctgttgcttataacagaatacgtaaaactgggtaatttataaggaaaagaaatttgttac

SEQ ID NO: 18856 - DNA, 201 bp, Homo sapiens
ctaaggtaattactttttcagttgtgaccttggacttgacccaaaagttgtgattttttttttttttccttttctggaaataggtagggcattagaaagayagctgtgctttggctcctttatggaccaaaagtgatgtcaaccagctggtcacttggacatgtctttttcagtggccatgggagtgttcctgtccctttc

SEQ ID NO: 18857 - DNA, 201 bp, Homo sapiens; identical to SEQ ID NO: 2078

SEQ ID NO: 18858 - DNA, 201 bp, Homo sapiens
ttgaagaattactagagtaggaaaggtaatttagtcattgatgtgcaatctataaattccttgttatttgaaatttgagtgttatttatatagggatttgrgtaaagtaggtttatgggaactaaaatgtaatctaatgaggtaatggtatttatcagaaggtgatataattctcacaacaatcttattacctggatactt

SEQ ID NO: 18859 - DNA, 201 bp, Homo sapiens
caggtacatatatttattttgttctcttggaagatcttcatggtttctctttagtgtgtttaaactagcacatgaaaataatagactttacaaaattggcsatgacctatatcagcaaatggtgaaaccagaaagaaaaatacattaaaggaaaaatcccaaaggaactgatatttctctaagaagcaaggtataactttt

SEQ ID NO: 18860 - DNA, 201 bp, Homo sapiens; identical to SEQ ID NO: 2079

SEQ ID NO: 18861 - DNA, 201 bp, Homo sapiens
tcaactatctcaatcctgggagaatcagagtctttatctgaaatctgctgcttatattatgcaggtacatatatttattttgttctcttggaagatcttcrtggtttctctttagtgtgtttaaactagcacatgaaaataatagactttacaaaattggccatgacctatatcagcaaatggtgaaaccagaaagaaaaa

SEQ ID NO: 18862 - DNA, 201 bp, Homo sapiens; identical to SEQ ID NO: 2081

SEQ ID NO: 18863 - DNA, 201 bp, Homo sapiens
aatggaaaagagcttgggtggtttctgtacttcatttagtttggagagttaacactgtattatagttttatctccagtgaacaaaatataatcatttttgwaacaaaaaaattaagctatgtatcagaaagcaatatccaaaggtaattattattttttaatttaaattatagatcttattttcctggaggctgtgtgaga

SEQ ID NO: 18864 - DNA, 201 bp, Homo sapiens
ccctagtagctgagactacaggtgtgcaccaccacgcctggctaatttttgtacttttagtagaggtgtggtttcaccatgttggccaggccggtctcgawctcctgacctcaggtgatccgcctgcctcagcctccgaaagtgctgggattacaggtgtgagccactgtgctgggctatatgtatgtatttctttgtgat

SEQ ID NO: 18865 - DNA, 201 bp, Homo sapiens; identical to SEQ ID NO: 2083

SEQ ID NO: 18866 - DNA, 201 bp, Homo sapiens
aaatggaaaagagcttgggtggtttctgtacttcatttagtttggagagttaacactgtattatagttttatctccagtgaacaaaatataatcatttttraaacaaaaaaattaagctatgtatcagaaagcaatatccaaaggtaattattattttttaatttaaattatagatcttattttcctggaggctgtgtgag

SEQ ID NO: 18867 - DNA, 201 bp, Homo sapiens
tttgagggaagctgtggtgtttagtggcacggggagggatcttcatggctagcagtgcctgggggtagtttcccatctccaagaattgtcctgtgccctcyaacttctgaatgtcccatcagagattcatggagctgaaaacctatttacctggctgagaacttagttgttttatatataaacagaaagtatgttttgcat

SEQ ID NO: 18868 - DNA, 201 bp, Homo sapiens
gcctccctagtagctgagactacaggtgtgcaccaccacgcctggctaatttttgtacttttagtagaggtgtggtttcaccatgttggccaggccggtckcgaactcctgacctcaggtgatccgcctgcctcagcctccgaaagtgctgggattacaggtgtgagccactgtgctgggctatatgtatgtatttctttg

SEQ ID NO: 18869 - DNA, 201 bp, Homo sapiens; identical to SEQ ID NO: 2085

SEQ ID NO: 18870 - DNA, 201 bp, Homo sapiens
gcatcacgtggtgaggggctcagtatgctagtccagctctctcttctttttcttttcttttctttttttttttttttgtgagatggagtcttactctgtcrcccaggccggagtgcagtgatgtgatcttggctcactgcaacctccgcctcccgagttcaagcgattctcctgcctcagcctcctgagtagctgggattg

SEQ ID NO: 18871 - DNA, 201 bp, Homo sapiens
gtcgccaggctggagtgcagtggcgtgttctcggctcactgcgacctctgcttcccgggtttgagcaattctcctgcctcagcctccctagtagctgagastacaggtgtgcaccaccacgcctggctaatttttgtacttttagtagaggtgtggtttcaccatgttggccaggccggtctcgaactcctgacctcaggt

SEQ ID NO: 18872 - DNA, 201 bp, Homo sapiens; identical to SEQ ID NO: 2086

SEQ ID NO: 18873 - DNA, 201 bp, Homo sapiens
tgagacagtctctcgctctgtcgccaggctggagtgcagtggcgtgttctcggctcactgcgacctctgcttcccgggtttgagcaattctcctgcctcascctccctagtagctgagactacaggtgtgcaccaccacgcctggctaatttttgtacttttagtagaggtgtggtttcaccatgttggccaggccggtct

SEQ ID NO: 18874 - DNA, 201 bp, Homo sapiens
ttttttctgagacagtctctcgctctgtcgccaggctggagtgcagtggcgtgttctcggctcactgcgacctctgcttcccgggtttgagcaattctccwgcctcagcctccctagtagctgagactacaggtgtgcaccaccacgcctggctaatttttgtacttttagtagaggtgtggtttcaccatgttggccagg

SEQ ID NO: 18875 - DNA, 201 bp, Homo sapiens; identical to SEQ ID NO: 2076

SEQ ID NO: 18876 - DNA, 201 bp, Homo sapiens
ttcttttctttttttttttttttgtgagatggagtcttactctgtcgcccaggccggagtgcagtgatgtgatcttggctcactgcaacctccgcctcccragttcaagcgattctcctgcctcagcctcctgagtagctgggattgcaggtgtgcaccaccatgtctggctaatttttgtatttgtagtagagacagggt

SEQ ID NO: 18877 - DNA, 201 bp, Homo sapiens
aaatttcataagagaacaaattttaagtgtccccaatgttccccaccccaatggtaactgtgtggtgctcgatatatttgtggtaatcattacatgattcrtatcaaatcatcacatagttcaccttgaatatatatgattctatttgtcaattataccttaataaagctggaaaaaccaaactgcttaatctcttttctg

SEQ ID NO: 18878 - DNA, 201 bp, Homo sapiens
taattttgatgggaaatgtgtcagcttgaaataaatcgatgtttgggaaattgttctcttaaagacggtaatctgaaaatgtgaatgctaaataatgaaaacatttgtacagtttgggggtagatgagttttaatctgtttctggcatctgtacattcttgtgatatctcacagagacctggagtgtttaggttgcaattt

SEQ ID NO: 18879 - DNA, 201 bp, Homo sapiens; identical to SEQ ID NO: 2087

SEQ ID NO: 18880 - DNA, 201 bp, Homo sapiens; identical to SEQ ID NO: 2088

SEQ ID NO: 18881 - DNA, 201 bp, Homo sapiens
ggtctctatttcatagccaaagtggacaatttatagagtgattttctagaacaccccaatatgtagtgacattttgtggcagtgatgccacatgtaggaartggatctctatagaactttgctattaatgttgcggggtatttgttgcatgatgtagaaaatgctatccgggttacctttcattccttatatctgacttag

SEQ ID NO: 18882 - DNA, 201 bp, Homo sapiens
aattttctaggggagttactgagatatatagaggggtgtataaaactagtggaagataagggttacttcattaagtatatttattcaggtctgttgcagcmccagttctcaatgtctggtggtaagggctgttttctcaccccagtactggaagggtacccctcccagaggaatcttgatggcttactgcatgcgggaaga

SEQ ID NO: 18883 - DNA, 201 bp, Homo sapiens
agacagatgccatttgttttgaaggcactcttaagatacattctccttataggatggtgaaggtaactgtcagctgaatatacctatattctctgtgtgcmtggtttaaatcaggtttatttgtctgccaactaaatggtgccacaaatggataataaacatgtttatttctaactcttgagatttatcctagtcatcttt

SEQ ID NO: 18884 - DNA, 201 bp, Homo sapiens
caccccaatggtaactgtgtggtgctcgatatatttgtggtaatcattacatgattcatatcaaatcatcacatagttcaccttgaatatatatgattctrtttgtcaattataccttaataaagctggaaaaaccaaactgcttaatctcttttctgttgcttataacagaatacgtaaaactgggtaatttataaggaa

SEQ ID NO: 18885 - DNA, 201 bp, Homo sapiens
aaaggtgttttttaaaaactgaaattatgcctcattatgcattgtttaaaaataacttttaaatgattatgaaagtaaaaatgtgttcttggtaaacactrcaacgaagtataaagagagaaaggaaaatgatccatttctcccaaatataaaggtaatcattagtatcattttggcatatgtatttatgtatgtatgtat

SEQ ID NO: 18886 - DNA, 201 bp, Homo sapiens; identical to SEQ ID NO: 2077

SEQ ID NO: 18887 - DNA, 201 bp, Homo sapiens
agatatgtggggtcgaatataggttccactgttctaatggagaccctaagttacatggctcaaaaagttaaaattttatttttctctcatgtaacattttrgataatttgatgattccctaatgttgggacccagtcttttctgtcttaggctcacaactatccttgagcctgtgtcatgggggatgactctgaagctgcg

SEQ ID NO: 18888 - DNA, 201 bp, Homo sapiens; identical to SEQ ID NO: 2080

SEQ ID NO: 18889 - DNA, 201 bp, Homo sapiens
caagctttcagttataagatggtgactttagttaataatattttttacttgaaatttcataagagaacaaattttaagtgtccccaatgttccccaccccratggtaactgtgtggtgctcgatatatttgtggtaatcattacatgattcatatcaaatcatcacatagttcaccttgaatatatatgattctatttgtc

SEQ ID NO: 18890 - DNA, 201 bp, Homo sapiens; identical to SEQ ID NO: 2084

SEQ ID NO: 18891 - DNA, 201 bp, Homo sapiens
attttccttggcttcccagatgacagtggaaaaaggcatagtcaagacttcaagtgcggaaaatgttggcaactctgacatgcaagttcttttccatatasagctgagttatgctggagtattttggttacaaagacttcattttctcacctgtctgaattcctgtttggattttagttactcttgatttatcagcatgga

SEQ ID NO: 18892 - DNA, 201 bp, Homo sapiens
tataattacattttaaaatatgtgctatttacaatcacacaaaaaatggaacagtataaatccaaaaaatgtgtataggattcttatgctgaaaatcactrcatgtatgcatgtatatatgtgtgtgtgtaaactcatgtgtgtgttgtgtgtgtgtgtgaattaaatgcaatatctgtggactggattgtgctaggtgat

SEQ ID NO: 18893 - DNA, 201 bp, Homo sapiens
tgaaaaaacagaaagtcttagaaaacaagaaatagaggaggagcgtcccttaactctatcaagtacatctacagctagcattacatttaatggtgaaagastgaatgcttatactctaagatcagtaacaaagcaaggatgtcctcactcgccactgttacccaacatatgtaatcctgaaagttgtagccagcacaataa

SEQ ID NO: 18894 - DNA, 201 bp, Homo sapiens
aaacttgctgaggtaggaggattgcttgaggccaggagtttgagaccagcctgggcaacatagcaagacccccatctcaaaaaagacattagctggagagsggggtggtagtgcatacccgtagtcccagctactcaagaagttgagatgggaggatgacttaagcccaggagttggaggctgcagtgagccatgaccaag

SEQ ID NO: 18895 - DNA, 201 bp, Homo sapiens
tggctgagtggggtttattctggtgatggaagactgatccagtattcagaatcagtcagtgtaatccaccatatcaacaggctaaagaagaaaaatcacayaatcgtatctattgatggagaaaaaacatttgaacaaattcaacactcattcattatttaaaaataaacttgctgaggtaggaggattgcttgaggccag

SEQ ID NO: 18896 - DNA, 201 bp, Homo sapiens
aggtgcccgccaccacacccagctaattttttgtatttttagtagagactgggtttcaccgtgttagccaggatggtctcgatctcctgaccttgtgatcygcctgcctcagccttccaaagtgctgggattacaggcctgagccaccacgtccagcctataaaattatttttacaatacgaatacaattcatagaattat

SEQ ID NO: 18897 - DNA, 201 bp, Homo sapiens
ctcatgcccaagaaaagaaatctccaggctcagatggtttactggaaaaacataacaaatattcacagattattcagtctcttccagaaaagataataggmaggaacacttcccaattcattttatgaaaccagtgttatcctgatacaaaaaccagacaaagattgttcaaaaaaataccacagaccaatattccttatc

SEQ ID NO: 18898 - DNA, 201 bp, Homo sapiens
ccgcctcccaggttcacaccattctcctgcctcagcctcagagtagctgggactacaggcgcccgccaccacgcctggctaattttttgtatttttagtaragacggggtttcaccatgttagccaggatggtctcgatctcctgacctcgtgatccgcccgccttggcctcccaaagtgctgggattacaggtatgagtc

SEQ ID NO: 18899 - DNA, 201 bp, Homo sapiens
taagaaactcatgcccaagaaaagaaatctccaggctcagatggtttactggaaaaacataacaaatattcacagattattcagtctcttccagaaaagakaataggaaggaacacttcccaattcattttatgaaaccagtgttatcctgatacaaaaaccagacaaagattgttcaaaaaaataccacagaccaatatt

SEQ ID NO: 18900 - DNA, 201 bp, Homo sapiens
ttaggcaggaaaggattgtttagttgtttttgttattgagtctccttggcactgacttgtttctgacagggacagtgtcacctcttgtagcaacacctctrctatgtggagtcattctgtggccttgcctctttatattccgggaatacctctgatgttccttgggaaccttctggcctagctgccaactgtgagctgtca

SEQ ID NO: 18901 - DNA, 201 bp, Homo sapiens
ttgtcctgcaatctctggagggtgccctcctcctgctggcgcctgagccaggcatgagtggcagcattgtctaattcttaacaaaattcagggggtgactytttgtgtatcttttcgcttgttttttgttgtgatactcttggacttaactcaaatttcatgaatcgaggaaaggataaaaggtataataggccttctaat

SEQ ID NO: 18902 - DNA, 201 bp, Homo sapiens
ctgccgggctggaagacagaaagaagaggcaccgccgcgtgctggaggctggagccggagcttgcgcctccgcggctcgcctcgctgcggttggtggtgamatcagagaccgcagctcggccacagtggtagaaatgtggtagggtaggtgagttatccagggctgcactgccctcttctgggggtaagggttgggtgtac

SEQ ID NO: 18903 - DNA, 201 bp, Homo sapiens
ttagttttatctgaaagtttccacataaattgtgagcaccaatgcccatctcaaccatttggttgccctcctcaaccagtttggttgatccaatgccagckcccagctcccactgcaggcatcaccacacgaccctgatctggcagacgctgtgcacagggacgtctacgggggtgggaggatgggttccagggaaactgt

SEQ ID NO: 18904 - DNA, 201 bp, Homo sapiens
gcacggtggctcctgtctgtaatcctggcactttgggaggccaaggtgggtggatcatgaggtcaagagatcaagaccatcctggccaacatgttgaaacyctgtctctactaaaaatacaaaaattagttgggtgtggtggcgggcgcctgtagtcccggctactcgggaggctgaggcaggagaatcgcttgaacctgg

SEQ ID NO: 18905 - DNA, 201 bp, Homo sapiens
cctccctgttggtggtggtggtgacggagcggtaggagggaggctagcagcgagagcttctcctgccgggctggaagacagaaagaagaggcaccgccgcrtgctggaggctggagccggagcttgcgcctccgcggctcgcctcgctgcggttggtggtgaaatcagagaccgcagctcggccacagtggtagaaatgtg

SEQ ID NO: 18906 - DNA, 201 bp, Homo sapiens
ctcccacctgtgcctaaatggtggcttcttggtatcttgaaagggggtgctcagcaggagaaagcagctccatgtttctgggcagcccgtcctatttacakactgctgcggctccctggcagctgccacagtccccgaggccagagggagttccttgagggccccagcagttgtttgagtcatgtgttttgggcccttttc

SEQ ID NO: 18907 - DNA, 201 bp, Homo sapiens
tctgaatgatgaaggcaaccacttttcatttggattcagaaacacttggaagcagtgataatatgtcttttcttttcttcttcttcttcttttttttttttgagatggagtctcactctgttgcccaggctggagtgcaatggtgcgatctcggctcgctgcaacctccgcctcccaggttcaagcaattctcctgcctca

SEQ ID NO: 18908 - DNA, 201 bp, Homo sapiens
ttctgattggatgagagcaagtcttaagacaaccaatcacagcatgaaaataaagtccaatcagagtaggcctagaggtttttctctcatccaatcagaayatgtagtccagggtctcctaacctcagtatataaagcatgctgaggcagcggcgcgtcatttctggcacttatgtgtgggtgtggggagctactacgtac

SEQ ID NO: 18909 - DNA, 201 bp, Homo sapiens
tctactaaaaatacaaaaaattagccaagcgtcgtggcaggcgcctgtagtcccagctactcgggaggctgaggcaggagaatagcgtgaacctggaaggyggagcttgcagtgagccgagatcacgccactgcactccagcctgggcgacagagtgagactccatctcaaaaaaaaaaaaaaaaaaaaaaaaaaactgga

SEQ ID NO: 18910 - DNA, 201 bp, Homo sapiens
cacggtgaaaccccgtctctactaaaaatacaaaaaattagccaagcgtcgtggcaggcgcctgtagtcccagctactcgggaggctgaggcaggagaatrgcgtgaacctggaaggcggagcttgcagtgagccgagatcacgccactgcactccagcctgggcgacagagtgagactccatctcaaaaaaaaaaaaaaa

SEQ ID NO: 18911 - DNA, 201 bp, Homo sapiens
cctgccttggcctcccaaagtgctgggattacaggcgtgagtcactgcacctggccgaaaatgtgtgtttttaaaactaagtgaagataatacagttaggratcatgaagtctaatcccattttttttttttttgagacagactctcaatgtcacccaggctgcagtgcagtggtgccatcttggctcacggcaacctctg

SEQ ID NO: 18912 - DNA, 201 bp, Homo sapiens
gacagtattgttctgaatgatgaaggcaaccacttttcatttggattcagaaacacttggaagcagtgataatatgtcttttcttttcttcttcttcttcytttttttttttgagatggagtctcactctgttgcccaggctggagtgcaatggtgcgatctcggctcgctgcaacctccgcctcccaggttcaagcaatt

SEQ ID NO: 18913 - DNA, 201 bp, Homo sapiens
gtgaacccgggaggccgaggtcatgccactgcaccccagcctgggcaacagagcgagactccgcctcaaaaaaaatagtattccgttgtatggctctcccrgtgtgtttacccattcactgttaaggagattttgggtgtttgcagtttctagtttaactagaactgctataaacatctgtgtgtgggtttttgtgtgaat

SEQ ID NO: 18914 - DNA, 201 bp, Homo sapiens
cgtgaacccgggaggccgaggtcatgccactgcaccccagcctgggcaacagagcgagactccgcctcaaaaaaaatagtattccgttgtatggctctccmagtgtgtttacccattcactgttaaggagattttgggtgtttgcagtttctagtttaactagaactgctataaacatctgtgtgtgggtttttgtgtgaa

SEQ ID NO: 18915 - DNA, 201 bp, Homo sapiens
ggactcttgctcactgctggggagtgtgaaatggtgcagccgctgtggaaaatggtgcagcagttcctccagaaattagacagacaattaccatatgatcmtgcaggtccacctctgggcacatccccgagagaatcaaaagcagggccttgaacagatgtttgcacgctgtgctcatggcagcattactcacactagccc

SEQ ID NO: 18916 - DNA, 201 bp, Homo sapiens
aacattcgggtttacaaagcttctacgtacatcacaacaatgctgtactccaattctaggtttctggaggagagactcacattgggccagtttgaatcacwaatctatgaatctatccttgaccccatcaaataagtgtgcgtgtgtgtgtgtcgtgggagacggggtaactcaatacaaatgtagcagctaagagtcccc

SEQ ID NO: 18917 - DNA, 201 bp, Homo sapiens
ggtgtcactagtggccaagtctaaatagagcagagtcccagtgacatcccaaaagaggcagacggtggtcaaatgcactccgactaactcaccaagttccraagtttcaaagttccaaaattccaaagtttgtcacttctctaaaagtcactttcagtgcaccagtgaaatattggaggtagcaggcactgcagcaggaag

SEQ ID NO: 18918 - DNA, 201 bp, Homo sapiens
gtcaagttttacaggaaggaagaggaaagagaaaggaaggaggggaggcttgtgagcctttcagccactgcaaggcttggggtcagtaccctcaccacccrggtgtatctcctgtcagggagagcctcagtgccccagacctacatggtgtgggatgaacccttcccacctttgcaagtcaccagtcaaggtgaaatgttt

SEQ ID NO: 18919 - DNA, 201 bp, Homo sapiens
caaaggtctaagagcttttatctgagaactctaatcatgagatagcatcacaaactcactgacctataaaagctggcttcaagttgtttttctgacaaaaytggaagctgtccacgtggctaactttgtttgccctgataggtaatccaaggaaagctggcagccaaaatttggggtaaagcagtctctatggcagtttgg

SEQ ID NO: 18920 - DNA, 201 bp, Homo sapiens
ctggggatttccttcggccaagaggcaggtccattcagtctgttgagaggcttaggattttattttagtttatattctcccttttttgtcaaggtattccrggggcagtattgatggccaagcttttattttgtcccatgtggatgctggggtggtatggttaccttcccagggtccatgatgttcctcgatgggacccct

SEQ ID NO: 18921 - DNA, 201 bp, Homo sapiens
gaataggttgggctggttaactgcagcaggagcatgtccttaaggcacagatcactcgtgctattgtttgtggcttaagaatgcctttaagcggttttccrccctgggcgggccaggtgttccttgccctcattccggtaaacccaaaaccttccagcgtgggcattaagaccatcatgaacatgtcacagtgctgcagag

SEQ ID NO: 18922 - DNA, 201 bp, Homo sapiens
acctcaggctgacatcatctcaacagtggccgagttgttaattagctgcatggaagtaatctctggaattttgcagctaggtctccatgcttggtctgtcygtctcaagattacctcctggaacttctaagaaggcacataatagatactagcatgcagttagctaaatgtgcagggagtatatatggtgagaaagggagc

SEQ ID NO: 18923 - DNA, 201 bp, Homo sapiens
gtggcataatctcggctcactgcaagctccgcctactgggttcacaccattctcctgcctcagcctcctgagtagctgggactacaggcgcccggcaccaygcccggctaattttgtgtatttttagtagagacggggtttcaccgtgttagccaggatggtctccatctcctgacctcgttatctgcccgccttggcctc

SEQ ID NO: 18924 - DNA, 201 bp, Homo sapiens
gtaaggaaaggctgcacatagctgggtcaaccatttcgtaaggtgataatggagaatgaacttttgggaagttacacaggttgcactgatggggagaaagragaagatgatactgagtcatgcacagcagcagggcctcggccagaacgacaccctgaatctaaggtgatggggttgtgtgttgtgagtcaggctgggggc

SEQ ID NO: 18925 - DNA, 201 bp, Homo sapiens
ggaggctgaggcaggagaatggcgtgaacccaggaggcagagcttgtagtgagccaagatcgcgccactgcactctagcctgggtgacagagcgagactcygtctcaaaaaaaaaaaaaaaaaattagccaagagtggtggcatgtgactgtggtcccagctactcggctgagacatgagaattgcttgaacctggaggtg

SEQ ID NO: 18926 - DNA, 201 bp, Homo sapiens
tatcttcacctccacttggtgtgcaggaagccaggaggtgctagtcctgggaggggagcgcagaggtttcttccacagggttctctttggtgctttatccsagcacagatgaggccaggttcacattacactgctgatggtcacagcccagtgtccagtttaagtctgtaataaaaagaatccggtggccaggcacggtgg

SEQ ID NO: 18927 - DNA, 201 bp, Homo sapiens
tgggcatagtggcgggcgcctataatccctgctactcaggaggctgagacaggagaattgcttgaacccgggggcagaggttgcagtgagctgagattgcrccattgcactccagcctgggcaacaagagtgaaactgtgtctcaaaaaaaaaaaaaaaaaaaaagggggctgggaagggtggctcatgcctgtaatccca

SEQ ID NO: 18928 - DNA, 201 bp, Homo sapiens
ataaagatatgctgtggttctcaatctctttttgatgtggtgtactctgccacgcacagccctgacacagagcaattgtgctaatgggaagatgtgctgaycagttggtgctttcctctctgatttaggggaaatacgtggtctgctttgacccactggatggatcttccaatattgactgcctggcctccatcggaacca

SEQ ID NO: 18929 - DNA, 201 bp, Homo sapiens
gggccttgaacacttacttcccagcatatgctggaagctcaacatgtatctgctgaatgcatgcatgcatgaatgaatgggctaaattggatttttttttwaaaaattggattattatagagatgttggggaatttccaagtttacaaattatctaacttttctactctggctgagcaaggaaaaaaaacagaaacaaagc

SEQ ID NO: 18930 - DNA, 201 bp, Homo sapiens
tgtgcacctgtagtcccagctacttgggagtctgaggtgggaggattgcttgagcccaggatctctaggctgcagcgagctctgaccacaccactgcactycatcctgggcaacagagtgagactctgtcaaaacaaaacaaaaacaagaaaacaaacaattttgctttctaggtctctgtgtgtttcttcattccttaat

SEQ ID NO: 18931 - DNA, 201 bp, Homo sapiens
aggacgccatcatcaccgccaaggagaagcgggtgcgtcatggggctgcggtgcccgctcgccagtagatgatgatactgagccggaaataagctgccttrcttttctttaattcccgggattctcctctatttcttaacatttgttttctggaaacaaaggattacatacttctctacttggaaatcttgtgctgtctag

SEQ ID NO: 18932 - DNA, 201 bp, Homo sapiens
taccagggaatgctgttgagcctcagagaggagggaactctgacccatgccacagcatgcggggatggtgaggacattgtgctgagtgaaataagccagtygcagcaggacagatactgtatggtctatgagggacccagtgtagccaaattcatagagacagcagaatggcgggtgccagggactaggtgttgggagggg

SEQ ID NO: 18933 - DNA, 201 bp, Homo sapiens
atccaattccctggtgatcaacatgctccaatcctcctatagtacctgcgtcctggtctcagaagagaataaggacgccatcatcaccgccaaggagaagmgggtgcgtcatggggctgcggtgcccgctcgccagtagatgatgatactgagccggaaataagctgccttacttttctttaattcccgggattctcctct

SEQ ID NO: 18934 - DNA, 201 bp, Homo sapiens
caaatatggttataattccgtctgtcaacccacataattggcggctgcatgcttgtgggcaaagagtacatagattagttaagaatttgtcagctgggtgyggtggctcatgcctgtaatcccagcactttgggaggccgaggccagcggatcacggggtcaggagatcgagaccatcctggctaacacggtgaaacccca

SEQ ID NO: 18935 - DNA, 201 bp, Homo sapiens
ctttctatatgtttggcttccatccctttattttgagcctataggtggcactgcatgtgggatgggtgacttcctttttctttgtttgtttagcggctctyttaagattgctgcaggatattgtctcatactttaagcagtcctgcatttgttaagtccagtcacaaggtaaggtttgaggagctcataataaatgaaatg

SEQ ID NO: 18936 - DNA, 201 bp, Homo sapiens
tgggggtttgctgtatagattgtttgtctcccaggtactaaacctggtatccaatacttatcttttctgctcctccccctcctccctccctccaccctcamgtaggccccagtgtctgttgtttccctctttgtgtccatgtgttctcatcatttagctcctacttataagtgagaacatgtggcatttggtttcctattt

SEQ ID NO: 18937 - DNA, 201 bp, Homo sapiens
aggtttgttatataagtaaactcctgtcatgggggtttgctgtatagattgtttgtctcccaggtactaaacctggtatccaatacttatcttttctgctsctccccctcctccctccctccaccctcacgtaggccccagtgtctgttgtttccctctttgtgtccatgtgttctcatcatttagctcctacttataagt

SEQ ID NO: 18938 - DNA, 201 bp, Homo sapiens
cttttgtcttctcaggtatggaatcgcaggaagcgttaacgtgacgggagatgaggtgaagaaactggatgtgctatccaattccctggtgatcaacatgstccaatcctcctatagtacctgcgtcctggtctcagaagagaataaggacgccatcatcaccgccaaggagaagcgggtgcgtcatggggctgcggtgcc

SEQ ID NO: 18939 - DNA, 201 bp, Homo sapiens
gtaattttattttctacacttttattttagattcaggggtagttgtgcaggtttgttatataagtaaactcctgtcatgggggtttgctgtatagattgtytgtctcccaggtactaaacctggtatccaatacttatcttttctgctcctccccctcctccctccctccaccctcacgtaggccccagtgtctgttgttt

SEQ ID NO: 18940 - DNA, 201 bp, Homo sapiens
ggcggatgagggggcatttgcaaagcgcaggacagaggctgtttctcagctctgcccaccgcaggcctgggcctgctgttcattctccagtggcaagcgcrttcagattccatatcgaaccaaggcctgtgtttgtggtcccctgaaactcagatgcagtcagcctagttttgttgctgctgttgcttgcttgcttttgtc

SEQ ID NO: 18941 - DNA, 201 bp, Homo sapiens
tgatccacccgcctcggcctcccaaagtgctgggattacatgcgtaagccactgcgcccagcctgtaccacaaattaatggttaaaatgcatccctcatabgacaatgtaacttcttcctctcactgttgatggcctatcttcctgaaaacattaatctgggggtgagaacttgggagatacacacagttgggttcaccat

SEQ ID NO: 18942 - DNA, 201 bp, Homo sapiens
ttagcaaagacggggtttcaccatgttagccaggatggtctcaatctcctgacctcgtgatccacccgcctcggcctcccaaagtgctgggattacatgcrtaagccactgcgcccagcctgtaccacaaattaatggttaaaatgcatccctcatacgacaatgtaacttcttcctctcactgttgatggcctatcttcc

SEQ ID NO: 18943 - DNA, 201 bp, Homo sapiens
gctgaggggtggggttaggcggatgagggggcatttgcaaagcgcaggacagaggctgtttctcagctctgcccaccgcaggcctgggcctgctgttcatyctccagtggcaagcgcattcagattccatatcgaaccaaggcctgtgtttgtggtcccctgaaactcagatgcagtcagcctagttttgttgctgctgtt

SEQ ID NO: 18944 - DNA, 201 bp, Homo sapiens
agtgggaaatcacagccttcagagttgagagccccaaacagatttacccacctatttattaacagcaagccagtcattagcattgtttctatagatattcsattaactaaaagtatcccttatgggaaaggaagggatgggccaaattaaaggaataggttgggctggttaactgcagcaggagcatgtccttaaggcaca

SEQ ID NO: 18945 - DNA, 201 bp, Homo sapiens
ctaacttattccaaaccctggctaaaggaattctggggttgccattatgttactatgtgacctacgtcccagataaggaacctgcgaatctgccacctccrccctcgggagagccaggccctgcagtcactatatgtgaagaatcctttggagcctggaataagagggttttatgcatcattttttaatcaactggatttc

SEQ ID NO: 18946 - DNA, 201 bp, Homo sapiens
tcatggccgtgggggatcattcctttagagactgttagttagctttagtgtcagtcagaacactgcaagatactgtcctacgggctagagagcccctttcmcccatcatctcaggtgaagctattgccgggaactcacatctcctggtgagtttccattctttctaggaggaggggtgctgcccagtgcctggagagaggg

SEQ ID NO: 18947 - DNA, 201 bp, Homo sapiens
cagatggtttactggaaaaacataacaaatattcacagattattcagtctcttccagaaaagataataggaaggaacacttcccaattcattttatgaaaycagtgttatcctgatacaaaaaccagacaaagattgttcaaaaaaataccacagaccaatattccttatcaataaatgcaaaaactcttaacaaaatatt

SEQ ID NO: 18948 - DNA, 201 bp, Homo sapiens
agaatgctccatgaatttcacttttaaatgctggatggcttgcccatcaattgtgaaatgctttgccaagtatactgaggtcttgtgaaaactcagataayatccaccaaagaacacgtcaaaacctcttgttcacttagaccaaaaggttaagtatttaagtttttgatttacagctgtttattgagcatctactgtgtc

SEQ ID NO: 18949 - DNA, 201 bp, Homo sapiens
ccctgcagtcactatatgtgaagaatcctttggagcctggaataagagggttttatgcatcattttttaatcaactggatttctcacctcccacctgtgcytaaatggtggcttcttggtatcttgaaagggggtgctcagcaggagaaagcagctccatgtttctgggcagcccgtcctatttacagactgctgcggctc

SEQ ID NO: 18950 - DNA, 201 bp, Homo sapiens
actctttacccacctctatctatcccaaaactatcttcttcttcctacccctccagccgcgctgcaatgtccaccgccaccaccaaccgcagcgaggcgasccgcgccacggtgccgcggctcaagcctccagcatacgacctgtgactccttttcctggtcttctaagccgggcactgagcagctcaatagaaacacacg

SEQ ID NO: 18951 - DNA, 201 bp, Homo sapiens
ataaactttctacccaccgtctttctgcaaaaccttccttccctccctctctgcaccctgtttttccacctccatctacccaaaaacttttttccccaccwtcttttccccatcgtctttttgcaacgccttctcctcctcgctatccttttttccctttggcactaaccacactctttacccacctctatctatcccaaa

SEQ ID NO: 18952 - DNA, 201 bp, Homo sapiens
gatgaggccaggttcacattacactgctgatggtcacagcccagtgtccagtttaagtctgtaataaaaagaatccggtggccaggcacggtggctcctgyctgtaatcctggcactttgggaggccaaggtgggtggatcatgaggtcaagagatcaagaccatcctggccaacatgttgaaaccctgtctctactaaaa

SEQ ID NO: 18953 - DNA, 201 bp, Homo sapiens
tccccccatctgctccatctcctcgtgctgagactgggtttgtgttttagtgagactgagtcctgggtcatctcattggaaggctaagaaaatatgacaacgactccaaggtgtaagggaggcaaggctgagaggtatcctgccaggcataatcgccttcttctgcacgtgtgacttggagactccagagacacagaacga

SEQ ID NO: 18954 - DNA, 201 bp, Homo sapiens
gtccccccatctgctccatctcctcgtgctgagactgggtttgtgttttagtgagactgagtcctgggtcatctcattggaaggctaagaaaatatgacaacgactccaaggtgtaagggaggcaaggctgagaggtatcctgccaggcataatcgccttcttctgcacgtgtgacttggagactccagagacacagaacg

SEQ ID NO: 18955 - DNA, 201 bp, Homo sapiens
tttaccttctaaaggtagtacttatctttacatttgagtttttccaggataaattctttataaagaaggcagagatcacatttacaaaattcagagctcasgccagatcctctctgaagtcatttgtttaagctccaacctatagactcactcagttgcatttgcttttagaataaataattatatgagaggccttcaaaa

SEQ ID NO: 18956 - DNA, 201 bp, Homo sapiens
agtccccccatctgctccatctcctcgtgctgagactgggtttgtgttttagtgagactgagtcctgggtcatctcattggaaggctaagaaaatatgacaacgactccaaggtgtaagggaggcaaggctgagaggtatcctgccaggcataatcgccttcttctgcacgtgtgacttggagactccagagacacagaac

SEQ ID NO: 18957 - DNA, 201 bp, Homo sapiens
cagttgtcactcatgttaggcaggaaaggattgtttagttgtttttgttattgagtctccttggcactgacttgtttctgacagggacagtgtcacctctygtagcaacacctctgctatgtggagtcattctgtggccttgcctctttatattccgggaatacctctgatgttccttgggaaccttctggcctagctgcc

SEQ ID NO: 18958 - DNA, 201 bp, Homo sapiens
acattagcttcaaaatgaaacctgaaaactaatcaaccaggcctccgtcttcaccctgcagtcatttactggaccagaacttggaagatccagccactctrtttctgtagtgatgtcaaaggaatcatcattggtttccccatgtgaaaggcaaagcttatttgttaatggcaacatgacgtgttaggatcaaggaaaggt

SEQ ID NO: 18959 - DNA, 201 bp, Homo sapiens
accacatccagctaatttttgtatttttttgtaaagacagggtctcactgtgttgcccagactggtcttgaactcctgggctcaagcgacctacacgcctyggcctcccacagtgctgggattacaggcacgaggccctggccctgactggcatagaattctcgtagtagcactctcttatactgcttgggatggcagtga

SEQ ID NO: 18960 - DNA, 201 bp, Homo sapiens
cgctgggctgctccaaagcaacagacacccacagcaagttaaaggtcatgagtcaaagaccatcactcgtgcacctgtaataacccgaagttagaattagsaggcactgcagaggaaccatggggtgttgcataaggagggagttgagatgggcttataggacttggggttttgcttggtgattctaaagaggatttgagg

SEQ ID NO: 18961 - DNA, 201 bp, Homo sapiens
cgcgatctcggctcactgcaagctctgcctcccgggttcacaccattctcctgcctcagccccccgagtagctgggactacaggtgcccaccaccacgccyggccaattttttgtatatttagcaaagacggggtttcaccatgttagccaggatggtctcaatctcctgacctcgtgatccacccgcctcggcctcccaa

SEQ ID NO: 18962 - DNA, 201 bp, Homo sapiens
tctgtaacactcaccgcgaagatctgcagcttcacttctgagcccagtgagaccacgagcccactgggaggaacgaacaactccagatgcgccaccttaaragctgtaacactcaccgcgagggtccgcggcttcattcttgaagtcagtgagaccaagaacctaccaattccggacacaccaccaccacccaggcagggg

SEQ ID NO: 18963 - DNA, 201 bp, Homo sapiens
tcacctccacttggtgtgcaggaagccaggaggtgctagtcctgggaggggagcgcagaggtttcttccacagggttctctttggtgctttatcccagcayagatgaggccaggttcacattacactgctgatggtcacagcccagtgtccagtttaagtctgtaataaaaagaatccggtggccaggcacggtggctcct

SEQ ID NO: 18964 - DNA, 201 bp, Homo sapiens
atcagcgctgggctgctccaaagcaacagacacccacagcaagttaaaggtcatgagtcaaagaccatcactcgtgcacctgtaataacccgaagttagawttaggaggcactgcagaggaaccatggggtgttgcataaggagggagttgagatgggcttataggacttggggttttgcttggtgattctaaagaggatt

SEQ ID NO: 18965 - DNA, 201 bp, Homo sapiens
attaaaatatgtattgtgttatcatgacttgtacttgcacagagagagtctcactggaacaaagaagtagaggggtgacgtgaaatatctctttatgcctyttgcagacatgagtgttttattgtaataagctttgcaaatatgttaggagctggaaattatgtacgacataggaagcttggtagagccccttcctgcatc

SEQ ID NO: 18966 - DNA, 201 bp, Homo sapiens
cttacctaaattatctgaatgtccgcaagctggaatgatccaagcctctgtgtgctgacttggacatcttcccataatatttgctttctggaactaaaaamatatataaataacatatatatatatttgggatcttaaacctgcatattaagatctactggtagatgttagttttatctgaaagtttccacataaattgtg

SEQ ID NO: 18967 - DNA, 201 bp, Homo sapiens
tgacagtattgttctgaatgatgaaggcaaccacttttcatttggattcagaaacacttggaagcagtgataatatgtcttttcttttcttcttcttcttcttttttttttttgagatggagtctcactctgttgcccaggctggagtgcaatggtgcgatctcggctcgctgcaacctccgcctcccaggttcaagcaat

SEQ ID NO: 18968 - DNA, 201 bp, Homo sapiens
taatacttgttttggggaccaggggtcctgagagcctagtttggggagccaaaaccatcatcagaaaccatgaagggcctctgtcccagtgagggcactcrgggggaggagtgtcctgcagagccagttgcatcaactcaggccctctccttaaggagctcattttccaaaaatgcactcaatctctttggcttatgagaa

SEQ ID NO: 18969 - DNA, 201 bp, Homo sapiens
  misc_feature (101)..(101): n is a, c, g, or t
acaaggaattttcaaatagacatcaacagcacaagcaacaaaagcaaagatgtaattacgttaaacttaaagccttttccaaagcagaggaagcaatcagnataatgaagacagaacccagagaatggaagaaagtatttgcaaactatgcatcaggcaagaggttaatacacaaaacatctaaagaattcaaactactca

SEQ ID NO: 18970 - DNA, 201 bp, Homo sapiens
ctcgtgagctgagatgggagaatcacttgaacctggaagatggaggttgcagtgagccgagatcgtgccacggcactccagtctgggcaacacagcgagaytctgtctcaaaaaacaaaacaaacaaaaagcataataaaaataattacaggagtggctaataagcacctgctcaacatcactaatcattaggaagatgca

SEQ ID NO: 18971 - DNA, 201 bp, Homo sapiens
aagttgaaaagacaatgctatcttgtgtttaccaggctgaattaaaatgaactctcttattattagtggtaaaagtataaattgatgcactctttctggargacaatttttcaatatgtatcaaaagatttttacccaattatttaattattgggaatttatcttgggaaaatgatcagagaattgtgtatttatgcagta

SEQ ID NO: 18972 - DNA, 201 bp, Homo sapiens
gaatcattttgcaccggttggatgtaccaagggccacagaaggaccagaaggagcaccaacatttaaggaatcagaggaagaggtgctgccgggaagagargcaagtgagaaggagcatccacagagtcagagagaaaggcagaatcagggcttcctgctgctgggcgagttgtgcagccgctccagctgcagtaggttgt

SEQ ID NO: 18973 - DNA, 201 bp, Homo sapiens
gggccagtttgaatcactaatctatgaatctatccttgaccccatcaaataagtgtgcgtgtgtgtgtgtcgtgggagacggggtaactcaatacaaatgwagcagctaagagtccccattttggataagggggtgaggaagaatcattttgcaccggttggatgtaccaagggccacagaaggaccagaaggagcaccaa

SEQ ID NO: 18974 - DNA, 201 bp, Homo sapiens; identical to SEQ ID NO: 2091

SEQ ID NO: 18975 - DNA, 201 bp, Homo sapiens
cagtatataaagcatgctgaggcagcggcgcgtcatttctggcacttatgtgtgggtgtggggagctactacgtacccggcttaaagaactggaaggctcygtcacttttcgccccctggagcctggagcttggagcctggagcctggggcactccctccctgttggtggtggtggtgacggagcggtaggagggaggcta

SEQ ID NO: 18976 - DNA, 201 bp, Homo sapiens
cccacttgctatcttcttttgctcctctacccaaaaacttctctccccaccatcttttcacaaaaccttctctccctactgctcgcccatttccccccccycaccactctttcctcttcccaattgccaccttcttttcccccttcatccacccataaactttctacccaccgtctttctgcaaaaccttccttccctccc

SEQ ID NO: 18977 - DNA, 201 bp, Homo sapiens
gaggccagcggatcacggggtcaggagatcgagaccatcctggctaacacggtgaaaccccatctctactaaaaatacaaaaattagccgggcgtggtggygggcgcctgtagtcccagctactcgggaggctgaggcaggagaatggcgtgaacccgggaggcagagcttgcagtgagccgagatcgcgccattgcactc

SEQ ID NO: 18978 - DNA, 201 bp, Homo sapiens
tctgtcacctagactggagggcagtagcatgatcacagctcactgcagccttgaactccggggctcagttgatcctcccacttcagcttcctgaatagctrggatcacaggtgtgcgctaccacacctggttaatttttaaattttttgtagagatggggtctcactatctcaaatggggtctcaaatgcctggactcaag

SEQ ID NO: 18979 - DNA, 201 bp, Homo sapiens
cacaggttgcactgatggggagaaaggagaagatgatactgagtcatgcacagcagcagggcctcggccagaacgacaccctgaatctaaggtgatggggktgtgtgttgtgagtcaggctgggggcgtcatgacatcatcacagaaatagacctaaaaagtccattcaatccaaccccattcatttcaattcactgcgta

SEQ ID NO: 18980 - DNA, 201 bp, Homo sapiens
atgcaatctgtgttcaactacaagacattcttcatttaaatagaaaaagaatcttaaaattaacatggaagttcaaaatacctcagatagacaaaagaatstggaataaaaagaaaagctggaggcatcacactacctgatttcaaaatatactacaaatctatggtaagcatggtactatcaaaacagtatggtactatc

SEQ ID NO: 18981 - DNA, 201 bp, Homo sapiens
gccagtcattagcattgtttctatagatattcgattaactaaaagtatcccttatgggaaaggaagggatgggccaaattaaaggaataggttgggctggytaactgcagcaggagcatgtccttaaggcacagatcactcgtgctattgtttgtggcttaagaatgcctttaagcggttttccgccctgggcgggccagg

SEQ ID NO: 18982 - DNA, 201 bp, Homo sapiens
tgatgagtggtaccagaggggaagtacaggatgctatgggagtgcaaacgatgggatttcacttagtctaagggtcaaaagacaagaccattgaaacaccrgcaaactagttagacaagtcaaagcttaagatgtggagttcctccacacaatcccagccactgtggctgtccccagagagacaagccggcatggtcaagg

SEQ ID NO: 18983 - DNA, 201 bp, Homo sapiens
aaaaaatataagaaaatgtaaacaaaattcatgtgtaagatactccaccctcaaaaaccccactgggaacatctctttttttttttttttttttttgaggkggagtcttgctctgtctccaggctgaagtggcacgatcttagctcactgcaacctccgcctccctggttcaagcgattctcctgcctcagcctcccgagt

SEQ ID NO: 18984 - DNA, 201 bp, Homo sapiens
aaaggaaagatttacagcctgaatgagggctatgccaagtattttgatgcggccaccactgaatatgtgcagaaaaagaaattccctgaggtgagtgaagmaagccaggtgggtggcagacagaatgctgtccccatggggtcctgtttgggtggtggcttcaggggctttgctgaaagaggttggtgccactgtttatgg

SEQ ID NO: 18985 - DNA, 201 bp, Homo sapiens
gctctctcatcatctaaaggagtgttttgctggctacgtgttttatttcttctctgtgactctttctttatcttcacctccacttggtgtgcaggaagccrggaggtgctagtcctgggaggggagcgcagaggtttcttccacagggttctctttggtgctttatcccagcacagatgaggccaggttcacattacactg

SEQ ID NO: 18986 - DNA, 201 bp, Homo sapiens
aatcaggattatagtgattttccatcaaaactcttgcaaaattgccattgtttgatgagaagattaagcaggagcattcatgtggtggagaagaactctayggtgaactttcctgggctttttctgctaaaactgtggctttctcagaacactctcaaaataagcacatgtgggccaaggatgtttctccccaatgttgta

SEQ ID NO: 18987 - DNA, 201 bp, Homo sapiens
cccaccaccacgcctggccaattttttgtatatttagcaaagacggggtttcaccatgttagccaggatggtctcaatctcctgacctcgtgatccacccrcctcggcctcccaaagtgctgggattacatgcgtaagccactgcgcccagcctgtaccacaaattaatggttaaaatgcatccctcatacgacaatgtaa

SEQ ID NO: 18988 - DNA, 201 bp, Homo sapiens
acattcttcatttaaatagaaaaagaatcttaaaattaacatggaagttcaaaatacctcagatagacaaaagaatctggaataaaaagaaaagctggagscatcacactacctgatttcaaaatatactacaaatctatggtaagcatggtactatcaaaacagtatggtactatcaataaaaggggcaggggagagaca

SEQ ID NO: 18989 - DNA, 201 bp, Homo sapiens
agactttgtttatggccagttttggggccagtttatggccaggttttggggggcctgttcccaacagtgccctttaaaggttttttaagattaggaaacawaaagaagtcaaaaggagctaaatcaggattatagtgattttccatcaaaactcttgcaaaattgccattgtttgatgagaagattaagcaggagcattca

SEQ ID NO: 18990 - DNA, 201 bp, Homo sapiens
ccccgagtagctgggactacaggtgcccaccaccacgcctggccaattttttgtatatttagcaaagacggggtttcaccatgttagccaggatggtctcratctcctgacctcgtgatccacccgcctcggcctcccaaagtgctgggattacatgcgtaagccactgcgcccagcctgtaccacaaattaatggttaaa

SEQ ID NO: 18991 - DNA, 201 bp, Homo sapiens
tgaacctagtgtcttatcctgtagtgattacctccctcaaacacatgtaaatttccaacttaatatcttagaagagtatttgtgtcttattttggataaayttgagttagaaatctcatggcaattaaattctgaaatttctgattgagcctatcttaagagtctataatttggatgaccaatcacagtttgaatggaaaa

SEQ ID NO: 18992 - DNA, 201 bp, Homo sapiens
acctgactcataaaaaatagaagttaaaacaaaagagatgtcattttgtccacctgtcaaattgacaaagttgaaaagacaatgctatcttgtgtttaccrggctgaattaaaatgaactctcttattattagtggtaaaagtataaattgatgcactctttctggaagacaatttttcaatatgtatcaaaagattttta

SEQ ID NO: 18993 - DNA, 201 bp, Homo sapiens; identical to SEQ ID NO: 2089

SEQ ID NO: 18994 - DNA, 201 bp, Homo sapiens
aaagagctattaaaataaacaagaagttgaatatcctgatagaaaaataagcaagacatgaaagagacaacttacaaaataaaaatggtcaaaataaacayataaaaggttttacctgactcataaaaaatagaagttaaaacaaaagagatgtcattttgtccacctgtcaaattgacaaagttgaaaagacaatgctat

SEQ ID NO: 18995 - DNA, 201 bp, Homo sapiens
acatataaaggcttccacccaggcctgcagcatcagtttgcttcttgttgaaccaagaaatagatgcctagatctcatatttccaagtcaagaggcaggtytctcataagcacaaggatcacaagatgggtagatacatggctcagtcacctggccagaggggcccccaaggcttctggatgagtgccatctgatgcatct

SEQ ID NO: 18996 - DNA, 201 bp, Homo sapiens
ttgcggggacttggattttgcctctgggtaagactgggggcactttaggaggacccctcctgctggtgtgttgagaaccccctgaaggggcgagggtggargtggggagacctttgcatatgaatgctctaaaacccaaagcctctagatagaattattttgagggtctccctccatcgctcaggctgcagtgcagtggcg

SEQ ID NO: 18997 - DNA, 201 bp, Homo sapiens
aaaacatatggaatgtcatgaataattttaattttaaaactgcactgcaaaaacaggcaccataaataagaaggcaatgacaatcgaggaaaatatttgtracatatacaagacattaatatcctttatatataaagagctattaaaataaacaagaagttgaatatcctgatagaaaaataagcaagacatgaaagagac

SEQ ID NO: 18998 - DNA, 201 bp, Homo sapiens
aaatgcctggactcaagcgatccttttgcctcggcctcccaaaatcctgggattacaggccggagccaacactttctctgtgtcggcactactgagaatamagatagtacagtgaccagctaggatggacagcagcctagagaggaagccaggcattaaagaggcctcagtgtgatgagtggtaccagaggggaagtacag

SEQ ID NO: 18999 - DNA, 201 bp, Homo sapiens
gactggaagagactactaggcctggcttcactaggcttaaagtccactaggttgctggaaatgttatataaatggatctggatgttatgtaaaatattctrtaaatacacataagtgtatattatatatttgtaaaaatttatcaagatgtaccattaagatttgtatgctctgctatatgctttatacctcaacaaaaag

SEQ ID NO: 19000 - DNA, 201 bp, Homo sapiens
ttttcttttcttcttcttcttcttttttttttttgagatggagtctcactctgttgcccaggctggagtgcaatggtgcgatctcggctcgctgcaacctycgcctcccaggttcaagcaattctcctgcctcagcctcctaaggagctaggactacaggtgcacaccaccatgcccagctagttttttgtatttttagta

SEQ ID NO: 19001 - DNA, 201 bp, Homo sapiens
agatctgcgtttgctgcgcataaccaccacccatactgaaagttctgttggatcctaatctccgcatttctgctgtcatggtccctgtgccgacgtctctstgtgtgtgtgtgtctgtgtgtgcatgtgcacactcctatcctgtgtgtgtctgcatctgtatagctgtgtagatttaattgcagagaaagtacaggtcat

SEQ ID NO: 19002 - DNA, 201 bp, Homo sapiens
cacactatggccaagcaatttcactcctgggacccacacagaagaaaggaattctgtgtctgcccaaagatggagaaattagtcatagtagccccaaaccrgaaaaatccaaatgcatatcaacatgagaatggagaaataaattgtgatatagtcatacaacagaaaactacatagcaatgaaaaagaacaaactgctat

SEQ ID NO: 19003 - DNA, 201 bp, Homo sapiens
ggctcaagcctccagcatacgacctgtgactccttttcctggtcttctaagccgggcactgagcagctcaatagaaacacacggaaacctaaaaaaacaamaacaaaaaaaacaacaacaaaaaaaacgtaactctgcttcagcattatttatatcctgaggttatgcgcatgccggttcctagactgcatgttctgattg

SEQ ID NO: 19004 - DNA, 201 bp, Homo sapiens
tcttagaaccactctggtcacttactcagttacattggggagaacataaagatcagttattactaattattcaaatgatcgtaaatgagtcagaaaatacycacatgggatcacatactcatgtcccttaagcacatgtcactccatagatagatctgcgtttgctgcgcataaccaccacccatactgaaagttctgttg

SEQ ID NO: 19005 - DNA, 201 bp, Homo sapiens
cttctaagaaggcacataatagatactagcatgcagttagctaaatgtgcagggagtatatatggtgagaaagggagctattttatagctaagagaaaagrcttctgcagtttgcttcaaggttatatcttgaaacccaagagaagggaaaaatgttttaaaatatattatgaagttaagctgcccagttacgttaggaag

SEQ ID NO: 19006 - DNA, 201 bp, Homo sapiens
ttccttctcccacttgctatcttcttttgctcctctacccaaaaacttctctccccaccatcttttcacaaaaccttctctccctactgctcgcccatttyccccccctcaccactctttcctcttcccaattgccaccttcttttcccccttcatccacccataaactttctacccaccgtctttctgcaaaaccttcct

SEQ ID NO: 19007 - DNA, 201 bp, Homo sapiens
tccactccatgggctcctgtgcggcccgagcctccccgacgagcgccaccccccgctccacagcgctcagtcccatcgaccacccaagggctgaggaatgygagcgcacggcgcaggactggcaggcagctccacctgcagccccggtgcgggatccactaggtgaagccagctgggctcctgagtctggtggggacgtgg

SEQ ID NO: 19008 - DNA, 201 bp, Homo sapiens
aaagcaaagatgtaattacgttaaacttaaagccttttccaaagcagaggaagcaatcagtataatgaagacagaacccagagaatggaagaaagtatttrcaaactatgcatcaggcaagaggttaatacacaaaacatctaaagaattcaaactactcaaaagtgaaaatacaaataatcttatttttaaaaatctacc

SEQ ID NO: 19009 - DNA, 201 bp, Homo sapiens
ctttctcagaacactctcaaaataagcacatgtgggccaaggatgtttctccccaatgttgtaaaaatgaatgggtgtaattagtcaagggcaaattgtaycctacaccttcagaggcccttgctctcctcccccaagttacgagcatctatagttatccctccctcctgccctcgctccctccctcactctcacctatct

SEQ ID NO: 19010 - DNA, 201 bp, Homo sapiens
aacaaaagcaaagatgtaattacgttaaacttaaagccttttccaaagcagaggaagcaatcagtataatgaagacagaacccagagaatggaagaaagtrtttgcaaactatgcatcaggcaagaggttaatacacaaaacatctaaagaattcaaactactcaaaagtgaaaatacaaataatcttatttttaaaaatc

SEQ ID NO: 19011 - DNA, 201 bp, Homo sapiens
aagcagacacaagtaaatggaaagatatcccatgtccatgcactagaagaatgttaaaatatctatatcacccaatgcgatctacagaatcaatgcaatcygtgttcaactacaagacattcttcatttaaatagaaaaagaatcttaaaattaacatggaagttcaaaatacctcagatagacaaaagaatctggaataa

SEQ ID NO: 19012 - DNA, 201 bp, Homo sapiens
tccccagagagacaagccggcatggtcaaggtgaccttactgtcccatccaagcttgactctttaccagccttgaggtctcacatataaaggcttccaccmaggcctgcagcatcagtttgcttcttgttgaaccaagaaatagatgcctagatctcatatttccaagtcaagaggcaggtctctcataagcacaaggatc

SEQ ID NO: 19013 - DNA, 201 bp, Homo sapiens
tgcaggaaacagtggccttgcttggacactttcttcgtttttgagacaggctcttgctctgtcacctagactggagggcagtagcatgatcacagctcacygcagccttgaactccggggctcagttgatcctcccacttcagcttcctgaatagctaggatcacaggtgtgcgctaccacacctggttaatttttaaatt

SEQ ID NO: 19014 - DNA, 201 bp, Homo sapiens
taattagccaggcgtggtggcatgtgcctgtggttccagctactcgggaggctgaggcaggagaatggcgtgaacctgggaggcggagcttgcagtgagcygagatcgcgccactgcactccagcctgggtgacagagtgagattccatctcaaaaaaaaaaaaaaaaaaaaaaaaaaaatacaggtcacatgtcacatgg

SEQ ID NO: 19015 - DNA, 201 bp, Homo sapiens
acggggtttcaccatgttagccaggatggtctcgatctcctgacctcgtgatccgcccgccttggcctcccaaagtgctgggattacaggtatgagtcacmgcgcccggcgaagacatggaaattcttagaaccactctggtcacttactcagttacattggggagaacataaagatcagttattactaattattcaaatg

SEQ ID NO: 19016 - DNA, 201 bp, Homo sapiens
aaatacaggtcacatgtcacatggcctgcaggccaaggtgccatgaagccctgggcattttgatattaaatttcctacaacaggggcatctgaggtcagarcaaaagtaacttggctccaagacaagcgcattaggtactaatgctgagctttttttgattaaagtagttgactcaacaggataattgattacaatctgag

SEQ ID NO: 19017 - DNA, 201 bp, Homo sapiens
tggatgagtgccatctgatgcatctggcctgctgtaggctctaaagctcgggcccactcttgcaaggtgcatggtgcgctcatgctagccagatggaagcrccgcagtacaaactcctcccccagctttaggggcatggctcgggacatttggccacttgcagagtttactcacctgcctctgttcctccacagctccggc

SEQ ID NO: 19018 - DNA, 201 bp, Homo sapiens
gagattccatctcaaaaaaaaaaaaaaaaaaaaaaaaaaaatacaggtcacatgtcacatggcctgcaggccaaggtgccatgaagccctgggcattttgrtattaaatttcctacaacaggggcatctgaggtcagaacaaaagtaacttggctccaagacaagcgcattaggtactaatgctgagctttttttgattaa

SEQ ID NO: 19019 - DNA, 201 bp, Homo sapiens
ctagtactttgggaggccaaggcgggtggatcacgaggtcagaagatcgagaccatcctggctaacacagtgaaaccccgtctctactaaaaatacaaaamataattagccaggcgtggtggcatgtgcctgtggttccagctactcgggaggctgaggcaggagaatggcgtgaacctgggaggcggagcttgcagtgag

SEQ ID NO: 19020 - DNA, 201 bp, Homo sapiens
tgtgtgtctgtgtgtgcatgtgcacactcctatcctgtgtgtgtctgcatctgtatagctgtgtagatttaattgcagagaaagtacaggtcatggctggstgcggtggctcacgcctgtaatcctagtactttgggaggccaaggcgggtggatcacgaggtcagaagatcgagaccatcctggctaacacagtgaaacc

SEQ ID NO: 19021 - DNA, 201 bp, Homo sapiens
catactgaaagttctgttggatcctaatctccgcatttctgctgtcatggtccctgtgccgacgtctctgtgtgtgtgtgtgtctgtgtgtgcatgtgcamactcctatcctgtgtgtgtctgcatctgtatagctgtgtagatttaattgcagagaaagtacaggtcatggctggctgcggtggctcacgcctgtaatcc

SEQ ID NO: 19022 - DNA, 201 bp, Homo sapiens
aaccaccacccatactgaaagttctgttggatcctaatctccgcatttctgctgtcatggtccctgtgccgacgtctctgtgtgtgtgtgtgtctgtgtgwgcatgtgcacactcctatcctgtgtgtgtctgcatctgtatagctgtgtagatttaattgcagagaaagtacaggtcatggctggctgcggtggctcacg

SEQ ID NO: 19023 - DNA, 201 bp, Homo sapiens
tattcaaatgatcgtaaatgagtcagaaaatactcacatgggatcacatactcatgtcccttaagcacatgtcactccatagatagatctgcgtttgctgygcataaccaccacccatactgaaagttctgttggatcctaatctccgcatttctgctgtcatggtccctgtgccgacgtctctgtgtgtgtgtgtgtctg

SEQ ID NO: 19024 - DNA, 201 bp, Homo sapiens
aggtttcagaggctggggctgaccctgtgaggatgagagagacgggcagccatgccaacccgggcgcagagattccacggtggtgcctgacacccacttgyggggacttggattttgcctctgggtaagactgggggcactttaggaggacccctcctgctggtgtgttgagaaccccctgaaggggcgagggtggaagtg

SEQ ID NO: 19025 - DNA, 201 bp, Homo sapiens
tctccctactaaaaaggacatttgagcaaagacccagtgcacaaagcttagtgcctgtttgacatccagcggaggtagcttgtggcagttgtcacagatasaaatgccatggaaggcggccagtagcttatggaggcagcattccctggtgggtcaaactgagcctgtgaggtctgtgggattgcagggctggtgatttga

SEQ ID NO: 19026 - DNA, 201 bp, Homo sapiens
ctgaactaagaacactgataagcctgcagaagtggtgctgaaggaaagctaagcaccatggaggactaagtgaggcaagtagaagacatggacaatggacwttctttttttttttttttttttttttgagatggagtcttgctctgtcgcccaggctggagtgcagtggcaccatctaggctcactgcaagctccgcctcc

SEQ ID NO: 19027 - DNA, 201 bp, Homo sapiens
caaggcaggtgtgtgccttggaggtttcagaggctggggctgaccctgtgaggatgagagagacgggcagccatgccaacccgggcgcagagattccacgktggtgcctgacacccacttgcggggacttggattttgcctctgggtaagactgggggcactttaggaggacccctcctgctggtgtgttgagaaccccct

SEQ ID NO: 19028 - DNA, 201 bp, Homo sapiens
agttttacaggaaggaagaggaaagagaaaggaaggaggggaggcttgtgagcctttcagccactgcaaggcttggggtcagtaccctcaccacccaggtktatctcctgtcagggagagcctcagtgccccagacctacatggtgtgggatgaacccttcccacctttgcaagtcaccagtcaaggtgaaatgtttctag

SEQ ID NO: 19029 - DNA, 201 bp, Homo sapiens
tgaaattaggattgcagcccctgcttttttctgctttctatatgtttggcttccatccctttattttgagcctataggtggcactgcatgtgggatgggtracttcctttttctttgtttgtttagcggctcttttaagattgctgcaggatattgtctcatactttaagcagtcctgcatttgttaagtccagtcacaag

SEQ ID NO: 19030 - DNA, 201 bp, Homo sapiens
cgagggtccgcggcttcattcttgaagtcagtgagaccaagaacctaccaattccggacacaccaccaccacccaggcaggggaccgcaagcccctggctycttttggggagatctttctagcaagggctccgtgaatgcaatttaaaagttatgagagtctccttttccccttctctttcctcttcttatggtgggaaca

SEQ ID NO: 19031 - DNA, 201 bp, Homo sapiens
caatacttatcttttctgctcctccccctcctccctccctccaccctcacgtaggccccagtgtctgttgtttccctctttgtgtccatgtgttctcatcrtttagctcctacttataagtgagaacatgtggcatttggtttcctatttccgtgttagtttacttaagataattaggccttcagctccacccatgttcct

SEQ ID NO: 19032 - DNA, 201 bp, Homo sapiens
acactcaccgcgaagatctgcagcttcacttctgagcccagtgagaccacgagcccactgggaggaacgaacaactccagatgcgccaccttaagagctgyaacactcaccgcgagggtccgcggcttcattcttgaagtcagtgagaccaagaacctaccaattccggacacaccaccaccacccaggcaggggaccgca

SEQ ID NO: 19033 - DNA, 201 bp, Homo sapiens
gtgtggaaactctgtatctaactaatctgatggggacgtggagaacctttgtatgtagctcagggattgtaaacgcaccaatcagcgccctgacaaaacargccactcggctctaccaatcagcaggatgtgggtgggccagataagagaataaaagcaggctgcctaaaccagcatcggcaacccgtttgggtctctttc

SEQ ID NO: 19034 - DNA, 201 bp, Homo sapiens
cactccatgggctcctgtgcggcccgagcctccccgacgagcgccaccccccgctccacagcgctcagtcccatcgaccacccaagggctgaggaatgcgmgcgcacggcgcaggactggcaggcagctccacctgcagccccggtgcgggatccactaggtgaagccagctgggctcctgagtctggtggggacgtggag

SEQ ID NO: 19035 - DNA, 201 bp, Homo sapiens
aggtgtggagggagaggtgcgagcgggaactggggctgcgtgcggcgcttgcgggccagctggagttccgggtgggcgtgggcttggcgggcccgcactcsgagcagccagccagccctgctggcccccggcaatgggggacttagcacccgggccagtggctgcggagggtgtactgagtcccccagcagtgctggccca

SEQ ID NO: 19036 - DNA, 201 bp, Homo sapiens
agcaggagcattcatgtggtggagaagaactctacggtgaactttcctgggctttttctgctaaaactgtggctttctcagaacactctcaaaataagcasatgtgggccaaggatgtttctccccaatgttgtaaaaatgaatgggtgtaattagtcaagggcaaattgtatcctacaccttcagaggcccttgctctcc

SEQ ID NO: 19037 - DNA, 201 bp, Homo sapiens
gccattgcactccagcctgggcaacaagagtgaaactgtgtctcaaaaaaaaaaaaaaaaaaaaagggggctgggaagggtggctcatgcctgtaatcccwgcaatttgggaggccgaggcgggcgaatcacgaggtcaggagatcgagaccatcctggctaacatggtgaaaccctgcctctactaaaaatacaaaaaaa

SEQ ID NO: 19038 - DNA, 201 bp, Homo sapiens
ggcaagaggttaatacacaaaacatctaaagaattcaaactactcaaaagtgaaaatacaaataatcttatttttaaaaatctacccaaaacctttgtccsccaccatttccccaccttcttttcctgaccgcatttggccctctccctctcaccaccctttctcttcctccatctaccccaaactttttcaccgttttct

SEQ ID NO: 19039 - DNA, 201 bp, Homo sapiens
tctgccacaagctgatcccatttttagtgactgctatcaccagaactagacataggggtatttgagagatgccctgcaggtactgaccacagtggctacaygggttgtggagagggactgggcacacttttattaatatgtctgaggattcctttagattttaccaactttttccttacgctgggtgaacacagtgtctga

SEQ ID NO: 19040 - DNA, 201 bp, Homo sapiens
ggatctggtttccaggctctggttttcctcctagtgacttagacagacatgagcatttaaggtggtatctgccacaagctgatcccatttttagtgactgmtatcaccagaactagacataggggtatttgagagatgccctgcaggtactgaccacagtggctacacgggttgtggagagggactgggcacacttttatt

SEQ ID NO: 19041 - DNA, 201 bp, Homo sapiens
gctttatgaatctgggtgcccctgtgttaggtgcatattatttaggatagttaagtcttcttgttgaattgagccctttaccattatgtaatgtccttttygtcttttttgaactttattggtttaaagtctattttgtctgaaattaggattgcagcccctgcttttttctgctttctatatgtttggcttccatccctt

SEQ ID NO: 19042 - DNA, 201 bp, Homo sapiens
ccaactgtgagctgtcattttggagtttttcactctcaaaatcttggacattcatcaaaatggatctggtttccaggctctggttttcctcctagtgactkagacagacatgagcatttaaggtggtatctgccacaagctgatcccatttttagtgactgctatcaccagaactagacataggggtatttgagagatgcc

SEQ ID NO: 19043 - DNA, 201 bp, Homo sapiens
atcctacagtggttcagaacactataacatattcctatgatgcaggtgtaattttattttctacacttttattttagattcaggggtagttgtgcaggttkgttatataagtaaactcctgtcatgggggtttgctgtatagattgtttgtctcccaggtactaaacctggtatccaatacttatcttttctgctcctccc

SEQ ID NO: 19044 - DNA, 201 bp, Homo sapiens
ctatagttatccctccctcctgccctcgctccctccctcactctcacctatctatcatctatctatctatcatctatgtatctattttctatctatctathatctatctacctatatctttaactgagagatttctcgtagcttttcttttagagcaaaggtaagttagagtagaaacacctgtctctgttatgtcaagtc

SEQ ID NO: 19045 - DNA, 201 bp, Homo sapiens
gaattgtcttcctgcttgctgtgttactgctagagcttcctgtgtgggctccatatggtccctattcttcccaccactcatgaaaacaccaaagagcaggytcagagtgaccacagccaagccccagctctgccagcaggcccccatcttctcctgctctgatgtggggattgtgcggttggcttgtttcctggcttctct

SEQ ID NO: 19046 - DNA, 201 bp, Homo sapiens
tgctctcctcccccaagttacgagcatctatagttatccctccctcctgccctcgctccctccctcactctcacctatctatcatctatctatctatcatctatgtatctattttctatctatctatcatctatctacctatatctttaactgagagatttctcgtagcttttcttttagagcaaaggtaagttagagtag

SEQ ID NO: 19047 - DNA, 201 bp, Homo sapiens
tttagtagagatggagtttctccacgttagccagtatggtctcgatctcctgacctcgtgatccgcctgccttggcctcccaaagtgctgggattacaggygtgagtcactgcacctggccgaaaatgtgtgtttttaaaactaagtgaagataatacagttagggatcatgaagtctaatcccattttttttttttttga

SEQ ID NO: 19048 - DNA, 201 bp, Homo sapiens
cttgctctcctcccccaagttacgagcatctatagttatccctccctcctgccctcgctccctccctcactctcacctatctatcatctatctatctatcatctatgtatctattttctatctatctatcatctatctacctatatctttaactgagagatttctcgtagcttttcttttagagcaaaggtaagttagagt

SEQ ID NO: 19049 - DNA, 201 bp, Homo sapiens
ggcccttgctctcctcccccaagttacgagcatctatagttatccctccctcctgccctcgctccctccctcactctcacctatctatcatctatctatctatcatctatgtatctattttctatctatctatcatctatctacctatatctttaactgagagatttctcgtagcttttcttttagagcaaaggtaagtta

SEQ ID NO: 19050 - DNA, 201 bp, Homo sapiens
gcctgtaccacaaattaatggttaaaatgcatccctcatacgacaatgtaacttcttcctctcactgttgatggcctatcttcctgaaaacattaatctgsgggtgagaacttgggagatacacacagttgggttcaccataaatgaggagcctcactgacagtggaagatgcacaggaaaagaaagaagactatgggctg

SEQ ID NO: 19051 - DNA, 201 bp, Homo sapiens
tctgcctcccgggttcacaccattctcctgcctcagccccccgagtagctgggactacaggtgcccaccaccacgcctggccaattttttgtatatttagyaaagacggggtttcaccatgttagccaggatggtctcaatctcctgacctcgtgatccacccgcctcggcctcccaaagtgctgggattacatgcgtaag

SEQ ID NO: 19052 - DNA, 201 bp, Homo sapiens
taacccgaagttagaattaggaggcactgcagaggaaccatggggtgttgcataaggagggagttgagatgggcttataggacttggggttttgcttggtrattctaaagaggatttgaggaagagagggtcagtctggattggatattgtctggaagtgggtgcaattaatgactagttaccttaatcatttttatctag

SEQ ID NO: 19053 - DNA, 201 bp, Homo sapiens
tattttgtatttttagtagagatgggatttcaccatgttggtcaggctggtcttgaacgcctgaccacaggtgatccacctgccttggcctcccaaaatgytgggattacaggcgtgaaccaccatgccagacccattgttttatttttaattgacatataataattgtacatatttatgggatacatactgatgtttcat

SEQ ID NO: 19054 - DNA, 201 bp, Homo sapiens
aaagaagtcaaaaggagctaaatcaggattatagtgattttccatcaaaactcttgcaaaattgccattgtttgatgagaagattaagcaggagcattcaygtggtggagaagaactctacggtgaactttcctgggctttttctgctaaaactgtggctttctcagaacactctcaaaataagcacatgtgggccaagga

SEQ ID NO: 19055 - DNA, 201 bp, Homo sapiens
gctgcagagactttgtttatggccagttttggggccagtttatggccaggttttggggggcctgttcccaacagtgccctttaaaggttttttaagattargaaacaaaaagaagtcaaaaggagctaaatcaggattatagtgattttccatcaaaactcttgcaaaattgccattgtttgatgagaagattaagcagga

SEQ ID NO: 19056 - DNA, 201 bp, Homo sapiens
caaaaacccaaagccaaaaggcaagcttccaaaattgacttatctacaaatctatacatcgagctactgtgagcttggctagtagcacttagctgcacaaracacaagccttttgttcagctgttgaagcctctctgtgtccgtcctggatttggaggctctgaattaatttgatcccataagactggcccttactatgtc

SEQ ID NO: 19057 - DNA, 201 bp, Homo sapiens
ggcaatgaagattgctgatataaactgggtttttgaaatctcaggaccgtgttagacaaatacaaaaactgaaccattcttttttttccatgcatagaaawaaattacagatgagttgatgagtttggtagagaggtggggaataaaaccagaaagaaaagacaagaatatttgtgtcaccctgtcttgatgtaggagaaa

SEQ ID NO: 19058 - DNA, 201 bp, Homo sapiens
tgtatgctctgctatatgctttatacctcaacaaaaaggaaaaaagtccacatttcataatttctaccaccaaatacatggagctcttgcaattttcattwattttaccaaaaagtagtggtaggaagcaccacttatctgatgggctcagatatttattggtgtagaaaaaaataaaaagacgcactaaatcatttgcaa

SEQ ID NO: 19059 - DNA, 201 bp, Homo sapiens
atgttttgggcattattcaggaagtatgtacagcacttagttttacttatacttcatggtccccactgtcaattatatttggggttcctgtggggcttgayaacaggttggcaaaatatacatatttaacaggctgggcatggtggctcatgcctgtaatcccagcattttgggaggctgaggtgggtggatcacctgagg

SEQ ID NO: 19060 - DNA, 201 bp, Homo sapiens
cagataaagttagatttggtgataaaggtgagaatagaggttacctttggcaggaggtgatagtgactggaagagactactaggcctggcttcactaggcytaaagtccactaggttgctggaaatgttatataaatggatctggatgttatgtaaaatattctataaatacacataagtgtatattatatatttgtaaaa

SEQ ID NO: 19061 - DNA, 201 bp, Homo sapiens
tggtagatagaaagtgactttattaaccacaactagtaaaggggaagtggccagattcccatcaaagcaaccactttgactatttcgggggaagggagggrtttaaaagaggaaaacttgattaaggagggcatgcaagagaattgtgctgagtacagtatctctgggtcttgtttttatgattatctttggtgccagtcc

SEQ ID NO: 19062 - DNA, 201 bp, Homo sapiens
cagaacataactataacatgtacattacataaacatatctaaacatgtatacatccatacacaaacaaaggtctaagagcttttatctgagaactctaatmatgagatagcatcacaaactcactgacctataaaagctggcttcaagttgtttttctgacaaaattggaagctgtccacgtggctaactttgtttgccct

SEQ ID NO: 19063 - DNA, 201 bp, Homo sapiens
attacagaaaaaattcacttaaaaaacatatttcatttatgtgtatttaattttttaatctttaagtttatctagattctttctgaaaacagatattatayaaagttagtcattatttaaagttatttccctgttaaccattttaaaagtccgaacattaggtgaacacctaagtaagaacctcaaagttaaatccatggt

SEQ ID NO: 19064 - DNA, 201 bp, Homo sapiens
aaacatctgtgtgtgggtttttgtgtgaatacacattttcagcattgttttgcgccatcacaggggaaaccttctttttttttgttttgagacagagtctygctctgtcgcccaggctggagtgcagtggcacaatctcagctcactgcgagctctgcctcctgggttcacgccattctcctgcctcagcctcccgagtag

SEQ ID NO: 19065 - DNA, 201 bp, Homo sapiens
tccgccttccgggttcacgccattctcctgcctcagcctcctgagtagctgggactacaggtgcccgccaccacacccagctaattttttgtatttttagyagagactgggtttcaccgtgttagccaggatggtctcgatctcctgaccttgtgatccgcctgcctcagccttccaaagtgctgggattacaggcctgag

SEQ ID NO: 19066 - DNA, 201 bp, Homo sapiens
aagttgtttttctgacaaaattggaagctgtccacgtggctaactttgtttgccctgataggtaatccaaggaaagctggcagccaaaatttggggtaaascagtctctatggcagtttgggtttttttctttttaaatcttttcccctttttgctgttcagtttcaaatgagttttcaatgtttatattcaatttagacc

SEQ ID NO: 19067 - DNA, 201 bp, Homo sapiens
tttcatttggattcagaaacacttggaagcagtgataatatgtcttttcttttcttcttcttcttcttttttttttttgagatggagtctcactctgttgyccaggctggagtgcaatggtgcgatctcggctcgctgcaacctccgcctcccaggttcaagcaattctcctgcctcagcctcctaaggagctaggactac

SEQ ID NO: 19068 - DNA, 201 bp, Homo sapiens
cccttgctcccctctttgcatcttcaacgtgggccagatgttcagaactgcagtgacattttgtgcccccaggatgccaagcaaggggcacaatccagccraccaaggatgacagagacgagacagagaggggtcccagtggaaccaagaacagctgaatgaacaccagccaccacctcctagtgcactcctggtctatga

SEQ ID NO: 19069 - DNA, 201 bp, Homo sapiens
agttgctcacagtctagctgggaagtcagacactaagcccgtgaatgaaaatgtgttgggagcttcagagaagcagctctgagtgctcatggcgtcaagcrctggaagaccagaccatgaggtcagaacatggaggcaagaacattcgggtttacaaagcttctacgtacatcacaacaatgctgtactccaattctaggt

SEQ ID NO: 19070 - DNA, 201 bp, Homo sapiens
acaaaatattggcaaatagaattcaacaatacataaaataaattatacaccatggctgagtggggtttattctggtgatggaagactgatccagtattcakaatcagtcagtgtaatccaccatatcaacaggctaaagaagaaaaatcacacaatcgtatctattgatggagaaaaaacatttgaacaaattcaacactc

SEQ ID NO: 19071 - DNA, 201 bp, Homo sapiens
tgctgggcgagttgtgcagccgctccagctgcagtaggttgttaatcttaggtggttttgctctcagagttctccctctgagccatggaggtgatggtgcyatctgccccaaagggctgttgagtgtgcagagtgagacactgcacgctcagctcagtgatctgagttgtgagtatcgtggcttgggaacatggcttatga

SEQ ID NO: 19072 - DNA, 201 bp, Homo sapiens
tttcgccccctggagcctggagcttggagcctggagcctggggcactccctccctgttggtggtggtggtgacggagcggtaggagggaggctagcagcgrgagcttctcctgccgggctggaagacagaaagaagaggcaccgccgcgtgctggaggctggagccggagcttgcgcctccgcggctcgcctcgctgcggt

SEQ ID NO: 19073 - DNA, 201 bp, Homo sapiens
cgtcaagcgctggaagaccagaccatgaggtcagaacatggaggcaagaacattcgggtttacaaagcttctacgtacatcacaacaatgctgtactccarttctaggtttctggaggagagactcacattgggccagtttgaatcactaatctatgaatctatccttgaccccatcaaataagtgtgcgtgtgtgtgtgt

SEQ ID NO: 19074 - DNA, 201 bp, Homo sapiens
caaatacaaacaaatacaaatgcataaaatgctcaaatggtgtcactagtggccaagtctaaatagagcagagtcccagtgacatcccaaaagaggcagayggtggtcaaatgcactccgactaactcaccaagttccaaagtttcaaagttccaaaattccaaagtttgtcacttctctaaaagtcactttcagtgcacc

SEQ ID NO: 19075 - DNA, 201 bp, Homo sapiens
aacaaattccaggagctggaggccacagtcctttacttttggagtcctcagttatggcaatgggtctgatttgatgagtccccccatctgctccatctccycgtgctgagactgggtttgtgttttagtgagactgagtcctgggtcatctcattggaaggctaagaaaatatgacaacgactccaaggtgtaagggaggc

SEQ ID NO: 19076 - DNA, 201 bp, Homo sapiens
tacaaaagtggacatccagagatattgacaaaataacactggtgccaggaactgtgctaggaatataatagttttcttccggatctggatctctactgtgratatccactggtcatacatgcctactggaaataaaaagcattctttcctaacttattccaaaccctggctaaaggaattctggggttgccattatgttac

SEQ ID NO: 19077 - DNA, 201 bp, Homo sapiens
aaagctgaggaccctggctaggaacgggcaggactagaggaccaggaagcaggaagcacggcagtggtctcgcaacatggccggtctggcctggacaccamccccagtgctgcgcctctcactcaggtttcaaatcctagggaggcgtatctcattttcaagctaaggtacatgcctgaccttggcctacaagaggcccag

SEQ ID NO: 19078 - DNA, 201 bp, Homo sapiens
atattaaaaatcagccgttgttggtgaccacacaatcagaacaaaggaacacattttccaggttaataaaactgtggaaacaatattcccagggcctgagwgtcccggccccagccccaggagtggatcaacgtaaggcgttttcacccgccctgatgcagaatgagcgcctctgttcaggtggtgagtgagtgccactgt

SEQ ID NO: 19079 - DNA, 201 bp, Homo sapiens
ataatcggtaacagggtgtatgagagcccatattaaaaatcagccgttgttggtgaccacacaatcagaacaaaggaacacattttccaggttaataaaaytgtggaaacaatattcccagggcctgagagtcccggccccagccccaggagtggatcaacgtaaggcgttttcacccgccctgatgcagaatgagcgcct

SEQ ID NO: 19080 - DNA, 201 bp, Homo sapiens
aagattcccaggcacagacagagcctctgttttctgccctcagtcatgaaagcagggcccagtctggacataggtgggcaccagagcttgtcaacatgacrgaaggaagagatgaaccatagcatctttccggatctctatgtattagcctgaaacccctttggatcacatctccctactaaaaaggacatttgagcaaag

SEQ ID NO: 19081 - DNA, 201 bp, Homo sapiens
tgagcagttctaaaggtgatgggagatgctttgactcagggacccaattcaaagattcccaggcacagacagagcctctgttttctgccctcagtcatgamagcagggcccagtctggacataggtgggcaccagagcttgtcaacatgacagaaggaagagatgaaccatagcatctttccggatctctatgtattagcc

SEQ ID NO: 19082 - DNA, 201 bp, Homo sapiens
ttttcagatggggaaagtgaggcgtagagagagtgagtaacttgcgcaaggtcaagctagtgactggtgtcaggagtcatgctccagcagtctgtgctttwattactctaccacactaaatttccaacacaactgctcttgagtacaagcaaaatatctccatgaacattctgagcagttctaaaggtgatgggagatgct

SEQ ID NO: 19083 - DNA, 201 bp, Homo sapiens
aataacagctaagagttagataattcttcgtaagtggtaggaatgtaaagtacctgtcctatgaaatttacatctattaatgcatttaaatgtcacagtgkccctatgagatatgtcctacaattattcccattttcagatggggaaagtgaggcgtagagagagtgagtaacttgcgcaaggtcaagctagtgactggtg

SEQ ID NO: 19084 - DNA, 201 bp, Homo sapiens
cggtggctcacgcctgtaatcccagaactttgggaggctgaggcgggcggatcacttgaggccttgaggctaggtggtcgagaccagtctgggaaacatgrtgaaaccccgtctctactaaaaatacaaaaattagccagggtgatggtgcacgcctgtaattccagctactcaggaggctgaggcaagagaattgcttga

SEQ ID NO: 19085 - DNA, 201 bp, Homo sapiens
gttgtagaataacagctaagagttagataattcttcgtaagtggtaggaatgtaaagtacctgtcctatgaaatttacatctattaatgcatttaaatgtyacagtggccctatgagatatgtcctacaattattcccattttcagatggggaaagtgaggcgtagagagagtgagtaacttgcgcaaggtcaagctagtg

SEQ ID NO: 19086 - DNA, 201 bp, Homo sapiens
ctctccccctcttgcctcatctctcctgtccccagccacagaaagttttctgctaacgctcattggattagattgaactaatctaacctggaaggtccacrgtgatctccctatttgaaatctgaacccctgagtacacctgaaaagtctttgttgccatgtaatgctgggtattcacagatcctggggactggcatatct

SEQ ID NO: 19087 - DNA, 201 bp, Homo sapiens
ggggttccggtcgccatcactaagggtctctcgtgaccttgcacacagggggctataaaaaggacctggggcttcccttggtggcttgagctgcctgtgayagcagagtgggtgggtgtgggggacgttggtctctcaagacacacccactttatcttctggtcttcgcatcagacaggtgagatggatacaaaacccaga

SEQ ID NO: 19088 - DNA, 201 bp, Homo sapiens
catggctcagctagaactgttggcaacatggccactcgtttcctctggatggatttgcagcagcttaaaattcaaagaaccgcgcttccttcagtgattcraggagatctgaagcccaggcccctggcaaagtgttctctccagagacaacaataacacatggcatttatccctctcttccacagacctcagaggatgagc

SEQ ID NO: 19089 - DNA, 201 bp, Homo sapiens
ctcaccgccccgccttctcattccacccccgcccccagccggcactttgcgaggggttacagtttcagcagagatttcttagtgcctgacaagctgttagrctggtccagaaacaaaaccacaagcctcctgtgctcttacctcgtaggatggtgaagtcggtgaaggaaggcacggctggggagggtctgcattcactat

SEQ ID NO: 19090 - DNA, 201 bp, Homo sapiens
accattctcctgcctcagcctcctgagtagctgggactacaggcgcccggcaccacgcccggctaattttgtgtatttttagtagagacggggtttcaccrtgttagccaggatggtctccatctcctgacctcgttatctgcccgccttggcctcccaaaatgctgggattacaggcataagccaccgtgcctggccaag

SEQ ID NO: 19091 - DNA, 201 bp, Homo sapiens
gaggcatgagaatcacttgaacctaggaggcggtgattgcagtgagctgagattgtgccactgtactgcagcctgagcaacagagcaagattctgtctcaracaaacaaacaaataaaaggcaatacagaacgttatatggttgtacaaactttaacccttttagatctcaacttttctaagcaattaaaacctaataaag

SEQ ID NO: 19092 - DNA, 201 bp, Homo sapiens
gaaggggcgagggtggaagtggggagacctttgcatatgaatgctctaaaacccaaagcctctagatagaattattttgagggtctccctccatcgctcargctgcagtgcagtggcgtgatcacagctcactgcaacctccacctccccaggcttagatgatcctttcatctcagcctccaaagtagctgggactacagg

SEQ ID NO: 19093 - DNA, 201 bp, Homo sapiens
tgtaaaagccaaaaacccaaagccaaaaggcaagcttccaaaattgacttatctacaaatctatacatcgagctactgtgagcttggctagtagcacttakctgcacaaaacacaagccttttgttcagctgttgaagcctctctgtgtccgtcctggatttggaggctctgaattaatttgatcccataagactggccct

SEQ ID NO: 19094 - DNA, 201 bp, Homo sapiens
gagactgttagttagctttagtgtcagtcagaacactgcaagatactgtcctacgggctagagagcccctttcacccatcatctcaggtgaagctattgcygggaactcacatctcctggtgagtttccattctttctaggaggaggggtgctgcccagtgcctggagagagggtgcagggggtcggctgaggggtggggt

SEQ ID NO: 19095 - DNA, 201 bp, Homo sapiens
gaacttgtttttcagtttatctggggatttccttcggccaagaggcaggtccattcagtctgttgagaggcttaggattttattttagtttatattctccyttttttgtcaaggtattccaggggcagtattgatggccaagcttttattttgtcccatgtggatgctggggtggtatggttaccttcccagggtccatga

SEQ ID NO: 19096 - DNA, 201 bp, Homo sapiens
tggcatcggcgctagcgttggtagcagcggcaagtctgggggctgggaaggggagtaggagcgctcacttgcccatcctgtcctggggtggggacgaaccytaaggtgctataatgcgggcctcagtggcagtggtggaggtgcatgtagggtaaggaggagtcttcctccttgtcctgcaatctctggagggtgccctcc

SEQ ID NO: 19097 - DNA, 201 bp, Homo sapiens
acaagatgtaattatcatttgatcaccacagactgtatttatttaggggtggtgacccagtagcaggacccaggttaacggtgcattatccttgctttttycctgtgggtggatgcttcagctctgtttttacctcatttggcaataacagccacgctctgcatttaatcgccttccagaatgtgagggcaggcggtgccc

SEQ ID NO: 19098 - DNA, 201 bp, Homo sapiens
tgaacccaggaggcagagcttgtagtgagccaagatcgcgccactgcactctagcctgggtgacagagcgagactccgtctcaaaaaaaaaaaaaaaaaawtagccaagagtggtggcatgtgactgtggtcccagctactcggctgagacatgagaattgcttgaacctggaggtggaagttatagtgagttgagattgc

SEQ ID NO: 19099 - DNA, 201 bp, Homo sapiens
actgaggagggatgatggggtgtttctggtgtgtggggcccacttgagaggaccagggaggcgtcccagagaggaaaaggaggaatagcaggaagaaagcygggcagagagcactgctgtggtgggaacaccattagtgaaggcgagaaggaccagagccgcttgctgggtgctggcccagggacatctgcggctgttgga

SEQ ID NO: 19100 - DNA, 201 bp, Homo sapiens
atgcgagcgcacggcgcaggactggcaggcagctccacctgcagccccggtgcgggatccactaggtgaagccagctgggctcctgagtctggtggggacrtggagagtctttatatctagctcagggattgtaaatacaccaatcagcaccctgtgtttagctcaaggtttgtgagtgcaccaatcgacactctgtatct

SEQ ID NO: 19101 - DNA, 201 bp, Homo sapiens
ggatgtgggtgggccagataagagaataaaagcaggctgcctaaaccagcatcggcaacccgtttgggtctctttccacactgtggaggctttgttctttygctcttgctgctgctcactctttgggtccacgctgcttttatgatctgtaacactcaccgcgaagatctgcagcttcacttctgagcccagtgagaccac

SEQ ID NO: 19102 - DNA, 201 bp, Homo sapiens
ttctttccctgctccctctcgccaccctcttttctcctcctccttgtcaccctctttccctcctccatctacccaaacactttttacctaccatcttttcrccaccatctttcttttctgccactgttttttcgcaaaaccttgtcttcctcccgctggttaccctctttttccttctcccacttgctatcttcttttgct

SEQ ID NO: 19103 - DNA, 201 bp, Homo sapiens
ttcccgtcttttccccaaacttctttccctgctccctctcgccaccctcttttctcctcctccttgtcaccctctttccctcctccatctacccaaacackttttacctaccatcttttctccaccatctttcttttctgccactgttttttcgcaaaaccttgtcttcctcccgctggttaccctctttttccttctccc

SEQ ID NO: 19104 - DNA, 201 bp, Homo sapiens
gctactcgggaggctgaggcaggagaatcgcttgaacctgggagatggaggttgcggtgagtcgagatcgtaccactgcactccagcctgggtgacaggaygagattccatctcaaaacatacaaacaaacaaacaaaaccccagctttctttgggcttcccttgtagtaattccaggggaggtcctctcaggagctgaag

SEQ ID NO: 19105 - DNA, 201 bp, Homo sapiens
ggtcaactcatttttaacaaaggccccaagaacacacattcgggaaggacaatctcttcaataaactgtaccaggaaaacccaacacccacatgtacaagratacatctaggccattaccttaccatatacaaaaatctactcaaaataaagatttaaatgcaggacctgaaactatgaaactaccagagaagaaaacata

SEQ ID NO: 19106 - DNA, 201 bp, Homo sapiens
atctggaataaaaagaaaagctggaggcatcacactacctgatttcaaaatatactacaaatctatggtaagcatggtactatcaaaacagtatggtactmtcaataaaaggggcaggggagagacagagagatgaacgaatgagacagacagacatagacaagtgaaacagaatagagaaatcagaaataaattcacgcg

SEQ ID NO: 19107 - DNA, 201 bp, Homo sapiens
aggactggcaggcagctccacctgcagccccggtgcgggatccactaggtgaagccagctgggctcctgagtctggtggggacgtggagagtctttatatstagctcagggattgtaaatacaccaatcagcaccctgtgtttagctcaaggtttgtgagtgcaccaatcgacactctgtatctagctgctctggtggggc

SEQ ID NO: 19108 - DNA, 201 bp, Homo sapiens
catgttggccaggctggtcttgaactctgacctcaggtgatccacccgcctcaggctcccaaagtgctgggattacaggcgtgagccaccatgcctggccygtggcagctcttgaatactccaaacctgctgatctctctgtcgaaaattcttctttctaggatgggcgcggtggctcacgcctgcaatcccggtgctttg

SEQ ID NO: 19109 - DNA, 201 bp, Homo sapiens
caaaaaaaaaaaaaaaaaaaaaaaaaaactggaagggcaataataggtaacaaagtactgagcacctactatactaggtacatctcattgcagccactctrtaagatggatgcttcacggttatgctcatttaagagtgagacaactgaggttccaaggggtttaataactttctcaaatcatgcaaccaacagatagcta

SEQ ID NO: 19110 - DNA, 201 bp, Homo sapiens
gtgaacccaggaggcagagcttgtagtgagccaagatcgcgccactgcactctagcctgggtgacagagcgagactccgtctcaaaaaaaaaaaaaaaaaattagccaagagtggtggcatgtgactgtggtcccagctactcggctgagacatgagaattgcttgaacctggaggtggaagttatagtgagttgagattg

SEQ ID NO: 19111 - DNA, 201 bp, Homo sapiens
tcctgttctaggtttctctggctttgcctgcgcaactgctcccagccaggctggaggaggaggaggagtcacctgtggtatgctggagcctgtagatggcktggctctgcagcttgcctcatgaggttggtggcagcaacagagactgcagcttgaccagagtggtaggagggcacccgtgggggccaagtgataggagcc

SEQ ID NO: 19112 - DNA, 201 bp, Homo sapiens
gattagaaacataaaatataaactttatttctcaacataagctccatcaagttcagatgcttttgtaaggcttcataccaaccctttaatccatctgtaaygaactgagatactgggaatttaatcttaaggcagtctttttaatgttatttgctgaagaaaaatgggtgccctgccaagaccagcttggtgggggagacc

SEQ ID NO: 19113 - DNA, 201 bp, Homo sapiens
tccaagaatggcctttgccatggctcagctagaactgttggcaacatggccactcgtttcctctggatggatttgcagcagcttaaaattcaaagaaccgygcttccttcagtgattcgaggagatctgaagcccaggcccctggcaaagtgttctctccagagacaacaataacacatggcatttatccctctcttccac

SEQ ID NO: 19114 - DNA, 201 bp, Homo sapiens
gtgatctgagttgtgagtatcgtggcttgggaacatggcttatgatgaagaggggctacggttttagcatctgggagtgcttttcttgtcaggctacagasacatgcgtttggaaaacaggaaggaagaagtccaagaatggcctttgccatggctcagctagaactgttggcaacatggccactcgtttcctctggatgg

SEQ ID NO: 19115 - DNA, 201 bp, Homo sapiens
ggctgttgagtgtgcagagtgagacactgcacgctcagctcagtgatctgagttgtgagtatcgtggcttgggaacatggcttatgatgaagaggggctayggttttagcatctgggagtgcttttcttgtcaggctacagacacatgcgtttggaaaacaggaaggaagaagtccaagaatggcctttgccatggctcag

SEQ ID NO: 19116 - DNA, 201 bp, Homo sapiens
tgccaccaagttgctcacagtctagctgggaagtcagacactaagcccgtgaatgaaaatgtgttgggagcttcagagaagcagctctgagtgctcatggygtcaagcgctggaagaccagaccatgaggtcagaacatggaggcaagaacattcgggtttacaaagcttctacgtacatcacaacaatgctgtactccaa

SEQ ID NO: 19117 - DNA, 201 bp, Homo sapiens
gcaccccatgccactgggccattctcacctgggaattgagaaagaacaatctgccccttatggaaagacaaaatcaggcaaagggccccttgtgttggggrcaggatccctgcactcagagagatttagaagctgaaataactgggttgggggcggtgactcacgccattaatctcagtactttgggaggccagggagggt

SEQ ID NO: 19118 - DNA, 201 bp, Homo sapiens; identical to SEQ ID NO: 2289

SEQ ID NO: 19119 - DNA, 201 bp, Homo sapiens
cccttatggaaagacaaaatcaggcaaagggccccttgtgttggggacaggatccctgcactcagagagatttagaagctgaaataactgggttgggggcrgtgactcacgccattaatctcagtactttgggaggccagggagggtggatcacctaaagtcaagagttcgagaccagcctggccaacatagtgaaacccc

SEQ ID NO: 19120 - DNA, 201 bp, Homo sapiens; identical to SEQ ID NO: 2290

SEQ ID NO: 19121 - DNA, 201 bp, Homo sapiens
caaaatcaggcaaagggccccttgtgttggggacaggatccctgcactcagagagatttagaagctgaaataactgggttgggggcggtgactcacgccaktaatctcagtactttgggaggccagggagggtggatcacctaaagtcaagagttcgagaccagcctggccaacatagtgaaaccccgtctctactaaaaa

SEQ ID NO: 19122 - DNA, 201 bp, Homo sapiens; identical to SEQ ID NO: 2292

SEQ ID NO: 19123 - DNA, 201 bp, Homo sapiens
tattatggggtggaaggtggtggtatggagcaaggggtaggtggaaagaagacctggagggccttcaaggtctattgggaactaggccactgaaatataaraggtttggctgttcctgggccagaaaaaagctgacacatcactgctgtctattactcactaaggccattccaccagctcagtggtcccagcttgctggtc

SEQ ID NO: 19124 - DNA, 201 bp, Homo sapiens
ccaagatgattctgagatttatcctgagcttttttttttttttttttttggatgcagagtctcgctctgtcgcccaggctggagtgcagtggcgtgatctyggctaactgcaacctccacctcgcgggttcaagcaattccctgcctcggcctcctgaatagctgggattacaggcgcctgccaccacacctggctaattt

SEQ ID NO: 19125 - DNA, 201 bp, Homo sapiens
actgctgtctattactcactaaggccattccaccagctcagtggtcccagcttgctggtcacagcccattggtcatctcagagatgacttgaaggcatttyttcctcccccaccatcaccagcaacaccaaacctagccccccaggagcggaaagaaatgaaaacaagatgggctattaagtgcagaggcaaaaactcccc

SEQ ID NO: 19126 - DNA, 201 bp, Homo sapiens
cccaactactctcgggaaatgagaacaatgcaaaaatgagtttgagacatacagaaccagagcatttggaatctgaattagggcaagggaagtggaagagwgattttatttggggttgtaaatgcagtgccaacaggttccaggtagataacaatgtaagcaatgagggctggatgggaggggataaatcccagatgacac

SEQ ID NO: 19127 - DNA, 201 bp, Homo sapiens
ttttttttttggatctaagagtggactgatgaagcacctggcaaggagcaagaggccttcttacaaatcaaacattgagactgagattcctaatgactagrgtgagctctaaagagaaaggtggctgggcgcggtggctcacacctgtaatcccagcattttggggggccaaggtgggcggatcacttgaggtcaggagtt

SEQ ID NO: 19128 - DNA, 201 bp, Homo sapiens
gatctgctgccctggctgaggtagctcatgcaatcagtctctctgagcctcagtctcctgatctgtgaaatgggatgatagtcatagctcctacacaagayaagtggcaggtcagacgtgagaatgcacaggcaggcctttgacaactggataagctctacacaggtctggaaaggaggaagagacaaaagaggacgggct

SEQ ID NO: 19129 - DNA, 201 bp, Homo sapiens
ctaggaagaagcctatatcctgaaggagcagaagtattcattcctgcagaacccccagacctccctctgcttctcagagtctattccaacaccttccaacwgggtgaaaacgcagcagaaatctgtgagtggatgccttctccccaggtggggatggggtagacctgtggtcagagcccccgggcagcacagccactgccg

SEQ ID NO: 19130 - DNA, 201 bp, Homo sapiens
ttaaagagaggacaagttgggtggtatctctggctgacactctgtgcacaaccctcacaacactggtgacggtgggaagggaaagatgacaagccaggggrcatgatcccagcatgtgtgggaggagcttctaaattatccattagcacaagcccgtcagtggccccatgcataaatgtacacagaaacaggtgggggcaa

SEQ ID NO: 19131 - DNA, 201 bp, Homo sapiens
ctccgcgcccgtcgcctgtaccagctggcatatgacacctatcaggagtttgtaagctcttgggtaatgggtgcgcttcagaggtggcaggaaggggtgamtttcccccgctgggaagtaatgggaggagactaaggagctcagggttgttttctgaagtgaaaatgcaggcagatgagcatacgctgagtgaggttccca

SEQ ID NO: 19132 - DNA, 201 bp, Homo sapiens
tgattctaacatgtaaacaaggttgagaaccactgtgttagggaccgcaaagatgagacccatgtgttcacagctgttgtactggtggaatagggagaaargagaaaaaggagatgagaggcctgggccagttgtggtgccacctgctcctaattccaaccagtcatctaaaaagtgtttatcatgagccagtcacaaaaa

SEQ ID NO: 19133 - DNA, 201 bp, Homo sapiens
tgagtagcaccacaccacctgctctggagaaaggacttttgttgttgttgttgttgttgtcgtcgttgttgtggttgttgaaatggagtctcactctggcrcccaggctggagtgccatggcccaatcttggctcacggcaacctctgcgtcctgggttcaagcgattctacctcctcaccctccggagtaactgggattg

SEQ ID NO: 19134 - DNA, 201 bp, Homo sapiens
agtttgagacatacagaaccagagcatttggaatctgaattagggcaagggaagtggaagagagattttatttggggttgtaaatgcagtgccaacaggtkccaggtagataacaatgtaagcaatgagggctggatgggaggggataaatcccagatgacactcacttcccttcgggggatgcaacacagaggggtggga

SEQ ID NO: 19135 - DNA, 201 bp, Homo sapiens
atggagttttgccatgttggctagtctggccttgaactgacctcaagtgatccacccacctcagtcttccaaagtgctgggattacaggcatgagccaccrtgcccggcctggagaaaggactttaaatgatgcaatgtgggaagagcaaggttgtggagatctgctgccctggctgaggtagctcatgcaatcagtctct

SEQ ID NO: 19136 - DNA, 201 bp, Homo sapiens
aaccagagcatttggaatctgaattagggcaagggaagtggaagagagattttatttggggttgtaaatgcagtgccaacaggttccaggtagataacaaygtaagcaatgagggctggatgggaggggataaatcccagatgacactcacttcccttcgggggatgcaacacagaggggtgggaaccagcacaatctgca

SEQ ID NO: 19137 - DNA, 201 bp, Homo sapiens
ttgaactgacctcaagtgatccacccacctcagtcttccaaagtgctgggattacaggcatgagccaccgtgcccggcctggagaaaggactttaaatgaygcaatgtgggaagagcaaggttgtggagatctgctgccctggctgaggtagctcatgcaatcagtctctctgagcctcagtctcctgatctgtgaaatgg

SEQ ID NO: 19138 - DNA, 201 bp, Homo sapiens
atgagggctggatgggaggggataaatcccagatgacactcacttcccttcgggggatgcaacacagaggggtgggaaccagcacaatctgcagaactcargcccctgctgaggtgggacccacccagcctgtcaccatcaggactgcagggacacggcttccagaccttctgaccttttgagacagccaggacatccaga

SEQ ID NO: 19139 - DNA, 201 bp, Homo sapiens
catgagccaccgtgcccggcctggagaaaggactttaaatgatgcaatgtgggaagagcaaggttgtggagatctgctgccctggctgaggtagctcatgyaatcagtctctctgagcctcagtctcctgatctgtgaaatgggatgatagtcatagctcctacacaagataagtggcaggtcagacgtgagaatgcacag

SEQ ID NO: 19140 - DNA, 201 bp, Homo sapiens
gaccttttgagacagccaggacatccagacttttacaggaattctaacatttaaacactggcaacacatattgaaaatcttttaagggcaaaaattaaccsaaacacacatggtctccaagctgtctgtgagcaattttgttctaagagatgttgattggggtaacttggtgtaagggaaagaatcagaaagatttgggct

SEQ ID NO: 19141 - DNA, 201 bp, Homo sapiens
cttcgggggatgcaacacagaggggtgggaaccagcacaatctgcagaactcaggcccctgctgaggtgggacccacccagcctgtcaccatcaggactgmagggacacggcttccagaccttctgaccttttgagacagccaggacatccagacttttacaggaattctaacatttaaacactggcaacacatattgaaa

SEQ ID NO: 19142 - DNA, 201 bp, Homo sapiens
agcaaggttgtggagatctgctgccctggctgaggtagctcatgcaatcagtctctctgagcctcagtctcctgatctgtgaaatgggatgatagtcatasctcctacacaagataagtggcaggtcagacgtgagaatgcacaggcaggcctttgacaactggataagctctacacaggtctggaaaggaggaagagaca

SEQ ID NO: 19143 - DNA, 201 bp, Homo sapiens
aattctaacatttaaacactggcaacacatattgaaaatcttttaagggcaaaaattaaccgaaacacacatggtctccaagctgtctgtgagcaattttrttctaagagatgttgattggggtaacttggtgtaagggaaagaatcagaaagatttgggctgtatgtaatttagtgcccccgaataaattacttgaccaa

SEQ ID NO: 19144 - DNA, 201 bp, Homo sapiens
gagaatgcacaggcaggcctttgacaactggataagctctacacaggtctggaaaggaggaagagacaaaagaggacgggcttccatggctggatagggcmtctttcggcatgatgtgttctgagttccaaagctgggaagagactcaaatcttcttttttttttctttttttttaattattattattcttttactttaag

SEQ ID NO: 19145 - DNA, 201 bp, Homo sapiens
atttggccttaaaattatttagaaatctcagtctttagaagttgatggaatgagcacaattataattatctctcggcttgcgtgttttaaaaggaaatgtgagccatcttaataagtatttgttgaatgcacgtgacagtggaatgacaatgtccagcgcctacttgggtggctaagagggttctaaagtggggtggtcat

SEQ ID NO: 19146 - DNA, 201 bp, Homo sapiens
catgctggtgtgctgcacccattaacttgtcatttagcattaggtatatctcctaaagctatccctccccctccccccaccccacaacagtctccagagtrtgatgttcccctgagactcaaatattcaagagctcttccaaccttgagattctctgatggtttcagggctgtgggaggaagcgcttgtggtccgtgtctg

SEQ ID NO: 19147 - DNA, 201 bp, Homo sapiens
ttaataagtatttgttgaatgcacgtgacagtggaatgacaatgtccagcgcctacttgggtggctaagagggttctaaagtggggtggtcataacatgtwactgaactgcagggggagccacactccagagactgtccacccagctcccctcgggtataggaaactccactcaaccactgctggttgagaattagaaaga

SEQ ID NO: 19148 - DNA, 201 bp, Homo sapiens
acttgtcatttagcattaggtatatctcctaaagctatccctccccctccccccaccccacaacagtctccagagtatgatgttcccctgagactcaaatmttcaagagctcttccaaccttgagattctctgatggtttcagggctgtgggaggaagcgcttgtggtccgtgtctgttcccgggatttctgtttcttggt

SEQ ID NO: 19149 - DNA, 201 bp, Homo sapiens
ttgaatgcacgtgacagtggaatgacaatgtccagcgcctacttgggtggctaagagggttctaaagtggggtggtcataacatgtaactgaactgcaggsggagccacactccagagactgtccacccagctcccctcgggtataggaaactccactcaaccactgctggttgagaattagaaagatactaccaactttg

SEQ ID NO: 19150 - DNA, 201 bp, Homo sapiens
ggacaaggtcgagacattcctgcgcatcgtgcagtgccgctctgtggagggcagctgtggcttctagctgcccgggtggcatccctgtgacccctccccastgcctctcctggtcgtggaaggtgctactccagtgcccaccagccttgtcctaataaaattaagttgcatcattttgtttgactaggtgtccttgtataa

SEQ ID NO: 19151 - DNA, 201 bp, Homo sapiens
ttaaactctttgatttacccactgttagtctacatttcagctcatcaacttggtgtggacagcaatttccgctgcaaatttgagatgcctagggtgttttytaaacgatgcattcgtgagccctcactccctgagattctgatataattagactggaatgtggtccaggcaagagtaatttgaaaactttcccaggtgatt

SEQ ID NO: 19152 - DNA, 201 bp, Homo sapiens
ctcaaactcctggcctcaggtgatccacccaccttggcctcccaaagtgataggatcataggcaggagccaccaggcctggcccttaatggtattttctawcgaaaactcttcctgaagataagattagtgagactcgcacagggaagagttcagcaggcagagctccagtcatccttgacccctggcataatgttttact

SEQ ID NO: 19153 - DNA, 201 bp, Homo sapiens; identical to SEQ ID NO: 2291

SEQ ID NO: 19154 - DNA, 201 bp, Homo sapiens
tggctgttcctgggccagaaaaaagctgacacatcactgctgtctattactcactaaggccattccaccagctcagtggtcccagcttgctggtcacagcycattggtcatctcagagatgacttgaaggcatttcttcctcccccaccatcaccagcaacaccaaacctagccccccaggagcggaaagaaatgaaaaca

SEQ ID NO: 19155 - DNA, 201 bp, Homo sapiens
ccaaccttgagattctctgatggtttcagggctgtgggaggaagcgcttgtggtccgtgtctgttcccgggatttctgtttcttggtttgtgtctctgctrcaggtccaaggagctgaggcaataccttgagtctgggttcttcgtccccagtgacctgggggagccccaccgcctccgccccaaggttcagggaaagggg

SEQ ID NO: 19156 - DNA, 201 bp, Homo sapiens
gaagcgcttgtggtccgtgtctgttcccgggatttctgtttcttggtttgtgtctctgctacaggtccaaggagctgaggcaataccttgagtctgggttmttcgtccccagtgacctgggggagccccaccgcctccgccccaaggttcagggaaaggggagagcaatgtgtggggttggttctctctagtggtcagtgt

SEQ ID NO: 19157 - DNA, 201 bp, Homo sapiens; identical to SEQ ID NO: 2498

SEQ ID NO: 19158 - DNA, 201 bp, Homo sapiens
tgtttggcagagcaactggattcctctaaccatggcttgtctgcaaaaacagtttcccaaagagctgagttcagtgcaccacactccctccctaccttcaycccctgctccctctcctcccctcacccaaatgctgtccccttcacccaacagctttccttcccaagggagcactagcagctccctgctttgagccaactc

SEQ ID NO: 19159 - DNA, 201 bp, Homo sapiens
tcaaactcctggcctcaggtgatccacccaccttggcctcccaaagtgataggatcataggcaggagccaccaggcctggcccttaatggtattttctatygaaaactcttcctgaagataagattagtgagactcgcacagggaagagttcagcaggcagagctccagtcatccttgacccctggcataatgttttactg

SEQ ID NO: 19160 - DNA, 201 bp, Homo sapiens; identical to SEQ ID NO: 2499

SEQ ID NO: 19161 - DNA, 201 bp, Homo sapiens
tagaaaaaccggaaagctgtgctcggtgtatatgacctttgatggccctcatggttatcatggatttctgattcttgctttgagtttactgtgattataawgatgtgcttaattaccactagaattatcagtgtaataataaaaaacaactaatgtgaacacatatctccagcaccatgctagtttattacatgtattgtg

SEQ ID NO: 19162 - DNA, 201 bp, Homo sapiens
tcatttcatctgactaggtgtcattctataatattatggggtggaaggtggtggtatggagcaaggggtaggtggaaagaagacctggagggccttcaagrtctattgggaactaggccgctgaaatataagaggcttggctgttcctgggccagaaaaaggctgacacatcaccgctattactcactaaggccattccac

SEQ ID NO: 19163 - DNA, 201 bp, Homo sapiens
cgagacaagcctggccaacatggtggcaccccgtctcttactaaaaatacaaaaattaccaggtgtgatggtgcacacctgtattcccagctactgaggcrcgagaatcacttgagcccaggaggcagagttgcactgagcccatcatgccactgccctccagctggatggctgagcaagattctctctcaaaaatagtaa

SEQ ID NO: 19164 - DNA, 201 bp, Homo sapiens
tccaggagcgggaagaaatgaaaacaagatgggctattaagtgcagaggcaaaaactccccaacaggtgaggaaacaatggcatagaattacttgtgttcrgaagaattttaggatgaatattccttaagcccaactactctcgggaaatgagaacaatgcaaaaatgagtttgagacatacagaaccagagcatttggaa

SEQ ID NO: 19165 - DNA, 201 bp, Homo sapiens
cgggtgtggtggcgcacatctggaatcccagctactccagaggctgaggcaggaaaattgcttgaagctgggaagcagaagttgcagtgagccgagattgygccactgcactccagcctgggagacagagcgagactctgtctccaaaaaaaaaaaaaaagaaaagaaaaaaaagaatcaatgagaaggggctgcctgcct

SEQ ID NO: 19166 - DNA, 201 bp, Homo sapiens
tgaaaacaagatgggctattaagtgcagaggcaaaaactccccaacaggtgaggaaacaatggcatagaattacttgtgttcagaagaattttaggatgartattccttaagcccaactactctcgggaaatgagaacaatgcaaaaatgagtttgagacatacagaaccagagcatttggaatctgaattagggcaaggg

SEQ ID NO: 19167 - DNA, 201 bp, Homo sapiens
cctgtggcagtgagaagcaaaggcagcagccggctaagcctccaggatctccctgctggaactagaaagtccaagtggcccccttcttccctctttttttkgttttgtttgttttgttttttgtttgtttgcttttgtttttgttttcttcaagatggggtgtcactctgttgcccaggctggagtgcaatggtgcaatct

SEQ ID NO: 19168 - DNA, 201 bp, Homo sapiens
ggttgtaaatgcagtgccaacaggtgccaggtagataacaacgtaagcaatgagggctggatgggaggggataaatcccagatgacactcgcttcccttcrggggatgcaacacagaggggtgggaaccagcacaatctgcagaactcaagcccctgctgaggtgggacccacccagcctgtcaccatcaggactgaaggg

SEQ ID NO: 19169 - DNA, 201 bp, Homo sapiens
tgcaatggtgcaatcttggctcactgcaacctcagtatcccgggttcaagcgattcttctgcctcagcctccccagtagctgggattacaggtgcacaccrccatgcctggctcatttttcccttcctttttggattcgctgtgcttcaaggcactgaggccatgaggcagggtttgcagatacagggtaactacagccct

SEQ ID NO: 19170 - DNA, 201 bp, Homo sapiens
ttaaacactggcaacacatattgaaaatcttttaagggcaaaaattaacccaaacacacatggtctccaagctgtctgtgagcaattttattctaagagakgttgattggggtaacttggtgtaagggaaagaatcagaaagatttgggctgtatgcaatttagtgctgctgaataaattacttgaccaagctgagataat

SEQ ID NO: 19171 - DNA, 201 bp, Homo sapiens
gcaatggtgcaatcttggctcactgcaacctcagtatcccgggttcaagcgattcttctgcctcagcctccccagtagctgggattacaggtgcacaccascatgcctggctcatttttcccttcctttttggattcgctgtgcttcaaggcactgaggccatgaggcagggtttgcagatacagggtaactacagccctg

SEQ ID NO: 19172 - DNA, 201 bp, Homo sapiens
ttccccaaatgctcaattcagggaaggtggatgatttatattagactcacatgatgaaggagcagtagctccacctagtggaaacattgaggttgaaaagktcatgttcggggatgatgctattttacaaagtcaagatatttcgtgtccctccgggaagccttccttgatccgagttatgctttctcttaacaatctgtt

SEQ ID NO: 19173 - DNA, 201 bp, Homo sapiens
atatatttttggaagccaggaacaatgttttgttcaccactgtatccccactgccttgtatgtggtgaaaccaaagggttacttttacacttaatctatarcaccagactcaggggaggtctgggaagaatgggaaaacgttttccctctgctgtctgatgccatggttttttctagctggtatctgcaatttggaaggct

SEQ ID NO: 19174 - DNA, 201 bp, Homo sapiens
cgctgcaaccctccacctcccgtgctcaagtgatcctcccacctcagactctcaagtagctgggactacatgcatgtgccactatacctggctaagttttrtgttttttgtagaaatggggttttgccatgttgcccaggctattcgcaaactccagggctcaagtgattcacctgcctcagcctcccaaagtgctgggat

SEQ ID NO: 19175 - DNA, 201 bp, Homo sapiens; identical to SEQ ID NO: 2129

SEQ ID NO: 19176 - DNA, 201 bp, Homo sapiens
tagaacataaaaagaccttaaagaccatctactttaaactctgatttacccactgttagtctacatttcagctcatcaacttggtgtggacggcaatttcygctgcaaatttgagatgcctaggatgttttctaaacgatgcatacgtgagccctcactccctgagattctgatataattagactggaatgtggtccaggc

SEQ ID NO: 19177 - DNA, 201 bp, Homo sapiens
cgcccccgccccaaggctcaggtaaaggggagagcaaagtgtggagtttgttccctctagtggtcagtattagcactgcatccaggcgggcctgtctcagrcgagcccaggagtcagcaaaagtggaattcagcactgaatcatgcccagaacccccgcaatctattggctgtgctttggccccttttcccaacacacaca

SEQ ID NO: 19178 - DNA, 201 bp, Homo sapiens
tgaaaacaagatgggctattaagtgcagaggcaaaaactccccaacaggtgaggaaacaatggcatagaattacttgtgttcggaagaattttaagatgartattccttaagcccaactactctcgggaaatgagaacaatgcaaaaatgagtttgagacatatggaaccagagcatttggaatctgaattagggcaaggg

SEQ ID NO: 19179 - DNA, 201 bp, Homo sapiens
ccgtcagtggccccatgcataaatgtacacagaaacaggtgggggcaacagtgggagagaaggggccagggtataaaaagggcccacaagagaccagctchaggatcccaaggcccaactccccgaaccactcagggtcctgtggacagctcacctagctgcaatggctacaggtaagcgcccctaaaatccctttgggca

SEQ ID NO: 19180 - DNA, 201 bp, Homo sapiens
cacatggtctccaagctgtctgtgagcaattttattctaagagatgttgattggggtaacttggtgtaagggaaagaatcagaaagatttgggctgtatgyaatttagtgctgctgaataaattacttgaccaagctgagataataatatattgctttacaaggattatgtgaggataaatgcaatggtatttttgacata

SEQ ID NO: 19181 - DNA, 201 bp, Homo sapiens
atattatagtactcaagaaattgtagttatttctgcattgaatttttggatgttttgtgttttctgatggagtgtctaaatacctgtagtgaaattatatwgttttcctaatgacaattaggaaatagtaaacatctgagatgtttattatttccaaataagcactaaagagcggtggttagttaagagtttactctccca

SEQ ID NO: 19182 - DNA, 201 bp, Homo sapiens
aattatattgttttcctaatgacaattaggaaatagtaaacatctgagatgtttattatttccaaataagcactaaagagcggtggttagttaagagtttrctctcccaagcaccttggctaagtgactggtgacctataaatcgatgctaagatgctcacaggaactctagtatccaaaaatgatttcatgaagtcagga

SEQ ID NO: 19183 - DNA, 201 bp, Homo sapiens
gctggtcatggtggtgggcgcctgtaatcccagctactcttaatctatagaggctgaggcagagaattgcttcaacccgggggtggagtttgaagtggacygaaatcacaccactgcactccagcctaggcaaagagcgagactccatctaaaaaaaaaagttataaaatgcagccatttgacataagagcttttagcaat

SEQ ID NO: 19184 - DNA, 201 bp, Homo sapiens
agttgaaataatcagaactctagagctgctgcatttctcagctcagaagacatttcttcatcttacatcattcttctactatcgggctttaaaattatggyattttggagttagaagggcctcataagtcagtctagtttcttctactttgggaatcttatcctacggcgtccattacagtcagtattccaattatgagtg

SEQ ID NO: 19185 - DNA, 201 bp, Homo sapiens
gaaccaaaggaatcactttcacaaggctcctcattctattaaaccactctcattgcaaaaaactatttcttgcacaaagctggaatcaatattcctgcaaygtccttcatttggccttaaaattatttagaaatctcagtctttagaagtcgatggaatgagcacaattataattatctctcagcttgcgtgttttaaaag

SEQ ID NO: 19186 - DNA, 201 bp, Homo sapiens
ccaaggacagggaaagaagctgaaacataaaatcatatgaacattttcacaagaagattcctcttgaagcttcaaggaaattgtttacagacagaagaaartatgcacttattgatgaaaagggagagtaaagattggaactttaacctagatgcccatatgggtaaaaaaaagaaaactggcaaatgcgaactcacagtt

SEQ ID NO: 19187 - DNA, 201 bp, Homo sapiens
ttgcgtgttttaaaaggaattgtgagccatcttaataagtatttgttgaatgcacgtgacagtggaatgacaatgtccagcgcctacttgggtggctaagrgggttctaaagtggggtggtcataacatataactgaactgcagggggagccacatgccagagactgtccacccagctcccctcgggtgtaggagaatcca

SEQ ID NO: 19188 - DNA, 201 bp, Homo sapiens
atgtttggagctcttaacctatgaggccaatttcatggaagaactctaccttctccttcagagacagaatactgagctagataggatgcccgtctggcccraagtggaatttcttaccatctgtatactcccccaagacccgcaacagatggttactgagttgaagcttgccactgatccttaatgatgtcaacaagctca

SEQ ID NO: 19189 - DNA, 201 bp, Homo sapiens
gtgagccatcttaataagtatttgttgaatgcacgtgacagtggaatgacaatgtccagcgcctacttgggtggctaagagggttctaaagtggggtggtsataacatataactgaactgcagggggagccacatgccagagactgtccacccagctcccctcgggtgtaggagaatccactcaaccactgctggttgaga

SEQ ID NO: 19190 - DNA, 201 bp, Homo sapiens
aggggggaagatttcaccactagagagggtgctctttcctgctgccatctctgggggcatctgatgcttgtgacctccagattatattgaaatagccccarctctgggcaccaggagacaggaggctcagtcctggccttctctgccttcaccttttcctgctgtgaggtttccacaaggcaccccatgccactgggccat

SEQ ID NO: 19191 - DNA, 201 bp, Homo sapiens
agttgaagcttgccactgatccttaatgatgtcaacaagctcagctctgggagctggccctccagaagcccaggtcaggggagcaagggaaagtggagatrggaacagagctctgattcctggccccatatttgatacttactcccttcaaagtcctgtccttggactacagatttagttcccagttagtaatcagaaaac

SEQ ID NO: 19192 - DNA, 201 bp, Homo sapiens
agccatcttaataagtatttgttgaatgcacgtgacagtggaatgacaatgtccagcgcctacttgggtggctaagagggttctaaagtggggtggtcatracatataactgaactgcagggggagccacatgccagagactgtccacccagctcccctcgggtgtaggagaatccactcaaccactgctggttgagaatt

SEQ ID NO: 19193 - DNA, 201 bp, Homo sapiens
tcttacaaatcaaacattgagactgagattcctaatgaatagagtgagctctaaagagaaaggtggctgggcgcggtggctcacacctgtaatcccagcaytttgggaggccaaggtggccggatcacttgaggtcaggagtttgagaccagcccagccaacatggtgaaaccccatctctacgaaaagtacaaaaattag

SEQ ID NO: 19194 - DNA, 201 bp, Homo sapiens
gtgacagtggaatgacaatgtccagcgcctacttgggtggctaagagggttctaaagtggggtggtcataacatataactgaactgcagggggagccacaygccagagactgtccacccagctcccctcgggtgtaggagaatccactcaaccactgctggttgagaattagatactagctgactttgcacattttagaac

SEQ ID NO: 19195 - DNA, 201 bp, Homo sapiens
agactgagattcctaatgaatagagtgagctctaaagagaaaggtggctgggcgcggtggctcacacctgtaatcccagcactttgggaggccaaggtggscggatcacttgaggtcaggagtttgagaccagcccagccaacatggtgaaaccccatctctacgaaaagtacaaaaattagacaggcatggtggtgtgca

SEQ ID NO: 19196 - DNA, 201 bp, Homo sapiens
tgccagagactgtccacccagctcccctcgggtgtaggagaatccactcaaccactgctggttgagaattagatactagctgactttgcacattttagaayataaaaagaccttaaagaccatctactttaaactctgatttacccactgttagtctacatttcagctcatcaacttggtgtggacggcaatttctgctgc

SEQ ID NO: 19197 - DNA, 201 bp, Homo sapiens
aggggtttccatcctgggcctggcagcagggcagcaaaggttaccttgaacaatgacagcaatgtctttgctgacagagcccagctggttagtggctgtgyagcggtaggttccagtgtggttctgggttgccttctgtggcacttcaaggtcaaagaccaccccattccaggtacacaccaaggctggagctgggtttcc

SEQ ID NO: 19198 - DNA, 201 bp, Homo sapiens
gcagggcagcaaaggttaccttgaacaatgacagcaatgtctttgctgacagagcccagctggttagtggctgtgcagcggtaggttccagtgtggttctrggttgccttctgtggcacttcaaggtcaaagaccaccccattccaggtacacaccaaggctggagctgggtttccctttgggacgcaggtgagcgtgtgt

SEQ ID NO: 19199 - DNA, 201 bp, Homo sapiens
gtgtggttctgggttgccttctgtggcacttcaaggtcaaagaccaccccattccaggtacacaccaaggctggagctgggtttccctttgggacgcaggygagcgtgtgttccatcccttccagccaggtctgtttggcagagcaactggattcctctaaccgtggttggtctgcagaaacagtatcccaaggagctgag

SEQ ID NO: 19200 - DNA, 201 bp, Homo sapiens
gttctgggttgccttctgtggcacttcaaggtcaaagaccaccccattccaggtacacaccaaggctggagctgggtttccctttgggacgcaggtgagcktgtgttccatcccttccagccaggtctgtttggcagagcaactggattcctctaaccgtggttggtctgcagaaacagtatcccaaggagctgagttcag

SEQ ID NO: 19201 - DNA, 201 bp, Homo sapiens
gatccacccacctcagtcttccaaagtgctgggattacaggcatgagccaccatgcccggcctggagaaaggactttaaatgacgcaatgtgggaagagcmaggttgtggagatctgctgccctggctgaggtagctcatgcaatcagtctctctgagcctcagtctcctgatctgtgaaatgggatgatactcatacctc

SEQ ID NO: 19202 - DNA, 201 bp, Homo sapiens
aggcaggcctttgacaactggataagctctacacaggtctggaaaggaggaagagacaaaagaggacgggcttccatggctggatagggcctctttcggcrtgatgtgttctgagttccaaagctgggaagagactcaaatcttcttttttttttctttttttttaattattattattcttttactttaagttttagggta

SEQ ID NO: 19203 - DNA, 201 bp, Homo sapiens
atcccaaggcccaactccccgaaccactcagggtcctgtggacagctcacctagctgcaatggctacaggtaagcgcccctaaaatccctttgggcacaaygtgtcctgaggggagaggcagcgacctgtagatgggacgggggcactaaccctcaggtttggggcttctgaatgtgagtatcgccatgtaagcccagtat

SEQ ID NO: 19204 - DNA, 201 bp, Homo sapiens
tgctgccctggctgaggtagctcatgtaatcagtctctctgagcctcagtctcctgatctgtgaaatgggatgatagtcatagctcctacacaagacaagyggcaggtcagacgtgagaatgcacaggcaggcccttggcaactggataagctctacacaggtctggaaaggaggaggagacaaaagaggaggggcttcca

SEQ ID NO: 19205 - DNA, 201 bp, Homo sapiens
caagcccgtcagtggccccatgcataaatgtacacagaaacaggtgggggcaacagtgggagagaaggggccagggtataaaaagggcccacaagagaccrgctcaaggatcccaaggcccaactccccgaaccactcagggtcctgtggacagctcacctagctgcaatggctacaggtaagcgcccctaaaatcccttt

SEQ ID NO: 19206 - DNA, 201 bp, Homo sapiens
ggggcatgatcccagcatgtgtgggaggagcttctaaattatccattagcacaagcccgtcagtggccccatgcataaatgtacacagaaacaggtggggkcaacagtgggagagaaggggccagggtataaaaagggcccacaagagaccagctcaaggatcccaaggcccaactccccgaaccactcagggtcctgtgg

SEQ ID NO: 19207 - DNA, 201 bp, Homo sapiens
ggctatcctgacatccttcgccgcgtgcaggttggccaccatggcctgctgccagagggcacccacgtgacccttaaagagaggacaagttgggtggtatytctggctgacactctgtgcacaaccctcacaacactggtgacggtgggaagggaaagatgacaagccagggggcatgatcccagcatgtgtgggaggagc

SEQ ID NO: 19208 - DNA, 201 bp, Homo sapiens
acaccagaatgtcaccctgaccatccttgagaggataaacggccaggcacggtggctcacgccagttatctcagcactttggagggctgaggcgggaggasgtcacaagttcgagacaagcctggccaacatggtggcaccccgtctcttactaaaaatacaaaaattaccaggtgtgatggtgcacacctgtattcccag

SEQ ID NO: 19209 - DNA, 201 bp, Homo sapiens
agaacataaaaagaccttaaagaccatctactttaaactctgatttacccactgttagtctacatttcagctcatcaacttggtgtggacggcaatttctsctgcaaatttgagatgcctaggatgttttctaaacgatgcatacgtgagccctcactccctgagattctgatataattagactggaatgtggtccaggca

SEQ ID NO: 19210 - DNA, 201 bp, Homo sapiens
atttgagatgcctaggatgttttctaaacgatgcatacgtgagccctcactccctgagattctgatataattagactggaatgtggtccaggcaagagtartttgaaaactttcccaggtgattctaacatgtaaacaaggttgagaaccactgtgttagggaccgcaaagatgagacccatgtgttcacagctgttgtac

SEQ ID NO: 19211 - DNA, 201 bp, Homo sapiens; identical to SEQ ID NO: 2495

SEQ ID NO: 19212 - DNA, 201 bp, Homo sapiens
taaacgatgcatacgtgagccctcactccctgagattctgatataattagactggaatgtggtccaggcaagagtagtttgaaaactttcccaggtgattytaacatgtaaacaaggttgagaaccactgtgttagggaccgcaaagatgagacccatgtgttcacagctgttgtactggtggaatagggagaaaggagaa

SEQ ID NO: 19213 - DNA, 201 bp, Homo sapiens
ggatggtggctgccagtggctgtggggagggatggaatagggagctatttaatgagcacagggtttcagctgtgcaagatgaaaagggttctggagatggwtggtggtgagggttgcatgacgatgtcaatgtacttgacatgactgaactgtacacgtaaaatggttaagatggaaacgtttatatcttctcacaactaa

SEQ ID NO: 19214 - DNA, 201 bp, Homo sapiens
caggtctgtttggcagagcaactggattcctctaaccgtggttggtctgcagaaacagtatcccaaggagctgagttcagtgcaccacactccctccctacttcaccccctgctccctctcctcccctcacccaaatgctgtcccctccacccaacagctttccttcccaagggagcactagcagctccctgctttgagcc

SEQ ID NO: 19215 - DNA, 201 bp, Homo sapiens
cacagggtttcagctgtgcaagatgaaaagggttctggagatggatggtggtgagggttgcatgacgatgtcaatgtacttgacatgactgaactgtacasgtaaaatggttaagatggaaacgtttatatcttctcacaactaaaaattgttaatactttatttttgtttttgtttttgagacagaggctggagtgcagt

SEQ ID NO: 19216 - DNA, 201 bp, Homo sapiens
ctccctgctttgagccaactcttctttcccactttccgtatgggcagggagtcccagatgaaacctagggtgttcttatggatttggactaaatgataacsctgctctgtccatggtggccctggggcccctgcttcccatgtttgtttctcggtgggtaaggagctaggtaacggtgaactcagagatgaggatttttct

SEQ ID NO: 19217 - DNA, 201 bp, Homo sapiens
atgacgatgtcaatgtacttgacatgactgaactgtacacgtaaaatggttaagatggaaacgtttatatcttctcacaactaaaaattgttaatactttrtttttgtttttgtttttgagacagaggctggagtgcagtggtgggatcttggctcactgcaacctccgcctcctcccgggttcaagtgattctcatgcct

SEQ ID NO: 19218 - DNA, 201 bp, Homo sapiens
cccagatgaaacctagggtgttcttatggatttggactaaatgataaccctgctctgtccatggtggccctggggcccctgcttcccatgtttgtttctcrgtgggtaaggagctaggtaacggtgaactcagagatgaggatttttctacttttctttttggttttttttggttgtttgtttgttttggagacaaagtca

SEQ ID NO: 19219 - DNA, 201 bp, Homo sapiens
tgccatgttgcccaggctattcgcaaactctggggctcaagtgattcgcccgcctcagcctcccaaagtgctgggattacacgctgagccaccgccccggsctgaatttcagttttgaaagcagtttacataggctgccaccctgagctaatgcaccccctgccccgggctggttgtttatgctatcaacacggtattttt

SEQ ID NO: 19220 - DNA, 201 bp, Homo sapiens
tggagtgcagtggtgggatcttggctcactgcaacctccgcctcctcccgggttcaagtgattctcatgcctcagcctcctgagtagctgggattataagygtgcaccaccacacagggcagatgtttgtatttttggtaaagacagggtttcgccatgttggccaggctggtctcaaactcctggcctcaggtgatccac

SEQ ID NO: 19221 - DNA, 201 bp, Homo sapiens
cttatggatttggactaaatgataaccctgctctgtccatggtggccctggggcccctgcttcccatgtttgtttctcggtgggtaaggagctaggtaacrgtgaactcagagatgaggatttttctacttttctttttggttttttttggttgtttgtttgttttggagacaaagtcagtctcactccttcgcccagggt

SEQ ID NO: 19222 - DNA, 201 bp, Homo sapiens
tggccaggctggtctcaaactcctggcctcaggtgatccacccttcttggcctcccaaagtgataggattacaggcgggagccaccaggcctggctcttawtggtattttctaatgaaaactcttcctgaagataagattagcaagactcacacaaggaagagttcagcaggcagagctccagtcatccttgacccctggc

SEQ ID NO: 19223 - DNA, 201 bp, Homo sapiens
tatggatttggactaaatgataaccctgctctgtccatggtggccctggggcccctgcttcccatgtttgtttctcggtgggtaaggagctaggtaacggkgaactcagagatgaggatttttctacttttctttttggttttttttggttgtttgtttgttttggagacaaagtcagtctcactccttcgcccagggtgg

SEQ ID NO: 19224 - DNA, 201 bp, Homo sapiens
ctcaaactcctggcctcaggtgatccacccttcttggcctcccaaagtgataggattacaggcgggagccaccaggcctggctcttattggtattttctawtgaaaactcttcctgaagataagattagcaagactcacacaaggaagagttcagcaggcagagctccagtcatccttgacccctggcataatgttttact

SEQ ID NO: 19225 - DNA, 201 bp, Homo sapiens
ggagctaggtaacggtgaactcagagatgaggatttttctacttttctttttggttttttttggttgtttgtttgttttggagacaaagtcagtctcactycttcgcccagggtggagtgcagtggcgcgatctcggctcatgacaacctctgcctcccaggttcaagcaattcttgtgcctcagccgctccagtaactag

SEQ ID NO: 19226 - DNA, 201 bp, Homo sapiens
cctcccaaagtgataggattacaggcgggagccaccaggcctggctcttattggtattttctaatgaaaactcttcctgaagataagattagcaagactcrcacaaggaagagttcagcaggcagagctccagtcatccttgacccctggcataatgttttactgactctgtcattttttttgaatttaccctaacctaaa

SEQ ID NO: 19227 - DNA, 201 bp, Homo sapiens
taacggtgaactcagagatgaggatttttctacttttctttttggttttttttggttgtttgtttgttttggagacaaagtcagtctcactccttcgcccwgggtggagtgcagtggcgcgatctcggctcatgacaacctctgcctcccaggttcaagcaattcttgtgcctcagccgctccagtaactaggattacaag

SEQ ID NO: 19228 - DNA, 201 bp, Homo sapiens
cggtgaactcagagatgaggatttttctacttttctttttggttttttttggttgtttgtttgttttggagacaaagtcagtctcactccttcgcccaggstggagtgcagtggcgcgatctcggctcatgacaacctctgcctcccaggttcaagcaattcttgtgcctcagccgctccagtaactaggattacaagcgc

SEQ ID NO: 19229 - DNA, 201 bp, Homo sapiens
ttttggagacaaagtcagtctcactccttcgcccagggtggagtgcagtggcgcgatctcggctcatgacaacctctgcctcccaggttcaagcaattctygtgcctcagccgctccagtaactaggattacaagcgcatgccaccacacccggctaatttttctatttttagtagagatcagtttcaccatgttggccac

SEQ ID NO: 19230 - DNA, 201 bp, Homo sapiens
acctgcggagttatgcagtggtccccaactagggcccctgccaccctcattcctaagggaggctggagacttcttccatggccgaaaatccacatcgaagyccccagaactggctaaaaggacctgtcatgggggctccctgtcccagctgacattggaggaaggatggtgggggaggcagaaagctacatggagctcagg

SEQ ID NO: 19231 - DNA, 201 bp, Homo sapiens
cacattttaaaatataaaaagaccttaaagaccatctactttaaactctttgatttacccactgttagtctacatttcagctcatcaacttggtgtggacrgcaatttccgctgcaaatttgagatgcctagggtgttttctaaacgatgcattcgtgagccctcactccctgagattctgatataattagactggaatgt

SEQ ID NO: 19232 - DNA, 201 bp, Homo sapiens; identical to SEQ ID NO: 2236

SEQ ID NO: 19233 - DNA, 201 bp, Homo sapiens
ggtataaaaagggcccacaagagaccagctcaaggatcccaaggcccaactccccgaaccactcagggtcctgtggacagctcacctagctgcaatggctrcaggtaagcgcccctaaaatccctttgggcacaatgtgtcctgaggggagaggcagcgacctgtagatgggacgggggcactaaccctcaggtttggggc

SEQ ID NO: 19234 - DNA, 201 bp, Homo sapiens
aaggggccagggtataaaaagggcccacaagagaccagctcaaggatcccaaggcccaactccccgaaccactcagggtcctgtggacagctcacctagcbgcaatggctacaggtaagcgcccctaaaatccctttgggcacaatgtgtcctgaggggagaggcagcgacctgtagatgggacgggggcactaaccctca

SEQ ID NO: 19235 - DNA, 201 bp, Homo sapiens
tccttgacccctggcataatgttttactgactctgtcattttttttgaatttaccctaacctaaaatgaccacttctgaatttcttccatgagcattgtcsaaatacacatggtgggttttgtccctttatacacagttgagagcagaactgaccccttcccttttcttctgaattatagggtctgggcttctaggccaag

SEQ ID NO: 19236 - DNA, 201 bp, Homo sapiens
gttaatagtttctttttgttttgtttttgtttttgtttttgagacagaggctggagtgcagtggtgggatcttggctcactgcaacctccgcctcctcccrggttcaagtgattctcatgcctcagcctcctgagtagctgggattataagtgtgcaccaccacacagggcagatttttgtatttttggtaaagacagggt

SEQ ID NO: 19237 - DNA, 201 bp, Homo sapiens
gaatttcttccatgagcattgtccaaatacacatggtgggttttgtccctttatacacagttgagagcagaactgaccccttcccttttcttctgaattayagggtctgggcttctaggccaagacaagctgacactttgcctggatgcttctttaattcagaaggccctggagtgctgaggcacacaatgagcaccgctg

SEQ ID NO: 19238 - DNA, 201 bp, Homo sapiens
ggactggtcaccctattagtagtcctaaatcttaggggaccaaactggggggaaagtaggggaaggagcaagaaaaagagtagaaaaatcagaaagctgcrcacggtgtatatgacttttgatggtgctcaaggttaccatggatttctgattcttgctttgagtttactgtgattataatgatgtgcttaattaccacca

SEQ ID NO: 19239 - DNA, 201 bp, Homo sapiens
atgtgcttaattaccaccagaattatcagtgtaatcacaaaaaccaacaaatgtaaacacatgtctccagcaacatgctagtttattgcaagtattatgtsatttctttctaagtataatcttctaaggtaaatactattattaatcctatggtaagaagtcccactaaagatgtaacttactctttctcaggtctaaaga

SEQ ID NO: 19240 - DNA, 201 bp, Homo sapiens
gaacagcccacagcacagtgccctcccagcaggtgatgagtctggggtgctggtccgataatgtttcaggaatgatggcagaaaatggagctctgtcttcygctctgaaagtggggagatggcagggccccagcattcacatcctaggccacaggggtgtgggttttcaatgttggttgccaacaccacagccaaccactt

SEQ ID NO: 19241 - DNA, 201 bp, Homo sapiens
gataaaattttggagtattaaaggccactcttcctctggagataatcaagatacctgcaatttaagcgtgagctggttgctttaatgttcagaaagaataygatcaaaatcatttaggggtggggcctcctcctatagacaatgaggcagctacccttagaagctctatcatactggaaaagagatatgagacccttcctg

SEQ ID NO: 19242 - DNA, 201 bp, Homo sapiens
tctgaaagtggggagatggcagggccccagcattcacatcctaggccacaggggtgtgggttttcaatgttggttgccaacaccacagccaaccacttctrgaagcatttgcttgtttgcttgcttgtgtttctacagagtcaagtgctagatgctcttaaactcaggggggaagatttcaccactagagagggtgctctt

SEQ ID NO: 19243 - DNA, 201 bp, Homo sapiens
agcctggccaacatgatgaaaccctgtctctactaataacacaaaaattagccgggtgtggtggcagacacctgtaatcccagctactctagaggttgagmagggaaaattgcttgaagccgggaagcagaagttgcagtgagccgagattgcgccactgcactccagcctgggagacagagcgagactctgtctccaaaa

SEQ ID NO: 19244 - DNA, 201 bp, Homo sapiens
ttgcttgtttgcttgcttgtgtttctacagagtcaagtgctagatgctcttaaactcaggggggaagatttcaccactagagagggtgctctttcctgctstcatctctgggggtatctgatgcttgtgacctccagattatattgaagtagccccaaccctgggcaccaggagacaggaggctcagtcctggccttctct

SEQ ID NO: 19245 - DNA, 201 bp, Homo sapiens
ccagaagcccaggtcaggggagcaagggaaagtggagatgggaacagagctctgattcctagccccatatttgatacttactcccttcaaagtcctgtccmtggactacaaatttagctcccagttagtaatcaaaaacccatgaaatatgagttgtatttctaagatatgcctgactgtagtatgatgtttaagagaaaa

SEQ ID NO: 19246 - DNA, 201 bp, Homo sapiens
cctggccaacatgatgaaaccctgtctctactaataacacaaaaattagccgggtgtggtggcagacacctgtaatcccagctactctagaggttgagaagggaaaattgcttgaagccgggaagcagaagttgcagtgagccgagattgcgccactgcactccagcctgggagacagagcgagactctgtctccaaaaaa

SEQ ID NO: 19247 - DNA, 201 bp, Homo sapiens
cttaaactcaggggggaagatttcaccactagagagggtgctctttcctgctctcatctctgggggtatctgatgcttgtgacctccagattatattgaartagccccaaccctgggcaccaggagacaggaggctcagtcctggccttctctgccttcaccttgtcctgctctgaggtttccacaaggcaccccatgcca

SEQ ID NO: 19248 - DNA, 201 bp, Homo sapiens
ggaacccagatctgcagacccgcttggtttgagggtactgtgtgggaccatctgtccacactgacaccctgtggcagtgagaagcaaaggcagcagccggytgagcctccaggatctccctgctggaactagaaagtccaagtggcccccttcttccctctttttttggttttgtcttgttttttgtttgtttgcttttgt

SEQ ID NO: 19249 - DNA, 201 bp, Homo sapiens
atgcttgtgacctccagattatattgaagtagccccaaccctgggcaccaggagacaggaggctcagtcctggccttctctgccttcaccttgtcctgctstgaggtttccacaaggcaccccatgccactgggccattctcacctgagaattgagaaagaacaatctgccccttatggaaagacaaaatgaggcaaaggg

SEQ ID NO: 19250 - DNA, 201 bp, Homo sapiens
tagctggtcatggtggtgggcgcctgtaatcccagctactcttaatctatagaggctgaggcagagaattgcttcaacccgggggtggagtttgaagtggrccgaaatcacaccactgcactccagcctaggcaaagagcgagactccatctaaaaaaaaaagttataaaatgcagccatttgacataagagcttttagca

SEQ ID NO: 19251 - DNA, 201 bp, Homo sapiens
acaggtgcacaccggcatgcctggctcatttttcccttcctttttggattcgctgtgcttcaaggcactgaggccatgaggcagggtttgcagatacaagrtaactatagccttgatgtggctgatcctgacaccgaaatgtctgtggatccctgcatggggcagctctatactcctgtctcttaaacctgcttcttaact

SEQ ID NO: 19252 - DNA, 201 bp, Homo sapiens
ttgtcctgctctgaggtttccacaaggcaccccatgccactgggccattctcacctgagaattgagaaagaacaatctgccccttatggaaagacaaaatsaggcaaagggccccttgtgttgggggcaggatccctgcactcagagggatatagaagctgaaataactgggttgggagcagtggctcacgcaagtaatct

SEQ ID NO: 19253 - DNA, 201 bp, Homo sapiens
acatcataaaaccacttttatttttaccatagcaacattccagtgaacatttcttgactgatttgggagaaaacatctggttctgtgattcctcacgcctwctccgagggtgaatatactctttcccaaggacagggaaagaagctgaaacataaaatcatatgaacattttcacaagaagattcctcttgaagcttcaag

SEQ ID NO: 19254 - DNA, 201 bp, Homo sapiens
catggggcagctctatactcctgtctcttaaacctgcttcttaacttacttccccaaatgctcaattcagggaaggtggatgatttatattagactcacakgatgagagagcagtagctccacctagtggaaacattgaggttgaaaaggtcatgttccgggatgatgctattttacaaagtcaagatatttcgtgtccct

SEQ ID NO: 19255 - DNA, 201 bp, Homo sapiens
ttttatttggggttgtaaatgcagtgccaacaggttccaggtagataacaatgtaagcaatgagggctggatgggaggggataaatcccagatgacactcrcttcccttcgggggatgcaacacagaggggtgggaaccagcacaatctgcagaactcaggcccctgctgaggtgggacccacccagcctgtcaccatcag

SEQ ID NO: 19256 - DNA, 201 bp, Homo sapiens
gccaacatagtgaaacccccgtctctactaaaaaagtgcaaatcttagcccggcatagtggtggacgcctgtaatcccagctacttgggaggctgaggcgrgagaatcaccggaacccaaaggtggaggttgctgtgaagcaacatcatgccactgaactccagcctgggtgacagaatgagactccatctcaaaaaaaaa

SEQ ID NO: 19257 - DNA, 201 bp, Homo sapiens
gcaggtggatcacgaggtcaggagttcgagaccatcctggctaacacagtgaaaccccacctctaaaaatacaaaaaaattagctgggcaaggtggcgggygcctgtactcccagctactcgggaggctgaggcaggagaatgtcatgaaccccagggggcagagcttgcagtgagccgagatcgcgccactgcactccag

SEQ ID NO: 19258 - DNA, 201 bp, Homo sapiens
ctctctgagcctcagtctcctgatctgtgaaatgggatgatagtcatagctcctacacaagacaagtggcaggtcagacgtgagaatgcacaggcaggccyttggcaactggataagctctacacaggtctggaaaggaggaggagacaaaagaggaggggcttccatggctggatagggcgtcttttggcgtgatgtgtt

SEQ ID NO: 19259 - DNA, 201 bp, Homo sapiens
ctgagcctcagtctcctgatctgtgaaatgggatgatagtcatagctcctacacaagacaagtggcaggtcagacgtgagaatgcacaggcaggcccttgrcaactggataagctctacacaggtctggaaaggaggaggagacaaaagaggaggggcttccatggctggatagggcgtcttttggcgtgatgtgttctga

SEQ ID NO: 19260 - DNA, 201 bp, Homo sapiens
tacaggacagatgtacacaaataggaatgcagcctgccattgtgtttcttcctttctcctctatcccttctcccatccctgggaaaccacagtagcagaastctcattcaatcaaatagctgtcaattatatgagttgcacttttctcttcctgaacagcaaactggctttcctcctctttgtcctcctctttctgcctgt

SEQ ID NO: 19261 - DNA, 201 bp, Homo sapiens
tgtgcacaaccctcacaacactggtgacggtgggaagggaaagatgacaagccagggggcatgatcccagcatgtgtgggaggagcttctaaattatccaytagcacaagcccgtcagtggccccatgcataaatgtacacagaaacaggtgggggcaacagtgggagagaaggggccagggtataaaaagggcccacaag

SEQ ID NO: 19262 - DNA, 201 bp, Homo sapiens
ggacatttgagttgtttgcttggcactgtcctctcatgcattgggtccactcagtagatgcttgttgaattcctgggcctggggctgtgtcagctgcctcrtcccatcaccttctggcttattctctccctccgtatcttagctttttacttcatgggaatgtttccaattcgaaatttctattttaccgttatatattta

SEQ ID NO: 19263 - DNA, 201 bp, Homo sapiens
atctgaaaaggaggaggagaaaaaagaggaggggcttccatggctggacagggcatctttctttttctttttctttttttttttttttttttttttgaggkggagtcttgctctgttgccaaggttggagtgcagcagcacgatctccgctcactgcaagctctgcctcccggattcacgccattctcctgcctcagcctc

SEQ ID NO: 19264 - DNA, 201 bp, Homo sapiens
aaaaatacaaaacattagccgggcatggcggtaggctcctgtagtccgagctactagggagcctgaggcaggagaatggcatgaacccaggggggcggagsttgcagtgagccaagatcgcgccactgcactccagcctgggcgacagagcaagactcggtctcaaaaaaaaaaaaaaaagaaatccagcctcaaagagct

SEQ ID NO: 19265 - DNA, 201 bp, Homo sapiens
tgcagtgcatgatctcaactcgctgcaaccctccacctcccgtgctcaagtgatcctcccacctcagactctcaagtagctgggactacatgcatgtgccmctatacctggctaagttttgtgttttttgtagaaatggggttttgccatgttgcccaggctattcgcaaactccagggctcaagtgattcacctgcctca

SEQ ID NO: 19266 - DNA, 201 bp, Homo sapiens
tcagtggccccatgcataaatgtacacagaaacaggtgggggcaacagtgggagagaaggggccagggtataaaaagggcccacaagagaccagctcaagsatcccaaggcccaactccccgaaccactcagggtcctgtggacagctcacctagctgcaatggctacaggtaagcgcccctaaaatccctttgggcacaa

SEQ ID NO: 19267 - DNA, 201 bp, Homo sapiens
tgccatgttgcccaggctattcgcaaactccagggctcaagtgattcacctgcctcagcctcccaaagtgctgggattacaggcgtgagccaccacaccarcctgaatttcagttttgaaagcaggtcaaataggctgctgccctcagttaatgcacccccggccctgggctggttgtttatgctatcaacacggtatttt

SEQ ID NO: 19268 - DNA, 201 bp, Homo sapiens
aaattgtttacagacagaagaaaatatgcacttattgatgaaaagggagagtaaagattggaactttaacctagatgcccatatgggtaaaaaaaagaaamctggcaaatgcgaactcacagttgatcactctatgaaaaggaattcagagatgtttggagctcttaacctatgaggccaatttcatggaagaactctacc

SEQ ID NO: 19269 - DNA, 201 bp, Homo sapiens
ggtgctggtccgataatgtttcaggaatgatggcagaaaatggagctctgtcttccgctctgaaagtggggagatggcagggccccagcattcacatcctwggccacaggggtgtgggttttcaatgttggttgccaacaccacagccaaccacttctggaagcatttgcttgtttgcttgcttgtgtttctacagagtca

SEQ ID NO: 19270 - DNA, 201 bp, Homo sapiens
gtgctggtccgataatgtttcaggaatgatggcagaaaatggagctctgtcttccgctctgaaagtggggagatggcagggccccagcattcacatcctargccacaggggtgtgggttttcaatgttggttgccaacaccacagccaaccacttctggaagcatttgcttgtttgcttgcttgtgtttctacagagtcaa

SEQ ID NO: 19271 - DNA, 201 bp, Homo sapiens
tgttgttgttgttgtcgttgttgtggttgttgaaatggagtctcactctggcgcccaggctggagtgccatggcccaatcttggctcacggcaacctctgmgtcctgggttcaagcgattctacctcctcaccctccggagtaactgggattgcaggcttctgccaccacacacagctacttttgtatttttaagagatgg

SEQ ID NO: 19272 - DNA, 201 bp, Homo sapiens
gggaagagcaaggttgtggagatctgctgccctggctgaggtagctcatgcaatcagtctctctgagcctcagtctcctgatctgtgaaatgggatgatastcatagctcctacacaagataagtggcaggtcagacgtgagaatgcacaggcaggcctttgacaactggataagctctacacaggtctggaaaggaggaa

SEQ ID NO: 19273 - DNA, 201 bp, Homo sapiens
ctgcaacctccgcctcctcccgggttcaagtgattctcatgcctcagcctcctgagtagctgggattataagcgtgcaccaccacacagggcagatgtttktatttttggtaaagacagggtttcgccatgttggccaggctggtctcaaactcctggcctcaggtgatccacccttcttggcctcccaaagtgataggat

SEQ ID NO: 19274 - DNA, 201 bp, Homo sapiens
acctgtgccatgctggtgtgctgcacccattaacttgtcatttagcattaggtatatctcctaaagctatccctccccctccccccaccccacaacagtcyccagagtatgatgttcccctgagactcaaatattcaagagctcttccaaccttgagattctctgatggtttcagggctgtgggaggaagcgcttgtggtc

SEQ ID NO: 19275 - DNA, 201 bp, Homo sapiens
cctggctgaggtagctcatgcaatcagtctctctgagcctcagtctcctgatctgtgaaatgggatgatagtcatagctcctacacaagataagtggcagrtcagacgtgagaatgcacaggcaggcctttgacaactggataagctctacacaggtctggaaaggaggaagagacaaaagaggacgggcttccatggctg

SEQ ID NO: 19276 - DNA, 201 bp, Homo sapiens
tgagaggcctgggccagttgtggtgccacctgctcctaattccaaccagtcatctaaaaagtgtttatcatgagccagtcacaaaaagacaaatactctcygattccagtcagatgaggtactcagagcagtcaaattcatagagacaaaaagtaggatggtggctgccagtggctgtggggagggatggaatagggagct

SEQ ID NO: 19277 - DNA, 201 bp, Homo sapiens
agcaattccctgccacagccacctgagtagctcggattacatgcgcctgccaccacgcgcagctaatttttgtatttttagtagagacgggatttcaccaycttgaccaggttggtcttaaactcctgacctaatgatccacccaccttggcctcccaaagtggtgggattacaggtgtgagccaacgcacccgacctatc

SEQ ID NO: 19278 - DNA, 201 bp, Homo sapiens
aataaaatgtctgcaaatagccacaggacaggtcaaaggaaggagaggctatttccagctgagggcaccccatcaggaaagcaccccagacttcctacaaytactagacacatctcgatgcttttcacttctctatcaatggatcgtctccctggagaataatccccaatgtgaaattacttagcacgtcaagttaggtag

SEQ ID NO: 19279 - DNA, 201 bp, Homo sapiens
agtggacacgcagaagtattgatcatcttcctcacctcccctaggagagcccttgggaatccccatataatattctctgaagacctcaatccaatgagccragtaattgactcggtagcaaactcatggaaaggacattagaagccaaaaggaggtagagtatgtcccagtacaataaccagcctctgatctcaaggaaga

SEQ ID NO: 19280 - DNA, 201 bp, Homo sapiens; identical to SEQ ID NO: 2225

SEQ ID NO: 19281 - DNA, 201 bp, Homo sapiens
tttccacagcaggcacacagaaccctagagttagtcgaggttggacataggaagggcttccaaacacacagagaaattcatggatcctaaattataaaggsaggttctttaaaagaaccaagatgattctgagatttatcctgagcttttttttttttttttttttggatgcagagtctcgctctgtcgcccaggctggag

SEQ ID NO: 19282 - DNA, 201 bp, Homo sapiens; identical to SEQ ID NO: 2131

SEQ ID NO: 19283 - DNA, 201 bp, Homo sapiens
ccagggatctggcctcaagtgatgccccaacagtgggcgacttcccagtactgttaggagaatcccaagtctaattcaaagttgattttttactagcaatkaatgatagacatggtctccattgctcaaggctctgggaagatctagactagagaaaacgatcaccgacttctacccacacctgtgggcctcagttcttcc

SEQ ID NO: 19284 - DNA, 201 bp, Homo sapiens
cctgctcctggcttttggcctgctctgcctgccctggcttcaagagggcagtgccttcccaaccattcccttatccaggctttttgacaacgctatgctcygcgcccatcgtctgcaccagctggcctttgacacctaccaggagtttgtaagctcttggggaatgggtgcgcatcaggggtggcaggaaggggtgacttt

SEQ ID NO: 19285 - DNA, 201 bp, Homo sapiens
atccacatctaagtccccggcactagcaaaaaggccctgtcatgggggctccctgccccagttgagattggaggaacatggaagaagctaaaataactaawtaactcagtagcatcacactacctgctctggagaaaaaaaaatttaatattattattttttgttttttgagatggagttctgctctgctgcacaggctgg

SEQ ID NO: 19286 - DNA, 201 bp, Homo sapiens
ggtttggctgttcctgggccagaaaaaggctgacatatcactgctgtctattactcactaaggccattccaccagctcagtggtcccagcttgctggtcayagctcattggtcatcccagagatgacttgaaggcatttcttcctcccccaccatcaccagcaacaccaaacctagccccccaggagcgggaagaaatgaa

SEQ ID NO: 19287 - DNA, 201 bp, Homo sapiens
tggcttcaagagggcagtgccttcccaaccattcccttatccaggctttttgacaacgctatgctccgcgcccatcgtctgcaccagctggcctttgacayctaccaggagtttgtaagctcttggggaatgggtgcgcatcaggggtggcaggaaggggtgactttcccccgctgggaaataagaggaggagactaagga

SEQ ID NO: 19288 - DNA, 201 bp, Homo sapiens
ctcacaacccccacaatctattggctgtgcttggccccttttcccaacacacacattctgtctggtgggtggaggttaaacatgcggggaggaggaaaggrataggatagagaatgggatgtggtcggtagggggtctcaaggactggctatcctgacatccttcgccgcgtgcaggttggccaccatggcctgctgccag

SEQ ID NO: 19289 - DNA, 201 bp, Homo sapiens
gtaacaatgggagctggtctccagcgtagaccttggtgggcggtccttctcctaggaagaagcctatatcccaaaggaacagaagtattcattcctgcagracccccagacctccctctgtttctcagagtctattccgacaccctccaacagggaggaaacacaacagaaatccgtgagtggatgccttctccccaggcg

SEQ ID NO: 19290 - DNA, 201 bp, Homo sapiens
tgggtggaggttaaacatgcggggaggaggaaagggataggatagagaatgggatgtggtcggtagggggtctcaaggactggctatcctgacatccttckccgcgtgcaggttggccaccatggcctgctgccagagggcacccacgtgacccttaaagagaggacaagttgggtggtatctctggctgacactctgtgc

SEQ ID NO: 19291 - DNA, 201 bp, Homo sapiens
aaggaacagaagtattcattcctgcagaacccccagacctccctctgtttctcagagtctattccgacaccctccaacagggaggaaacacaacagaaatycgtgagtggatgccttctccccaggcggggatgggggagacctgtagtcagagcccccgggcagcacagccaatgcccgtccttcccctgcagaacctag

SEQ ID NO: 19292 - DNA, 201 bp, Homo sapiens
aggttaaacatgcggggaggaggaaagggataggatagagaatgggatgtggtcggtagggggtctcaaggactggctatcctgacatccttcgccgcgtkcaggttggccaccatggcctgctgccagagggcacccacgtgacccttaaagagaggacaagttgggtggtatctctggctgacactctgtgcacaaccc

SEQ ID NO: 19293 - DNA, 201 bp, Homo sapiens
ccgtgagtggatgccttctccccaggcggggatgggggagacctgtagtcagagcccccgggcagcacagccaatgcccgtccttcccctgcagaacctaragctgctccgcatctccctgctgctcatccagtcgtggctggagcccgtgcagttcctcaggagtgtcttcgccaacagcctggtgtacggcgcctctga

SEQ ID NO: 19294 - DNA, 201 bp, Homo sapiens
aaagggataggatagagaatgggatgtggtcggtagggggtctcaaggactggctatcctgacatccttcgccgcgtgcaggttggccaccatggcctgcdgccagagggcacccacgtgacccttaaagagaggacaagttgggtggtatctctggctgacactctgtgcacaaccctcacaacactggtgacggtggga

SEQ ID NO: 19295 - DNA, 201 bp, Homo sapiens; identical to SEQ ID NO: 2237

SEQ ID NO: 19296 - DNA, 201 bp, Homo sapiens
cacccacgtgacccttaaagagaggacaagttgggtggtatctctggctgacactctgtgcacaaccctcacaacactggtgacggtgggaagggaaagaygacaagccagggggcatgatcccagcatgtgtgggaggagcttctaaattatccattagcacaagcccgtcagtggccccatgcataaatgtacacagaa

SEQ ID NO: 19297 - DNA, 201 bp, Homo sapiens
ctaataacacaaaaattagccaggtgtggtggtgcacacctgtaatcccagctactccagaggctgaggtaggaaaattgcttgaagccaggaggcagaarttgcagtgagccgaggtcgtgccactgcattccagcctgggagacagagcgagactccgtctccaaaaaaaaaaaaagaatcaatgagaaaggcctgcct

SEQ ID NO: 19298 - DNA, 201 bp, Homo sapiens
acaggcttccctggagaacagcccacagcacagtgccctcccagcaggtgatgagtctgtggtgctggtccggtaatgcttcaggaatgatggcaaaaaawggagctctgtcttccgctctgaaagtggggagatggcagggccccagcattcacatcctaggccacaggggtgtgggttttcaatgttggttgccaacac

SEQ ID NO: 19299 - DNA, 201 bp, Homo sapiens
caggtgattctaacatgtaaacaaggttgagaaccactgtgttagggaccgcaaagatgagacccatgtgttcacagctgttgtactggtggaatagggaraaaggagaaaaaggagatgagaggcctgggccagttgtggtgccacctgctcctaattccaaccagtcatctaaaaagtgtttatcatgagccagtcaca

SEQ ID NO: 19300 - DNA, 201 bp, Homo sapiens
atcacttaggaactgggagagctccaggcaagccaccttatctctttgggcctcagtatcctcactcacatccccatggtcagtagagtgccaagcacatrgtggacacgcagaagtattgatcatcttcctcacctcccctaggagagcccttgggaatccccatataatattctctgaagacctcaatccaatgagcca

SEQ ID NO: 19301 - DNA, 201 bp, Homo sapiens
gctggagctgggtttccctttgggacgcaggtgagcgtgtgttccatcccttccagccaggtctgtttggcagagcaactggattcctctaaccgtggttkgtctgcagaaacagtatcccaaggagctgagttcagtgcaccacactccctccctacttcaccccctgctccctctcctcccctcacccaaatgctgtcc

SEQ ID NO: 19302 - DNA, 201 bp, Homo sapiens
ctagcagctccctgctttgagccaactcttctttcccactttccgtatgggcagggagtcccagatgaaacctagggtgttcttatggatttggactaaawgataaccctgctctgtccatggtggccctggggcccctgcttcccatgtttgtttctcggtgggtaaggagctaggtaacggtgaactcagagatgagga

SEQ ID NO: 19303 - DNA, 201 bp, Homo sapiens
tcaaggaagaaagaacagagctgcaggtgagaagtgtgcgcctcaaatcaccaaagtgagagtggaaggagcacccaccagtccctcggaggcgattcctragaccggtgagaatggcttcgaaaaatgtgatcgtcctcaaccccacagtcttgaacctaacaggagatcttgaagcctgaaagacaccactttaggatc

SEQ ID NO: 19304 - DNA, 201 bp, Homo sapiens; identical to SEQ ID NO: 2496

SEQ ID NO: 19305 - DNA, 201 bp, Homo sapiens; identical to SEQ ID NO: 2497

SEQ ID NO: 19306 - DNA, 201 bp, Homo sapiens; identical to SEQ ID NO: 2248

SEQ ID NO: 19307 - DNA, 201 bp, Homo sapiens
tacacagaaacaggtgggggcaacagtgggagagaaggggccagggtataaaaagggcccacaagagaccagctcaaggatcccaaggcccaactccccgmaccactcagggtcctgtggacagctcacctagctgcaatggctacaggtaagcgcccctaaaatccctttgggcacaatgtgtcctgaggggagaggcag

SEQ ID NO: 19308 - DNA, 201 bp, Homo sapiens
aagaaatgaaaacaagatgggctattaagtgcagaggcaaaaactccccaacaggtgaggaaacaatggcatagaattacttgtgttcagaagaattttargatgaatattccttaagcccaactactctcgggaaatgagaacaatgcaaaaatgagtttgagacatacagaaccagagcatttggaatctgaattaggg

SEQ ID NO: 19309 - DNA, 201 bp, Homo sapiens; identical to SEQ ID NO: 2250

SEQ ID NO: 19310 - DNA, 201 bp, Homo sapiens
cagggtttcagctgtgcaagatgaaaagggttctggagatggatggtggtgagggttgcatgacgatgtcaatgtacttgacatgactgaactgtacacgyaaaatggttaagatggaaacgtttatatcttctcacaactaaaaattgttaatactttatttttgtttttgtttttgagacagaggctggagtgcagtgg

SEQ ID NO: 19311 - DNA, 201 bp, Homo sapiens; identical to SEQ ID NO: 2251

SEQ ID NO: 19312 - DNA, 201 bp, Homo sapiens; identical to SEQ ID NO: 2253

SEQ ID NO: 19313 - DNA, 201 bp, Homo sapiens; identical to SEQ ID NO: 2254

SEQ ID NO: 19314 - DNA, 201 bp, Homo sapiens; identical to SEQ ID NO: 2145

SEQ ID NO: 19315 - DNA, 201 bp, Homo sapiens
tctccccaggcggggatgggggagacctgtagtcagagcccccgggcagcacagccaatgcccgtccttcccctgcagaacctagagctgctccgcatctscctgctgctcatccagtcgtggctggagcccgtgcagttcctcaggagtgtcttcgccaacagcctggtgtacggcgcctctgacagcaacgtctatgac

SEQ ID NO: 19316 - DNA, 201 bp, Homo sapiens
gaccagcctggccaacatagtgaaaccccgtctctatttaaaaagtacaaaacttagcccggcatagtggcgggcgcctgtaatcccagctactagggagrctgaggcgggagaatcactggaacccaggaggtggaggttgctgtgaggcaacatcatgccactgcactccagcctcggagacagaatgagactccatca

SEQ ID NO: 19317 - DNA, 201 bp, Homo sapiens
gaaagtctgagagtacaaggatcacccaccccagcccaccaggcccacttctgagtctcattcttcccaacctagtagaatctttcttattttcatgcttrgataagaatcccaaacccctgaggggtttccatcctgggcctggcagcagggcagcaaaggttaccttgaacaatgacagcaatgtctttgctgacagag

SEQ ID NO: 19318 - DNA, 201 bp, Homo sapiens
tgctcaattcagggaaggtggatgatttatattagactcacatgatgaaggagcagtagctccacctagtggaaacattgaggttgaaaagttcatgttcsgggatgatgctattttacaaagtcaagatatttcgtgtccctccgggaagccttccttgatccgagttatgctttctcttaacaatctgttttcccagtc

SEQ ID NO: 19319 - DNA, 201 bp, Homo sapiens; identical to SEQ ID NO: 2227

SEQ ID NO: 19320 - DNA, 201 bp, Homo sapiens
agaaagtccaagtggcccccttcttcctccctttttggttttgtttgcttttgtttttgttttgttcaagatggtgtctcgctttgttgcccaggctggartgcaatggcacgatctcagatcactgcaacttctgcctcccacagtcaagcgattctcctgcctcagcctccccagtagctgggattacaggtgcacacc

SEQ ID NO: 19321 - DNA, 201 bp, Homo sapiens
agactgagattcctaatgactagggtgagctctaaagagaaaggtggctgggcgcggtggctcacacctgtaatcccagcattttggggggccaaggtggscggatcacttgaggtcaggagtttgagaacagcctagccaacatggtgaaaccccatctctacgaaaaatacaaaaattagacaggcatggtggtatgca

SEQ ID NO: 19322 - DNA, 201 bp, Homo sapiens; identical to SEQ ID NO: 2232

SEQ ID NO: 19323 - DNA, 201 bp, Homo sapiens
tccctgtccttctgattttaaaataactataccagcaggaggacgtccagacacagcataggctacctggccatgcccaaccggtgggacatttgagttgyttgcttggcactgtcctctcatgcgttgggtccactcagtagatgcctgttgaattcctgggcctagggctgtgccagctgcctcgtcccgtcaccttct

SEQ ID NO: 19324 - DNA, 201 bp, Homo sapiens
catgttacaggcaacaactacttgtggaattggtgaatgcatgaatagaagaatgagtgaatgaatgaatagacaaaaggcagaaatccagcctcaaagarcttacagtctggtaagaggaataaaatgtctgcaaatagccacaggacaggtcaaaggaaggaggggctatttccagctgagggcaccccatcaggaaag

SEQ ID NO: 19325 - DNA, 201 bp, Homo sapiens
cgagctacgctgggtgcttcttttctaccactttccttaatgcctatggacacctcattctgtggctgaagttccttgtgttcaattccccccatcttcaytgaacatcctgtgtagggacctcacccctgtcctgctagctttgcactgaggcaagttctgtccatgcctagtagtgccaccacctttactagatgagac

SEQ ID NO: 19326 - DNA, 201 bp, Homo sapiens
tacaggcatgagccactgcgcccggcctattctgagccttttgaagctgacgccagaggcgcgaagcccagcctctccccactggccatgtggaggctctygctgagtagtctctcagcctgcaggagccaaggatctggacccaagtgatgccccaacagtgggcaacttcccagtactgttaggagaatcccaagtcta

SEQ ID NO: 19327 - DNA, 201 bp, Homo sapiens
acaggcatgagccactgcgcccggcctattctgagccttttgaagctgacgccagaggcgcgaagcccagcctctccccactggccatgtggaggctcttsctgagtagtctctcagcctgcaggagccaaggatctggacccaagtgatgccccaacagtgggcaacttcccagtactgttaggagaatcccaagtctaa

SEQ ID NO: 19328 - DNA, 201 bp, Homo sapiens
ccttcttcctccctttttggttttgtttgcttttgtttttgttttgttcaagatggtgtctcgctttgttgcccaggctggagtgcaatggcacgatctcrgatcactgcaacttctgcctcccacagtcaagcgattctcctgcctcagcctccccagtagctgggattacaggtgcacaccaccatgcctggctcattt

SEQ ID NO: 19329 - DNA, 201 bp, Homo sapiens
tggcgggcgactgtaatcccagctactaaacagggtgaggcaggagaatcacttgaacccaggaggtggaggttgctgtgaggcaacatcatgccactgcmctccagcctgggtgacagaatgagactccaactgaaaaaaaagaaagaaagagagagagagagacaaagaggaaggaaagaaagaaagaaagaaagagaa

SEQ ID NO: 19330 - DNA, 201 bp, Homo sapiens; identical to SEQ ID NO: 2241

SEQ ID NO: 19331 - DNA, 201 bp, Homo sapiens
taactgagtaacaccacactacctgttctggagaaaggacttttttcttgttgttgtggttgttgaaatggagtcacactctgtcgcccaggctggagtgsagtggcgcgatcttggctcacagcaacctctgcctcctggattcaagtgattctaccacctcaccctccggagtaactgggattacaggcttgcgccacc

SEQ ID NO: 19332 - DNA, 201 bp, Homo sapiens; identical to SEQ ID NO: 2242

SEQ ID NO: 19333 - DNA, 201 bp, Homo sapiens
ctgccctggcttcaagagggcagtgccttcccaaccattcccttatccaggctttttgacaacgctatgctccgcgcccatcgtctgcaccagctggcctwtgacacctaccaggagtttgtaagctcttggggaatgggtgcgcatcaggggtggcaggaaggggtgactttcccccgctgggaaataagaggaggagac

SEQ ID NO: 19334 - DNA, 201 bp, Homo sapiens
gaggcaaagggcccctgtgttgggggcaggatccctgcactcagagggatttagaagctgaaataactgggttgggggcggtgactcacgccagtaatctmagtacttagagaggccagggagggtggatcccctaaagtcaagagttcgagaccagcctggccaacatagtgaaaccccgtctctactaaaaaagtacaa

SEQ ID NO: 19335 - DNA, 201 bp, Homo sapiens
gcgcctgccaccacgcgcagctaatttttgtatttttagtagagacgggatttcaccatcttgaccaggttggtcttaaactcctgacctaatgatccacmcaccttggcctcccaaagtggtgggattacaggtgtgagccaacgcacccgacctatccagagccttttgaggctgatgctagaggtacaaagcccagcc

SEQ ID NO: 19336 - DNA, 201 bp, Homo sapiens
ggaaagatgacaagccagggggcatgatcccagcatgtgtgggaggagcttctaaattatccattagcacaagcccgtcagtggccccatgcataaatgtrcacagaaacaggtgggggcaacagtgggagagaaggggccagggtataaaaagggcccacaagagaccagctcaaggatcccaaggcccaactccccgaa

SEQ ID NO: 19337 - DNA, 201 bp, Homo sapiens
gggaagagcaaggctgtggagatctgctgccctggctgaggtagctcatgcaatcagtctctctgagcctcagtctcctgatatgtgaaatgggatgatamtcatacctcctacacaagacaagtggcaggtcagacgtgagaatgcacaggcaggcccttcgcaactggataggctctatacaggtgtggaaaggaggag

SEQ ID NO: 19338 - DNA, 201 bp, Homo sapiens
ccgtgtctgttcccgggatttcggtttcttggtttgtgtctctgctgcaggtccagggagctggggcaataccttgagagtctgagttcttcgtccccagkgacctgggggagccccccacccaaccccccctccgccccgccccaaggctcagggaaaggggagatcaaagtgtggggttggttccctctagtggtcagt

SEQ ID NO: 19339 - DNA, 201 bp, Homo sapiens
gcctaaacatgcagagaaacaggtgaggagaagcagcgagagagaaggggccaggtataaaaagggcccacaagagaccagctcaaggatcccaaggcccractccccgaaccactcagggtcctgtggacagctcacctagcggcaatggctgcaggtaagcgcccctaaaatccctttgggcacaatgtgtcctgaggg

SEQ ID NO: 19340 - DNA, 201 bp, Homo sapiens
ggtggaggttaaacatgcggggaggaggaaaggaataggatagagagtgggatgtggtcgataggggtctcaaggactggctatcctgacatccttctcckcattcaggttggccaccatggcctgctgccagagggcacccacctgaaccttaaagagaggacaagttgggtggtgtctgtggttgacactctgtgcaca

SEQ ID NO: 19341 - DNA, 201 bp, Homo sapiens
agcccatcgcgcacaccagctggccattgacacctaccaggagtttataagctcttggggaatgggtgcgggtcaggggtggcaagaaggggtgactttcycccactggggaagtaatgggaggagactaaggagctcagggttgttttctgaagtgaaaatgcaggcagatgagcataggctgagccaggttcccagaag

SEQ ID NO: 19342 - DNA, 201 bp, Homo sapiens
attgacacctaccaggagtttataagctcttggggaatgggtgcgggtcaggggtggcaagaaggggtgactttcccccactggggaagtaatgggaggasactaaggagctcagggttgttttctgaagtgaaaatgcaggcagatgagcataggctgagccaggttcccagaagagtaacagtgggagctggtctccag

SEQ ID NO: 19343 - DNA, 201 bp, Homo sapiens
tggggaatgggtgcgggtcaggggtggcaagaaggggtgactttcccccactggggaagtaatgggaggagactaaggagctcagggttgttttctgaagygaaaatgcaggcagatgagcataggctgagccaggttcccagaagagtaacagtgggagctggtctccagcatagaaagcagtggtccttcttggtgggg

SEQ ID NO: 19344 - DNA, 201 bp, Homo sapiens
tgctccacatctccctgctgctcatcgagtcgcggctggagcccgtgcggttcctcaggagtaccttcaccaacaacctggtgtatgacacctcggacagygatgactatcacctcctaaaggacctagaggaaggcatccaaatgctgatgggggtgagggtggcaccaggggtccccaatcctggaagcccactggctt

SEQ ID NO: 19345 - DNA, 201 bp, Homo sapiens
gggtccccaatcctggaagcccactggcttcgagggctgggggagagaaacactgctgccctcttttcagcagtcaggcgctgacccaagagaactcaccwtattcttcatttcccctcgtgaatcctccaggcctttctctacaccctgaaggggaaggaggaaaatggataaatgagagagggagggaacagtgcccaa

SEQ ID NO: 19346 - DNA, 201 bp, Homo sapiens
cactgctgccctcttttcagcagtcaggcgctgacccaagagaactcaccttattcttcatttcccctcgtgaatcctccaggcctttctctacaccctgraggggaaggaggaaaatggataaatgagagagggagggaacagtgcccaagcgcttggtctctccttctcttgcttcactttgcagaggctggaagacgg

SEQ ID NO: 19347 - DNA, 201 bp, Homo sapiens
gaaggacatggacaaggtcgagacattcctgcgcatggtgcagtgccgctctgtggagggcagctgtggcttctaggggcccgcgtggcatcctgtgaccyctccccagtgcctctcctggccctgaaggtgccactccagtgcccaccagccttgtcctaataaaattaagttgtattgtttcatctgactaggtgtcct

SEQ ID NO: 19348 - DNA, 201 bp, Homo sapiens
gcctgccctggcttcaagagggcagtgccttcccaaccattcccttatccaggctttttgacaacgctatgctccgcgcccatcgtctgcaccagctggcmtttgacacctaccaggagtttgtaagctcttggggaatgggtgcgcatcaggggtggcaggaaggggtgactttcccccgctgggaaataagaggaggag

SEQ ID NO: 19349 - DNA, 201 bp, Homo sapiens
aagctcttggggaatgggtgcgcatcaggggtggcaggaaggggtgactttcccccgctgggaaataagaggaggagactaaggagctcagggtttttccygaagcgaaaatgcaggcagatgagcacacgctgagtgaggttcccagaaaagtaacaatgggagctggtctccagcgtagaccttggtgggcggtccttc

SEQ ID NO: 19350 - DNA, 201 bp, Homo sapiens
gcataaatgtacacagaaacaggtgggggcaacagtgggagagaaggggccagggtataaaaagggcccacaagagaccagctcaaggatcccaaggcccractccccgaaccactcagggtcctgtggacagctcacctagctgcaatggctacaggtaagcgcccctaaaatccctttgggcacaatgtgtcctgaggg

SEQ ID NO: 19351 - DNA, 201 bp, Homo sapiens
gtttgcttttgtttttgttttcttcaagatggggtgtcactctgttgcccaggctggagtgcaatggtgcaatcttggctcactgcaacctcagtatcccrggttcaagcgattcttctgcctcagcctccccagtagctgggattacaggtgcacaccaccatgcctggctcatttttcccttcctttttggattcgctg

SEQ ID NO: 19352 - DNA, 201 bp, Homo sapiens; identical to SEQ ID NO: 2231

SEQ ID NO: 19353 - DNA, 201 bp, Homo sapiens
cttgtcctaataaaattaagttgtattgtttcatctgactaggtgtccttctataatattatggggtggaaggtggtggtatggagcaaggggtaggtggraagacgacctggagggccttcagggtctattgggaactaggccactgaaatataagaggtttggctgttcctgggccagaaaaaggctgacatatcactg

SEQ ID NO: 19354 - DNA, 201 bp, Homo sapiens
ggtttggggcttatgaatgttagtatcgccatctaagcccagtatttggccaatctctgaatgttcctggtccctggagggaggcagagagagagagagaraaaaaaaaacccagctcctggaacagggagagcgctggcctcttgctctccagctccctctgttgccctccggtttctccccaggctcccggacgtccct

SEQ ID NO: 19355 - DNA, 201 bp, Homo sapiens
agaattacttgtgttcggaagaattttaagatgagtattccttaagcccaactactctcgggaaatgagaacaatgcaaaaatgagtttgagacatatggwaccagagcatttggaatctgaattagggcaagggaagtggaagagagattttatttgcgggttgtaaatgcagtgccaacaggtgccaggtagataacaa

SEQ ID NO: 19356 - DNA, 201 bp, Homo sapiens
gaattacttgtgttcggaagaattttaagatgagtattccttaagcccaactactctcgggaaatgagaacaatgcaaaaatgagtttgagacatatggawccagagcatttggaatctgaattagggcaagggaagtggaagagagattttatttgcgggttgtaaatgcagtgccaacaggtgccaggtagataacaac

SEQ ID NO: 19357 - DNA, 201 bp, Homo sapiens
acatactgaaaatcttttaagggcaaaaattaacccaaacacacatggtctccaagctgtctgtgagcaattttgttctaagagatgttgattggggtaayttggtgtaagggaaagaatcagaaagatttgggctgtatgcaatttagtgtcgctgaataaattacttgaccaagctgagataataatatattgctttac

SEQ ID NO: 19358 - DNA, 201 bp, Homo sapiens
tagatgaggtactcagagcagtcaaattcgtagagacaaaaagtaggatggtggctgccagtggctgtggggagggatggaatagggagccatttaacgascacagggtttcagctgtgcaagatgaaaagggttctggagatggttggtggtgagggttgcatgacgatgtcaatgtacttgacgtgaccgaactgtaca

SEQ ID NO: 19359 - DNA, 201 bp, Homo sapiens
gttaagatggaaatgtttatatcttctcacaactaaaaattgttaatagtttcttttgtttttgtttttgtttttgagacagaggctggagtgcagtggtggatcttggctcactgcaacctccgcctcctcctgggttcaagtgattctcatgcctcagcctcctgagtagctgggattataagtgtgcaccaccacaca

SEQ ID NO: 19360 - DNA, 201 bp, Homo sapiens
taaaaattgttaatagtttcttttgtttttgtttttgtttttgagacagaggctggagtgcagtggtggatcttggctcactgcaacctccgcctcctccygggttcaagtgattctcatgcctcagcctcctgagtagctgggattataagtgtgcaccaccacacagggcagatttttgtatttttggtaaagacaggg

SEQ ID NO: 19361 - DNA, 201 bp, Homo sapiens
aacctaaaatgaccacttctgaatatcttccatgagcattgttgaaatacacatggttggttttgtccctttatacacagttgagagcagaactgaccccktcctttttcttctgaattgtagggtctgggcttctcagccaagacaagctgacactttgcctggatgcttctttaattcagaaggccctggagtgctgag

SEQ ID NO: 19362 - DNA, 201 bp, Homo sapiens
acaaaaattagccaggtgtggtggtgcacacctgtattcccagctacgaaggcatgagaatcgcttgagcccgggaggcagtgttgggctgggcccatcawgccactgcactccagctgggtggctgaggaagattctctctcaaaaataataagaaagaagataaaattttggagtattaaaggccactcttcctctgga

SEQ ID NO: 19363 - DNA, 201 bp, Homo sapiens
aatgggatgtggtcggtagggggtctcaaggactggctatcctgacatccttcgccgcgtgcaggttggccaccatggcctgctgccagagggcacccacstgacccttaaagagaggacaagttgggtggtatctctggctgacactctgtgcacaaccctcacaacactggtgacggtgggaagggaaagatgacaagc

SEQ ID NO: 19364 - DNA, 201 bp, Homo sapiens
tgcctcccaggttcaagcgattctcctgcctcagcctccccagtagctgggattacaggtgcacaccggcatgcctggctcatttttcccttcctttttgrattcgctgtgcttcaaggcactgaggccatgaggcagggtttgcagatacaagataactatagccttgatgtggctgatcctgacaccgaaatgtctgtg

SEQ ID NO: 19365 - DNA, 201 bp, Homo sapiens
gcctccaggctcgccctgctggaactagaaagtccaagtggcccccttcttcctccctttttggttttgtttgcttttgtttttgttttgttcaagatggkgtctcgctttgttgcccaggctggagtgcaatggcacgatctcagatcactgcaacttctgcctcccacagtcaagcgattctcctgcctcagcctcccc

SEQ ID NO: 19366 - DNA, 201 bp, Homo sapiens
cttctgcctcccacagtcaagcgattctcctgcctcagcctccccagtagctgggattacaggtgcacaccaccatgcctggctcattttccccttccttkttggattcgctgtgcttcaaggcactgaggccatgaggcagggtttgcagatacaggatatctacagccctgatgcgactgatcctgacaccaaaatggc

SEQ ID NO: 19367 - DNA, 201 bp, Homo sapiens
acaggtgcacaccaccatgcctggctcattttccccttccttgttggattcgctgtgcttcaaggcactgaggccatgaggcagggtttgcagatacaggrtatctacagccctgatgcgactgatcctgacaccaaaatggctgtggatccctgcatggtgtggctgtatactcctgtctcttaaacctgcttcttaact

SEQ ID NO: 19368 - DNA, 201 bp, Homo sapiens
ggtgcacaccaccatgcctggctcattttccccttccttgttggattcgctgtgcttcaaggcactgaggccatgaggcagggtttgcagatacaggatawctacagccctgatgcgactgatcctgacaccaaaatggctgtggatccctgcatggtgtggctgtatactcctgtctcttaaacctgcttcttaacttac

SEQ ID NO: 19369 - DNA, 201 bp, Homo sapiens
actttagaaggccgaagtgggtggatcacgagatcaggacttcaagaccagcctggccaagatggtgaaaccctgtctctactaaaaatacaaaaaattakctgggcatggtgatgggcacctgtaatcccagctacttgggaggctgaggcagagaaatccttgaacccaggaggtagaggtggaagtgagccaaaatca

SEQ ID NO: 19370 - DNA, 201 bp, Homo sapiens
cacagaagggaagggaactgcatttggacatcataaaaccacttttatttttaccatagcaacattccagtgaacatttcttgactgacttgggagaaaakatctggttttgtgattcctcacgccttctccgagggtgaatatactctttccgaaggacagggaaggaggctgaaccataaaatcatatgaacattttca

SEQ ID NO: 19371 - DNA, 201 bp, Homo sapiens
tggctgtgcttggccccttttcccaacacacacattctgtctggtgggtggaggttaaacatgcggggaggaggaaagggataggatagagaatgggatgkggtcggtagggggtctcaaggactggctatcctgacatccttcgccgcgtgcaggttggccaccatggcctgctgccagagggcacccacgtgaccctta

SEQ ID NO: 19372 - DNA, 201 bp, Homo sapiens
tttccgaaggacagggaaggaggctgaaccataaaatcatatgaacattttcacaagaggattcctcttgaagcttcaaggaaattgtttacagtcagaaraaaatatgcacttcttgatgaaaacagagagtaaacattgcaactctaacctagacacctatatgggtaaaaaaaagaaaactggcaaatgcgaactcac

SEQ ID NO: 19373 - DNA, 201 bp, Homo sapiens
tgaaaaggaattcagagatgtttggagctcttaacctaagaggccaatttcatggaagaactctaccttctacttcagagacagaacactgggctagatasgatgcttgtctggcccgaagtggaatttcttaccatctgtatactcccccaagacccacaacagatggttactgagttgcagcttgccactgatccttaa

SEQ ID NO: 19374 - DNA, 201 bp, Homo sapiens
gtatactcccccaagacccacaacagatggttactgagttgcagcttgccactgatccttaatgatgtcaacaagctcagctctgggagctggcactccasaagcccaggtcaggggagcaagggaaagtggagatgggaacagagctctgattcctagccccatatttgatacttactcccttcaaagtcctgtccatgg

SEQ ID NO: 19375 - DNA, 201 bp, Homo sapiens
cttaatgatgtcaacaagctcagctctgggagctggcactccagaagcccaggtcaggggagcaagggaaagtggagatgggaacagagctctgattcctrgccccatatttgatacttactcccttcaaagtcctgtccatggactacaaatttagctcccagttagtaatcaaaaacccatgaaatatgagttgtattt

SEQ ID NO: 19376 - DNA, 201 bp, Homo sapiens
gaggacaagttgggtggtatctctggctgacactctgtgcacaaccctcacaacactggtgacggtgggaagggaaagatgacaagccagggggcatgatsccagcatgtgtgggaggagcttctaaattatccattagcacaagcccgtcagtggccccatgcataaatgtacacagaaacaggtgggggcaacagtggg

SEQ ID NO: 19377 - DNA, 201 bp, Homo sapiens
tgaagcacctggcaaggagcaagaggccttcttacaaatcaaacattgagactgagattcctaatgactagggtgagctctaaagagaaaggtggctgggygcggtggctcacacctgtaatcccagcattttggggggccaaggtgggcggatcacttgaggtcaggagtttgagaacagcctagccaacatggtgaaac

SEQ ID NO: 19378 - DNA, 201 bp, Homo sapiens
agagaaaggtggctgggcgcggtggctcacacctgtaatcccagcattttggggggccaaggtgggcggatcacttgaggtcaggagtttgagaacagccyagccaacatggtgaaaccccatctctacgaaaaatacaaaaattagacaggcatggtggtatgcacctgtaatctcagctactggggaggctgaggcagg

SEQ ID NO: 19379 - DNA, 201 bp, Homo sapiens
taggcgacaacagtgagactccatctcaaaaaaaaaaagagagagagagagaatggtgagattgtggacatattggacacacaggacatggggcatggggrcctgaaacaccgttttacaggacagatgtacacaaataggaatgcagcctgccattgtgtttcttcctttctcctctatcccttctcccatccctgggaa

SEQ ID NO: 19380 - DNA, 201 bp, Homo sapiens
agtgagactccatctcaaaaaaaaaaagagagagagagagaatggtgagattgtggacatattggacacacaggacatggggcatgggggcctgaaacacygttttacaggacagatgtacacaaataggaatgcagcctgccattgtgtttcttcctttctcctctatcccttctcccatccctgggaaaccacagtagc

SEQ ID NO: 19381 - DNA, 201 bp, Homo sapiens
attgtgtttcttcctttctcctctatcccttctcccatccctgggaaaccacagtagcagaactctcattcaatcaaatagctgtcaattatatgagttgyacttttctcttcctgaacagcaaactggctttcctcctctttgtcctcctctttctgcctgtagagcaatttcttcctgtctactttgcagggccgatag

SEQ ID NO: 19382 - DNA, 201 bp, Homo sapiens
caaatagctgtcaattatatgagttgcacttttctcttcctgaacagcaaactggctttcctcctctttgtcctcctctttctgcctgtagagcaatttcytcctgtctactttgcagggccgatagctcaaatacagtgctatggtgatgacacccactccaagggcaacggtaataatgacaaagagggtagagctgat

SEQ ID NO: 19383 - DNA, 201 bp, Homo sapiens
tgtcaattatatgagttgcacttttctcttcctgaacagcaaactggctttcctcctctttgtcctcctctttctgcctgtagagcaatttcttcctgtcyactttgcagggccgatagctcaaatacagtgctatggtgatgacacccactccaagggcaacggtaataatgacaaagagggtagagctgattccttcat

SEQ ID NO: 19384 - DNA, 201 bp, Homo sapiens
tgatggtttcagggctgtgggaggaagcgcttgtggtccgtgtctgttcccgggatttctgtttcttggtttgtgtctctgctacaggtccaaggagctgrggcaataccttgagtctgggttcttcgtccccagtgacctgggggagccccaccgcctccgccccaaggttcagggaaaggggagagcaatgtgtggggt

SEQ ID NO: 19385 - DNA, 201 bp, Homo sapiens
tcttcctgtctactttgcagggccgatagctcaaatacagtgctatggtgatgacacccactccaagggcaacggtaataatgacaaagagggtagagctkattccttcatccagtcctgcccaagcacagaagatagagttaggaaagtctgagagtacaaagatcacccaccccagcccaccaggcccacttctgagtc

SEQ ID NO: 19386 - DNA, 201 bp, Homo sapiens
gatgccttctccccaggcggggatgggggagacctgtagtcagagcccccgggcagcacagccaatgcccgtccttcccctgcagaacctagagctgctcygcatctccctgctgctcatccagtcgtggctggagcccgtgcagttcctcaggagtgtcttcgccaacagcctggtgtacggcgcctctgacagcaacgt

SEQ ID NO: 19387 - DNA, 201 bp, Homo sapiens
tggagctgggtttccctttgggacgcaggcgagcgtgtgttccatcccttccagccaggtctgtttggcagagcaactggattcctctaaccatggcttgyctgcaaaaacagtttcccaaagagctgagttcagtgcaccacactccctccctaccttcatcccctgctccctctcctcccctcacccaaatgctgtccc

SEQ ID NO: 19388 - DNA, 201 bp, Homo sapiens
gctgggattacaggtatgagccactgggcccttccctgtcctgtgattttaaaataattataccagcagaaggacgtccagacacagcatgggctacctgrccatgcccagccagttggacatttgagttgtttgcttggcactgtcctctcatgcattgggtccactcagtagatgcttgttgaattcctgggcctgggg

SEQ ID NO: 19389 - DNA, 201 bp, Homo sapiens
cctgagattctgatataattagactggaatgtggtccaggcaagagtagtttgaaaactttcccaggtgattctaacatgtaaacaaggttgagaaccacygtgttagggaccgcaaagatgagacccatgtgttcacagctgttgtactggtggaatagggagaaaggagaaaaaggagatgagaggcctgggccagttg

SEQ ID NO: 19390 - DNA, 201 bp, Homo sapiens
gggacgcaggcgagcgtgtgttccatcccttccagccaggtctgtttggcagagcaactggattcctctaaccatggcttgtctgcaaaaacagtttcccraagagctgagttcagtgcaccacactccctccctaccttcatcccctgctccctctcctcccctcacccaaatgctgtccccttcacccaacagctttcc

SEQ ID NO: 19391 - DNA, 201 bp, Homo sapiens
ctttcccaggtgattctaacatgtaaacaaggttgagaaccactgtgttagggaccgcaaagatgagacccatgtgttcacagctgttgtactggtggaayagggagaaaggagaaaaaggagatgagaggcctgggccagttgtggtgccacctgctcctaattccaaccagtcatctaaaaagtgtttatcatgagcca

SEQ ID NO: 19392 - DNA, 201 bp, Homo sapiens
gcttgtgtttctacagagtcaagtgctagatgctcttaaactcaggggggaagatttcaccactagagagggtgctctttcctgctctcatctctgggggyatctgatgcttgtgacctccagattatattgaagtagccccaaccctgggcaccaggagacaggaggctcagtcctggccttctctgccttcaccttgtc

SEQ ID NO: 19393 - DNA, 201 bp, Homo sapiens
aaacagtttcccaaagagctgagttcagtgcaccacactccctccctaccttcatcccctgctccctctcctcccctcacccaaatgctgtccccttcacycaacagctttccttcccaagggagcactagcagctccctgctttgagccaactcttctttcccactttccgtatgggcagggagtcccagatgaaaccta

SEQ ID NO: 19394 - DNA, 201 bp, Homo sapiens
gtgattctaacatgtaaacaaggttgagaaccactgtgttagggaccgcaaagatgagacccatgtgttcacagctgttgtactggtggaatagggagaamggagaaaaaggagatgagaggcctgggccagttgtggtgccacctgctcctaattccaaccagtcatctaaaaagtgtttatcatgagccagtcacaaaa

SEQ ID NO: 19395 - DNA, 201 bp, Homo sapiens
ctagcagctccctgctttgagccaactcttctttcccactttccgtatgggcagggagtcccagatgaaacctagggtgttcttatggatttggactaaawtataatgctgctctgtccatggtggccctggggcccctgcttcccatgtttgtttctcggtgggtaaggagctaggtaacagtgaactcagagatgagga

SEQ ID NO: 19396 - DNA, 201 bp, Homo sapiens
tttgtttgtttgcttgtttttgagacaaagtcagtctcacttcttcgccctggctggagtgcagtagtgtgatctcggctcatgacaacctctgcctcccrggttcaagcaattctcgtgcctcagccgctccagtaactaggattatcggcaaatgccaccacccccgctaatttttctatttttagtagagatcagttt

SEQ ID NO: 19397 - DNA, 201 bp, Homo sapiens
tggagaacagcccacagcacagtgccctcccagcaggtgatgagtctggggtgctggtccgataatgtttcaggaatgatggcagaaaatggagctctgtyttccgctctgaaagtggggagatggcagggccccagcattcacatcctaggccacaggggtgtgggttttcaatgttggttgccaacaccacagccaacc

SEQ ID NO: 19398 - DNA, 201 bp, Homo sapiens
atccacatgtctcagcctcccaaagtgttgggattacaggcatgagccaccacgccggcctatcctgagccttttgaagctgacgccagaggtgcaaagcscagcctctccccactggccacgtagaggctcttgttgggtagtctctcagcctgcagcagccagggatctggcctcaagtgatgccccaacagtgagcga

SEQ ID NO: 19399 - DNA, 201 bp, Homo sapiens
caatctattggctgtgcttggccccttttcccaacacacacattctgtctggtgggtggaggttaaacatgcggggaggaggaaagggataggatagagartgggatgtggtcggtagggggtctcaaggactggctatcctgacatccttcgccgcgtgcaggttggccaccatggcctgctgccagagggcacccacgt

SEQ ID NO: 19400 - DNA, 201 bp, Homo sapiens
aagtgttgggattacaggcatgagccaccacgccggcctatcctgagccttttgaagctgacgccagaggtgcaaagcgcagcctctccccactggccacrtagaggctcttgttgggtagtctctcagcctgcagcagccagggatctggcctcaagtgatgccccaacagtgagcgacttcccagtactgtcaggggaa

SEQ ID NO: 19401 - DNA, 201 bp, Homo sapiens
caatgaatgatagacatggtctccattgctcaaggctctgggaagatctagactagagaaaatgatcattgacttctacccacacctgtgggcctcagttmttccctctggtccatggttggcatggtaaccccttacaaaggtgtttccccaggggttcctagagtcctctgagtcaccataattctgcggtcaacagaa

SEQ ID NO: 19402 - DNA, 201 bp, Homo sapiens
gtccccaactagggcccctgccaccctctttcctaagggaggctgcagacttcttccatggccaaaaatccacatctaagtccccagcactggctaaaagrccctgtcatgggggctccctgtcccagctgacactggaggaaggatggtgggggaggcagggaccctcttctacttggagctcagggaccctcttccatt

SEQ ID NO: 19403 - DNA, 201 bp, Homo sapiens
aagggaggctgcagacttcttccatggccaaaaatccacatctaagtccccagcactggctaaaagaccctgtcatgggggctccctgtcccagctgacaytggaggaaggatggtgggggaggcagggaccctcttctacttggagctcagggaccctcttccattcccacctggctcctcctctttgctggtgctggaa

SEQ ID NO: 19404 - DNA, 201 bp, Homo sapiens
tgctcggtgtatatgacctttgatggccctcatggttatcatggatttctgattcttgctttgagtttactgtgattataaagatgtgcttaattaccacyagaattatcagtgtaataataaaaaacaactaatgtgaacacatatctccagcaccatgctagtttattacatgtattgtgtcatttctttctaattata

SEQ ID NO: 19405 - DNA, 201 bp, Homo sapiens
cttctggaagcgtttgcctgtttgtttgcttgtgtttctacagagtcaagtgctagatgctcttaaactcaggggggaagatttcaccactagagagggtsctctttcctgctgccatctctgggggcatctgatgcttgtgacctccagattatattgaaatagccccagctctgggcaccaggagacaggaggctcagt

SEQ ID NO: 19406 - DNA, 201 bp, Homo sapiens
accatagcaacattccagtgaacatttcttgactgatttgggagaaaacatctggttctgtgattcctcacgccttctccgagggtgaatatactctttcycaaggacagggaaagaagctgaaacataaaatcatatgaacattttcacaagaagattcctcttgaagcttcaaggaaattgtttacagacagaagaaaa

SEQ ID NO: 19407 - DNA, 201 bp, Homo sapiens
ttagtacagagtggatttcacctggttagccaagatggtcttgatctactgacctcgtgatccgcccgcctcggcctcccaaagtgctgggattacaggcrtgagccaccgcgcccagcctgatagagcatctttcggcgtgatgtgttctgagttccaaagctgaggaagagactcaaatcttcaagagctcttctaact

SEQ ID NO: 19408 - DNA, 201 bp, Homo sapiens
ccaactttgagattctctgttggtttcaggactatgggaggaagcgcttgtggtccgtgtctgttcccgggatttctgtttcttggtttgtatctctgctwcaggtccaaggagctggggcaataccttgagtctgggttattcgtccccagggacctgggggagccccaccgcctccgccccaaggttcagggaaagggg

SEQ ID NO: 19409 - DNA, 201 bp, Homo sapiens
ctcacacaggcttccctggagaacagcccacagcacagtgccctcccagcaggtgatgagtctgtggtgctggtccggtaatgcttcaggaatgatggcaraaaaaggagctctgtcttccgctctgaaagtggggagatggcagggccccagcattcacatcctaggccacaggggtgtgggttttcaatgttggttgcc

SEQ ID NO: 19410 - DNA, 201 bp, Homo sapiens
ccatctactttaaactctgatttacccactgttagtctacatttcagctcatcaacttggtgtggacggcaatttctgctgcaaatttgagatgcctaggrtgttttctaaacgatgcatacgtgagccctcactccctgagattctgatataattagactggaatgtggtccaggcaagagtagtttgaaaactttccca

SEQ ID NO: 19411 - DNA, 201 bp, Homo sapiens
tttacccactgttagtctacatttcagctcatcaacttggtgtggacggcaatttctgctgcaaatttgagatgcctaggatgttttctaaacgatgcatwcgtgagccctcactccctgagattctgatataattagactggaatgtggtccaggcaagagtagtttgaaaactttcccaggtgattctaacatgtaaac

SEQ ID NO: 19412 - DNA, 201 bp, Homo sapiens
agactccatctaaaaaaaaaagttataaaatgcagccatttgacataagagcttttagcaatgacacagaagggaagggaactgcatttggacatcataamaccacttttatttttaccatagcaacattccagtgaacatttcttgactgatttgggagaaaacatctggttctgtgattcctcacgccttctccgaggg

SEQ ID NO: 19413 - DNA, 201 bp, Homo sapiens
cagtgccttcccaaccattcccttatccaggctttttgacaacgctatgctccgcgcccgtcgcctgtaccagctggcatatgacacctatcaggagtttrtaagctcttgggtaatgggtgcgcttcagaggtggcaggaaggggtgactttcccccgctgggaagtaatgggaggagactaaggagctcagggttgttt

SEQ ID NO: 19414 - DNA, 201 bp, Homo sapiens
atgggaggagactaaggagctcagggttgttttctgaagtgaaaatgcaggcagatgagcatacgctgagtgaggttcccagaaaagtaacaatgggagcwggtctccagcatagaccttggtgggcggtccttctcctaggaagaagcctatatcctgaaggagcagaagtattcattcctgcagaacccccagacctcc

SEQ ID NO: 19415 - DNA, 201 bp, Homo sapiens; identical to SEQ ID NO: 2425

SEQ ID NO: 19416 - DNA, 201 bp, Homo sapiens
ttctggaagcgtttgcctgtttgtttgcttgtgtttctacagagtcaagtgctagatgctcttaaactcaggggggaagatttcaccactagagagggtgstctttcctgctgccatctctgggggcatctgatgcttgtgacctccagattatattgaaatagccccagctctgggcaccaggagacaggaggctcagtc

SEQ ID NO: 19417 - DNA, 201 bp, Homo sapiens; identical to SEQ ID NO: 2426

SEQ ID NO: 19418 - DNA, 201 bp, Homo sapiens
atgccagtaatctcagtactttgggaggccagggagggtggatcacctaaagtcaagagctcgagaccagcctggccaacatagtgaaaccccgtctctayttaaaaagtacaaaacttagcccggcatagtggcgggcgcctgtaatcccagctactagggaggctgaggcgggagaatcactggaacccaggaggtgga

SEQ ID NO: 19419 - DNA, 201 bp, Homo sapiens; identical to SEQ ID NO: 2427

SEQ ID NO: 19420 - DNA, 201 bp, Homo sapiens
tgtaatcccagctactagggaggctgaggcgggagaatcactggaacccaggaggtggaggttgctgtgaggcaacatcatgccactgcactccagcctcrgagacagaatgagactccatcaaaaacaagaaagaaagaaagacaaagagagaaagaaagaaagaaagaaagaaagaaagagagagagagagagagagag

SEQ ID NO: 19421 - DNA, 201 bp, Homo sapiens
cattcctgcgcatcgtgcagtgccgctctgtggagggcagctgtggcttctagctgcccgggtggcatccctgtgacccctccccagtgcctctcctggtsgtggaaggtgctactccagtgcccaccagccttgtcctaataaaattaagttgcatcattttgtttgactaggtgtccttgtataatattatggggtgga

SEQ ID NO: 19422 - DNA, 201 bp, Homo sapiens
catgccactgcactccagcctcggagacagaatgagactccatcaaaaacaagaaagaaagaaagacaaagagagaaagaaagaaagaaagaaagaaagaragagagagagagagagagagagagaaagaaagaaagaaagaaagaaagaaagaaagaaagaaagaaagaaagaaagaaagaaggaaagaaagaaaggaaa

SEQ ID NO: 19423 - DNA, 201 bp, Homo sapiens
gggagtcccagatgaaacctagggtgttcttatggatttggactaaatgataaccctgctctgtccatggtggccctggggcccctgcttcccatgtttgyttctcggtgggtaaggagctaggtaacggtgaactcagagatgaggatttttctacttttctttttggttttttttggttgtttgtttgttttggagaca

SEQ ID NO: 19424 - DNA, 201 bp, Homo sapiens
gggaagagcaaggttgtggagatctgctgccctggctgaggtagctcatgcaatcagtctctctgagcctcagtctcctgatctgtgaaatgggatgatastcatacctcctacacaagacaagttgcaggtcagacgtgagaatgcacaggcaggcctttgacaactggataagctctacacaggtctggaaaggaggaa

SEQ ID NO: 19425 - DNA, 201 bp, Homo sapiens
tgcagaaacagtatcccaaggagctgagttcagtgcaccacactccctccctacttcaccccctgctccctctcctcccctcacccaaatgctgtcccctycacccaacagctttccttcccaagggagcactagcagctccctgctttgagccaactcttctttcccactttccgtatgggcagggagtcccagatgaaa

SEQ ID NO: 19426 - DNA, 201 bp, Homo sapiens
acatctccctgctgctcatcgagtcgcggctggagcccgtgcggttcctcaggagtaccttcaccaacaacctggtgtatgacacctcggacagtgatgamtatcacctcctaaaggacctagaggaaggcatccaaatgctgatgggggtgagggtggcaccaggggtccccaatcctggaagcccactggcttcgaggg

SEQ ID NO: 19427 - DNA, 201 bp, Homo sapiens
tccgaggcccttcctccgtgcctgaaccccctggacatatcatgtggcaaactgaagggtccaacgacatacaggaagcgaaacacgatgtacactgaaaygtgcaatacaaatatgcagcatgaagtgcctcggttcactaacccgagctacgttgggtgcctcttttctaccacttttcttaatgcctatggacacctc

SEQ ID NO: 19428 - DNA, 201 bp, Homo sapiens
tgttggtttcaggactatgggaggaagcgcttgtggtccgtgtctgttcccgggatttctgtttcttggtttgtatctctgctacaggtccaaggagctgrggcaataccttgagtctgggttattcgtccccagggacctgggggagccccaccgcctccgccccaaggttcagggaaaggggagagcaatgtgtggggt

SEQ ID NO: 19429 - DNA, 201 bp, Homo sapiens
gaaacacgatgtacactgaaatgtgcaatacaaatatgcagcatgaagtgcctcggttcactaacccgagctacgttgggtgcctcttttctaccactttycttaatgcctatggacacctcattctgtggctgaagttccttgtgttcaattccccccatcttcattgaacatcctctgtgcagggacttgacccctgtc

SEQ ID NO: 19430 - DNA, 201 bp, Homo sapiens
cgcttgtggtccgtgtctgttcccgggatttctgtttcttggtttgtatctctgctacaggtccaaggagctggggcaataccttgagtctgggttattcrtccccagggacctgggggagccccaccgcctccgccccaaggttcagggaaaggggagagcaatgtgtggggttggttctctctagtggtcagtgttagc

SEQ ID NO: 19431 - DNA, 201 bp, Homo sapiens
gtccgtgtctgttcccgggatttctgtttcttggtttgtatctctgctacaggtccaaggagctggggcaataccttgagtctgggttattcgtccccagkgacctgggggagccccaccgcctccgccccaaggttcagggaaaggggagagcaatgtgtggggttggttctctctagtggtcagtgttagcactgcatc

SEQ ID NO: 19432 - DNA, 201 bp, Homo sapiens; identical to SEQ ID NO: 2331

SEQ ID NO: 19433 - DNA, 201 bp, Homo sapiens
cctggctgaggtagctcatgtaatcagtctctctgagcctcagtctcctgatctgtgaaatgggatgatagtcatagctcctacacaagacaagtggcagktcagacgtgagaatgcacaggcaggcccttggcaactggataagctctacacaggtctggaaaggaggaggagacaaaagaggaggggcttccatggctg

SEQ ID NO: 19434 - DNA, 201 bp, Homo sapiens
tcacatccctatggtcagtagagtgccaagcacatggtggacacacagaagtattgatcatcttcctcacctcccctaggagagcccttgggaatccccayataatattctctgaagacctcaatccaatgagccgagtaattgactcagtagcaaactcatagaaaggacattagaagccaaaaggaggtagagtatgtc

SEQ ID NO: 19435 - DNA, 201 bp, Homo sapiens
atacagagtcttactctgtcacccaggctggagtgcagtggcatgatctcggctcgctacaacctccacctcccgggttcaagcaattccctgccacagcsacctgagtagctcggattacatgcgcctgccaccacgcgcagctaatttttgtatttttagtagagacgggatttcaccatcttgaccaggttggtctta

SEQ ID NO: 19436 - DNA, 201 bp, Homo sapiens
gtctaattcaaagttgattttttactagcaatgaatgatagacatggtctccattgctcaagggaagatctagactagagaaaaggatcaccaacttctayccacacctgtgggcctcagttcttccctctggtccatggttgccatggtaaccccttataaaggtgtttccccaggggtccctaacgtcctctgagtcac

SEQ ID NO: 19437 - DNA, 201 bp, Homo sapiens
cccctgcccccctcattcctaagggaggcttcccttacgaatggccaaaaatccacatctaagtccccagaactggctaaaaggtcctgtcatgggggctccctgtcccagctgacattggaagaaggatggtgagggaggcagggaccctcttctacttggagctcagggacccacttccattcccacctggctcctcct

SEQ ID NO: 19438 - DNA, 201 bp, Homo sapiens; identical to SEQ ID NO: 2333

SEQ ID NO: 19439 - DNA, 201 bp, Homo sapiens
gggaggcttcccttacgaatggccaaaaatccacatctaagtccccagaactggctaaaaggtcctgtcatgggggctccctgtcccagctgacattggargaaggatggtgagggaggcagggaccctcttctacttggagctcagggacccacttccattcccacctggctcctcctctttgctggtgctgggaggagc

SEQ ID NO: 19440 - DNA, 201 bp, Homo sapiens
cagagctggtatcattgatgacacccctcttggatcctcacacaggcttccctggagaacagcccacagcacagtgccctcccagcaggtgatgagtctgkggtgctggtccggtaatgcttcaggaatgatggcaaaaaaaggagctctgtcttccgctctgaaagtggggagatggcagggccccagcattcacatcct

SEQ ID NO: 19441 - DNA, 201 bp, Homo sapiens; identical to SEQ ID NO: 2334

SEQ ID NO: 19442 - DNA, 201 bp, Homo sapiens
cctaggccacaggggtgtgggttttcaatgttggttgccaacaccacagccaaccacttctagaagcatttgcctgtttgcttgcttgtgtttctacagcrtcaagtgctacatgctcttaaactcagggtgggagaagatttcaccactacagagggtgttctttcctgctctcatctctgggggcatctgatgcttgtg

SEQ ID NO: 19443 - DNA, 201 bp, Homo sapiens
accctccctggcctcccaaagtactgagattaatggcgtgagtcaccgcccccaacccagttatttcagcttctaaatctctctgagtgcagggatcctgyccccaacacaaggggccctttgcctgattttgtctttccataaggggcagattgttctttctcaattcccaggtgagaatggcccagtggcatggggtgc

SEQ ID NO: 19444 - DNA, 201 bp, Homo sapiens
ggggtttcactatgttggccaggctggtctcgaactcttgactttaggtgatccaccctccctggcctcccaaagtactgagattaatggcgtgagtcacygcccccaacccagttatttcagcttctaaatctctctgagtgcagggatcctgtccccaacacaaggggccctttgcctgattttgtctttccataaggg

SEQ ID NO: 19445 - DNA, 201 bp, Homo sapiens
tttttagtagagacggggtttcactatgttggccaggctggtctcgaactcttgactttaggtgatccaccctccctggcctcccaaagtactgagattamtggcgtgagtcaccgcccccaacccagttatttcagcttctaaatctctctgagtgcagggatcctgtccccaacacaaggggccctttgcctgattttg

SEQ ID NO: 19446 - DNA, 201 bp, Homo sapiens
ggctcaaagcagggagctgctagtgctcccttgggaaggaaagctgttgggtggaggggacagcatttgggtgaggggaggagagggagcagggggtgaagtagggagggagtgtggtgcactgaactcagctccttgggatactgtttctgcagaccaaccacggttagaggaatccagttgctctgccaaacagacctg

SEQ ID NO: 19447 - DNA, 201 bp, Homo sapiens
agaaaaatcctcatctctgagttcaccgttacctagctccttacccaccgagaaacaaacatgggaagcaggggccccagggccaccatggacagagcagsgttatcatttagtccaaatccataagaacaccctaggtttcatctgggactccctgcccatacggaaagtgggaaagaagagttggctcaaagcagggag

SEQ ID NO: 19448 - DNA, 201 bp, Homo sapiens
tgactttgtctccaaaacaaacaaacaaccaaaaaaaaccaaaaagaaaagtagaaaaatcctcatctctgagttcaccgttacctagctccttacccacygagaaacaaacatgggaagcaggggccccagggccaccatggacagagcagggttatcatttagtccaaatccataagaacaccctaggtttcatctggg

SEQ ID NO: 19449 - DNA, 201 bp, Homo sapiens
agcccgtcctcttttgtctcttcctcctttccagacctgtgtagagcttatccagttgtcaaaggcctgcctgtgcattctcacgtctgacctgccacttrtcttgtgtaggagctatgactatcatcccatttcacagatcaggagactgaggctcagagagactgattgcatgagctacctcagccagggcagcagatc

SEQ ID NO: 19450 - DNA, 201 bp, Homo sapiens
accctgggcgaaggagtgagactgactttgtctccaaaacaaacaaacaaccaaaaaaaaccaaaaagaaaagtagaaaaatcctcatctctgagttcacygttacctagctccttacccaccgagaaacaaacatgggaagcaggggccccagggccaccatggacagagcagggttatcatttagtccaaatccataag

SEQ ID NO: 19451 - DNA, 201 bp, Homo sapiens
ccaccctgggcgaaggagtgagactgactttgtctccaaaacaaacaaacaaccaaaaaaaaccaaaaagaaaagtagaaaaatcctcatctctgagttcmccgttacctagctccttacccaccgagaaacaaacatgggaagcaggggccccagggccaccatggacagagcagggttatcatttagtccaaatccata

SEQ ID NO: 19452 - DNA, 201 bp, Homo sapiens
ctagttactggagcggctgaggcacaagaattgcttgaacctgggaggcagaggttgtcatgagccgagatcgcgccactgcactccaccctgggcgaagragtgagactgactttgtctccaaaacaaacaaacaaccaaaaaaaaccaaaaagaaaagtagaaaaatcctcatctctgagttcaccgttacctagctcc

SEQ ID NO: 19453 - DNA, 201 bp, Homo sapiens
cttgtaatcctagttactggagcggctgaggcacaagaattgcttgaacctgggaggcagaggttgtcatgagccgagatcgcgccactgcactccacccwgggcgaaggagtgagactgactttgtctccaaaacaaacaaacaaccaaaaaaaaccaaaaagaaaagtagaaaaatcctcatctctgagttcaccgtta

SEQ ID NO: 19454 - DNA, 201 bp, Homo sapiens
gcgcttgtaatcctagttactggagcggctgaggcacaagaattgcttgaacctgggaggcagaggttgtcatgagccgagatcgcgccactgcactccascctgggcgaaggagtgagactgactttgtctccaaaacaaacaaacaaccaaaaaaaaccaaaaagaaaagtagaaaaatcctcatctctgagttcaccg

SEQ ID NO: 19455 - DNA, 201 bp, Homo sapiens
gtggccaacatggtgaaactgatctctactaaaaatagaaaaattagccgggtgtggtggcatgcgcttgtaatcctagttactggagcggctgaggcacragaattgcttgaacctgggaggcagaggttgtcatgagccgagatcgcgccactgcactccaccctgggcgaaggagtgagactgactttgtctccaaaa

SEQ ID NO: 19456 - DNA, 201 bp, Homo sapiens
cctgagctccatgtagctttctgcctcccccaccatccttcctccaatgtcagctgggacagggagcccccatgacaggtccttttagccagttctggggrcttcgatgtggattttcggccatggaagaagtctccagcctcccttaggaatgagggtggcaggggccctagttggggaccactgcataactccgcaggt

SEQ ID NO: 19457 - DNA, 201 bp, Homo sapiens
acattccagtctaattatatcagaatctcagggagtgagggctcacgaatgcatcgtttagaaaacaccctaggcatctcaaatttgcagcggaaattgcygtccacaccaagttgatgagctgaaatgtagactaacagtgggtaaatcaaagagtttaaagtagatggtctttaaggtctttttatattttaaaatgtg

SEQ ID NO: 19458 - DNA, 201 bp, Homo sapiens
cggcagtggctgtgctgcccgggggctctgaccacaggtctaccccatccccacctggggagaaggcatccactcacagatttctgctgcgttttcacccwgttggaaggtgttggaatagactctgagaagcagagggaggtctgggggttctgcaggaatgaatacttctgctccttcaggatataggcttcttcctag

SEQ ID NO: 19459 - DNA, 201 bp, Homo sapiens
ctctgtcagcaaagacattgctgtcattgttcaaggtaacctttgctgccctgctgccaggcccaggatggaaacccctcaggggtttgggattcttatcyaagcatgaaaataagaaagattctactaggttgggaagaatgagactcagaagtgggcctggtgggctggggtgggtgatccttgtactctcagactttc

SEQ ID NO: 19460 - DNA, 201 bp, Homo sapiens
gactgggaaaacagattgttaagagaaagcataactcggatcaaggaaggcttcccggagggacacgaaatatcttgactttgtaaaatagcatcatcccsgaacatgaacttttcaacctcaatgtttccactaggtggagctactgctccttcatcatgtgagtctaatataaatcatccaccttccctgaattgagca

SEQ ID NO: 19461 - DNA, 201 bp, Homo sapiens
tgggaacctcactcagcgtatgctcatctgcctgcattttcacttcagaaaacaaccctgagctccttagtctcctcccattacttcccagcgggggaaaktcaccccttcctgccacctctgaagcgcacccattacccaagagcttacaaactcctgataggtgtcatatgccagctggtacaggcgacgggcgcggag

SEQ ID NO: 19462 - DNA, 201 bp, Homo sapiens
tgaacccaggacgcagaggttgccgtgagccaagattgggccatggcactccagcctgggcgccagagtgagactccatttcaacaaccacaacaacgacracaacaacaacaacaacaacaaaagtcctttctccagagcaggtggtgtggtgctactcagttatttagttattttagtttcttttctttccttctttct

SEQ ID NO: 19463 - DNA, 201 bp, Homo sapiens
caatcccagttactccggagggtgaggaggtagaatcgcttgaacccaggacgcagaggttgccgtgagccaagattgggccatggcactccagcctgggygccagagtgagactccatttcaacaaccacaacaacgacgacaacaacaacaacaacaacaaaagtcctttctccagagcaggtggtgtggtgctactca

SEQ ID NO: 19464 - DNA, 201 bp, Homo sapiens
accccacacattgctctcccctttccctgaaccttggggcggaggcggtggggctcccccaggtcactggggacgaagaacccagactcaaggtattgccycagctccttggacctgtagcagagacacaaaccaagaaacagaaatcccgggaacagacacggaccacaagcgcttcctcccacagccctgaaaccatca

SEQ ID NO: 19465 - DNA, 201 bp, Homo sapiens
agagactgattgcatgagctacctcagccagggcagcagatctccacaaccttgctcttcccacattgcatcatttaaagtcctttctccaggccgggcayggtggctcatgcctgtaatcccagcactttggaagactgaggtgggtggatcacttgaggtcagttcaaggccagactagccaacatggcaaaactccat

SEQ ID NO: 19466 - DNA, 201 bp, Homo sapiens
ccatttcacagatcaggagactgaggctcagagagactgattgcatgagctacctcagccagggcagcagatctccacaaccttgctcttcccacattgcrtcatttaaagtcctttctccaggccgggcacggtggctcatgcctgtaatcccagcactttggaagactgaggtgggtggatcacttgaggtcagttcaa

SEQ ID NO: 19467 - DNA, 201 bp, Homo sapiens
ctgtgcattctcacgtctgacctgccacttatcttgtgtaggagctatgactatcatcccatttcacagatcaggagactgaggctcagagagactgattrcatgagctacctcagccagggcagcagatctccacaaccttgctcttcccacattgcatcatttaaagtcctttctccaggccgggcacggtggctcatg

SEQ ID NO: 19468 - DNA, 201 bp, Homo sapiens
tgtctcttcctcctttccagacctgtgtagagcttatccagttgtcaaaggcctgcctgtgcattctcacgtctgacctgccacttatcttgtgtaggagstatgactatcatcccatttcacagatcaggagactgaggctcagagagactgattgcatgagctacctcagccagggcagcagatctccacaaccttgct

SEQ ID NO: 19469 - DNA, 201 bp, Homo sapiens
cttaaagtaaaagaataataataattaaaaaaaaagaaaaaaaaaagaagatttgagtctcttcccagctttggaactcagaacacatcatgccgaaagakgccctatccagccatggaagcccgtcctcttttgtctcttcctcctttccagacctgtgtagagcttatccagttgtcaaaggcctgcctgtgcattctc

SEQ ID NO: 19470 - DNA, 201 bp, Homo sapiens
atgaccaccccactttagaaccctcttagccacccaagtaggcgctggacattgtcattccactgtcacgtgcattcaacaaatacttattaagatggctcacatttccttttaaaacacgcaagccgagagataattataattgtgctcattccatcaacttctaaagactgagatttctaaataattttaaggccaaat

SEQ ID NO: 19471 - DNA, 201 bp, Homo sapiens
accctgtctttaccaaaaatacaaaaatctgccctgtgtggtggtgcacacttataatcccagctactcaggaggctgaggcatgagaatcacttgaaccygggaggaggcggaggttgcagtgagccaagatcccaccactgcactccagcctctgtctcaaaaacaaaaacaaaaacaaaacaaaaagaaactattaac

SEQ ID NO: 19472 - DNA, 201 bp, Homo sapiens
cagacacggaccacaagcgcttcctcccacagccctgaaaccatcagagaatctcaaggttggaagagctcttgaatatttgagtctcaggggaacatcayactctggagactgttgtggggtggggggagggggagggatagctttaggagatatacctaatgctaaatgacaagttaatgggtgcagcacaccagcatg

SEQ ID NO: 19473 - DNA, 201 bp, Homo sapiens
tctttctaattctcaaccagcagtggttgagtggagtttcctatacccgaggggagctgggtggacagtctctggagtgtggctccccctgcagttcagtwacatgttatgaccaccccactttagaaccctcttagccacccaagtaggcgctggacattgtcattccactgtcacgtgcattcaacaaatacttattaa

SEQ ID NO: 19474 - DNA, 201 bp, Homo sapiens
accaagaaacagaaatcccgggaacagacacggaccacaagcgcttcctcccacagccctgaaaccatcagagaatctcaaggttggaagagctcttgaakatttgagtctcaggggaacatcatactctggagactgttgtggggtggggggagggggagggatagctttaggagatatacctaatgctaaatgacaagt

SEQ ID NO: 19475 - DNA, 201 bp, Homo sapiens
caaagttggtagtatctttctaattctcaaccagcagtggttgagtggagtttcctatacccgaggggagctgggtggacagtctctggagtgtggctccscctgcagttcagttacatgttatgaccaccccactttagaaccctcttagccacccaagtaggcgctggacattgtcattccactgtcacgtgcattcaa

SEQ ID NO: 19476 - DNA, 201 bp, Homo sapiens
ttatacaaggacacctagtcaaacaaaatgatgcaacttaattttattaggacaaggctggtgggcactggagtagcaccttccacgaccaggagaggcastggggaggggtcacagggatgccacccgggcagctagaagccacagctgccctccacagagcggcactgcacgatgcgcaggaatgtctcgaccttgtcc

SEQ ID NO: 19477 - DNA, 201 bp, Homo sapiens
aatcacctgggaaagttttcaaattactcttgcctggaccacattccagtctaattatatcagaatctcagggagtgagggctcacgaatgcatcgtttaraaaacaccctaggcatctcaaatttgcagcggaaattgctgtccacaccaagttgatgagctgaaatgtagactaacagtgggtaaatcaaagagtttaa

SEQ ID NO: 19478 - DNA, 201 bp, Homo sapiens
aagtggttggctgtggtgttggcaaccaacattgaaaacccacacccctgtggcctaggatgtgaatgctggggccctgccatctccccactttcagagcrgaagacagagctccattttctgccatcattcctgaaacattatcggaccagcaccccagactcatcacctgctgggagggcactgtgctgtgggctgttc

SEQ ID NO: 19479 - DNA, 201 bp, Homo sapiens
agtaaaacattatgccaggggtcaaggatgactggagctctgcctgctgaactcttccctgtgcgagtctcactaatcttatcttcaggaagagttttcgwtagaaaataccattaagggccaggcctggtggctcctgcctatgatcctatcactttgggaggccaaggtgggtggatcacctgaggccaggagtttgag

SEQ ID NO: 19480 - DNA, 201 bp, Homo sapiens
aagagcaccctctctagtggtgaaatcttcccccctgagtttaagagcatctagcacttgactctgtagaaacacaagcaagcaaacaagcaaatgcttcyagaagtggttggctgtggtgttggcaaccaacattgaaaacccacacccctgtggcctaggatgtgaatgctggggccctgccatctccccactttcaga

SEQ ID NO: 19481 - DNA, 201 bp, Homo sapiens
agagaaggccaggactgagcctcctgtctcctggtgcccagggttggggctacttcaatataatctggaggtcacaagcatcagatacccccagagatgasagcaggaaagagcaccctctctagtggtgaaatcttcccccctgagtttaagagcatctagcacttgactctgtagaaacacaagcaagcaaacaagcaa

SEQ ID NO: 19482 - DNA, 201 bp, Homo sapiens
tggcatggggtgccttgtggaaacctcagagcaggacaaggtgaaggcagagaaggccaggactgagcctcctgtctcctggtgcccagggttggggctayttcaatataatctggaggtcacaagcatcagatacccccagagatgagagcaggaaagagcaccctctctagtggtgaaatcttcccccctgagtttaag

SEQ ID NO: 19483 - DNA, 201 bp, Homo sapiens
ccctttgcctcattttgtctttccataaggggcagattgttctttctcaattctcaggtgagaatggcccagtggcatggggtgccttgtggaaacctcasagcaggacaaggtgaaggcagagaaggccaggactgagcctcctgtctcctggtgcccagggttggggctacttcaatataatctggaggtcacaagcat

SEQ ID NO: 19484 - DNA, 201 bp, Homo sapiens
tgctaaaagctcttatgtcaaatggctgcattttataacttttttttttagatggagtctcgctctttgcctaggctggagtgcagtggtgtgatttcggyccacttcaaactccacccccgggttgaagcaattctctgcctcagcctctatagattaagagtagctgggattacaggcgcccaccaccatgaccagcta

SEQ ID NO: 19485 - DNA, 201 bp, Homo sapiens
agattacttgcgtgagccactgctcccaacccagttatttcagcttctatatccctctgagtgcagggatcctgcccccaacacaaggggccctttgcctsattttgtctttccataaggggcagattgttctttctcaattctcaggtgagaatggcccagtggcatggggtgccttgtggaaacctcagagcaggacaa

SEQ ID NO: 19486 - DNA, 201 bp, Homo sapiens
cttgaagcttcaagaggaatcttcttgtgaaaatgttcatatgattttatgtttcagcttctttccctgtccttgggaaagagtatattcaccctcggagwaggcgtgaggaatcacagaaccagatgttttctcccaaatcagtcaagaaatgttcactggaatgttgctatggtaaaaataaaagtggttttatgatgt

SEQ ID NO: 19487 - DNA, 201 bp, Homo sapiens
tttttttttgagatggagtctcattctgtcacccaggctggagttcagtggcatgatgttgcttcacagcaacctccacctttgggttccggtgattctcycgcctcagcctcccaagtagctgggattacaggcgtccaccactatgccgggctaagatttgcacttttttagtagagacgggggtttcactatgttggc

SEQ ID NO: 19488 - DNA, 201 bp, Homo sapiens
ctggagtgcagtggcgcgatctcggctcactgcaagctctgccccctggggttcatgacattctcctgcctcagcctcccgagtagctgggagtacaggcrcccgccaccttgcccagctaatttttttgtatttttagaggtggggtttcactgtgttagccaggatggtctcgaactcctgacctcgtgatccacctgc

SEQ ID NO: 19489 - DNA, 201 bp, Homo sapiens
aacacatcacgccaaaagacgccctatccagccatggaagcccctcctcttttgtctcctcctcctttccagacctgtgtagagcttatccagttgccaarggcctgcctgtgcattctcacgtctgacctgccacttgtcttgtgtaggagctatgactatcatcccatttcacagatcaggagactgaggctcagagag

SEQ ID NO: 19490 - DNA, 201 bp, Homo sapiens
tcagaacacatcacgccaaaagacgccctatccagccatggaagcccctcctcttttgtctcctcctcctttccagacctgtgtagagcttatccagttgycaagggcctgcctgtgcattctcacgtctgacctgccacttgtcttgtgtaggagctatgactatcatcccatttcacagatcaggagactgaggctcag

SEQ ID NO: 19491 - DNA, 201 bp, Homo sapiens
ggctgggctttgtacctctagcatcagcctcaaaaggctctggataggtcgggtgcgttggctcacacctgtaatcccaccactttgggaggccaaggtgkgtggatcattaggtcaggagtttaagaccaacctggtcaagatggtgaaatcccgtctctactaaaaatacaaaaattagctgcgcgtggtggcaggcgc

SEQ ID NO: 19492 - DNA, 201 bp, Homo sapiens
ccccaggcccaggaattcaacaagcatctactgagtggacccaatgcatgagaggacagtgccaagcaaacaactcaaatgtccaactggctgggcatggycaggtagcccatgctgtgtctggacgtccttctgctggtataattattttaaaatcacaggacagggaagggcccagtggctcatacctgtaatcccagc

SEQ ID NO: 19493 - DNA, 201 bp, Homo sapiens
gacaaggtgaaggcagagaaggccaggactgagcctcctgtctcctggtgcccagggttggggctacttcaatataatctggaggtcacaagcatcagatrcccccagagatgagagcaggaaagagcaccctctctagtggtgaaatcttcccccctgagtttaagagcatctagcacttgactctgtagaaacacaagc

SEQ ID NO: 19494 - DNA, 201 bp, Homo sapiens
taaatatataacggtaaaatagaaatttcgaattggaaacattcccatgaagtaaaaagctaagatacggagggagagaataagccagaaggtgatgggaygaggcagctgacacagccccaggcccaggaattcaacaagcatctactgagtggacccaatgcatgagaggacagtgccaagcaaacaactcaaatgtcc

SEQ ID NO: 19495 - DNA, 201 bp, Homo sapiens
ggttggctgtggtgttggcaaccaacattgaaaacccacacccctgtggcctaggatgtgaatgctggggccctgccatctccccactttcagagcggaaracagagctccattttctgccatcattcctgaaacattatcggaccagcaccccagactcatcacctgctgggagggcactgtgctgtgggctgttctcca

SEQ ID NO: 19496 - DNA, 201 bp, Homo sapiens
cccctttccctgaaccttggggcggaggcggtggggctcccccaggtcactggggacgaagaacccagactcaaggtattgcctcagctccttggacctgyagcagagacacaaaccaagaaacagaaatcccgggaacagacacggaccacaagcgcttcctcccacagccctgaaaccatcagagaatctcaaggttgg

SEQ ID NO: 19497 - DNA, 201 bp, Homo sapiens
acactgaccactagagagaaccaaccccacacattgctctcccctttccctgaaccttggggcggaggcggtggggctcccccaggtcactggggacgaakaacccagactcaaggtattgcctcagctccttggacctgtagcagagacacaaaccaagaaacagaaatcccgggaacagacacggaccacaagcgcttc

SEQ ID NO: 19498 - DNA, 201 bp, Homo sapiens
tgaggcaggtgaatcacttgagccctggagtttgcgaatagcctgggcaacatggcaaaaccccatttctacaaaaaacacaaaacttagccaggtatagkggcacatgcatgtagtcccagctacttgagagtctgaggtgggaggatcacttgagcacgggaggtggagggttgcagcgagttgagatcatgcactgca

SEQ ID NO: 19499 - DNA, 201 bp, Homo sapiens
ccctcaggacacattgtgcccaaagggattttaggggcgcttacctgcagccattgccgctaggtgagctgtccacaggaccctgagtggttcggggagtygggccttgggatccttgagctggtctcttgtgggccctttttatacctggccccttctctctcgctgcttctcctcacctgtttctctgcatgtttaggc

SEQ ID NO: 19500 - DNA, 201 bp, Homo sapiens
aaaataccgtgttgatagcataaacaaccagcccagggccgggggtgcattaactgagggcagcagcctatttgacctgctttcaaaactgaaattcaggytggtgtggtggctcacgcctgtaatcccagcactttgggaggctgaggcaggtgaatcacttgagccctggagtttgcgaatagcctgggcaacatggca

SEQ ID NO: 19501 - DNA, 201 bp, Homo sapiens
cagtaaaacattatgccaggggtcaaggatgactggagctctgcctgctgaactcttccctgtgcgagtctcactaatcttatcttcaggaagagttttcratagaaaataccattaagggccaggcctggtggctcctgcctatgatcctatcactttgggaggccaaggtgggtggatcacctgaggccaggagtttga

SEQ ID NO: 19502 - DNA, 201 bp, Homo sapiens
ggtagagttcttccatgaaattggcctcataggttaagagctccaaacatctctgaattccttttcatagagtgatcaactgtgagttcgcatttgccagktttcttttttttacccatatgggcatctaggttaaagttccaatctttactctcccttttcatcaataagtgcatattttcttctgtctgtaaacaattt

SEQ ID NO: 19503 - DNA, 201 bp, Homo sapiens
cacaatacatgtaataaactagcatggtgctggagatatgtgttcacattagttgttttttattattacactgataattctagtggtaattaagcacatcwttataatcacagtaaactcaaagcaagaatcagaaatccatgataaccatgagggccatcaaaggtcatatacaccgagcacagctttccggtttttcta

SEQ ID NO: 19504 - DNA, 201 bp, Homo sapiens
tataattagaaagaaatgacacaatacatgtaataaactagcatggtgctggagatatgtgttcacattagttgttttttattattacactgataattctrgtggtaattaagcacatctttataatcacagtaaactcaaagcaagaatcagaaatccatgataaccatgagggccatcaaaggtcatatacaccgagca

SEQ ID NO: 19505 - DNA, 201 bp, Homo sapiens
tgactctgtagaaacacaagcaagcaaacaagcaaatgcttccagaagtggttggctgtggtgttggcaaccaacattgaaaacccacacccctgtggccwaggatgtgaatgctggggccctgccatctccccactttcagagcggaagacagagctccattttctgccatcattcctgaaacattatcggaccagcacc

SEQ ID NO: 19506 - DNA, 201 bp, Homo sapiens
ttactatttttgagagagaatcttgctcagccatccagctggagggcagtggcatgatgggctcagtgcaactctgcctcctgggctcaagtgattctcgygcctcagtagctgggaatacaggtgtgcaccatcacacctggtaatttttgtatttttagtaagagacggggtgccaccatgttggccaggcttgtctcg

SEQ ID NO: 19507 - DNA, 201 bp, Homo sapiens
ttgactctgtagaaacacaagcaagcaaacaagcaaatgcttccagaagtggttggctgtggtgttggcaaccaacattgaaaacccacacccctgtggcytaggatgtgaatgctggggccctgccatctccccactttcagagcggaagacagagctccattttctgccatcattcctgaaacattatcggaccagcac

SEQ ID NO: 19508 - DNA, 201 bp, Homo sapiens
aggcaggcagccccttctcattgattcttttttttcttttctttttttttttttttggagacagagtctcgctctgtctcccaggctggagtgcagtggcrcaatctcggctcactgcaacttctgcttcccagcttcaagcaattttcctgcctcagcctctggagtagctgggattccagatgtgcgccaccacacccg

SEQ ID NO: 19509 - DNA, 201 bp, Homo sapiens
ttttcttctgtctgtaaacaatttccttgaagcttcaagaggaatcttcttgtgaaaatgttcatatgattttatgtttcagcttctttccctgtccttgrgaaagagtatattcaccctcggagaaggcgtgaggaatcacagaaccagatgttttctcccaaatcagtcaagaaatgttcactggaatgttgctatggt

SEQ ID NO: 19510 - DNA, 201 bp, Homo sapiens
ttcctcctttccagacctgtgtagagcttatccagttgtcaaaggcctgcctgtgcattctcacgtctgacctgccacttatcttgtgtaggagctatgastatcatcccatttcacagatcaggagactgaggctcagagagactgattgcatgagctacctcagccagggcagcagatctccacaaccttgctcttccc

SEQ ID NO: 19511 - DNA, 201 bp, Homo sapiens
agattgcaccattgcactccagcctgggcaacagagtgacaccccatcttgaagaaaacaaaaacaaaagcaaacaaacaaaaaacaaaacaaacaaaacmaaaaaaagagggaagaagggggccacttggactttctagttccagcagggagatcctggaggcttagccggctgctgcctttgcttctcactgccacagg

SEQ ID NO: 19512 - DNA, 201 bp, Homo sapiens
gaccacaagcgcttcctcccacagccctgaaaccatcagagaatctcaaggttggaagagctcttgaatatttgagtctcaggggaacatcatactctggrgactgttgtggggtggggggagggggagggatagctttaggagatatacctaatgctaaatgacaagttaatgggtgcagcacaccagcatggcacaggt

SEQ ID NO: 19513 - DNA, 201 bp, Homo sapiens
cagccatggaagcccgtcctcttttgtctcttcctcctttccagacctgtgtagagcttatccagttgtcaaaggcctgcctgtgcattctcacgtctgayctgccacttatcttgtgtaggagctatgactatcatcccatttcacagatcaggagactgaggctcagagagactgattgcatgagctacctcagccagg

SEQ ID NO: 19514 - DNA, 201 bp, Homo sapiens
agggctgtagttaccctgtatctgcaaaccctgcctcatggcctcagtgccttgaagcacagcgaatccaaaaaggaagggaaaaatgagccaggcatggyggtgtgcacctgtaatcccagctactggggaggctgaggcagaagaatcgcttgaacccgggatactgaggttgcagtgagccaagattgcaccattgca

SEQ ID NO: 19515 - DNA, 201 bp, Homo sapiens
cagggctgtagttaccctgtatctgcaaaccctgcctcatggcctcagtgccttgaagcacagcgaatccaaaaaggaagggaaaaatgagccaggcatgstggtgtgcacctgtaatcccagctactggggaggctgaggcagaagaatcgcttgaacccgggatactgaggttgcagtgagccaagattgcaccattgc

SEQ ID NO: 19516 - DNA, 201 bp, Homo sapiens
aacagattgttaagagaaagcataactcggatcaaggaaggcttcccggagggacacgaaatatcttgactttgtaaaatagcatcatccccgaacatgamcttttcaacctcaatgtttccactaggtggagctactgctccttcatcatgtgagtctaatataaatcatccaccttccctgaattgagcatttggggaa

SEQ ID NO: 19517 - DNA, 201 bp, Homo sapiens
agccttccaaattgcagataccagctagaaaaaaccatggcatcagacagcagagggaaaacgttttcccattcttcccagacctcccctgagtctggtgytatagattaagtgtaaaagtaaccctttggtttcaccacatacaaggcagtggggatacagtggtgaacaaaacattgttcctggcttccaaaaatatat

SEQ ID NO: 19518 - DNA, 201 bp, Homo sapiens
atcccagcactttgggaggctgaggcaggtgaatcacttgagccctggagtttgcgaatagcctgggcaacatggcaaaaccccatttctacaaaaaacayaaaacttagccaggtatagtggcacatgcatgtagtcccagctacttgagagtctgaggtgggaggatcacttgagcacgggaggtggagggttgcagcg

SEQ ID NO: 19519 - DNA, 201 bp, Homo sapiens
ggcaaccaacattgaaaacccacacccctgtggcctaggatgtgaatgctggggccctgccatctccccactttcagagcggaagacagagctcctttttytgccatcattcctgaagcattaccggaccagcaccacagactcatcacctgctgggagggcactgtgctgtgggctgttctccagggaagcctgtgtgag

SEQ ID NO: 19520 - DNA, 201 bp, Homo sapiens
cagcgaatccaaaaaggaagggaaaaatgagccaggcatggtggtgtgcacctgtaatcccagctactggggaggctgaggcagaagaatcgcttgaaccygggatactgaggttgcagtgagccaagattgcaccattgcactccagcctgggcaacagagtgacaccccatcttgaagaaaacaaaaacaaaagcaaac

SEQ ID NO: 19521 - DNA, 201 bp, Homo sapiens
gataggtcgggtgcgttggctcacacctgtaatcccaccactttgggaggccaaggtgggtggatcattaggtcaggagtttaagaccaacctggtcaagrtggtgaaatcccgtctctactaaaaatacaaaaattagctgcgcgtggtggcaggcgcatgtaatccgagctactcaggtggctgtggcagggaattgct

SEQ ID NO: 19522 - DNA, 201 bp, Homo sapiens
ccctcggagaaggcgtgaggaatcacagaaccagatgttttctcccaaatcagtcaagaaatgttcactggaatgttgctatggtaaaaataaaagtggtkttatgatgtccaaatgcagttcccttcccttctgtgtcattgctaaaagctcttatgtcaaatggctgcattttataacttttttttttagatggagtct

SEQ ID NO: 19523 - DNA, 201 bp, Homo sapiens
tgtgtgtgttgggaaaaggggccaaagcacagccaatagattgcgggggttctgggcatgattcagtgctgaattccacttttgctgactcctgggctcgyctgagacaggcccgcctggatgcagtgctaatactgaccactagagggaacaaactccacactttgctctcccctttacctgagccttggggcgggggcg

SEQ ID NO: 19524 - DNA, 201 bp, Homo sapiens
aaacaaccctgagctccttagtctcctcccattacttcccagcgggggaaagtcaccccttcctgccacctctgaagcgcacccattacccaagagcttayaaactcctgataggtgtcatatgccagctggtacaggcgacgggcgcggagcatagcgttgtcaaaaagcctggataagggaatggttgggaaggcactg

SEQ ID NO: 19525 - DNA, 201 bp, Homo sapiens
ggaggtctgggggttctgcaggaatgaatacttctgctccttcaggatataggcttcttcctaggagaaggaccgcccaccaaggtctatgctggagaccwgctcccattgttacttttctgggaacctcactcagcgtatgctcatctgcctgcattttcacttcagaaaacaaccctgagctccttagtctcctcccat

SEQ ID NO: 19526 - DNA, 201 bp, Homo sapiens
ccatcttccagcctctgcaaagtgaaggaagagaaggagaggccaagcgcttgggcactgttccctccctctctcattcatccattttcctccctcccctycaggttgtagagaaaggcctggaggattcacgaggggaaatgaagaatacggtgagttctcttgggtcagcgcctgactgctaaaaagagggcagcagtg

SEQ ID NO: 19527 - DNA, 201 bp, Homo sapiens
gggctgccatcttccagcctctgcaaagtgaaggaagagaaggagaggccaagcgcttgggcactgttccctccctctctcattcatccattttcctcccycccctccaggttgtagagaaaggcctggaggattcacgaggggaaatgaagaatacggtgagttctcttgggtcagcgcctgactgctaaaaagagggca

SEQ ID NO: 19528 - DNA, 201 bp, Homo sapiens
tgcgtcatcgttgtgcgattttgtgtcaaacttgctgtaggactgattgaagatctgcccagtccgggggctgccatcttccagcctctgcaaagtgaagsaagagaaggagaggccaagcgcttgggcactgttccctccctctctcattcatccattttcctccctcccctccaggttgtagagaaaggcctggaggat

SEQ ID NO: 19529 - DNA, 201 bp, Homo sapiens
tccaccccataatattatacaaggacacctagtcaaacaaaatgatgcaacttaattttattaggacaaggctggtgggcactggagtagcaccttccacsaccaggagaggcactggggaggggtcacagggatgccacccgggcagctagaagccacagctgccctccacagagcggcactgcacgatgcgcaggaatg

SEQ ID NO: 19530 - DNA, 201 bp, Homo sapiens
tgtctccaaaacaaacaaacaaccaaaaaaaaccaaaaagaaaagtagaaaaatcctcatctctgagttcaccgttacctagctccttacccaccgagaarcaaacatgggaagcaggggccccagggccaccatggacagagcagggttatcatttagtccaaatccataagaacaccctaggtttcatctgggactccc

SEQ ID NO: 19531 - DNA, 201 bp, Homo sapiens
tttcatctgggactccctgcccatacggaaagtgggaaagaagagttggctcaaagcagggagctgctagtgctcccttgggaaggaaagctgttgggtgraggggacagcatttgggtgaggggaggagagggagcagggggtgaagtagggagggagtgtggtgcactgaactcagctccttgggatactgtttctgca

SEQ ID NO: 19532 - DNA, 201 bp, Homo sapiens
gaggtgtccataggcattaagaaaagtggtagaaaagaggcacccaacgtagctcgggttagtgaaccgaggcacttcatgctgcatatttgtattgcacrtttcagtgtacatcgtgtttcgcttcctgtatgtcgttggacccttcagtttgccacatgatatgtccagggggttcaggcacggaggaagggcctcgga

SEQ ID NO: 19533 - DNA, 201 bp, Homo sapiens
agggacgtccgggagcctggggagaaaccggagggcaacagagggagctggagagcaagaggccagcgctctccctgttccaggagctgggtttttttttytctctctctctctctgcctccctccagggaccaggaacattcagagattggccaaatactgggcttagatggcgatactaacattcataagccccaaacc

SEQ ID NO: 19534 - DNA, 201 bp, Homo sapiens
gacaggggtcaagtccctgcacagaggatgttcaatgaagatggggggaattgaacacaaggaacttcagccacagaatgaggtgtccataggcattaagraaagtggtagaaaagaggcacccaacgtagctcgggttagtgaaccgaggcacttcatgctgcatatttgtattgcacatttcagtgtacatcgtgtttc

SEQ ID NO: 19535 - DNA, 201 bp, Homo sapiens
attgctaaaagctcttatgtcaaatggctgcattttataacttttttttttagatggagtctcgctctttgcctaggctggagtgcagtggtgtgatttcrgtccacttcaaactccacccccgggttgaagcaattctctgcctcagcctctatagattaagagtagctgggattacaggcgcccaccaccatgaccagc

SEQ ID NO: 19536 - DNA, 201 bp, Homo sapiens
aactgtgagttcgcatttgccagttttcttttttttacccatatgggcatctaggttaaagttccaatctttactctcccttttcatcaataagtgcataytttcttctgtctgtaaacaatttccttgaagcttcaagaggaatcttcttgtgaaaatgttcatatgattttatgtttcagcttctttccctgtccttgg

SEQ ID NO: 19537 - DNA, 201 bp, Homo sapiens
tgagcttgttgacatcattaaggatcagtggcaagcttcaactcagtaaccatctgttgcgggtcttgggggagtatacagatggtaagaaattccacttygggccagacgggcatcctatctagctcagtattctgtctctgaaggagaaggtagagttcttccatgaaattggcctcataggttaagagctccaaacat

SEQ ID NO: 19538 - DNA, 201 bp, Homo sapiens
gtgttggcaaccaacattgaaaacccacacccctgtggcctaggatgtgaatgctggggccctgccatctccccactttcagagcggaagacagagctccwttttttgccatcattcctgaagcattaccggaccagcaccacagactcatcacctgctgggagggcactgtgctgtgggctgttctccagggaagcctgt

SEQ ID NO: 19539 - DNA, 201 bp, Homo sapiens
gttttctgattactaactgggaactaaatctgtagtccaaggacaggactttgaagggagtaagtatcaaatatggggccaggaatcagagctctgttccyatctccactttcccttgctcccctgacctgggcttctggagggccagctcccagagctgagcttgttgacatcattaaggatcagtggcaagcttcaact

SEQ ID NO: 19540 - DNA, 201 bp, Homo sapiens
ctaatttttgtacttttcgtagagatggggtttcaccatgttggctgggctggtctcaaactcctgacctcaagtgatccggccaccttggcctcccaaartgctgggattacaggtgtgagccaccgcgcccagccacctttctctttagagctcactctattcattaggaatctcagtctcaatgtttgatttgtaaga

SEQ ID NO: 19541 - DNA, 201 bp, Homo sapiens
tgcacaccaccatgcctgtctaatttttgtacttttcgtagagatggggtttcaccatgttggctgggctggtctcaaactcctgacctcaagtgatccgsccaccttggcctcccaaagtgctgggattacaggtgtgagccaccgcgcccagccacctttctctttagagctcactctattcattaggaatctcagtct

SEQ ID NO: 19542 - DNA, 201 bp, Homo sapiens
ggaaacccagctccagccttggtgtgtacctggaatggggtggtctttgaccttgaagtgccacagaaggcaacccagaaccacactggaacctaccgctrcacagccactaaccagctgggctctgtcagcaaagacattgctgtcattgttcaaggtaacctttgctgccctgctgccaggcccaggatggaaacccct

SEQ ID NO: 19543 - DNA, 201 bp, Homo sapiens
acacacgctcacctgcgtcccaaagggaaacccagctccagccttggtgtgtacctggaatggggtggtctttgaccttgaagtgccacagaaggcaaccyagaaccacactggaacctaccgctgcacagccactaaccagctgggctctgtcagcaaagacattgctgtcattgttcaaggtaacctttgctgccctgc

SEQ ID NO: 19544 - DNA, 201 bp, Homo sapiens
ctcagctccttgggatactgtttctgcagaccaaccacggttagaggaatccagttgctctgccaaacagacctggctggaagggatggaacacacgctcrcctgcgtcccaaagggaaacccagctccagccttggtgtgtacctggaatggggtggtctttgaccttgaagtgccacagaaggcaacccagaaccacac

SEQ ID NO: 19545 - DNA, 201 bp, Homo sapiens
ctgaactcagctccttgggatactgtttctgcagaccaaccacggttagaggaatccagttgctctgccaaacagacctggctggaagggatggaacacamgctcacctgcgtcccaaagggaaacccagctccagccttggtgtgtacctggaatggggtggtctttgaccttgaagtgccacagaaggcaacccagaac

SEQ ID NO: 19546 - DNA, 201 bp, Homo sapiens
cagccatggaagcccctcctcttttgtctcctcctcctttccagacctgtgtagagcttatccagttgccaagggcctgcctgtgcattctcacgtctgamctgccacttgtcttgtgtaggagctatgactatcatcccatttcacagatcaggagactgaggctcagagagactgattacatgagctacctcagccagg

SEQ ID NO: 19547 - DNA, 201 bp, Homo sapiens
taccctaaaacttaaagtaaaagaataataataattaaaaaaaaagaaaaaaaaaagaagatttgagtctcttcccagctttggaactcagaacacatcaygccgaaagaggccctatccagccatggaagcccgtcctcttttgtctcttcctcctttccagacctgtgtagagcttatccagttgtcaaaggcctgcct

SEQ ID NO: 19548 - DNA, 201 bp, Homo sapiens
tggaagcccctcctcttttgtctcctcctcctttccagacctgtgtagagcttatccagttgccaagggcctgcctgtgcattctcacgtctgacctgccrcttgtcttgtgtaggagctatgactatcatcccatttcacagatcaggagactgaggctcagagagactgattacatgagctacctcagccagggcagca

SEQ ID NO: 19549 - DNA, 201 bp, Homo sapiens
ggacagcatttgggtgaggggaggagagggagcagggggtgaagtagggagggagtgtggtgcactgaactcagctccttgggatactgtttctgcagacmaaccacggttagaggaatccagttgctctgccaaacagacctggctggaagggatggaacacacgctcacctgcgtcccaaagggaaacccagctccagc

SEQ ID NO: 19550 - DNA, 201 bp, Homo sapiens
ctgggaatacaggtgtgcaccatcacacctggtaatttttgtatttttagtaagagacggggtgccaccatgttggccaggcttgtctcgaacttgtgacstcctcccgcctcagccctccaaagtgctgagataactggcgtgagccaccgtgcctggccgtttatcctctcaaggatggtcagggtgacattctggtgt

SEQ ID NO: 19551 - DNA, 201 bp, Homo sapiens
gacatactctacctccttttggcttctaatgtcctttctatgagtttgctactgagtcaattactcggctcattggattgaggtcttcagagaatattatrtggggattcccaagggctctcctaggggaggtgaggaagatgatcaatacttctgtgtgtccaccatgtgcttggcactctactgaccatagggatgtga

SEQ ID NO: 19552 - DNA, 201 bp, Homo sapiens
tcctcatctctgagttcaccgttacctagctccttacccaccgagaaacaaacatgggaagcaggggccccagggccaccatggacagagcagggttatcwtttagtccaaatccataagaacaccctaggtttcatctgggactccctgcccatacggaaagtgggaaagaagagttggctcaaagcagggagctgctag

SEQ ID NO: 19553 - DNA, 201 bp, Homo sapiens
taagaccaacctggtcaagatggtgaaatcccgtctctactaaaaatacaaaaattagctgcgcgtggtggcaggcgcatgtaatccgagctactcaggtsgctgtggcagggaattgcttgaacccgggaggtggaggttgtagcgagccgagatcatgccactgcactccagcctgggtgacagagtaagactctgtat

SEQ ID NO: 19554 - DNA, 201 bp, Homo sapiens
gatcctaaagtggtgtctttcaggcttcaagatctcctgttaggttcaagactgtggggttgaggacgatcacatttttcgaagccattctcaccggtctyaggaatcgcctccgagggactggtgggtgctccttccactctcactttggtgatttgaggcgcacacttctcacctgcagctctgttctttcttccttga

SEQ ID NO: 19555 - DNA, 201 bp, Homo sapiens
gtgactcagaggacgttagggacccctggggaaacacctttataaggggttaccatggcaaccatggaccagagggaagaactgaggcccacaggtgtggrtagaagttggtgatccttttctctagtctagatcttcccttgagcaatggagaccatgtctatcattcattgctagtaaaaaatcaactttgaattagac

SEQ ID NO: 19556 - DNA, 201 bp, Homo sapiens
aggaggagccaggtgggaatggaagtgggtccctgagctccaagtagaagagggtccctgcctccctcaccatccttcttccaatgtcagctgggacagggagcccccatgacaggaccttttagccagttctggggacttagatgtggatttttggccattcgtaagggaagcctcccttaggaatgaggggggcagggg

SEQ ID NO: 19557 - DNA, 201 bp, Homo sapiens
gctcctcccagcaccagcaaagaggaggagccaggtgggaatggaagtgggtccctgagctccaagtagaagagggtccctgcctccctcaccatccttcytccaatgtcagctgggacagggagcccccatgacaggaccttttagccagttctggggacttagatgtggatttttggccattcgtaagggaagcctccc

SEQ ID NO: 19558 - DNA, 201 bp, Homo sapiens
aggatgtgaatgctggggccctgccatctccccactttcagagcggaagacagagctcctttttttgccatcattcctgaagcattaccggaccagcaccmcagactcatcacctgctgggagggcactgtgctgtgggctgttctccagggaagcctgtgtgaggatccaagaggggtgtcatcaatgataccagctctg

SEQ ID NO: 19559 - DNA, 201 bp, Homo sapiens
cacaagcatcagatgcccccagagatgagagcaggaaagaacaccctctgtagtggtgaaatcttctcccaccctgagtttaagagcatgtagcacttgaygctgtagaaacacaagcaagcaaacaggcaaatgcttctagaagtggttggctgtggtgttggcaaccaacattgaaaacccacacccctgtggcctagg

SEQ ID NO: 19560 - DNA, 201 bp, Homo sapiens
ccagaatgccagcaaaacgtgggaactgagtctgtatgagctgcaccggaccccgcaggtgacaggcattctccctttcaggcttaccccctcccccaaamccttatatccacagaccgcatcacacagcttcttttccgtaatttgctctattctgccttgcctggccctacctttgaatcaccttaatctttccaaagc

SEQ ID NO: 19561 - DNA, 201 bp, Homo sapiens; identical to SEQ ID NO: 2511

SEQ ID NO: 19562 - DNA, 201 bp, Homo sapiens; identical to SEQ ID NO: 2509

SEQ ID NO: 19563 - DNA, 201 bp, Homo sapiens; identical to SEQ ID NO: 2510

SEQ ID NO: 19564 - DNA, 201 bp, Homo sapiens
gcccgtgtaggggtgctctgtgactcccaagcaggaggatcactgcaggccagtagggaggtgaggagcggcctcacagaggaggtgggactgggctgggraaggaaacagagaagcctttctgcagtgggtgagggagatggggggaagctccctctcccttaccctacctaccacccagcacgattttacctctcaggc

SEQ ID NO: 19565 - DNA, 201 bp, Homo sapiens
gccctacggagcgggtaataggagagacatgtttgagatgagatgaaggggtacaaagttagggccctctcactggtcttggttcagcctaggcttcagtwcccttgactgaccactcagggcttcccttctcctaccccaggaacaaggagtgtcctacctgccgaaagaagctggtgtccaagcgatccctacggccag

SEQ ID NO: 19566 - DNA, 201 bp, Homo sapiens
cctaccccaggaacaaggagtgtcctacctgccgaaagaagctggtgtccaagcgatccctacggccagaccccaactttgatgccctgatctctaagatytatcctagccgggaggaatacgaggcccatcaagaccgagtgcttatccgcctgagccgcctgcacaaccagcaggcattgagctccagcattgaggagg

SEQ ID NO: 19567 - DNA, 201 bp, Homo sapiens
cccgggcctagggagaggcgcggcggcggcgggagcgcgaacggctggagctgggtgaggggcagtgccggcgcgggggcgggagcgggggcggagagggkcgcttctggaggggcggggtctacgcgaggggcggcccccctgacgccctcctccccttccccccacccccagccttcttcgccttctcctcggctgtgg

SEQ ID NO: 19568 - DNA, 201 bp, Homo sapiens
tcgtggttccatcatcaacatcagtagcatcgtaggaaaggtcaggttgagttggacgaggtcagccagccaagtggtatagagaggagaacccctccttragactcctgactcattccacatctctgactcacctataggtggggaacgtggggcagacaaactatgcagcatccaaggctggagtgattgggctgaccc

SEQ ID NO: 19569 - DNA, 201 bp, Homo sapiens
gccctactcctgcagaaagtgtggccacagctcttgccacagctcacacctggcccagcactgcggcacacacctgcctgaacccaatcactgccaccagygtggcaagggcctctccccaaggctccagcccgttgcagcctgccactctacacacaggcaagcagccttacgtctgtgccacctaagccttcttgtggt

SEQ ID NO: 19570 - DNA, 201 bp, Homo sapiens
ccagccctaaccacccggcagcctcttctctgtctctgctgcccgtcctgccttcactctgaaacagcctgccccctcccgggtccccagtcctcaccttygccccacacgcccccctctctatttatcacatttcctttcgtgtccccctaaccccatcgcttggtgcgagtgctctcttgccctcctctccccatgact

SEQ ID NO: 19571 - DNA, 201 bp, Homo sapiens
ttccctttctctgcctggtctcccagggcaacccccgccgccgggtgtgagaggaaagagtatgtgtcactgtgtatgcgtgacactccgggtctttttgragggaggggttcgtgcgtcacccctttccactggttctgcagcaccagtcccctccccccaactccctgggttcttatggtccccaagggtgatttgttc

SEQ ID NO: 19572 - DNA, 201 bp, Homo sapiens
tccgccccacatgcagtctttgtctttttggggggaatggggccccttgtcttctccacacccggggcccctaagcagcagtgtcgggccacgccccctckgtgggaggtcggcctgcgctggtggccgcagatggcctaaggctggcgggcctttgattggccccggctttgcccttgccacgcccctctgcgctgggat

SEQ ID NO: 19573 - DNA, 201 bp, Homo sapiens
gtgagggtcaggagagaagcagaactgatgggatgggtccgtgggtcagtccttgttgcctgctagcttctaagcctcagcatcctaggagctgaccacakactgatcattagggctggaaatcatgggtgtaaattgcagtttcttagtaaacaactggccctgctcttcttaagaaaaatatagggctgggcacagtga

SEQ ID NO: 19574 - DNA, 201 bp, Homo sapiens
gtcagatgcttgagggtgctggggagcacctggggggtctgagggaggtaccagcattcagccctctccagaatcggcagccactctccttcccacagacrtgggatccgctgtaactctgtcctcccagggttcattgcaacacccatgacacagaaagtgccacagaaagtggtggacaaggtaggaggctgtgggtgg

SEQ ID NO: 19575 - DNA, 201 bp, Homo sapiens
ctgccagagaggtggaacaagtattattatcttcatttgaaagatcacaaacacaaaaattaccttccctgttcctcattcagtgtcataagtcagtgcayataagactcactttgggagtttattaaaagcagagcttcatgccccccaacattctgattcagtagtgaattgggttctcagaatctgaatttttaacag

SEQ ID NO: 19576 - DNA, 201 bp, Homo sapiens
agcgggtcggagggtctagggagagccaaagcagagggtggagggagtccccagggtggtaaggggaatcccgggcacatcgggacctaggtgtgttctcrggactagaaggctaaagcggcagatcttttgcagccttttcccccgggatcctggaatgggggttacggagaagtgaggggggttgatccccagagtcgc

SEQ ID NO: 19577 - DNA, 201 bp, Homo sapiens
tccaagtcatcagtccttctctttctcagaattcttgtctcctatagagaccaacatgggtcttctcactgtatttctcaaaattcttattttatgggctrctgtttctaaaacccctttccctctaacccacaccacctttctactcactgatgccttcaggaagccataatggatggcacagagattgctgtttcccct

SEQ ID NO: 19578 - DNA, 201 bp, Homo sapiens
ctttttattttgatgtttagtttccaaatccatgtcccctatacctataccccaccagccacttctaaaccactgataatctttagctattggtgagtgcytttttctcttttctgcccatcaggcgatgcgtctgcaactactgacagcagtaggggcactggcaggcacagcctgtgcccttctcactgaaggaggagc

SEQ ID NO: 19579 - DNA, 201 bp, Homo sapiens
ctccagacattctgcccctgtgtaccccacccacacgcgcacccccccttcccaatgggagctccatcttgtgtatgtccctgtttccgcgtggtgtctcyattccccctttcctcccgtgcgcctccctcccttccccgccccgggccgcggctcctgattgtccaaacgcaattctcgagtctatggctccggccgaga

SEQ ID NO: 19580 - DNA, 201 bp, Homo sapiens
gaggttaaggcatgagaatcacttgaacctgggaggcggagtttgcagtggccgagatcacgccactgcactccagcctgggcgacagagtgaacctctayctcaaaacagaacaaacaaagaaaaaaatgcccttaagagttcttttataaaaataaaaacagaaaaaaaatagataacttaatttccagagatctccag

SEQ ID NO: 19581 - DNA, 201 bp, Homo sapiens; identical to SEQ ID NO: 2514

SEQ ID NO: 19582 - DNA, 201 bp, Homo sapiens
gccccacgaggtcggagactttgccatcttggtccagtctggctgcagcaaaaagcaggttggtgatgtctgccaaacacagctgcctcaaaccctttatytctcctcactcaccctaaacccaaacagcctcttattagttccaaacaattcatactgtcattgacaagtcctctagaaatgagggggaagaagttctgg

SEQ ID NO: 19583 - DNA, 201 bp, Homo sapiens
tatttccttacagattactgaaatgatcccgatgggacacttgggggaccctgagggtgagcactgaatgtagtggggtccctgggaagggggcctgaatraagagatccccaaagtttggggattttctaggggactggtggttggtgtctgtggagaggtttgtggggagggatgtctttggtgggagattatggctgt

SEQ ID NO: 19584 - DNA, 201 bp, Homo sapiens
gcttcacagagagagagagagagagagagagagaatactgggcacagttcctggcaaacattaaatattcaatgaatgtatgagaaatgaagacaaaaaarggtcacagactcagtcttcaaaaaaatccataaaagaagctttcacccacatgagtatttccttacagattactgaaatgatcccgatgggacacttggg

SEQ ID NO: 19585 - DNA, 201 bp, Homo sapiens
atgctgccttccaggctgacgtgtctgaggccagggccgccaggtgcctgctggaacaagtgcaggtgaacgctaggccactttccccctctaaagctctratattgcctccactgccccggctttttgtggggggtttttgatgcgtaacctccccctcccataggcctgcttttctcgcccaccatctgtcgttgtgtc

SEQ ID NO: 19586 - DNA, 201 bp, Homo sapiens
agcatctcaatattgaatccagcacctagtcctatccattttatctgctctaatatatctcaagtctgtccactcgttttcatccctccacatccctgggytagccaccatgtggaccatgtggccttctctgagtcattgcagtagctgaagaggctgggaatggccttctctacagtatgacacacacctaagagggat

SEQ ID NO: 19587 - DNA, 201 bp, Homo sapiens
tcaggaatgctgaatatgggaagcaggggtgcttgtgaccctaataaattccaagtcctcttccctgccacctccggctcttcttgtgtccaagccctcakacccttccccacctccccctcctttccctttcccgaaggattgttccctttctctgcctggtctcccagggcaacccccgccgccgggtgtgagaggaaa

SEQ ID NO: 19588 - DNA, 201 bp, Homo sapiens
ttatcgcttttattattccttttttctttcctcctcccttggtcaccttttgcctctcattcatttccttttccatcttctccaactttcctctctctttycccctctctcccttttaccccctcctcagacgttgaatggctcgctgaccctggagctggtgaatgagaaattctggaaggtgtcccggccactggagct

SEQ ID NO: 19589 - DNA, 201 bp, Homo sapiens
acaaagtatctatatgagattcttctatattgtacagagtggggcaaaacacgcccccatctgctgccttttctattgccctgcaacgtcccatctatacsaggtgttggagaaggtgaagaaccctcccattcacgcccgcctaccaacaacaaacgtgcttttttcctctttgaaacctgcagttctgtgtgtctgttt

SEQ ID NO: 19590 - DNA, 201 bp, Homo sapiens; identical to SEQ ID NO: 5514

SEQ ID NO: 19591 - DNA, 201 bp, Homo sapiens
gaacaaacaaagaaaaaaatgcccttaagagttcttttataaaaataaaaacagaaaaaaaatagataacttaatttccagagatctccaggacaaccccstaccatcaaatcctagtcccccaactaatcccacccaacccccagaggctactgggttcttcctgcctcaggtgttcacactacacccggcgcccctatt

SEQ ID NO: 19592 - DNA, 201 bp, Homo sapiens
agctgggtgaggggcagtgccggcgcgggggcgggagcgggggcggagaggggcgcttctggaggggcggggtctacgcgaggggcggcccccctgacgcmctcctccccttccccccacccccagccttcttcgccttctcctcggctgtggagccctggtggggggtctgcgcccggtcaccatgacgacgccggcgaa

SEQ ID NO: 19593 - DNA, 201 bp, Homo sapiens
gagcagccggtttctatagctggaaagagggagggaggtggagaggactgcggagaagctccctgttcgacatcccagtccccgggccacctcccaaaaamgggcaggctgggctgcagactcggagtgtgagtgcacagcctttgcccgccgggcagcggggctgagcggagggagggtcgcctgggaacactagttctg

SEQ ID NO: 19594 - DNA, 201 bp, Homo sapiens
aggaggctgtgctctgggcttctccaccttcacagtccacctcagcgaggagggaggtgccgctgaaaccgccaaccacttcttcagttgggtgtggggcwtagcctctcctctcccacctctgtctcctctgcttcctcctcccccatgctgctctcacctctctcccctctccctgcaggctgggagcaaagggagagg

SEQ ID NO: 19595 - DNA, 201 bp, Homo sapiens
ctgaggggaggtgtgagaatagctgaccaagactggaacaagtggtgatggaagcctctgatcattttctcttcttgtcctgtacaagacctgcgtgtgtyggggtacctgaatctggctgctgacttggcacacaacttcactgatggtctggccattggggcttcctttcgagggggccggggactagggatcctgacc

SEQ ID NO: 19596 - DNA, 201 bp, Homo sapiens
cccaagcaggaggatcactgcaggccagtagggaggtgaggagcggcctcacagaggaggtgggactgggctggggaaggaaacagagaagcctttctgcmgtgggtgagggagatggggggaagctccctctcccttaccctacctaccacccagcacgattttacctctcaggcttctcagtctccaaagcagagcaga

SEQ ID NO: 19597 - DNA, 201 bp, Homo sapiens
gcaaagggagaggaggaggagaagagaggacagacccagccctctacctactatggcactcctttacctgccagctgtcacaaccaacccttccccaactsccctacccgggacccccatctccacccacaaatccactcaaatttcctgcctggaatgtggagtctcttcccactgctctcacctctctcagcacagcct

SEQ ID NO: 19598 - DNA, 201 bp, Homo sapiens
tcaagtctgtccactcgttttcatccctccacatccctgggctagccaccatgtggaccatgtggccttctctgagtcattgcagtagctgaagaggctgrgaatggccttctctacagtatgacacacacctaagagggatcctttaaaaatgcaaatctgattgtttcagtcagcctccttaaacctattcagtggttt

SEQ ID NO: 19599 - DNA, 201 bp, Homo sapiens
tccacccacaaatccactcaaatttcctgcctggaatgtggagtctcttcccactgctctcacctctctcagcacagcctgggcaaggggcccttctcctscccctaatataggaagtacttcagccaaggggcccacctgaccctgtgcgaacactttcacacaggtgataggccctactcctgcagaaagtgtggccac

SEQ ID NO: 19600 - DNA, 201 bp, Homo sapiens
gcggagaccgtggttccctaagtggcgcagaactcccgggacgcaggatcctcacgcgggacgagcccgtcccgtgggcgggagaaccgcggcgtccacgkcccgtcccacccgcgccgcgaatggtgggtgacgtctccgccggcggggggagcgggtgtagcggaggagcaggcggaagtgacgtagggccccagcgcc

SEQ ID NO: 19601 - DNA, 201 bp, Homo sapiens
gcaaggaggggccgccccgagggaaccatgctgccttccaggctgacgtgtctgaggccagggccgccaggtgcctgctggaacaagtgcaggtgaacgcyaggccactttccccctctaaagctctgatattgcctccactgccccggctttttgtggggggtttttgatgcgtaacctccccctcccataggcctgctt

SEQ ID NO: 19602 - DNA, 201 bp, Homo sapiens
ctgatggtctggccattggggcttcctttcgagggggccggggactagggatcctgaccacaatgactgtcctgctacatgaagtgccccacgaggtcggrgactttgccatcttggtccagtctggctgcagcaaaaagcaggttggtgatgtctgccaaacacagctgcctcaaaccctttatctctcctcactcaccc

SEQ ID NO: 19603 - DNA, 201 bp, Homo sapiens
ctcttttctgcccatcaggcgatgcgtctgcaactactgacagcagtaggggcactggcaggcacagcctgtgcccttctcactgaaggaggagcagtggrcagtgaaattgcaggtggtgcaggtcctggctgggtcctgccatttactgcaggtggctttatctacgtagcaacagtgtctgtgttgcccgagctgctg

SEQ ID NO: 19604 - DNA, 201 bp, Homo sapiens
tcatctcccaccacaccccctcactcgtgtgctccagttgctgtccaccttgtgcttcctcctgcacagagtctccagggaggctggaccctctgtggaamggctccttcctctgttcctctcctcttagctcctcttcattcttcaggcctcaccttctcaatagcctcagggaagccttcctgaccttcttttcagggt

SEQ ID NO: 19605 - DNA, 201 bp, Homo sapiens
tcacaaatcacatggaatatgtgctgtgggtaatggcaggtatctgagaaacactaaaggactgggtgtaaagtggtctctgaggggaggtgtgagaatarctgaccaagactggaacaagtggtgatggaagcctctgatcattttctcttcttgtcctgtacaagacctgcgtgtgtcggggtacctgaatctggctgc

SEQ ID NO: 19606 - DNA, 201 bp, Homo sapiens
aagatgggccagtgagacctcagaacgctgaagaagaaaaaagaggcttaggtaagggccagagttggtgataaatttgggcaagggacatcatcacaaaycacatggaatatgtgctgtgggtaatggcaggtatctgagaaacactaaaggactgggtgtaaagtggtctctgaggggaggtgtgagaatagctgacca

SEQ ID NO: 19607 - DNA, 201 bp, Homo sapiens
tccggccccaccccctgctcgtggagaagggagaatactgccagacgaggtgaggagccctgtctttccccagccactgagaaaccaaagatcacctagakttccatcagaagtgggctttgcccaaacccaaaataccaccccaacccagaatccattttggaaagcccctacctccagtcctcatctgaggcgctctgg

SEQ ID NO: 19608 - DNA, 201 bp, Homo sapiens
agcaggaagcaggggagccaggagggcctggagggggcgcctctgacaccggaggacctgatgggtgtggcggggagggtgggggtgccggaggaggtgayggtcctgaggagcctgctttgcccagcctggagggcgtcagtgaaaagcagtacaccatctacatcgcacctggaggcggggcgttcacggtgagagctt

SEQ ID NO: 19609 - DNA, 201 bp, Homo sapiens
tgcccagaatgccagcaaaacgtgggaactgagtctgtatgagctgcaccggaccccgcaggtgacaggcattctccctttcaggcttaccccctcccccmaacccttatatccacagaccgcatcacacagcttcttttccgtaatttgctctattctgccttgcctggccctacctttgaatcaccttaatctttccaa

SEQ ID NO: 19610 - DNA, 201 bp, Homo sapiens; identical to SEQ ID NO: 2524

SEQ ID NO: 19611 - DNA, 201 bp, Homo sapiens; identical to SEQ ID NO: 2525

SEQ ID NO: 19612 - DNA, 201 bp, Homo sapiens
cagaagaggagctgaagacccacattagcaagggcacgctgggcaagttcactgtgcccatgttgaaagaggcctgccgggcttacgggctgaagagtggkctgaagaagcaggagctgctggaagccctcaccaagcacttccaggattgaccagaggccatgcgtccagctgcccttccacagtgaggccaggctgcct

SEQ ID NO: 19613 - DNA, 201 bp, Homo sapiens
tgaaaaggagagaaaaaatataaataaatgaaataaactattactttctgaaggggtgggttgtccctccacacctgtgggtgtttcttgttaggtggaaygagagacttggaaaagaaaaagacacagagacaaagtatagagaaagaaataagggggcccaggggaccagcgttcagcatatggaggatcccgccagcc

SEQ ID NO: 19614 - DNA, 201 bp, Homo sapiens
gtctggggacagctggagaggagtacaagcccagagctttctctggaataagcagacaaatcacacaagttaaagtcccttgaactcgcccactaaaaagkaaactcttaggaacactgacctgcttcaggccaaacactaacaccaggactataacctagaccaactcctgagaaacaagtaaggtttccccttctttga

SEQ ID NO: 19615 - DNA, 201 bp, Homo sapiens
agtggcatgatcttggctcattgcaacttctgcctcccaggttcaagcgattctcctgcctcagcctcccgagtagctggttttacaggcgcctgccaccrtgcccagctaatttttgtagtttttagttgaaacagggtttcaccatcttggccagactggtcttgaactcctgacctcgtgatccacctgcctcagcct

SEQ ID NO: 19616 - DNA, 201 bp, Homo sapiens
cacccattcctatctccggacgcctcttcccaaatcctgcggcctctgacaaatgcctcacaatgtctgggctgacctcgaaaattcaggtacgaccggtyccattctacagcggagggcaccgaggctcagagaggccaacggggctgttttcgggtaacatctacctgatccagatcccgcacgtgccttccccctgcc

SEQ ID NO: 19617 - DNA, 201 bp, Homo sapiens
gcggccgtccatctcccgagccaggacagcgcgcatgtgcgtccagaggggcagacccgcgctccagccagcgcgctgattggtcagctggagtgtcaatsggaatggtgaccgggcgggactcagagcctgaggaggcggggcttttcctccgcccaggaaggaaatgcagaaatgccttcctatgcttttagggagagc

SEQ ID NO: 19618 - DNA, 201 bp, Homo sapiens
ggttgtgagggcctctaagtgggtcctcttgtttccctgtcttctgaggcccagggctttctcagggcctccgtgggtcccccccctgcacccatcacatrgagcctgggtcctgtctgccaggctcacactccccacacccatcttgctgtcctatttccatccctacgacagccccctgggcactgccagtccctctct

SEQ ID NO: 19619 - DNA, 201 bp, Homo sapiens
aaattaggtggcttgtcccagctcatgctgctagtgggaggcagaagcagggctgatcccgtggcttcaatggagagcccaactgcacgccgaggcagtcycctcccggtccttgtgcggccgtgcctctcacccctcacctttccggtccaccacggctgcccgcagcgcatcaaccagctcctcccgactgaggttttt

SEQ ID NO: 19620 - DNA, 201 bp, Homo sapiens
gggcagggccacagtataggcagtggtcacttgcctgttttaggggacaggagagccagccatcccaaatccatacccctgactcctctctgtaggggtamtatatctagaagcacccctcctcttcccagacccggactcacgagattgaccccatcaatgtgttccagtttcagggcagcctggatcttcccctcagaa

SEQ ID NO: 19621 - DNA, 201 bp, Homo sapiens
gggcctttgacagacacttctttttttttttccttcgagatggagtctcactctgtcacccgggctggagttcagtggcacgatcttggctcactgcaacstctgcctcctgggttcaagcaattctcctgccccagcctcccaagtagctgatactacaggcatgcaccatcatacctgcctaattttttgtatttttta

SEQ ID NO: 19622 - DNA, 201 bp, Homo sapiens
ttagtttgcctcattgttaccccggcttcttccaagcgcacaagcttaccgcaaggctgactgtagacgtactcgggatctcttgtggacttgtcctcaaygaccacactcgagcgtaccttcaccctagagaaaagcacccacgttgggcaccagatgaaggggtgggttgcccctccacacctgtgggtgtttcttgtt

SEQ ID NO: 19623 - DNA, 201 bp, Homo sapiens
catgggtcccctggaagtctgtcttgtgctacatacaatgatgaaaatctagggcccggtgtggtggctcatgcctgtaatcccagcactttgggaggccraggcgggcggatcacgaggtcaggagatcgagaccatcctggctaacacagtgaaaccccgtctctactaaaaatacaaaaaattagccgggcgtggtgg

SEQ ID NO: 19624 - DNA, 201 bp, Homo sapiens
tggagtgtcaatcggaatggtgaccgggcgggactcagagcctgaggaggcggggcttttcctccgcccaggaaggaaatgcagaaatgccttcctatgcwtttagggagagcgctgtagcagaagaatttgatctgatcaaaaaacctgtcttagcaaaaaacctgaagccgcctttgcaaaaattatattacaaaatta

SEQ ID NO: 19625 - DNA, 201 bp, Homo sapiens
ctcagaaagacacattccacgtgatgtccctgaagtgtccatctaaaaaagttgacctcatagaaatagcgagtgggtcgatggtgaacgatggctgggastggtgtgtggaggggtggcagagggaagaaatgggggcttgtcggtcaaaaaaccacagtctcagttggaaaggaggaagaggttttgacatctagtgca

SEQ ID NO: 19626 - DNA, 201 bp, Homo sapiens
caagaacattaaaaaccttgtgacaggttgaccacgtgtagacttcaacggctgtgggtgagaactgggcaagatgccgatgctgccatttgcccagcacmtctggcccagaggcattcagcagaggacgcagatgtccaagctgctaccagggtcagtggaacaggattcaaaagtcaagagggcatctggcaaccctgt

SEQ ID NO: 19627 - DNA, 201 bp, Homo sapiens
tttttttttttttagtagagacggggtttcaccgtgttagccaagatggtctcgatctcctgacctcatgatccgcccgcctcggcctcccaaagtgctgrgattacaagcgtgagccattgtgcccggcctttctttttttcttttttttttttttttttgagatggagtctcattcagtcccccaggttggagtgcagt

SEQ ID NO: 19628 - DNA, 201 bp, Homo sapiens
tagagcctgggcaggggtgggaggtgtccccggggaccccagtgcacgagagccctgtgcctgcacggccctccaccaggaggccaggcctcagaggcagkccagcattggagccacttaccacatgaacaaatgtctgtgtccccccaaactcatgtgttgacacctcatccccaaggtgatggcatctggaggtggcat

SEQ ID NO: 19629 - DNA, 201 bp, Homo sapiens
cctgggcaggacgggccacggccccttggggcacctgttgcctgtgcccttgatgggtggcctgcaggggacgtggccgcacttggtcagtggtggttctrgggcagccacattcaggtgggcagcattttaggaaggacaaactccaaaacccaggctccaaaggatccacgggaaggtcgagaggctcaggggagtgtc

SEQ ID NO: 19630 - DNA, 201 bp, Homo sapiens
actccagcctgggcaaaagagctagactccatctcaaaaaaaaaaaaaggaaagaaaatctggaaactgtaatttaactcctggccctagacaggactcargttttgtgaaagggaggaagaaaaaaaaagcaaaccccaccaaaccaacacctagtctaaagcctgatataaatgccattcaaaacatgtttcctccttt

SEQ ID NO: 19631 - DNA, 201 bp, Homo sapiens
aagcatcacaggggggaggggcaagggtcctgcgagctggtcttgccatcccttgtcccccagtttacatgaagccgagtttacatgaagccaagctccaragaagaggcagggcctgtggggcatttggattacactccaagtctaattcccagtccagcaatcctgcccccagaggcttccttcatctttccacttagc

SEQ ID NO: 19632 - DNA, 201 bp, Homo sapiens
caagggtcctgcgagctggtcttgccatcccttgtcccccagtttacatgaagccgagtttacatgaagccaagctccagagaagaggcagggcctgtggrgcatttggattacactccaagtctaattcccagtccagcaatcctgcccccagaggcttccttcatctttccacttagccaaggaaggagcaggtcagct

SEQ ID NO: 19633 - DNA, 201 bp, Homo sapiens
gggcaggacgggccacggccccttggggcacctgttgcctgtgcccttgatgggtggcctgcaggggacgtggccgcacttggtcagtggtggttctaggkcagccacattcaggtgggcagcattttaggaaggacaaactccaaaacccaggctccaaaggatccacgggaaggtcgagaggctcaggggagtgtcctg

SEQ ID NO: 19634 - DNA, 201 bp, Homo sapiens
cctccagccctaaggcggttttcccctatctcagtagatggaacatacaatcgggttttataccgagacattccattgcccaggggacattccattgcccrgggacgggcaggagacagatgccttcctcttgtctcaactgcaaagaggcatgccttcctcttttactaatcctcctcagcacagaccctttacaggtgt

SEQ ID NO: 19635 - DNA, 201 bp, Homo sapiens
tgcccagggacgggcaggagacagatgccttcctcttgtctcaactgcaaagaggcatgccttcctcttttactaatcctcctcagcacagaccctttacrggtgtcgggctgggggacggtcaggtctttcccttcccacgaggccatatttcagactatcacatggggagaaaccttggacaatacctggctttcccag

SEQ ID NO: 19636 - DNA, 201 bp, Homo sapiens
tcttggagccttgccacaaaatcagggtagggctctttagagccttgtcttgtattaaatgaggggcaggcggttcctgggtcttggattttttcccaggytctaaggcagatagctctaacttgctcaatggcctcattttgcattaatgcttgttgactaatagtgctccaattttgaccagttcccagtagttgatct

SEQ ID NO: 19637 - DNA, 201 bp, Homo sapiens
catgccaaaagctatgggtgggctcagaatgccccggaaggaagtcagataactgaaaagaacacttgcactggtcacaggaaaaccagcctgagctgccrgcagcctccgggaggtgttgggatggcctgcccctggtttccatgcgggtcctgacccagagagcaggccccaggggagtgggggtcagcagaggcagga

SEQ ID NO: 19638 - DNA, 201 bp, Homo sapiens
ctcagaatgccccggaaggaagtcagataactgaaaagaacacttgcactggtcacaggaaaaccagcctgagctgccggcagcctccgggaggtgttggkatggcctgcccctggtttccatgcgggtcctgacccagagagcaggccccaggggagtgggggtcagcagaggcaggatggggcccggtctgcttgtgag

SEQ ID NO: 19639 - DNA, 201 bp, Homo sapiens
gacagatgccttcctcttgtctcaactgcaaagaggcatgccttcctcttttactaatcctcctcagcacagaccctttacgggtgtcgggctgggggacrgtcaggtctttcccttcccacgaggccatatttcagactatcacatggagagaaaccttggacaatacctggctttcctagacagaggtccctgtggcct

SEQ ID NO: 19640 - DNA, 201 bp, Homo sapiens; identical to SEQ ID NO: 2527

SEQ ID NO: 19641 - DNA, 201 bp, Homo sapiens
acgaggccatatttcagactatcacatggagagaaaccttggacaatacctggctttcctagacagaggtccctgtggccttccgcagtgtttgtgtcccygggtacttgagattagggagtggtgatgactcttaacgagcatgctgccttcaagcatctgttgaacaaagcacaccctgcacagcccttaatccattta

SEQ ID NO: 19642 - DNA, 201 bp, Homo sapiens
tttttggtcttggggtagagattcctttttctccccattcccagggatagaaagactgtaattttttatgcttatgtttgtctaaactttctgttaagtcrctttcaacagctggactcacttgtgccctgggacatgactgagtttgccctgagcaattgtggtagaattgacctcaaggtgcccaatctataatagttc

SEQ ID NO: 19643 - DNA, 201 bp, Homo sapiens
gttttgccatgttgcccaggctggtcttgaacttctggactcaagcaatcctcccacctcggcctcccaaagtcctattgattataggcatgagccaccaygcggaaagttttgttgttgtttttccagagatggggtctattttgcccaggctggtctcgaactcctgggctcaagtgatcctcttgccttggcctccag

SEQ ID NO: 19644 - DNA, 201 bp, Homo sapiens
ctatacccagaccctccctgctcccaatagactccgggcagggccacagtataggcagtggtcacttgcctgttttaggggacaggagagccagccatccyaaatccatacccctgactcctctctgtaggggtactatatctagaagcacccctcctcttcccagacccggactcacgagattgaccccatcaatgtgtt

SEQ ID NO: 19645 - DNA, 201 bp, Homo sapiens
caacgtcactagaggtcctgaaacatacatcacacgaacatcagcaaaagcaacggtaaccctttatgcagcactaaagagtttccagagcactttctcaygcatcttagcacatgtccccatcatgactctcagacatgagttaactaccccacaccaaattcaacttctttctgttcctctgccacctcagagcctcgg

SEQ ID NO: 19646 - DNA, 201 bp, Homo sapiens
cccaagcagctgtttccccaccacagatggatgcctgtactcctagcttcctgtcacccctaccacttacttcccagatgctcggacaacctgaagctccygctccctgagccctagggactggctcagctctggcagcactgagaacaacgtcagctctcctggttttcctggaaagtaagaaagaaaaattacaagagg

SEQ ID NO: 19647 - DNA, 201 bp, Homo sapiens
cggactcacgagattgaccccatcaatgtgttccagtttcagggcagcctggatcttcccctcagaagcagctgggatcccatcagtgacagcactgagamaggggcaggaggaggtcacagggtggcttgctgggacctccccaccactctaggaacctcccagcacctctcaccagtaggtggctgtgggcctttgggc

SEQ ID NO: 19648 - DNA, 201 bp, Homo sapiens
ctgtcctgccatctcccccttcctccaccctcagctccctgcagtcctctctccacctttccaaggtagatgcagcttgctgctctgctgtcctgagtccscactaagactgtggtttctggtccctgctgacctctgggacttgatttccctggccttttgccccacctcctttctgtttgtcccagccccacccccaac

SEQ ID NO: 19649 - DNA, 201 bp, Homo sapiens
tctcttcctcctgtctgtcccctgcttcctctgtcctgccatctcccccttcctccaccctcagctccctgcagtcctctctccacctttccaaggtagaygcagcttgctgctctgctgtcctgagtccccactaagactgtggtttctggtccctgctgacctctgggacttgatttccctggccttttgccccacctc

SEQ ID NO: 19650 - DNA, 201 bp, Homo sapiens
ttatttgaccttaacatgagggcacagttcttgtgtgaagactctggtagtctgggcttagtgtgttagagcaggtagaggcatctggtgtcctaatacaygcatgcctttgaccctttgtaccagactcaaagaatggcagacttaagagggctttagaaattagccacatcaactcccttattgaacacatggacagaa

SEQ ID NO: 19651 - DNA, 201 bp, Homo sapiens
agcactgagaacaacgtcagctctcctggttttcctggaaagtaagaaagaaaaattacaagaggccaaagcttcatgccttcacttttccctccctcagwcacgaaacccccttccgctgcattcccttcccacatccccggcccatacctgtcactggtagaccctgtggcttgttcaacgtcactagaggtcctgaaa

SEQ ID NO: 19652 - DNA, 201 bp, Homo sapiens
aaacaccaccccctttctcagatcatatgtttcagtgaggtcagtactatggcccctgcatccagagagggacacataacacgtcaggacgatcacagctrtcaatctgcctggctgtgggatccactcatgatgagatgcaaccctgatttaattgctgaagccaccgggcctaaggactgttctttcctgttggggtgc

SEQ ID NO: 19653 - DNA, 201 bp, Homo sapiens
agctatgggtgggctcagaatgccccggaaggaagtcagataactgaaaagaacacttgcactggtcacaggaaaaccagcctgagctgccggcagcctcygggaggtgttgggatggcctgcccctggtttccatgcgggtcctgacccagagagcaggccccaggggagtgggggtcagcagaggcaggatggggcccg

SEQ ID NO: 19654 - DNA, 201 bp, Homo sapiens
ggcctttggagatgtctttccaggcttttgcatttctgacggccggatcaccccacccggaccctcaactcttggctctactagtcctgtggcccctcgargtcaggagatcgagaccatcctggctaacacggtgaaaccacgtctccaccaaaaatacaaaaaaattagccgggcgtggtggcgggcgcctgtagtccc

SEQ ID NO: 19655 - DNA, 201 bp, Homo sapiens
gggtcccctggaagtctgtcttgtgctacatacaatgatgaaaatctagggcccggtgtggtggctcatgcctgtaatcccagcactttgggaggccaagrcgggcggatcacgaggtcaggagatcgagaccatcctggctaacacagtgaaaccccgtctctactaaaaatacaaaaaattagccgggcgtggtggcgg

SEQ ID NO: 19656 - DNA, 201 bp, Homo sapiens
atcttttatttacttgctaataatctatccatgggtcccctggaagtctgtcttgtgctacatacaatgatgaaaatctagggcccggtgtggtggctcaygcctgtaatcccagcactttgggaggccaaggcgggcggatcacgaggtcaggagatcgagaccatcctggctaacacagtgaaaccccgtctctactaa

SEQ ID NO: 19657 - DNA, 201 bp, Homo sapiens
ccccaaactcatgtgttgacacctcatccccaaggtgatggcatctggaggtggcatctttgggaggtgatggggtcatgagggtggggcccttgtggttrggattagcgcccttatacaagaggccccagagagctccctcgccccttccgccatgtgaccacagtgggaagatggcaggcatgacccagaaagtgggcc

SEQ ID NO: 19658 - DNA, 201 bp, Homo sapiens
tacatacaatgatgaaaatctagggcccggtgtggtggctcatgcctgtaatcccagcactttgggaggccaaggcgggcggatcacgaggtcaggagatygagaccatcctggctaacacagtgaaaccccgtctctactaaaaatacaaaaaattagccgggcgtggtggcgggcgcctgtagtcccagctactcagga

SEQ ID NO: 19659 - DNA, 201 bp, Homo sapiens
tggtgaccgggcgggactcagagcctgaggaggcggggcttttcctccgcccaggaaggaaatgcagaaatgccttcctatgcttttagggagagcgctgyagcagaagaatttgatctgatcaaaaaacctgtcttagcaaaaaacctgaagccgcctttgcaaaaattatattacaaaattatgacagcgaaagagatc

SEQ ID NO: 19660 - DNA, 201 bp, Homo sapiens
cagattaaaatggagtctcttatgtctactttctatacagacacattaacaatctgatctctctttcttttccccacaaccaagggcccagctcctaacawgcaggtgtcaccagagagaaatgcaccactgtgcccagcaccatagctctggctcagagagtttgcctgagaaagcagcagacagaaaacagaaggtgcg

SEQ ID NO: 19661 - DNA, 201 bp, Homo sapiens
cctcattgttaccccggcttcttccaagcgcacaagcttaccgcaaggctgactgtagacgtactcgggatctcttgtggacttgtcctcaatgaccacamtcgagcgtaccttcaccctagagaaaagcacccacgttgggcaccagatgaaggggtgggttgcccctccacacctgtgggtgtttcttgttaggtggaa

SEQ ID NO: 19662 - DNA, 201 bp, Homo sapiens
ttcagagagcacggggttgggggtaaggttatagattaacagcatctcaaggcagaataatttttcttagtacagagcaaaatggagtctcctatgtctamttatttctacacgacacagtaacaatctgatctctcttttccccacatttcccccttttcttttcgacaaaactgccatcatcatcatggcccgttcttg

SEQ ID NO: 19663 - DNA, 201 bp, Homo sapiens
caggagaatggcatgaacccaggaggtggagcttgcagtgagtggagatcctgccactgtactccagcctgggcgacagagcgaaactccgtctaaaaaaraaaaaaagaaaagaaaagaaaagaaaatctaggccgggtgctgtggctcacgcctgtaatcccagcactttgggaggccgaggcaggcagatcacaaggt

SEQ ID NO: 19664 - DNA, 201 bp, Homo sapiens
cacactgagcataggtattattttctctattttaccattaggggaactgaagctcagggagggtatttgttttgttttgtttttttgagacggggtctcaytcaggttgtttaggcttgcgtacagtggcgggatctcagcttattgcagctgccatcttctgagctcaggtgattctcccatctcagccacccgagcact

SEQ ID NO: 19665 - DNA, 201 bp, Homo sapiens
gctggagttcagtggcacgatcttggctcactgcaacctctgcctcctgggttcaagcaattctcctgccccagcctcccaagtagctgatactacaggcrtgcaccatcatacctgcctaattttttgtattttttagtagagatggggtttcaccatgttgaccaggctggtctcaaactcccgacctcaggtgatcca

SEQ ID NO: 19666 - DNA, 201 bp, Homo sapiens
ccatggacacagggatccacacgccctctcttgctctcaccagcagaatacggtgctgccgattaaaagtcgaatcaatgcaagtaaactatctacttttyacaggttatagtttgagagtctggtttaataactatatttcctacaactagcatataagggggctttacacaactttgtaaaggaaccgttagactggaa

SEQ ID NO: 19667 - DNA, 201 bp, Homo sapiens
gggaggcagaagcagggctgatcccgtggcttcaatggagagcccaactgcacgccgaggcagtcccctcccggtccttgtgcggccgtgcctctcacccytcacctttccggtccaccacggctgcccgcagcgcatcaaccagctcctcccgactgaggttttttggcagcagccccgcgaagggctggtccccgaggg

SEQ ID NO: 19668 - DNA, 201 bp, Homo sapiens
ttcggtgccaaagcctgcgtcctcgggcactgggcggacacccaggccccgccgccagccactccagaaccggcccaaaacacggcggccgtccatctccsgagccaggacagcgcgcatgtgcgtccagaggggcagacccgcgctccagccagcgcgctgattggtcagctggagtgtcaatcggaatggtgaccgggc

SEQ ID NO: 19669 - DNA, 201 bp, Homo sapiens; identical to SEQ ID NO: 2528

SEQ ID NO: 19670 - DNA, 201 bp, Homo sapiens
gagcacctctggaatcccagcgacctgcagaggttgcccgtctctgtgggggcagcagcgcctgaagggaggtggccatagcagcccacaggggcccaggrctgaccagctctgccttgggtgccaaggctgggcagggcctgtgcccttgggagtcctgtttcagacccacctcaaccacatggccctgccctcatctta

SEQ ID NO: 19671 - DNA, 201 bp, Homo sapiens
tccatcctcaagagatctgcctgcatcagcctcccaaagtgctgggattacaggcgtgagccactgcgcctggcctccttcctttattcttcaataaccaraaaattcttcctgaaaaaggtggcccctgagaccatttggaagcatcacaggggggaggggcaagggtcctgcgagctggtcttgccatcccttgtcccc

SEQ ID NO: 19672 - DNA, 201 bp, Homo sapiens
tcagactctgctccttagttgccagcacctttactaaagaaggtgggggcggtgggcagaaagcatgggggtgtcgtgtcatggtgacaggtgtaaggagmaggcaaagagttttccacttccattgatggtagcagtggcggccacctgacccagggcaccatctcttcctcctgtttgtcccctgcttcctctgccctg

SEQ ID NO: 19673 - DNA, 201 bp, Homo sapiens
atatctagaagcacccctcctcttcccagacccggactcacgagattgaccccatcaatgtgttccagtttcagggcagcctggatcttcccctcagaagsagctgggatcccatcagtgacagcactgagaaaggggcaggaggaggtcacagggtggcttgctgggacctccccaccactctaggaacctcccagcacc

SEQ ID NO: 19674 - DNA, 201 bp, Homo sapiens
tgcaaggctcggtagttatttgcatcttctccccactcttaaccctactgcatcatggcagtagggttaaaagcggggagagggtgcaaattaggtggctygtcccagctcatgctgctagtgggaggcagaagcagggctgatcccgtggcttcaatggagagcccaactgcacgccgaggcagtcccctcccggtcctt

SEQ ID NO: 19675 - DNA, 201 bp, Homo sapiens
agactctgctccttagttgccagcacctttactaaagaaggtgggggcggtgggcagaaagcatgggggtgtcgtgtcatggtgacaggtgtaaggagaargcaaagagttttccacttccattgatggtagcagtggcggccacctgacccagggcaccatctcttcctcctgtttgtcccctgcttcctctgccctgcc

SEQ ID NO: 19676 - DNA, 201 bp, Homo sapiens
aaatgactgcacactgagcataggtattattttctctattttaccattaggggaactgaagctcagggagggtatttgttttgttttgtttttttgagacrgggtctcattcaggttgtttaggcttgcgtacagtggcgggatctcagcttattgcagctgccatcttctgagctcaggtgattctcccatctcagccac

SEQ ID NO: 19677 - DNA, 201 bp, Homo sapiens
gatgggactgacagtaggtacttctaacaaccaattttggactgcaggcattaagcatcctggtgctctccctaggcaaataggaggataacgatacccartggaaatatttatcataatcccttcttcctcaggtttggcagggcagcgatcatctgtggggccaggtaccccatacactatcattaacatatacttcaa

SEQ ID NO: 19678 - DNA, 201 bp, Homo sapiens
actgcaacctctgctatccgggttcaagtgactctcctgcctcagcctcccgagtagctgggattacaggcggacgccgccacacctggctaatttttgtrtttttagtagagacggggtttcaccatgttggccaggctagtctcgaactcctgacctcaggtgatccgcccgcgtcagcaccctaaagtgccgggatta

SEQ ID NO: 19679 - DNA, 201 bp, Homo sapiens
ctctggaatcccagcgacctgcagaggttgcccgtctctgtgggggcagcagcgcctgaagggaggtggccatagcagcccacaggggcccagggctgacsagctctgccttgggtgccaaggctgggcagggcctgtgcccttgggagtcctgtttcagacccacctcaaccacatggccctgccctcatcttatttgcc

SEQ ID NO: 19680 - DNA, 201 bp, Homo sapiens
cctggctaatttttgtgtttttagtagagacggggtttcaccatgttggccaggctagtctcgaactcctgacctcaggtgatccgcccgcgtcagcaccstaaagtgccgggattacaggcgtgagccaccgcggccaataaacaataatctagtatagcaactcccgtaactgagcgccggctatgtgcaaggctcggt

SEQ ID NO: 19681 - DNA, 201 bp, Homo sapiens
cccgtctctactaaaaatacaaaaaattagccgggcgtggtggcgggcgcctgtagtcccagctactcaggaggctgaggcaggagaatggcatgaacccrggaggtggagcttgcagtgagtggagatcctgccactgtactccagcctgggcgacagagcgaaactccgtctaaaaaaaaaaaaaagaaaagaaaagaa

SEQ ID NO: 19682 - DNA, 201 bp, Homo sapiens
cacgtgccttccccctgccctagcctccgtcccgcatgagagagggggtacttaatcaccgggcttcggtgccaaagcctgcgtcctcgggcactgggcgsacacccaggccccgccgccagccactccagaaccggcccaaaacacggcggccgtccatctcccgagccaggacagcgcgcatgtgcgtccagaggggca

SEQ ID NO: 19683 - DNA, 201 bp, Homo sapiens
gtggggcatttggattacgctccaagtctgattcctagtccagcaatcctgcccccagaggctccctttatctgtccccttggccaaggaaggggcagtcrccccctgccccctgcctggccacagacaaaaaccatcagaaggctgtctgtggggccccagaaccatgtggtaatcgcctaaggagttggagccctttag

SEQ ID NO: 19684 - DNA, 201 bp, Homo sapiens
gtcctgtttcagacccacctcaaccacatggccctgccctcatcttatttgcctggacagcaaggcctgcagaaactgatttgctcatccaatttggggawcctgagctccctgctgggcaagcctgatggtttcacagctgcccatgatggtttcctcggcaacttcaaatcagactctgctccttagttgccagcacct

SEQ ID NO: 19685 - DNA, 201 bp, Homo sapiens
actctgatggccccactaattctggacctttttcttctaattttaacgtttcagggtatatcacctgctgtaattgattatagtcaacattttgcattgastgagccattaccagctctactgcatattcacaatgtaaactttccatttctttccgggatttcctccccgcctcttctttacaatctattacacagcctt

SEQ ID NO: 19686 - DNA, 201 bp, Homo sapiens
gccctagaaagctgtgaaggcctgtaagtgggtcttcctgtttccctgtcttctgaggcccaggcctttcttagagcttccgtgggtcccacccttacacrcatcacaccgtgtctgggctctgcctgcctggcttacactccctacccccaaccactgccctatttccacccccgggacatcctgctgggcactgctgtt

SEQ ID NO: 19687 - DNA, 201 bp, Homo sapiens
agggcccggtgtggtggctcatgcctgtaatcccagcactttgggaggccaaggcgggcggatcacgaggtcaggagatcgagaccatcctggctaacacrgtgaaaccccgtctctactaaaaatacaaaaaattagccgggcgtggtggcgggcgcctgtagtcccagctactcaggaggctgaggcaggagaatggca

SEQ ID NO: 19688 - DNA, 201 bp, Homo sapiens
tggccatagcagcccacaggggcccagggctgaccagctctgccttgggtgccaaggctgggcagggcctgtgcccttgggagtcctgtttcagacccacytcaaccacatggccctgccctcatcttatttgcctggacagcaaggcctgcagaaactgatttgctcatccaatttggggaacctgagctccctgctggg

SEQ ID NO: 19689 - DNA, 201 bp, Homo sapiens; identical to SEQ ID NO: 2544

SEQ ID NO: 19690 - DNA, 201 bp, Homo sapiens; identical to SEQ ID NO: 2534

SEQ ID NO: 19691 - DNA, 201 bp, Homo sapiens
atttctttcattctatatctgccacaaagaacacaactttatagtttaattttaataactattgcaggacacttctctgggtggtcttggactgacccggktctccctcttttctcacttgcagttctcaagataactgtagaacattctgggaaggcaacatcttgaaataggcagggactggctggaacagctggggct

SEQ ID NO: 19692 - DNA, 201 bp, Homo sapiens; identical to SEQ ID NO: 2530

SEQ ID NO: 19693 - DNA, 201 bp, Homo sapiens; identical to SEQ ID NO: 2532

SEQ ID NO: 19694 - DNA, 201 bp, Homo sapiens
cttgcagagtctagaatcagcagggagctgcctcccttctcctctaggccatggggctgaaccctccacatcccccctctcctccatcaactacattatayagtccactgaaacacgcaggtctctggataagctgctgaaaggggacatagacattggaagtcagaatggaactgatctatttggatttggaaatactca

SEQ ID NO: 19695 - DNA, 201 bp, Homo sapiens; identical to SEQ ID NO: 2555

SEQ ID NO: 19696 - DNA, 201 bp, Homo sapiens; identical to SEQ ID NO: 2556

SEQ ID NO: 19697 - DNA, 201 bp, Homo sapiens
acagaaaatataggaaagggaaaggagagaaagagagagagggccaggcacagtggctcacacctgtaatcccagcacgttgggaggccgaggctggtggrtcacgaggaagagattgagaccatcctggccaacatgatgaaaccccgtctctactaaaaatacaaaaaaactagctgggcatgatgcgcacacctgtag

SEQ ID NO: 19698 - DNA, 201 bp, Homo sapiens; identical to SEQ ID NO: 2581

SEQ ID NO: 19699 - DNA, 201 bp, Homo sapiens
agtttagctttttcctatcaaacttaaaacaagactttaaccctttaatctaggcaaaaaaaaaaaaatccacattcccatgccttcttataatcttttaycaaaaacacattttactttccttacacaccttgcatgtaaaactgtttcctcagtagtttcaattacatgttacaatattaactcttagtaacttttatt

SEQ ID NO: 19700 - DNA, 201 bp, Homo sapiens; identical to SEQ ID NO: 2557

SEQ ID NO: 19701 - DNA, 201 bp, Homo sapiens
atgaaaaaactgaatacccctttaactttagccagtgttcacacatagaatttcttttacaagattaatccttcataaaccttccataagttgctcaaaaktttagctttttcctatcaaacttaaaacaagactttaaccctttaatctaggcaaaaaaaaaaaaatccacattcccatgccttcttataatcttttatc

SEQ ID NO: 19702 - DNA, 201 bp, Homo sapiens; identical to SEQ ID NO: 2560

SEQ ID NO: 19703 - DNA, 201 bp, Homo sapiens; identical to SEQ ID NO: 2539

SEQ ID NO: 19704 - DNA, 201 bp, Homo sapiens; identical to SEQ ID NO: 2587

SEQ ID NO: 19705 - DNA, 201 bp, Homo sapiens; identical to SEQ ID NO: 2588

SEQ ID NO: 19706 - DNA, 201 bp, Homo sapiens; identical to SEQ ID NO: 2541

SEQ ID NO: 19707 - DNA, 201 bp, Homo sapiens; identical to SEQ ID NO: 2591

SEQ ID NO: 19708 - DNA, 201 bp, Homo sapiens
ttcaatgagacagcaagcggtttttacaagatctagaattgctccaaaggtagctcagagaaaagaaaatttcaagacaggaaatcagaagctgtccatgraagggaaaagaaccaataaatggcaaaaagtcacacacatagcgaatgggaaaggactaattacctaagctgggaattgaacccaggctgccagtgtgaa

SEQ ID NO: 19709 - DNA, 201 bp, Homo sapiens
taaaatattttattactagattttagtcaagagaaatggccaatatttctggcttttgaattcttttacctcctacatgaaatcaataagccttaactaayggtatgactttaccacaggtgcatgaagtatcttcaatgagacagcaagcggtttttacaagatctagaattgctccaaaggtagctcagagaaaagaaa

SEQ ID NO: 19710 - DNA, 201 bp, Homo sapiens
gatctagaattgctccaaaggtagctcagagaaaagaaaatttcaagacaggaaatcagaagctgtccatggaagggaaaagaaccaataaatggcaaaawgtcacacacatagcgaatgggaaaggactaattacctaagctgggaattgaacccaggctgccagtgtgaaaggccagaatcttagctcctgaactattg

SEQ ID NO: 19711 - DNA, 201 bp, Homo sapiens; identical to SEQ ID NO: 2535

SEQ ID NO: 19712 - DNA, 201 bp, Homo sapiens
tggaagggaaaagaaccaataaatggcaaaaagtcacacacatagcgaatgggaaaggactaattacctaagctgggaattgaacccaggctgccagtgtraaaggccagaatcttagctcctgaactattgcacaaggtgacgactactgcttcttcccaggagtctagagcagtcatttttgagcttgcaaatgatttt

SEQ ID NO: 19713 - DNA, 201 bp, Homo sapiens
tagcgaatgggaaaggactaattacctaagctgggaattgaacccaggctgccagtgtgaaaggccagaatcttagctcctgaactattgcacaaggtgaygactactgcttcttcccaggagtctagagcagtcatttttgagcttgcaaatgattttaactattcaagaaaatttagactagatataacacaatcatgt

SEQ ID NO: 19714 - DNA, 201 bp, Homo sapiens; identical to SEQ ID NO: 2547

SEQ ID NO: 19715 - DNA, 201 bp, Homo sapiens; identical to SEQ ID NO: 2537

SEQ ID NO: 19716 - DNA, 201 bp, Homo sapiens; identical to SEQ ID NO: 2538

SEQ ID NO: 19717 - DNA, 201 bp, Homo sapiens; identical to SEQ ID NO: 2540

SEQ ID NO: 19718 - DNA, 201 bp, Homo sapiens
gacacgtaaggaagagtgggagaaaattaagatggggcaagaatttgtggagtccaaagaaaagctggggccttttgggtatccacccaccttggtgtacyagaatggcagcattggctgtgttgaaaacgtggatgcaagtagctatccaccaccatcacagtcagactctgcttcttcaccttctccttccttctccga

SEQ ID NO: 19719 - DNA, 201 bp, Homo sapiens; identical to SEQ ID NO: 2542

SEQ ID NO: 19720 - DNA, 201 bp, Homo sapiens
aaggaataaagaatggctacttcatgggtaagagcagtggcatgggctgctcgactgagtatatttatagttatttcttgattatatgctgtattaatccrttttcacactgctataaaagaacttccctgagactgggtgatttataaaggaaagaggtttaattgactcagttttgcgtggctggagaggcctcaggaa

SEQ ID NO: 19721 - DNA, 201 bp, Homo sapiens
agcaacactgaatcaaaagttcaaatggccacttgtcagttgtgaagggatcttttccagcagtcccatcagctctcaagtttccccttttgggaaggaaraagttccccatgttccacggtcttgtatatgcctaatcctgtcacccacagtcgtcagcaaagagtataagacagattaatccaaagagaatagcggtgg

SEQ ID NO: 19722 - DNA, 201 bp, Homo sapiens
cccttttgggaaggaagaagttccccatgttccacggtcttgtatatgcctaatcctgtcacccacagtcgtcagcaaagagtataagacagattaatccraagagaatagcggtggcattaatccataatgccaaattcatttttaaccaagagggactttactgagaggggcctttaaccctctaaatcttaggaagga

SEQ ID NO: 19723 - DNA, 201 bp, Homo sapiens; identical to SEQ ID NO: 2531

SEQ ID NO: 19724 - DNA, 201 bp, Homo sapiens
ttctgtcttgggctgggtttatagttttgtaactcttatgccaaattttggcacctaatgatatctggcagagataaatatgaaaccgcttgatcaataarctcaaatgaaaatgtatgttgacaattcttaagatatttataatattattttaccaataatgtaaagccagcttatttattaaagattttacttaattta

SEQ ID NO: 19725 - DNA, 201 bp, Homo sapiens; identical to SEQ ID NO: 2578

SEQ ID NO: 19726 - DNA, 201 bp, Homo sapiens
cataattttggaacatgtttcctatataataaccctttcttagttggaaatgacccagacattcaacaagcatctacaatgattttaagaacttaaatcayacaaaaaagttttacttagaagcatttatctcatttatatgcatataattctcccatttttaaccgtttacttagattacttctgaaaactgagatctta

SEQ ID NO: 19727 - DNA, 201 bp, Homo sapiens
acatttgtgccccactgacctgaaggttccatgtaactgtatacacatgaatacttaaatgccaacattttaaataatttgataaagtctttgtagccacaaaaaaaaaaaaaacgtaaaggaataaagaatggctacttcatgggtaagagcagtggcatgggctgctcgactgagtatatttatagttatttcttgatt

SEQ ID NO: 19728 - DNA, 201 bp, Homo sapiens
agagcaagactccgtctcaaaaaaaaaaaaaaaaagagagagagagagagaaagcattccctgcggtggggaaggtgaagagctcagggaggccagagaargacctactcattgaagcaacactgaatcaaaagttcaaatggccacttgtcagttgtgaagggatcttttccagcagtcccatcagctctcaagtttccc

SEQ ID NO: 19729 - DNA, 201 bp, Homo sapiens; identical to SEQ ID NO: 2558

SEQ ID NO: 19730 - DNA, 201 bp, Homo sapiens
tgagcttgcaaatgattttaactattcaagaaaatttagactagatataacacaatcatgtgtcctttttagtctcaagagtcaaagccctgtaacttaayggcgcaaggactttaaagacaatacagaaacttacatggatacaataacctttttaagtccataatttgaattagcttttaaataacttttgaattagac

SEQ ID NO: 19731 - DNA, 201 bp, Homo sapiens; identical to SEQ ID NO: 2586

SEQ ID NO: 19732 - DNA, 201 bp, Homo sapiens; identical to SEQ ID NO: 2590

SEQ ID NO: 19733 - DNA, 201 bp, Homo sapiens; identical to SEQ ID NO: 2543

SEQ ID NO: 19734 - DNA, 201 bp, Homo sapiens
cagctctgtaggcgggagccacctgtcagccccccccggggctggtgactccattcccagcaggccgaaactctggtccagaggagatagtccggccttgraagttttgcctccttccttcatttgtctcctaatgtcttaagctgcctgtccacagaggcactggctttgcttgtgtgcccctccgggcaggccacagga

SEQ ID NO: 19735 - DNA, 201 bp, Homo sapiens; identical to SEQ ID NO: 6976

SEQ ID NO: 19736 - DNA, 201 bp, Homo sapiens
gagcgccggatgaggcctggccctggcgcggggcgtgggctgctgcggccctttcctccccgcgcccctcacgccccagcgggcccctagcggttcccgtscacccgctccatgtctttaccccggtactacctccacctgcaatcgcctcctcctgcgcgccagtggcctctgcgtttctgttgaaaggtaccgactacg

SEQ ID NO: 19737 - DNA, 201 bp, Homo sapiens
gcccagtggcaccaccagcctgtgataaactggaacactcgaaggcctgcctggctattgggcactaccggtgggatttcaggagggctggcagggctgtrgccagccaggcagggcatggctgagatgggctccccagagtccccaaggcatccatatggccactcccagggcaaggcctcgctctgggagaggaggggc

SEQ ID NO: 19738 - DNA, 201 bp, Homo sapiens
ctggctattgggcactaccggtgggatttcaggagggctggcagggctgtggccagccaggcagggcatggctgagatgggctccccagagtccccaaggsatccatatggccactcccagggcaaggcctcgctctgggagaggaggggcggggggctgggaggactgttgctgccgctttgttttgcctgagacctgct

SEQ ID NO: 19739 - DNA, 201 bp, Homo sapiens
acaagtctaaggaaaagcccacctgctgatgagggcagagcctcccagacctccagcctgttcccacaacaccccctcccttccatctcagccaccttgamcttcccatcatgctcctgctgcctcggtatcttcacacctgcggcattttctgcctggcatactctccataaatcacccttgcctattgctcttccaaac

SEQ ID NO: 19740 - DNA, 201 bp, Homo sapiens
gagaaaacctcaaatctttctccgagaagtttggggttagggttcttaagagttttagagcaggccaaagtgtggagattgttgatttgttgaagagtgcrgagtgaagtcatggggccagggagatgaaaaaactgtattctcatgctgattatgttcttctgggctgttcaaactggttggggtcacttgtttcactgg

SEQ ID NO: 19741 - DNA, 201 bp, Homo sapiens
ctgggattacaggtgcctgccaccacgcctggctaatttttgtatttttagtagagatggggtttcaccattttggccaggctggtctcaaatacctgatyttaggtgatccatcagccttggcctcccaaagtgctggaagtacaggtgtgagccaccgcacccagcccagagtcttctcaagaatgaaatagttaaaga

SEQ ID NO: 19742 - DNA, 201 bp, Homo sapiens
tgagccatgattgcgctactgcactccagcctgagtggcagagtgagatcctatctcaaaaaaaaaaaaaaagtatatatgtatgtgtgtgtgtgtgtatrtatgtgtgtgtatatatatgtgtgtgtatatatatgtgtgtgtgtatatatatgtgtgtgtgtgtgtgtgtgtgtatgtacctgtgtatgtgtggtgtat

SEQ ID NO: 19743 - DNA, 201 bp, Homo sapiens
tcccacctcagcctcctgaagtgctgggattacagtcgggagccaccgtgcccggcccattatattctatttttgtgtatgacattttctatttttaaaayggtaaaaaagttaaaataaaaattttataaaaagaagggcttatgtgaacagtattctgatttttaaatgtttggttggtattgttagtctgtagccttt

SEQ ID NO: 19744 - DNA, 201 bp, Homo sapiens
tcaggaaaggtgacctgagaggcccaagcttattcctgccctccctgagccatgcttcctgcccaacttcctaaggcttcggtgacagacggcaatctccytgcctgggctgcacaggcacactgccctctcccccttggggttgcatggtctgcaagtgcacacacctgtatctcgccctctcaggggaaagatttacca

SEQ ID NO: 19745 - DNA, 201 bp, Homo sapiens
tgccaggggaatgtatcttgcaagctgttttgctgcacccaaggatgatcttctccactcaggcccaggtccctaagtcccctcctaacagccacaagtcrtactctctagcgccttgcctgccccatctcaggaaaggtgacctgagaggcccaagcttattcctgccctccctgagccatgcttcctgcccaacttcct

SEQ ID NO: 19746 - DNA, 201 bp, Homo sapiens
atcccggctggggcccaggcacatcctctcctctgcagagccctctgtccacaatgccccaagcaggtcccccgggagacccaggccaggctaagcctacrggcactgtggttcccgggccctgcctgacctgccctctctcccgcccttccccagccatggaccagctggccaagaccacccaggaaaccatcgacaaga

SEQ ID NO: 19747 - DNA, 201 bp, Homo sapiens; identical to SEQ ID NO: 2596

SEQ ID NO: 19748 - DNA, 201 bp, Homo sapiens; identical to SEQ ID NO: 2599

SEQ ID NO: 19749 - DNA, 201 bp, Homo sapiens
aagcactgccatgggcaggcatgaagggtctggaagcagctcaggccagtcagggctgttcctgctccccagcccagacatgtacacattaagcaggcctrtatgaacccaggaggaggccacctggggcctgggtgtgcccgagagtcccctgggctgtgagagaaagcaaggaggagcaaggctggtcaggtgatgggg

SEQ ID NO: 19750 - DNA, 201 bp, Homo sapiens
tctcggttagtgcccctctcccgcccgactttagagccagcccctgccccttattccctgccccaggatcccggcccctcctgggagctgggctggactcsgtcctcagatcctcggaaggctcagctctgggcggggcaagggaccttgcaagtcgggggggcctcgggaacttctctccgccagctgcgactggaggct

SEQ ID NO: 19751 - DNA, 201 bp, Homo sapiens
tctggagtgggagtatacccagctgggtggggcctgacctacaccccttgtgtgccaggggaatgtatcttgcaagctgttttgctgcacccaaggatgaycttctccactcaggcccaggtccctaagtcccctcctaacagccacaagtcatactctctagcgccttgcctgccccatctcaggaaaggtgacctgaga

SEQ ID NO: 19752 - DNA, 201 bp, Homo sapiens
gggcgctgccgcccggcggggtcccgccccgccactccccggggaggggcttcggggcacggggccgtgcacgtgagaacgaagcacggttgtgggggggscatgcacgtgcgcgctcgcgtgcgggagacccctcccttccacaccacttcctttcgggacaaaccggtaacctccggccctggaaggttttgtctagtg

SEQ ID NO: 19753 - DNA, 201 bp, Homo sapiens
gcagggcagctaggggtctctgcattctccacatggtctcatgcccccttttgtcccctacaggaggacttgaggccatctgccccccaacaggagggtgwggcatccaaagagaaagaggaagtggcagaggaggtaggagctgggctcctggggtgcaccatggggggttccttggtagggaccccatcccccacagac

SEQ ID NO: 19754 - DNA, 201 bp, Homo sapiens
tccctctaggggctgaccccgcagcactagaagcagggtatgtgccagcagaccaagcctgtgtggcaggggcttcccagcgctccagaataggggagacmccagcagaggtgcaagaaacagccccggacaggaagcggtagagagacccagaaaggcagggtgggtgtgcactggcctccaggtcctgaaggcctactc

SEQ ID NO: 19755 - DNA, 201 bp, Homo sapiens
gcggactcaaggcgcgctccctgccttccccggcctcccagcaggggacgaagtccccaacctggctgccagtccagatgctgcagtacaggtctgcctargaggccgttcccttctccagtctgagatctccctcgcggggcacgtgtctaccacccttaacccagggctgccctggttccactatcggttacatgttgc

SEQ ID NO: 19756 - DNA, 201 bp, Homo sapiens
actaccggtgggatttcaggagggctggcagggctgtggccagccaggcagggcatggctgagatgggctccccagagtccccaaggcatccatatggccrctcccagggcaaggcctcgctctgggagaggaggggcggggggctgggaggactgttgctgccgctttgttttgcctgagacctgctccctcccccttcc

SEQ ID NO: 19757 - DNA, 201 bp, Homo sapiens
aaagccgaactgtgggaacagtggggatgcagatggtcagtatacagtgccacgggaagttctatagaaggaatttagttaaagcacagcctcattaatgyttaattataactgttaatttttaattataactgttaatgcttaattataactatatttctgtgtagaatgcttgttaaccctgtgaggacagcttcacca

SEQ ID NO: 19758 - DNA, 201 bp, Homo sapiens
ttggatctgcaattgaagatattaaaagctgtttgccattccttctgctgaatattttctgctatctcttggttggttagaattagtcctgcagagtcttytctctctctctctctctctcttttttttttgagacagagtatcactcctgttacccaggcaggagtgcagtggcacagtgtccgctcactgcaacctcca

SEQ ID NO: 19759 - DNA, 201 bp, Homo sapiens
tctctctctctctcttttttttttgagacagagtatcactcctgttacccaggcaggagtgcagtggcacagtgtccgctcactgcaacctccacctcccrggttcaagcagttcttctgcctcagcttccggaatagctgggattacaggtgcctgccaccacgcctggctaatttttgtatttttagtagagatggggt

SEQ ID NO: 19760 - DNA, 201 bp, Homo sapiens
agccatgattgcgctactgcactccagcctgagtggcagagtgagatcctatctcaaaaaaaaaaaaaaagtatatatgtatgtgtgtgtgtgtgtatatrtgtgtgtgtatatatatgtgtgtgtatatatatgtgtgtgtgtatatatatgtgtgtgtgtgtgtgtgtgtgtatgtacctgtgtatgtgtggtgtatgt

SEQ ID NO: 19761 - DNA, 201 bp, Homo sapiens
ttacccaggcaggagtgcagtggcacagtgtccgctcactgcaacctccacctcccaggttcaagcagttcttctgcctcagcttccggaatagctgggaytacaggtgcctgccaccacgcctggctaatttttgtatttttagtagagatggggtttcaccattttggccaggctggtctcaaatacctgatcttaggt

SEQ ID NO: 19762 - DNA, 201 bp, Homo sapiens
aatagttaaagatgataaatgtttacagagataagacatctgatatctgagttaataatttctataactgggtaatgggtccatgagggttcattttatttatatatatatatatatttatttatttatttatttatttttttgagacagagtcttcctctgttgcccaggctggagtgcactggcatgatgtcggctcac

SEQ ID NO: 19763 - DNA, 201 bp, Homo sapiens
ggcggggcagaaaggtctggtggggctggagggaggcgggcaaccccagcacacctcccactccccgccccatcccggctggggcccaggcacatcctctyctctgcagagccctctgtccacaatgccccaagcaggtcccccgggagacccaggccaggctaagcctacaggcactgtggttcccgggccctgcctgac

SEQ ID NO: 19764 - DNA, 201 bp, Homo sapiens
agatgggctccccagagtccccaaggcatccatatggccactcccagggcaaggcctcgctctgggagaggaggggcggggggctgggaggactgttgctrccgctttgttttgcctgagacctgctccctcccccttcctccacctaatctcatcacctgcctcttccctttgcccagggttgacctcatctccattaat

SEQ ID NO: 19765 - DNA, 201 bp, Homo sapiens
ccagggcaaggcctcgctctgggagaggaggggcggggggctgggaggactgttgctgccgctttgttttgcctgagacctgctccctcccccttcctccrcctaatctcatcacctgcctcttccctttgcccagggttgacctcatctccattaatccataccgtgtgtgtgtgtgtgtgtgtgtgtgtgtgtgtgtgt

SEQ ID NO: 19766 - DNA, 201 bp, Homo sapiens
cggtagagagacccagaaaggcagggtgggtgtgcactggcctccaggtcctgaaggcctactctggagtgggagtatacccagctgggtggggcctgacytacaccccttgtgtgccaggggaatgtatcttgcaagctgttttgctgcacccaaggatgatcttctccactcaggcccaggtccctaagtcccctccta

SEQ ID NO: 19767 - DNA, 201 bp, Homo sapiens; identical to SEQ ID NO: 6984

SEQ ID NO: 19768 - DNA, 201 bp, Homo sapiens; identical to SEQ ID NO: 6972

SEQ ID NO: 19769 - DNA, 201 bp, Homo sapiens
cagggactacaggcgtgcgccaccacgcccagctaattttggtacttttagtacagacagggtttcaccatgttggccaggctggtctcgaactcctgacytcaagctatccacctacctcggcctcccaaagtgctgggattacaggcaggagccatcacgaccagctatttctggaattttccatttaacattttggac

SEQ ID NO: 19770 - DNA, 201 bp, Homo sapiens
atggcagggcaagtccatacacccgaaacaccgggttgcagcagaagaaagaggtttaatcgcagggctgccagacaagatgggagaaaacctcaaatctytctccgagaagtttggggttagggttcttaagagttttagagcaggccaaagtgtggagattgttgatttgttgaagagtgcagagtgaagtcatggggc

SEQ ID NO: 19771 - DNA, 201 bp, Homo sapiens
tgatggatgacagtgagttctcattttcaggtttaccatggaaccatctctgcaatgcagccccttccacattgccccagccccatggagctggtgctccsgtggcgctgtgcaattgcctgttcctgtgtgcctctgctcccccgacactaggagccctggagggcagggccaggtgggacttgccttttgaaccatgtc

SEQ ID NO: 19772 - DNA, 201 bp, Homo sapiens
gaaagccgaactgtgggaacagtggggatgcagatggtcagtatacagtgccacgggaagttctatagaaggaatttagttaaagcacagcctcattaatkcttaattataactgttaatttttaattataactgttaatgcttaattataactatatttctgtgtagaatgcttgttaaccctgtgaggacagcttcacc

SEQ ID NO: 19773 - DNA, 201 bp, Homo sapiens
ggggcctgtgggagtctggtcggagagaccttaaggcttcttcagttcagaatgtcacaccactatatttcggggtattggtttctgagccccaacaatgrgtaactgaaactgcagaaagcgaaatcacaaattagctgggggtggtggctcatgcctgtaatctcagctactcaggaagctgaggcagaactgcttgaa

SEQ ID NO: 19774 - DNA, 201 bp, Homo sapiens
atagttaaagatgataaatgtttacagagataagacatctgatatctgagttaataatttctataactgggtaatgggtccatgagggttcattttatttatatatatatatatatttatttatttatttatttatttttttgagacagagtcttcctctgttgcccaggctggagtgcactggcatgatgtcggctcact

SEQ ID NO: 19775 - DNA, 201 bp, Homo sapiens; identical to SEQ ID NO: 6956

SEQ ID NO: 19776 - DNA, 201 bp, Homo sapiens
cccaacccacccattgcctttaacatggaggaggcagcactgccttcggctccccaagacattcgacaggactcacagtcccatccacggggatagcttakctcagcctcaaggtagcccccgcctgcctgctctgagtccctgaggaacccactgtcagcaggaggtgaagataggctcctgggtcttccctccatgtga

SEQ ID NO: 19777 - DNA, 201 bp, Homo sapiens
tttctataactgggtaatgggtccatgagggttcattttatttatatatatatatatatttatttatttatttatttatttttttgagacagagtcttccyctgttgcccaggctggagtgcactggcatgatgtcggctcactgcagcctccgtctcctgggttcaggcgattctcctgtctcagcctcctgtctcagct

SEQ ID NO: 19778 - DNA, 201 bp, Homo sapiens
tttatatatatatatatatttatttatttatttatttatttttttgagacagagtcttcctctgttgcccaggctggagtgcactggcatgatgtcggctyactgcagcctccgtctcctgggttcaggcgattctcctgtctcagcctcctgtctcagctcatgcctgtagctgggattgcaggcatgtgccaccatgcc

SEQ ID NO: 19779 - DNA, 201 bp, Homo sapiens
ctctctcccgcccttccccagccatggaccagctggccaagaccacccaggaaaccatcgacaagactgctaaccaggcctctgacaccttctctgggatygggaaaaaattcggcctcctgaaatgacagcagggagacttgggtcggcctcctgaaatgacagcagggagacttgggtgaccccccttccaggcgccat

SEQ ID NO: 19780 - DNA, 201 bp, Homo sapiens
ttgaacctggaaggcagaggttgcagtgagccaagatcccgccattgcactccagcctgggcaacaagagcaaaactctgtctccaaaaacaaaaaaaggraaaaaaaaaagtgacaccacagcaaactggggcgggggtgggggaaacggtaatgcggtaatgcgctccctccttctgcctctccttgtctgagaagccc

SEQ ID NO: 19781 - DNA, 201 bp, Homo sapiens; identical to SEQ ID NO: 2598

SEQ ID NO: 19782 - DNA, 201 bp, Homo sapiens; identical to SEQ ID NO: 2600

SEQ ID NO: 19783 - DNA, 201 bp, Homo sapiens
ggcgccttaaaaaccggagctggcgcttggcatcgccactctgggcaggatccaacgtcgctccagctgctcttgacgactccacagataccccgaagccmtggcaagcaagggcttgcaggacctgaagcaacaggtggaggggaccgcccaggaagccggtgaggatagcgcgcgacctagggctcaggcaggggcacc

SEQ ID NO: 19784 - DNA, 201 bp, Homo sapiens
tacagagataagacatctgatatctgagttaataatttctataactgggtaatgggtccatgagggttcattttatttatatatatatatatatttatttrtttatttatttatttttttgagacagagtcttcctctgttgcccaggctggagtgcactggcatgatgtcggctcactgcagcctccgtctcctgggttc

SEQ ID NO: 19785 - DNA, 201 bp, Homo sapiens
gtggggatgcagatggtcagtatacagtgccacgggaagttctatagaaggaatttagttaaagcacagcctcattaatgcttaattataactgttaattyttaattataactgttaatgcttaattataactatatttctgtgtagaatgcttgttaaccctgtgaggacagcttcaccagaggagcccttgggagctta

SEQ ID NO: 19786 - DNA, 201 bp, Homo sapiens
tgcacgtgcgcgctcgcgtgcgggagacccctcccttccacaccacttcctttcgggacaaaccggtaacctccggccctggaaggttttgtctagtgggktccggatggactggtgttcccagcacccccccggcacgtgtccacgcgtgtggccccggtacggtgtatgccttgccagtaggtgactcaacgtggcact

SEQ ID NO: 19787 - DNA, 201 bp, Homo sapiens
gcccactctgaacaagcctgccgggcacgacgcaaaccacccatcatgtaggccactggccagcgtgtcctgggttgttttaaagccttgcatgccgggcrggcttgttcagaccagggttccctggggatcctggcttcccctttgatactcagatggtttgggctcaaagcatctcagtgccttgccccaggccttcag

SEQ ID NO: 19788 - DNA, 201 bp, Homo sapiens
agtggggatgcagatggtcagtatacagtgccacgggaagttctatagaaggaatttagttaaagcacagcctcattaatgcttaattataactgttaatktttaattataactgttaatgcttaattataactatatttctgtgtagaatgcttgttaaccctgtgaggacagcttcaccagaggagcccttgggagctt

SEQ ID NO: 19789 - DNA, 201 bp, Homo sapiens
ttgctgactgtccccaaaaggtttctttgtagaatgtgggaaagtccttgaagagacacccggagcagtgtcaggggcgcttccaggagcccccgcctccrggagcaggtcctagggtctggagagccggcctcagggccactccaggaggctggtggggctggactggcagagcccagcatccttctggtgtgcatcatt

SEQ ID NO: 19790 - DNA, 201 bp, Homo sapiens
cattaagcaggcctgtatgaacccaggaggaggccacctggggcctgggtgtgcccgagagtcccctgggctgtgagagaaagcaaggaggagcaaggctrgtcaggtgatgggggtgagggagagggcacctatgcccggctcccagcgacaacctgccccaggtttcagggccctctgcctctgctggaggagcccaga

SEQ ID NO: 19791 - DNA, 201 bp, Homo sapiens
tcagggccactccaggaggctggtggggctggactggcagagcccagcatccttctggtgtgcatcattcccctatgactcagggatgaatcccaagggayttttcacttgttctccttgtgagtgatcgccttaagtgcgacccaggtgcggccaaggagagagatcaggcctgaggccaggagtcttctagaaaaggct

SEQ ID NO: 19792 - DNA, 201 bp, Homo sapiens
tgagagaaagcaaggaggagcaaggctggtcaggtgatgggggtgagggagagggcacctatgcccggctcccagcgacaacctgccccaggtttcagggycctctgcctctgctggaggagcccagaggggtccctgctgcccctaccacagcccccctacaaccccctctcacatacactcagggcttgttcctggact

SEQ ID NO: 19793 - DNA, 201 bp, Homo sapiens
ttccagctgcctgcaaccccagatagtaccaaagcctacatatgtatcttcctacacgtacacatgtgcctccctatgatgaagtttatacattaggcacmgtaatagactaacaataaccagtaagaaaacggaacaattataacaatatactgtaatgaaagttatttaaaacatgaattgtttatttctagaattttc

SEQ ID NO: 19794 - DNA, 201 bp, Homo sapiens
ttgctcttccaaacgtcaggtctcagcggccttgggtgtgccgacacacacacacacacacacacacacacacaaatgcatcaggcccctggtgacacatyctcacaccccctgtacctcctttttagagtcacaatgagccttcatgtgtgcttctccatagtggtggttcatggggctgtaaccagtccctttttagtg

SEQ ID NO: 19795 - DNA, 201 bp, Homo sapiens
gagggcacagagccagtgtctctgtaataggtcccttgcctgatggcagggcaagtccatacacccgaaacaccgggttgcagcagaagaaagaggtttartcgcagggctgccagacaagatgggagaaaacctcaaatctttctccgagaagtttggggttagggttcttaagagttttagagcaggccaaagtgtgga

SEQ ID NO: 19796 - DNA, 201 bp, Homo sapiens
cagcacctggcacaagacaaatgctcagtaaaagaccactgctgtcattaaggtcaacaccagccctgagctcctgccctggagctgacccagcgctcacrcccaggatcagaaagggagggctggggctgatgagctgggaggtggtgtgcgcccttctcctgcctccagctcctctctggacccctgtcctggcacctc

SEQ ID NO: 19797 - DNA, 201 bp, Homo sapiens; identical to SEQ ID NO: 6961

SEQ ID NO: 19798 - DNA, 201 bp, Homo sapiens
accctttccggaggatgggatctgggtaaggcaggccctttcctgttcagcagcagggatgagttacagctctgtaggcgggagccacctgtcagcccccyccggggctggtgactccattcccagcaggccgaaactctggtccagaggagatagtccggccttgaaagttttgcctccttccttcatttgtctcctaat

SEQ ID NO: 19799 - DNA, 201 bp, Homo sapiens
actctccataaatcacccttgcctattgctcttccaaacgtcaggtctcagcggccttgggtgtgccgacacacacacacacacacacacacacacacaawtgcatcaggcccctggtgacacattctcacaccccctgtacctcctttttagagtcacaatgagccttcatgtgtgcttctccatagtggtggttcatgg

SEQ ID NO: 19800 - DNA, 201 bp, Homo sapiens
ttacatgttgctgactgtccccaaaaggtttctttgtagaatgtgggaaagtccttgaagagacacccggagcagtgtcaggggcgcttccaggagccccygcctccaggagcaggtcctagggtctggagagccggcctcagggccactccaggaggctggtggggctggactggcagagcccagcatccttctggtgtg

SEQ ID NO: 19801 - DNA, 201 bp, Homo sapiens
tgcggccctttcctccccgcgcccctcacgccccagcgggcccctagcggttcccgtccacccgctccatgtctttaccccggtactacctccacctgcartcgcctcctcctgcgcgccagtggcctctgcgtttctgttgaaaggtaccgactacgcggtgcttcccagttctgaggcgatttagtcagcggactcaag

SEQ ID NO: 19802 - DNA, 201 bp, Homo sapiens
cccccatctcggttagtgcccctctcccgcccgactttagagccagcccctgccccttattccctgccccaggatcccggcccctcctgggagctgggctkgactcggtcctcagatcctcggaaggctcagctctgggcggggcaagggaccttgcaagtcgggggggcctcgggaacttctctccgccagctgcgactg

SEQ ID NO: 19803 - DNA, 201 bp, Homo sapiens
gaatgttttccatcccgccacgcgcctcccgaagctcccagaccggaggctcagcccccatctcggttagtgcccctctcccgcccgactttagagccagyccctgccccttattccctgccccaggatcccggcccctcctgggagctgggctggactcggtcctcagatcctcggaaggctcagctctgggcggggcaa

SEQ ID NO: 19804 - DNA, 201 bp, Homo sapiens; identical to SEQ ID NO: 2601

SEQ ID NO: 19805 - DNA, 201 bp, Homo sapiens
aacagggccacctaacatcctccctggggcagatggtgactttcaaagatggagaagtctaaacctagtgaggatgaagggcatcccacaggagagacagraggtggaccctgcggcgcctcccacctggccccagccagtctcatgctccccgctggacctggagctgggtaccccttgcacccctcctgcacccagaag

SEQ ID NO: 19806 - DNA, 201 bp, Homo sapiens
tctcccgcccttccccagccatggaccagctggccaagaccacccaggaaaccatcgacaagactgctaaccaggcctctgacaccttctctgggattggraaaaaattcggcctcctgaaatgacagcagggagacttgggtcggcctcctgaaatgacagcagggagacttgggtgaccccccttccaggcgccatcta

SEQ ID NO: 19807 - DNA, 201 bp, Homo sapiens
actctgaaggccaaggtgggcggatcatctgacgttaggagttcgagaccagcctggccacatagtgaaaccctgtctctactaaaaatacaaaaattagycgggtttggtggcgtgcgcctgtaatcccagttacttgggaggctgaggcaggagaattgcttgaacctgggaggtggaggttgctgagccaagatggtg

SEQ ID NO: 19808 - DNA, 201 bp, Homo sapiens; identical to SEQ ID NO: 2597

SEQ ID NO: 19809 - DNA, 201 bp, Homo sapiens
cagacaacggtttgcaaaatctgtccaggtatgtgagcaggcttcagtctttcttcctgtgacagcagttcagtcagagaaaactccgggaagggaccagyggtcattgttttcttctttggtgggtccagacttaaggcacatgaggaacttcagagaacaacttcactgtatgctttggaagagacaaagggttggggg

SEQ ID NO: 19810 - DNA, 201 bp, Homo sapiens
atgtgagcaggcttcagtctttcttcctgtgacagcagttcagtcagagaaaactccgggaagggaccagtggtcattgttttcttctttggtgggtccakacttaaggcacatgaggaacttcagagaacaacttcactgtatgctttggaagagacaaagggttggggggcctgtgggagtctggtcggagagacctta

SEQ ID NO: 19811 - DNA, 201 bp, Homo sapiens
tactctccataaatcacccttgcctattgctcttccaaacgtcaggtctcagcggccttgggtgtgccgacacacacacacacacacacacacacacacamatgcatcaggcccctggtgacacattctcacaccccctgtacctcctttttagagtcacaatgagccttcatgtgtgcttctccatagtggtggttcatg

SEQ ID NO: 19812 - DNA, 201 bp, Homo sapiens
cttcagtctttcttcctgtgacagcagttcagtcagagaaaactccgggaagggaccagtggtcattgttttcttctttggtgggtccagacttaaggcasatgaggaacttcagagaacaacttcactgtatgctttggaagagacaaagggttggggggcctgtgggagtctggtcggagagaccttaaggcttcttca

SEQ ID NO: 19813 - DNA, 201 bp, Homo sapiens
gttcagcagcagggatgagttacagctctgtaggcgggagccacctgtcagccccccccggggctggtgactccattcccagcaggccgaaactctggtcyagaggagatagtccggccttgaaagttttgcctccttccttcatttgtctcctaatgtcttaagctgcctgtccacagaggcactggctttgcttgtgtg

SEQ ID NO: 19814 - DNA, 201 bp, Homo sapiens; identical to SEQ ID NO: 6983

SEQ ID NO: 19815 - DNA, 201 bp, Homo sapiens; identical to SEQ ID NO: 6971

SEQ ID NO: 19816 - DNA, 201 bp, Homo sapiens
ccacaccacttcctttcgggacaaaccggtaacctccggccctggaaggttttgtctagtgggttccggatggactggtgttcccagcacccccccggcaygtgtccacgcgtgtggccccggtacggtgtatgccttgccagtaggtgactcaacgtggcactggttgagcgccggatgaggcctggccctggcgcgggg

SEQ ID NO: 19817 - DNA, 201 bp, Homo sapiens; identical to SEQ ID NO: 2603

SEQ ID NO: 19818 - DNA, 201 bp, Homo sapiens; identical to SEQ ID NO: 2593

SEQ ID NO: 19819 - DNA, 201 bp, Homo sapiens
ctcgtctccctggccacccttggcctgtccacctgtgctgctgcaccaacctcactgccctccctcggccccacccaccctctggtccttctgaccccacwtatgctgctgtgaattttttttttaaatgattccaaataaaacttgagcccactcctgccatgcttcctctgggtgctgtgtagcttgaggaggggtccc

SEQ ID NO: 19820 - DNA, 201 bp, Homo sapiens
ccagtcagcagtgcccctgcagctgtttggggctgggggctccgatgatgccagagccctagggtttacaggcacctaggcagattcgaggatccaagtcsctgccacatgcgtttgggtgagaccgacctcactgcctcagtttcctcctatacactgatgctatcaacaaaaatacccacttcaggaggtggttgtaaa

SEQ ID NO: 19821 - DNA, 201 bp, Homo sapiens
ctgtgctgctgcaccaacctcactgccctccctcggccccacccaccctctggtccttctgaccccacttatgctgctgtgaattttttttttaaatgatkccaaataaaacttgagcccactcctgccatgcttcctctgggtgctgtgtagcttgaggaggggtccccaggtcctcccaggaacaggaacgggttcagc

SEQ ID NO: 19822 - DNA, 201 bp, Homo sapiens
ttctgaccccacttatgctgctgtgaattttttttttaaatgattccaaataaaacttgagcccactcctgccatgcttcctctgggtgctgtgtagcttsaggaggggtccccaggtcctcccaggaacaggaacgggttcagcctgttgataggaccaggtatcctatagggacacacacagggcattcatgggacctg

SEQ ID NO: 19823 - DNA, 201 bp, Homo sapiens
acaggcacactgccctctcccccttggggttgcatggtctgcaagtgcacacacctgtatctcgccctctcaggggaaagatttaccaggccctctccggstgcatccactgggtctctggctacaggcagagagccagtcagcagtgcccctgcagctgtttggggctgggggctccgatgatgccagagccctagggtt

SEQ ID NO: 19824 - DNA, 201 bp, Homo sapiens
gactaaccctttccggaggatgggatctgggtaaggcaggccctttcctgttcagcagcagggatgagttacagctctgtaggcgggagccacctgtcagccccccccggggctggtgactccattcccagcaggccgaaactctggtccagaggagatagtccggccttgaaagttttgcctccttccttcatttgtctc

SEQ ID NO: 19825 - DNA, 201 bp, Homo sapiens
ccctttccggaggatgggatctgggtaaggcaggccctttcctgttcagcagcagggatgagttacagctctgtaggcgggagccacctgtcagccccccycggggctggtgactccattcccagcaggccgaaactctggtccagaggagatagtccggccttgaaagttttgcctccttccttcatttgtctcctaatg

SEQ ID NO: 19826 - DNA, 201 bp, Homo sapiens; identical to SEQ ID NO: 5912

SEQ ID NO: 19827 - DNA, 201 bp, Homo sapiens; identical to SEQ ID NO: 5949

SEQ ID NO: 19828 - DNA, 201 bp, Homo sapiens; identical to SEQ ID NO: 5876

SEQ ID NO: 19829 - DNA, 201 bp, Homo sapiens; identical to SEQ ID NO: 5877

SEQ ID NO: 19830 - DNA, 201 bp, Homo sapiens; identical to SEQ ID NO: 5911

SEQ ID NO: 19831 - DNA, 201 bp, Homo sapiens; identical to SEQ ID NO: 5878

SEQ ID NO: 19832 - DNA, 201 bp, Homo sapiens; identical to SEQ ID NO: 5832

SEQ ID NO: 19833 - DNA, 201 bp, Homo sapiens; identical to SEQ ID NO: 5834

SEQ ID NO: 19834 - DNA, 201 bp, Homo sapiens; identical to SEQ ID NO: 5837

SEQ ID NO: 19835 - DNA, 201 bp, Homo sapiens; identical to SEQ ID NO: 5914

SEQ ID NO: 19836 - DNA, 201 bp, Homo sapiens; identical to SEQ ID NO: 5880

SEQ ID NO: 19837 - DNA, 201 bp, Homo sapiens; identical to SEQ ID NO: 5881

SEQ ID NO: 19838 - DNA, 201 bp, Homo sapiens; identical to SEQ ID NO: 5882

SEQ ID NO: 19839 - DNA, 201 bp, Homo sapiens; identical to SEQ ID NO: 5954

SEQ ID NO: 19840 - DNA, 201 bp, Homo sapiens; identical to SEQ ID NO: 5917

SEQ ID NO: 19841 - DNA, 201 bp, Homo sapiens; identical to SEQ ID NO: 5919

SEQ ID NO: 19842 - DNA, 201 bp, Homo sapiens; identical to SEQ ID NO: 5918

SEQ ID NO: 19843 - DNA, 201 bp, Homo sapiens; identical to SEQ ID NO: 5920

SEQ ID NO: 19844 - DNA, 201 bp, Homo sapiens; identical to SEQ ID NO: 5957

SEQ ID NO: 19845 - DNA, 201 bp, Homo sapiens; identical to SEQ ID NO: 5885

SEQ ID NO: 19846 - DNA, 201 bp, Homo sapiens; identical to SEQ ID NO: 5958

SEQ ID NO: 19847 - DNA, 201 bp, Homo sapiens; identical to SEQ ID NO: 5922

SEQ ID NO: 19848 - DNA, 201 bp, Homo sapiens; identical to SEQ ID NO: 5928

SEQ ID NO: 19849 - DNA, 201 bp, Homo sapiens; identical to SEQ ID NO: 5931

SEQ ID NO: 19850 - DNA, 201 bp, Homo sapiens; identical to SEQ ID NO: 5859

SEQ ID NO: 19851 - DNA, 201 bp, Homo sapiens; identical to SEQ ID NO: 5860

SEQ ID NO: 19852 - DNA, 201 bp, Homo sapiens; identical to SEQ ID NO: 5895

SEQ ID NO: 19853 - DNA, 201 bp, Homo sapiens; identical to SEQ ID NO: 2607

SEQ ID NO: 19854 - DNA, 201 bp, Homo sapiens; identical to SEQ ID NO: 5936

SEQ ID NO: 19855 - DNA, 201 bp, Homo sapiens; identical to SEQ ID NO: 5937

SEQ ID NO: 19856 - DNA, 201 bp, Homo sapiens; identical to SEQ ID NO: 5863

SEQ ID NO: 19857 - DNA, 201 bp, Homo sapiens; identical to SEQ ID NO: 2605

SEQ ID NO: 19858 - DNA, 201 bp, Homo sapiens; identical to SEQ ID NO: 5939

SEQ ID NO: 19859 - DNA, 201 bp, Homo sapiens; identical to SEQ ID NO: 5902

SEQ ID NO: 19860 - DNA, 201 bp, Homo sapiens; identical to SEQ ID NO: 5969

SEQ ID NO: 19861 - DNA, 201 bp, Homo sapiens; identical to SEQ ID NO: 5867

SEQ ID NO: 19862 - DNA, 201 bp, Homo sapiens; identical to SEQ ID NO: 5868

SEQ ID NO: 19863 - DNA, 201 bp, Homo sapiens; identical to SEQ ID NO: 5869

SEQ ID NO: 19864 - DNA, 201 bp, Homo sapiens; identical to SEQ ID NO: 5903

SEQ ID NO: 19865 - DNA, 201 bp, Homo sapiens; identical to SEQ ID NO: 5870

SEQ ID NO: 19866 - DNA, 201 bp, Homo sapiens; identical to SEQ ID NO: 5871

SEQ ID NO: 19867 - DNA, 201 bp, Homo sapiens; identical to SEQ ID NO: 5979

SEQ ID NO: 19868 - DNA, 201 bp, Homo sapiens; identical to SEQ ID NO: 5906

SEQ ID NO: 19869 - DNA, 201 bp, Homo sapiens; identical to SEQ ID NO: 5985

SEQ ID NO: 19870 - DNA, 201 bp, Homo sapiens; identical to SEQ ID NO: 5947

SEQ ID NO: 19871 - DNA, 201 bp, Homo sapiens; identical to SEQ ID NO: 5989

SEQ ID NO: 19872 - DNA, 201 bp, Homo sapiens
tggatgtttatcagtgcaatatttaaaaacaagaagaccgaagtcacaagaagcagcaccaaaaccacctttttaaccctccactttaggtagagaaaaayagagttagaaaaattggctatcttgagaaaataaaaagtaccgaggcctgtagctaaccagacactaaaatgattgatcactgtccagatattagtaagc

SEQ ID NO: 19873 - DNA, 201 bp, Homo sapiens
atgatggttgacctgaaatcaccaaggcaggactgctcatctccaggtctaatggaaaacagtatctggtgaaaccaaagaaaataattccagtaacccaytgggagctgcttggcttaagcacctaccctgtgcctaagatacaacccatcaagcccagctaaaactgatccagtttccacagggccagagaagaattgc

SEQ ID NO: 19874 - DNA, 201 bp, Homo sapiens; identical to SEQ ID NO: 2613

SEQ ID NO: 19875 - DNA, 201 bp, Homo sapiens; identical to SEQ ID NO: 2615

SEQ ID NO: 19876 - DNA, 201 bp, Homo sapiens; identical to SEQ ID NO: 2609

SEQ ID NO: 19877 - DNA, 201 bp, Homo sapiens
gatcaaaaaataagaataggaaataataatatttgattcttccaaagttgcaaagagaagctttctaagaatgcatacttatgtgcagttttcctcctgarttgtttctaatatgccacttgaggtatacttgacatgcaataagttgtacagatataaagtgtacaatttcatgagtgtctcaccatgtgatactcatca

SEQ ID NO: 19878 - DNA, 201 bp, Homo sapiens
cattgaaatactcaagagccctttaactaaataagcactaaggcttaaggaatcatgagaggacaaacaggggcccttctatgttgagttcctggttgacrctcagtgtagtaacaatcctgctttcccttacatcttcttccacttccggtagcatcagagagtggctgatgagatctcaaaggggatgcacagggtgtg

SEQ ID NO: 19879 - DNA, 201 bp, Homo sapiens
caagtttatattaaatagtaatacatgtaaatattccggagactttggaaatattttctctgtacatgtgagaagaggtagaaatctatctattgtctcayaaagcagtcattgtgtttgaatgagttcatccacatggcaagaattcttattctgtgcctctcccctgcccagtagggcatattgcttcatcagcaccaa

SEQ ID NO: 19880 - DNA, 201 bp, Homo sapiens; identical to SEQ ID NO: 2616

SEQ ID NO: 19881 - DNA, 201 bp, Homo sapiens
cttttggagattacctctcactaccttgcagctgctttctgaattcccatttgcctctaaggttgcaattttatttctctctctctctctctctctctctstgtgtgtgtgtgtgcgtgcgtgtgtatgaatatgtatattgtattttattaaatctagaatgcatagactagaagacatgtcattgttttatgtaccacc

SEQ ID NO: 19882 - DNA, 201 bp, Homo sapiens
atcacacttttaactcctctgtgggctttggtgctggcgtctccggatattttgacagtgtgctgcatcttcttgcgatgtttccacatggagaagatgargagaagaaacattgccagggacaaagtaaagggtatgaaaatgaacacagtgctggttaatacaataagactggaaaatcgtgtaaagttacttgaatca

SEQ ID NO: 19883 - DNA, 201 bp, Homo sapiens
attgagagtgtgggcttcaacacatggattttggagacaaacaagtcagtccataacagtctttctgaagcagattggttattagcattttcagtaaggasgtatgtttagtaaacagccctcatctttttttaaggggagaggggaatgttattatttaattcaaaccccagaacaaatttttagcaaagaattcaggat

SEQ ID NO: 19884 - DNA, 201 bp, Homo sapiens
atgatcatcttaataaacagcaaaaaatttgatagtttttaacagagattttattacaatactatacacaggaagataggaaacaaatattctccctgaakaatatttttaaaagaatttatctcaaagctagagtcagtattacgtttattgttaaaacactagaaaacactccatttgcaaagacagcagttacgatca

SEQ ID NO: 19885 - DNA, 201 bp, Homo sapiens
tatctattgtctcataaagcagtcattgtgtttgaatgagttcatccacatggcaagaattcttattctgtgcctctcccctgcccagtagggcatattgyttcatcagcaccaaataccttcacatttttttcacatatactcactctcccagcaacatctactccatgatcctcactacagggaccaatgtagataaag

SEQ ID NO: 19886 - DNA, 201 bp, Homo sapiens
gaacaaagaaaatgatattaaggaggggggctgtagaagggatagagggcaaaaggatggttttgcatcttcctcaccgcagtaaaccaatgaggtattasacatttcctgccatgtcaagtcttgcctataatcttccttgtctttttcaggaagtgaataagaagatgacagtgtttcaaatgccttgaaacataatgt

SEQ ID NO: 19887 - DNA, 201 bp, Homo sapiens
agatcctactttatattccattcagagagcttccgggtcttcaaaaaagatttagtcatgtgggtgtgaaagagctgagtcatgaaatttggaccttattrtaagtccagaaggaaaaacaaggggtttgaagcacaagggtgatatgatctaatttctacttttaaatgatcactctgattgtcgtgagggaactgatat

SEQ ID NO: 19888 - DNA, 201 bp, Homo sapiens
tgattgtcgtgagggaactgatatgggatgtactgggggaagaatgttaccaggaccaggtcgaggctgttaaagacctccaggagagagcattgtgggcygaacaacaagcttctagtaaagatcatgcaagtggacacatttgagatgtattttgaaggtggaagaaattagataagctaatgggtagtgcctggaggg

SEQ ID NO: 19889 - DNA, 201 bp, Homo sapiens
tgtgtttgaatgagttcatccacatggcaagaattcttattctgtgcctctcccctgcccagtagggcatattgcttcatcagcaccaaataccttcacatttttttcacatatactcactctcccagcaacatctactccatgatcctcactacagggaccaatgtagataaaggatgacatactgtctagccaagacgg

SEQ ID NO: 19890 - DNA, 201 bp, Homo sapiens
cctgtattgtacagcaccaacgcttgcctgagtgtagtgagattcacagagtttggaaatttcctgtagcatgaggaggctgcggggcagccttctgtcayctatgtgtacccagcagtgtgctgtcctcacacaactcacggataagcagaaagcatctctattacatgaaaaatttagctaaatatacaaatatccatg

SEQ ID NO: 19891 - DNA, 201 bp, Homo sapiens
aaaacacagacacacaccagcttccgaatattaaccaaaccaggctaattcgagagattgccaaagcagtgaggatccgatcaaccgaagagatctttctwcccttgacccagtcaatacagttcaccagtgctatgaaactatttcctaaatttccaattataaattccacaattaaaacgaatgtaaatatgctcttta

SEQ ID NO: 19892 - DNA, 201 bp, Homo sapiens
cgccattgtcctgcttgtctttataaagggagctgacacgtttctcccagcataaagttgggagtgacaccagagccttctgcaagatgcttctgattctsctgtcagtggccctgctggccttcagctcagctcaggacttagatgaaggtaagccgaattgggggaagatattgtgactctgattggggtttacgggcg

SEQ ID NO: 19893 - DNA, 201 bp, Homo sapiens
aataggctatcaaaagagtcagacatattgaccgtcttcactgttagctgtaggattgctgcccaaccccctgacacacccacacaaactcacatacacasaaatgaaaagcacagtggaaagcagaatagcagtctttccaaacagattgaaaaacaaatgatgtctaaagttcaatcctgacactgtgctgattgcttg

SEQ ID NO: 19894 - DNA, 201 bp, Homo sapiens
aagacagattcagggaagtgcagctgtgaagatcctatactgatcccagtagacagggatgatggtggccttgctggacagtggatgagtatccatgaagkagataaacacatgtcagagctattgctgaggcagagaattgggtaaacacttgcctctgtctacatagagttagagaatcaccagagtgaaatattgtca

SEQ ID NO: 19895 - DNA, 201 bp, Homo sapiens
tactttcttgatatgctagtctcttttgctgattgttgacattggagaaggtcatggaagggacctgagctgagcgacctttaggagcatttcctgttctyttcctgtactctgctgccaaggagaaatctgtctttcaccaggcttgcagctttctccgttacccacatcatcaggcaatatctgtctggcacccctctt

SEQ ID NO: 19896 - DNA, 201 bp, Homo sapiens
ttcctttttgacatgatggttgacctgaaatcaccaaggcaggactgctcatctccaggtctaatggaaaacagtatctggtgaaaccaaagaaaataatyccagtaacccattgggagctgcttggcttaagcacctaccctgtgcctaagatacaacccatcaagcccagctaaaactgatccagtttccacagggcca

SEQ ID NO: 19897 - DNA, 201 bp, Homo sapiens
ctggtgagagcatagctggtatttatactttcttgatatgctagtctcttttgctgattgttgacattggagaaggtcatggaagggacctgagctgagcracctttaggagcatttcctgttcttttcctgtactctgctgccaaggagaaatctgtctttcaccaggcttgcagctttctccgttacccacatcatcag

SEQ ID NO: 19898 - DNA, 201 bp, Homo sapiens
agaatggtatataaatggaatcatacatcattgtgttttctctgtgcccacagatgcctgtttcttcctctttttataaagacaccagtcctattgtactrcggcctcactgtatggcctaatttaaccttaactacctacttaaaagccttatatccaaatacagtcacattgagagtgtgggcttcaacacatggattt

SEQ ID NO: 19899 - DNA, 201 bp, Homo sapiens
taaagttcaatcctgacactgtgctgattgcttggacacagttccgtcaaaacatttgtccaagtcatagttgtaccttttagaaattagccacaaacaayatcctccccaacccttcctgctaggctagagtcccagaagaaatgagggatacacttgacctgaagtaagcaaagcagaacccagtctctgaggcgagga

SEQ ID NO: 19900 - DNA, 201 bp, Homo sapiens
gatcactctgattgtcgtgagggaactgatatgggatgtactgggggaagaatgttaccaggaccaggtcgaggctgttaaagacctccaggagagagcaytgtgggccgaacaacaagcttctagtaaagatcatgcaagtggacacatttgagatgtattttgaaggtggaagaaattagataagctaatgggtagtgc

SEQ ID NO: 19901 - DNA, 201 bp, Homo sapiens
atccattgatactggcatttatatggatgtttatcagtgcaatatttaaaaacaagaagaccgaagtcacaagaagcagcaccaaaaccacctttttaacyctccactttaggtagagaaaaatagagttagaaaaattggctatcttgagaaaataaaaagtaccgaggcctgtagctaaccagacactaaaatgattga

SEQ ID NO: 19902 - DNA, 201 bp, Homo sapiens
taccgagtagtatattttatgaattgaggaacagggaatttctaggtatcacagagcaatcagcagctgagaagaggagtaccaatccaggaccctggaargatttttcagaaacttaatagtttattgtccaattgtagagacaaaaatgaaaataaagatagtgaggagtaccatacaccattgcttagaagattaaat

SEQ ID NO: 19903 - DNA, 201 bp, Homo sapiens
caaatgcgccattgtcctgcttgtctttataaagggagctgacacgtttctcccagcataaagttgggagtgacaccagagccttctgcaagatgcttctrattctgctgtcagtggccctgctggccttcagctcagctcaggacttagatgaaggtaagccgaattgggggaagatattgtgactctgattggggttta

SEQ ID NO: 19904 - DNA, 201 bp, Homo sapiens
aaagaaatttgatttttcaccaccctaatgtggattaagaggagttctaattaggaagccttgggaaggggggaggttgggagttgagaggcaggtcaggsagagaggggccggccgtgtggtgaagacagagagatatgaagacaggagggttttccagcatgagctcagctcttcttgtttcaactcacacagatggag

SEQ ID NO: 19905 - DNA, 201 bp, Homo sapiens
atttattgattgcacaaatagaacccaataaagaatttgtaccgggggagtgagagagtgagatttgcatttatagagacatgggactgctgggaaggatrtggagaatgcaagacagattcagggaagtgcagctgtgaagatcctatactgatcccagtagacagggatgatggtggccttgctggacagtggatgagt

SEQ ID NO: 19906 - DNA, 201 bp, Homo sapiens
taagaggagttctaattaggaagccttgggaaggggggaggttgggagttgagaggcaggtcagggagagaggggccggccgtgtggtgaagacagagagrtatgaagacaggagggttttccagcatgagctcagctcttcttgtttcaactcacacagatggaggagactctgagcagttcatagatgaggagcgtcag

SEQ ID NO: 19907 - DNA, 201 bp, Homo sapiens
aaatattctcaccataaaaaaatatttgttacctgttatctgttatatttattatcatttgaatacgttaattagtttcatttaattattccacatagtaktcataaatcataacaacacctgatacctcataaatgtatgcaagtaaaatatgtcaatttacaataaaaataaagaaaataaagaaaaatcagatggttt

SEQ ID NO: 19908 - DNA, 201 bp, Homo sapiens
ggggagtgagagagtgagatttgcatttatagagacatgggactgctgggaaggatatggagaatgcaagacagattcagggaagtgcagctgtgaagatmctatactgatcccagtagacagggatgatggtggccttgctggacagtggatgagtatccatgaaggagataaacacatgtcagagctattgctgaggca

SEQ ID NO: 19909 - DNA, 201 bp, Homo sapiens
atgatataattttctatctgcaaagccaagagaatgagcaaagcaaatgtggtagtttagtaaggcagctggcttctaattcaacaaacgaagcaaattasttttttgcatacacgctaatcaggtactaaatattatacaaaaattaaaaacacttaatataggtactaaaattccatattcttttatgtactttatcta

SEQ ID NO: 19910 - DNA, 201 bp, Homo sapiens
ataaattccacaattaaaacgaatgtaaatatgctctttatgacaccacccattgcctgtaagagcatgccccaatgtctaatatcactgctgaagacttyttaatgcattcatctaaaatgctatgtatatctgattcttgaaaattcaataatatattccctttaaaaagggaatgttaaaccagcaaccatccagatt

SEQ ID NO: 19911 - DNA, 201 bp, Homo sapiens
atggagaatgcaagacagattcagggaagtgcagctgtgaagatcctatactgatcccagtagacagggatgatggtggccttgctggacagtggatgagyatccatgaaggagataaacacatgtcagagctattgctgaggcagagaattgggtaaacacttgcctctgtctacatagagttagagaatcaccagagtg

SEQ ID NO: 19912 - DNA, 201 bp, Homo sapiens
aatgtggtagtttagtaaggcagctggcttctaattcaacaaacgaagcaaattacttttttgcatacacgctaatcaggtactaaatattatacaaaaawtaaaaacacttaatataggtactaaaattccatattcttttatgtactttatctaccagattgagatgtaagtttaagaagcctatttttagtaactgtg

SEQ ID NO: 19913 - DNA, 201 bp, Homo sapiens
  misc_feature (101)..(101): n is a, c, g, or t
aagatcctatactgatcccagtagacagggatgatggtggccttgctggacagtggatgagtatccatgaaggagataaacacatgtcagagctattgctnaggcagagaattgggtaaacacttgcctctgtctacatagagttagagaatcaccagagtgaaatattgtcatttttttctctcctgcatgtagtatttt

SEQ ID NO: 19914 - DNA, 201 bp, Homo sapiens
acagttccgtcaaaacatttgtccaagtcatagttgtaccttttagaaattagccacaaacaacatcctccccaacccttcctgctaggctagagtcccaraagaaatgagggatacacttgacctgaagtaagcaaagcagaacccagtctctgaggcgaggaggcccacctggtagggagctcaaatgcgccattgtcc

SEQ ID NO: 19915 - DNA, 201 bp, Homo sapiens
atttaattattccacatagtagtcataaatcataacaacacctgatacctcataaatgtatgcaagtaaaatatgtcaatttacaataaaaataaagaaartaaagaaaaatcagatggttttttaaagttaagtctgtaaagggacttattcatagttatccaaagctcctcctacaaagtagcagagttttctaataat

SEQ ID NO: 19916 - DNA, 201 bp, Homo sapiens; identical to SEQ ID NO: 2608

SEQ ID NO: 19917 - DNA, 201 bp, Homo sapiens; identical to SEQ ID NO: 2610

SEQ ID NO: 19918 - DNA, 201 bp, Homo sapiens
aagaactctttatagtattcgcattcttctctgtatggtaatatacatactttcatatatcctaatttgtgatatgtttggatggtgttgattccaagcayatctttgtaaaattcacaaagttatacacaatgaaagaatcttaaggaagtataaatttatataacatacaagaatttcttaggagctattttttttcta

SEQ ID NO: 19919 - DNA, 201 bp, Homo sapiens
tatttcttagctttcacatgagtttatttagatctcttcagtgtttattggttagtttttttttttacaattatatatgatgctattgtttggtttttccrtaatttacttaaccaatccttgtcactgaacattaaggctgctttcacactgtccctattacaggatatgttgcagtccccatctttctgaaaataaccc

SEQ ID NO: 19920 - DNA, 201 bp, Homo sapiens
ttccacatggagaagatgaggagaagaaacattgccagggacaaagtaaagggtatgaaaatgaacacagtgctggttaatacaataagactggaaaatcrtgtaaagttacttgaatcagaactgcaagtcttgtttcttctgtatccattgatactggcatttatatggatgtttatcagtgcaatatttaaaaacaag

SEQ ID NO: 19921 - DNA, 201 bp, Homo sapiens
cccacctcctcctggaaagccccagggaccacctccccaagggggccgcccacaaggacctccacaggggcagtctcctcagtaatctaggattcaatgayaggtatgattccagtttattatccatcaaaggctccaactgctacagttctccaacttcattgtgccagtgaatctattgaaaagctgttaatatttccg

SEQ ID NO: 19922 - DNA, 201 bp, Homo sapiens; identical to SEQ ID NO: 2614

SEQ ID NO: 19923 - DNA, 201 bp, Homo sapiens
atgcagggatgcaggtctaccccctccacagtacattttcaacatgggaagaagttgctgcccttcccacagtgactgcatttcatgcctttctctctgcytactggcatgtccttatcagtgggagttctgaagagaagacacaattcttgttcatggagaaaagttatctttcttgagaacacatagaagttggagaac

SEQ ID NO: 19924 - DNA, 201 bp, Homo sapiens
gacagcagcctggagtgtgatccagcttcaacatctgggtgcacattttaatgggagtcactttagcaatgctgcaagcaaaagggatgtcatgttaatgrtatcagccagccacctaaggaaggaagtcaggagtccctgaagttacccacaggaaatcatctctgctcaggtccttgatgggttttgtgtctcctctct

SEQ ID NO: 19925 - DNA, 201 bp, Homo sapiens
ttgctcttcctcttaccatgaacgcagatgtactcacatgcatgcctgtgcctacaggcgcacacacacaggcacacatctgctgcagctgaattacttascaccccaccaacccaggcccagtagtttcccagccacggagggccactgggagggctccataggtcaatgattgtgaaacagattttgtcaatgacaaag

SEQ ID NO: 19926 - DNA, 201 bp, Homo sapiens
gaggggtggctcatccagaggttggcaaggggcgcctggcatgtggggaaggagtgagaaggctggggtgggagagggtggagtgtgaaccctcattctcytaagccacgggggaagcggggtgtgggggaagagtacagcctcgcttcaagtcattactggcgttttcacccccatcctggatcagaggctgactggctg

SEQ ID NO: 19927 - DNA, 201 bp, Homo sapiens
gccaatggatgataattgcacagtctaaatttggtggaagttcagaaatttggtcattttgaaaagggattaaaggtttgggtctgactaggcttgaaagrcctcaggtccagccagtcatgctggggtcatctgatccacaggaatgaccctcctgaagtcctccaagacaaacagcgataagtttgagagggacagcat

SEQ ID NO: 19928 - DNA, 201 bp, Homo sapiens
tagagctagaatttaaagccagggaactgcaggggatcctttagggagagtgtggataaagaaaacagtgagggccgagccctggggcaggccaggagaasgagcctggaaaggggaagaggaagaagttggtgtgtgcacactgcattgtcacatgcatggtgctgggggagctgggaaccagaagtctagccgtccacc

SEQ ID NO: 19929 - DNA, 201 bp, Homo sapiens
agggaactgcaggggatcctttagggagagtgtggataaagaaaacagtgagggccgagccctggggcaggccaggagaaggagcctggaaaggggaagargaagaagttggtgtgtgcacactgcattgtcacatgcatggtgctgggggagctgggaaccagaagtctagccgtccacctgctgtgtgactttgaccca

SEQ ID NO: 19930 - DNA, 201 bp, Homo sapiens
aactgcaggggatcctttagggagagtgtggataaagaaaacagtgagggccgagccctggggcaggccaggagaaggagcctggaaaggggaagaggaasaagttggtgtgtgcacactgcattgtcacatgcatggtgctgggggagctgggaaccagaagtctagccgtccacctgctgtgtgactttgacccaatcc

SEQ ID NO: 19931 - DNA, 201 bp, Homo sapiens
ggggcaggccaggagaaggagcctggaaaggggaagaggaagaagttggtgtgtgcacactgcattgtcacatgcatggtgctgggggagctgggaaccasaagtctagccgtccacctgctgtgtgactttgacccaatcccttgtctggtcttctgcaccttcctggccagcatgtgtcttatggtgaggttgagggta

SEQ ID NO: 19932 - DNA, 201 bp, Homo sapiens
ggctgcaacaaccagtaccaagacatagacaaatgggaggtggtttggttgagagacaaatgtcttgttttcctcagtatcctggggaacaatgaacggtwtctattctgctgccatgggccccgtcataaaccatcctgagtgctggggcttagaaaactcatgcttgcatgattgatttctcaggctgagtctccgtgc

SEQ ID NO: 19933 - DNA, 201 bp, Homo sapiens
ctcctggaaggcaattctcatttatctctgaggactcagatcactgagcccttctcatttccctcaactcttgcagcacttactctggtccaatacctatyctggtcttggtcctcagtgcctcagctggtctatcctgtctttttttttttttttttttttttttgagacggagtctcaccctgtcgcccaggctggagt

SEQ ID NO: 19934 - DNA, 201 bp, Homo sapiens
cctgctccacccaaagagctaacattcccccatttgcccaccaggtggttggacaaggataaggatgatgggcagctggtccgagagttgctacccagtgrcagcagcgcgacactgaagagtgagttgtcctgatgaccaggtgctgggtgtgcccttggtgagacaggggccttccctcagctaagcccttcaagaaaa

SEQ ID NO: 19935 - DNA, 201 bp, Homo sapiens
  misc_feature (199)..(201): n is a, c, g, or t
agtacattcttttaatattctataccagggatcagcaaacattttgtgtaaagaccagatagtaaatattttaggttttgcaagcatttggtctctggaamaacagctttgctggtgtaacacaaaagcagtcatagatgatgcctaaatgattgggcatggctgtgtcattttgacatgtgaaaattatatgaatttnnn

SEQ ID NO: 19936 - DNA, 201 bp, Homo sapiens
gctccaaatcctgcagaagctcctggtcactcagagtcaaagccaaagcatgtttggtggtcagctcagcccgcaggtctgctctatgcccctcatctctstattctgattcccccttgctcactccttgctgttccttgaacccaacagacatggtcccacctcaaggcctttgcatttgctgtccacgctccctagcag

SEQ ID NO: 19937 - DNA, 201 bp, Homo sapiens
agttgaggagacctcacagagatggaaggaacccctgccccaagttgcagggctgcttagaacaggagcctggattttcaattcccagcgtgtgttccccrcaaacctccagctccaggctgccctcctatacacgcaccctgcttcctgtcaccccctgcactaaccccttcccttcctccctctgccttgggctgttca

SEQ ID NO: 19938 - DNA, 201 bp, Homo sapiens
cagttaagtttgaatttcagataagcaatgaataatgtttttgtataagcatgactcaaatattagataggacacacttaaaacgttatgcattgtttatstaaaatccaaatttaatagggattttgtaactattggctaaatctggcaaccctagcacagagagataaggacacttactcaagattgcacaagtattag

SEQ ID NO: 19939 - DNA, 201 bp, Homo sapiens
tccatgctgaggggtctgacttggacctccctttcctagatggccccagcagtcttctatgccagctcctcagccatactctctgtaccttctgaaagcakacataattggctcattccattaaaatccattagttcaacacttatgtattgtgcacctactatgtacaaccctctctactaaagtagccctggctagcag

SEQ ID NO: 19940 - DNA, 201 bp, Homo sapiens; identical to SEQ ID NO: 2626

SEQ ID NO: 19941 - DNA, 201 bp, Homo sapiens
atgtgtataatgctctagacactgtctggaaaggttgatccttcctttgtctcagtttccttgtccactgtcagagaagctagaccagatgattgtgggaratcctttcaggctcttatgttttgatgttcttgcttgtgatttacacgctttcctgctctaagcccattcacaccttctggagcagacagagaacctact

SEQ ID NO: 19942 - DNA, 201 bp, Homo sapiens
cagttagttagagacagagttaaatctagaataaggtctcttgcttcctggttcagtggctataccaaatcatcaccctgcctttttgcattcggtaatarctgccttgggaacaaggcaatcatctatctaaatatgataacatataacccattcccaaaattgggacttaatataatattaaaggtaatggcaaaaatt

SEQ ID NO: 19943 - DNA, 201 bp, Homo sapiens
agaaggcccaacagtgcgcaggatcatgggcagtaagtactgacaggctctccatcctgggaggcagtggaactcctgcttggtgtcccgatgggcctgayctatgagctgagagtcttgtctgctttgcatcttcaggccccttagagtgccagagtggatttggaaggtccctgcctcaagactggcttggaaaagcca

SEQ ID NO: 19944 - DNA, 201 bp, Homo sapiens
aaaggtaatggcaaaaattgcaattacttttgcactaacctgatatgtagtccaccaaggcagaaatacacctgttcttacctgatctgtccactttgtgygccagaattgagcctgcaggtataaagaactggggagaagtcttgggccgtaactgcttttgaaacccttttaactaactctcacgattttagattctcg

SEQ ID NO: 19945 - DNA, 201 bp, Homo sapiens
cccaccgctggctggcccggggcaaggaggacaacgaacttgtcgtggagttggtgccagctggcaagccgggtcctgagcgtaagtgggtcgtggggggkgggggtggggagggagtggccagacagttcccctaaagggggcccactgggggcagggggcctagatccccctcacgtggaggccaaataggtgggcacc

SEQ ID NO: 19946 - DNA, 201 bp, Homo sapiens
gagctctgcaataatcccagaagatggtcagggttgatgttgtccatgggtcagatggagaaacttagaaccggaagagctgaagatatttttatttttgkttatttgtttatttttgaaacagggtcttactctgtcaacgaggctggagtgcagtggtgtgattttggctcattgcagcctcagcctcctaggctcagg

SEQ ID NO: 19947 - DNA, 201 bp, Homo sapiens
gaaacagggtcttactctgtcaacgaggctggagtgcagtggtgtgattttggctcattgcagcctcagcctcctaggctcaggtgatcctcctgtctcascctcctgagtagctagggcaataggtgtacatcaccacacctggctaatttttatattttttttctacagatggggtctctttatgttgtccaggctggt

SEQ ID NO: 19948 - DNA, 201 bp, Homo sapiens
cggcagctaaagatatttgtatctgacctcttctaaggtcagactgctgactttgaactagagtgtcccatttctggtctcagaattacagaatttaagawctgggaaggatcccaggagataagatgcctgtggcaaaaggacccctattccccctccacaaccccagcaaacccagttgtgtagtcagtgatggggctg

SEQ ID NO: 19949 - DNA, 201 bp, Homo sapiens
tacttctaaatattttattctttttgatgctgttgcaaatagaactgttgtcttaatttcactttcagactattcattgcaaaagaatagaaatataatckattttggtatattgatcttgtactctacaactttgctgaagtcatttattctaatagttttttagtgaattccttatgattttataaatacatagttatg

SEQ ID NO: 19950 - DNA, 201 bp, Homo sapiens
caccttctggagcagacagagaacctactagaattctgccattacagttgaggagacctcacagagatggaaggaacccctgccccaagttgcagggctgsttagaacaggagcctggattttcaattcccagcgtgtgttccccacaaacctccagctccaggctgccctcctatacacgcaccctgcttcctgtcaccc

SEQ ID NO: 19951 - DNA, 201 bp, Homo sapiens
gattgaggctgagaaagggttcaggagcctggctagagtttggccaaggtgagaatcttccttgacatcacctggagaaacacagttctaaatcttggacktgaggattggggatgtctctagaaatgcctgagctgggatttttgttactacctgctgctcccagggtgtggcttggtggaaatggagatggtaacaagc

SEQ ID NO: 19952 - DNA, 201 bp, Homo sapiens
tgagaatcttccttgacatcacctggagaaacacagttctaaatcttggacttgaggattggggatgtctctagaaatgcctgagctgggatttttgttastacctgctgctcccagggtgtggcttggtggaaatggagatggtaacaagccctctacctggaacctcatctttcctgccccttccctctctgggagtcc

SEQ ID NO: 19953 - DNA, 201 bp, Homo sapiens
aacatatacagacttttttccttgtcattattccctaacagtacagtataacaactatttatatagcatttaccttgtattaggtattataagtaacctaragatatttaaagtgtataggaggatgtgtgtaggttatatacaaatactatgccattttatatgaggggcttgagcatcctcagattcgggtatgcttgg

SEQ ID NO: 19954 - DNA, 201 bp, Homo sapiens
catatacagacttttttccttgtcattattccctaacagtacagtataacaactatttatatagcatttaccttgtattaggtattataagtaacctagaratatttaaagtgtataggaggatgtgtgtaggttatatacaaatactatgccattttatatgaggggcttgagcatcctcagattcgggtatgcttgggg

SEQ ID NO: 19955 - DNA, 201 bp, Homo sapiens
ggtttccccccacaaggctgacgagttcactatcgagtctgtcaccatgcggaatgtgaggcgggtgaggatcagacacgatggcaaaggctccggcagckgctggtacctggacagagtgctggtgagagaggaggggcagcctgagagcgacaacgtggagttcccatgtctcaggtacatgcgtcctgcctgctggtg

SEQ ID NO: 19956 - DNA, 201 bp, Homo sapiens
gtcattattccctaacagtacagtataacaactatttatatagcatttaccttgtattaggtattataagtaacctagagatatttaaagtgtataggagratgtgtgtaggttatatacaaatactatgccattttatatgaggggcttgagcatcctcagattcgggtatgcttgggggttctggaacctgtccctgca

SEQ ID NO: 19957 - DNA, 201 bp, Homo sapiens
gccatcagtgtaacgttgcccccctcagcaccccatctgagcccattgactgagatctcgctctctggttctgctcctctaacattttgatacttggaggyaatgaagactctagcaaaatgtgggactcagacagggatgggacctttggcctgcactgcccctacctctccagactttgagcagtccctgagtggccct

SEQ ID NO: 19958 - DNA, 201 bp, Homo sapiens
attgtgcatgaaatgttccccaaaagaaaagctagatctgggatcctgtagccccagttggctgctacctaataagtattctatctctaattaaggatagyaggagaaggactaagctttaaatgtggaatccaggagccacattcaaatagccaaagggaagaagtcattttgcctctaggttatagaagcacggtactg

SEQ ID NO: 19959 - DNA, 201 bp, Homo sapiens
cgaccctcattctttcagcctccaacactcacccactttgttggtccatgcccaccccacttagccagcccttccctgccacttaatttgggatcatcccrtgaagctgccccttctttgaacccatgcccaaccctctgactcaagcccctgccctcccagcactgttgtgaccttggtacacttcacctcacccttgac

SEQ ID NO: 19960 - DNA, 201 bp, Homo sapiens
gtcttgggttgggagtgtgggcagtttcagtcccaggttagtgtagatgcatctgaagatccctctgttctaggatctggctggatctgagaggctgtgcytcaggtccaaacaccccatggccatgaggccctccacactgcatctttctgtgtctacaggaaacacctatgaggttcaggtggtcacggggaatgtgcc

SEQ ID NO: 19961 - DNA, 201 bp, Homo sapiens
tcacttcttcctccccacatttttcctggtctgtcaggggctgacgtggatgggtggaggatggaacggagagacaaacctacaatcagacctccagtggrgaggaaaagaggttctgaaatcggacagagagaggacaccagagaggagaagataaatttaagaaatattttgaaggtggaactggcaggtcttgaagtg

SEQ ID NO: 19962 - DNA, 201 bp, Homo sapiens
taggtcttctatgtggagggatttgacagacaaggagagaccatgtcaggaggtggaggagatggcaaggaagagcatctctacaggttacatgtataaartgtgctcgtacacatttttaacagtgtacaattgtggggctatcctagctggtgtttttttgttgtcttctgtgatgctattaaaaaatcatttcaagga

SEQ ID NO: 19963 - DNA, 201 bp, Homo sapiens
tatgtggagggatttgacagacaaggagagaccatgtcaggaggtggaggagatggcaaggaagagcatctctacaggttacatgtataaaatgtgctcgyacacatttttaacagtgtacaattgtggggctatcctagctggtgtttttttgttgtcttctgtgatgctattaaaaaatcatttcaaggagaaaaataa

SEQ ID NO: 19964 - DNA, 201 bp, Homo sapiens
ggagaaaaataattctggtgatagtatggatatggatagtatggattgaagggctgtctgttgtggctataaggcagtttgatgtcttccgggggtccctrgctatatttcagagcccaaacaaacttgaatttctttctctcaactgctctttatggcccacaaacatttatcttatgcttggaacacccctatgtcctc

SEQ ID NO: 19965 - DNA, 201 bp, Homo sapiens
tgtgtgtctctggtttacttacaaattaagggccagccaaataagcaattaatgccatgtctgagagccaagaggcttttgggagtgattgttctgattarcacagactgggagatatggacaatacacatgccagctcacaatttatttccaccttggctgtccctcaggagctacatgacagtaaaataaatgagatcc

SEQ ID NO: 19966 - DNA, 201 bp, Homo sapiens
tttccaccttggctgtccctcaggagctacatgacagtaaaataaatgagatccgtgttctccactgtacttccaagagaagtgattacacaccactgatkagtgggcaagaggccactggactcaagtgcagaaaatcgtagcttctcgttaatcagagctgtaattttaaaattaaagtaaagaggctctgtacttacc

SEQ ID NO: 19967 - DNA, 201 bp, Homo sapiens
ttgggcctgaaggccgtaatttgctgacccctggtggaggctcacagctgccacatgagttgggctgggaagagagtgttatgtcttcccataggtccacmccccagggaggtgaagccacagccccataatcagtcagtgccacagctaggaccagaactccagactgtctatgttgaattgaacgtgttttcattaggc

SEQ ID NO: 19968 - DNA, 201 bp, Homo sapiens
ctgtccactttgtgcgccagaattgagcctgcaggtataaagaactggggagaagtcttgggccgtaactgcttttgaaacccttttaactaactctcacrattttagattctcggtctctatttctacattatctggacggtcactcttgagccttttggtaggattccttcttgaattttgtgactgacagctctgatg

SEQ ID NO: 19969 - DNA, 201 bp, Homo sapiens
cttgggtgtaaggggcccaagggcaagagaaaggagagaagtccccttgtatgagtggagtgggacagagaagaaagcatgagtgatcctgagtgggcttkggggctgctgagggcctgccagtgcctagaatgtaatgggcaccctatcaacaaatatttgttgaattaaatcaactttccagcccatagacttgttggg

SEQ ID NO: 19970 - DNA, 201 bp, Homo sapiens
aagaactggggagaagtcttgggccgtaactgcttttgaaacccttttaactaactctcacgattttagattctcggtctctatttctacattatctggayggtcactcttgagccttttggtaggattccttcttgaattttgtgactgacagctctgatgaatcctttccggtctgctaagtcagcgattctcaaacct

SEQ ID NO: 19971 - DNA, 201 bp, Homo sapiens
gattttagattctcggtctctatttctacattatctggacggtcactcttgagccttttggtaggattccttcttgaattttgtgactgacagctctgatsaatcctttccggtctgctaagtcagcgattctcaaacctcagcatgcattatccccaggagggcttgttaaaacacggattcctgggctccacttgcaga

SEQ ID NO: 19972 - DNA, 201 bp, Homo sapiens
attttgtgactgacagctctgatgaatcctttccggtctgctaagtcagcgattctcaaacctcagcatgcattatccccaggagggcttgttaaaacacrgattcctgggctccacttgcagagtttctaattcagttagtctggaatgggactcaaggatctgcttgcctaacaaatttacaggtaatatctatgctgc

SEQ ID NO: 19973 - DNA, 201 bp, Homo sapiens
tagctgctctccagcttccaaaattgtgttgttctctaaacttgtcgccttcccctagtcttgttggtgaaaacttttttgtttagttaaatttttaaagyaacctgtagattgccattttgataaggttttctagagagaaatctattttaatttgtaatgtccagaatgttctttacttccaccccctctttgccttga

SEQ ID NO: 19974 - DNA, 201 bp, Homo sapiens
atgactttcccctaagaaccttattttccctcctcatcaactgaggagggattaggccccaaccatatgacctccttttactttactcctttaaaggccckgtctacaaatacattctgagttattggggagttaggacttcagtatataaatttgggggtatgggcacaattcagcttataacagacaacatctcctaaa

SEQ ID NO: 19975 - DNA, 201 bp, Homo sapiens
atggattgatcacaggttcgcattattgctaacaggcttcagatgtacctaatcacaagaaacactgctcctggggcgtgactgccctcagcattccttcygggtagcagacacactttgtcagtttgccaacaacctgcattcatgagaacagtttgctgtttcctcatatagcctccagtggtatactgagttgatcac

SEQ ID NO: 19976 - DNA, 201 bp, Homo sapiens
ctctgcctgccagtggcccggtaccatgtgactgtgtgcacaggtgaacttgaaggtgctgggaccgatgccaacgtctatctctgcctttttggtgatgygggggacacgggggaacggctgctctacaactgcaggaataacacagacctgtttgaaaagggcaatgtaagttacagcaatgtgccccactcatcccct

SEQ ID NO: 19977 - DNA, 201 bp, Homo sapiens
tcatgtgccatacaatttacccatttaaagtgtacaagtcaatggcttttagtatattaataaaatcgtgcatccatcaccactatcaaattccagaacaytttcatctcccccaaaaagaaaacccatacccgttagcagtcattcccatttccccactttacccctctgcctctgacaaccactaatctactttttgtc

SEQ ID NO: 19978 - DNA, 201 bp, Homo sapiens
gaatagattttagctgcaagtagaggagggggataaaggcaggccaagtaaggaaactgtatgagccatgatagggacagaaatcataggaatgaggcgcrcgcgcgcgcgtgcgtgtgtgtgtgtatacgtgcaggcatatgtgtttaagagagaagagggagaccagcttgcccacacagaagttggaagaaataaact

SEQ ID NO: 19979 - DNA, 201 bp, Homo sapiens
tccatattgtagcattatcagtactccgttctttttattgctgaataatatagtccattgtatcgatgtaccaaattcaactgttaaagagcatttatgtwgtttctactttttggttatgtaaataatgctgccataaacatccatgtacaagtttttatgcagacatattttcagttctcttgagcatatacctaagag

SEQ ID NO: 19980 - DNA, 201 bp, Homo sapiens
cttctagtacattcttttaatattctataccagggatcagcaaacattttgtgtaaagaccagatagtaaatattttaggttttgcaagcatttggtctcyggaacaacagctttgctggtgtaacacaaaagcagtcatagatgatgcctaaatgattgggcatggctgtgtcattttgacatgtgaaaattatatgaat

SEQ ID NO: 19981 - DNA, 201 bp, Homo sapiens
ctgtctaactggccttgtggtttccccccacaaggctgacgagttcactatcgagtctgtcaccatgcggaatgtgaggcgggtgaggatcagacacgatkgcaaaggctccggcagcggctggtacctggacagagtgctggtgagagaggaggggcagcctgagagcgacaacgtggagttcccatgtctcaggtacat

SEQ ID NO: 19982 - DNA, 201 bp, Homo sapiens
tccttgtcaacacttgttcttctccttgattattcattctcagggttgttttggctattctgggtcccttgcagttctatatgaattttagaatcagcttrtcaatttctacaaataagtcagctgagttctgttaggggctacattgaatctatagaccagtttggggagtattgccatcttaataatgttaggtcttcc

SEQ ID NO: 19983 - DNA, 201 bp, Homo sapiens
taattcttttgatatgtcgctggattctttttgtgaatattttgttgaagatttttgcatccatattcataagagatattggtctgtagttttcttatgaygtctttgtcagttttggtaccaggataatgctggcctcagaaaatgagttgggaaatgttccctcctcttctatttttggaagagttggagaagtattag

SEQ ID NO: 19984 - DNA, 201 bp, Homo sapiens
tgttactatcattgttattgttattattactaaatgttccacttcttctgcacgtgcccacccagtggtccactatgaggttgagatttggacaggagatrtgggtggcgcaggcaccagtgcccgagtctacatgcagatctatggagagaaaggcaagacagaagtgctcttcctctccagccgctcaaaagtttttga

SEQ ID NO: 19985 - DNA, 201 bp, Homo sapiens
tctttttgtgaatattttgttgaagatttttgcatccatattcataagagatattggtctgtagttttcttatgacgtctttgtcagttttggtaccaggrtaatgctggcctcagaaaatgagttgggaaatgttccctcctcttctatttttggaagagttggagaagtattagtattatttcttctctgagtgtttga

SEQ ID NO: 19986 - DNA, 201 bp, Homo sapiens
ctaactcacccatgtaaccaaaaaccacctgtaccccaaaagctattgaaataaaaaattttttaaaatgcccactgtgcaaaggtggccaatggatgatmattgcacagtctaaatttggtggaagttcagaaatttggtcattttgaaaagggattaaaggtttgggtctgactaggcttgaaaggcctcaggtccagc

SEQ ID NO: 19987 - DNA, 201 bp, Homo sapiens
taattcatcttttcacttaaaagatttggaattttatttttaatggacatattgtaattgtatgtatttatggagtacaatttaacattttgagacaaatwtatgttgtatcatgatccaatcagtgttgttagcctatccatcacctcatgcatttatcatttctttatggtgagaatgttcaaaagcatttcttctagc

SEQ ID NO: 19988 - DNA, 201 bp, Homo sapiens
ctgcaacaaccagtaccaagacatagacaaatgggaggtggtttggttgagagacaaatgtcttgttttcctcagtatcctggggaacaatgaacggtatytattctgctgccatgggccccgtcataaaccatcctgagtgctggggcttagaaaactcatgcttgcatgattgatttctcaggctgagtctccgtgccc

SEQ ID NO: 19989 - DNA, 201 bp, Homo sapiens
tccatcacctcatgcatttatcatttctttatggtgagaatgttcaaaagcatttcttctagctattttgtgatatacaagtctttattgttaactatagwcattatactgtataatagaacatcagaacttattcctctcatttaattgtaactttgtacccattgatcaacttctccccatcctctcctcccccctcct

SEQ ID NO: 19990 - DNA, 201 bp, Homo sapiens
tactcctgtcttcctttttgcctcatttataggccagctgataagaaagccttccttaacactggtggaaagtttaagccatacaagccctgatcattcawaggaaccaccacctcagtctcactccctaaccaccataaaatcctaatctccctgctgtcccaagctattattggacctgctcaagagcctgccaagctc

SEQ ID NO: 19991 - DNA, 201 bp, Homo sapiens
gctcaagagcctgccaagctctcccaagaactcctcattatgtaaataatagaatctggctcttaatgtatgtgtagtatcatcagccttgatagctgagyaaatttggggtgggtggattcaccctgtttctgcagaatggccaccacactccggcttttgatggaaatgtttagtctaattaaatttaatgtaatacat

SEQ ID NO: 19992 - DNA, 201 bp, Homo sapiens
agacctcttggatgcctctctgccactcatgccctgtccccagcccattggcagaacctgttgggccttccatcagaagagcatgagtctgacctcatccsttctatcttcaccatccccaccccctgatcgaagcttcctgacctgatccatgcttgcccaaggccctcctattgcctacagcagcccagtgaccaggat

SEQ ID NO: 19993 - DNA, 201 bp, Homo sapiens
atcgaagcttcctgacctgatccatgcttgcccaaggccctcctattgcctacagcagcccagtgaccaggatcacaccactcctctgctccaaatcctgsagaagctcctggtcactcagagtcaaagccaaagcatgtttggtggtcagctcagcccgcaggtctgctctatgcccctcatctctctattctgattccc

SEQ ID NO: 19994 - DNA, 201 bp, Homo sapiens
gatccatgcttgcccaaggccctcctattgcctacagcagcccagtgaccaggatcacaccactcctctgctccaaatcctgcagaagctcctggtcactsagagtcaaagccaaagcatgtttggtggtcagctcagcccgcaggtctgctctatgcccctcatctctctattctgattcccccttgctcactccttgct

SEQ ID NO: 19995 - DNA, 201 bp, Homo sapiens
tgagtaagcagactctgcattcatggggtcatagttttcccagcaggaggaacagacaaatatactccctgagcaacctcttccatccttatcacttcaaytaccatttatttgagaataatgctcaagttgtatcagtcagaataggctaggttctgctaagtaacaaacaggcctaaaatgccagtggcctaacacaac

SEQ ID NO: 19996 - DNA, 201 bp, Homo sapiens
aatttgataaattacattaattgattttcagcagttaagccaatttgtatctctgggataaatcctacattgtcatgatgtataattcttttgatatgtcrctggattctttttgtgaatattttgttgaagatttttgcatccatattcataagagatattggtctgtagttttcttatgacgtctttgtcagttttggt

SEQ ID NO: 19997 - DNA, 201 bp, Homo sapiens
atgccaacgttggctggcagtggaggaagatgatggccagctgtccagggagctgttgccagtggatgagtcctatgtgctgccacagagcgaggagggtrggggaggcggtgacaacaaccccctcgacaacctggccctggagcagaaaggttttctaaactagagctgatttctttctccagcacccctcccctctgc

SEQ ID NO: 19998 - DNA, 201 bp, Homo sapiens
gttcatccattgttggacacttaggttgattctatatcttggctattgtaagtagtgatgatgcaataaacatgagagtacagatatcttgtcaacatacygttttcattttttttttggatatatacccagtaatgggattattggatcatgtggttcttctatttttaacttttttgaggaatctccatactgtttttc

SEQ ID NO: 19999 - DNA, 201 bp, Homo sapiens
tttttacaagattgtgatatctttttacaagattgtgatatcagaaaattttatgtttgaactcctcctgccttctctagcttgagaggccctgctccttrgccactctgaaaaaaaatgacagtttacaaaggcactagattgattttttttattaatagtgatgtcatatttagaataagaagaggctagtttttcctt

SEQ ID NO: 20000 - DNA, 201 bp, Homo sapiens
acagcactggcatgcatgccagctggttcctgggcagcgttcagatccgtgtgccccgtcaaggcaagcagtacacctttcccgccaaccgctggctggayaagaaccaggctgacgggcgcctggaggtggagctgtatcccagcgaggtggtggagatccagaaatgtatggaggaggctgtggtgggaccacccattg

SEQ ID NO: 20001 - DNA, 201 bp, Homo sapiens
agctgcacacagagtttctggcctaattagtctagagctgtacctggacactggtgatttttaaagcctttatcaaccccagtgtcggtaattttaatgcwcagccagatatgaaaatctccgatctaactcagtagttctttgagtgtgcaacaggatcacctggggggttattaactcacagatttcttggctccaccc

SEQ ID NO: 20002 - DNA, 201 bp, Homo sapiens
gggcatgcagggatgcaggtctaccccctccacagtacattttcaacatgggaagaagttgctgcccttcccacagtgactgcatttcatgcctttctctstgcttactggcatgtccttatcagtgggagttctgaagagaagacacaattcttgttcatggagaaaagttatctttcttgagaacacatagaagttgga

SEQ ID NO: 20003 - DNA, 201 bp, Homo sapiens
ctgagcttatgtcttcccttggtgtttgggtcctggggtagccactgtctaactggccttgtggtttccccccacaaggctgacgagttcactatcgagtytgtcaccatgcggaatgtgaggcgggtgaggatcagacacgatggcaaaggctccggcagcggctggtacctggacagagtgctggtgagagaggagggg

SEQ ID NO: 20004 - DNA, 201 bp, Homo sapiens
tgcagtcaccttttctgcatctctaaataatttatattccctcactccactccttaccactccaagatgtccctccactgtgttatcttagttacagatayaacaaaaacattttcttattcataatttatgattttactttgcattgctcctctctacttttactcttaactctaatatcagaattcctgtactgttaat

SEQ ID NO: 20005 - DNA, 201 bp, Homo sapiens
tcttcttcttccagtgtggcccagggaaaccaaaagattgaacacccctggttgagatggaaaatagtacaagaaagaggtctccttcccagtctctgctrctacatctttcagcaagaatagaggccatttcctcaagtgcccttgggtggcactaatggagctgatctggagcagacctgcaggtctggccttctccag

SEQ ID NO: 20006 - DNA, 201 bp, Homo sapiens
tttcaccttgttagccaggatggtctcgatctcctgacctcatgatccacccgcctcggcctcccaaagtgctgggattactggcgtgagccaccgtgccyggcccacacgctgactcttaaaaatcccttacagcccagggattccatgtatattaacaaataacctaaaaattcagtgttcttcagcatccaaagctat

SEQ ID NO: 20007 - DNA, 201 bp, Homo sapiens
ctcttctgataaatgggcttaatgttgccagcctaacttcttaagatgttctgaaaatccaaggcatttaagcttggaaaggaaaaagtgccacagaaccrtgaggctggggacaaactgtgaacatccccagcttccccttgcagctccatcagggttagtaattctctgccactgatttggcatttctcggctagccca

SEQ ID NO: 20008 - DNA, 201 bp, Homo sapiens
cagaaccatgaggctggggacaaactgtgaacatccccagcttccccttgcagctccatcagggttagtaattctctgccactgatttggcatttctcggytagcccaacaatttaaacattattatagctttacaatctatagtaatgcctgtcagtacttgtcccccttcattattctttaaaaatattagctattctt

SEQ ID NO: 20009 - DNA, 201 bp, Homo sapiens
actgtgaacatccccagcttccccttgcagctccatcagggttagtaattctctgccactgatttggcatttctcggctagcccaacaatttaaacattaytatagctttacaatctatagtaatgcctgtcagtacttgtcccccttcattattctttaaaaatattagctattcttgcctttttcaaatcaagacatta

SEQ ID NO: 20010 - DNA, 201 bp, Homo sapiens
gaataagtgctaccctccggtacacttttccatttatccagctgtttatgtacctcagtaatgctttacaatttcctacacataactgctacacattcttkttaagtttatgcccaggtatattatattttattgctcttgtgaatagagtcttctcattactcttcttttcccccctccctttctcttctttcttcctcc

SEQ ID NO: 20011 - DNA, 201 bp, Homo sapiens
ccactttttgtctctatgactttgagtactctagggacctcatagaaatggaatcctacagaatttgtctttttgtgtctagcttgtttcacttagtgtgwtgtcctcaagcttcatccgtgttgtagtacatgacaggatgtccttcctttttaaggctgaataatatttcattgtatgtacgtaccacctttttagatg

SEQ ID NO: 20012 - DNA, 201 bp, Homo sapiens
tgctcttgtgaatagagtcttctcattactcttcttttcccccctccctttctcttctttcttcctccctccactctccccttccctcatctcctcttccytccccatctctttctgttggcatggctagttgacagtcctttgcttcctttgctattgaagtagcagtctgccagggctctgtgatgagctggccttaac

SEQ ID NO: 20013 - DNA, 201 bp, Homo sapiens
tccttcctttttaaggctgaataatatttcattgtatgtacgtaccacctttttagatggattttaatggggtgtcccgggatctgaggtctcccttgggtcaacctgggctctgcacacagcctcacatccctttggtaaaggactactctttttacaagattgtgatatctttttacaagattgtgatatcagaaaatt

SEQ ID NO: 20014 - DNA, 201 bp, Homo sapiens
ttccctcagctaagcccttcaagaaaacacgagcacttcatgtttcacagaggtggcagtggggagggaggagagggaggctccgagggagtgtctggagrgttcctgcctgtgctcctgcacacagtctctttgtggcctcaggtgtgaggccctgaatgcatatgggtcaacgagagtgatgagcagtaatgctggcca

SEQ ID NO: 20015 - DNA, 201 bp, Homo sapiens
cttctttcttcctccctccactctccccttccctcatctcctcttccctccccatctctttctgttggcatggctagttgacagtcctttgcttcctttgytattgaagtagcagtctgccagggctctgtgatgagctggccttaacaatcttcaagccaagagcaactctatgcaaagcctactgtgggagctagacaa

SEQ ID NO: 20016 - DNA, 201 bp, Homo sapiens
tgagaacactgacatctccctcactgttgacatgtccagtcaacatcctccatgactagacctcttggatgcctctctgccactcatgccctgtccccagyccattggcagaacctgttgggccttccatcagaagagcatgagtctgacctcatcccttctatcttcaccatccccaccccctgatcgaagcttcctgac

SEQ ID NO: 20017 - DNA, 201 bp, Homo sapiens
ggaggaagggggaaggtcagcccagatgagaactagaaggagaggaggaatcagagcttagaagtgggagcagcagggctagggatgggaagcagggggcggtcagcaatgatgtccctctctctgcctgccagtggcccggtaccatgtgactgtgtgcacaggtgaacttgaaggtgctgggaccgatgccaacgtcta

SEQ ID NO: 20018 - DNA, 201 bp, Homo sapiens
cctccatgactagacctcttggatgcctctctgccactcatgccctgtccccagcccattggcagaacctgttgggccttccatcagaagagcatgagtcygacctcatcccttctatcttcaccatccccaccccctgatcgaagcttcctgacctgatccatgcttgcccaaggccctcctattgcctacagcagccca

SEQ ID NO: 20019 - DNA, 201 bp, Homo sapiens
taatgatctgcacattgaatatatcatcccactgctttctggcctctatagtttctgatgagaagtcagctgttaattgtattgagcatcccttatatgtratgaataacttttgtgctactcctttcaagattctctcttcatctttggctctcaacagtttgactataatatgtctaggtgtagatctctttgaattta

SEQ ID NO: 20020 - DNA, 201 bp, Homo sapiens
caccttttctgcatctctaaataatttatattccctcactccactccttaccactccaagatgtccctccactgtgttatcttagttacagatacaacaagaacattttcttattcataatttatgattttactttgcattgctcctctctacttttactcttaactctaatatcagaattcctgtactgttaatggtgcc

SEQ ID NO: 20021 - DNA, 201 bp, Homo sapiens
gcctacagcagcccagtgaccaggatcacaccactcctctgctccaaatcctgcagaagctcctggtcactcagagtcaaagccaaagcatgtttggtggycagctcagcccgcaggtctgctctatgcccctcatctctctattctgattcccccttgctcactccttgctgttccttgaacccaacagacatggtccca

SEQ ID NO: 20022 - DNA, 201 bp, Homo sapiens
aacttttgtgctactcctttcaagattctctcttcatctttggctctcaacagtttgactataatatgtctaggtgtagatctctttgaatttatcataayttggagtttgttgaacatgttgaatgtgtatattaatgcttttaaaatcaaatttgggaagttttgaccattatttgttcaaatattctttcagtccttg

SEQ ID NO: 20023 - DNA, 201 bp, Homo sapiens
cactcctctgctccaaatcctgcagaagctcctggtcactcagagtcaaagccaaagcatgtttggtggtcagctcagcccgcaggtctgctctatgcccytcatctctctattctgattcccccttgctcactccttgctgttccttgaacccaacagacatggtcccacctcaaggcctttgcatttgctgtccacgct

SEQ ID NO: 20024 - DNA, 201 bp, Homo sapiens
aattcctgtactgttaatggtgcctggcacctactaggcttcagtaaaccgatttggggtgaataagtgagtgaatgggtacattttacttttcagcttaytttaagtgagaaggagggctgggcatgcagggatgcaggtctaccccctccacagtacattttcaacatgggaagaagttgctgcccttcccacagtgac

SEQ ID NO: 20025 - DNA, 201 bp, Homo sapiens
cctcactctgggtaagggggcggggaactggggaatcccagcagagccactgggagggcacagcaatgcctagtgtatttggttcctgagtatctggcccrccctgattcactaatatgcatggacacctgttggactcctgggactgtacagcagggagttgaagagccaccttagagggattatggttctcccccaccc

SEQ ID NO: 20026 - DNA, 201 bp, Homo sapiens
tgctgagtacagagtcgttgttgcagtgaagtgaggccaagggagctcagcagggtgaaggggatttgcagacaactgctctatctccttcctctgccacsacttccttggtgaggtcagggaaagccctggaattccagtgaaggcctctctctgaggccaatccaggctggctcgattcttgggatcatggccatttga

SEQ ID NO: 20027 - DNA, 201 bp, Homo sapiens
gcttagacctgagcctcacattcccttctcaccccctaccaccgtgatgaacaccactgtggtgtgttccggtgtgctgctagtttcctctatttaagcamcaaaatgtgggtgcttgttcatgataaaatttggcaattcctgaatttaggtgaaagttagttcagagagttagttgcagattgaattaaacttttaaat

SEQ ID NO: 20028 - DNA, 201 bp, Homo sapiens
gtgggtgcttgttcatgataaaatttggcaattcctgaatttaggtgaaagttagttcagagagttagttgcagattgaattaaacttttaaatcaaaagkttttttttaatttaaataactttctgaccatacctcttccctgttaacttcttttcaaggtatcttaccttgttttcctttctgcaatttattcatgaga

SEQ ID NO: 20029 - DNA, 201 bp, Homo sapiens
cctgtgcctacaggcgcacacacacaggcacacatctgctgcagctgaattacttagcaccccaccaacccaggcccagtagtttcccagccacggagggscactgggagggctccataggtcaatgattgtgaaacagattttgtcaatgacaaagagctctacagtcttctacatatagcactgtttgtattacaagga

SEQ ID NO: 20030 - DNA, 201 bp, Homo sapiens
ttcacagaggtggcagtggggagggaggagagggaggctccgagggagtgtctggagagttcctgcctgtgctcctgcacacagtctctttgtggcctcargtgtgaggccctgaatgcatatgggtcaacgagagtgatgagcagtaatgctggccaatggtgccaagcattggcagtacctgtcattcaggccttaaga

SEQ ID NO: 20031 - DNA, 201 bp, Homo sapiens
tgtggacaggacctcctgaccccctgcttcctcagtcagagcgtctgaaagcgtttagatcaagcttgtccaacccacagcccgcacgcatgtggcccacracggctttgaatgtggcccaacacaaatttgtaaactttcttaaaacataaaacttttttgcaatttttttaactcatcagctatcatttgtattagtgt

SEQ ID NO: 20032 - DNA, 201 bp, Homo sapiens
ccagtcatatcagacacttacctctgtctttaccctttcagccaatccctccctgggactttcatagtcctggcaccacagaagaacaacaaaactcttcyctgtcccttgacatgcacacagagggctctcaggctttgtaagcttagctggttttcttctgataattccaggggactgggctgcatgcacttagctctg

SEQ ID NO: 20033 - DNA, 201 bp, Homo sapiens
agtagagacggggtttcaccttgttagccaggatggtctcgatctcctgacctcatgatccacccgcctcggcctcccaaagtgctgggattactggcgtragccaccgtgcccggcccacacgctgactcttaaaaatcccttacagcccagggattccatgtatattaacaaataacctaaaaattcagtgttcttcag

SEQ ID NO: 20034 - DNA, 201 bp, Homo sapiens
cgcaccctgcttcctgtcaccccctgcactaaccccttcccttcctccctctgccttgggctgttcagactttcgctatcacatcagcttgaagactgggkatgtctctggggccagcacggattctagagtctacatcaagctctatggggataaatctgacaccatcaagcaagttcttcttgtctctgacaacaacct

SEQ ID NO: 20035 - DNA, 201 bp, Homo sapiens
aaatacttattaaatacactaatgagtaaaaatgatggttaatatgttgatttattcattaatttgacaaacacatgctgtgctaagtgctgggggttaamtagctgctcagttatgactctgtttttgaagaaaggaaccctgatggtctaggaggctgatgatttaggtttaagtactttctcttccactgttatgtgg

SEQ ID NO: 20036 - DNA, 201 bp, Homo sapiens
aatttgacaaacacatgctgtgctaagtgctgggggttaactagctgctcagttatgactctgtttttgaagaaaggaaccctgatggtctaggaggctgwtgatttaggtttaagtactttctcttccactgttatgtggccttgggaaaggcactttactcctctgagcctcaggccttccatctgtacaacgggcata

SEQ ID NO: 20037 - DNA, 201 bp, Homo sapiens
aaacacatgctgtgctaagtgctgggggttaactagctgctcagttatgactctgtttttgaagaaaggaaccctgatggtctaggaggctgatgatttargtttaagtactttctcttccactgttatgtggccttgggaaaggcactttactcctctgagcctcaggccttccatctgtacaacgggcataataaacct

SEQ ID NO: 20038 - DNA, 201 bp, Homo sapiens
ctgagcctcaggccttccatctgtacaacgggcataataaacctcacccaggaaatcatcatgaggactagatgagaaaatgtgtttaggcgcccagcacsctgcctgatcccagtgcaacacagcagtagttctttccccttggcaatgagagtccaattagttaacatggaaaagtggcttgacagctgggaaaggctg

SEQ ID NO: 20039 - DNA, 201 bp, Homo sapiens
ggggtttcaccttgttagccaggatggtctcgatctcctgacctcatgatccacccgcctcggcctcccaaagtgctgggattactggcgtgagccaccgygcccggcccacacgctgactcttaaaaatcccttacagcccagggattccatgtatattaacaaataacctaaaaattcagtgttcttcagcatccaaag

SEQ ID NO: 20040 - DNA, 201 bp, Homo sapiens
accaggatgtattcctggaggaggaagaggcaggggtcagtaggcctggtgtcctaaatcttcatgtgtgcttgttggcactgtggggatagaagctgaaygcccagcgctcaggccatacctgactcctgctttggttctgtcggtacaaggagcaggttctgagaggagacgtgctgctctctgcagtagtgagcatgc

SEQ ID NO: 20041 - DNA, 201 bp, Homo sapiens
ctggggatgtctctggggccagcacggattctagagtctacatcaagctctatggggataaatctgacaccatcaagcaagttcttcttgtctctgacaayaacctcaaagactactttgaacgtggccgggtggatgagttcaccctcgagaccctgaacattggaaatgtaagtctccttcccaagaccatgtgacatc

SEQ ID NO: 20042 - DNA, 201 bp, Homo sapiens
cttccaggtcatctcacccagccttctgggtggtacagtttaatccctaggatctcacagcttgttaggggcagaggagggaaacaaattcagaattcctsagttccagatccatgcttttgtcattacaccactctgccaggatttactcatacttgatgttgtccagactttagcttataaacaaaatggaaaattctg

SEQ ID NO: 20043 - DNA, 201 bp, Homo sapiens
acttaggttgattctatatcttggctattgtaagtagtgatgatgcaataaacatgagagtacagatatcttgtcaacatactgttttcatttttttttttgatatatacccagtaatgggattattggatcatgtggttcttctatttttaacttttttgaggaatctccatactgtttttcataatggccatactagtt

SEQ ID NO: 20044 - DNA, 201 bp, Homo sapiens
aaacaaattcagaattcctgagttccagatccatgcttttgtcattacaccactctgccaggatttactcatacttgatgttgtccagactttagcttatraacaaaatggaaaattctgtatgaaattatttatattgtacaacactcaattttgcaatctcattccattttttactttcaagtggagtttatactttta

SEQ ID NO: 20045 - DNA, 201 bp, Homo sapiens
gagcacagaggccccagccctctccatcctgcagcttagcaaacaggccttgtgcctggctctttgttgggcgggggtgttgggggcgttggggaggacgytggggccacgacagccgctgccctgccctttgaacagcttgaggcggccgacgtgggcgaggtctataagctccggctcgggcacacgggcgagggcttt

SEQ ID NO: 20046 - DNA, 201 bp, Homo sapiens
tgaaattatttatattgtacaacactcaattttgcaatctcattccattttttactttcaagtggagtttatacttttaacagtttcgagcttttggttcratgctcagtttcaacctcctgcttacagaagcccttactctttccttccatcatccttgtttaggagtgtggtgagcttatctgccttagaacacctgca

SEQ ID NO: 20047 - DNA, 201 bp, Homo sapiens
cagacagggatgggacctttggcctgcactgcccctacctctccagactttgagcagtccctgagtggcccttgtgcatcagggcaggggtggggaagggrcataaagagggtggaatggccccaacttagagacaggctgaattctgagaccctttgtgttattctgggagcttagcacccagagaggatattcccagac

SEQ ID NO: 20048 - DNA, 201 bp, Homo sapiens
ggttctgtcggtacaaggagcaggttctgagaggagacgtgctgctctctgcagtagtgagcatgctgaggggctttaaagtcatgatgcaagtatctcarggacaatggagattttgctccaggaaatccagactctgtgtgcattttctctttgtatgcatgggagggcttgtaccttttctgtctctttgactttttt

SEQ ID NO: 20049 - DNA, 201 bp, Homo sapiens
actgcccctacctctccagactttgagcagtccctgagtggcccttgtgcatcagggcaggggtggggaagggacataaagagggtggaatggccccaacttagagacaggctgaattctgagaccctttgtgttattctgggagcttagcacccagagaggatattcccagaccacagcgtccagagatcccaggcatgg

SEQ ID NO: 20050 - DNA, 201 bp, Homo sapiens
tgctgctctctgcagtagtgagcatgctgaggggctttaaagtcatgatgcaagtatctcaaggacaatggagattttgctccaggaaatccagactctgwgtgcattttctctttgtatgcatgggagggcttgtaccttttctgtctctttgactttttttctctccctccctggctctttctttgtgtgtgtctcgtt

SEQ ID NO: 20051 - DNA, 201 bp, Homo sapiens
agatcgagaccatcccggctaaaacggtgaaaccccgtctctactaaaaatacaaaaaattagccgggcgtagtggcgggcgcctgtagtcccagctactygggaggctgaggcaggagaatggcgtgaacccgggaggcggagcttgcagtgagccgagatcccgccactgcactccagcctgggcgacagagcgagact

SEQ ID NO: 20052 - DNA, 201 bp, Homo sapiens
ttggggctggaatgtgtatttttagtggcattgcctcaacattttatttacctacatatccaagaccaatgtacctgggtcacagacactggagaaggagmctgaacgcagggaaggaaaagagaagggaggactaagaaaaggggctaaaaatacttcccaatttcaaacttgagtgtgcatcagaattggggccaggaa

SEQ ID NO: 20053 - DNA, 201 bp, Homo sapiens
ctatagcctattattcataagttatttgattggataaaatgttaactttcctattcatacatttaaaggctaagaagcagaacagtgtgcatttttctctkaaacactaatttaatggtagcttagttcatattgccccaggtcgagctcctttaaatccatgccatcagtgtaacgttgcccccctcagcaccccatctg

SEQ ID NO: 20054 - DNA, 201 bp, Homo sapiens
attagttcaacacttatgtattgtgcacctactatgtacaaccctctctactaaagtagccctggctagcagattcattctggaaagggttggaaaggtcyccgtatgtccctctccttctagatacttccatccaatatgaccctgattgaggctctgtgtgctccaggcaggtcacataacaattttcaatggagtgtc

SEQ ID NO: 20055 - DNA, 201 bp, Homo sapiens
ccctctccttctagatacttccatccaatatgaccctgattgaggctctgtgtgctccaggcaggtcacataacaattttcaatggagtgtctagagccartgtccccaagtttgttctctaccccaggcaaatgactaatggagtgattcccaggctgggtagaatagcagggcaatgctgtcaggggcagacaggggag

SEQ ID NO: 20056 - DNA, 201 bp, Homo sapiens
ttggaatggagtggaatgaactgaattgggatgattggaatggaatagattggaatgaaatgggatgggttggaatgaaatggaatggaatggagtagaggggaatggaatggagtggagtggaatggaatggaatgtgatgggttggaatggaatggaatgtattgaaatggaatggaatgcattgaagtagaatggagt

SEQ ID NO: 20057 - DNA, 201 bp, Homo sapiens
ggagtagagtggagtagaatggaatgagtgtagccacttctgattcagtcttgtgccctcccctataggcactcaatgcatttttgtcaagggaaagaatkaacagtaactttcaagagttctatgatgctcccctgaaatatgcatccctaaaactcctcccagccaggaggagtcagaatggggctcctggctgctgag

SEQ ID NO: 20058 - DNA, 201 bp, Homo sapiens
tgcagggccaagattcacccacattcttccccagggagaccagaagactcagcagaaatttccaaggggaatcctaattatgcttttgtctctcaataggrtgcaagcaattagccccatcgagaaaggcagttcctttttttctaaaaattttctttttctctgagccagctttctttttctgttctaatggtgaaggta

SEQ ID NO: 20059 - DNA, 201 bp, Homo sapiens
tctgggagcttagcacccagagaggatattcccagaccacagcgtccagagatcccaggcatgggccaaggagaatgaaagggaagggaaattacaagagygacaatagcagtagcaatgcttactgagagcctacattgagccaggcatttttataagcattttataaagttaacacatgtaatcctcacaacaccctat

SEQ ID NO: 20060 - DNA, 201 bp, Homo sapiens
gaccatcccggctaaaacggtgaaaccccgtctctactaaaaatacaaaaaattagccgggcgtagtggcgggcgcctgtagtcccagctacttgggaggytgaggcaggagaatggcgtgaacccgggaggcggagcttgcagtgagccgagatcccgccactgcactccagcctgggcgacagagcgagactccgtctc

SEQ ID NO: 20061 - DNA, 201 bp, Homo sapiens
ccgggcgtagtggcgggcgcctgtagtcccagctacttgggaggctgaggcaggagaatggcgtgaacccgggaggcggagcttgcagtgagccgagatcscgccactgcactccagcctgggcgacagagcgagactccgtctcaaaaaaaaaaaaaaaaaaaagaaatggccaagaggaacatagaaacatacttatta

SEQ ID NO: 20062 - DNA, 201 bp, Homo sapiens
agccctgactccacccaataacaatctgggacaagatggctttgcccaactttcaatgaaattcagccatgatactctcagtatgaggcactccaggcatygtagagttgttcaggagcctttgctcaggtactcagagaaggtggtgtttagtgttgggtccagccatctgctcacgccactgtccagccattctgttga

SEQ ID NO: 20063 - DNA, 201 bp, Homo sapiens
gagtagagtggagtagaatggaatgagtgtagccacttctgattcagtcttgtgccctcccctataggcactcaatgcatttttgtcaagggaaagaatgwacagtaactttcaagagttctatgatgctcccctgaaatatgcatccctaaaactcctcccagccaggaggagtcagaatggggctcctggctgctgagc

SEQ ID NO: 20064 - DNA, 201 bp, Homo sapiens
ggtgaaaccccgtctctactaaaaatacaaaaaattagccgggcgtagtggcgggcgcctgtagtcccagctacttgggaggctgaggcaggagaatggcrtgaacccgggaggcggagcttgcagtgagccgagatcccgccactgcactccagcctgggcgacagagcgagactccgtctcaaaaaaaaaaaaaaaaaa

SEQ ID NO: 20065 - DNA, 201 bp, Homo sapiens
gctacttgggaggctgaggcaggagaatggcgtgaacccgggaggcggagcttgcagtgagccgagatcccgccactgcactccagcctgggcgacagagygagactccgtctcaaaaaaaaaaaaaaaaaaaagaaatggccaagaggaacatagaaacatacttattactaatcactgggctcacagatacaggattga

SEQ ID NO: 20066 - DNA, 201 bp, Homo sapiens
ggatttactcatacttgatgttgtccagactttagcttataaacaaaatggaaaattctgtatgaaattatttatattgtacaacactcaattttgcaatctcattccattttttactttcaagtggagtttatacttttaacagtttcgagcttttggttcgatgctcagtttcaacctcctgcttacagaagcccttac

SEQ ID NO: 20067 - DNA, 201 bp, Homo sapiens
gctgtttggggataagcatggcgcttgttctgaggttctcaggaagaattgatgactttgggaggagccctgatatgactcaatacaactgactgaggggkcatgaggtaggagggctgcctgctggcttcatggtaaaggagtcttgggttgggagtgtgggcagtttcagtcccaggttagtgtagatgcatctgaaga

SEQ ID NO: 20068 - DNA, 201 bp, Homo sapiens
ctgtttggggataagcatggcgcttgttctgaggttctcaggaagaattgatgactttgggaggagccctgatatgactcaatacaactgactgaggggtyatgaggtaggagggctgcctgctggcttcatggtaaaggagtcttgggttgggagtgtgggcagtttcagtcccaggttagtgtagatgcatctgaagat

SEQ ID NO: 20069 - DNA, 201 bp, Homo sapiens
cagtttcagtcccaggttagtgtagatgcatctgaagatccctctgttctaggatctggctggatctgagaggctgtgcctcaggtccaaacaccccatgsccatgaggccctccacactgcatctttctgtgtctacaggaaacacctatgaggttcaggtggtcacggggaatgtgcccaaggccggcactgatgctaa

SEQ ID NO: 20070 - DNA, 201 bp, Homo sapiens
cagaagactcagcagaaatttccaaggggaatcctaattatgcttttgtctctcaataggatgcaagcaattagccccatcgagaaaggcagttccttttyttctaaaaattttctttttctctgagccagctttctttttctgttctaatggtgaaggtagccctgactccacccaataacaatctgggacaagatggct

SEQ ID NO: 20071 - DNA, 201 bp, Homo sapiens
atcataattaagagtgaagccaggctggtgttgagagctttccttccctgctgtgtcatgtttccaccttcagtcctcagctgttctttcctctcactgtkgatacgttggaccattcagagcttcacacaaaagaaccaacttcatttatacaaaggctgaagattgaaagcatttagtatttgaattttaaacgagttg

SEQ ID NO: 20072 - DNA, 201 bp, Homo sapiens
agacctgtccttttttgacatttggaaaaccaagtctcagaaacattacataattttcccaaggccacccagtggtaagtggcagagctaggcactggacmaaggtctgtctatctctctgtatacttaaaccagtctgtagtgagtctaggaatagcagaagactttctacatgaggtgggcccagagctgggacttatt

SEQ ID NO: 20073 - DNA, 201 bp, Homo sapiens
atttacttctaaatattttattctttttgatgctgttgcaaatagaactgttgtcttaatttcactttcagactattcattgcaaaagaatagaaatatartcgattttggtatattgatcttgtactctacaactttgctgaagtcatttattctaatagttttttagtgaattccttatgattttataaatacatagtt

SEQ ID NO: 20074 - DNA, 201 bp, Homo sapiens
gctgggacttattggggtacagggacttaaaggcaatgcagtgcatcctgaggcaggaagacatagcgatgactctgagatcacctcagtttcagactgamactacaggcagtctcaggactgattatatatgtgaaatagctgggggttggggcattcaaattcatccctcctctgtcatccagagaagatgctccagag

SEQ ID NO: 20075 - DNA, 201 bp, Homo sapiens
tgtactctacaactttgctgaagtcatttattctaatagttttttagtgaattccttatgattttataaatacatagttatgtcacccatgaataagatayttcttcctttccaatttagatctttttatatatttgcttgcctacttgccttggctgaaatctccagcaccacattgaatacaagagatgactcgtttct

SEQ ID NO: 20076 - DNA, 201 bp, Homo sapiens
ggacttattggggtacagggacttaaaggcaatgcagtgcatcctgaggcaggaagacatagcgatgactctgagatcacctcagtttcagactgacactrcaggcagtctcaggactgattatatatgtgaaatagctgggggttggggcattcaaattcatccctcctctgtcatccagagaagatgctccagagattc

SEQ ID NO: 20077 - DNA, 201 bp, Homo sapiens
accatattttctttatccgttcatccattgttggacacttaggttgattctatatcttggctattgtaagtagtgatgatgcaataaacatgagagtacaratatcttgtcaacatactgttttcattttttttttggatatatacccagtaatgggattattggatcatgtggttcttctatttttaacttttttgagga

SEQ ID NO: 20078 - DNA, 201 bp, Homo sapiens
catattttctttatccgttcatccattgttggacacttaggttgattctatatcttggctattgtaagtagtgatgatgcaataaacatgagagtacagawatcttgtcaacatactgttttcattttttttttggatatatacccagtaatgggattattggatcatgtggttcttctatttttaacttttttgaggaat

SEQ ID NO: 20079 - DNA, 201 bp, Homo sapiens
tcaacataaactggaaataaaaatgcacaccctaaagggttattgtaaaactcagtgaaagaacacacaccaaaaaagtgcccactgtgagttgaacagtragaacacatggacacagggagaggaacatcatacaccgaggcctgtcagggggtggggggttagggtagggatagccttaggagaaataactaatgtaga

SEQ ID NO: 20080 - DNA, 201 bp, Homo sapiens
gagagggaaagatgccgggcactgtggactagaggacctgggctggagaaagctgggcccccaggggccaatgtgggaacttggcattctcccctatggcmtgaccattgcaggcatcttgttcatgacctttaggaaagagaaatcaagaaagaccctaaagatggggtgggagaacttgcttctgttgctagcctcatt

SEQ ID NO: 20081 - DNA, 201 bp, Homo sapiens
taatgtcttatacaacaatttagatggagctggagcccattattctaagtgaagtaactcaggaatggagaaaccaaatactgaatgttctcacttataaragagagctaagctatgaggatgcaaaaacatacaaaatgatataatggactgtggggactcattgtgggaaggttgggaaggggatgagggataaaagac

SEQ ID NO: 20082 - DNA, 201 bp, Homo sapiens
acaggtccttgtgggcatctgggaaagattctggaaatttgaatgccatctgtcttctgtaatgacacagcttccttaatccctttagcccagtagagccsagagagtcctcagctgcacacagagtttctggcctaattagtctagagctgtacctggacactggtgatttttaaagcctttatcaaccccagtgtcggt

SEQ ID NO: 20083 - DNA, 201 bp, Homo sapiens
gacccagccctactaccatgaccagcaagcaaaacagtggcttaaggctatagctggtgcaagaaagaggtgacctcgctggtggtgcttagacctgagcmtcacattcccttctcaccccctaccaccgtgatgaacaccactgtggtgtgttccggtgtgctgctagtttcctctatttaagcaccaaaatgtgggtgc

SEQ ID NO: 20084 - DNA, 201 bp, Homo sapiens
atgaccagcaagcaaaacagtggcttaaggctatagctggtgcaagaaagaggtgacctcgctggtggtgcttagacctgagcctcacattcccttctcamcccctaccaccgtgatgaacaccactgtggtgtgttccggtgtgctgctagtttcctctatttaagcaccaaaatgtgggtgcttgttcatgataaaatt

SEQ ID NO: 20085 - DNA, 201 bp, Homo sapiens
ctggtggatgaccagccgagagctgggaccgtggctcactccaacatgttgaagagtcacagctatcaaaccgcagccctgcagagcacagccccagcttytcctggaaggcaattctcatttatctctgaggactcagatcactgagcccttctcatttccctcaactcttgcagcacttactctggtccaatacctatc

SEQ ID NO: 20086 - DNA, 201 bp, Homo sapiens
acacacattcacacgtgtccacacacacatatgtccacacacagacacacacgcacacactcatgtacataagggtaaacacattttgaagagaaaaagcmcacttgggaatagtgagtgaggtgtgtagttttttagctgtgacctagagcagctgaagatatgtaaacagtagtgatgcttccagagcctctttggggc

SEQ ID NO: 20087 - DNA, 201 bp, Homo sapiens
cgagagctgggaccgtggctcactccaacatgttgaagagtcacagctatcaaaccgcagccctgcagagcacagccccagcttctcctggaaggcaattytcatttatctctgaggactcagatcactgagcccttctcatttccctcaactcttgcagcacttactctggtccaatacctatcctggtcttggtcctca

SEQ ID NO: 20088 - DNA, 201 bp, Homo sapiens
gatctcctggcagggacaagttagggaaacaattgtgcagaccaaacaccagactactaagtgacattctccatcatccccactcctggttgctttgggtstcaccattggcctctggctggctgccctggttcttgggaggatggggctgatggccatgtggggaggggtaggtcttaccccactgagtgttccctggcc

SEQ ID NO: 20089 - DNA, 201 bp, Homo sapiens
accgtggctcactccaacatgttgaagagtcacagctatcaaaccgcagccctgcagagcacagccccagcttctcctggaaggcaattctcatttatctytgaggactcagatcactgagcccttctcatttccctcaactcttgcagcacttactctggtccaatacctatcctggtcttggtcctcagtgcctcagct

SEQ ID NO: 20090 - DNA, 201 bp, Homo sapiens
agggtgtggggtgggtggggtcatgagaggcttaagagacaagctgagaagccagaactgtatcctaatgcagtgggaatccatgaaaagaaatacacatmccttactcttccaggtgtagtgggaaagtcatgaaaaataaagccgtcatctttgcccttcaagattttataatatcccctggctagaaaactatctctt

SEQ ID NO: 20091 - DNA, 201 bp, Homo sapiens
gagtcacagctatcaaaccgcagccctgcagagcacagccccagcttctcctggaaggcaattctcatttatctctgaggactcagatcactgagcccttytcatttccctcaactcttgcagcacttactctggtccaatacctatcctggtcttggtcctcagtgcctcagctggtctatcctgtcttttttttttttt

SEQ ID NO: 20092 - DNA, 201 bp, Homo sapiens
gactttctacatgaggtgggcccagagctgggacttattggggtacagggacttaaaggcaatgcagtgcatcctgaggcaggaagacatagcgatgactstgagatcacctcagtttcagactgacactacaggcagtctcaggactgattatatatgtgaaatagctgggggttggggcattcaaattcatccctcctc

SEQ ID NO: 20093 - DNA, 201 bp, Homo sapiens
tgatggctgggcggaagagaagcggaggcctcaaacactccagagtcctccctgcccccaaacacttaacagtgcatgcatttttttttttttttttttaraaaatgggttcttatgtcttgctgacacatgtagtgatggcatttgccaactcaggacccaggagacttggaaaaatcaggaactggagcctgagcatgc

SEQ ID NO: 20094 - DNA, 201 bp, Homo sapiens
actgaacccaacttaggtttgtgcagaggtttgcaaacctctttaaagggaggatgagggaataaggggagggtaatcaagggctcagtagagtcaggggraaaacatgaaaagcagtaatggggaggtcagcacatgtgggttgtggaacccatctgggtttgctaactgatgctttatggcatgagggtcttatccttc

SEQ ID NO: 20095 - DNA, 201 bp, Homo sapiens
ggagacagacaataataggataatgcgaatgaacagccaagaggaacatgaaacaggataaagggttagcaatggtgtgggggaagggcctttttggatargatggtgacatttctgaggaggaagacagtgggaccaaagcctggcacagagaatgtcccttctcacctctgcatttttttttttgagacagagccttac

SEQ ID NO: 20096 - DNA, 201 bp, Homo sapiens
tctcagaagatggaaccacatgagcaaagatatggaggtggaaatgggggaggccagtttaggacagtgtgtcttccagctgagctgtggtcggtgctaasccccagtggataagcttggataagaacaatttagggtgtggggtgggtggggtcatgagaggcttaagagacaagctgagaagccagaactgtatcctaa

SEQ ID NO: 20097 - DNA, 201 bp, Homo sapiens
cttaacagtgcatgcatttttttttttttttttttaaaaaatgggttcttatgtcttgctgacacatgtagtgatggcatttgccaactcaggacccaggrgacttggaaaaatcaggaactggagcctgagcatgcacactgcttctttcttcacctgagctgttattttaactctgttggagaggaggacaaaccaggt

SEQ ID NO: 20098 - DNA, 201 bp, Homo sapiens
ggtcagggaaagccctggaattccagtgaaggcctctctctgaggccaatccaggctggctcgattcttgggatcatggccatttgaaggctgcagtggcaaaaaataatctgagcaggatgttgtgggtggactcaggttcatttgaggagaggaggtagcgatgcctttacttcacatagctttttaaatttcctctct

SEQ ID NO: 20099 - DNA, 201 bp, Homo sapiens
ataggataatgcgaatgaacagccaagaggaacatgaaacaggataaagggttagcaatggtgtgggggaagggcctttttggataggatggtgacatttytgaggaggaagacagtgggaccaaagcctggcacagagaatgtcccttctcacctctgcatttttttttttgagacagagccttactctgttgcccaggc

SEQ ID NO: 20100 - DNA, 201 bp, Homo sapiens
ctggagcctgagcatgcacactgcttctttcttcacctgagctgttattttaactctgttggagaggaggacaaaccaggtctatttatcagaatttctgmtaggatcaggtgtgtgtgtgtgtgtgtgtgtgtgtgtgtgtatgtgtacacactctctgtcttgtgagctcagagaaagagtaataaaatctcttcttga

SEQ ID NO: 20101 - DNA, 201 bp, Homo sapiens
ggttagcaatggtgtgggggaagggcctttttggataggatggtgacatttctgaggaggaagacagtgggaccaaagcctggcacagagaatgtcccttytcacctctgcatttttttttttgagacagagccttactctgttgcccaggctggagtgcagtggcacaatctcagctcactgcaacctcctcccgggttc

SEQ ID NO: 20102 - DNA, 201 bp, Homo sapiens
ggtcttaccccactgagtgttccctggcccttcccagacagacaccttcaccatctatgccattgacctgggggccctgaccaagattcggattcgccacracaacacaggcaacagagcaggctggttcctggacagaatagacattactgacatgaacaacgagatcacgtgagtgtgggggcagtgggcagggagggg

SEQ ID NO: 20103 - DNA, 201 bp, Homo sapiens
aattaacatatttctgggctcatttcttgatttatttcaggggccccctgctttttctttaaagaatcttccccttgacttgaggatgtagtttatttctrcgtttcagtgttctcctttaaaaattatagccacatatttctggattaggaaaaaatttctatagaggactacataacttgtgcaactggtaaaatttga

SEQ ID NO: 20104 - DNA, 201 bp, Homo sapiens
gtctgagggtgcaggtgggctgggtgtgacattggagggtgagggtggactggctgtgacgtcgaaaagtaagggtggactgggtgacatctgaaaatgaragtgggtgagtatgagggtgagggtgggctggtggtgatgtctgaggctgagggtgagctggatgacattggagggtgagggtgggctggctgtgacact

SEQ ID NO: 20105 - DNA, 201 bp, Homo sapiens
gggctgggtgtgacattggagggtgagggtggactggctgtgacgtcgaaaagtaagggtggactgggtgacatctgaaaatgagagtgggtgagtatgasggtgagggtgggctggtggtgatgtctgaggctgagggtgagctggatgacattggagggtgagggtgggctggctgtgacactggaaggtcagagtggc

SEQ ID NO: 20106 - DNA, 201 bp, Homo sapiens
gggtggactgggtgacatctgaaaatgagagtgggtgagtatgagggtgagggtgggctggtggtgatgtctgaggctgagggtgagctggatgacattgragggtgagggtgggctggctgtgacactggaaggtcagagtggctgtgacgtcacagggtgagggtggactgggtgacatctgagaatgagggtgggtgt

SEQ ID NO: 20107 - DNA, 201 bp, Homo sapiens
atggccctgggaggtgtgctgggcttaggagaagggaatggtggctacaggcaggtgaggtgatgccctggtgccccagctggctgatggtggggcaggartgggattccagctttcccatggatcttccctctcctggggactggagacctgggttgtgttttgtgctggtgtttggggaggtagggatgggatcatgga

SEQ ID NO: 20108 - DNA, 201 bp, Homo sapiens
agagtggctgtgacgtcacagggtgagggtggactgggtgacatctgagaatgagggtgggtgtgtgtgagggtgagggtgggctggctgtgatgtctgasactgagggtgggctgggtgacgttggaggatgagagtgggctggctgtgacactggaggatgagggcgagctggctgtgacatccgagggtgagggtgga

SEQ ID NO: 20109 - DNA, 201 bp, Homo sapiens
ggtgacgttggaggatgagagtgggctggctgtgacactggaggatgagggcgagctggctgtgacatccgagggtgagggtggactggatgacatctgasaatgagggtgggcaggtatgaggatgagggtgggctggttgtgatgtctgaggctgagagtgggctgcgtgacatctgagggtgagggtgggctggctgt

SEQ ID NO: 20110 - DNA, 201 bp, Homo sapiens
tatgagtggagtgggacagagaagaaagcatgagtgatcctgagtgggctttggggctgctgagggcctgccagtgcctagaatgtaatgggcaccctatyaacaaatatttgttgaattaaatcaactttccagcccatagacttgttgggctcccctctgtgcagggcaggaggtgacagggttctcccatctcccacc

SEQ ID NO: 20111 - DNA, 201 bp, Homo sapiens
aggatcacaccactcctctgctccaaatcctgcagaagctcctggtcactcagagtcaaagccaaagcatgtttggtggtcagctcagcccgcaggtctgstctatgcccctcatctctctattctgattcccccttgctcactccttgctgttccttgaacccaacagacatggtcccacctcaaggcctttgcatttgc

SEQ ID NO: 20112 - DNA, 201 bp, Homo sapiens
ctcctcatcgtgcattttttgctgcaaaaagaataagaggtgtgagggggcagctggcaagagggagaagtgtgtggggacaaatccctggggctttcagrggcctaagggagatgcccttggagggagaggcagggccccagggatcctgtggtcccacgttagaggcacttgtggtttagggggatggaactggggatc

SEQ ID NO: 20113 - DNA, 201 bp, Homo sapiens
cactcctcatcgtgcattttttgctgcaaaaagaataagaggtgtgagggggcagctggcaagagggagaagtgtgtggggacaaatccctggggctttcwgaggcctaagggagatgcccttggagggagaggcagggccccagggatcctgtggtcccacgttagaggcacttgtggtttagggggatggaactgggga

SEQ ID NO: 20114 - DNA, 201 bp, Homo sapiens
ttcatttcagaaagaatgggtgtcctaggacacctttaatcattgcagcctcaggggtggggtaggtggagagtggcttcaacttcggcaccaaaattctrtctcgtagcatcttggactggctcaccattttgatgccattgttttcttcacttttgaaatttctccctctccacccttgtgtggttgactgagcagaac

SEQ ID NO: 20115 - DNA, 201 bp, Homo sapiens
ctgtacaggcacctgtgccatctgtgtctgtgtgagaaccaacatgaaatgagcaatgcccaggcttggtcctcatggcatattggtttgggctcagtgtygattggccccagagtctcaagatgccctcacggtgaggtgctgaatcataggaggcagggggagacccctggggaagacagggagggggctccctgggag

SEQ ID NO: 20116 - DNA, 201 bp, Homo sapiens; identical to SEQ ID NO: 9671

SEQ ID NO: 20117 - DNA, 201 bp, Homo sapiens
caggtgaagacgtgctgggaggggaccttgatgtcatgtgccatgcagactttcctttgttcctgcctccagccttctccccattgccacccccctatcckcacacccccaagggttccctggaagctgaagtgactcagggattccaaaactagtcacctcaggaggaaaccccactggaaaatgtttctcatgacaggg

SEQ ID NO: 20118 - DNA, 201 bp, Homo sapiens
gtgtgtgctggccagggtatgcgtgagggaccagggcaattccagcttactttcccattttgatctcagaggggctgtaaaggtttgggagttagacaagktctgtatttgagtcctagctctgactctcattggatgatcttgagtcaattcaagttttcaaaactcagggtttttttttttttcacctgcaaaatgata

SEQ ID NO: 20119 - DNA, 201 bp, Homo sapiens
ctcccatctcctttcccataccttaattctcagccagctctgagccttttctggcattggtggaaaattcatttcagaaagaatgggtgtcctaggacacmtttaatcattgcagcctcaggggtggggtaggtggagagtggcttcaacttcggcaccaaaattctatctcgtagcatcttggactggctcaccattttg

SEQ ID NO: 20120 - DNA, 201 bp, Homo sapiens
aagagtgaggttcccgaggcagtgtcactcctcatcgtgcattttttgctgcaaaaagaataagaggtgtgagggggcagctggcaagagggagaagtgtrtggggacaaatccctggggctttcagaggcctaagggagatgcccttggagggagaggcagggccccagggatcctgtggtcccacgttagaggcacttg

SEQ ID NO: 20121 - DNA, 201 bp, Homo sapiens
gcccagcatggcctggctcagcagctccatcccagctgacgtgctatctcctgtcgctgatgtgtgtgtgttcccgccctgagatacaatccttcttctgsagcgctccttccagctgcaggccccagctcccaagtcctgcccgaaccctggatcttgaactctggtcagagcgctctgcttccttggtggcagccactc

SEQ ID NO: 20122 - DNA, 201 bp, Homo sapiens
ctcctttgaacaccccctcctgggcaagggtcaagataggagatctgagccaactccatttctactaccttcttagccctgaggttctgattggtgagagygagacccataggtatccagctcttctgaaacggcactgcctcctaagatcctgttctgggattgaggttttcccaggagcacgggaagccaccttgaggc

SEQ ID NO: 20123 - DNA, 201 bp, Homo sapiens
atgtaatataaggcccttggtgaacttgaggccctggacagataaccttgcctcaatattccacaggcccacacatctaggcatttcctaggagagtgtgrtcaggacacctgccccagctccttccccactgtattacctgggcacctgtgaagaaacctctgctggaagggtgtggtggagcctatggggtggaatagg

SEQ ID NO: 20124 - DNA, 201 bp, Homo sapiens
tccatggcttttcctctttaccttggcttcccctctgacttgtgctttccagaaagctgaatgtgttcgttgttgagggcaggtgaggttggagaaaaccmaggcttggcaggtagctgagaccctgggtgggtggcagcctcaagcagtgggtcttcaaggtttgcccttgccatattcagggagaagaagggaaggaac

SEQ ID NO: 20125 - DNA, 201 bp, Homo sapiens
atatcatgtagctcatgcttgaatccagtcaatatcttccggctgactctggaataaaatccaaatgctccatggtagcctggaggaccctatgtgatctsctccctgcccacctctttcacctcatcttgtctccctctcctccttatctcttgttcaacatctacactgtcctttctgtttctcaaatatgccatgctc

SEQ ID NO: 20126 - DNA, 201 bp, Homo sapiens
tccaaggaggggaaggcaaagccctggcccctgcctgtgtccccttcttggcatgttccacatgctcggtcctgcaggccctgaccctcatcatcttcatytgcttcacggcctccatctctgcctacatggccgcggcgctactggagttcttcatcacacttgccttcctcttcctctatgccacccagtactaccagc

SEQ ID NO: 20127 - DNA, 201 bp, Homo sapiens
ctggagactgtcgcctgccagactaatggagtcgcagacctgtgggacatctacttttcagtgtttttcatctttctttctttctttctttttttttttttgccatgaaatcctttcagaataagtaaataagtcttcccatgcactctcaagtatgcttataatataagcttgcacagcgtctggaagaatgtgcaggaa

SEQ ID NO: 20128 - DNA, 201 bp, Homo sapiens
cctgttaaccctgcacccctggcccccaggacttcctgcgctgtgtcagtgccatcatcatcttcctggtggtctcctttgcagctgtgacctcccgggayggagctgccattgctgcttttgtgagttcagccctgcaggactccttagcccctcaagagctcaggctggtgcttgcacactttctgtatcagaagccac

SEQ ID NO: 20129 - DNA, 201 bp, Homo sapiens
gctggagactgtcgcctgccagactaatggagtcgcagacctgtgggacatctacttttcagtgtttttcatctttctttctttctttctttttttttttttgccatgaaatcctttcagaataagtaaataagtcttcccatgcactctcaagtatgcttataatataagcttgcacagcgtctggaagaatgtgcagga

SEQ ID NO: 20130 - DNA, 201 bp, Homo sapiens
agctggagactgtcgcctgccagactaatggagtcgcagacctgtgggacatctacttttcagtgtttttcatctttctttctttctttctttttttttttttgccatgaaatcctttcagaataagtaaataagtcttcccatgcactctcaagtatgcttataatataagcttgcacagcgtctggaagaatgtgcagg

SEQ ID NO: 20131 - DNA, 201 bp, Homo sapiens
cctcctcagcctggctcactcttgctgctatgaggagaggattgggcaggaccgctggcacaaaagttgctagaactcttccagaggagatgggatctagycccaccaggagtttccactgaaaggatggtgctcctagccccctacagctcctctgccctgggataactccttagtgtgtgctgcttccctggaccttcc

SEQ ID NO: 20132 - DNA, 201 bp, Homo sapiens
ggcatctggagttctgtgtctgagaaggcacagccttcctcatgggagcatgcatgcaccaccacacctgttcccgcaggttagtgggctggaggccaggsgctcgcctggggcgtgtgcagagctcccccttgtggtgtggggaagacttggcccacaggacgcagggagagggcagcctgaggtatcagaggagggaga

SEQ ID NO: 20133 - DNA, 201 bp, Homo sapiens
ctatgaggagaggattgggcaggaccgctggcacaaaagttgctagaactcttccagaggagatgggatctagccccaccaggagtttccactgaaaggayggtgctcctagccccctacagctcctctgccctgggataactccttagtgtgtgctgcttccctggaccttccctctgggacacacacatcagggcctct

SEQ ID NO: 20134 - DNA, 201 bp, Homo sapiens; identical to SEQ ID NO: 2632

SEQ ID NO: 20135 - DNA, 201 bp, Homo sapiens; identical to SEQ ID NO: 2633

SEQ ID NO: 20136 - DNA, 201 bp, Homo sapiens
tggaggctaaggcaggagcctgctcaccctcccctgcctccctcacggtcccaggaccagttggaaagcactctgtcacctgctaccctcatttacagtgsggaaaatttaataaaggagggaggtgacttgttcaaagttacacagcaagtgggttcagaactgagacaagaggccaaggccccagacggaccatttcct

SEQ ID NO: 20137 - DNA, 201 bp, Homo sapiens
ccaaccatggccaacatcatgaaaccccatctctactaaaaatatgaaaattagctgggtatggtggcgggcatcaggagaatcgcttgaacccaggaggyagaggttgcagttgagccaagatcgtgccactgcactccagcttgggtactccgtctcaaaaaaacaaaaacaaaaaatcaaaaaacaaacaaaaacacc

SEQ ID NO: 20138 - DNA, 201 bp, Homo sapiens
aagaccagcctggccaaccatggccaacatcatgaaaccccatctctactaaaaatatgaaaattagctgggtatggtggcgggcatcaggagaatcgctygaacccaggaggtagaggttgcagttgagccaagatcgtgccactgcactccagcttgggtactccgtctcaaaaaaacaaaaacaaaaaatcaaaaaac

SEQ ID NO: 20139 - DNA, 201 bp, Homo sapiens
tcccagcttgccagctcctcagcacacatttcctgagcatctcccatgcacactgtgctgggtgccagggcctcagaggtgacggggggcctgccctttarcactcacaggctgggaaagagacaagctggtcaagagctccccacagtgaatgctatgggaaggctcaggggagtttggagcagacactgccacagcccg

SEQ ID NO: 20140 - DNA, 201 bp, Homo sapiens
ccatgcacactgtgctgggtgccagggcctcagaggtgacggggggcctgccctttagcactcacaggctgggaaagagacaagctggtcaagagctcccyacagtgaatgctatgggaaggctcaggggagtttggagcagacactgccacagcccgggagtcagccctgctgggccgagacagacagatgtgcagccag

SEQ ID NO: 20141 - DNA, 201 bp, Homo sapiens
ctgtcccttctcctttccaccattggccctcacctctgtccaccctgccagctctctccgccctccagagtttccgctgcaccctcccgtcctctcccatstctgtctccctggcccatcccaaacaccagggtgggggctaggccgcgctcccggcatgctggagagacagaggcccattgaggcattgcagcaggcaca

SEQ ID NO: 20142 - DNA, 201 bp, Homo sapiens
tctccgccctccagagtttccgctgcaccctcccgtcctctcccatctctgtctccctggcccatcccaaacaccagggtgggggctaggccgcgctcccrgcatgctggagagacagaggcccattgaggcattgcagcaggcacagagcgcccccttgtcccccaacaatccgcctttgtcctccagtcctggctgctg

SEQ ID NO: 20143 - DNA, 201 bp, Homo sapiens
ttgtgatcttgggtaagttactaaatttccttgggcctcagtttcctcatctgtaacatggggataatagtttccatgtcatggtttcattgtcgggataraatgagatgatgcatgcccagggcttagcaccatgcctggcacatgtaagtgcacaggagctgaggccagcaggatatggaagggagaggacgtctgcga

SEQ ID NO: 20144 - DNA, 201 bp, Homo sapiens
cacatcagggcctctcaggcttgagtgaagcctgccttcttccatttttgaggttcctggtatttaaaaagcaagatgacaaacaggattgaaagctgtgrtatattttggatgtttacattgaacaaattaacgcttcaaacacatacaatagagaatgactctgtgcataaccttatttggagacaagatcagaaatgt

SEQ ID NO: 20145 - DNA, 201 bp, Homo sapiens
ctgtgttggctctaggctggctctccatgatggaagactcctgaatagattccaactccactgggatggtagaggaacttttaaatttccagggagagctyctgcttcccagctccagttaggttagaggtggccactagggaagattttccaacctcttccagaccccagccctgggggacctggctgccaggcacacgg

SEQ ID NO: 20146 - DNA, 201 bp, Homo sapiens
caaggtggaggtgggcaggaaaccctgtcttcaaagatgaatgctttgactggcacgaggggaaatagatggaggccagaaaaggctaaggaggaaggaarctgctaggaccaggcaagggttggcttgggagatgggcaggcagtttccctgcccggggaagggtagaagagggacagcagaggacagaccagtgggaaa

SEQ ID NO: 20147 - DNA, 201 bp, Homo sapiens
tcaatatcttccggctgactctggaataaaatccaaatgctccatggtagcctggaggaccctatgtgatctgctccctgcccacctctttcacctcatcktgtctccctctcctccttatctcttgttcaacatctacactgtcctttctgtttctcaaatatgccatgctcttttccacctctaggactctgcatgtcc

SEQ ID NO: 20148 - DNA, 201 bp, Homo sapiens
cctggactaaagacatgggtttgttgggttcttggttctgctaactctgattctccatgtgtctcccagggtctagactgggttctccttgaaggctgctyctgagcctaggcgtttttgtagctaaaccattatcatctaccaatcagaaagtggtagcactgttctgggggcctccatctgtgccaggtgttcaacctt

SEQ ID NO: 20149 - DNA, 201 bp, Homo sapiens
ctaccaggcatataatgatggtcatcacaacttccatgagtattgcattttaagcagcctttggaaatactttcagagtttttttggttttgttttttaayctcaagtcactccctaaaaagacagtggaaataaatttgaataaacaaaacaggcttgctgaaaataaaatcaggactcctaacctgctccagtcagcct

SEQ ID NO: 20150 - DNA, 201 bp, Homo sapiens
gggattccagacatgtgatttcacttcttccttctagttctgtcttagcattggctttgggggtagatggagaagttcagtggtggggagggggtcagatytaactgagattggatctagtgtggacactacaggtcatgactctttggagtggtctcagaagctggctgggtcctgggccaaatcagatggcatgggagc

SEQ ID NO: 20151 - DNA, 201 bp, Homo sapiens; identical to SEQ ID NO: 2630

SEQ ID NO: 20152 - DNA, 201 bp, Homo sapiens
gttataagcatactaaaggagtgaaacccttaacttttgggggcagctggctggctggagctgtggactggatatctttgatcatgatcatgggtactgtrttctttcactcagtgtgccacataaatattatagttctctatttgtgccatgatatgaaaaatattaggaagtgctgaaatatgaatgatgaagcaaaat

SEQ ID NO: 20153 - DNA, 201 bp, Homo sapiens
tacctaaggtcaggagttcaagaccagcctggccaaccatggccaacatcatgaaaccccatctctactaaaaatatgaaaattagctgggtatggtggcrggcatcaggagaatcgcttgaacccaggaggtagaggttgcagttgagccaagatcgtgccactgcactccagcttgggtactccgtctcaaaaaaacaa

SEQ ID NO: 20154 - DNA, 201 bp, Homo sapiens
ataatagaaacaccacctaaagtccggcccggtggctcatgcctgtaatcccagcactttgggaggtcgaggtgggtggattacctaaggtcaggagttcmagaccagcctggccaaccatggccaacatcatgaaaccccatctctactaaaaatatgaaaattagctgggtatggtggcgggcatcaggagaatcgctt

SEQ ID NO: 20155 - DNA, 201 bp, Homo sapiens
ggagagactattaactttcactctttatactctttaatacttggatgtcagagtggtttttacttttgcaataatgctataataataatagaaacaccacytaaagtccggcccggtggctcatgcctgtaatcccagcactttgggaggtcgaggtgggtggattacctaaggtcaggagttcaagaccagcctggccaa

SEQ ID NO: 20156 - DNA, 201 bp, Homo sapiens
gtctggaagaatgtgcaggaaatagttgaggatagcttcttctggggagtggggctggtagggagagactattaactttcactctttatactctttaatasttggatgtcagagtggtttttacttttgcaataatgctataataataatagaaacaccacctaaagtccggcccggtggctcatgcctgtaatcccagca

SEQ ID NO: 20157 - DNA, 201 bp, Homo sapiens
agcttgcacagcgtctggaagaatgtgcaggaaatagttgaggatagcttcttctggggagtggggctggtagggagagactattaactttcactctttayactctttaatacttggatgtcagagtggtttttacttttgcaataatgctataataataatagaaacaccacctaaagtccggcccggtggctcatgcct

SEQ ID NO: 20158 - DNA, 201 bp, Homo sapiens
ctttctttctttctttctttttttttttttgccatgaaatcctttcagaataagtaaataagtcttcccatgcactctcaagtatgcttataatataagcktgcacagcgtctggaagaatgtgcaggaaatagttgaggatagcttcttctggggagtggggctggtagggagagactattaactttcactctttatact

SEQ ID NO: 20159 - DNA, 201 bp, Homo sapiens
caggtgcaggtgatttattagggaacccactttgggaagtgatgtgctagctaattccatttgccagggcttgtctgtgtggggaatggtcccacaagctrgagactgtcgcctgccagactaatggagtcgcagacctgtgggacatctacttttcagtgtttttcatctttctttctttctttctttttttttttttgc

SEQ ID NO: 20160 - DNA, 201 bp, Homo sapiens
aaattcatttaagcacccaacaggtgcaggtgatttattagggaacccactttgggaagtgatgtgctagctaattccatttgccagggcttgtctgtgtrgggaatggtcccacaagctggagactgtcgcctgccagactaatggagtcgcagacctgtgggacatctacttttcagtgtttttcatctttctttcttt

SEQ ID NO: 20161 - DNA, 201 bp, Homo sapiens
cactcaggtggctttccccaaagtgtgttctgtgcaatgctcatcccatgagctgcttctcagaaaaaagtgatgccaggtaaacttgggaaagactgctrtatctcctaccccttggagattcatactgtcattgtacattaaagtctgcaagaagtctgtagaaagtaaaccgttaaactggtgtttcccaaattcatt

SEQ ID NO: 20162 - DNA, 201 bp, Homo sapiens
tgttttttctgggtaaaatattagggaataatggcatgatacaggcatgaagcatcccaataccaattgatactgccctggccatgaatgggttagttatwagcatactaaaggagtgaaacccttaacttttgggggcagctggctggctggagctgtggactggatatctttgatcatgatcatgggtactgtattctt

SEQ ID NO: 20163 - DNA, 201 bp, Homo sapiens
acagctgcctcccaacctggtgcctccatctccctgacccccggctcctggccagccttatgccagcccccagctcacccttcagtagcctccttccccargccctctggacacctctcctgcccgcagctgccccttcttcgtctcctactctgccttcttgctgcctctccacccggagacatttacagcaggtttcag

SEQ ID NO: 20164 - DNA, 201 bp, Homo sapiens
aaccgagctggtaacagctgcctcccaacctggtgcctccatctccctgacccccggctcctggccagccttatgccagcccccagctcacccttcagtakcctccttccccaagccctctggacacctctcctgcccgcagctgccccttcttcgtctcctactctgccttcttgctgcctctccacccggagacattta

SEQ ID NO: 20165 - DNA, 201 bp, Homo sapiens
cggtctcccagcctgtcccttctcctttccaccattggccctcacctctgtccaccctgccagctctctccgccctccagagtttccgctgcaccctcccrtcctctcccatctctgtctccctggcccatcccaaacaccagggtgggggctaggccgcgctcccggcatgctggagagacagaggcccattgaggcatt

SEQ ID NO: 20166 - DNA, 201 bp, Homo sapiens
agtgaatcctgcttaactagctgtgtgacctttgtccagttatagggcatccgagtctcaggtcctcctctgtggcagtgactttggtgaggagtaagctkatgtagattgccaggcacagtgctcttcttccatggcttttcctctttaccttggcttcccctctgacttgtgctttccagaaagctgaatgtgttcgtt

SEQ ID NO: 20167 - DNA, 201 bp, Homo sapiens
ggttcctggaactgagacctccttcctgttgggtcttaggtgaggctgtttcagtttccctcctcttccttgcttcaccttctcatttgtgcaatggggayactcacccacagcttcttccatcagaccttgcccatccagccaacaaacttaggaagtcagggtcttccagcagccctgtgagggtaggcttgtatcccc

SEQ ID NO: 20168 - DNA, 201 bp, Homo sapiens
ccctgtggccctcagcaggtgcagttgaaacttgtcccaacccaagcccaggtgagcaggaaagcattcactgtggggctccccttccattcacagccaastaggggtaggcacggtgtggcacttccatgccaggaggttacatgtggaattggtcagagctggaatgggaaaccagctcagcctctttctttgtgatct

SEQ ID NO: 20169 - DNA, 201 bp, Homo sapiens
cctcccctgcatttctagctgttagaatagtgcttggaacacagtaggtgcacagtaaatatttggtgagtggataagtgaacgaaggcagccatgactayaggacaaagccgagtaagctgaggggcctcctggggaaggctacagccctggactaaagacatgggtttgttgggttcttggttctgctaactctgattc

SEQ ID NO: 20170 - DNA, 201 bp, Homo sapiens; identical to SEQ ID NO: 2631

SEQ ID NO: 20171 - DNA, 201 bp, Homo sapiens
gccacagggacaggaatcccaggaagctctcttcaactgccaggtcaggcctaggcaggtgaagacgtgctgggaggggaccttgatgtcatgtgccatgsagactttcctttgttcctgcctccagccttctccccattgccacccccctatcctcacacccccaagggttccctggaagctgaagtgactcagggattc

SEQ ID NO: 20172 - DNA, 201 bp, Homo sapiens
cccattttgatctcagaggggctgtaaaggtttgggagttagacaaggtctgtatttgagtcctagctctgactctcattggatgatcttgagtcaattcragttttcaaaactcagggtttttttttttttcacctgcaaaatgatataatgccccataggctaatgtgcagatcaaatgaaatataatgtatgtaaaag

SEQ ID NO: 20173 - DNA, 201 bp, Homo sapiens
agatggacccctcaacagcagggccatctccccctggagatatgagtgagtctgctgcccctcccgaatgcctgccctgtgtgtgctggccagggtatgcrtgagggaccagggcaattccagcttactttcccattttgatctcagaggggctgtaaaggtttgggagttagacaaggtctgtatttgagtcctagctct

SEQ ID NO: 20174 - DNA, 201 bp, Homo sapiens
ggagcactgtgcctgtgcctcccctagagcctgctaggcccaaccgccacccagagtcctgtagggccagtgaagatggacccctcaacagcagggccatytccccctggagatatgagtgagtctgctgcccctcccgaatgcctgccctgtgtgtgctggccagggtatgcgtgagggaccagggcaattccagcttac

SEQ ID NO: 20175 - DNA, 201 bp, Homo sapiens
ttccatcagaccttgcccatccagccaacaaacttaggaagtcagggtcttccagcagccctgtgagggtaggcttgtatccccggtggggggcagtgacyggcgagggcaagggggagttagggagtgggtcatggacaatgggggagaagtcatagctgatgggggtcatagaattttggggtcattgaaaatgtggaa

SEQ ID NO: 20176 - DNA, 201 bp, Homo sapiens
cacagtgtctcccaagcaggctggacccggctgacctgtgtctttggggtcaagcccaactgtaagcctttctggggcacacatacaccctcctggctaayagtggcccatgtttctggacctgctgaggctgagtgggctcacttcatggcctgaaagcagtagctgaccctgtcatgggcttggtccccaaggctctgt

SEQ ID NO: 20177 - DNA, 201 bp, Homo sapiens
aggccaataggcaagcatgaagagaaggacctggggggaaggacacactggcccactctcagcacagtgtctcccaagcaggctggacccggctgacctgkgtctttggggtcaagcccaactgtaagcctttctggggcacacatacaccctcctggctaacagtggcccatgtttctggacctgctgaggctgagtggg

SEQ ID NO: 20178 - DNA, 201 bp, Homo sapiens
ctagaggagtattttctaagggaaagcacatgcaaatcaagccacatcattctaggggcaatgtctgtgtatgggtatgttgggtgcgtatgggggatgakgcaggccaataggcaagcatgaagagaaggacctggggggaaggacacactggcccactctcagcacagtgtctcccaagcaggctggacccggctgacc

SEQ ID NO: 20179 - DNA, 201 bp, Homo sapiens
cttctctcttttggggctgctttgccctaacgcattggaaagattcctctcactgcagtttaagttattcctggttccctttgttgatttcctagtccttrgttactagaggagtattttctaagggaaagcacatgcaaatcaagccacatcattctaggggcaatgtctgtgtatgggtatgttgggtgcgtatggggg

SEQ ID NO: 20180 - DNA, 201 bp, Homo sapiens
gtgcccctgctttcccagccaccacctgcttcttctaagtgccctccatcccacagttccaggtgccccaagactcatcagagcagagcagtttctcccarttttccagattgccctttgacttcatcacttctctcttttggggctgctttgccctaacgcattggaaagattcctctcactgcagtttaagttattcct

SEQ ID NO: 20181 - DNA, 201 bp, Homo sapiens
ggcagctggcaagagggagaagtgtgtggggacaaatccctggggctttcagaggcctaagggagatgcccttggagggagaggcagggccccagggatcytgtggtcccacgttagaggcacttgtggtttagggggatggaactggggatctctgcagaagttccagtcagtggggggctgttttgagcaggagagtgg

SEQ ID NO: 20182 - DNA, 201 bp, Homo sapiens
ctccccttccccaccctcagccatgactattgtgaaaaggttccttttccgaggattaaattcaaacttctgcttggctcatgtggtctcatgcccacccyagcccatctttctagattcagtcatgctactctcctgctacaaggaaccctcctcattccttatctctgctgcctccagtatctggcccttgctctctgc

SEQ ID NO: 20183 - DNA, 201 bp, Homo sapiens
ttttgtcttttcaggaaagatgaggatcctgaaaataaaattgaatttaaaacacgtctgggtgagtacagtttctatactagtgactatgcattctggawgaattgtacggaatttaatgctctgggaaggatatgcttctcctttcccccaacctcctttcttctttctttctttttgagacagtgtctcacttaatcg

SEQ ID NO: 20184 - DNA, 201 bp, Homo sapiens
gagttggagaccagcctggccaacatggtgaaatcctgtctctactaaaaatagaaaaattagctgggtgtggtggcgggcacctgtaatcccagcttctygggaggctgaggcaggagaatcgcttgaacctgggaggtggaggtggcagtgagccgagatcgtgccattgcactccagcctgggcaacaagagcaaaac

SEQ ID NO: 20185 - DNA, 201 bp, Homo sapiens
gttatttcccaccgattattatttatttacttacctatttatttttgagacggagtctcgctctgtcgccgaggctggagtgcagtggcgcgatctgggcwcactgcaacctcccccttccgggttcaagcagttctcttcctcagcctcccgagtagctgggattataagcgcccgccaccacgcccggctaattttttt

SEQ ID NO: 20186 - DNA, 201 bp, Homo sapiens
ggtttcaccaagccacgaaggactagcgtccctctctcctatcccaagggcattaagcctgtctggatgaagtaggagaggaaagatttacacgcagttcycaactttacgtgacgtgactagggagggaattgacggtcgcaccgtctacctagcccaaacggggtcacagcaggacaaggaagtagccgatctcccaga

SEQ ID NO: 20187 - DNA, 201 bp, Homo sapiens; identical to SEQ ID NO: 5342

SEQ ID NO: 20188 - DNA, 201 bp, Homo sapiens
ggaagtagccgatctcccagatgcggtctcttcgctccgctccacccgcaccagcagcggcccacccacctctcctgtaagaggaagaacgtcccggagayacttccggccccgccccccgaggcggaagcggagtgccaggctactcctcccgcagtgtgggtggttccgaggctgactaccctgcggcggcgcggctcg

SEQ ID NO: 20189 - DNA, 201 bp, Homo sapiens
aggttaggagttcaataccaggtgggccaacattgtaaaacctgatctctactaaaaattagccaggcgtggcggcatgtgcccgtaatcccagttactcrgaaggctgaggcatgagaattgcttgaacccagaaggtggaggttgcagtgagccaagatcgtgccactgcattctagcctgggcgacagaatgagactc

SEQ ID NO: 20190 - DNA, 201 bp, Homo sapiens
ggaattgacggtcgcaccgtctacctagcccaaacggggtcacagcaggacaaggaagtagccgatctcccagatgcggtctcttcgctccgctccacccrcaccagcagcggcccacccacctctcctgtaagaggaagaacgtcccggagacacttccggccccgccccccgaggcggaagcggagtgccaggctactc

SEQ ID NO: 20191 - DNA, 201 bp, Homo sapiens
aggatggtgggcgcctttgggcagttattatttgttttacatgtatctccttccccactcctaaaaaatctatctcatttactgggccccaccctcctttrgctgcagcagtagaaacagcagcattgagggtcatgagcagcttaactatttcagagtctttgcacaagatcaaatgacatagggtcaaaaatctatttt

SEQ ID NO: 20192 - DNA, 201 bp, Homo sapiens
aagctttgcccaagtgagtcggtactgaatatgggcagggtgtgaggaggggtgtggggatttggtggaatagtgcatataaggttagagggtgtggtctrgctgagatgttccccactaagttctttgcccacaggactctgggaaaacctcgccactgctatgcaatctctgatgcattctttcccaactgcttttttc

SEQ ID NO: 20193 - DNA, 201 bp, Homo sapiens
ggctaaagtccgagttctagtttctccacgggtttctgcacgaccttgggcggtcccttctcttctcaaacccttgttcccctaccggagccccagacccytggcgtcccgcactcaccgtagcgggcccagagcttgggctgcacatcggagcattcgcggattaggatgggtaggtcgggattcgccttcttcagctcc

SEQ ID NO: 20194 - DNA, 201 bp, Homo sapiens
ttgggctgcacatcggagcattcgcggattaggatgggtaggtcgggattcgccttcttcagctccacgtagcgtttctcaatgaagtccctgcggggccsgagagagcgccgcgcgtgctgtgggcgggggcttccctcaacttcagggaggtcgaggtcgtgaccctggcgtcccgaagcccgcccgcctcaccacgcc

SEQ ID NO: 20195 - DNA, 201 bp, Homo sapiens
aagtttgctgggtctgctggctgggaaggcacagaatcatatcctttattttaatacgttcctgggttccagagaactggtctctttactccaaccccccmtgcctccctgctccctcctaccctgcccctctccttcccttttacgctgaattttgacagaatgaaaccatcccttgttccttcccagagcacccataac

SEQ ID NO: 20196 - DNA, 201 bp, Homo sapiens
aattcatgtgtctggctaggaagggctttgggtttggacactttcccatctgggcagggctttgggtttggacactctcccacctgctatcagggtttggyaagaaccactggcatcttcgtggttcctacttacagccctgcttctgccagcagctccatcttggcctccactctccctcagcacatgctacaaatgttg

SEQ ID NO: 20197 - DNA, 201 bp, Homo sapiens
gcctgaatgatttccaaagctgttgcacattttaaattcatgtgtctggctaggaagggctttgggtttggacactttcccatctgggcagggctttgggwttggacactctcccacctgctatcagggtttggtaagaaccactggcatcttcgtggttcctacttacagccctgcttctgccagcagctccatcttggc

SEQ ID NO: 20198 - DNA, 201 bp, Homo sapiens
tgatccacccgcctcggcctgctgaagtgctgggattacaggcgtgagccaccgcacctggccccccaaccccctttcccccaccccctttttttttttttggagacagagtcttgctcttgttgcccaggctggagtgcagtagcgcgatctcagctcactgcagcctccgcctcccatgttcaggcgattctcttgcct

SEQ ID NO: 20199 - DNA, 201 bp, Homo sapiens
atttgccacccacaaagggctgttcttttttttttttttttttgagatggagtctcgctctgtcacccaggctggactgcagtggcacgatcttggctcayggcaagctccgcctcccaggttcatgccattctcctgcctcagcctcccgagtagctgggactacaggcgcccgccaccacgcccggctaattttttgta

SEQ ID NO: 20200 - DNA, 201 bp, Homo sapiens
gtttcagactgattcttttcttttttttatttttttgagacagagtcttgctctttttgcccaggctggagtgtaatacctagatctcggctcactgcaawctccgcctcccaggttcaagcgattttcctgcctcagcctcctgagtagctaggattacaggcgcccaccacaacgcccagctaatttttttgtattttt

SEQ ID NO: 20201 - DNA, 201 bp, Homo sapiens
gcactttgggaggccgaggtgggtggatcacaaggtcaggagttcaagaccagcctggccaatatgggtgacagtgagactccgtctcaaaaaaaaaaaaacagtgtcatatctttgttttaatttgtatttccctgatttctgttaatttaatcatgatttttacttgttcctttttcatttcttattgagtcctaatat

SEQ ID NO: 20202 - DNA, 201 bp, Homo sapiens
cgcagcgtgggattttgcggcttcctgacagcccaggctgtcgcttgacttgatcttgggtttcaccaagccacgaaggactagcgtccctctctcctatsccaagggcattaagcctgtctggatgaagtaggagaggaaagatttacacgcagttctcaactttacgtgacgtgactagggagggaattgacggtcgca

SEQ ID NO: 20203 - DNA, 201 bp, Homo sapiens
tttgtgtttcattctttgtagactatatatgtgtctatctgcaggtgctcacagttctgtgcaatgttgcagaaaagggtcctgcttactgccagcggctrtggccagggcccctgcttcccgccttgctgcacacactagccttttctgacactgaagtagtaggccagagtttggagctgctgcatctgctgttcctgt

SEQ ID NO: 20204 - DNA, 201 bp, Homo sapiens
gggtagttgtaggagtatgagaacatgtatgtagaagagcttggcatggtgcctgggcatgtggtcaccatgtcatatattttagctattgttatgatctktgtgtttcattctttgtagactatatatgtgtctatctgcaggtgctcacagttctgtgcaatgttgcagaaaagggtcctgcttactgccagcggctgt

SEQ ID NO: 20205 - DNA, 201 bp, Homo sapiens
ggcatatcttttcctcccgttgcccaggctggagttcaatggcattatttctgctcacagcaacctttgcctcctgggctcaagcaattcttctgcctcaktttccccagtagctgggattacaggcatgccccaccatgcttggctaatttttgtattagtagagacagggtttcgctatgttggccaggctggtcttga

SEQ ID NO: 20206 - DNA, 201 bp, Homo sapiens
ctataagctggaagaagttgtagttctgattttgagtaactacgaagaggtggccagcagttctatcaggacagacatgagcttttccccatagagagtasgttggagatgtagggaagcaagcaggaacagttctgttgaccttgaggtagcagctgatgagccttatacatttgcctttctctggtcacagttattatg

SEQ ID NO: 20207 - DNA, 201 bp, Homo sapiens
aaaatcatctttttattttttttgagactgagtttcgctcttgttgctcaggctggaatgcagtggtgcgatctcggctcaccacaacctccgcctcccgrgttcaagcaattctcctgcctcagccttccgagtagctgggattacaggcatgttccactacgcccggctaattttgtatttttagtagagatggggttt

SEQ ID NO: 20208 - DNA, 201 bp, Homo sapiens
ttcttccccatggcacttggggcacttggcgcattattgtagcttctgagcttaagccgggtgtgtgtgtgtgtgtgtgtgtgtgtgtgtgtgtgtgtgtrtgtatgtatgtgtgacgcttgagcccggagaagccacagggtcctaagtgaggccgacagctccaaactccgtccccagtcctcactcctactccaagtg

SEQ ID NO: 20209 - DNA, 201 bp, Homo sapiens
caccatatagttaaaagctgtgattaaaatcctgttattcagtatgtataaacatttattgcatacctacaatgtgttaggcaacatgataggaaaatttsattttgcaatacattgccatgccagtcttagaggggtaagtgcattctaggaaggggaataaatgtaaaggctcaatcctgttaaactctagctgcatct

SEQ ID NO: 20210 - DNA, 201 bp, Homo sapiens
acacgcagttctcaactttacgtgacgtgactagggagggaattgacggtcgcaccgtctacctagcccaaacggggtcacagcaggacaaggaagtagcmgatctcccagatgcggtctcttcgctccgctccacccgcaccagcagcggcccacccacctctcctgtaagaggaagaacgtcccggagacacttccggc

SEQ ID NO: 20211 - DNA, 201 bp, Homo sapiens
tcctcctgtagtctactggcttttggaaggagaagcttttttccttctccaattattagtgcatgtctaatgtctactgtgtctcacagatatctactctsagaaccaatctgcttaaggtggtcactctcctccacctcctcccgtcattcccagggcaccatatagttaaaagctgtgattaaaatcctgttattcagt

SEQ ID NO: 20212 - DNA, 201 bp, Homo sapiens
ggctacacccatcatctccccaccctcttgtgagccgcaaggatagctgctccagcgtccccatcacctcccctccccatctccccacacgcagcctggcwtgaaacaggccaagcccagtgcttttgttgcctgttctcaggagctgtgtctgtatacactgggtaacctgatcgtggagagtgaggctgtgagaaggca

SEQ ID NO: 20213 - DNA, 201 bp, Homo sapiens
aggtatgtagttagaaggatggtgggcgcctttgggcagttattatttgttttacatgtatctccttccccactcctaaaaaatctatctcatttactggrccccaccctcctttagctgcagcagtagaaacagcagcattgagggtcatgagcagcttaactatttcagagtctttgcacaagatcaaatgacataggg

SEQ ID NO: 20214 - DNA, 201 bp, Homo sapiens
tggacggggacgtgttcgtgtgagagcggggcagggccggggcgccgggtctggaagcttcccgggggtggacctgggaacaggagagatgagagaaagtkgcagggagacaaattttgcaagattctttgggtccaatttattcagtaacattcggctcttctatcacaccaatctgttgaaagaactggaatgtcgtga

SEQ ID NO: 20215 - DNA, 201 bp, Homo sapiens
tcttccggaagtcttctctgatcctccagcgcaggattagggtcctctgctttgtgctcccacagcttcttgtagtttcctatttcagcacttattacatygtgttgacactgtcgctgttctaacttttgttctgtattgttcactactatatctcaaatttttgcataggatctgacacgtaagagactgattaaatta

SEQ ID NO: 20216 - DNA, 201 bp, Homo sapiens
actgacccatttctccttccattgcagggttgaagtcaaaagaccaaaatactaatcactagttacaaccagagatgctccacaaggatatgctccccackgttttctttctacaatttccaaaggttgcaagatgtttttttgtggatgaatataaaattttattgtgtaattacttggttccattaaaattggttaact

SEQ ID NO: 20217 - DNA, 201 bp, Homo sapiens
tgttctagactcctgactttcttgaatggtcttgattcattttgatgcagggcttttgtgcaggctgttttatctctggaatatcctttcacagcacttcstttccctcccttcacctactgtattgtaattcagtctttagtttgttaagtgaatgaatgaataaatgaagagatttctgctgagtggtttaacattctt

SEQ ID NO: 20218 - DNA, 201 bp, Homo sapiens
gggagtacaggcgtgagccaccgtgcctggcccccgataaaatcatctttgataacatccccaattccagtccatttctttttttttttcttttcttttcytttctttctttttttttttttttgagacggagtctcactgttacccaggctggagtgcagtgatgcaatcttggctcactgcaacctctgcctcctgagt

SEQ ID NO: 20219 - DNA, 201 bp, Homo sapiens
gttcttcccctgagttcactgtattgaaatagcatggtttaatcttggagccttgtttaatcctgcctctactgtttattagttttgtgaacttgccaagytctttcactgtttatgcctcagtttcctcatcaggaaaatggagagaaatatagttccctcttcatagattttatgagaattaagtgagatatgcattta

SEQ ID NO: 20220 - DNA, 201 bp, Homo sapiens
aatatccacttcatagggctgttgcaaagattaaatgacgcaaagcttgcatagcacttggcatggtggctagcacagagtaagcacataagtgacagctrttcttgtagatcctggctacttgctgctcttctccttattgtaggccgcaatgtttaccgaatgctttttaagagcaaagcatatgagcggaatgagttg

SEQ ID NO: 20221 - DNA, 201 bp, Homo sapiens
gcctaggcaactgcttctcttcttaaaggtggaattgactatatacctagggactgcttgcttcctgttgcccagccaggtcagcaatcctctgctcattrgccatggggctctgtctactctggggttgctgctgttggacttggctggggctgtccagaaaaccgaggatgcaggactggagctggtaggtgaagatgt

SEQ ID NO: 20222 - DNA, 201 bp, Homo sapiens
tggatgaactattttattaggctctaagtgggaggtctagggggtggtcattcctatgcagataacctcttagtcgggtaggtttccagatgaagcatagsgtcagggtatgcaacatctgtttaactcttgcttctccttaggatggatgacatggctgtggatagtgatgaggaggtggattatagcaaaatggaccag

SEQ ID NO: 20223 - DNA, 201 bp, Homo sapiens
cctgccgagctgtggccttctctgaagatgggcagagtgagtactggggaagacaaccagcaatgtggtggaagggagcagtgagcagcaccatgacctgrgcaccttttccccagagctcattactgtctccaaggacaaagccatccatgttctagatgtggagcagggccaactggaaagacgtgtttccaaggctca

SEQ ID NO: 20224 - DNA, 201 bp, Homo sapiens
agccacgaaggactagcgtccctctctcctatcccaagggcattaagcctgtctggatgaagtaggagaggaaagatttacacgcagttctcaactttacrtgacgtgactagggagggaattgacggtcgcaccgtctacctagcccaaacggggtcacagcaggacaaggaagtagccgatctcccagatgcggtctct

SEQ ID NO: 20225 - DNA, 201 bp, Homo sapiens
atgtcatcgcgcagcgtgggattttgcggcttcctgacagcccaggctgtcgcttgacttgatcttgggtttcaccaagccacgaaggactagcgtccctstctcctatcccaagggcattaagcctgtctggatgaagtaggagaggaaagatttacacgcagttctcaactttacgtgacgtgactagggagggaattg

SEQ ID NO: 20226 - DNA, 201 bp, Homo sapiens
ggcacgatctccactcactgcaacctccacctcctgggttcaagcaattctcctgcctcagcctcctgagtagctgggattacaggtgcccgccaccacayccggctaatttttgtatgtttagtagagacggggttttaccatgttggccaggctggtcttgaactcctgacctcaggtgatccacctgcttcagcctcc

SEQ ID NO: 20227 - DNA, 201 bp, Homo sapiens
gtggcacgatctccactcactgcaacctccacctcctgggttcaagcaattctcctgcctcagcctcctgagtagctgggattacaggtgcccgccaccayacccggctaatttttgtatgtttagtagagacggggttttaccatgttggccaggctggtcttgaactcctgacctcaggtgatccacctgcttcagcct

SEQ ID NO: 20228 - DNA, 201 bp, Homo sapiens
tctgtgcaatgttgcagaaaagggtcctgcttactgccagcggctgtggccagggcccctgcttcccgccttgctgcacacactagccttttctgacactraagtagtaggccagagtttggagctgctgcatctgctgttcctgtatcagccagaggtataggtttctggcccacatcctcagtcacccctgttctgaag

SEQ ID NO: 20229 - DNA, 201 bp, Homo sapiens
atgtacacaaaatgctgatcgtagcttactagtccgttatatgactagaatgtgaaaaaacactgttctggagtgtaatctgtcatcggttttgttctctrttttatctccaacctctagtctagggtagatgctcaacacatgtttgattttgaacaaaagatacaggttagaggcagtggaaaagttgaagatgttatg

SEQ ID NO: 20230 - DNA, 201 bp, Homo sapiens
acaaatatctcctccacagtggtccagacccaatctttgtccaggctggggctttcaaagatgataaagaggggttgggtgggatcacaaagaaatcttgygcaaatataccttgaactaacatatattgaaaaaagcaggacctaacatttcaaactcactgaaaatggagaaatgagatggtaaactttttgggcttag

SEQ ID NO: 20231 - DNA, 201 bp, Homo sapiens
cggggcgccgggtctggaagcttcccgggggtggacctgggaacaggagagatgagagaaagttgcagggagacaaattttgcaagattctttgggtccartttattcagtaacattcggctcttctatcacaccaatctgttgaaagaactggaatgtcgtgacagagcccagataccgtagtaggccaaaaagcccttt

SEQ ID NO: 20232 - DNA, 201 bp, Homo sapiens
gaacgtcccggagacacttccggccccgccccccgaggcggaagcggagtgccaggctactcctcccgcagtgtgggtggttccgaggctgactaccctgmggcggcgcggctcgcagtccttctcagcatggaccgcacttgtgaggagaggcccgctgaggatgggagcgacgaggaggacccagactccatggaagcc

SEQ ID NO: 20233 - DNA, 201 bp, Homo sapiens
ggtcggagggaaaaacaggaagcggaaaggctgcgaacgcaaagcagtgtgggttgattctgaggtgcactgtgggaaagagcttgtcgctgcggtgttgytgttggagactcgattgttggtgacagcgaaagaacgataacaaaatgccggagcgagatagtaaggctcaggccatccgttatttcttccccatggcac

SEQ ID NO: 20234 - DNA, 201 bp, Homo sapiens
aaagctgttgcacattttaaattcatgtgtctggctaggaagggctttgggtttggacactttcccatctgggcagggctttgggtttggacactctcccrcctgctatcagggtttggtaagaaccactggcatcttcgtggttcctacttacagccctgcttctgccagcagctccatcttggcctccactctccctca

SEQ ID NO: 20235 - DNA, 201 bp, Homo sapiens
ggaggacccagactccatggaagccccaacccggatccgggacactccggaagacatcgtgctggaagctccggctagtgggctggcgttccatccggccygtgacctactggctgcaggggacgtggacggggacgtgttcgtgtgagagcggggcagggccggggcgccgggtctggaagcttcccgggggtggacctg

SEQ ID NO: 20236 - DNA, 201 bp, Homo sapiens
gtattcttatcagtaaaaaggataataatatccacttcatagggctgttgcaaagattaaatgacgcaaagcttgcatagcacttggcatggtggctagcrcagagtaagcacataagtgacagctgttcttgtagatcctggctacttgctgctcttctccttattgtaggccgcaatgtttaccgaatgctttttaaga

SEQ ID NO: 20237 - DNA, 201 bp, Homo sapiens
atgatttatgaattgtggaacctgggattatgggagagtctggcttcaatcaagggctgaaattccatttccactgacatctcttccttccccatcccccrattctgtcctgcaacagggtaacaagaaggggcccttaggccgttgggactttgatacccaggaagaatacagcgagtatatgaacaacaaagaagcttt

SEQ ID NO: 20238 - DNA, 201 bp, Homo sapiens
ggctggagtgtaatacctagatctcggctcactgcaaactccgcctcccaggttcaagcgattttcctgcctcagcctcctgagtagctaggattacaggygcccaccacaacgcccagctaatttttttgtatttttagtagagatgggatatcaccatgttggccatgctggtcttgaactcctgacctcgggtgatcc

SEQ ID NO: 20239 - DNA, 201 bp, Homo sapiens
gaagtccctgcggggccggagagagcgccgcgcgtgctgtgggcgggggcttccctcaacttcagggaggtcgaggtcgtgaccctggcgtcccgaagccygcccgcctcaccacgccgcgcctcacctgacgccctggctgccgggcgagcgctgacataagtggatgcgaatctcacgcaggcccagctttgccccgac

SEQ ID NO: 20240 - DNA, 201 bp, Homo sapiens
tgacccatttctccttccattgcagggttgaagtcaaaagaccaaaatactaatcactagttacaaccagagatgctccacaaggatatgctccccactgwtttctttctacaatttccaaaggttgcaagatgtttttttgtggatgaatataaaattttattgtgtaattacttggttccattaaaattggttaacttg

SEQ ID NO: 20241 - DNA, 201 bp, Homo sapiens
tttattattaactacggtgagcaatgtattgcatgggtccagcctcagctgggagcccattctctctctttttttttttttttttttgagacggagtctcrctctgtcacccaggctggagtgtggtggcacgatctccactcactgcaacctccacctcctgggttcaagcaattctcctgcctcagcctcctgagtagc

SEQ ID NO: 20242 - DNA, 201 bp, Homo sapiens
ttcagagtctttgcacaagatcaaatgacatagggtcaaaaatctattttttacttcctatagcaaagtgccaggctttgattcccatggtaggcagtaarcaagcatcaatgcataagtagaaagggcagaaaaaattgcagtctttggaaaataactaaattttattctagccaggattgaagttttcctctaagtctt

SEQ ID NO: 20243 - DNA, 201 bp, Homo sapiens
attagcaagctgacccagatcctttcatacctgaggcagggaacccgtaacaagaagcttaagaagaaggataaaggtacctggagggttagagagagaarccttacccacagaggacgtttggggataaaaccaaggtctcctggagctttctgtctccagaatattgagaggctcctgggaagcagagaaaaatgggag

SEQ ID NO: 20244 - DNA, 201 bp, Homo sapiens
ggaataggcctatctatattttaatctcatcttcgctagtttcttggtggataacctagacatttgcttagcctctctaatccacagatagaatggagatmcagtagcaataataacttttatcaggatgtcatgaggatcagctgtgaaagtacatgtaggcatttagcaccaatgcctggcatatggtaaccacccaat

SEQ ID NO: 20245 - DNA, 201 bp, Homo sapiens
tcatatgtcatttatgtctcctcaggtagattgaaagatttttcagtttggggcttatgagttaaaagaagtaacatggttagtgattaaaagttcaaaayttggagtcagagagacctgagtttaaaccttgatgatgaaacagcactaagtgtatgattttaggcaactgactttgctgtttgttcatctgtaaaaatt

SEQ ID NO: 20246 - DNA, 201 bp, Homo sapiens
tgctgacatgagaatctggagaaatggtcagggggagtgaaggtgtatgtgtgaatttggccagctagtgatctccattttcccagtatttttgaagacaytggggattacgtaccctccacaaccaagacacctcgggacaaggagcgggagagatatcgggaacgggagcgtgatcgggaaagagacagagaccgtgac

SEQ ID NO: 20247 - DNA, 201 bp, Homo sapiens
ttattttaatacgttcctgggttccagagaactggtctctttactccaaccccccctgcctccctgctccctcctaccctgcccctctccttcccttttaygctgaattttgacagaatgaaaccatcccttgttccttcccagagcacccataacagctcacagcccactcagaattttcatgttggggcttctagccct

SEQ ID NO: 20248 - DNA, 201 bp, Homo sapiens
attgcccttcaaattggttatactggtttacattctcatcagcattatatgagagagtccccttcccaaattctcactcacacttgatttatcaaactttytggtagttaacactctgatgcattaaaagtggcatggcatatctggtcgggcgtggtggcttacacctataatcccagcactttgggaggctgaggtggg

SEQ ID NO: 20249 - DNA, 201 bp, Homo sapiens
tccttcctatttctttctactaagtagaatgacttttaatagtccctcaggtatttatgatactctctaaagtttgagaactgcccacctacaaatattgrtgtggatttctgcttgattgaaagtgttactttgatcagtattctaggtctttctaaaaatcctcaaggagacttcttggggtttctggggctgtggcaa

SEQ ID NO: 20250 - DNA, 201 bp, Homo sapiens
caggccaagtgctccggtctgaccaaccgcggaccctaaagcctagcccataggctgcatgaggcaggggcggggtaaagcttggccaatgatataaaagyattgtaggaccgctgcgaggtcaatttctttgcgctcggggttggtcggagggaaaaacaggaagcggaaaggctgcgaacgcaaagcagtgtgggttga

SEQ ID NO: 20251 - DNA, 201 bp, Homo sapiens
tggagtttgtttaaaactttgttagacaaaagggttctatgccttaaaaatgttttttaagtgtgttgtggggaggaggttgtgagagcctcagttcaagrtctgggctgagttctcttttctcctaggacctgggtctaccaaggagttgatcaagtccatcaatgaaaagtttgctgggtctgctggctgggaaggcac

SEQ ID NO: 20252 - DNA, 201 bp, Homo sapiens
cgtcccgaagcccgcccgcctcaccacgccgcgcctcacctgacgccctggctgccgggcgagcgctgacataagtggatgcgaatctcacgcaggcccasctttgccccgactcctcgacttgctgcggccgccgccatccttgttaatatcgaagtcgccaattccaggtcttcaggccaagtgctccggtctgaccaa

SEQ ID NO: 20253 - DNA, 201 bp, Homo sapiens
gggagaagaggaacttgattagatatcaagttggattggatatcaagagtgggaaaactttctgtgaactgacttaggattcctttttaaaactgaggtcrgcaggccaaggaagagccctagtcagaagagagctttaaaggagtctgactttaatttgatcaagagaggagtctttgttagtgtaccaattaaaataat

SEQ ID NO: 20254 - DNA, 201 bp, Homo sapiens
cacagttttaacaaagaaatcaaccaccgctccacccccatacctaaccaagttgcttttagtaattttctataaattctcacttgtccctgttgtattcrgaattaagttcagtctctctactctattacaatggtcttgactcttgttacagtagtcttcaataaagtcttccttggggagaagaggaacttgattaga

SEQ ID NO: 20255 - DNA, 201 bp, Homo sapiens
tgcctcccaaagtggtgggagtacaggcgtgagccaccgtgcctggcccccgataaaatcatctttgataacatccccaattccagtccatttcttttttyttttcttttcttttcttttctttctttttttttttttttgagacggagtctcactgttacccaggctggagtgcagtgatgcaatcttggctcactgcaa

SEQ ID NO: 20256 - DNA, 201 bp, Homo sapiens
ctgttgcccagccaggtcagcaatcctctgctcattggccatggggctctgtctactctggggttgctgctgttggacttggctggggctgtccagaaaascgaggatgcaggactggagctggtaggtgaagatgtcaggtgaaattctgggagatgtttcttgatactctggaatgcaggtaacctcttccttcttaca

SEQ ID NO: 20257 - DNA, 201 bp, Homo sapiens
catgactttaggtaaattacttaaatctcagccatagtattcttatcagtaaaaaggataataatatccacttcatagggctgttgcaaagattaaatgaygcaaagcttgcatagcacttggcatggtggctagcacagagtaagcacataagtgacagctgttcttgtagatcctggctacttgctgctcttctcctta

SEQ ID NO: 20258 - DNA, 201 bp, Homo sapiens
aaacaaagcaaaacaaaaaagaaaaaaaaattcttggtaactgagcactgcttgtccagcccattgagtttctgtagacaaattgtaggaactggcacagyaaactggccacaaagacgttaggggcgtggacaccagctgcttgagctgcctgctgtcccagactcccgtatgtcatcgcgcagcgtgggattttgcggc

SEQ ID NO: 20259 - DNA, 201 bp, Homo sapiens
cattccagtatggtatcaaaatgtctgaagggcggaaaaccaggcgcttcaaggaaaccaatgacaaagcagagcttgatcgccagtggaagaagattagygcagtaagtaggatggccccttgggtgggagggtttcagctgggagaagacattagcctgcagattcaggaacaggcaaggggctggagagccatggaaa

SEQ ID NO: 20260 - DNA, 201 bp, Homo sapiens; identical to SEQ ID NO: 2635

SEQ ID NO: 20261 - DNA, 201 bp, Homo sapiens
tccttggacaaatcaactaaccaccttaagcttcagtctcctcacttataactgaggataatcttgcatcatagggtagttgtaggagtatgagaacatgyatgtagaagagcttggcatggtgcctgggcatgtggtcaccatgtcatatattttagctattgttatgatctttgtgtttcattctttgtagactatata

SEQ ID NO: 20262 - DNA, 200 bp, Homo sapiens
ggtggagggaggagttggggctctgagggatggaccacaagctaagcagggctctggtactcactcacataggctggagggcagcatgcggaccctggtygggctcctgaccagcaaccaggccctgctgcagcttgaggcggctcggtgcctgcatgagctctctcactccgagcagtccactgttgctgaggcctgcc

SEQ ID NO: 20263 - DNA, 201 bp, Homo sapiens
tcacgcaggcccagctttgccccgactcctcgacttgctgcggccgccgccatccttgttaatatcgaagtcgccaattccaggtcttcaggccaagtgcyccggtctgaccaaccgcggaccctaaagcctagcccataggctgcatgaggcaggggcggggtaaagcttggccaatgatataaaagtattgtaggaccg

SEQ ID NO: 20264 - DNA, 201 bp, Homo sapiens
aactaatgaagattaaatgagttaggcagggaagcactcagcacagggcccagctctatgtgcaaaattactgagattctcacacactacctggactgacwctggctacacgttatttggagaaactatattgactaacttctctcctgtctgaagcccattcttaactacaaaaacgtcagctcctggtccctacgcagg

SEQ ID NO: 20265 - DNA, 201 bp, Homo sapiens
ctccaagaagttctacatctgtgtctctagtgcccccatcaatagtcttctgctggtggatgagaatgttctggccactggggatgacacaggtggtatcygtctctgggaccagcggaaggagggccccttaatggatatgaggcaacatgaagagtacatcgcagacatggctctggatccagccaaaaagctgctgct

SEQ ID NO: 20266 - DNA, 201 bp, Homo sapiens
gtggtgggagtacaggcgtgagccaccgtgcctggcccccgataaaatcatctttgataacatccccaattccagtccatttctttttttttttcttttcytttcttttctttctttttttttttttttgagacggagtctcactgttacccaggctggagtgcagtgatgcaatcttggctcactgcaacctctgcctcc

SEQ ID NO: 20267 - DNA, 201 bp, Homo sapiens
tccccatggcacttggggcacttggcgcattattgtagcttctgagcttaagccgggtgtgtgtgtgtgtgtgtgtgtgtgtgtgtgtgtgtgtgtatgtrtgtatgtgtgacgcttgagcccggagaagccacagggtcctaagtgaggccgacagctccaaactccgtccccagtcctcactcctactccaagtgatga

SEQ ID NO: 20268 - DNA, 201 bp, Homo sapiens
gtgtatgtgcatggaggtgaagggtaaggaccaggaggtccccactgggacagagatgctccaagaagttctacatctgtgtctctagtgcccccatcaayagtcttctgctggtggatgagaatgttctggccactggggatgacacaggtggtatccgtctctgggaccagcggaaggagggccccttaatggatatga

SEQ ID NO: 20269 - DNA, 201 bp, Homo sapiens
cttggctcatgtggtctcatgcccaccccagcccatctttctagattcagtcatgctactctcctgctacaaggaaccctcctcattccttatctctgctscctccagtatctggcccttgctctctgccaggcaaattctactcttgtatgatccaacccacatgtcaccaccttagctttccagggctctcttctccct

SEQ ID NO: 20270 - DNA, 201 bp, Homo sapiens
ttctagaatgttctagactcctgactttcttgaatggtcttgattcattttgatgcagggcttttgtgcaggctgttttatctctggaatatcctttcacrgcacttcgtttccctcccttcacctactgtattgtaattcagtctttagtttgttaagtgaatgaatgaataaatgaagagatttctgctgagtggttta

SEQ ID NO: 20271 - DNA, 201 bp, Homo sapiens
gatcaaaatacatttggtatgcctagaattaatacaataggtctcaaacacatctaggaagcccaagtccaaatagaattttggctgattctggatggccrcaatgggttgtttcagggaagctttcgggggcactgtaggcatttattattaactacggtgagcaatgtattgcatgggtccagcctcagctgggagccc

SEQ ID NO: 20272 - DNA, 201 bp, Homo sapiens
atccagtcctaactatagttgtttctctgggcctggctaacctatataggttccatgtcagaaacttcatcctcttgttggggaatgcaccctctggagtrggctgacccatgaggctgtgggaattgagtcttaggacacagagaccaggtgtgttgaattttcttccctgcccctaggctgttcaggtcttcctgcagc

SEQ ID NO: 20273 - DNA, 201 bp, Homo sapiens
gtttctggcccacatcctcagtcacccctgttctgaagccacacagtggctcccttcccatccagtcctaactatagttgtttctctgggcctggctaacytatataggttccatgtcagaaacttcatcctcttgttggggaatgcaccctctggagtaggctgacccatgaggctgtgggaattgagtcttaggacaca

SEQ ID NO: 20274 - DNA, 201 bp, Homo sapiens
ccctggatctgattgagcctctcttacagctgttgccagtatctaacgtggtgagcgtaatggtatgtattggggttacttgaatccaagatctggtagtyggattgtatgggacagcagtcctgagccctcagatgtacccttagttgagagccagcaggtggtggtgtgtggcctcagggcccaaccaatctaggtgtg

SEQ ID NO: 20275 - DNA, 201 bp, Homo sapiens
ctcactgaaaatggagaaatgagatggtaaactttttgggcttagaggtgtagaagcaggaactcttaggtaggtgggaaggctgctctgtctagttggtytctgcactcaatgcaacccaggctgggtctggagtcatttaccctccttgccctctccccagcttttcctactcttgccaagagggagaaaccaaggagc

SEQ ID NO: 20276 - DNA, 201 bp, Homo sapiens
cattaattggagtttgtttaaaactttgttagacaaaagggttctatgccttaaaaatgttttttaagtgtgttgtggggaggaggttgtgagagcctcasttcaaggtctgggctgagttctcttttctcctaggacctgggtctaccaaggagttgatcaagtccatcaatgaaaagtttgctgggtctgctggctggg

SEQ ID NO: 20277 - DNA, 201 bp, Homo sapiens
agaaaaatgggagtactggagcattggcaaggagacagttacagccagattctgtctccttaacctacctaagaagcagtggtcaggtctgaagcatgagkgatggagagtgggtagcttatgtcctatttatttattttttttaaaagagattttttggtgaaaaccagaaaacctagacagattctaaaaaggctctaa

SEQ ID NO: 20278 - DNA, 201 bp, Homo sapiens
accatgcttggctaatttttgtattagtagagacagggtttcgctatgttggccaggctggtcttgaactcctgacctcaaatgatctgcccgtctcggcrgcccaaagtgctgggattacaggcgtgagccactgcgcctggccctcctactcttttttaaatgcatttatacacatacatgcatatctgaggaaaacac

SEQ ID NO: 20279 - DNA, 201 bp, Homo sapiens
aggctcagttctgcctacctggaactcactggcaattaagcatgtattcattctgccctttttgaggatctgctctgaggcaggcacttgggggtattccrtaaacagtactcacctcaaagttgtttacaggctggtgcctctcccccacctccattttgatcttgcctctttttcagcacgtactctcaatgtactgta

SEQ ID NO: 20280 - DNA, 201 bp, Homo sapiens
agacacttccggccccgccccccgaggcggaagcggagtgccaggctactcctcccgcagtgtgggtggttccgaggctgactaccctgcggcggcgcggytcgcagtccttctcagcatggaccgcacttgtgaggagaggcccgctgaggatgggagcgacgaggaggacccagactccatggaagccccaacccggat

SEQ ID NO: 20281 - DNA, 201 bp, Homo sapiens
aaagtttgctgggtctgctggctgggaaggcacagaatcatatcctttattttaatacgttcctgggttccagagaactggtctctttactccaacccccmctgcctccctgctccctcctaccctgcccctctccttcccttttacgctgaattttgacagaatgaaaccatcccttgttccttcccagagcacccataa

SEQ ID NO: 20282 - DNA, 201 bp, Homo sapiens
gcattaagagctggagaggatggtgaagttcagtggaaattaactgaggagtatgttcctgactcctctctttaaatttcagggaagctggaagagaagaracctcctgaggctgacatgaagtatgtatcctagcccctggcatctgatcagagggagggggtctgtacatttcttgtgtctggcattttggggaggtgc

SEQ ID NO: 20283 - DNA, 201 bp, Homo sapiens
catttcttgtgtctggcattttggggaggtgctgacatgagaatctggagaaatggtcagggggagtgaaggtgtatgtgtgaatttggccagctagtgakctccattttcccagtatttttgaagacattggggattacgtaccctccacaaccaagacacctcgggacaaggagcgggagagatatcgggaacgggagc

SEQ ID NO: 20284 - DNA, 201 bp, Homo sapiens
gtcggggcaaagctgggcctgcgtgagattcgcatccacttatgtcagcgctcgcccggcagccagggcgtcaggtgaggcgcggcgtggtgaggcgggcrggcttcgggacgccagggtcacgacctcgacctccctgaagttgagggaagcccccgcccacagcacgcgcggcgctctctccggccccgcagggacttc

SEQ ID NO: 20285 - DNA, 201 bp, Homo sapiens
ggatcacccgaggtcaggagttcaagaccagcatggccaacatggtgatatcccatctctactaaaaatacaaaaaaattagctgggcgttgtggtgggcrcctgtaatcctagctactcaggaggctgaggcaggaaaatcgcttgaacctgggaggcggagtttgcagtgagccgagatctaggtattacactccagcc

SEQ ID NO: 20286 - DNA, 201 bp, Homo sapiens
gctactcaggaggctgaggcaggagaattgcttgaacccaggaggtggaggttgcagtgagtggagatcgtgccaccacactccagcctgggtgacagagygagactccgtctcaaaaaaaaaaaaaaaaaaagagagagaatgggctcccagctgaggctggacccatgcaatacattgctcaccgtagttaataataaa

SEQ ID NO: 20287 - DNA, 201 bp, Homo sapiens; identical to SEQ ID NO: 2657

SEQ ID NO: 20288 - DNA, 201 bp, Homo sapiens
attgggtggttaccatatgccaggcattggtgctaaatgcctacatgtactttcacagctgatcctcatgacatcctgataaaagttattattgctactgkatctccattctatctgtggattagagaggctaagcaaatgtctaggttatccaccaagaaactagcgaagatgagattaaaatatagataggcctattcc

SEQ ID NO: 20289 - DNA, 201 bp, Homo sapiens
cccacctcagcctcccaaagtgctgggattataggtgtaagccaccacgcccgaccagatatgccatgccacttttaatgcatcagagtgttaactaccaraaagtttgataaatcaagtgtgagtgagaatttgggaaggggactctctcatataatgctgatgagaatgtaaaccagtataaccaatttgaagggcaat

SEQ ID NO: 20290 - DNA, 201 bp, Homo sapiens
ttgccacagccccagaaaccccaagaagtctccttgaggatttttagaaagacctagaatactgatcaaagtaacactttcaatcaagcagaaatccacaycaatatttgtaggtgggcagttctcaaactttagagagtatcataaatacctgagggactattaaaagtcattctacttagtagaaagaaataggaagga

SEQ ID NO: 20291 - DNA, 201 bp, Homo sapiens
tcaacccacactgctttgcgttcgcagcctttccgcttcctgtttttccctccgaccaaccccgagcgcaaagaaattgacctcgcagcggtcctacaatrcttttatatcattggccaagctttaccccgcccctgcctcatgcagcctatgggctaggctttagggtccgcggttggtcagaccggagcacttggcctg

SEQ ID NO: 20292 - DNA, 201 bp, Homo sapiens
ttggtcagaccggagcacttggcctgaagacctggaattggcgacttcgatattaacaaggatggcggcggccgcagcaagtcgaggagtcggggcaaagstgggcctgcgtgagattcgcatccacttatgtcagcgctcgcccggcagccagggcgtcaggtgaggcgcggcgtggtgaggcgggcgggcttcgggacg

SEQ ID NO: 20293 - DNA, 201 bp, Homo sapiens
attattttaattggtacactaacaaagactcctctcttgatcaaattaaagtcagactcctttaaagctctcttctgactagggctcttccttggcctgcygacctcagttttaaaaaggaatcctaagtcagttcacagaaagttttcccactcttgatatccaatccaacttgatatctaatcaagttcctcttctccc

SEQ ID NO: 20294 - DNA, 201 bp, Homo sapiens
tctaatcaagttcctcttctccccaaggaagactttattgaagactactgtaacaagagtcaagaccattgtaatagagtagagagactgaacttaattcygaatacaacagggacaagtgagaatttatagaaaattactaaaagcaacttggttaggtatgggggtggagcggtggttgatttctttgttaaaactgtg

SEQ ID NO: 20295 - DNA, 201 bp, Homo sapiens
ttgcagtgagccaagattgcatcactgcactccagcctgggtaacagtgagactccgtctcaaaaaaaaaaaaaaagaaagaaaagaaaagaaaagaaaaraaaaaagaaatggactggaattggggatgttatcaaagatgattttatcgggggccaggcacggtggctcacgcctgtactcccaccactttgggaggca

SEQ ID NO: 20296 - DNA, 201 bp, Homo sapiens
tgtaagaaggaagaggttacctgcattccagagtatcaagaaacatctcccagaatttcacctgacatcttcacctaccagctccagtcctgcatcctcgsttttctggacagccccagccaagtccaacagcagcaaccccagagtagacagagccccatggccaatgagcagaggattgctgacctggctgggcaacag

SEQ ID NO: 20297 - DNA, 201 bp, Homo sapiens
ggagctgaagaaggcgaatcccgacctacccatcctaatccgcgaatgctccgatgtgcagcccaagctctgggcccgctacggtgagtgcgggacgccargggtctggggctccggtaggggaacaagggtttgagaagagaagggaccgcccaaggtcgtgcagaaacccgtggagaaactagaactcggactttagcc

SEQ ID NO: 20298 - DNA, 201 bp, Homo sapiens
ggcgtggtgaggcgggcgggcttcgggacgccagggtcacgacctcgacctccctgaagttgagggaagcccccgcccacagcacgcgcggcgctctctcsggccccgcagggacttcattgagaaacgctacgtggagctgaagaaggcgaatcccgacctacccatcctaatccgcgaatgctccgatgtgcagcccaa

SEQ ID NO: 20299 - DNA, 201 bp, Homo sapiens
caacatttgtagcatgtgctgagggagagtggaggccaagatggagctgctggcagaagcagggctgtaagtaggaaccacgaagatgccagtggttcttrccaaaccctgatagcaggtgggagagtgtccaaacccaaagccctgcccagatgggaaagtgtccaaacccaaagcccttcctagccagacacatgaatt

SEQ ID NO: 20300 - DNA, 201 bp, Homo sapiens
gccaagatggagctgctggcagaagcagggctgtaagtaggaaccacgaagatgccagtggttcttaccaaaccctgatagcaggtgggagagtgtccaawcccaaagccctgcccagatgggaaagtgtccaaacccaaagcccttcctagccagacacatgaatttaaaatgtgcaacagctttggaaatcattcaggc

SEQ ID NO: 20301 - DNA, 201 bp, Homo sapiens
aggcaagagaatcgcctgaacatgggaggcggaggctgcagtgagctgagatcgcgctactgcactccagcctgggcaacaagagcaagactctgtctccaaaaaaaaaaaaagggggtgggggaaagggggttggggggccaggtgcggtggctcacgcctgtaatcccagcacttcagcaggccgaggcgggtggatca

SEQ ID NO: 20302 - DNA, 201 bp, Homo sapiens
gcctcaagctgcagcagggcctggttgctggtcaggagcccgaccagggtccgcatgctgccctccagcctatgtgagtgagtaccagagccctgcttagyttgtggtccatccctcagagccccaactcctccctccaccacaccatccacactgaccggatgaaggtttgctgtgtttcagggtgctgcaagcctcgac

SEQ ID NO: 20303 - DNA, 201 bp, Homo sapiens
tacaaaaaattagccgggcgtggtggcgggcgcctgtagtcccagctactcgggaggctgaggcaggagaatggcatgaacctgggaggcggagcttgccrtgagccaagatcgtgccactgcagtccagcctgggtgacagagcgagactccatctcaaaaaaaaaaaaaaaaaagaacagccctttgtgggtggcaaat

SEQ ID NO: 20304 - DNA, 201 bp, Homo sapiens
aaaaatacaaaaaaattagctgggcgttgtggtgggcgcctgtaatcctagctactcaggaggctgaggcaggaaaatcgcttgaacctgggaggcggagwttgcagtgagccgagatctaggtattacactccagcctgggcaaaaagagcaagactctgtctcaaaaaaataaaaaaaagaaaagaatcagtctgaaac

SEQ ID NO: 20305 - DNA, 201 bp, Homo sapiens
atattaggactcaataagaaatgaaaaaggaacaagtaaaaatcatgattaaattaacagaaatcagggaaatacaaattaaaacaaagatatgacactgtttttttttttttgagacggagtctcactgtcacccatattggccaggctggtcttgaactcctgaccttgtgatccacccacctcggcctcccaaagtgc

SEQ ID NO: 20306 - DNA, 201 bp, Homo sapiens
acaggaacagcagatgcagcagctccaaactctggcctactacttcagtgtcagaaaaggctagtgtgtgcagcaaggcgggaagcaggggccctggccayagccgctggcagtaagcaggacccttttctgcaacattgcacagaactgtgagcacctgcagatagacacatatatagtctacaaagaatgaaacacaaa

SEQ ID NO: 20307 - DNA, 201 bp, Homo sapiens
tcaagaccagcctggccaacatagcgaaaccctgtctctactaatacaaaaattagccaagcatggtggggcatgcctgtaatcccagctactggggaaamtgaggcagaagaattgcttgagcccaggaggcaaaggttgctgtgagcagaaataatgccattgaactccagcctgggcaacgggaggaaaagatatgcc

SEQ ID NO: 20308 - DNA, 201 bp, Homo sapiens
ggcaggcctcagcaacagtggactgctcggagtgagagagctcatgcaggcaccgagccgcctcaagctgcagcagggcctggttgctggtcaggagcccraccagggtccgcatgctgccctccagcctatgtgagtgagtaccagagccctgcttagcttgtggtccatccctcagagccccaactcctccctccacca

SEQ ID NO: 20309 - DNA, 201 bp, Homo sapiens
acagccgctggcagtaagcaggacccttttctgcaacattgcacagaactgtgagcacctgcagatagacacatatatagtctacaaagaatgaaacacamagatcataacaatagctaaaatatatgacatggtgaccacatgcccaggcaccatgccaagctcttctacatacatgttctcatactcctacaactaccc

SEQ ID NO: 20310 - DNA, 201 bp, Homo sapiens
tatatagtctacaaagaatgaaacacaaagatcataacaatagctaaaatatatgacatggtgaccacatgcccaggcaccatgccaagctcttctacatrcatgttctcatactcctacaactaccctatgatgcaagattatcctcagttataagtgaggagactgaagcttaaggtggttagttgatttgtccaagga

SEQ ID NO: 20311 - DNA, 201 bp, Homo sapiens
tagctcctccaccccgcagaccgtgggcctgaggcggccctgccgtcggctccacatggtggagcaggaggaggaaagccgaaggaaacagcagccacaaygctcccaggggcgtagaagatggcaccgactgcgcagcctcagcacagggcgggaacaggcggggagggcgcgaggagcggggtgggtgctgggtgaggg

SEQ ID NO: 20312 - DNA, 201 bp, Homo sapiens
aaaccccatctctactaaaaatacaaaattagccgggcgtagtggaacatgcctgtaatcccagctactcggaaggctgaggcaggagaattgcttgaacycgggaggcggaggttgtggtgagccgagatcgcaccactgcattccagcctgagcaacaagagcgaaactcagtctcaaaaaaaataaaaagatgatttt

SEQ ID NO: 20313 - DNA, 201 bp, Homo sapiens
cataataactgtgaccagagaaaggcaaatgtataaggctcatcagctgctacctcaaggtcaacagaactgttcctgcttgcttccctacatctccaacstactctctatggggaaaagctcatgtctgtcctgatagaactgctggccacctcttcgtagttactcaaaatcagaactacaacttcttccagcttatag

SEQ ID NO: 20314 - DNA, 201 bp, Homo sapiens
cacttggagtaggagtgaggactggggacggagtttggagctgtcggcctcacttaggaccctgtggcttctccgggctcaagcgtcacacatacatacayacacacacacacacacacacacacacacacacacacacacccggcttaagctcagaagctacaataatgcgccaagtgccccaagtgccatggggaagaa

SEQ ID NO: 20315 - DNA, 201 bp, Homo sapiens
tccagcctatgtgagtgagtaccagagccctgcttagcttgtggtccatccctcagagccccaactcctccctccaccacaccatccacactgaccggatsaaggtttgctgtgtttcagggtgctgcaagcctcgacgaaggctgaccagagccccctctctctccttttcctctgtcccccgctgggcttgccgcagga

SEQ ID NO: 20316 - DNA, 201 bp, Homo sapiens; identical to SEQ ID NO: 2659

SEQ ID NO: 20317 - DNA, 201 bp, Homo sapiens
agatgcagctagagtttaacaggattgagcctttacatttattccccttcctagaatgcacttacccctctaagactggcatggcaatgtattgcaaaatsaaattttcctatcatgttgcctaacacattgtaggtatgcaataaatgtttatacatactgaataacaggattttaatcacagcttttaactatatggtg

SEQ ID NO: 20318 - DNA, 201 bp, Homo sapiens
ggaggcagaggttgcagtgagccaagattgcatcactgcactccagcctgggtaacagtgagactccgtctcaaaaaaaaaaaaaaagaaagaaaagaaargaaaagaaaaaaaaaaagaaatggactggaattggggatgttatcaaagatgattttatcgggggccaggcacggtggctcacgcctgtactcccaccac

SEQ ID NO: 20319 - DNA, 201 bp, Homo sapiens
tcatcacttggagtaggagtgaggactggggacggagtttggagctgtcggcctcacttaggaccctgtggcttctccgggctcaagcgtcacacatacayacatacacacacacacacacacacacacacacacacacacacacccggcttaagctcagaagctacaataatgcgccaagtgccccaagtgccatgggga

SEQ ID NO: 20320 - DNA, 201 bp, Homo sapiens
cctgcgtagggaccaggagctgacgtttttgtagttaagaatgggcttcagacaggagagaagttagtcaatatagtttctccaaataacgtgtagccagwgtcagtccaggtagtgtgtgagaatctcagtaattttgcacatagagctgggccctgtgctgagtgcttccctgcctaactcatttaatcttcattagtt

SEQ ID NO: 20321 - DNA, 201 bp, Homo sapiens
actgaataacaggattttaatcacagcttttaactatatggtgccctgggaatgacgggaggaggtggaggagagtgaccaccttaagcagattggttctsagagtagatatctgtgagacacagtagacattagacatgcactaataattggagaaggaaaaaagcttctccttccaaaagccagtagactacaggagga

SEQ ID NO: 20322 - DNA, 201 bp, Homo sapiens
tgccttctcacagcctcactctccacgatcaggttacccagtgtatacagacacagctcctgagaacaggcaacaaaagcactgggcttggcctgtttcawgccaggctgcgtgtggggagatggggaggggaggtgatggggacgctggagcagctatccttgcggctcacaagagggtggggagatgatgggtgtagcc

SEQ ID NO: 20323 - DNA, 201 bp, Homo sapiens
agcttgtggtccatccctcagagccccaactcctccctccaccacaccatccacactgaccggatgaaggtttgctgtgtttcagggtgctgcaagcctcsacgaaggctgaccagagccccctctctctccttttcctctgtcccccgctgggcttgccgcaggaactgctgcacctggagttcagggcagggaaaggag

SEQ ID NO: 20324 - DNA, 201 bp, Homo sapiens
taatttaatcagtctcttacgtgtcagatcctatgcaaaaatttgagatatagtagtgaacaatacagaacaaaagttagaacagcgacagtgtcaacacratgtaataagtgctgaaataggaaactacaagaagctgtgggagcacaaagcagaggaccctaatcctgcgctggaggatcagagaagacttccggaaga

SEQ ID NO: 20325 - DNA, 201 bp, Homo sapiens
agagtctcaaaaaaaaaaaaagaaaagaaaagaaaaaaaataggctctcaagacagaataccaaaagaaacgaacgttagacgtagcgaatgccaagggcytgagacacaaatccgatatatcgttgcaggaactaaaaagaggacggtgggtaggatgagaaaactgataaaatttgagttaggaagaggctagaccatg

SEQ ID NO: 20326 - DNA, 201 bp, Homo sapiens
ctaggaaaaaaagtctctcatccctgacctcgagtgacccaagccagcagtgtcacaatctactcagcaaacacaacttccccacccacaatacgctctaratgaaagttcaaaacaatcccgaactgcgggaagcgccatgatgccgtttcactattaatgcggatcccactgatgagagctgccaaaaacgcttgaagc

SEQ ID NO: 20327 - DNA, 201 bp, Homo sapiens
actcaggaggcagaggttgcagtgagccaagattgcatcactgcactccagcctgggtaacagtgagactccgtctcaaaaaaaaaaaaaaagaaagaaargaaaagaaaagaaaaaaaaaaagaaatggactggaattggggatgttatcaaagatgattttatcgggggccaggcacggtggctcacgcctgtactccc

SEQ ID NO: 20328 - DNA, 201 bp, Homo sapiens
gggctcccagctgaggctggacccatgcaatacattgctcaccgtagttaataataaatgcctacagtgcccccgaaagcttccctgaaacaacccattgyggccatccagaatcagccaaaattctatttggacttgggcttcctagatgtgtttgagacctattgtattaattctaggcataccaaatgtattttgatc

SEQ ID NO: 20329 - DNA, 201 bp, Homo sapiens
gctgcaggaagacctgaacagcctaggggcagggaagaaaattcaacacacctggtctctgtgtcctaagactcaattcccacagcctcatgggtcagccyactccagagggtgcattccccaacaagaggatgaagtttctgacatggaacctatataggttagccaggcccagagaaacaactatagttaggactggat

SEQ ID NO: 20330 - DNA, 201 bp, Homo sapiens
tgtgtcctaagactcaattcccacagcctcatgggtcagcctactccagagggtgcattccccaacaagaggatgaagtttctgacatggaacctatatargttagccaggcccagagaaacaactatagttaggactggatgggaagggagccactgtgtggcttcagaacaggggtgactgaggatgtgggccagaaac

SEQ ID NO: 20331 - DNA, 201 bp, Homo sapiens
acatcttcacctaccagctccagtcctgcatcctcggttttctggacagccccagccaagtccaacagcagcaaccccagagtagacagagccccatggcyaatgagcagaggattgctgacctggctgggcaacaggaagcaagcagtccctaggtatatagtcaattccacctttaagaagagaagcagttgcctaggc

SEQ ID NO: 20332 - DNA, 201 bp, Homo sapiens
cacacctagattggttgggccctgaggccacacaccaccacctgctggctctcaactaagggtacatctgagggctcaggactgctgtcccatacaatccractaccagatcttggattcaagtaaccccaatacataccattacgctcaccacgttagatactggcaacagctgtaagagaggctcaatcagatccaggg

SEQ ID NO: 20333 - DNA, 201 bp, Homo sapiens
ggaggctgaagcaggtggatcacctgaggtcaggagttcaagaccagcctggccaacatggtaaaaccccgtctctactaaacatacaaaaattagccggrtgtggtggcgggcacctgtaatcccagctactcaggaggctgaggcaggagaattgcttgaacccaggaggtggaggttgcagtgagtggagatcgtgcc

SEQ ID NO: 20334 - DNA, 201 bp, Homo sapiens
aggctgaagcaggtggatcacctgaggtcaggagttcaagaccagcctggccaacatggtaaaaccccgtctctactaaacatacaaaaattagccgggtrtggtggcgggcacctgtaatcccagctactcaggaggctgaggcaggagaattgcttgaacccaggaggtggaggttgcagtgagtggagatcgtgccac

SEQ ID NO: 20335 - DNA, 201 bp, Homo sapiens
cttcagaacaggggtgactgaggatgtgggccagaaacctatacctctggctgatacaggaacagcagatgcagcagctccaaactctggcctactacttyagtgtcagaaaaggctagtgtgtgcagcaaggcgggaagcaggggccctggccacagccgctggcagtaagcaggacccttttctgcaacattgcacaga

SEQ ID NO: 20336 - DNA, 201 bp, Homo sapiens
gtgttttcctcagatatgcatgtatgtgtataaatgcatttaaaaaagagtaggagggccaggcgcagtggctcacgcctgtaatcccagcactttgggcygccgagacgggcagatcatttgaggtcaggagttcaagaccagcctggccaacatagcgaaaccctgtctctactaatacaaaaattagccaagcatggt

SEQ ID NO: 20337 - DNA, 201 bp, Homo sapiens
gtgccatggggaagaaataacggatggcctgagccttactatctcgctccggcattttgttatcgttctttcgctgtcaccaacaatcgagtctccaacarcaacaccgcagcgacaagctctttcccacagtgcacctcagaatcaacccacactgctttgcgttcgcagcctttccgcttcctgtttttccctccgacc

SEQ ID NO: 20338 - DNA, 201 bp, Homo sapiens
tgagggagagtggaggccaagatggagctgctggcagaagcagggctgtaagtaggaaccacgaagatgccagtggttcttaccaaaccctgatagcaggygggagagtgtccaaacccaaagccctgcccagatgggaaagtgtccaaacccaaagcccttcctagccagacacatgaatttaaaatgtgcaacagcttt

SEQ ID NO: 20339 - DNA, 201 bp, Homo sapiens
tctgttgcccgggctggagtgcagtggtgtgatctcagctcactgcaaccttcagctcctgggttcaagtgattctcatgcctcagcctccccagtagccrgggttacaggcatgtgccaccacgcctggctaattttttgtatttttagtagagacggagtttcaccatgttggccaggctggtcttgaactcctggcct

SEQ ID NO: 20340 - DNA, 201 bp, Homo sapiens
catgcagcatcagggtccactccttcagcacccccttctgcggggcgctgccgacaaatcccagctccagggtccaggtgcctcgggcgtcttccccccaygtgtgagtggtcatgaaaggccacttgtcaaagcccaccttggagtcgtcatcccttggacgccggctcagcaaaatggacttggtgcccataggggaag

SEQ ID NO: 20341 - DNA, 201 bp, Homo sapiens
catttcttgggaatggatgtgcattgggactggggatgagaagcaatctctgggtaggtcactttggtaatgtctagttgggaatggagtggtgacttttrggattgaccataaccttcgggttgcatgttaaatggtctcagggactgcttagttgccgagaaggtgactgtgtgctttcctcacagaggtcttctctca

SEQ ID NO: 20342 - DNA, 201 bp, Homo sapiens
tggctaagaatcagagatgagacagccacttttgctagaaataagaccacagcccaccatacatgaagtttctgtgaattaactataaggtccttcgctaygtgaaaagagttgttctagtgctgagatgacttcttatgatggaaggagagaaatatggattagactaaacctgagatgaccttcaggcataccacagct

SEQ ID NO: 20343 - DNA, 201 bp, Homo sapiens
gaccttcaggcataccacagctaagggtgttttggtagatagtgatagtgcctcattcagatccccttccctgggctgtgcaccaccccagctactgtggrcattggctgctaactgtggtcttctgcttgtgtctctgaagaatcaccctcaggagctatggaaacctggctgaaataagaatacataaaaccaatgctc

SEQ ID NO: 20344 - DNA, 201 bp, Homo sapiens
tttttttttcaggatatcacccatttgaatgacagaaataaagaatttagagtcacacataggacatggatgttgttgggaacgctatatttggggcataragtaaaaaagattgtttccattgtaatgaaaataatcattgacagtgagtgaagcttcagattaagaagacggaattgcctgtacgggtgatggaattgc

SEQ ID NO: 20345 - DNA, 201 bp, Homo sapiens
gaagcccacaatattgtcaaagaatgtgcagacggggttttaggtggtgaagattataattacaacaacatcaaccagtggaccgcaagcatagtggaatwatcgttaacacatctgcctaagctgggaaaagcttataaatgtattgtgaaatgtgcagtggtccagaagagcgcatatggctttcgcacagcagctcct

SEQ ID NO: 20346 - DNA, 201 bp, Homo sapiens
gaataaacccatttggattagaattctgcttctatgtttactgctcatgagagcttgggcaggttatttaagcactcgaagtttcactgtcattgtggatrgttcttttttttttttttttttttttgagacggagtcttgctctgtcgcccaggctggagtgcagtggcgccatctcggctcactgcaagctccgcctcc

SEQ ID NO: 20347 - DNA, 201 bp, Homo sapiens
tagagaaggtcacaaggtgttagagaagacagaaatccatgccaatatgggagaaaagaaagcaaatggggttttcagatttctctcttaaagtggccacyttcagggaattgaacctagtgctctgtgttgctggcttgaaggaaaggtgctccaggctaagctctctgctcccacaggaagggagatggtgcctggaga

SEQ ID NO: 20348 - DNA, 201 bp, Homo sapiens; identical to SEQ ID NO: 2663

SEQ ID NO: 20349 - DNA, 201 bp, Homo sapiens
tctttagatctctctttggcaatttttaaattatctgttcctagaatggatgaaagtattttcatgtacaatatagcacatctcacataatttctggagcrtaatgttttattgttgagcctcctaatttacaacatgtcttttgaaatttgcttataaaattttgtcacagggagcaacaatgttaacctaattattatt

SEQ ID NO: 20350 - DNA, 201 bp, Homo sapiens
gcttcaggtggcggaaagggcaagggctttggggttgatcaatcagacctgggtttagttcccacactggctgtgtgagcctgagtaagttacttatctcyctctttttttttttttttttttttgtcttttgagacagggtcccactctgttgcccgggctggagtgcagtggtgtgatctcagctcactgcaaccttca

SEQ ID NO: 20351 - DNA, 201 bp, Homo sapiens
ggcagcttcaggtggcggaaagggcaagggctttggggttgatcaatcagacctgggtttagttcccacactggctgtgtgagcctgagtaagttacttayctctctctttttttttttttttttttttgtcttttgagacagggtcccactctgttgcccgggctggagtgcagtggtgtgatctcagctcactgcaacc

SEQ ID NO: 20352 - DNA, 201 bp, Homo sapiens
gtgcacacacacatctgaaacaaatatttcaggaaacaatacttatccttattatgcatgattattctattctattctattctattctattctattctatyctattctattctattctattctatcctatcctatcctgtgattttcttctctcctactgtattctaaattactctattttattaaaaactgacctcctaa

SEQ ID NO: 20353 - DNA, 201 bp, Homo sapiens
ggagtatgagatttctcttccattatattacttggaaatcaaagcccacatctgtgtgtgtaaagctgtaaaaaaaaaaaaatactcctgtcgcctctcastcagatcagattgagacacctcaaagtgacttaggaaaagggacattcttgtttgaaaagctagtaaactactcttcaccaggtgtgttgccaggcttgt

SEQ ID NO: 20354 - DNA, 201 bp, Homo sapiens; identical to SEQ ID NO: 2662

SEQ ID NO: 20355 - DNA, 201 bp, Homo sapiens
aaaatactcctgtcgcctctcactcagatcagattgagacacctcaaagtgacttaggaaaagggacattcttgtttgaaaagctagtaaactactcttcwccaggtgtgttgccaggcttgtcttaattttttttctcttttgggtagctatgtgaggagccccagaaaattggggctgggatgaactctatacaaactg

SEQ ID NO: 20356 - DNA, 201 bp, Homo sapiens
ctgagggtgattcttcagagacacaggcagaagaccacagttagcagccaatgcccacagtagctggggtggtgcatagcccagtgaaggggacctgaacragaggcactgtcaccatctactgaaacccccttagccatggtgtgcctgaaggtcatctcaggtttggtccaatctgtatttctctccttccatcataag

SEQ ID NO: 20357 - DNA, 201 bp, Homo sapiens
tcttctgcttgtgtctctgaagaatcaccctcaggagctatggaaacctggctgaaataagaatacataaaaccaatgctcctgcccccaagcgggacaamtgtgtggtggcgttgatgctccaaagcccccggtgggtcaggccacatgcacatacctggttccacatcctttcttggctacttctgcccctcccaaatc

SEQ ID NO: 20358 - DNA, 201 bp, Homo sapiens
tcccaggagccccacgctcatggggaaggccttagcgactaagactaagggagggaaaatgacagcgaggctgagaaggggaaactagaacacaggccacygattgcccaggctaaaggtcttatttgagagtgagtggtgtgcatttgtgatagagggtgcaagggagagatggagggagactgaaagacatattccatg

SEQ ID NO: 20359 - DNA, 201 bp, Homo sapiens
ttctttgacctattagagataacatgcaaaatcgtagtgttccagtcttataaaagacaaacttggggttgtcggggtggcttgtatctttattttattgkgtatcattgcaagtaagtgtttaaactgccttgtgtcaagaaataggtgttgcttcccaggaggccctggggaatgcttcttgtgttatgaatcttcaac

SEQ ID NO: 20360 - DNA, 201 bp, Homo sapiens
ttcaggtggcggaaagggcaagggctttggggttgatcaatcagacctgggtttagttcccacactggctgtgtgagcctgagtaagttacttatctctcyctttttttttttttttttttttgtcttttgagacagggtcccactctgttgcccgggctggagtgcagtggtgtgatctcagctcactgcaaccttcagc

SEQ ID NO: 20361 - DNA, 201 bp, Homo sapiens
atgttgttgggaacgctatatttggggcatagagtaaaaaagattgtttccattgtaatgaaaataatcattgacagtgagtgaagcttcagattaagaaracggaattgcctgtacgggtgatggaattgctaggtgcctgcctgaaacgtggagcgaggacagaggcggagctggggagggagggcggtgggaaaggcg

SEQ ID NO: 20362 - DNA, 201 bp, Homo sapiens
tcggctcactgcaagctccgcctcccgggttcacgccattcctgcctcagcctctcgagtagctgggactacaggcgccctccactgtgcccgggtaattwtttatatttttagtaaagacggagtttcaccgtgttagccatgatggtctcgatctcctgaccttgtgatccgcctgcctcggcctcccaaagtgctgag

SEQ ID NO: 20363 - DNA, 201 bp, Homo sapiens
tcaggagctatggaaacctggctgaaataagaatacataaaaccaatgctcctgcccccaagcgggacaactgtgtggtggcgttgatgctccaaagcccscggtgggtcaggccacatgcacatacctggttccacatcctttcttggctacttctgcccctcccaaatccctcactctcctacagttctccctgaaaag

SEQ ID NO: 20364 - DNA, 201 bp, Homo sapiens
ttatcctacatatacattatatatgcacatatatataacgtgtctatatgtgtatatacatgtatactcatatacatagtatatttacaaatgtctagacyagcattggccaataggacactctacgatgatggaaatattctatatatataatctctagtatggtagccactggctacatgtggctaatgagcaattgaa

SEQ ID NO: 20365 - DNA, 201 bp, Homo sapiens
acaaacacacaaacttgtgttaagaatcacacattttcctagaagccttggacactggggtgtgcctgggggtcacaggccatgctggctttggagcatcwacgccaccacacagttgtcctgcttggaggcaggagcatgggttttatgtattcttatttcagccaggtttccatagcccctgagggtgattcttcagag

SEQ ID NO: 20366 - DNA, 201 bp, Homo sapiens
tcttttttttttttttttttttttgagacggagtcttgctctgtcgcccaggctggagtgcagtggcgccatctcggctcactgcaagctccgcctcccgsgttcacgccattcctgcctcagcctctcgagtagctgggactacaggcgccctccactgtgcccgggtaattatttatatttttagtaaagacggagttt

SEQ ID NO: 20367 - DNA, 201 bp, Homo sapiens
caaaaaactgtcagcacccaagtcttgtctcaggttggacttctgggacaacccagactgaggcaggaactcataatgtctttctttcaaagtgctaagtrctttgataaatagaagctgttgctaatatgactgccattactaccattaagaaaagctgggccgggcgcagtggctcacgcctgtaatcccagcactttg

SEQ ID NO: 20368 - DNA, 201 bp, Homo sapiens; identical to SEQ ID NO: 2660

SEQ ID NO: 20369 - DNA, 201 bp, Homo sapiens
ctcatttgctgcagaaaatgaagcatgctttctggaggtttaagagttcttaggtcaggcgcggaggctcacgcctgtaatcccagcactttgcgaggccraggggtcggaacacgaggtcaggagttcaagaccagcctgaccaacatggagaaaccccgtctctactaaaaacacaaaaattagtcaggcatggtggtg

SEQ ID NO: 20370 - DNA, 201 bp, Homo sapiens
ccatggtgaggttttctcctccccctgtagcagagtcaggtgggcatgaacttgtgcaggaagcctctgcagctcgggagtgctggtccacagtcccccaggtggcacagggccgagcacacgctgacctctcactcccatgctgcttccggcattgataccaggttttaacatttatttccaaattcacttaaacttcag

SEQ ID NO: 20371 - DNA, 201 bp, Homo sapiens
tttcaagaaggaaattcacaagccaacaaccaaagactgtaactgagtggcaatcattatagatattataaaacatcactaatcatttgtcaagtgcagtrgtcactattatcttaagaattcagaacaccagctgaattctaagaaaatttgttttctgtcccaatttgcacccaggacccttgtggactggagtcatag

SEQ ID NO: 20372 - DNA, 201 bp, Homo sapiens
acaagcagccaggcccagaatcgggctttccttctagagttgagccagaggggctttgggagtctttgagaagcacagttgcaggaagcagagaatgatamcaggaagagagaccctggctctgagttctgtgttgaatttgagctctcttttctttcctgtagtctagggcttcttgaaaagtttcaagaaggaaattca

SEQ ID NO: 20373 - DNA, 201 bp, Homo sapiens
gtgttagagaagacagaaatccatgccaatatgggagaaaagaaagcaaatggggttttcagatttctctcttaaagtggccaccttcagggaattgaacytagtgctctgtgttgctggcttgaaggaaaggtgctccaggctaagctctctgctcccacaggaagggagatggtgcctggagaggctgaagacaaagca

SEQ ID NO: 20374 - DNA, 201 bp, Homo sapiens
gtttatgtatgttgaatttgaatctgataagaacaacaacaacaggcagagagtctcttggccttctgtttcaagggcattcagttttttcccggctcacrggctctaggaaaagcagttggggaaactgcagctttgttttgcaggttttctggccacctctctggaggactctgaaatattcatccagaacctcaaggt

SEQ ID NO: 20375 - DNA, 201 bp, Homo sapiens
tccatgcaccttggaaagccgaaagacaggtgggagtagggacaaacacacaaacttgtgttaagaatcacacattttcctagaagccttggacactgggrtgtgcctgggggtcacaggccatgctggctttggagcatctacgccaccacacagttgtcctgcttggaggcaggagcatgggttttatgtattcttatt

SEQ ID NO: 20376 - DNA, 201 bp, Homo sapiens
agtgctgaaatgaatgttcaatttattttattcaattttaactaatctaatatgttattatataaccacttgtggctggttgcgtctgtactggacagtgsgggtctaaattgtttatgtatgttgaatttgaatctgataagaacaacaacaacaggcagagagtctcttggccttctgtttcaagggcattcagttttt

SEQ ID NO: 20377 - DNA, 201 bp, Homo sapiens
tcccaacacattaatgacatcaaactgtgggggagtatgagatttctcttccattatattacttggaaatcaaagcccacatctgtgtgtgtaaagctgtaaaaaaaaaaaaatactcctgtcgcctctcactcagatcagattgagacacctcaaagtgacttaggaaaagggacattcttgtttgaaaagctagtaaac

SEQ ID NO: 20378 - DNA, 201 bp, Homo sapiens
ataatctctagtatggtagccactggctacatgtggctaatgagcaattgaaacatagatcatgtgagtgctgaaatgaatgttcaatttattttattcarttttaactaatctaatatgttattatataaccacttgtggctggttgcgtctgtactggacagtgcgggtctaaattgtttatgtatgttgaatttgaat

SEQ ID NO: 20379 - DNA, 201 bp, Homo sapiens
gaaccaaggccatgaacctgggagggcttgctgaaacatacagtgcagttcattaatactctctggaggaactttacaaatatagacttaaacggtttcayggagtactgctgtattcccctctcccacccccggatactgatgctgaatcatgtatggagtgtccatcagctatggggatccagtgatggtggggttggt

SEQ ID NO: 20380 - DNA, 201 bp, Homo sapiens
cttgccagtggatggtattttcctgagggcagagtgaagaggagataggataagcagtggtgggtgcaccttacaagggattttgagggcagcttcaggtrgcggaaagggcaagggctttggggttgatcaatcagacctgggtttagttcccacactggctgtgtgagcctgagtaagttacttatctctctctttttt

SEQ ID NO: 20381 - DNA, 201 bp, Homo sapiens
caggtggcggaaagggcaagggctttggggttgatcaatcagacctgggtttagttcccacactggctgtgtgagcctgagtaagttacttatctctctctttttttttttttttttttttgtcttttgagacagggtcccactctgttgcccgggctggagtgcagtggtgtgatctcagctcactgcaaccttcagctc

SEQ ID NO: 20382 - DNA, 201 bp, Homo sapiens
aggtggcggaaagggcaagggctttggggttgatcaatcagacctgggtttagttcccacactggctgtgtgagcctgagtaagttacttatctctctctttttttttttttttttttttgtcttttgagacagggtcccactctgttgcccgggctggagtgcagtggtgtgatctcagctcactgcaaccttcagctcc

SEQ ID NO: 20383 - DNA, 201 bp, Homo sapiens
ggtggcggaaagggcaagggctttggggttgatcaatcagacctgggtttagttcccacactggctgtgtgagcctgagtaagttacttatctctctctttttttttttttttttttttgtcttttgagacagggtcccactctgttgcccgggctggagtgcagtggtgtgatctcagctcactgcaaccttcagctcct

SEQ ID NO: 20384 - DNA, 201 bp, Homo sapiens
tgtctcaaaaaaaaagaaaaagttataaggctgtgattgttttgatagaataatcacaatagtaacaatgacagccactctttctcaagtgcccaagatgyctgcttttgtggcagtcacatgacgacacgcagcaggtggccatggtgaggttttctcctccccctgtagcagagtcaggtgggcatgaacttgtgcagg

SEQ ID NO: 20385 - DNA, 201 bp, Homo sapiens
aaatcgtagtgttccagtcttataaaagacaaacttggggttgtcggggtggcttgtatctttattttattgtgtatcattgcaagtaagtgtttaaactkccttgtgtcaagaaataggtgttgcttcccaggaggccctggggaatgcttcttgtgttatgaatcttcaactgtaagataaagttatgaagctgtggtg

SEQ ID NO: 20386 - DNA, 201 bp, Homo sapiens; identical to SEQ ID NO: 2661

SEQ ID NO: 20387 - DNA, 201 bp, Homo sapiens
cactccagcctgggtgacacagtgagactcgatctcaaaaaaaaaaaaaaaaaaaaaaaaagagttcttctttgacctattagagataacatgcaaaatcstagtgttccagtcttataaaagacaaacttggggttgtcggggtggcttgtatctttattttattgtgtatcattgcaagtaagtgtttaaactgccttg

SEQ ID NO: 20388 - DNA, 201 bp, Homo sapiens
cagaaaatgaagcatgctttctggaggtttaagagttcttaggtcaggcgcggaggctcacgcctgtaatcccagcactttgcgaggccgaggggtcggawcacgaggtcaggagttcaagaccagcctgaccaacatggagaaaccccgtctctactaaaaacacaaaaattagtcaggcatggtggtgtgtacctgtaa

SEQ ID NO: 20389 - DNA, 201 bp, Homo sapiens
catgttaaatggtctcagggactgcttagttgccgagaaggtgactgtgtgctttcctcacagaggtcttctctcacctccttcaggcctcaggttcctcygggatgaattgcatggccctctcttggcagaagaggctccatacaactggagaactatgtgaagatagcgctcgcatcttcaaacgtgcccctttcacct

SEQ ID NO: 20390 - DNA, 201 bp, Homo sapiens
gctgcagaaaatgaagcatgctttctggaggtttaagagttcttaggtcaggcgcggaggctcacgcctgtaatcccagcactttgcgaggccgaggggtyggaacacgaggtcaggagttcaagaccagcctgaccaacatggagaaaccccgtctctactaaaaacacaaaaattagtcaggcatggtggtgtgtacct

SEQ ID NO: 20391 - DNA, 201 bp, Homo sapiens
gaagacggaattgcctgtacgggtgatggaattgctaggtgcctgcctgaaacgtggagcgaggacagaggcggagctggggagggagggcggtgggaaargcggatgtgcagcgctagttcttgttaaggatgcttttcaggcttctctccacggcttcgtccagctcttcctccagctcctctttcttggacatggcca

SEQ ID NO: 20392 - DNA, 201 bp, Homo sapiens
ctcacaggtcaggtttttttggctggcatcgtggcattgggagagcctaggaacagtattttccagatgtttcttgtttctctcttcatttgctcacttgyattttctgattttcttacagtgaccatgtattgcttttatgagaagaaaaggaatgaaacattcttattttaaagcaaaaaggagatatatgctcaggaa

SEQ ID NO: 20393 - DNA, 201 bp, Homo sapiens; identical to SEQ ID NO: 2664

SEQ ID NO: 20394 - DNA, 201 bp, Homo sapiens
agtcccaagaaggagcctcactggcagaacaacaagggccggtgtgttcctgtctgtgtgaatcttctatggtggctgtcgtatctgtttctcccaggagmcccacgctcatggggaaggccttagcgactaagactaagggagggaaaatgacagcgaggctgagaaggggaaactagaacacaggccactgattgccca

SEQ ID NO: 20395 - DNA, 201 bp, Homo sapiens
ggagagatggagggagactgaaagacatattccatgcaccttggaaagccgaaagacaggtgggagtagggacaaacacacaaacttgtgttaagaatcayacattttcctagaagccttggacactggggtgtgcctgggggtcacaggccatgctggctttggagcatctacgccaccacacagttgtcctgcttggag

SEQ ID NO: 20396 - DNA, 201 bp, Homo sapiens
tggatgttgttgggaacgctatatttggggcatagagtaaaaaagattgtttccattgtaatgaaaataatcattgacagtgagtgaagcttcagattaaraagacggaattgcctgtacgggtgatggaattgctaggtgcctgcctgaaacgtggagcgaggacagaggcggagctggggagggagggcggtgggaaag

SEQ ID NO: 20397 - DNA, 201 bp, Homo sapiens
gtgctgaaatgaatgttcaatttattttattcaattttaactaatctaatatgttattatataaccacttgtggctggttgcgtctgtactggacagtgcrggtctaaattgtttatgtatgttgaatttgaatctgataagaacaacaacaacaggcagagagtctcttggccttctgtttcaagggcattcagtttttt

SEQ ID NO: 20398 - DNA, 201 bp, Homo sapiens
ttgaactcctggcctcaagtgatccagctgccttggcctcccaaagtgctgggattacaggtgtgagccaccacgcccggctgtgagcaagttacttacgyttggaaccttctgtgtggaaggagaatgtagtagatgctgtgatgtccctcctgagtctcctaagtcccttctgagttcacctgcagctgaagctccctt

SEQ ID NO: 20399 - DNA, 201 bp, Homo sapiens; identical to SEQ ID NO: 2665

SEQ ID NO: 20400 - DNA, 201 bp, Homo sapiens
ggagtttcaccatgttggccaggctggtcttgaactcctggcctcaagtgatccagctgccttggcctcccaaagtgctgggattacaggtgtgagccacyacgcccggctgtgagcaagttacttacgcttggaaccttctgtgtggaaggagaatgtagtagatgctgtgatgtccctcctgagtctcctaagtccctt

SEQ ID NO: 20401 - DNA, 201 bp, Homo sapiens
gtcacagggtgttagtttccaggccatgatctggagctcatttgctgcagaaaatgaagcatgctttctggaggtttaagagttcttaggtcaggcgcggwggctcacgcctgtaatcccagcactttgcgaggccgaggggtcggaacacgaggtcaggagttcaagaccagcctgaccaacatggagaaaccccgtctc

SEQ ID NO: 20402 - DNA, 201 bp, Homo sapiens
gtggcggaaagggcaagggctttggggttgatcaatcagacctgggtttagttcccacactggctgtgtgagcctgagtaagttacttatctctctctttttttttttttttttttttgtcttttgagacagggtcccactctgttgcccgggctggagtgcagtggtgtgatctcagctcactgcaaccttcagctcctg

SEQ ID NO: 20403 - DNA, 201 bp, Homo sapiens
tggcggaaagggcaagggctttggggttgatcaatcagacctgggtttagttcccacactggctgtgtgagcctgagtaagttacttatctctctctttttttttttttttttttttgtcttttgagacagggtcccactctgttgcccgggctggagtgcagtggtgtgatctcagctcactgcaaccttcagctcctgg

SEQ ID NO: 20404 - DNA, 201 bp, Homo sapiens
gttcccacactggctgtgtgagcctgagtaagttacttatctctctctttttttttttttttttttttgtcttttgagacagggtcccactctgttgcccrggctggagtgcagtggtgtgatctcagctcactgcaaccttcagctcctgggttcaagtgattctcatgcctcagcctccccagtagccagggttacagg

SEQ ID NO: 20405 - DNA, 201 bp, Homo sapiens
ttcttttttttttttttttttttttgagacggagtcttgctctgtcgcccaggctggagtgcagtggcgccatctcggctcactgcaagctccgcctcccsggttcacgccattcctgcctcagcctctcgagtagctgggactacaggcgccctccactgtgcccgggtaattatttatatttttagtaaagacggagtt

SEQ ID NO: 20406 - DNA, 201 bp, Homo sapiens
gcgccatctcggctcactgcaagctccgcctcccgggttcacgccattcctgcctcagcctctcgagtagctgggactacaggcgccctccactgtgcccrggtaattatttatatttttagtaaagacggagtttcaccgtgttagccatgatggtctcgatctcctgaccttgtgatccgcctgcctcggcctcccaaa

SEQ ID NO: 20407 - DNA, 201 bp, Homo sapiens; identical to SEQ ID NO: 2666

SEQ ID NO: 20408 - DNA, 201 bp, Homo sapiens; identical to SEQ ID NO: 2667

SEQ ID NO: 20409 - DNA, 201 bp, Homo sapiens
gtcaagaggtttgggtgagaggggaggagacagagagggtgacaattggacaggggcaagagtccaaggaggcatttgggtgctcttttttttttttttttgtctacttctgctttttattgtgagaagtttgggcttatggaaaggctaacaggatggcaccagtaaagaaagagacactgtgaacactggagagacaca

SEQ ID NO: 20410 - DNA, 201 bp, Homo sapiens
cacatgtctgccgacctttgttcatgtcagaggtagcccacagggcagtgctcatttatatcaccaatccataagaatacatttttgttttgtcaaaaagmcaatgtctatagaattatctgaaacctgttttttcagatctgactagagtgagttagctatgatcactttccttctggtagccactcaaggggcgtgata

SEQ ID NO: 20411 - DNA, 201 bp, Homo sapiens
agtcaagaggtttgggtgagaggggaggagacagagagggtgacaattggacaggggcaagagtccaaggaggcatttgggtgctcttttttttttttttttgtctacttctgctttttattgtgagaagtttgggcttatggaaaggctaacaggatggcaccagtaaagaaagagacactgtgaacactggagagacac

SEQ ID NO: 20412 - DNA, 201 bp, Homo sapiens; identical to SEQ ID NO: 2671

SEQ ID NO: 20413 - DNA, 201 bp, Homo sapiens
tcttatcacattaaggctagactgagacatgtcacaaatttctctcttgtggaatgaaggtgaaaaagagaaatataagcattgggtgaatgttgaaatgsataagttctgagattcctcttaaagtttagattctgatgagatttcctgaacaggtgcctctcttgtggctcaggtaccagagggactctgtagaactcc

SEQ ID NO: 20414 - DNA, 201 bp, Homo sapiens; identical to SEQ ID NO: 2675

SEQ ID NO: 20415 - DNA, 201 bp, Homo sapiens
agtactctttctaacctgtcataatattgatatgaggcacaagaaaatatagctgatctttctgaaaacacacaatttctgaatatttttaaatgtgtagkcaattaattgaatttttttctttttctacatgtatttggtaccaagtagctgcctttgcgaggattttaatcactcagagatgtttctagggctaaaaat

SEQ ID NO: 20416 - DNA, 201 bp, Homo sapiens
ttagctatgatcactttccttctggtagccactcaaggggcgtgataggcgagtgaggtttatagagtgaaaggaagacggctcatgcaggatttggctgrtgagtgttctattagggtgagaattttggaaggagaagctttctgattgactttcaaatacagttggcaatctggttggtataatatctactggtacata

SEQ ID NO: 20417 - DNA, 201 bp, Homo sapiens
aatgcagccactgcaaaaccatgtcccaacaaggagtcacagtgggataaataggctgacctggcttcctgccttctaatccccagtcagcaccagccatyagccaaacccaattggaagccagaggacaaggagagtcagatgacacagttgtaggcgtcagcctcccagagcacaagccaaggcaaagggtggagagtg

SEQ ID NO: 20418 - DNA, 201 bp, Homo sapiens
ctccacctggttgaaggtcttgccgttgtagacgcccaccatgctgcccaccatctcgggtaggatgatcatgtcccgcaggtgcgtcttcaccacttcckgcttctccatgggcggcgcctccttcttggccttgcgcaggcgcttcagcagggagtgctgcttccgccgcaggccccggttcagccgccgccgctggcg

SEQ ID NO: 20419 - DNA, 201 bp, Homo sapiens; identical to SEQ ID NO: 2681

SEQ ID NO: 20420 - DNA, 201 bp, Homo sapiens
cttaaaagataatttaaaagttgaaattctctcagttttacatataacttcaagatgattcaacaccattggtaccatttggccatgttttcatcctcccraaatgttttgttaaatggggtctggaatcccagagattctcatctgctgctgctatgaagcaaaattaactcaagagtggagtgaaggtgttaggtcaat

SEQ ID NO: 20421 - DNA, 201 bp, Homo sapiens
tgctgacattgtttttgtccagtggagaagggtgaggataatgttggaaagagggcagggagcaagcttcacttcatcaaggaggggctttggttcaaatyggtttgggtgggcgggcactttgaaaatccatttgtcacactaaacggcaagtccaggtccaggaggttcctgtcttccctctctcaagagcaaactgca

SEQ ID NO: 20422 - DNA, 201 bp, Homo sapiens
agggagcaagcttcacttcatcaaggaggggctttggttcaaattggtttgggtgggcgggcactttgaaaatccatttgtcacactaaacggcaagtccrggtccaggaggttcctgtcttccctctctcaagagcaaactgcaagtagtttcattgcaggataaggccaagcccaccgctgcccatgctgtttttgttt

SEQ ID NO: 20423 - DNA, 201 bp, Homo sapiens
tcttcacctggtaagttgggtggcttccaggacacctgattctcatggctcttctctctttcctggctgccccatcctcagtctcctttgctggttcttcctcatcttcctgatgacggcaggttagagtgctcaagcctcagtcttctgaccacttctttttttctacactcacttctttggtggtcaatcttatccagt

SEQ ID NO: 20424 - DNA, 201 bp, Homo sapiens
ttcattgcaggataaggccaagcccaccgctgcccatgctgtttttgttttgtttccagacagagtctagctgtcaccaggctgcagtgcagtggtgcgakcatagctctcctgagctcaagtgattctcttgcctccacctcccaaagccctgggattacagctgtgagacacctcatggggacccggtttactgggttt

SEQ ID NO: 20425 - DNA, 201 bp, Homo sapiens
acgttggtcaggctggtcttgaactcccgacctcaggtgatctacccgcctcagcctcccaaagtgctgggattagaagtgtgagccaccacgtctggccrggacactttctttacttggcttctctttcttcacctggtaagttgggtggcttccaggacacctgattctcatggctcttctctctttcctggctgcccc

SEQ ID NO: 20426 - DNA, 201 bp, Homo sapiens
cagtcagaaccctttttcttataatagcattagataatgctgacattgtttttgtccagtggagaagggtgaggataatgttggaaagagggcagggagcragcttcacttcatcaaggaggggctttggttcaaattggtttgggtgggcgggcactttgaaaatccatttgtcacactaaacggcaagtccaggtccag

SEQ ID NO: 20427 - DNA, 201 bp, Homo sapiens
tgctgtttttgttttgtttccagacagagtctagctgtcaccaggctgcagtgcagtggtgcgatcatagctctcctgagctcaagtgattctcttgcctycacctcccaaagccctgggattacagctgtgagacacctcatggggacccggtttactgggttttttttgttttttgttttttgtttttttttgagacag

SEQ ID NO: 20428 - DNA, 201 bp, Homo sapiens
ggcggccgcgtgatcccgggggtggggcccatttctgagttggggccagctccccacccgcaagaggccccacattccgggccagcagcccagaaagtccmtccccgcaggcggagacagccccaagaagtcgacgccccggtcccgccgcccggccactacccagagggctgccgccgcctctccaagttcttgtggccc

SEQ ID NO: 20429 - DNA, 201 bp, Homo sapiens
ggttcagctggtcagcatctgtgaactgattaagttgtaattgttttaatattgcttatctcaagccagtgcttgtttagcctctagaggaaaagaaaacstttgtggcagttagaccatagtttatttcttaagtgtaggagtgtgtgacttaggtcctttttataatttgatgtcttattgctacaaagagtctgttct

SEQ ID NO: 20430 - DNA, 201 bp, Homo sapiens
agctactgcctcagttctctgcttgccttactatgaacttttgaaatttttgtccatacctgcagtttctagttcctttcttcctgttctttctcgagccbgttccaattaggttttcatctcctgctccaccaaaattgtgcttaatatggtagctaatgactaccatgtcactaattccattggtcaattctcagtcct

SEQ ID NO: 20431 - DNA, 201 bp, Homo sapiens
tacttcaaacctacacttcaaaaggtcttttcaggacgtgaatgcatacaagtgcacaatccctgtacactggccagaaccggtccatggtcggtcttctwatcatgaaaaagttcctgaaatcagcccagtgaaagctgtagttctggctggtgcaacaggggttcagctggtcagcatctgtgaactgattaagttgta

SEQ ID NO: 20432 - DNA, 201 bp, Homo sapiens
atcaatttagtttccagatttgatcagtctgtagaaagtgctttgtgtttgtttatttaaacaatacttatgggtcacacatacacacaagtaacctagtraaatctgaataagggatggaggaggagggagagaaaaaaataaaaaataagtaaattttaaaaaaacctgaataaggtcagaggattgtatcaatgtcaa

SEQ ID NO: 20433 - DNA, 201 bp, Homo sapiens
acatcttaatgtagtcaattatataaatatattctatttttaaacttgggtgagttaaaaacatatttgtctcaaaattctcttttgctgtctgaaatatmcagattcatatctcgcgttgttgtctttgtgctaaccgagcttctcagaaatattatttcacaacttcatggctttgcttagtgggaggaattttggcac

SEQ ID NO: 20434 - DNA, 201 bp, Homo sapiens
tccggccaatgtttatttattttttaattgatgtataataatcataacatatttttgtggtacatatgatattttgataaaagtatacaatgggtaatgamcaaatcagggtaattgggatacccattatttcatttatctttactttgtgttgggagcattccagttcttctcttctaggtattttgaaatatacaataa

SEQ ID NO: 20435 - DNA, 201 bp, Homo sapiens; identical to SEQ ID NO: 2674

SEQ ID NO: 20436 - DNA, 201 bp, Homo sapiens
tgtgaaccatcacgtccggccaatgtttatttattttttaattgatgtataataatcataacatatttttgtggtacatatgatattttgataaaagtatmcaatgggtaatgaacaaatcagggtaattgggatacccattatttcatttatctttactttgtgttgggagcattccagttcttctcttctaggtatttt

SEQ ID NO: 20437 - DNA, 201 bp, Homo sapiens
tcaccttgttgcccaggctgttctcaaactcctggactcaagtgatctgcccgccttagcctcccaaagtgctaagattacaggtgtgaggcactgcgccyggcctttactgttaacttaaaacaaaaaattataaatttgaaaaaagaggagactttatttcttataaaaggttatagcctgcaaggaggccattccata

SEQ ID NO: 20438 - DNA, 201 bp, Homo sapiens
tgtttgtgcaaaggttttgtttttcttcttaaatcataaatggatgtggaattttattgaatgcttttgctatctctgctgagatgaatataccttttttkttttttttttttgagatggagtcttgctctatcacccaggctggagtgcagtgctgccaccttggctcactgcaacacctgcctcctaggctcaagcaat

SEQ ID NO: 20439 - DNA, 201 bp, Homo sapiens
aaaaagaatctttgactattttttattttaaagagaatgcctgccaaaggctaaaaaagaattaataaataaaaagaatgcttctaatattttaccattgrgtacagatgcgtcacatttcctcctacccctgtttgtgcaaaggttttgtttttcttcttaaatcataaatggatgtggaattttattgaatgcttttgc

SEQ ID NO: 20440 - DNA, 201 bp, Homo sapiens
cccatttaatttggttggacacgagttatggtttctttctttttgcttgtttgttttgatacagggtcttgctctgtcagccaggctggagtgtagtggcraaatcatgactcactgcagcctcgacctcccgggcccaagtgattcttccacccctctcaaagtgctgggattacagttgtgaaccaccgcaccgtccca

SEQ ID NO: 20441 - DNA, 201 bp, Homo sapiens
ctttcgcaagtgtggccagcattctcccactctggaatgtagtggaaggtgttactaaccctcagcattcaaaggcttccctggtgtgagatcggcatcasggtgtgagcaccactgggcacctaaggcatttcgttgcgtaactctcagttattttgccactatgcttataagaaaaaaacatactcaagttccaaagta

SEQ ID NO: 20442 - DNA, 201 bp, Homo sapiens
tatagagacttccttaaaaggtcaaaacaagctttgaaatgactatacagactttggctgtacttttctaagtttttgttgttgttcattcaatttcttcrtattatcctatccatttaattaacatatttattaagtacttactgtgtaccagacactgtgtaaaacaagtaagatacagctcggtctgcaagctgttcc

SEQ ID NO: 20443 - DNA, 201 bp, Homo sapiens
cagagggaaatgagttgtggagactgataatcctgttctgagcattctgccaaggagagtgaaataatactttattcaaagagggaagggaagtgtaatgrgcacaccatgtttaagtagaattcataagtgttttaaaattccagtgtacttcaaactcaataacttactcttattttatttttgaattcacttcaagtt

SEQ ID NO: 20444 - DNA, 201 bp, Homo sapiens
tgtggctaaggaggcttcgttagtagttaaaagcacacacataaccctacccaacggatccctctcttctcttaaccaagagggcgcaccactgccctackcaacctccccacaaataaggacgagacacgggaagtgttaaaagcaagtggtgagtataaaatcctcggaattttctctttgagcaactaactaggtctg

SEQ ID NO: 20445 - DNA, 201 bp, Homo sapiens
agggagagggtgaggccaccaggcagtgagcgccctcggcggccgcgtgatcccgggggtggggcccatttctgagttggggccagctccccacccgcaaraggccccacattccgggccagcagcccagaaagtccctccccgcaggcggagacagccccaagaagtcgacgccccggtcccgccgcccggccactaccc

SEQ ID NO: 20446 - DNA, 201 bp, Homo sapiens
tcttggacaaaaatgtgtaaattttggcaattttcatctgctgctcttacgaaaatcttgtttctttttttctttctttcaagacgtagtcttgctctgtygcccaggctggagtgcagtggcgcaatcttggctcactgcaacctccacctcccaggttcaagcaattctcctgccccagcctccccagtagctgggatt

SEQ ID NO: 20447 - DNA, 201 bp, Homo sapiens
cctggctatttcgccgtacctgggaatccatattcggcagaagcctgttatgccaaggaaccctcttagttgctttagtgttttggaatgaggataagccrgtataggctggatacatttctcaccaagggcaaaacttctggtgagtgtactctttctgcaggaagtaaaaatggccttactaaataaattaaatttatg

SEQ ID NO: 20448 - DNA, 201 bp, Homo sapiens
ggtagacgagtaagtggttgttgaatgaatgagtgattatttctgtaccatcattgaattgttagtaacaaaatgcagtttacagccacttacttgtgacrataacaatagtgtctaaagtaaacacaccctcgcttttccctagtgattctcctgttcagccagtttaaaagcactggcttagtcaacctccaggaagaa

SEQ ID NO: 20449 - DNA, 201 bp, Homo sapiens
acaccctcgcttttccctagtgattctcctgttcagccagtttaaaagcactggcttagtcaacctccaggaagaatggacatcatattgcactggaaacscatctttattctgaggcctctagctgatgagaatgttgctgcttaagtacaatctgtacctcctcttcccttcatcccagttctccctcctttttctgca

SEQ ID NO: 20450 - DNA, 201 bp, Homo sapiens
ctgaccaatcttaggttctacaatagtgatgttatctataggagcaactggggaagtcacaaattttgtgacctctggccacttgactcctgagcagtaasagattagagaaactgatgcaggtcaggggagccccaacgtggagcttagcccatgtaggtttttggctttgcccaggaaagaattcaagagcaagccaga

SEQ ID NO: 20451 - DNA, 201 bp, Homo sapiens
gcctggaagaaatgtggctggattaagagttgcacaagtgtgcagtcgcagcactggtccctcaagtaatagagcctgatgtttaagcaaatggttgtctracagccacaagtctccacacagtgagatctcttccctgtatcattttaactgcttcagatactaagactgctactgctgccactaccagtaaaaaatgag

SEQ ID NO: 20452 - DNA, 201 bp, Homo sapiens
tgagctcaccgcaaactctgcctcccgggttcaagcgattctcctgcctcagcctccagagtagctgggattacaggtatgcaccacgatgcccagctaaktttgtatttttagtagagatggggtttctccacgttggtcaggctggtcttgaactcccgacctcaggtgatctacccgcctcagcctcccaaagtgctg

SEQ ID NO: 20453 - DNA, 201 bp, Homo sapiens
caggtgcgtcttcaccacttcctgcttctccatgggcggcgcctccttcttggccttgcgcaggcgcttcagcagggagtgctgcttccgccgcaggcccsggttcagccgccgccgctggcgcgcactgtacagctgcatcggctgctccagctgctcgtaggacatgtccagcagctggtccaggtccacgccgcggta

SEQ ID NO: 20454 - DNA, 201 bp, Homo sapiens
gttgaacagtgccccccaaaaaggtatgtctaaatcctaatcccaggtatccatgaatgtgaccttacttggaaataggatctttgcagatgttaactatrgatctcaagatgagatcaccctggatttagactgggctctaaatcctatgattggtgcccttataagagaaaggagaaggagatttgagacaaagacaca

SEQ ID NO: 20455 - DNA, 201 bp, Homo sapiens
aatatgttgttttaagttactagatttctggtaatttgttatggtagctctaggggattaatataggctataacagttatcactgcactctgggaagcccraagtattggcatcgtcatcaggtatttacagatttttcattgtttctctcagtccagacacagtttaccaattgggtcagtttttattataaccagcgtt

SEQ ID NO: 20456 - DNA, 201 bp, Homo sapiens
ccaaaaaggtatgtctaaatcctaatcccaggtatccatgaatgtgaccttacttggaaataggatctttgcagatgttaactatggatctcaagatgagrtcaccctggatttagactgggctctaaatcctatgattggtgcccttataagagaaaggagaaggagatttgagacaaagacacacagagaagaaggcta

SEQ ID NO: 20457 - DNA, 201 bp, Homo sapiens
ctcctgcctcaagcctcccaagcagctgggattacagacatgcaccaccatgcccagctgatttttgtgtttttagtggagacggggtttcaccatgttgrccaggctggtctcaaactcctgacttcaagtgacccacccgccttggcctcccaaagtgctgggattacaggcatgagccaccacgcccagcctgtattt

SEQ ID NO: 20458 - DNA, 201 bp, Homo sapiens
ctctagcttttggcgcaaacaccatttatttgtaaccacttccccaaaggcacggccttcagaaagtagttagagaaaggcagcaaggggtggagtggtgytatgtcgcagaaaataatcgagaggagtagcaagggtttggaaagatatgcccactggccgaaatctctagctttgcctgcgggcaggctgccttttctt

SEQ ID NO: 20459 - DNA, 201 bp, Homo sapiens
atttaattgtattacttcaaatacatttaaatgtattacttcaaacctacacttcaaaaggtcttttcaggacgtgaatgcatacaagtgcacaatccctstacactggccagaaccggtccatggtcggtcttcttatcatgaaaaagttcctgaaatcagcccagtgaaagctgtagttctggctggtgcaacaggggt

SEQ ID NO: 20460 - DNA, 201 bp, Homo sapiens
tcctgacaggtgacacaaggaggcactggatggggaggtcagtgggatataaaagtctgggcaggggcagactcagggaaggtttctcagtggagatgggrgtcagggaaatttagaggcagtggcgtgggtaggaagtggtcagaagctgccagagcagtttacagccaaggacatcagggccagtcaggttgtggtaag

SEQ ID NO: 20461 - DNA, 201 bp, Homo sapiens
agctggtttgcacaaaggatttaattgaagtgagtttaataaatggactattaacagaggtgcaacagccttaagggaactcggcaaagagtggtgaagaaccagggacaagcacagcaggaagccaatgccactcatagacgcgtagaagcaagtggtgatggtgttactggacccctgtgagagccacagctgtggaga

SEQ ID NO: 20462 - DNA, 201 bp, Homo sapiens
tgtttgtgtcttttgtctatttaaaaaatgtttctctttttcttaaagatttataggaattctatatcgaattctttttcatttatatatattgctatatyttctcctagtttgaagcttgcattttctctgttgttaacatcttttgataaacagaaattgtcaattttaatgtaaccaaattaatcatcttttcctctg

SEQ ID NO: 20463 - DNA, 201 bp, Homo sapiens
gatccgcctgtcttggcctcccaaagttctgggattacaggcgtgagccaccacacccagccgacattttctaataattaaacccaaattcaagttactgkatttttctcttcattgtcttaagataattatacacaggtattcacttcttcctccctccctttctttctttttaagtttgtcatgctagcatgttccacc

SEQ ID NO: 20464 - DNA, 201 bp, Homo sapiens
aattggtgtttgattgatgaccccaaatgatcaataaaagactgaatatattctattcattctactgctggacagggaaagctagcgtgcagccaatttgygtaaatgtaaaaggtttttaaaaatcaagttttgacactcagagggggcaaagttcagttttacagcaaatttgacacatttctctgtgatgcttcatag

SEQ ID NO: 20465 - DNA, 201 bp, Homo sapiens
atttttagcagagacagagtttcaccatgttggccatgctagtcttgaactcctgacctcaaatgatctgcctgcctcagcctcccaaagtgctgggattrcaagtgtgagctactgcgcccagcctactcttgacttttaatatcagagatgagtttttattttgggaatttttgatataatatgatccagattggggag

SEQ ID NO: 20466 - DNA, 201 bp, Homo sapiens
ggaggagctacatgctttgagtccagggctgccttaggctctggggatacagtggagaaccagcaagacacattaacgccctcagagaagatgaagtaggrgtgagagggggccttgagtttgctttaaaagtgtactttttaaggtattgcattaaatcatttgaaaagattccttgaatatagaaatgattatccaaaa

SEQ ID NO: 20467 - DNA, 201 bp, Homo sapiens
agggattcttagtcagcctaggaaatccagctagtcctatctcttagtaccacctctcaacaggaaaacccaagtgctgttggggaggttggccaaagacygctctaactgcttcctgctgaattgggacgtagtaggggtcgtgcaattgagatttcctcgggaggggtgccttcgatgtcattaacatcagagcatggg

SEQ ID NO: 20468 - DNA, 201 bp, Homo sapiens
tattgtcctaatggtgaggactgttaagtgttagaatggaaccaaagaataggaaaaatgacatcctgtgctgaaagctttaaagaggctgaattcacatyggtctttgtaggtttagatgtgtttctgtctgaaaaaggaatagataatcccttatatttttataatcctatgaagttcttgggtgtttgtttgtttgtt

SEQ ID NO: 20469 - DNA, 201 bp, Homo sapiens
ctgccaaatctttttagacagcgaaaaccttcatctaaaatatgttttgaaactcttcattcatgttagagtccaatatacggttttctaaaaggtttttwaatttctctaaactttgtacttctcttaatctgttcatacttaactcttggacaaaaatgtgtaaattttggcaattttcatctgctgctcttacgaaaa

SEQ ID NO: 20470 - DNA, 201 bp, Homo sapiens
aggaaaaatgacatcctgtgctgaaagctttaaagaggctgaattcacattggtctttgtaggtttagatgtgtttctgtctgaaaaaggaatagataatyccttatatttttataatcctatgaagttcttgggtgtttgtttgtttgttttttgagacagagtctcattctgttgcccaggctggagtgcaatggtgcg

SEQ ID NO: 20471 - DNA, 201 bp, Homo sapiens
aactgatgcaggtcaggggagccccaacgtggagcttagcccatgtaggtttttggctttgcccaggaaagaattcaagagcaagccagaggtggaagaamacagctttactgaagaggcagtgttacagcaccatgactgctcctgtagagcagtgctaccccctaggcagagagtagcctgtaaaatattttaaagagg

SEQ ID NO: 20472 - DNA, 201 bp, Homo sapiens
accatggcttgccactcctatttccttagcctgctttgaaaatcatccccgtatacttcctgcacattctaaggtctttcaagacggcaacaagacaatayagcaaagtagtccttggagatgagctacagaagagggctagaagtgaacgttcccaaatgcattctggaagccctggcagtcagaaccctttttcttata

SEQ ID NO: 20473 - DNA, 201 bp, Homo sapiens
acgttcccaaatgcattctggaagccctggcagtcagaaccctttttcttataatagcattagataatgctgacattgtttttgtccagtggagaagggtraggataatgttggaaagagggcagggagcaagcttcacttcatcaaggaggggctttggttcaaattggtttgggtgggcgggcactttgaaaatccatt

SEQ ID NO: 20474 - DNA, 201 bp, Homo sapiens
gctaatttttgtatttttagtagagatggggtttcaccatgttggccaggctggtcttgaactgctgacctcaagtgataccccgcctcagcctctcaaaktgctgggattacaggcatgagccactgggcccggccaaactgagacatttttaagaagaaaggagacaacaggcataaatcagattgttaagattaggaa

SEQ ID NO: 20475 - DNA, 201 bp, Homo sapiens
cctgaggtcaaaatatcatcttatgctttctactaagagcattaaaattttgtcttttacttttctactctagtacacagaaaaaacaaaccaaaaaaacyccaacaatatgaaaaatagttttgtctttgatatttaagtacttacttcatctggaattaattttaatgtgtgaggtgatgtgattcaacttcatttttt

SEQ ID NO: 20476 - DNA, 201 bp, Homo sapiens
gataggcaattgagtatttggtagataggaagtgttctgggaggcctctcatatagtatgtgagagctctcatataggggataaaggaagtcacacctcayaccaagacctgaagccacacacctggtgtagaaagggcggagagtcttctaggtggatggaatagcatgtggggaagagtttgtggtatttgaggagtag

SEQ ID NO: 20477 - DNA, 201 bp, Homo sapiens
aaggtaaaaaaaaatccataaataattcattttctattgtggtaaccaattaccacagacttaatggcctgaaacaacataaatttatgacctcacagtayctgtacatcagaagtccagattggcttgtctggtttctctgctctgggtctaacaaggccagtatcaaggtgtcagccttccagggctctgattgggaga

SEQ ID NO: 20478 - DNA, 201 bp, Homo sapiens
cagccaacatggaaactttaaaagtaaacttttattgtctatttctaattataaaagtaatacacattaatgttaaagtttataagatgtagaaagatatraagaaaaaaccctggctattctgggcacactgcctgtggggtattcctgttccacaaggagtagaacctctgctgctgctacaaattaaataaaaaaaca

SEQ ID NO: 20479 - DNA, 201 bp, Homo sapiens
gcctgcagtcagtttgattggttgtagaaagcaaccaatcagagatactttcaattttccatccgccatgcagaaaagcggggtttgcaaagggagtagcytcgggtccttttgctacttagatgtggaaagttggggttttccttttggtttagttctaggaagtccgtgtgaattgacctgaggttgcctgcctccaga

SEQ ID NO: 20480 - DNA, 201 bp, Homo sapiens
tatataatatttactattaatattatatatttatatataatatttactattattatatatttatatataatatttaatattttatatatataaaatttttygcagtaaagagtttaattaatgcaaagcagccaagcagaaggactggagttatcactcaaatcagtcttcctgagggctcagaggttagggtttttcaat

SEQ ID NO: 20481 - DNA, 201 bp, Homo sapiens
attttataattttgtaggaaaaatatgcatctattttttcttgacttcttttatatagtaataaaagttattttggaagctctttgtgtgttatcaatttstctggggtaacaggggtaggcattgttgtgaaagtttctttgccatggtttttggtttgtttatttttcagcagagatagtcttttttcagtttcttgat

SEQ ID NO: 20482 - DNA, 201 bp, Homo sapiens; identical to SEQ ID NO: 2686

SEQ ID NO: 20483 - DNA, 201 bp, Homo sapiens
tgtctatagaattatctgaaacctgttttttcagatctgactagagtgagttagctatgatcactttccttctggtagccactcaaggggcgtgataggcragtgaggtttatagagtgaaaggaagacggctcatgcaggatttggctggtgagtgttctattagggtgagaattttggaaggagaagctttctgattga

SEQ ID NO: 20484 - DNA, 201 bp, Homo sapiens
cgaagttcaagaccagactgggcaacatagggagactgtctctacaaataaaggaaagacagagagagagatcgagagagagagaaatcaagagagagacwgatctaacaattagcaataaagagaatacctatttaaaaatctgtgggtcctggctgggcatagtgcactgctcactcctgtgatcccagcactttgaaa

SEQ ID NO: 20485 - DNA, 201 bp, Homo sapiens
tccataagaatacatttttgttttgtcaaaaagacaatgtctatagaattatctgaaacctgttttttcagatctgactagagtgagttagctatgatcamtttccttctggtagccactcaaggggcgtgataggcgagtgaggtttatagagtgaaaggaagacggctcatgcaggatttggctggtgagtgttctatt

SEQ ID NO: 20486 - DNA, 201 bp, Homo sapiens
ttaaacattaatgctagtcagctgttgagtctaaattccaaaatggagggggtagacttcccttccggctgtagctagaaactcagctttaaggtttttcyggggtctgcttggccaaggaggtccattcagtcagtgaggggcttaggattttatttttagtttacaccaccttacaggttcctccttaacaccctttga

SEQ ID NO: 20487 - DNA, 201 bp, Homo sapiens
ggctttctgagttttcttaattagtgtatataatgacctggctatttcgccgtacctgggaatccatattcggcagaagcctgttatgccaaggaaccctsttagttgctttagtgttttggaatgaggataagccagtataggctggatacatttctcaccaagggcaaaacttctggtgagtgtactctttctgcagga

SEQ ID NO: 20488 - DNA, 201 bp, Homo sapiens
aacatgtcttcttactctacattctacatctgtgtgagggacaaaaaattctgcatgagcatgtttctagcatctaggtgttttttttgtttgtttttttktttttttttttttttttgagacagagtctcgctctgtcgcccaggctggagtgcagtggcgtgatctcgtctcactgcaagctccgcctccctggttcac

SEQ ID NO: 20489 - DNA, 201 bp, Homo sapiens
gccatcttgccggatcctcagaagagcagcatactggacttctgtatgcaccagaagaaatgcaacattattttgtggaagttcaaaagacagatggcatstagggctcccagtgcctcatctcctgatgggtgggatttggattttctttccacaaccctcacaacatgtcttcttactctacattctacatctgtgtga

SEQ ID NO: 20490 - DNA, 201 bp, Homo sapiens
taaatatcatatatttatatataatatttactataaatatcatatatttatatataatatttactattaatatcatatatttatatataatatttactatwaatattatatatttatatataatatttactattattatatatttatatataatatttaatattttatatatataaaatttttcgcagtaaagagtttaat

SEQ ID NO: 20491 - DNA, 201 bp, Homo sapiens
ttaatattatatatttatatataatatttactataaatatcatatatttatatataatatttactataaatatcatatatttatatataatatttactatwaatatcatatatttatatataatatttactattaatattatatatttatatataatatttactattattatatatttatatataatatttaatattttat

SEQ ID NO: 20492 - DNA, 201 bp, Homo sapiens
ctgagacatttttaagaagaaaggagacaacaggcataaatcagattgttaagattaggaatttggttttggataagtttgagatgtctgggaagcaaacrccgtacggaaataccaagaagacattggattatgcagatctgaagcttagaagacagttctgggctggagatataaattttttggagtccctgccatgga

SEQ ID NO: 20493 - DNA, 201 bp, Homo sapiens
cgccatgttgcccgggcttgtcttgaactcctggactcaagtgatcttcccaccttggcctcccaaagtgctgggattacaggcgtgaggcaccacactcrgcccccattttcatatagaaagcacaacatggacatcaggaagcttgccctttgatactaatagaatcactgaagttcactgaagaagatttaggaatat

SEQ ID NO: 20494 - DNA, 201 bp, Homo sapiens
aacattattattctttaattcctacaaggtactcgaaaaccttaagtgaaaaagatttctatctttttatcttagcgcatttatggaaaaaatattaactrtcctgaatattttataattttgtaggaaaaatatgcatctattttttcttgacttcttttatatagtaataaaagttattttggaagctctttgtgtgtt

SEQ ID NO: 20495 - DNA, 201 bp, Homo sapiens
aatcctgatctcaagtgatcctcctgcctcggcctcccaaagtgctgggattacagcaggcatccctttaaatgcatgccttctgtgaacagcacttccastactgacttagagagacaaaaggtcttataattttcggtccactaggttataaattatcaccttcacttgtaaggtagtaagattaagatagttaaaagg

SEQ ID NO: 20496 - DNA, 201 bp, Homo sapiens
ttcacagagttgaggtgagaattataatgaaactgtgaagcacttagatggtacctactacctagcaaggactcaattgtgtgtgtgtgtttgtgtgtctstgtatgtgtgcgtgtgtgtgtaataaatgagcccaacacaggcaagggggagatgtgttattaggtcttcatatatcgcacatttttattttactattgc

SEQ ID NO: 20497 - DNA, 201 bp, Homo sapiens; identical to SEQ ID NO: 2680

SEQ ID NO: 20498 - DNA, 201 bp, Homo sapiens; identical to SEQ ID NO: 2682

SEQ ID NO: 20499 - DNA, 201 bp, Homo sapiens; identical to SEQ ID NO: 2683

SEQ ID NO: 20500 - DNA, 201 bp, Homo sapiens; identical to SEQ ID NO: 2685

SEQ ID NO: 20501 - DNA, 201 bp, Homo sapiens
acctcacaccaagacctgaagccacacacctggtgtagaaagggcggagagtcttctaggtggatggaatagcatgtggggaagagtttgtggtatttgargagtagggaggagaccaggctgtccagagcagggcatagaagatgaattggaggctggacaggtataattatagggagactagcttgcaggtgtttatgg

SEQ ID NO: 20502 - DNA, 201 bp, Homo sapiens; identical to SEQ ID NO: 2687

SEQ ID NO: 20503 - DNA, 201 bp, Homo sapiens
aacattaatgctagtcagctgttgagtctaaattccaaaatggagggggtagacttcccttccggctgtagctagaaactcagctttaaggtttttctggrgtctgcttggccaaggaggtccattcagtcagtgaggggcttaggattttatttttagtttacaccaccttacaggttcctccttaacaccctttgatgt

SEQ ID NO: 20504 - DNA, 201 bp, Homo sapiens
acccaagtgctgttggggaggttggccaaagaccgctctaactgcttcctgctgaattgggacgtagtaggggtcgtgcaattgagatttcctcgggaggsgtgccttcgatgtcattaacatcagagcatgggctagcaggccggtccaggggtccacggtagatcttagtcatggactgcttctggggctccatttgaa

SEQ ID NO: 20505 - DNA, 201 bp, Homo sapiens
taaaaatataacaaaattttttagatattaaaattaaaaaatattttaaagaatttgttatatcatataggtaatatgatattactaaaagtttagaaggrccaaaaagtctgacaaattgtattactcttatgaaacaactattgaagttatacattccctttcaatcttgttgatatgcatgtttttatattaattgta

SEQ ID NO: 20506 - DNA, 201 bp, Homo sapiens
tttttttttttttttttgagacagagtctcgctctgtcgcccaggctggagtgcagtggcgtgatctcgtctcactgcaagctccgcctccctggttcackccattctcctgcctcagcctcccgagtagctgggactacaggtgcctgccaccacgtctggccaattttttgtatttttagtagagacagggtttcaccg

SEQ ID NO: 20507 - DNA, 201 bp, Homo sapiens
ctccttaatagcaagctttgagagtttacattgaaactgtactagtgtgcattttgagcagataaattcaagactgttttgcatgttgctgtatcatcctstttgtaattggatacatctcttatttcataggagagatcctgcatacagtacattcccgccagaaggtgttttcgtaaatacgcttggccttctgatcct

SEQ ID NO: 20508 - DNA, 201 bp, Homo sapiens; identical to SEQ ID NO: 2673

SEQ ID NO: 20509 - DNA, 201 bp, Homo sapiens
aatcaatttcattatatattcctgagtgaattgtagcataatttatatttctccttaatagcaagctttgagagtttacattgaaactgtactagtgtgcmttttgagcagataaattcaagactgttttgcatgttgctgtatcatcctgtttgtaattggatacatctcttatttcataggagagatcctgcatacagt

SEQ ID NO: 20510 - DNA, 201 bp, Homo sapiens
ctccttcttggccttgcgcaggcgcttcagcagggagtgctgcttccgccgcaggccccggttcagccgccgccgctggcgcgcactgtacagctgcatcrgctgctccagctgctcgtaggacatgtccagcagctggtccaggtccacgccgcggtaggtgaacttgcggaaggtccgcttcttcttctgctctacttc

SEQ ID NO: 20511 - DNA, 201 bp, Homo sapiens
ggaccctgattaacacactcagtctcattagcctcccaacacatgtttattgagtaactgccacatcccaaggaggaataaaatgatcaattagagaatcmatgccttcaatagggcagtctgagagtggagacagccagagaagcagatccttatattacatcctgacaggtgacacaaggaggcactggatggggaggt

SEQ ID NO: 20512 - DNA, 201 bp, Homo sapiens
ttctaataattaaacccaaattcaagttactgtatttttctcttcattgtcttaagataattatacacaggtattcacttcttcctccctccctttctttstttttaagtttgtcatgctagcatgttccaccatcaatatcttttcttttaaaggatttaaagtgtatttctcatctataatgtttgtatttcccctcat

SEQ ID NO: 20513 - DNA, 201 bp, Homo sapiens
aagcaaagctaacatagaagttacaaaacaaatctccctctccttctttattcccctttccctttctcgctcaccctctctctccttgtcccattttctcytctgtgtccctctcccttcctttccccctctctctcccctcctttccccctctctctccccacctcccatactccaagtatattttggaatatgtatata

SEQ ID NO: 20514 - DNA, 201 bp, Homo sapiens
aattccaatatgctgtttgttttctgccaggaccctgattaacacactcagtctcattagcctcccaacacatgtttattgagtaactgccacatcccaasgaggaataaaatgatcaattagagaatccatgccttcaatagggcagtctgagagtggagacagccagagaagcagatccttatattacatcctgacagg

SEQ ID NO: 20515 - DNA, 201 bp, Homo sapiens
atgaaattactcaattccaatatgctgtttgttttctgccaggaccctgattaacacactcagtctcattagcctcccaacacatgtttattgagtaactrccacatcccaaggaggaataaaatgatcaattagagaatccatgccttcaatagggcagtctgagagtggagacagccagagaagcagatccttatatta

SEQ ID NO: 20516 - DNA, 201 bp, Homo sapiens; identical to SEQ ID NO: 2676

SEQ ID NO: 20517 - DNA, 201 bp, Homo sapiens
cccacaaacgagtgtgcaaaagagtgctgacctcattcctaaagaaaagtgattttggcttttgtttttgttggttgttttaaacttgtactgcagctttsgcaagtgtggccagcattctcccactctggaatgtagtggaaggtgttactaaccctcagcattcaaaggcttccctggtgtgagatcggcatcagggtg

SEQ ID NO: 20518 - DNA, 201 bp, Homo sapiens; identical to SEQ ID NO: 2677

SEQ ID NO: 20519 - DNA, 201 bp, Homo sapiens
tcttgctctgtcacccaggctggagtgcagtggcatgatctcagctcactgcaacctctgcctcccaggttcaagcgattctcctgcctcagcctcccaartagctgagattacaggtatgcaccacaatgcctggctaatttttttgtatttttagtagagacagggtttcaccatgttggtcaggctggtcttgaactc

SEQ ID NO: 20520 - DNA, 201 bp, Homo sapiens
taaatatgttgttttaagttactagatttctggtaatttgttatggtagctctaggggattaatataggctataacagttatcactgcactctgggaagcmcaaagtattggcatcgtcatcaggtatttacagatttttcattgtttctctcagtccagacacagtttaccaattgggtcagtttttattataaccagcg

SEQ ID NO: 20521 - DNA, 201 bp, Homo sapiens
ggcgtgatctcgtctcactgcaagctccgcctccctggttcacgccattctcctgcctcagcctcccgagtagctgggactacaggtgcctgccaccacgyctggccaattttttgtatttttagtagagacagggtttcaccgtgttagccaggatggtctcgatctcctgacctcaagatctgcccgccttggcctccc

SEQ ID NO: 20522 - DNA, 201 bp, Homo sapiens
gtagagactgagaatcaccactgtagtgattgtatctgtgtggcaaatcatcttaaagatttcttgtatttggaaacaatgtctaataaagaatggccaaatacaaagttacactatacaaaaactatgtcatcaaaaattatattgttcaagtgaataattagcaatatgaaaatatgttcataaaatattaagtgaaag

SEQ ID NO: 20523 - DNA, 201 bp, Homo sapiens
ttaaaaatacagattcctgggccctaatccagaaattggatttagcaggtcagaatgtggcccaggcatctttttattttttatttttttgttgttgttgkttttgttcttgagacagagctttgctctgtcacccaggctgaagtgcacaatgtcagctcactgcaacctccgccatccgggttcaagcaattctcttgc

SEQ ID NO: 20524 - DNA, 201 bp, Homo sapiens
ggcagtttgttaaaaatacagattcctgggccctaatccagaaattggatttagcaggtcagaatgtggcccaggcatctttttattttttatttttttgktgttgttgtttttgttcttgagacagagctttgctctgtcacccaggctgaagtgcacaatgtcagctcactgcaacctccgccatccgggttcaagcaa

SEQ ID NO: 20525 - DNA, 201 bp, Homo sapiens
atcattgtcccttcccctgtgctctcacgtgatagatgattggctatttctttacctcctgttttagcctaattagcattttagtgagctctctttactayctgactggtctggtgtgagctaagttgcaagccccgtgcttaaaggtggatgcagtcaccttcccagctaggcttagggattcttagtcagcctaggaaa

SEQ ID NO: 20526 - DNA, 201 bp, Homo sapiens
tgcaggataaggccaagcccaccgctgcccatgctgtttttgttttgtttccagacagagtctagctgtcaccaggctgcagtgcagtggtgcgatcatasctctcctgagctcaagtgattctcttgcctccacctcccaaagccctgggattacagctgtgagacacctcatggggacccggtttactgggtttttttt

SEQ ID NO: 20527 - DNA, 201 bp, Homo sapiens
gagggttttccagactgtttatccatatctctagaataatttgagtgaatcaacagcagtcattttcaaacttcaacatacgtaagaatcgtctgggcagyttgttaaaaatacagattcctgggccctaatccagaaattggatttagcaggtcagaatgtggcccaggcatctttttattttttatttttttgttgttg

SEQ ID NO: 20528 - DNA, 201 bp, Homo sapiens
aactgcttacaatctccagagggaaacttctatcatttaacaactctgttttaaaaaagttcacaggcaggggtggtggctcatgcctataatgccagcaytttgggccgccaaggcaggtggatctcctgagctcaggagtttgagaccagcctgagcaacatgatgaaaccccctttctaccaaacatacaaaaattag

SEQ ID NO: 20529 - DNA, 201 bp, Homo sapiens
aatcctcggaattttctctttgagcaactaactaggtctgttactgaagccctctgcgagcttggatgctggacgagggagagggtgaggccaccaggcartgagcgccctcggcggccgcgtgatcccgggggtggggcccatttctgagttggggccagctccccacccgcaagaggccccacattccgggccagcagc

SEQ ID NO: 20530 - DNA, 201 bp, Homo sapiens
tgcagatgacattttccacttctactattgatcataggtaccttcatggttaagaacatgcattttttgtcattgcaattttattcccaaatctattcatrtattcagcagtgaaccgaatacccgttatatgccagataccttgctaggctgggctgtgggtgatacctgttccacaagacaaatgtgggctcaaagaga

SEQ ID NO: 20531 - DNA, 201 bp, Homo sapiens
cccagaaacttgagcccgggcgcgatgccggagcgccgcgcagtcgggccgctgcagcccacgcgccccggaaagtcgcccctgtggaccgagcctgcgcratcgggggcgcggaaacactttcgcctcagccttttgctgaacttgcttccaggctgcagatgaggaggggaaggcagcggggaaaagattgccagagcg

SEQ ID NO: 20532 - DNA, 201 bp, Homo sapiens
caggcacctgtaatcccaggtactcaggagtctgagacaggagaattgcttgaacctgggaggtggaggttgcagtgagccaagattgtgccactgcactstagcctgggcaacagagtgagattctgtctcgaaaaaaaaagagggataaactccaaagaagcaaagctaacatagaagttacaaaacaaatctccctct

SEQ ID NO: 20533 - DNA, 201 bp, Homo sapiens
tgcgcaatcgggggcgcggaaacactttcgcctcagccttttgctgaacttgcttccaggctgcagatgaggaggggaaggcagcggggaaaagattgccrgagcgagaatttgcccgtatttgtaacatcctcggccctgggtaaaggggctggccaaggggggcgagtgaagcatccgccctgggttcctctcctccta

SEQ ID NO: 20534 - DNA, 201 bp, Homo sapiens
tgcacttcagcctgggcaacaagagcgaaactcccgtctaaaaaaaaaaaaaaaaaaaaaaaaagaagtaggctctggccgggcacggtggcttacgcctrtaatcccagcactttgggaggctgaggcgagtggatcccctgaggtcaggagttcgagaccagcctggccaacatggtgaaacactgtctctactaaaaa

SEQ ID NO: 20535 - DNA, 201 bp, Homo sapiens
cactgtctccagggttcaagtgattctcctgtttcagcctcccaagtagctgggattacaggtacccaccatcgtgccaggctaatttttgtattttagtrgagatggggtttcaccatgttggccaggctagtcttgaactcctgacctcaggtgatccgcctgcctcagcctcccaaagtgctaggattacaggtgtga

SEQ ID NO: 20536 - DNA, 201 bp, Homo sapiens
ctacttgggaggctgaggcaggagaattgcttgaactcgggaaacggaggttgcggtgagtcgagatcttgccattgcacttcagcctgggcaacaagagygaaactcccgtctaaaaaaaaaaaaaaaaaaaaaaaaagaagtaggctctggccgggcacggtggcttacgcctataatcccagcactttgggaggctga

SEQ ID NO: 20537 - DNA, 201 bp, Homo sapiens
cactgcaaccactgtctccagggttcaagtgattctcctgtttcagcctcccaagtagctgggattacaggtacccaccatcgtgccaggctaatttttgyattttagtagagatggggtttcaccatgttggccaggctagtcttgaactcctgacctcaggtgatccgcctgcctcagcctcccaaagtgctaggatta

SEQ ID NO: 20538 - DNA, 201 bp, Homo sapiens
gtgtttgagaaccacaatgttaacaatatagccaatatgtacagtctgcacagctgggttggactgatagctgtcatatgctatttgttacaggtcagtayttcagtgtatttacaagcaagttataaaaacaattcagagactgtaaatgttttcttttctttttttttttttttttttttgagacagagtctcgcttag

SEQ ID NO: 20539 - DNA, 201 bp, Homo sapiens
ttataatcctatgaagttcttgggtgtttgtttgtttgttttttgagacagagtctcattctgttgcccaggctggagtgcaatggtgcggtcttggtttmctgcaacctccgcctcccgagttcaagcgattctcctgcctcagcctcccaagtagctgggattacaggtgcctaccaccacgcccggctaatttctgta

SEQ ID NO: 20540 - DNA, 201 bp, Homo sapiens
gtaggtttagatgtgtttctgtctgaaaaaggaatagataatcccttatatttttataatcctatgaagttcttgggtgtttgtttgtttgttttttgagmcagagtctcattctgttgcccaggctggagtgcaatggtgcggtcttggtttactgcaacctccgcctcccgagttcaagcgattctcctgcctcagcct

SEQ ID NO: 20541 - DNA, 201 bp, Homo sapiens
gacctggggaacacagtctcaagaggtcctgagaaagtgtgccccagcggtcggaattacagtttgcttttagatattttagggaagcaggagttataggraaaggcataaatcaatgcatggaaggtatgcagtggtttgccccaaaaaggtgggataacttgaaacagaagcttagtttataggtggattcagagactc

SEQ ID NO: 20542 - DNA, 201 bp, Homo sapiens
agcctgtaaaatattttaaagaggtttattctgagccaatacaagtgtcaatgacctggggaacacagtctcaagaggtcctgagaaagtgtgccccagcrgtcggaattacagtttgcttttagatattttagggaagcaggagttatagggaaaggcataaatcaatgcatggaaggtatgcagtggtttgccccaaaa

SEQ ID NO: 20543 - DNA, 201 bp, Homo sapiens
ataagggatataagacaaatcccttctagatctgagtcatgtcttggaagagagctactctgaaatgcctatagaccataagcagactgtgtgtgagcaaraaatatacttttatatgttaagctcttgaaaatggagcctgttagttcctatagcatgttctgtcctaatataatcagattaaaataatcatcttccatt

SEQ ID NO: 20544 - DNA, 201 bp, Homo sapiens
ggttgcctgcctccagaccctacctgccttaaaacaagtgttacagatgctatattattttcatatttattatttttaaatcaatttcattatatattccygagtgaattgtagcataatttatatttctccttaatagcaagctttgagagtttacattgaaactgtactagtgtgcattttgagcagataaattcaaga

SEQ ID NO: 20545 - DNA, 201 bp, Homo sapiens
attctatattccttcctttcctgtgtagaactccttttattgtataaactgaagggagagaaattaaatagtctaatgatctcaagttgatttcgtgagakaatataactacctttaagtaacatttaaaagactaacagaaattaagagcagttcttaaaaaacagttgggatatcctattaatttatctaaaagtgacc

SEQ ID NO: 20546 - DNA, 201 bp, Homo sapiens
tttgtaggaaaaatatgcatctattttttcttgacttcttttatatagtaataaaagttattttggaagctctttgtgtgttatcaatttgtctggggtarcaggggtaggcattgttgtgaaagtttctttgccatggtttttggtttgtttatttttcagcagagatagtcttttttcagtttcttgattatgttaact

SEQ ID NO: 20547 - DNA, 201 bp, Homo sapiens
attagccgggcatggtggtgtgcacctgtaatcccagctatttgggaggctgaggcaggagaatatcttgagcccaggaagcagaggttgcagtgagccargatcatgccactgcactccagcttgggcgacatagtgagactctgtctcaaaaaaaaagaagactaaaaaataagtatgtgaggtgatggatatgttaat

SEQ ID NO: 20548 - DNA, 201 bp, Homo sapiens
ttttgtatttttagtagagacagggtttcaccgtgttagccaggatggtctcgatctcctgacctcaagatctgcccgccttggcctcccaaagtgctggrattacaggcgtgagccactgcgcccggccagcttctaggtttttaggaaggccatcttcttcaatgctctcccccacctgctacatcaggaatcacccaa

SEQ ID NO: 20549 - DNA, 201 bp, Homo sapiens
aaaagcaagatgcagaacaatatgtatagggataataaattttctggaatgatccatgagaaggtgataaaaggggttacattaggtagtggaactggagygaggaaacttcattttctaccctttggttctatatgaaaggttttgtcatattacacatattgctttttaaataatttaaaattagtttagaacttaaaa

SEQ ID NO: 20550 - DNA, 201 bp, Homo sapiens
tgtggaagttcaaaagacagatggcatctagggctcccagtgcctcatctcctgatgggtgggatttggattttctttccacaaccctcacaacatgtctycttactctacattctacatctgtgtgagggacaaaaaattctgcatgagcatgtttctagcatctaggtgttttttttgtttgtttttttgttttttttt

SEQ ID NO: 20551 - DNA, 201 bp, Homo sapiens; identical to SEQ ID NO: 2688

SEQ ID NO: 20552 - DNA, 201 bp, Homo sapiens
gaaatgcaacattattttgtggaagttcaaaagacagatggcatctagggctcccagtgcctcatctcctgatgggtgggatttggattttctttccacarccctcacaacatgtcttcttactctacattctacatctgtgtgagggacaaaaaattctgcatgagcatgtttctagcatctaggtgttttttttgtttg

SEQ ID NO: 20553 - DNA, 201 bp, Homo sapiens
gacgagggagagggtgaggccaccaggcagtgagcgccctcggcggccgcgtgatcccgggggtggggcccatttctgagttggggccagctccccacccscaagaggccccacattccgggccagcagcccagaaagtccctccccgcaggcggagacagccccaagaagtcgacgccccggtcccgccgcccggccact

SEQ ID NO: 20554 - DNA, 201 bp, Homo sapiens; identical to SEQ ID NO: 2668

SEQ ID NO: 20555 - DNA, 201 bp, Homo sapiens; identical to SEQ ID NO: 2669

SEQ ID NO: 20556 - DNA, 201 bp, Homo sapiens
aaaagtgtggagtgatgattaggattcaggcctctccttgcctagccttcctccattctctctctctcaacctctcactctctctctctctctctctctctgtctctgtctcatttaacagagcactggattgcgaatggagtgcaagtagagactgagaatcaccactgtagtgattgtatctgtgtggcaaatcatctt

SEQ ID NO: 20557 - DNA, 201 bp, Homo sapiens; identical to SEQ ID NO: 2670

SEQ ID NO: 20558 - DNA, 201 bp, Homo sapiens
gaaaagtgtggagtgatgattaggattcaggcctctccttgcctagccttcctccattctctctctctcaacctctcactctctctctctctctctctctctgtctctgtctcatttaacagagcactggattgcgaatggagtgcaagtagagactgagaatcaccactgtagtgattgtatctgtgtggcaaatcatct

SEQ ID NO: 20559 - DNA, 201 bp, Homo sapiens; identical to SEQ ID NO: 2672

SEQ ID NO: 20560 - DNA, 201 bp, Homo sapiens
ataaatatcatatatttatatataatatttactattaatatcatatatttatatataatatttactattaatattatatatttatatataatatttactawtattatatatttatatataatatttaatattttatatatataaaatttttcgcagtaaagagtttaattaatgcaaagcagccaagcagaaggactggag

SEQ ID NO: 20561 - DNA, 201 bp, Homo sapiens
ggaaaagtgtggagtgatgattaggattcaggcctctccttgcctagccttcctccattctctctctctcaacctctcactctctctctctctctctctctctgtctctgtctcatttaacagagcactggattgcgaatggagtgcaagtagagactgagaatcaccactgtagtgattgtatctgtgtggcaaatcatc

SEQ ID NO: 20562 - DNA, 201 bp, Homo sapiens
cttccctggtgtgagatcggcatcagggtgtgagcaccactgggcacctaaggcatttcgttgcgtaactctcagttattttgccactatgcttataagaraaaaacatactcaagttccaaagtaactgtcagaagcactctttccttcgtggtggagcccttaagtttggccccgagctgtctacaccttgtttgctca

SEQ ID NO: 20563 - DNA, 201 bp, Homo sapiens
actataaatatcatatatttatatataatatttactataaatatcatatatttatatataatatttactattaatatcatatatttatatataatatttamtattaatattatatatttatatataatatttactattattatatatttatatataatatttaatattttatatatataaaatttttcgcagtaaagagtt

SEQ ID NO: 20564 - DNA, 201 bp, Homo sapiens
tggaaaagtgtggagtgatgattaggattcaggcctctccttgcctagccttcctccattctctctctctcaacctctcactctctctctctctctctctctctgtctctgtctcatttaacagagcactggattgcgaatggagtgcaagtagagactgagaatcaccactgtagtgattgtatctgtgtggcaaatcat

SEQ ID NO: 20565 - DNA, 201 bp, Homo sapiens
ttatatatttatatataatatttactataaatatcatatatttatatataatatttactataaatatcatatatttatatataatatttactattaatatyatatatttatatataatatttactattaatattatatatttatatataatatttactattattatatatttatatataatatttaatattttatatatat

SEQ ID NO: 20566 - DNA, 201 bp, Homo sapiens
gaaaaaggtttcaaaaagggagtgtccagtgtgtcaaactgttcattttgtgttgtttaaaaaacaaaacaaaacacattctgtgtcctttcgtctttccstagccatcatcgtctacagactgccgtggacctggaaatgcagcaagctcctgatgaaatccatccatgcagggttaaatgcagttgctgccattcttgc

SEQ ID NO: 20567 - DNA, 201 bp, Homo sapiens
ggagtgaagaaaatgccagcaaaggaactcctccaccgtcccctagagggagccactgagaggcaggggtaacatggggaagaggggagaagcaaaagccragggaaaaaggtttcaaaaagggagtgtccagtgtgtcaaactgttcattttgtgttgtttaaaaaacaaaacaaaacacattctgtgtcctttcgtctt

SEQ ID NO: 20568 - DNA, 201 bp, Homo sapiens
ccacgccgcggtaggtgaacttgcggaaggtccgcttcttcttctgctctacttctgccatcttgccggatcctcagaagagcagcatactggacttctgwatgcaccagaagaaatgcaacattattttgtggaagttcaaaagacagatggcatctagggctcccagtgcctcatctcctgatgggtgggatttggatt

SEQ ID NO: 20569 - DNA, 201 bp, Homo sapiens
tgctaaccgagcttctcagaaatattatttcacaacttcatggctttgcttagtgggaggaattttggcacctggcttcttccttgctcagatccagaggrcaggtagtgtttaagaaaacaggatttgcaattaggaagacctcagtttggattaggttcatccatttgatagttggtgaccgtggaccaagttacttct

SEQ ID NO: 20570 - DNA, 201 bp, Homo sapiens
ccaaggggggcgagtgaagcatccgccctgggttcctctcctcctagagtgttaaactcagtcgagtccgggaagctgccaggacttccaagtgtgtttcrccgccctgcccagtcattggacggtcttgagcccgacttgtttatgtggcagaagagtggcgaaagttcccccgcggggcttcctattgggcactggccc

SEQ ID NO: 20571 - DNA, 201 bp, Homo sapiens; identical to SEQ ID NO: 2678

SEQ ID NO: 20572 - DNA, 201 bp, Homo sapiens; identical to SEQ ID NO: 2684

SEQ ID NO: 20573 - DNA, 201 bp, Homo sapiens
ctgctctacttctgccatcttgccggatcctcagaagagcagcatactggacttctgtatgcaccagaagaaatgcaacattattttgtggaagttcaaargacagatggcatctagggctcccagtgcctcatctcctgatgggtgggatttggattttctttccacaaccctcacaacatgtcttcttactctacattc

SEQ ID NO: 20574 - DNA, 201 bp, Homo sapiens
ataatacatattttataatatttactattaatattatatatttatatataatatttactataaatatcatatatttatatataatatttactataaatatyatatatttatatataatatttactattaatatcatatatttatatataatatttactattaatattatatatttatatataatatttactattattatat

SEQ ID NO: 20575 - DNA, 201 bp, Homo sapiens
tttgggaatttttgatataatatgatccagattggggagaaaatgctactgtggttcattgttcataatttgcttttcgagtgttgaaatcctgagtattktttttttctgtatgtagatgttcaagttcactcatctaagactccttacccggagtggtgtttgcataatgtgatggtgatgatgataacaaaaaaacaa

SEQ ID NO: 20576 - DNA, 201 bp, Homo sapiens
tgtagaatattggcaggagacttaatgaccagtttgagtgtctgttacgtcccttataaaaaaactatgggcatattgtagttggtgctggttagatttatttatttatttatttttaatttttttttaacccctggaagaaaagtgtcattacactggaggaatgcaatttggcaatgacctaagacagcgtttggtccc

SEQ ID NO: 20577 - DNA, 201 bp, Homo sapiens
acccacgacctggctccctgtctctatcagcgctcacattccccattcaaacctctaggtcttgagcagattgtaggaggttctggcccagtgaactcacytggaacactcaaatgaaggaagtaaaagggtgtgaggcaagaggagcagtgacagccttaagtgtgagctaattcaccccaagagcaagcaaaagtgcaa

SEQ ID NO: 20578 - DNA, 201 bp, Homo sapiens
atgtagaatattggcaggagacttaatgaccagtttgagtgtctgttacgtcccttataaaaaaactatgggcatattgtagttggtgctggttagatttatttatttatttatttttaatttttttttaacccctggaagaaaagtgtcattacactggaggaatgcaatttggcaatgacctaagacagcgtttggtcc

SEQ ID NO: 20579 - DNA, 201 bp, Homo sapiens
tatggcagaaatttagtctgaagtctagtccaaataaatgttttctatattctcatatctatttatatgaatcttatcacattaaggctagactgagacaygtcacaaatttctctcttgtggaatgaaggtgaaaaagagaaatataagcattgggtgaatgttgaaatggataagttctgagattcctcttaaagttta

SEQ ID NO: 20580 - DNA, 201 bp, Homo sapiens
ctaatttttgtatgtttggtagaaagggggtttcatcatgttgctcaggctggtctcaaactcctgagctcaggagatccacctgccttggcggcccaaartgctggcattataggcatgagccaccacccctgcctgtgaacttttttaaaacagagttgttaaatgatagaagtttccctctggagattgtaagcagtt

SEQ ID NO: 20581 - DNA, 201 bp, Homo sapiens
gctgctggcccggaatgtggggcctcttgcgggtggggagctggccccaactcagaaatgggccccacccccgggatcacgcggccgccgagggcgctcaytgcctggtggcctcaccctctccctcgtccagcatccaagctcgcagagggcttcagtaacagacctagttagttgctcaaagagaaaattccgaggatt

SEQ ID NO: 20582 - DNA, 201 bp, Homo sapiens
cgctctggcaatcttttccccgctgccttcccctcctcatctgcagcctggaagcaagttcagcaaaaggctgaggcgaaagtgtttccgcgcccccgatygcgcaggctcggtccacaggggcgactttccggggcgcgtgggctgcagcggcccgactgcgcggcgctccggcatcgcgcccgggctcaagtttctggg

SEQ ID NO: 20583 - DNA, 201 bp, Homo sapiens
taggaggagaggaacccagggcggatgcttcactcgccccccttggccagcccctttacccagggccgaggatgttacaaatacgggcaaattctcgctcyggcaatcttttccccgctgccttcccctcctcatctgcagcctggaagcaagttcagcaaaaggctgaggcgaaagtgtttccgcgcccccgattgcgca

SEQ ID NO: 20584 - DNA, 201 bp, Homo sapiens
acccctgttgcaccagccagaactacagctttcactgggctgatttcaggaactttttcatgataagaagaccgaccatggaccggttctggccagtgtasagggattgtgcacttgtatgcattcacgtcctgaaaagaccttttgaagtgtaggtttgaagtaatacatttaaatgtatttgaagtaatacaattaaat

SEQ ID NO: 20585 - DNA, 201 bp, Homo sapiens
cttaccacaacctgactggccctgatgtccttggctgtaaactgctctggcagcttctgaccacttcctacccacgccactgcctctaaatttccctgacycccatctccactgagaaaccttccctgagtctgcccctgcccagacttttatatcccactgacctccccatccagtgcctccttgtgtcacctgtcagga

SEQ ID NO: 20586 - DNA, 201 bp, Homo sapiens
tctccacagctgtggctctcacaggggtccagtaacaccatcaccacttgcttctacgcgtctatgagtggcattggcttcctgctgtgcttgtccctggttcttcaccactctttgccgagttcccttaaggctgttgcacctctgttaatagtccatttattaaactcacttcaattaaatcctttgtgcaaaccagct

SEQ ID NO: 20587 - DNA, 201 bp, Homo sapiens
tgaggcaggagaaccgcttgaacccaggaggcggaggttgcagtgagccaagatcgtgccattgcactccagcctggacaataagagtgaaactccgcctaaaaaaaaaaaaaagatttggaccagaaagctgccccagatgaccaagacaaaggaactccctgccggcaccatgactcatgaggcaagccaagccccaga

SEQ ID NO: 20588 - DNA, 201 bp, Homo sapiens
ctggcagtgtctcagaattttggctcatagatctgagggccttattgaagtatgaaggaatcatgcaagtccaaaaagaactctgaatgtagaccagagargccctcttaataggtcaagtgtttggctagataaattttgcctacaaactttatcttacacttcagtggatcttaggaaggcttgactacatttctgtta

SEQ ID NO: 20589 - DNA, 201 bp, Homo sapiens
tgggactagattagtgttcttaacccggtatatgtggacagaacatggatgaggggaaattgcatctttattttcagtaactcctaactgaaatttagcartctctttattatgaatgcagacaacaaaccccactagtattcataggacctgtgaccttgtcaccaatataaatcactgataatttcatgttgcatcaga

SEQ ID NO: 20590 - DNA, 201 bp, Homo sapiens
cggtatatgtggacagaacatggatgaggggaaattgcatctttattttcagtaactcctaactgaaatttagcaatctctttattatgaatgcagacaamaaaccccactagtattcataggacctgtgaccttgtcaccaatataaatcactgataatttcatgttgcatcagaatttttgcagatatctcaatttatc

SEQ ID NO: 20591 - DNA, 201 bp, Homo sapiens
aaactgggctgcagtttgctaatccgtgacaggacactttgggactagattagtgttcttaacccggtatatgtggacagaacatggatgaggggaaattkcatctttattttcagtaactcctaactgaaatttagcaatctctttattatgaatgcagacaacaaaccccactagtattcataggacctgtgaccttgt

SEQ ID NO: 20592 - DNA, 201 bp, Homo sapiens
cactctccaccctttgccttggcttgtgctctgggaggctgacgcctacaactgtgtcatctgactctccttgtcctctggcttccaattgggtttggctratggctggtgctgactggggattagaaggcaggaagccaggtcagcctatttatcccactgtgactccttgttgggacatggttttgcagtggctgcatt

SEQ ID NO: 20593 - DNA, 201 bp, Homo sapiens; identical to SEQ ID NO: 2690

SEQ ID NO: 20594 - DNA, 201 bp, Homo sapiens
attgacctaacaccttcactccactcttgagttaattttgcttcatagcagcagcagatgagaatctctgggattccagaccccatttaacaaaacatttygggaggatgaaaacatggccaaatggtaccaatggtgttgaatcatcttgaagttatatgtaaaactgagagaatttcaacttttaaattatcttttaag

SEQ ID NO: 20595 - DNA, 201 bp, Homo sapiens
tgcagtttgctcttgagagagggaagacaggaacctcctggacctggacttgccgtttagtgtgacaaatggattttcaaagtgcccgcccacccaaaccratttgaaccaaagcccctccttgatgaagtgaagcttgctccctgccctctttccaacattatcctcacccttctccactggacaaaaacaatgtcagca

SEQ ID NO: 20596 - DNA, 201 bp, Homo sapiens
aaacaaaaacagcatgggcagcggtgggcttggccttatcctgcaatgaaactacttgcagtttgctcttgagagagggaagacaggaacctcctggaccyggacttgccgtttagtgtgacaaatggattttcaaagtgcccgcccacccaaaccaatttgaaccaaagcccctccttgatgaagtgaagcttgctccct

SEQ ID NO: 20597 - DNA, 201 bp, Homo sapiens
aaacccagtaaaccgggtccccatgaggtgtctcacagctgtaatcccagggctttgggaggtggaggcaagagaatcacttgagctcaggagagctatgmtcgcaccactgcactgcagcctggtgacagctagactctgtctggaaacaaaacaaaaacagcatgggcagcggtgggcttggccttatcctgcaatgaa

SEQ ID NO: 20598 - DNA, 201 bp, Homo sapiens
ctgtctcaaaaaaaaacaaaaaacaaaaaacaaaaaaaacccagtaaaccgggtccccatgaggtgtctcacagctgtaatcccagggctttgggaggtgraggcaagagaatcacttgagctcaggagagctatgatcgcaccactgcactgcagcctggtgacagctagactctgtctggaaacaaaacaaaaacagca

SEQ ID NO: 20599 - DNA, 201 bp, Homo sapiens
ctggacctggacttgccgtttagtgtgacaaatggattttcaaagtgcccgcccacccaaaccaatttgaaccaaagcccctccttgatgaagtgaagctygctccctgccctctttccaacattatcctcacccttctccactggacaaaaacaatgtcagcattatctaatgctattataagaaaaagggttctgactg

SEQ ID NO: 20600 - DNA, 201 bp, Homo sapiens
agaacagactctttgtagcaataagacatcaaattataaaaaggacctaagtcacacactcctacacttaagaaataaactatggtctaactgccacaaasgttttcttttcctctagaggctaaacaagcactggcttgagataagcaatattaaaacaattacaacttaatcagttcacagatgctgaccagctgaacc

SEQ ID NO: 20601 - DNA, 201 bp, Homo sapiens
tataagaaaaagggttctgactgccagggcttccagaatgcatttgggaacgttcacttctagccctcttctgtagctcatctccaaggactactttgctrtattgtcttgttgccgtcttgaaagaccttagaatgtgcaggaagtatacggggatgattttcaaagcaggctaaggaaataggagtggcaagccatggt

SEQ ID NO: 20602 - DNA, 201 bp, Homo sapiens
gggccacaagaacttggagaggcggcggcagccctctgggtagtggccgggcggcgggaccggggcgtcgacttcttggggctgtctccgcctgcggggakggactttctgggctgctggcccggaatgtggggcctcttgcgggtggggagctggccccaactcagaaatgggccccacccccgggatcacgcggccgcc

SEQ ID NO: 20603 - DNA, 201 bp, Homo sapiens
aatggattttcaaagtgcccgcccacccaaaccaatttgaaccaaagcccctccttgatgaagtgaagcttgctccctgccctctttccaacattatcctyacccttctccactggacaaaaacaatgtcagcattatctaatgctattataagaaaaagggttctgactgccagggcttccagaatgcatttgggaacgt

SEQ ID NO: 20604 - DNA, 201 bp, Homo sapiens
tacaacttaatcagttcacagatgctgaccagctgaacccctgttgcaccagccagaactacagctttcactgggctgatttcaggaactttttcatgatwagaagaccgaccatggaccggttctggccagtgtacagggattgtgcacttgtatgcattcacgtcctgaaaagaccttttgaagtgtaggtttgaagta

SEQ ID NO: 20605 - DNA, 201 bp, Homo sapiens
ttgggtgattcctgatgtagcaggtgggggagagcattgaagaagatggccttcctaaaaacctagaagctggccgggcgcagtggctcacgcctgtaatyccagcactttgggaggccaaggcgggcagatcttgaggtcaggagatcgagaccatcctggctaacacggtgaaaccctgtctctactaaaaatacaaaa

SEQ ID NO: 20606 - DNA, 201 bp, Homo sapiens
aaaaaaaaacaaaaaaacaaacaaaaaaaacacctagatgctagaaacatgctcatgcagaattttttgtccctcacacagatgtagaatgtagagtaagragacatgttgtgagggttgtggaaagaaaatccaaatcccacccatcaggagatgaggcactgggagccctagatgccatctgtcttttgaacttccaca

SEQ ID NO: 20607 - DNA, 201 bp, Homo sapiens
caaacaaaaaaaacacctagatgctagaaacatgctcatgcagaattttttgtccctcacacagatgtagaatgtagagtaagaagacatgttgtgagggytgtggaaagaaaatccaaatcccacccatcaggagatgaggcactgggagccctagatgccatctgtcttttgaacttccacaaaataatgttgcatttc

SEQ ID NO: 20608 - DNA, 201 bp, Homo sapiens
agtggccgggcggcgggaccggggcgtcgacttcttggggctgtctccgcctgcggggagggactttctgggctgctggcccggaatgtggggcctcttgsgggtggggagctggccccaactcagaaatgggccccacccccgggatcacgcggccgccgagggcgctcactgcctggtggcctcaccctctccctcgtc

SEQ ID NO: 20609 - DNA, 201 bp, Homo sapiens
acatcaaagggtgttaaggaggaacctgtaaggtggtgtaaactaaaaataaaatcctaagcccctcactgactgaatggacctccttggccaagcagacyccagaaaaaccttaaagctgagtttctagctacagccggaagggaagtctaccccctccattttggaatttagactcaacagctgactagcattaatgtt

SEQ ID NO: 20610 - DNA, 201 bp, Homo sapiens
cggtgaaaccctgtctctactaaaaatacaaaaaattggccagacgtggtggcaggcacctgtagtcccagctactcgggaggctgaggcaggagaatggmgtgaaccagggaggcggagcttgcagtgagacgagatcacgccactgcactccagcctgggcgacagagcgagactctgtctcaaaaaaaaaaaaaaaaa

SEQ ID NO: 20611 - DNA, 201 bp, Homo sapiens; identical to SEQ ID NO: 2691

SEQ ID NO: 20612 - DNA, 201 bp, Homo sapiens
tatggaatggcctccttgcaggctataaccttttataagaaataaagtctcctcttttttcaaatttataattttttgttttaagttaacagtaaaggccrggcgcagtgcctcacacctgtaatcttagcactttgggaggctaaggcgggcagatcacttgagtccaggagtttgagaacagcctgggcaacaaggtga

SEQ ID NO: 20613 - DNA, 201 bp, Homo sapiens
acctccccatccagtgcctccttgtgtcacctgtcaggatgtaatataaggatctgcttctctggctgtctccactctcagactgccctattgaaggcatkgattctctaattgatcattttattcctccttgggatgtggcagttactcaataaacatgtgttgggaggctaatgagactgagtgtgttaatcagggtcc

SEQ ID NO: 20614 - DNA, 201 bp, Homo sapiens
attttagtatgtaagaactgggttatacgattattatagagtagccagaaacattgttttacctttggagaattttttttttttttttgagacggagtctygctctgttgcgcaggctggagtgcagtggcgcaatcttggctcactgcaacctccgcctcccgggttcaagtgattctcctgccttagcctcctgagtag

SEQ ID NO: 20615 - DNA, 201 bp, Homo sapiens
cctgtcaggatgtaatataaggatctgcttctctggctgtctccactctcagactgccctattgaaggcatggattctctaattgatcattttattcctcsttgggatgtggcagttactcaataaacatgtgttgggaggctaatgagactgagtgtgttaatcagggtcctggcagaaaacaaacagcatattggaatt

SEQ ID NO: 20616 - DNA, 201 bp, Homo sapiens
taatataaggatctgcttctctggctgtctccactctcagactgccctattgaaggcatggattctctaattgatcattttattcctccttgggatgtggyagttactcaataaacatgtgttgggaggctaatgagactgagtgtgttaatcagggtcctggcagaaaacaaacagcatattggaattgagtaatttcat

SEQ ID NO: 20617 - DNA, 201 bp, Homo sapiens
aatccaaatcccacccatcaggagatgaggcactgggagccctagatgccatctgtcttttgaacttccacaaaataatgttgcatttcttctggtgcatwcagaagtccagtatgctgctcttctgaggatccggcaagatggcagaagtagagcagaagaagaagcggaccttccgcaagttcacctaccgcggcgtgg

SEQ ID NO: 20618 - DNA, 201 bp, Homo sapiens
atcactgataatttcatgttgcatcagaatttttgcagatatctcaatttatcaattatacccagcacttcttcaaagtaaccctagttactttgtagggrgggaggagggggaagttcttacttgatttactgtcataggctggcacacatgcaaagctgaatacctctcatggaaaaacacccatgggttctttggggg

SEQ ID NO: 20619 - DNA, 201 bp, Homo sapiens
tgcatggtggccttgaccatttattatgttacagtgcagtattagttttccattgctgctgcaacagatgaccacatggcagcgtagctaacacaaatgtrttatcttacagttgtggagcacgtaagtctgacatgggtctcactgggccaaaatcaagggttcacagggctgctgagctcctctctgaagcttctaggg

SEQ ID NO: 20620 - DNA, 201 bp, Homo sapiens
aacacttgttccacagaaatgacctatttactctgtcctgacaaactctgggagagacaggctgagctgaacgcagctgcagaccttcatcctctgaaacmaaagcagatcaccagttcatctttcttgccctttaggtttcctgagcagcagttagactcagtcctttgtggccccaaactcaaggggatacagactaag

SEQ ID NO: 20621 - DNA, 201 bp, Homo sapiens
gcgcaatcttggctcactgcaacctccgcctcccgggttcaagtgattctcctgccttagcctcctgagtagctgggactacaggcgcatgccaccacatycggctaatttttttgtatttttagtagagacagggttttaccgtattagccaggatggtcttaatctcctgacctcgtgatccgcccacttcagcctccc

SEQ ID NO: 20622 - DNA, 201 bp, Homo sapiens
gggccagtgcccaataggaagccccgcgggggaactttcgccactcttctgccacataaacaagtcgggctcaagaccgtccaatgactgggcagggcggygaaacacacttggaagtcctggcagcttcccggactcgactgagtttaacactctaggaggagaggaacccagggcggatgcttcactcgccccccttgg

SEQ ID NO: 20623 - DNA, 201 bp, Homo sapiens
cagacctagttagttgctcaaagagaaaattccgaggattttatactcaccacttgcttttaacacttcccgtgtctcgtccttatttgtggggaggttgmgtagggcagtggtgcgccctcttggttaagagaagagagggatccgttgggtagggttatgtgtgtgcttttaactactaacgaagcctccttagccaca

SEQ ID NO: 20624 - DNA, 201 bp, Homo sapiens
gggaggccaaggcgggcagatcttgaggtcaggagatcgagaccatcctggctaacacggtgaaaccctgtctctactaaaaatacaaaaaattggccagrcgtggtggcaggcacctgtagtcccagctactcgggaggctgaggcaggagaatggcgtgaaccagggaggcggagcttgcagtgagacgagatcacgcc

SEQ ID NO: 20625 - DNA, 201 bp, Homo sapiens
ttacgacattggactgtttggatggcacattttagtatgtaagaactgggttatacgattattatagagtagccagaaacattgttttacctttggagaaytttttttttttttttgagacggagtctcgctctgttgcgcaggctggagtgcagtggcgcaatcttggctcactgcaacctccgcctcccgggttcaagt

SEQ ID NO: 20626 - DNA, 201 bp, Homo sapiens
gggtagtggccgggcggcgggaccggggcgtcgacttcttggggctgtctccgcctgcggggagggactttctgggctgctggcccggaatgtggggcctyttgcgggtggggagctggccccaactcagaaatgggccccacccccgggatcacgcggccgccgagggcgctcactgcctggtggcctcaccctctccct

SEQ ID NO: 20627 - DNA, 201 bp, Homo sapiens
ggcagaaagggcagaagcctttattgtggcttttgaaaagaggaaaggggaaagcaaagtaagcaagcagaacaaccttatgattggacagtttaaataayttcagcagggcctgtagtgatctgataaaagcaggtaggttggggcgtggaaccctaattggttggtctgcatatcaaagatgtgctggcaggcaaattc

SEQ ID NO: 20628 - DNA, 201 bp, Homo sapiens
ttgcctacaaactttatcttacacttcagtggatcttaggaaggcttgactacatttctgttagcagataaagctttttttaaaagagaaatcaaatggtrtaagtcagcattttacctttgttggaaaataatttagcttgacttctgtcatttgcatgttgctaaagccaatgctgaatccttgagattctagtcaaca

SEQ ID NO: 20629 - DNA, 201 bp, Homo sapiens
gcagagtctggtctttatccaggcaaaagagaattaggattaaatccttgattccccaattctcatctactacctttatcccatatgttagcagaaaatasccagatggggaagaaaaggatggtgcttgatcacatctaggttctatttattttagagccctcgctcatgcaaatgtataaaccctaggctaaaatataa

SEQ ID NO: 20630 - DNA, 201 bp, Homo sapiens
cctgacgacatgtgcccaaggtggttggggcacagcttggttttacacattttagggagacatgagacattaattaatatatgtaagatgtacattggttyggtctggaaaggcaggacaactaaaaatggggaggggcttccagattatagaaatttgcattttttaaagtttctgattagccttttcaaaggaggcaat

SEQ ID NO: 20631 - DNA, 201 bp, Homo sapiens
gaatgtagagtaagaagacatgttgtgagggttgtggaaagaaaatccaaatcccacccatcaggagatgaggcactgggagccctagatgccatctgtcytttgaacttccacaaaataatgttgcatttcttctggtgcatacagaagtccagtatgctgctcttctgaggatccggcaagatggcagaagtagagcag

SEQ ID NO: 20632 - DNA, 201 bp, Homo sapiens
cctcacgaggtcctgacgacatgtgcccaaggtggttggggcacagcttggttttacacattttagggagacatgagacattaattaatatatgtaagatrtacattggttcggtctggaaaggcaggacaactaaaaatggggaggggcttccagattatagaaatttgcattttttaaagtttctgattagccttttca

SEQ ID NO: 20633 - DNA, 201 bp, Homo sapiens
atagcctcttcctttgagaagaggcaggaagaaactctcttactaagggaacagagtaagacactggactgacaagcagacacaaggataagaggaaggtwtctgggagaatggggagtgagcagagcatctttgagaggcattccagcaaaatgtctaattcagtacagcctcttttgtgctacgtggggagcatgggag

SEQ ID NO: 20634 - DNA, 201 bp, Homo sapiens; identical to SEQ ID NO: 2689

SEQ ID NO: 20635 - DNA, 201 bp, Homo sapiens
tcaaagggtgttaaggaggaacctgtaaggtggtgtaaactaaaaataaaatcctaagcccctcactgactgaatggacctccttggccaagcagaccccrgaaaaaccttaaagctgagtttctagctacagccggaagggaagtctaccccctccattttggaatttagactcaacagctgactagcattaatgtttaa

SEQ ID NO: 20636 - DNA, 201 bp, Homo sapiens
gtgaaccagggaggcggagcttgcagtgagacgagatcacgccactgcactccagcctgggcgacagagcgagactctgtctcaaaaaaaaaaaaaaaaamaaaaaaacaaacaaaaaaaacacctagatgctagaaacatgctcatgcagaattttttgtccctcacacagatgtagaatgtagagtaagaagacatgtt

SEQ ID NO: 20637 - DNA, 201 bp, Homo sapiens
tcacacagatgtagaatgtagagtaagaagacatgttgtgagggttgtggaaagaaaatccaaatcccacccatcaggagatgaggcactgggagccctasatgccatctgtcttttgaacttccacaaaataatgttgcatttcttctggtgcatacagaagtccagtatgctgctcttctgaggatccggcaagatggc

SEQ ID NO: 20638 - DNA, 201 bp, Homo sapiens
aaaaaaaacccagtaaaccgggtccccatgaggtgtctcacagctgtaatcccagggctttgggaggtggaggcaagagaatcacttgagctcaggagagstatgatcgcaccactgcactgcagcctggtgacagctagactctgtctggaaacaaaacaaaaacagcatgggcagcggtgggcttggccttatcctgca

SEQ ID NO: 20639 - DNA, 201 bp, Homo sapiens
tgcccccagatagccacggggcttcctccctgccttcagggcttgcatcaaatgtcagctgcttagtgaggcgttctctcctctcctactagaaattgagkccggccacagtgactcacgcttataatcccagcactttgggaggccgaggcgggtggatcatgaggtcaagagatcgagaccatcctggccaacacagtg

SEQ ID NO: 20640 - DNA, 201 bp, Homo sapiens
gtcccaaacctccaaagacatcttacacaggccttcaagggcccgcaagatctgccccatccgcatctcgcctgttgcctttctaaactcacttcgctttsctcacctgctgcaaccacactgatctcctgctgtcccccaagccaggaaacaccaggcacactccttccccagggcctttgcatcctaggttccctctgt

SEQ ID NO: 20641 - DNA, 201 bp, Homo sapiens; identical to SEQ ID NO: 2692

SEQ ID NO: 20642 - DNA, 201 bp, Homo sapiens; identical to SEQ ID NO: 2694

SEQ ID NO: 20643 - DNA, 201 bp, Homo sapiens; identical to SEQ ID NO: 2695

SEQ ID NO: 20644 - DNA, 201 bp, Homo sapiens; identical to SEQ ID NO: 2696

SEQ ID NO: 20645 - DNA, 201 bp, Homo sapiens; identical to SEQ ID NO: 2698

SEQ ID NO: 20646 - DNA, 201 bp, Homo sapiens; identical to SEQ ID NO: 2699

SEQ ID NO: 20647 - DNA, 201 bp, Homo sapiens; identical to SEQ ID NO: 2701

SEQ ID NO: 20648 - DNA, 201 bp, Homo sapiens
ttaacacacagctctccaggcttacacacacagaaacagttctcgcacataaccttatgtgcacccagtgtttacaaatagtgactgagagtctgtacatkccaggccctggtaatgtggcaggaacgtgaccagggagctccctgctctcctggagataatttcagagacggctgtgaagagtgtctgctgaggaagtgg

SEQ ID NO: 20649 - DNA, 201 bp, Homo sapiens
ctgtagaggaagaaattgaggcacagggatttgagtaacttgcctaagggtacaggagtcaacagcaaagtctcagctcctgggctcagccaccaacaacrtctcagcactccgagggcagtggccacagtctcagaaccccacagctccaggccctcgagccacactcatgccgcccctctacctagaatgctcttccct

SEQ ID NO: 20650 - DNA, 201 bp, Homo sapiens
tccctcagggcagctagccctgaagttctcaggtctgcgtgtccccaaagatgtcctcctgctggtcctgaagacagaaccctcagggacccggccctggrgcccagggaatccaaggactaaatcttgctgtggaggaacagggacttctgtgccaccagccccaggcctcaacagccccctgccaccttccctttcctc

SEQ ID NO: 20651 - DNA, 201 bp, Homo sapiens; identical to SEQ ID NO: 2704

SEQ ID NO: 20652 - DNA, 201 bp, Homo sapiens
aatctctccccgggatgactgcttccatcttctcgcttcctgcccctgactctgggaagtggactctgaggaagggctaagtgggtacattggggagtgaytcctataagtgtaaaaggggaggaagcaggattgagcaacaagatgtgtcccagggagctcagaagcagagactgtccatgcgggcagctctgcaccgga

SEQ ID NO: 20653 - DNA, 201 bp, Homo sapiens; identical to SEQ ID NO: 2706

SEQ ID NO: 20654 - DNA, 201 bp, Homo sapiens; identical to SEQ ID NO: 2707

SEQ ID NO: 20655 - DNA, 201 bp, Homo sapiens; identical to SEQ ID NO: 2708

SEQ ID NO: 20656 - DNA, 201 bp, Homo sapiens
aggctgaggtaggaggctcccttgagcctgggaagcagaggttgcagtgagccaaggtcgcaccactgcactccagcctgggcgacacagcaaggccttgkctcaaaaaaaaaaaagaaaggggacaggaacagagtgacagaagcaggggctctttcagacccagggtaatctggagaggcctctaaagagatgaggttt

SEQ ID NO: 20657 - DNA, 201 bp, Homo sapiens
ctacctgctgcacactctctggcatggcttcaatatgccgcgcctggtgcagtgtgccaacgtggccccctgccccaacatcgtggactgctacattgccygacctaccgagaagaaaatcttcacctacttcatggtgggcgcctccgccgtctgcatcgtactcaccatctgtgagctctgctacctcatctgccacag

SEQ ID NO: 20658 - DNA, 201 bp, Homo sapiens; identical to SEQ ID NO: 2709

SEQ ID NO: 20659 - DNA, 201 bp, Homo sapiens
ggcgcccccgccgctcgtgcggtccagcagggctcccgcgggcgtcactccggccatcgtccccacctccacctgggccgcccggcaggcaggcggtgagwcgggggctaggaagggaccaggggcgccacctgctcgcgggaggccgggaggagtcttgggtcctccgatgccgggacgggggttgctgcggaacgcccg

SEQ ID NO: 20660 - DNA, 201 bp, Homo sapiens; identical to SEQ ID NO: 2710

SEQ ID NO: 20661 - DNA, 201 bp, Homo sapiens; identical to SEQ ID NO: 2711

SEQ ID NO: 20662 - DNA, 201 bp, Homo sapiens; identical to SEQ ID NO: 2712

SEQ ID NO: 20663 - DNA, 201 bp, Homo sapiens; identical to SEQ ID NO: 2713

SEQ ID NO: 20664 - DNA, 201 bp, Homo sapiens; identical to SEQ ID NO: 2714

SEQ ID NO: 20665 - DNA, 201 bp, Homo sapiens; identical to SEQ ID NO: 2716

SEQ ID NO: 20666 - DNA, 201 bp, Homo sapiens; identical to SEQ ID NO: 2717

SEQ ID NO: 20667 - DNA, 201 bp, Homo sapiens
gtggataagccagccaagtttaaaggacccagggccggctgacactgtccctacacccccatgactgattcatagcttgaccattcctgagcacagcttcmccgcactacatcttgggcaggcctttagaacctcagtcttgccatcggtacaatgggaattggatcaatcagggtcctagcagaaaacagatggcacatt

SEQ ID NO: 20668 - DNA, 201 bp, Homo sapiens
gtggctcccactgacctaacccaaccggaagtcagagggcaagtcagcctcccagtgtacagggcagggtggagagtagacctgagggacacagggaatayggtcagcatgacacccagttgttcctacacagaggatttttgtagaggtagaaggagacactgcaggtaaaacattagcacagcactaatgtatctgata

SEQ ID NO: 20669 - DNA, 201 bp, Homo sapiens; identical to SEQ ID NO: 2718

SEQ ID NO: 20670 - DNA, 201 bp, Homo sapiens; identical to SEQ ID NO: 2719

SEQ ID NO: 20671 - DNA, 201 bp, Homo sapiens
gtgagacctggttgggtcacagcgagaagggtgaggggtaaggctggagaagtggccagggactggaggttggggagcctagggcttacccagaaggtgayagggagccatagatgacttttcagcagggcgatgttggtcagatttctagggaagtgtggaggctgagttggaagggtggggctagaggtcaagagacca

SEQ ID NO: 20672 - DNA, 201 bp, Homo sapiens
ctctatatcgactgatgggagaaatgtcgtattttgctaagtgaaaaaaagcaacgtgcagaagagtgtagatagcatacttccacaggttaagactatayagttgaatatgaacagacgattcaggaaggaaaacaagaaactagggaccctggtgttcaggtaggcagctccggttgcagtctgcccctctgagtcact

SEQ ID NO: 20673 - DNA, 201 bp, Homo sapiens
aatatcatctctgtggagacaggactcgggccccaccctaagatccagggactcccaagggaggctggaaaccctggggttttccaaaagaggctggggcrctgcaggcttttattagttcctagtcaggacacactagtaaataagacaatgtgtccttatccccagggcacagcccagccccaccccagccgcagaccc

SEQ ID NO: 20674 - DNA, 201 bp, Homo sapiens
taaagcttgataacgctctctattggtacgtatatggggatacaggcactcccttgtcccttggagtgcaaactgaaacatctgtgaagacgattgggcartatgtatcaaaattttaaatacacatacaactttaaagcaaacatttcacatgtaggaatatgtcctgtagacacaattttcaaatgtgttcaataatga

SEQ ID NO: 20675 - DNA, 201 bp, Homo sapiens
aggctgtgggccaggaccatggaggaggggacattccagccctgcacagcctgcctttggcctggagctgttctgagcagtgcagttcactgatctcatcyagtatgtattgggtgactactattcaccaccaagagccagggcacattaagtcaccacaaggtggccctcacgtccccttgacgttctcagggtacgttc

SEQ ID NO: 20676 - DNA, 201 bp, Homo sapiens; identical to SEQ ID NO: 2693

SEQ ID NO: 20677 - DNA, 201 bp, Homo sapiens; identical to SEQ ID NO: 2697

SEQ ID NO: 20678 - DNA, 201 bp, Homo sapiens; identical to SEQ ID NO: 2700

SEQ ID NO: 20679 - DNA, 201 bp, Homo sapiens
ggaattcttggaagtcgcccagctactaagtggccaagctgaggtttgaatccaggtggaactccgtgttccatgctatcccactcccttcccccaccacsagggcttagaaggagcagagtaggggagaagaggagggtttccaagaatgaggtcttcccaatcaccccatcctgcccagactgtgattcccagaggaaa

SEQ ID NO: 20680 - DNA, 201 bp, Homo sapiens
cctcccacaccaccccagccacctccgccatcacacacgttcacaaccacacatgcacacagcctcccacaccaccccagccatctctgccatcacacackttcacaaccacacatgcacacagcctcccacaccaccccagccatctccaccatcacacacactcacaacaacgcacatcaaagcctacacacacgtggc

SEQ ID NO: 20681 - DNA, 201 bp, Homo sapiens
atatgcacacagcctcccacaccaccccagccatctccatcatcacacacattcacaaccacacatgcacacagcctcccacaccaccccagccacctccrccatcacacacattcacaaccacacatgcacacagcctcccacaccaccccagccatctccgccatcacacacgttcacaaccacacatgcacacagcct

SEQ ID NO: 20682 - DNA, 201 bp, Homo sapiens
ctcccacaccaccccagccatctccgccatcacacacgttcacaaccacacatgcacacagcctcccacaccaccccagccacctccgccatcacacacgytcacaaccacacatgcacacagcctcccacaccaccccagccatctctgccatcacacacgttcacaaccacacatgcacacagcctcccacaccacccc

SEQ ID NO: 20683 - DNA, 201 bp, Homo sapiens
cctcccacaccaccccagccatctccgccatcacacacgttcacaaccacacatgcacacagcctcccacaccaccccagccacctccgccatcacacacrttcacaaccacacatgcacacagcctcccacaccaccccagccatctctgccatcacacacgttcacaaccacacatgcacacagcctcccacaccaccc

SEQ ID NO: 20684 - DNA, 201 bp, Homo sapiens; identical to SEQ ID NO: 2703

SEQ ID NO: 20685 - DNA, 201 bp, Homo sapiens; identical to SEQ ID NO: 2702

SEQ ID NO: 20686 - DNA, 201 bp, Homo sapiens
acatgcacacagcctcccacaccaccccagccatctccgccatcacacacgttcacaaccacacatgcacacagcctcccacaccaccccagccacctccrccatcacacacgttcacaaccacacatgcacacagcctcccacaccaccccagccatctctgccatcacacacgttcacaaccacacatgcacacagcct

SEQ ID NO: 20687 - DNA, 201 bp, Homo sapiens; identical to SEQ ID NO: 2705

SEQ ID NO: 20688 - DNA, 201 bp, Homo sapiens
cctcccacaccaccccagccacctccaccatcacacacattcacaaccacacatgcacacagcctcccacaccaccccagccatctccgccatcacacacrttcacaaccacacatgcacacagcctcccacaccaccccagccacctccgccatcacacacgttcacaaccacacatgcacacagcctcccacaccaccc

SEQ ID NO: 20689 - DNA, 201 bp, Homo sapiens
tcaaatgtcagctgcttagtgaggcgttctctcctctcctactagaaattgaggccggccacagtgactcacgcttataatcccagcactttgggaggccraggcgggtggatcatgaggtcaagagatcgagaccatcctggccaacacagtgaaaccccgtctctactaaaaatacaaaaattagctgggcgtggtggc

SEQ ID NO: 20690 - DNA, 201 bp, Homo sapiens
catgcacacagcctcccacaccaccccagccacctccaccatcacacacattcacaaccacacatgcacacagcctcccacaccaccccagccatctccgycatcacacacgttcacaaccacacatgcacacagcctcccacaccaccccagccacctccgccatcacacacgttcacaaccacacatgcacacagcctc

SEQ ID NO: 20691 - DNA, 201 bp, Homo sapiens
cctcccacaccaccccagccatctccatcatcacacacattcacaaccacacatgcacacagcctcccacaccaccccagccacctccaccatcacacacrttcacaaccacacatgcacacagcctcccacaccaccccagccatctccgccatcacacacgttcacaaccacacatgcacacagcctcccacaccaccc

SEQ ID NO: 20692 - DNA, 201 bp, Homo sapiens
acatgcacacagcctcccacaccaccccagccacctccaccatcacacacattcacaaccacacatgcacacagcctcccacaccaccccagccatctccrccatcacacacgttcacaaccacacatgcacacagcctcccacaccaccccagccacctccgccatcacacacgttcacaaccacacatgcacacagcct

SEQ ID NO: 20693 - DNA, 201 bp, Homo sapiens
gacaaagatcataaagcttgataacgctctctattggtacgtatatggggatacaggcactcccttgtcccttggagtgcaaactgaaacatctgtgaagwcgattgggcagtatgtatcaaaattttaaatacacatacaactttaaagcaaacatttcacatgtaggaatatgtcctgtagacacaattttcaaatgtg

SEQ ID NO: 20694 - DNA, 201 bp, Homo sapiens
tctctgcctgatgcactggaggtcagcctctgcttgggctggagggttgcaaaggtctcagggaggggtggtcgccacctacttgccgacatgcattccarcatcttcctgggtggttctggctgcctggccaagggtggcttggaggtcagagtaaccagagaacatcactggctattcctgcagagaattaacgctcag

SEQ ID NO: 20695 - DNA, 201 bp, Homo sapiens
accacacatgcacacagcctcccacaccaccccagccacctccaccatcacacacattcacaaccacacatgcacacagcctcccacaccaccccagccayctccgccatcacacacgttcacaaccacacatgcacacagcctcccacaccaccccagccacctccgccatcacacacgttcacaaccacacatgcacac

SEQ ID NO: 20696 - DNA, 201 bp, Homo sapiens
tatgcacacagcctcccacaccaccccagccatctccatcatcacacacattcacaaccacacatgcacacagcctcccacaccaccccagccacctccaycatcacacacattcacaaccacacatgcacacagcctcccacaccaccccagccatctccgccatcacacacgttcacaaccacacatgcacacagcctc

SEQ ID NO: 20697 - DNA, 201 bp, Homo sapiens
ctgtatgccatcaaccccacaaagtagatactatcactattctcattctgtagaggaagaaattgaggcacagggatttgagtaacttgcctaagggtacrggagtcaacagcaaagtctcagctcctgggctcagccaccaacaacgtctcagcactccgagggcagtggccacagtctcagaaccccacagctccaggc

SEQ ID NO: 20698 - DNA, 201 bp, Homo sapiens
accacatatgcacacagcctcccacaccaccccagccatctccatcatcacacacattcacaaccacacatgcacacagcctcccacaccaccccagccayctccaccatcacacacattcacaaccacacatgcacacagcctcccacaccaccccagccatctccgccatcacacacgttcacaaccacacatgcacac

SEQ ID NO: 20699 - DNA, 201 bp, Homo sapiens
gtgctcaggagagtctctgcctgatgcactggaggtcagcctctgcttgggctggagggttgcaaaggtctcagggaggggtggtcgccacctacttgccracatgcattccagcatcttcctgggtggttctggctgcctggccaagggtggcttggaggtcagagtaaccagagaacatcactggctattcctgcagag

SEQ ID NO: 20700 - DNA, 201 bp, Homo sapiens; identical to SEQ ID NO: 2715

SEQ ID NO: 20701 - DNA, 201 bp, Homo sapiens
atccttaagatgatacattttatggtagctgctttttaacataattaaaaatttttaaataacaaaaacaaagcaccatgggtagtagctgagctgctgaragcacaaaggtacacctagcacagagggagccagcaaggggacttctgggagaaggcaacaactgagaaaagtcctgattcacagcgttcagcacgtgag

SEQ ID NO: 20702 - DNA, 201 bp, Homo sapiens; identical to SEQ ID NO: 2720

SEQ ID NO: 20703 - DNA, 201 bp, Homo sapiens
cactttcttcctactgcagaaagtaggaagatagagaaagcagaaagtaattcaagatactttatactgggtactcaatctaaactacctgggtgagactrtgtgtttcaatttctcagtactcccgtggaactgggttaataaatatttgctgagtagaatttactgcatgcaggctgagctgtcttaatgacccagctg

SEQ ID NO: 20704 - DNA, 201 bp, Homo sapiens
tgaacatagatcagatgaaggggctgggggaagatagcagacatgaggttacaggtatggggactacaaggtgtaagctatgccagggagtttgaacttgrccctgtaggaaataaggaggcaacgtacttagttaaaattattatcattgttatgttaaaatatgcataacataaaatttaccatttcacccatttaaaa

SEQ ID NO: 20705 - DNA, 201 bp, Homo sapiens
aacagtcattgttattattgactcacccttccttaaaattatattttcccttgtctttatagatacagctatagcctatctttcattctgcctttcagatkaatttatctttctgtgttttgggtccaatttcagctacgaggtaaaacggcttaaacacatacacatttatcctgtggttacctaatacttgtaagggtt

SEQ ID NO: 20706 - DNA, 201 bp, Homo sapiens
ttccttaaaattatattttcccttgtctttatagatacagctatagcctatctttcattctgcctttcagattaatttatctttctgtgttttgggtccartttcagctacgaggtaaaacggcttaaacacatacacatttatcctgtggttacctaatacttgtaagggtttctggttagataggatggtgaagaggga

SEQ ID NO: 20707 - DNA, 201 bp, Homo sapiens
tgttcactgtactctgaaatagactgtgcaaaacattaaaactgaccaaatcaataaggtcttgttttcaacatctctatgtttatctatgaataggaaarggactgacgtgaggtgggaccattggtgattttgttctgaaataagtgaaagtttaatggaaagatacatatggcacaaaaggaagataaaatttttttt

SEQ ID NO: 20708 - DNA, 201 bp, Homo sapiens
ggaaatgggggctggggatctggcccaatcttacacccagcccacagcacaagcatagtgagtggtcccaacaggggactctgaatgacactgacaaagaygagaaagcaggaggcaaggcaccctatggtgtccttcagagaaggtccttctggcccctcgtctgccagccagctgatgccccaaagtctaccatctgag

SEQ ID NO: 20709 - DNA, 201 bp, Homo sapiens
atcttacacccagcccacagcacaagcatagtgagtggtcccaacaggggactctgaatgacactgacaaagacgagaaagcaggaggcaaggcaccctayggtgtccttcagagaaggtccttctggcccctcgtctgccagccagctgatgccccaaagtctaccatctgagcatttaaagtctgatcagtccctttgc

SEQ ID NO: 20710 - DNA, 201 bp, Homo sapiens
ggaaaacttcctccattctcacctagtgttgtgggtcaggggacatccagcatgggggagtcatgtctccacagacaaaccaaccaacaacaacatttccrttgcttcgcccaatggagaagccgcccctcatccagtgaacagtgcctgctccccaaatcattgcattcaacaggtgcctcctgctttctccaggatgca

SEQ ID NO: 20711 - DNA, 201 bp, Homo sapiens
tatattctgactagaaataacaccattttctctttgcagcacctgagagtttattcagtgacgataatactcacaagaccctttttggatttgtggcccamcccacaagttatagttccttctctgaatatttcatccagattgtgaagagcagcttctggcagccacagttgtactatgtgacccctacttcccatgccc

SEQ ID NO: 20712 - DNA, 201 bp, Homo sapiens
cagaggatgaccgaaccgtaaaaccttgcaccattgggttcagcctttggcctctcctttcccgctaaatttctctgaatccggctggagcaagatctctkggtttcacaggatgttggatatcctgggagaggagctggagagagggcgaggtcttgccctgggtggcgcagtgcctccgtgcccacagtggggagtgag

SEQ ID NO: 20713 - DNA, 201 bp, Homo sapiens
tgtgaactactaaaagtaaatctgcatggacttcttgcctggtgagttacacagaaaatgaaagtgattatcagtggctgtggcaagatgaaaggaaccaygccaggacttctgagggaaggtaagattttgttatttatttcaagaaattgaaaagttgagagaaatgcacccagccatccccctatgcattcattcatc

SEQ ID NO: 20714 - DNA, 201 bp, Homo sapiens; identical to SEQ ID NO: 2726

SEQ ID NO: 20715 - DNA, 201 bp, Homo sapiens
tggacaattttagatttgcataggactatgccttgattccttagagtatcattgtgagatggttgtatattctgactagaaataacaccattttctctttrcagcacctgagagtttattcagtgacgataatactcacaagaccctttttggatttgtggcccaacccacaagttatagttccttctctgaatatttcat

SEQ ID NO: 20716 - DNA, 201 bp, Homo sapiens
taaggcctagagtccaccaaaatccttccctccctgaaatccttccaagttcgtccatcttatacagtctaacatattctaagcctaggctttggagctcrgtggagctgggtttccatccagcactgctcctggctatgtgaatgccagcaagtcacttaacgtctctaagcatcagttttcctcctgtcaaacaggcct

SEQ ID NO: 20717 - DNA, 201 bp, Homo sapiens
atggagagagaagccacccatgcaagagttcacttatgctggccacaggggacaggtagtgtgggagagccacgtatagcttccaaagtcctccagacacrtaatgaattgaaggagcataagcattggagtctaacatgggaggatgttagataatgcggaaatcccaactccaccactggatcctggggcaagtcatgc

SEQ ID NO: 20718 - DNA, 201 bp, Homo sapiens
ggctgcagtttttattcgaggttgaaaacagtgacctaagacggagggagggagcgagcgaaggacacacccaagcaaggggggctgtgactaagcagccmgcagaggttttaagaagtagcagccctcccgggcgggcccctctgcccccgccccgtgctctgctgaggctgtaaataatcggggctgccagggacgtgg

SEQ ID NO: 20719 - DNA, 201 bp, Homo sapiens
aaggaagcttgtaatgcactgggtaaggagtagtaaataataaagaaattcagaggccaggtgtggtggcttatgcctgtaatctcagcactttggcaggytgaggcaggcagatcatgaggtcaggagatggagaccatcctggctaacacggtgaaaccccgtctctactaaaaatacaaaaaaaattagctgggcatg

SEQ ID NO: 20720 - DNA, 201 bp, Homo sapiens
ggaatacctgaattagttgatgctagccccaacagagatgaagctttgcctctttgctccttcacatgggaaaacacagctaaagttctaactcccagcarggggcggagtctctaatgctcaattagagagaagggagcagaaaggtgtgtgccagccctaagacccagggctctcagacgctctcctctttctcaacac

SEQ ID NO: 20721 - DNA, 201 bp, Homo sapiens
tttccaaagtttcctcgtggttgtccagagtccaccactccccagaatggggcaacaagagctcctttccttcccctttcctccttctccccttcgccacycacaccatgcccagccccaagccctctgacaaagtcatgtctcctttccaagtcccagttcctgccaaacaactttacaagcacatgaaagcgagggccg

SEQ ID NO: 20722 - DNA, 201 bp, Homo sapiens
ctgtttggatgagatattggagccctagctccagggtccctgatgttgccctggtatcaaggctcttctctctgctctgaggctgccaggcagggaatatragccaccttactgttgagatttccccacactgattggcagaagcaggaggtggtgaggaccaagcagctggtccagtggttgcctctcatattcatgctc

SEQ ID NO: 20723 - DNA, 201 bp, Homo sapiens
acgtcttgagagagcttatgaaggtgaaagaaggcaaaagacacagatgtgactccatgatgaagcaatggaaaataaaagtcttttaatcatccaatggraatttaatggacaccttctgtatgcactacatggattcgccacagaggacaagccacagatgaggaggacctgccctctctcttcagagactatgatcta

SEQ ID NO: 20724 - DNA, 201 bp, Homo sapiens
ggaattgtgatcccttctgtgaccaccttgataacagccactcgccctgttccagccccagtctctgccccgcccagctctgccctgcctagacacagccyggtggggcttggcgagcccttgggcacaggagcctgttagtccagacaacgactgtgcgcatccgggagaacggttactttctgccatgtgctgcagctc

SEQ ID NO: 20725 - DNA, 201 bp, Homo sapiens
gggagcagaaaggtgtgtgccagccctaagacccagggctctcagacgctctcctctttctcaacaccaggcatgcaattcccaagcaaagatcccctcayccagtctatcattgttggacatttgggttggttccaagtctttgctattgtgaataatgccacaataaacatacatgtgcatgtgtctttatagcagcat

SEQ ID NO: 20726 - DNA, 201 bp, Homo sapiens
cccaaaactgcgcgccggcagcctgcccaacaaactttcttctctttctctttttctttcaaccaaatggtgcttccacagacacattctccaacggtttrgcgcaaatcccagccctgctttccggagcccaatgcacttcgcagacagctcacttgactccagtcccccagggccgactcagccggaggggctgccgcc

SEQ ID NO: 20727 - DNA, 201 bp, Homo sapiens
ctgcgggtctctgggagaacctcaagggttaggacagtgccaaatatttggaagtggggccttttagaaggaacggggagacaggttggaaggagtcaggrgtcagaatgcccaaagacaaagcagaagatggcactggtaggtaacatacaaataaacttccctagagactatagggaaaccaccagggccctcttcttt

SEQ ID NO: 20728 - DNA, 201 bp, Homo sapiens
atttttgtattttttgtaaagatggggtttcaccatgttggccaaggctggtctcaaactcctgaccttgggtaatttgctgcctcagcctcccaaagtcmtaggattacaggcatgggccaccatgacaggctgtgttgttgctatcattattattattatttcagcttcagtagtataaatcctagatccccaaatccc

SEQ ID NO: 20729 - DNA, 201 bp, Homo sapiens
ttggaaaatgctgccagtccgcaggaaaaagttgttactgctgctgtctgtgaccaagaggacactttatttcttgaaacaactgggggcaaactggctcycagataaggcttcagtccctactcatgtgaggaaaccagccctggtaggttccatgcacaagaatacaggacaaggagcagcttttttcacctcatgcaa

SEQ ID NO: 20730 - DNA, 201 bp, Homo sapiens
gtgtttcatggaacctggaggttccttagagacccctcagaagcagacctagtggtcagagtaaaagctgaggagtaagctgtgcctctccctccccaggmcccatcccaaccacagaagttccacttgcatcagttttatataccagactattgcatgaaattacattttgacagatgattattcttaaaaaatatataa

SEQ ID NO: 20731 - DNA, 201 bp, Homo sapiens
acctaagtgcaagatgactggggaagggtaatccttccatttgcctaaaggtagataagaacccaatgtgagtaagcagtaaaaatctagcatataaatcraccttagaacaagtccagtaatactctaaggaagcttgtaatgcactgggtaaggagtagtaaataataaagaaattcagaggccaggtgtggtggctta

SEQ ID NO: 20732 - DNA, 201 bp, Homo sapiens
agctggttcaagcttccacagcgctaaggtggcagtgacactgcggactgtaagctttggaacaaggctcagtggggagctgggagaacccaggacccctytctggaaaacccattgccagctagtctcacacttggaattgtgatcccttctgtgaccaccttgataacagccactcgccctgttccagccccagtctct

SEQ ID NO: 20733 - DNA, 201 bp, Homo sapiens
agagtattgctaaggtagagaatggagaatgttgactctcacagccctctgacaaattagaatcctagaataagacaactttaaatgtgtagactcggacygtggctattcaatggacaattttagatttgcataggactatgccttgattccttagagtatcattgtgagatggttgtatattctgactagaaataacac

SEQ ID NO: 20734 - DNA, 201 bp, Homo sapiens
caatggaaaataaaagtcttttaatcatccaatgggaatttaatggacaccttctgtatgcactacatggattcgccacagaggacaagccacagatgagraggacctgccctctctcttcagagactatgatctagatcagagttggcagatcagttgccttcattagtttaagaactattttgtatgcacctctatatt

SEQ ID NO: 20735 - DNA, 201 bp, Homo sapiens
ctctcttcagagactatgatctagatcagagttggcagatcagttgccttcattagtttaagaactattttgtatgcacctctatattccaggcactactstaaattccaaaaatacaacagcacaaaaagacagactggcattttattatcatcgaggaagtgggtggagggtgcaggcaattttaataaggtagactag

SEQ ID NO: 20736 - DNA, 201 bp, Homo sapiens
gcagagatagcaccactgcactccagcctgggcaacagtgcaagactctgactcaaaaaaaaaaagagaaaaaaagaaattcagagtggtgataccaacaygtgtagctcaaaaagtctctatagagaggaagggtactcgggccagatcttgatggatgagcagcgtcctgttactcaatcctcaccatctgatgcccaa

SEQ ID NO: 20737 - DNA, 201 bp, Homo sapiens
gtcacaccacaaacaatgataaaaacggagacacctgggtgagcctcactcactgcgcatgcctccatcttcgaagagctcctgttcactgtactctgaartagactgtgcaaaacattaaaactgaccaaatcaataaggtcttgttttcaacatctctatgtttatctatgaataggaaagggactgacgtgaggtggg

SEQ ID NO: 20738 - DNA, 201 bp, Homo sapiens
ccaggctgcggcgggcactcaccgatctgcgccaggctcagcggcacgaggcagagtccccaggctgcgtgccaccaaaacttgtccatggtgtccggagygaacggagggcgcgggcgaaaggagctggaggatccctgggcgcggggcaggggccggcggaggacgggacgaggatggcggaccgaacctggcagaggc

SEQ ID NO: 20739 - DNA, 201 bp, Homo sapiens
aaatctttcctggctttaagagatatggggatagaaaagtttaatccctttttgattcttgatgtagcaaaaatgctaaattaatggagtcctaattcatyagtctttactaaattttattctgaatcatggaaatcagtttcttttaagaaggaagatttcctttggaagcttttgttggagtggaggaggtgaaaagag

SEQ ID NO: 20740 - DNA, 201 bp, Homo sapiens; identical to SEQ ID NO: 2724

SEQ ID NO: 20741 - DNA, 201 bp, Homo sapiens
agaaaaaaagaaattcagagtggtgataccaacatgtgtagctcaaaaagtctctatagagaggaagggtactcgggccagatcttgatggatgagcagcrtcctgttactcaatcctcaccatctgatgcccaataaacgccccactttccctggctcaatcccatccactattctgcaagtcactttaactgactcttt

SEQ ID NO: 20742 - DNA, 201 bp, Homo sapiens
aattttcttttttttttcttttttttctttttttttttgagacggagtctgagtctggctctgtcgcccaggctggagtgcagtggtacaatctcggctcwctgcaagctccgcctcccaggttcatgccattctcctgcctcagcctcctgagtagctgggactacaggcacctgacactacgccgggctaattttttgt

SEQ ID NO: 20743 - DNA, 201 bp, Homo sapiens
ttttattctgtttacattagcataagctggtttccgttgcaaccaaaaagacttgatgaatataggagagcatcacaccattttacaaaagagtaaacagyggctcaagtggatggcggatgcccctaccactgggtcttgaattcaggactttgactctaaatcttaggtcttctgattctgaggtctgtgctcttttca

SEQ ID NO: 20744 - DNA, 201 bp, Homo sapiens
aatttttgacgatgaaatttgaattaatggtatgtggctttatgtagcaagctaactggaaggaacacaagcaaaacagtctatattttatgcactattayttaagggaatgtaattatatttatttttaattatatttattttatgttcatgtagtaactaaaattcatatttattcctcttctctccacttcatacaaa

SEQ ID NO: 20745 - DNA, 201 bp, Homo sapiens
gtcccagtccagatggagctataccaatggtggttgctggtactctccaagtcattgcttgcccttgttcatggatggaaaacttcctccattctcacctmgtgttgtgggtcaggggacatccagcatgggggagtcatgtctccacagacaaaccaaccaacaacaacatttccgttgcttcgcccaatggagaagccg

SEQ ID NO: 20746 - DNA, 201 bp, Homo sapiens
tggagaccatcctggctaacacggtgaaaccccgtctctactaaaaatacaaaaaaaattagctgggcatggtggtgggtgcctgtagtcccagctactcrggaggctgaggtaggagaatggtgtaaacccaggaggcggagcttgcagtgagcagagatagcaccactgcactccagcctgggcaacagtgcaagactc

SEQ ID NO: 20747 - DNA, 201 bp, Homo sapiens
tcctcttgcattttcaggaagagtgtttgggactgaaaaatccttgtctggatctagtcctcagccactcagaagctggcatgccatgactcaaagagccrcccgtctggaatgaagacagtgacccgtaactcccacctgaagagcaggtgcttggaaaatgctgccagtccgcaggaaaaagttgttactgctgctgtc

SEQ ID NO: 20748 - DNA, 201 bp, Homo sapiens
tgaggtaggagaatggtgtaaacccaggaggcggagcttgcagtgagcagagatagcaccactgcactccagcctgggcaacagtgcaagactctgactcaaaaaaaaaaagagaaaaaaagaaattcagagtggtgataccaacatgtgtagctcaaaaagtctctatagagaggaagggtactcgggccagatcttgat

SEQ ID NO: 20749 - DNA, 201 bp, Homo sapiens
catttctccactttttgctttcccatacaaagactggactcctcctcaaagccttgctcctttccaaagtttcctcgtggttgtccagagtccaccactcyccagaatggggcaacaagagctcctttccttcccctttcctccttctccccttcgccacccacaccatgcccagccccaagccctctgacaaagtcatgt

SEQ ID NO: 20750 - DNA, 201 bp, Homo sapiens
catcctctccttattttcccttcattcctatctcttgccctagttcccctcccaccagtcaaatatatgactgttttggggagttttttggtttaatttcwctctttcttccccaccttggtcttgctgctgcctgccacctcctcagactgggtttgtccctttttcttcccccacccacagagtgtcagctcctagtgg

SEQ ID NO: 20751 - DNA, 201 bp, Homo sapiens
tggttacctaatacttgtaagggtttctggttagataggatggtgaagagggataaacaattcaggctgatagagactctccaattttcttttttttttcttttttttctttttttttttgagacggagtctgagtctggctctgtcgcccaggctggagtgcagtggtacaatctcggctcactgcaagctccgcctccc

SEQ ID NO: 20752 - DNA, 201 bp, Homo sapiens
ctcctcttgcattttcaggaagagtgtttgggactgaaaaatccttgtctggatctagtcctcagccactcagaagctggcatgccatgactcaaagagcygcccgtctggaatgaagacagtgacccgtaactcccacctgaagagcaggtgcttggaaaatgctgccagtccgcaggaaaaagttgttactgctgctgt

SEQ ID NO: 20753 - DNA, 201 bp, Homo sapiens
cctagttcccctcccaccagtcaaatatatgactgttttggggagttttttggtttaatttcactctttcttccccaccttggtcttgctgctgcctgccwcctcctcagactgggtttgtccctttttcttcccccacccacagagtgtcagctcctagtggcctgattcagaccttttatattaggttggtgcaaaagt

SEQ ID NO: 20754 - DNA, 201 bp, Homo sapiens
cctaatacttgtaagggtttctggttagataggatggtgaagagggataaacaattcaggctgatagagactctccaattttcttttttttttcttttttytctttttttttttgagacggagtctgagtctggctctgtcgcccaggctggagtgcagtggtacaatctcggctcactgcaagctccgcctcccaggttc

SEQ ID NO: 20755 - DNA, 201 bp, Homo sapiens
taatacttgtaagggtttctggttagataggatggtgaagagggataaacaattcaggctgatagagactctccaattttcttttttttttcttttttttytttttttttttgagacggagtctgagtctggctctgtcgcccaggctggagtgcagtggtacaatctcggctcactgcaagctccgcctcccaggttcat

SEQ ID NO: 20756 - DNA, 201 bp, Homo sapiens
agataggatggtgaagagggataaacaattcaggctgatagagactctccaattttcttttttttttcttttttttctttttttttttgagacggagtctragtctggctctgtcgcccaggctggagtgcagtggtacaatctcggctcactgcaagctccgcctcccaggttcatgccattctcctgcctcagcctcct

SEQ ID NO: 20757 - DNA, 201 bp, Homo sapiens
ctttctactagtggctttgtacatgtattataaaaatatgtatattacttttgaattgagcaatattattttaaaaacattaagattcagtaaacatcacmcacacacacacacacacacacacacacatgttgagtggctctgagatcacctctatggaaacacccttgtcctgaggacagttttcaacacatgctaggt

SEQ ID NO: 20758 - DNA, 201 bp, Homo sapiens
tggctttagccccagttatgcctaagtctgactttctcagaagtaaccaatgtcctctgtcccagtccagatggagctataccaatggtggttgctggtaytctccaagtcattgcttgcccttgttcatggatggaaaacttcctccattctcacctagtgttgtgggtcaggggacatccagcatgggggagtcatgtc

SEQ ID NO: 20759 - DNA, 201 bp, Homo sapiens
caatgtcacttaactacatttggccatttctccactttttgctttcccatacaaagactggactcctcctcaaagccttgctcctttccaaagtttcctcrtggttgtccagagtccaccactccccagaatggggcaacaagagctcctttccttcccctttcctccttctccccttcgccacccacaccatgcccagcc

SEQ ID NO: 20760 - DNA, 201 bp, Homo sapiens
tgggatgtgggaaactggaaaggaaacttgaattgatttgagttgacacgagattacactatttgggaagaatccagaattcaatcagcagccttggaccragaaagtccaggtctgagcattggctttcccccttatcagaggatgacttaacctctgggagtttcggtaatcccagccacaaaacaagggtaatcagac

SEQ ID NO: 20761 - DNA, 201 bp, Homo sapiens
cagtgacatcctatttggggtgactggttcagggagacttgagtgcaaacagagcattactcactctggcagactagggttctttgctgaaatattggggmctgatggcttctgactggtagtaataaatcctgttcctctcgagcaaagaaaagccaaatctaaaccaaatgtgagcaggagtgtgaaatggaaagctgg

SEQ ID NO: 20762 - DNA, 201 bp, Homo sapiens
cccattctacccaaagaatacagttctctctccttcgttgtgatagaaactagacatctctgatactttgcctacagttgtatgtcaatccaaatgagtgrcaggtcttccgagtcccatcctcccagatcttctccagagagcccctgtctgcctgaacatgcctcacagtctattttcaaagggcaaaacctttcatct

SEQ ID NO: 20763 - DNA, 201 bp, Homo sapiens
tgtatgtcaatccaaatgagtggcaggtcttccgagtcccatcctcccagatcttctccagagagcccctgtctgcctgaacatgcctcacagtctatttkcaaagggcaaaacctttcatctggcagatggtaacagctgcttctctttaaaacacccaaagggtagaaattctgggctctaacgtacaggcataaggct

SEQ ID NO: 20764 - DNA, 201 bp, Homo sapiens
cctgccaagtcctgactgggcttagcatcaaatcctgtagaaaaggaataggtacagaacatggatgtgaggccaggccaaaacgcattttattgctggcyactgtttcccagccacagaagaatgctgctgtagaaggcatggcgtgggtgagaaagagacttgttgaactgaactttaatgggagaggatgtggggagg

SEQ ID NO: 20765 - DNA, 201 bp, Homo sapiens
gactatgatctagatcagagttggcagatcagttgccttcattagtttaagaactattttgtatgcacctctatattccaggcactactctaaattccaaraatacaacagcacaaaaagacagactggcattttattatcatcgaggaagtgggtggagggtgcaggcaattttaataaggtagactaggaaggtctggg

SEQ ID NO: 20766 - DNA, 201 bp, Homo sapiens
atttgcataggactatgccttgattccttagagtatcattgtgagatggttgtatattctgactagaaataacaccattttctctttgcagcacctgagartttattcagtgacgataatactcacaagaccctttttggatttgtggcccaacccacaagttatagttccttctctgaatatttcatccagattgtgaag

SEQ ID NO: 20767 - DNA, 201 bp, Homo sapiens
tcactctctacacagaagattgagaaagagcagaaacccacttctgttttgttgaaagcattaagaatctaaactgtattacattaacatttgcagatttmtttgtattttcagaagtattatctctgagaattcagattctataaatatttgggtgatgatcgatattttttattaaaataaataacatattctgtcacc

SEQ ID NO: 20768 - DNA, 201 bp, Homo sapiens; identical to SEQ ID NO: 2729

SEQ ID NO: 20769 - DNA, 201 bp, Homo sapiens
aagtcatgcctgaccaatttaatttccttctgtgaaaccaaggcagtacttaaaatgggatataatatagaatatctaaaattcagatttagtcagacttytctagcttgtcagtttttttttttttttttttttttttagatggagtctcactctgtcacccaggctggagtgcagtggtgcaacctctgctcaccacaa

SEQ ID NO: 20770 - DNA, 201 bp, Homo sapiens
ttgtggattatgatttttcttggaaagaatgttagatgttggataagagttaaaatcactttttggtataacagtgccttaaaatcacaggggatatttttggcaggccttaaaagaatatatacctaattgagttttaaaggttaaccagggtgcagaggtgtcagaaaggacggtttttggtctattccctgtagttaa

SEQ ID NO: 20771 - DNA, 201 bp, Homo sapiens
attttttcattcagttttttccctctagtcctaagactccatattctgtttctattcttttgctagttactctagaaattacaggatgcattcttaacttatttcacttattgaagccttatgagggtttacattctttgtagacaattcaagaaccttttgtattgctttttaactcccttcctgcttataatatatcct

SEQ ID NO: 20772 - DNA, 201 bp, Homo sapiens; identical to SEQ ID NO: 2732

SEQ ID NO: 20773 - DNA, 201 bp, Homo sapiens
cttgtctatgcagaaatggaagtaatcttgaatttatacttttgtcttcagtcagatctgtaccactataattccagacagaaaaacatgcattatatttyaaaataccttgacatcctaagactagttgggtctgtaagcatttcctttgtgactgttaaagtttattacatgtatttgagatcattagcactaaaattg

SEQ ID NO: 20774 - DNA, 201 bp, Homo sapiens
aagctcacctgcagcagccccaggctctggactggttccaatgccaggccagacaccatagtcaggctccaggatggccccaaggactcagtcctcagacycatccagcaacaggcagaccctaatggatataggctccagacaagatcccatggagctgcctgcaggcccgccttggtgccagtggacttattctctcag

SEQ ID NO: 20775 - DNA, 201 bp, Homo sapiens
gttaaattggggatcatgtactaatgtgacgatttgattatggaataattgaactatagccattcttcctggcagtattaaatagtgctatctctatgtgrttggtatatagaaaacaaggcaatttttaaaagtagtaggattaatatttatcttgtatattaaattggtacgtgaaattaagtctgctttacaaattaa

SEQ ID NO: 20776 - DNA, 201 bp, Homo sapiens
ctttctctggcattaatatagttttattagctttctttggttggcatttgtacagtcttatctttttacttcaacttttctgcatagttacgtttcagatygttcttccaaatacagtgatgcattgattaacaatgaagatgcattcaatatattgctaggcaatttcatcgtcgtgcaaacatcataaagtgtacttac

SEQ ID NO: 20777 - DNA, 201 bp, Homo sapiens
tgatttctagttttattccaatgtggtcagagaagatgcttgatattatttcatttcttaaaatgttttaagacttgttttgtgacctaacgtatggtctstcctcgagaatgatccatgtgctgaggaaaagaatgtatattctgtagctgttggatgaaatgttctgtaaatatctattgtttttgatagtacagatta

SEQ ID NO: 20778 - DNA, 201 bp, Homo sapiens
aaatactaggtcttattaattctaactatttttttgtacacattaaccatccctacctccctgccaatcccttacgacccctcctagcctctggtaatcayccttctactctatctctatgggtccagttgttttgatttttagctcccataaataagtgaggacatgcaacgcttgtatttctgtgcctggcttatttca

SEQ ID NO: 20779 - DNA, 201 bp, Homo sapiens
ttctttggttggcatttgtacagtcttatctttttacttcaacttttctgcatagttacgtttcagatcgttcttccaaatacagtgatgcattgattaayaatgaagatgcattcaatatattgctaggcaatttcatcgtcgtgcaaacatcataaagtgtacttacacaaacctagatagttttttttttttttttta

SEQ ID NO: 20780 - DNA, 201 bp, Homo sapiens
ctcccaaatagctggaattacaggcatgtaccaccatgcctggctaatttttgtatttttagtagaggtggggtttcaccatgttggccaggctggtctcraactcctgacctcaggtgatccatcctccttggcctcccaaagtgcagggattacaggcgtgagccaccacacccggccacaaacgtagatagtatagcc

SEQ ID NO: 20781 - DNA, 201 bp, Homo sapiens
aataagtacacaaataaggaacgctcttctttacagagggaaactgacaaatgatgcaacgatggaattagaaaattgccatttggcagccatcatagtartactaaaactaatggatgaaagtttagtaaggaacaggatatttacataatctcaaaatatattcccacagtatacttattaattataaaggaaaaacaa

SEQ ID NO: 20782 - DNA, 201 bp, Homo sapiens
caacatagaggagaaacctggaagatactatctgcatttgctgtccaaagtaaacatcatcagagatggggcaaattaacagaagtgccacctgataaaaygcaataagaacattgctacatttctgtggtattcctgccccaaacccataacctaaatctaattgagaggaaacatcagagaaacctgcattttaagata

SEQ ID NO: 20783 - DNA, 201 bp, Homo sapiens
cctgccccaaacccataacctaaatctaattgagaggaaacatcagagaaacctgcattttaagatattctataaaataactgatctgtgttcttcaaaastgttaatgccatgaaagacaaagaaagagtgaagaattattccagattaaaggagtctaaaaagacatagctaaacacttaatctggaattttcttttac

SEQ ID NO: 20784 - DNA, 201 bp, Homo sapiens
ggtggcagcatctcattctgatagttctgtatctgagctggaagtcatatatgttagtatctagagttgaacagtagattttccatttacctataaaaacractattctaataaaaatgtttccagtattgaaaaccaatgactatttttgagcatctactatgttctcctagatgtagagggaatacaaaatataagttt

SEQ ID NO: 20785 - DNA, 201 bp, Homo sapiens
aaagagtgaagaattattccagattaaaggagtctaaaaagacatagctaaacacttaatctggaattttcttttactataaaggacactattgcagcagytcaagaaatctaagctctatagataatagtattttatcagtatccattgcccgatcttgataattgtactgtggtcatataagacatttttaaggggaaa

SEQ ID NO: 20786 - DNA, 201 bp, Homo sapiens
attccagattaaaggagtctaaaaagacatagctaaacacttaatctggaattttcttttactataaaggacactattgcagcagttcaagaaatctaagstctatagataatagtattttatcagtatccattgcccgatcttgataattgtactgtggtcatataagacatttttaaggggaaacattaaagtattaag

SEQ ID NO: 20787 - DNA, 201 bp, Homo sapiens
tatctaaaggtacataagggtaggaagcttttttcactgatgagtccccagtacttagaacagtatctggaacagccaggtgtggtggctcacacctgtartcccaacactttgggaggctgaggcgggtggaacacgaggtcaggggtttgagatcagcctggccaacatggtgaaaccccgtgtctactaaaaataaaa

SEQ ID NO: 20788 - DNA, 201 bp, Homo sapiens
tataagacatttttaaggggaaacattaaagtattaaggaataaaaaggaatcatgcctgcaactttcaaatggtccagaaaaaaatatatgtatgtatayagagacaagggtaaagcagatgtaaaatattaacatttggggaatgtggtatacaggaactttttataactttgtataactgtataaatttacaactttt

SEQ ID NO: 20789 - DNA, 201 bp, Homo sapiens
gtgtactcagtgtttagcttccacttataaatgagaatatgtggtatttggttttctgtttctgccttagtttacttaggataatggcctccaactacatmcatgttcttgcaaaggacatgatctcatttttttggctgcatagtattctgtggcatatgtgtaccacattttctttatccagtctattattgatgggca

SEQ ID NO: 20790 - DNA, 201 bp, Homo sapiens
aaccataatggcacagtagaaaaacaagtcatgcctgaccaatttaatttccttctgtgaaaccaaggcagtacttaaaatgggatataatatagaatatmtaaaattcagatttagtcagacttctctagcttgtcagtttttttttttttttttttttttttagatggagtctcactctgtcacccaggctggagtgca

SEQ ID NO: 20791 - DNA, 201 bp, Homo sapiens
acaaccataatggcacagtagaaaaacaagtcatgcctgaccaatttaatttccttctgtgaaaccaaggcagtacttaaaatgggatataatatagaatwtctaaaattcagatttagtcagacttctctagcttgtcagtttttttttttttttttttttttttagatggagtctcactctgtcacccaggctggagtg

SEQ ID NO: 20792 - DNA, 201 bp, Homo sapiens
taattatctgaaagagcacaggatgttgggtgacaaccataatggcacagtagaaaaacaagtcatgcctgaccaatttaatttccttctgtgaaaccaakgcagtacttaaaatgggatataatatagaatatctaaaattcagatttagtcagacttctctagcttgtcagtttttttttttttttttttttttttaga

SEQ ID NO: 20793 - DNA, 201 bp, Homo sapiens
ggaagtaaatattattaaataatatttagggacatttggttttaggtttaggtatttctaaaatgtgattctctgggttttagttcataactttaatttarggttaaacttgcacaactttgcagagaaaagaaatgcaacctactagtccctgaaactttctgcctactgtatcctagtaccagcagtagtctccttacc

SEQ ID NO: 20794 - DNA, 201 bp, Homo sapiens
ttaattatctgaaagagcacaggatgttgggtgacaaccataatggcacagtagaaaaacaagtcatgcctgaccaatttaatttccttctgtgaaaccamggcagtacttaaaatgggatataatatagaatatctaaaattcagatttagtcagacttctctagcttgtcagtttttttttttttttttttttttttag

SEQ ID NO: 20795 - DNA, 201 bp, Homo sapiens
ttccgcttttatattttccccaacttcacaaagatagccattatagagagggaagtaaatattattaaataatatttagggacatttggttttaggtttargtatttctaaaatgtgattctctgggttttagttcataactttaatttagggttaaacttgcacaactttgcagagaaaagaaatgcaacctactagtcc

SEQ ID NO: 20796 - DNA, 201 bp, Homo sapiens
ttgactttccgcttttatattttccccaacttcacaaagatagccattatagagagggaagtaaatattattaaataatatttagggacatttggttttargtttaggtatttctaaaatgtgattctctgggttttagttcataactttaatttagggttaaacttgcacaactttgcagagaaaagaaatgcaacctac

SEQ ID NO: 20797 - DNA, 201 bp, Homo sapiens
tttaattttgccatgaactagaaatgatctcttgggctttgtgaaaaacagattgaaaaacaaaacaaaacaaaacaaaaaacaagctgctttcaagcagkctatatataatcaactaacaaatacttaagttcctatgtttgtaaatataggaataataaatagtaataatagtaaaataaaataaagtaatataatagt

SEQ ID NO: 20798 - DNA, 201 bp, Homo sapiens
catgtttccttgtgactaaggtctgttactggagaattagtattttcctttccattcttttcctttggtgtcatatttccttgctttctcatggttggtgkgtttctacattgatttctatgtatctggcagaaaaagttgcctcttctaattttatggagtaggtttcatagggaaagacttgttactatgaataggtcc

SEQ ID NO: 20799 - DNA, 201 bp, Homo sapiens
  misc_feature (101)..(101): n is a, c, g, or t
catttaaaaatattacgttatgcgactctgggccttttgtaaatcctatggagaatgttgatatttttgttttagcaggaattagagctggctgggttganatggaaaggtttgaccaaccttctgtatattgtagtttccatgtaagttccattttcaaagcctttgcagtgctagctgaatatactctatcctgtgatg

SEQ ID NO: 20800 - DNA, 201 bp, Homo sapiens
ttcatgtttccttgtgactaaggtctgttactggagaattagtattttcctttccattcttttcctttggtgtcatatttccttgctttctcatggttggkgtgtttctacattgatttctatgtatctggcagaaaaagttgcctcttctaattttatggagtaggtttcatagggaaagacttgttactatgaataggt

SEQ ID NO: 20801 - DNA, 201 bp, Homo sapiens
tataatatactggcagagattaaaatgatttatataattataacataaggcagatggaagagattgtagttgggaaaacaagaagaggttttatggaagaktaaggtttggaaagataagaacaacagaagcaaaggaatggcataatacgaaggataaattattgagtgactgttttctttgcaaaagttactttttaat

SEQ ID NO: 20802 - DNA, 201 bp, Homo sapiens
atgacagactgcctttcattctttctttctgcttcaaaattctttccaaaatgaatgcgtatgtgactgcatgaaaaattgtttttcttcttatttgatasagttacgcagattattattttatatttccaatttaggtgtctctacatgccattttgcctgggcttttcattctgaggctgaagaagaactgattaatat

SEQ ID NO: 20803 - DNA, 201 bp, Homo sapiens
caggtgtggtggcacatacctatagtcccagctactcgggaggctgaggcaagagaatcacttgaacccgagaggcggaggttgcagtgaggtgagattgygccactacactccagcctgggcgacagagtgagactccatctcaaaaagaaaaaaagaaaaatttcatatatggcacattgcatttcaagactatgtgta

SEQ ID NO: 20804 - DNA, 201 bp, Homo sapiens
gtgctgggattacaggtgtgagccaccacgcccggccaaaataatgaaatttttttttttttttttgagatggagtttcgctctgtcacccaggctggagygcagtggtgctatcttggctcactgcaagcttcgcctcccaggttcatgccattctcctgccttagcctcccgagtagctgggactacaggcgcccacca

SEQ ID NO: 20805 - DNA, 201 bp, Homo sapiens
tgatatacatacattttgtaattttataatttatttttaaagctaaagcttcagaaggggcttcctctgagagtctactttcagtccctggacagaagaaygtagattcttctccagaaacctctcctagtgtgagccccatgccacattcttcatcaattgccaatcttcaaactgccagtaaacttattctgagttcta

SEQ ID NO: 20806 - DNA, 201 bp, Homo sapiens
atcctgttagaggataaatgattggtttaaattttgttagagaaggaaacatgttgagtaccttctgggtgccaggcactgagattggtgctttatatatrtgaatagatattatccccagtttactaatggagtaagggtatgtaacttgaccaagtcccattatatggtttgtcacagaactaagtttcaaaatcaggc

SEQ ID NO: 20807 - DNA, 201 bp, Homo sapiens
agcaataataactctattctgcatatgtggcaccttcatcttaaatctgtacaagcatgtttaggtaagtaattatagttttatacagagatgatacatamcaaatttattttatagaatatgctttactttggttaattctgtaaaatgaagttccattaaactgtaaattgagttgctgaattatgtctcttctaaact

SEQ ID NO: 20808 - DNA, 201 bp, Homo sapiens
ggtggcatgtcaagtaaatataggatgtttgctgtatactccagcaattcagtaaggccagtattatgtagccgagttgaatgtctctacgagaatagagwaataaggtttttacctgtaatcattgtaacagtttaaacaatcttagtgttctagaaattgttatttattgggtaacaaatttgatcaagagtatgttaa

SEQ ID NO: 20809 - DNA, 201 bp, Homo sapiens
cctttagaatatatccacaatctgcttacttctttaccacctccactcttataatctggttgaagccaccattatttatcacttgtattattgtattaaakttttaattggtttcccaatttttgctgcacttctgtacaatctatgttcaaaccagcaggtggagtgatttaaaaaattgtttttttgagacagagtctc

SEQ ID NO: 20810 - DNA, 201 bp, Homo sapiens
cagagtttccacagcagagcagaaatataacttctgattgcagccatccttaggaccctgcatcaacccgggagcaaattactgagttatttctttttccrtgcctgattttattaaacatttatttacttagagaaaaatcatcatattccttataagagtgaaataattatcaatattttgaatctatgtttagaaata

SEQ ID NO: 20811 - DNA, 201 bp, Homo sapiens
aagcttatacaaatgattcctttattatatacaggtctaagaaagctgttgggcactcagaagcttgcttagaaatctagtttgttcttgagggagggttrttttacctactaaatatatctgaggattgtttatgcctgataggaaatatagcacacattgtagagatgctcagtaaatgataatgtgggaaatttatat

SEQ ID NO: 20812 - DNA, 201 bp, Homo sapiens
tgaaataaaagtgctttataagaaattacgttataacacatagcacaaatgattgtgtcccatatgattaggtaatacaatgagatatatgcattattttraattgtcagaaatttattatagtaaacttagattactatttttcttgtggctgttttttattattcaaatactgtatgcttattctagaattggattaag

SEQ ID NO: 20813 - DNA, 201 bp, Homo sapiens
gcaccacgctgctgctgccagggtgtgggagaagagtggtgttggtgattcaagtgtgtgtttcctacctcttcagtgcttctttcagtgataatgaagtyaaaactgggtactgtgaatgcttacctgatttttggttcttatgaaggtgctttttttcgtatagtggttaaattggtgttcttgcttgggggacgattg

SEQ ID NO: 20814 - DNA, 201 bp, Homo sapiens
aaataaaccacaattgcagatagaaatattttggatattgtgagccaggtttctcattattgaagaagagagttacaagtgtagaaagtgggaaggcagcygggtgcaatgggtcacacctgtaatcccagcactttgggaggctgaggcgggcagatcacgaggtcaggagattgagaccatcctggctaacacagtgaa

SEQ ID NO: 20815 - DNA, 201 bp, Homo sapiens
ttgcctttcaagtttatttaaggccccagagaacctgagccttgtggtggcaaggcttttggggaatcaagctcagacagataggatcagcgattcccctmtgggtagggctccctccatgggtgagcgtcagctgagtttggtctggtttttctttctgctatataacaaggcagcactgacttcagtgctcacagttgc

SEQ ID NO: 20816 - DNA, 201 bp, Homo sapiens
aaatatggtggaaatgatggcgtgtgacttctaaggctagtttataaaagacattgcagtttctaccttggtctctctcttggatcacttgctgctggagmagtcagccgccgtgtcttgaggacactcacacagcactatggagaggaacacataggaactgaggcctccatctatctattaggctcaacttgctagcca

SEQ ID NO: 20817 - DNA, 201 bp, Homo sapiens
tgaattcatctgaaaatagttgtggatatttaggagtaagtgataaaagtgcatcgaaaaatgaattcagtgaccctggatttaaactgagtaggcagttkgttggagtctattcatacactctcttttcttccaatagaagcaaaaatctacaaaatttagtatggattaatcatctatttaaagatactaaatatactg

SEQ ID NO: 20818 - DNA, 201 bp, Homo sapiens
aggtgaaatattttatttatatttttagggaagcaaaaacagtcttattctgaggattctgactttgatgttacaaaaatctcatcttgaccatttttatrtacagtacaccagattttaaaagggctaattgcctaactctctcttttttagaacctcagtatctgtacatttgatggaatggtctcctgatggtgaata

SEQ ID NO: 20819 - DNA, 201 bp, Homo sapiens
tgtggaagacagtttttctacagcgaggggtgaaggagagggatggttttgggatgattcaagcacattatgtttatcattagattctcataaagagcatrcagcctacatccctagcatgtgcagtttacaatagggcttgagttcctatgagaatctaatgccaccgctgatctggcaggatgtggagctcaggcagta

SEQ ID NO: 20820 - DNA, 201 bp, Homo sapiens
cgcaatctcggctcactgcaacttccgcctcctgggttcaagcaattctcctgtctcagcctcctgagtagctgggactatagacgcataacaccatgacyggctaattattttgtatttttagtaaagacagggtttcaccatattggtcaggctggtctcgaactcctgacctcaggtgatccacctgtcttggcctcc

SEQ ID NO: 20821 - DNA, 201 bp, Homo sapiens
gtgaaccactgcgcctggctgccccttgactcttgaagataaagtccttgagttccgtggtgtagtggacaacctccaaaatggctgctcacgactctccmttcctggcactcactttcttgggaaatagtctcccacactaagttatagctggcctgtgcacccaataaaatatggtggaaatgatggcgtgtgacttct

SEQ ID NO: 20822 - DNA, 201 bp, Homo sapiens
gttttggttttaggtgcacacacttcattcactagcagcatcactttctgcatcaatttaccaagcattatgtgacagtcatagctacaggtaaaaaaaaatcacccaaaatagtattaatacagcaaaaacattaaactgttccagagttatattaagtttctatttcctagggactgaaaaatccctaaatatgacagc

SEQ ID NO: 20823 - DNA, 201 bp, Homo sapiens
tagtggagacggggtttctccatgttggtcaggctggtctcaaactcccgacctcaggtgatctgcctgcctcggcctcccaaagctctgggattacaggygtgaaccactgcgcctggctgccccttgactcttgaagataaagtccttgagttccgtggtgtagtggacaacctccaaaatggctgctcacgactctcc

SEQ ID NO: 20824 - DNA, 201 bp, Homo sapiens; identical to SEQ ID NO: 2745

SEQ ID NO: 20825 - DNA, 201 bp, Homo sapiens
aaggaacaatgatgccttagatgctgcactattctacctttcaatgaagaagaaagcagtagtgtggggtctgtttaggtaagttgccttgacacttaacrtgattcaacagaatgaagattgtgctgtgagtaagaaacctaatgcttttgaaaataattaggtatatgagcttcatcaaatccacttctatgcgacctg

SEQ ID NO: 20826 - DNA, 201 bp, Homo sapiens
cttagtttggaccacaagtttgtttctctttagcttagtacttagaagtttgttatagctccatctattagtaaattatcaaaattggctagtttttttttagtaacattaaattactctttttaaagtctaaatttaaaattttacttttataaagaaagttctttctttcaggccagttgctgttttggagtagttagg

SEQ ID NO: 20827 - DNA, 201 bp, Homo sapiens
tctttatgtttttactcccatttatgtatttatgtatttatttatttatttattttgagtctgaatcttgctctgtcatccaggctggagtgcagtggcgygatctcagctcactgcaacctctgcctcccaggttcaaacgatactcctgcttcagcttcctgaatagctgggattacaggtgcgcactgccacgcccaa

SEQ ID NO: 20828 - DNA, 201 bp, Homo sapiens
ccaacagtgttgaaatatagaaagtaaaactgaaagtttccagttcccagaagaattcgtataacttactggttatcctttattcaaaaaatattttggcrcctagacattgtgcatacaggataaactagctattgaagtgtactgttgtataagaggacttggtgtatgttgttatgttgcaggaagtcaaggacccta

SEQ ID NO: 20829 - DNA, 201 bp, Homo sapiens
agcaataaactctcatttatgcttgtaagactactcatttattccactaagaagccaaatgcagaaattaatgatctcagacatgttttataggtaaataytattaaaagttttttaaaaattgatattttatgctcaagttctagataatattattttaattcttttgttttgcatgtcacatgtgaaaatctatgggac

SEQ ID NO: 20830 - DNA, 201 bp, Homo sapiens
aggttcaccctgggcaagactgccagattgtttctctgaccaaaagtgtgatggtaggggttgatttccctgccatgcaggaccaaagtcatagccagtcrtggtcctaggctctgcatagctgggattgtagcattcagctacccatgtaggcttggaatgaagacgggtccccagtgttggagaggtacagtgactcct

SEQ ID NO: 20831 - DNA, 201 bp, Homo sapiens
ctttatccagtttgccagtctgtgtcttttaattggggcatttagcctgtttacatttaaggttaatattgtgatgtgtgaatttaatcctgtcattatgrtgctagctggttatttcgcctgttaattgatgcagtttcttcatagcattgatggtctttacaatttggtatgtttttgcagtggctggtaccagttgtt

SEQ ID NO: 20832 - DNA, 201 bp, Homo sapiens
ctgggaggtagggagcagagtcaataatcttagaaatctacctggtgttctattgtactgtggccgagctggtactcaaaccacaagacacagtccctccyacccttctctctcctttccaaaggcagacgagcttcaccctgtggccaccaggacttcaggcctacagggagtacttccagactactaccaatgttttct

SEQ ID NO: 20833 - DNA, 201 bp, Homo sapiens
gcatgtctggatgttttcttagggtcgagtcctaaaaagagatttactgaatcaaagtactctatttaattctctttatagtctcttaattcataatatcraattattttccagaaaagttgtatggtttgatgctgtaccatactctagctcattgctttttctatactttattaaaggctgaaaaaaagtacatttagc

SEQ ID NO: 20834 - DNA, 201 bp, Homo sapiens
agcataatttttctattatgtgttgtttagattgtttgcttttttattgctttacataatggtgcaataaacatcttaatactaattgtgatctttgtttrcatgtctggatgttttcttagggtcgagtcctaaaaagagatttactgaatcaaagtactctatttaattctctttatagtctcttaattcataatatcg

SEQ ID NO: 20835 - DNA, 201 bp, Homo sapiens
tgtgggctgctgtttttggaggcggtgtaaaacttgttgtgaaacctcgaagacaatcagaaaatatttcaggtaagatacgtttgataccagtaatgtawgtaaatgttaatcattttgaatgttaaaattttttttaatgtttcaagaaatttcactttgaaaataagcgatgcttaaagtataatcactcttgttatg

SEQ ID NO: 20836 - DNA, 201 bp, Homo sapiens
ctaaatttacattttgccaaaagggaaaaaagttaaccagtattaacattggcgattaggacttgtacctaagtttttctcatggctacttagtttttaamataaagattgtcctatgggtacataagaagatttttagttggaatttgtgttaagagaaaagggaatgttcacagtaacacatgaatgtttttcacagtt

SEQ ID NO: 20837 - DNA, 201 bp, Homo sapiens
agatttttaataagtattcagttttcattaaggtgatttttaataaatattcagaatacaggcatgagactgatttttagaacttccagaagtttttaacsttttctctcataatccattttttaattaaactttttgttaataattttgtatctacttattgtgcctgtttaattatgattctagaccatggttaagcct

SEQ ID NO: 20838 - DNA, 201 bp, Homo sapiens
ctgcttggtgcagagctgagttcaagccctggtatccttgttaattttctgtcttgtcgatgtgtctattattgacagtggagtgttaaagtctcccactrttactgtgtgggagtctaagtctctttgtaggtctttaagaacttgctttatgaatctgggtgctcctgtattaggtgcatatatatttaggatagttag

SEQ ID NO: 20839 - DNA, 201 bp, Homo sapiens
gagagtattcttgtgtcatatttatctatataccatctacatctagcatagtacctggtacatactgggtgctcaataaatttgtgtagaatgagtgagcraacatattccctttacacaatgtttatcaccagtatttctgtcagagaactgataaaattttttaaactactttgaaaaaaataattcactatcacccac

SEQ ID NO: 20840 - DNA, 201 bp, Homo sapiens
tcgcctctcttcaagcagaaggaaggagtctcctttggagccgtgagctgtacagcctggggttagggaagggatgatgccagcacttttttagccatccygcctggtgtctcagtaggttgcatgcctccccagcccactgtctttggcccagttcagccctaggactcatctaggagttgcagaccttgtggcctagat

SEQ ID NO: 20841 - DNA, 201 bp, Homo sapiens
attgtaatttttctttagttttctttaacatttctaaggaaatcagtgcttgatttattctgaaattttctttctggttgggtaatagtcaaagttcactraactaccgtgaactacttttaagataaaaccttataattttcatttcatagcaatgaaacaacataggtactttgataaattacatatattcaagtgaaa

SEQ ID NO: 20842 - DNA, 201 bp, Homo sapiens
atggggcccaaggtggtggtttggcttcagtaaggatggaactcaaatttttgctacaagaatcacaacaggtgtgaatatcacttttttttcaatcttgrttatttcagtaatttcagtagctcttccagttatagctataaagctcttttactactttttactagttaatctaaatatgttcagctcctctctttatag

SEQ ID NO: 20843 - DNA, 201 bp, Homo sapiens
ctaccctgaaaatgtgaatcaggatgagctcctccttgtggccaatttgatgagctaaacgaagctgcctttgtcatctctctcaactttattgctatttwgatctgtggctgtggtcattttgttgtacaagcaaagcacttgaactttttttcttcagccttctcttaggccatgaatagagatatggtattacctaaa

SEQ ID NO: 20844 - DNA, 201 bp, Homo sapiens
ttgttgtgaaacctcgaagacaatcagaaaatatttcaggtaagatacgtttgataccagtaatgtatgtaaatgttaatcattttgaatgttaaaatttyttttaatgtttcaagaaatttcactttgaaaataagcgatgcttaaagtataatcactcttgttatgacagcaaataattaaacccatgatataataaac

SEQ ID NO: 20845 - DNA, 201 bp, Homo sapiens
gctggtaaactgtaagcaataatgaatgacaaagtttaaaattctttctaggtttgttcccaatgtgttgtatgatttctatatctgtgaagacatcacccttctctttactttcatctattgtttgtcccttggggaaatgacctcctagacaatgaatgtgaagagatttttaatgtttctacctagagaaacacaaaa

SEQ ID NO: 20846 - DNA, 201 bp, Homo sapiens
atgcgaatctctacaagtggccgggcgccatggctcatgcctgtaatcccagcactttgggaggctgtggtgcgtggataacctgaggtcaggagttcgasaccagcctggtcaactggtgaaaccctgtctctactaaaaatacgaaattagctgggcatagcgtcgtcccagctactcgggaggctgaggcagaagaat

SEQ ID NO: 20847 - DNA, 201 bp, Homo sapiens
gaaactctgctagaatagtgaacttcaaactccattcttcttaccgcatttatctgctataattcaccttattaagagtcctcaaatagctgttctgtgcwttctgtttatgttttatggctgcatcaagtgggagagacatcactgtggttactttattttacttggaactggagctatgatgtcatttttcataccatc

SEQ ID NO: 20848 - DNA, 201 bp, Homo sapiens
gtaaggtttggaaagataagaacaacagaagcaaaggaatggcataatacgaaggataaattattgagtgactgttttctttgcaaaagttactttttaaycacaggacttcttcattaaataacagacactcttagaatgttgaaaaaatataatatgcaaacattacctgtagcttttcaggaaaacgtacctggtatt

SEQ ID NO: 20849 - DNA, 201 bp, Homo sapiens
tcggcgtggcgcgcgcaattgccctggaaaccacggcgcgcgcacgcgcaaacgcgggtgatggggggaagaaagactgagctgagagctttgccgcgggrggagggctctacctcgctcccccgcggtgggcgcgcgcgctggcccgctcccttgctgcacgctcccggctcgcgcgttccccccggtgccctcccccgc

SEQ ID NO: 20850 - DNA, 201 bp, Homo sapiens
gggaggctccaagggaactcccgcacgtctgcgcgcgcaatcacgggacggcgggtcggcgtggcgcgcgcaattgccctggaaaccacggcgcgcgcacrcgcaaacgcgggtgatggggggaagaaagactgagctgagagctttgccgcgggaggagggctctacctcgctcccccgcggtgggcgcgcgcgctggcc

SEQ ID NO: 20851 - DNA, 201 bp, Homo sapiens
aaatgctgtttcctatttatgtatacataaggcattattgaccttccttcttagaagaagtgaagagatgcttgataacaaatgcctgtccttgaagttaytgttcttcttttagatttctgtttgaggtttttattttatattattatacattctgtagaacattttaaatttggtttaaccactttatgtttatgctcg

SEQ ID NO: 20852 - DNA, 201 bp, Homo sapiens
ttcaacacagcaaaaccggctcgtggcgcgtccccggcgtccgactgctgcgtggccccgagcgacctgcaccccactcgcccccgcccccacctccgccycagtccgcagcggctacagcccgggaggctccaagggaactcccgcacgtctgcgcgcgcaatcacgggacggcgggtcggcgtggcgcgcgcaattgcc

SEQ ID NO: 20853 - DNA, 201 bp, Homo sapiens
tttttggagacagaatctcgctctgtcacccaggctggagtccagtggcacaatctcagctcactgcaatctcagcttcccaggttcaagtatttctcccrtttcagcttcccaagtagctgggactacaggcacccatcaccatgccggttaatttttgtatttttggtagagatgaagtttcaccattttgtccaggct

SEQ ID NO: 20854 - DNA, 201 bp, Homo sapiens
acttgtttcttgcttttctaatttttccccccaggtactccccaccctcaagcattgcttacacttagtttagaaaacatggggagtgtcagatttctctytttaattttttgttgctcttctctctaggccaagcaaggtagcttaagcctgcctaaagttgtatgatagttgtcagaggtgaattttagtaaataactc

SEQ ID NO: 20855 - DNA, 201 bp, Homo sapiens
tttcctggtgtttcctggtacttgtttcttgcttttctaatttttccccccaggtactccccaccctcaagcattgcttacacttagtttagaaaacatgsggagtgtcagatttctctttttaattttttgttgctcttctctctaggccaagcaaggtagcttaagcctgcctaaagttgtatgatagttgtcagaggt

SEQ ID NO: 20856 - DNA, 201 bp, Homo sapiens
taccttagtaatgggaaatttattgtaaggatatagaaaagagaatagtagacaaatcttccaagagtcttgtaacacaagttgtagtacagctgagcctsagttatcagggactcatttctgtggactgcttactctttctagtgggctatgtggtctcttacagtgtctgttcctctttttgtgttgggtctattaaaa

SEQ ID NO: 20857 - DNA, 201 bp, Homo sapiens
gtttgaaagtattccttccttctctatttttcagaataattttagtgggattggtattcgttcctttttatatgtttggcagcattcagcagcaaaaccaytgggtcctgggcttttctttacttagagactatttattatggctttgatcttgttacttgttttactgatctattcaggttttggacttcttttgtggtt

SEQ ID NO: 20858 - DNA, 201 bp, Homo sapiens
taatttcagtagataataccaatctgttttccaaagttgatatactaatttacactctcatagtatacaatagttcctgttgctcctagccagtgctgatrtggtctgacttttaaacttttgtaaatttggtagatgtcaagtaccacctccgtgtagttttttttgctttttgtttttttagagacagagtcttactct

SEQ ID NO: 20859 - DNA, 201 bp, Homo sapiens
ctcccactgatgagtgaggacatattgtttggttttctgtttgtgtgttagtttgcagagaataatggtttccagcttcttccatgtccctgcaaaggacmtgaactcatccttttttatggctgtgtagtattccatggtgtatatgtgccacattttctttatccagtctatcattgatgggcatttgggttggttcta

SEQ ID NO: 20860 - DNA, 201 bp, Homo sapiens; identical to SEQ ID NO: 2731

SEQ ID NO: 20861 - DNA, 201 bp, Homo sapiens
cttgcatcccagggatgaagcccacttgatcatggtggataagcttcttgatgtgctgctggatttggtttgccagtattttattgaggatttttgcatcratgttcatcagggatattggtctaaaattctctttttttgttgtgtctctgccaggctttggtatcaggatgatgctggcctcataaaatgagttaggga

SEQ ID NO: 20862 - DNA, 201 bp, Homo sapiens
atttttagatggagcttttatactttagggtttactgagatgaactttggagagaaagtctaaacagaatgacttatgacctgcaggaacagtggctgttytaagaactggaagaacccttttcctattagtaacagttgttgaatgataatgcatggagtgtcatcagtttattttttaatgtgacttttaatgttctta

SEQ ID NO: 20863 - DNA, 201 bp, Homo sapiens
agctacctccatgcattctttatcatcacttagagtagggatcggagaactgtggcccaagagctaagaatgttttttacctttttaaagggatgtaagaraaaaagaagaatctgtgtcatagacctgtgtagcccacaaagcctaacttatttaccatctggccctttgcagaaaaatttgctgactcttgatatagag

SEQ ID NO: 20864 - DNA, 201 bp, Homo sapiens
tatgctcggtccccaggtcacagcatgatgaaaaaatgacaacatttttcagccacaactttaatgaagatagatggcgaaaagctgctttgaaaaatgckttttccttacttggaaaacaacgctttgaacaatcggctgcttttttcttgctagctggttcattgaaagatgccatagaggtataaataagaaaacaca

SEQ ID NO: 20865 - DNA, 201 bp, Homo sapiens
taggtattcagtaaatggtgaattataaggaaggctttggtagattctcttctagtagatcttctacatttattgatactgttagctggaaaatcagtcaraatctctccctcttttcttaagcttatgaggataggttggccaaattattagcaacaaggcagtgtcagtgtttcaactccaagttctttgactaagttt

SEQ ID NO: 20866 - DNA, 201 bp, Homo sapiens; identical to SEQ ID NO: 2748

SEQ ID NO: 20867 - DNA, 201 bp, Homo sapiens; identical to SEQ ID NO: 2749

SEQ ID NO: 20868 - DNA, 201 bp, Homo sapiens
gggcttttcattctgaggctgaagaagaactgattaatatgattccagcaattcagagaggggacccccagtggtctgaattaagagctatgggcataggrtggtgggtgaggaacattaacacgcttcgaagatgcattgaaaaggtaacttttctttagtggattttgagttatattaaaaaaaccttttcctaacgaa

SEQ ID NO: 20869 - DNA, 201 bp, Homo sapiens
cttgtcagtttttttttttttttttttttttttagatggagtctcactctgtcacccaggctggagtgcagtggtgcaacctctgctcaccacaacctccrtctcctaggttcaagcgattctcctgcctcagcctcctgagtagctggaattacaggtgcgtgccaccatgccaggctaatttttgtatttttagtagag

SEQ ID NO: 20870 - DNA, 201 bp, Homo sapiens
caccatgcccggctaattttttgtatttttattggagacggggtttcaccatgttagccaggatggtctcgatctcctgacctcatgatctgcccgcctcrgcctcccaaagttctgggattacaggcgtgagccaccgtgcctggcctttataagtgtttcatatgtgcttaaagaaaatgtgtcctcttcaattgttgg

SEQ ID NO: 20871 - DNA, 201 bp, Homo sapiens
ctatttcctagggactgaaaaatccctaaatatgacagccatgatattttaatacatgcgagagaatcagaaataaaataattatttgtttagttgtcacytagtagtcacagagaaatatagaaagtaacaaatagtaaatgtaaattaccatcattaccatcctttttgtttttaagaaagaagagtttactgtccata

SEQ ID NO: 20872 - DNA, 201 bp, Homo sapiens
gctcccagagactatgaatagaacatatggctgtatttcataatttatttactatttaaatatgaggcagatagtaataattatgattatgcagaaatatrtttggaaattaagaggaagtggtatataaattctagtgtcatatatagtatttaatttaaaaatgaatgttatttaagttgatcttaagtctgagatgat

SEQ ID NO: 20873 - DNA, 201 bp, Homo sapiens
tgatttttgggtagttattttgctaataatttattctattttgtgtagattttcaaatttatgagtataaagttgttcacagcggcctcttaatatcttcytaggtctgcagcatctctgttgcttcttttgtcattactgccattggttatttgtgcctctccctttttcttcagcaaaggtttatcaactttattaatc

SEQ ID NO: 20874 - DNA, 201 bp, Homo sapiens
tataatcctttgggtatatacccagtaatgggattgctgggtcaaatggtatttctggttctagatccttcaggaattgccacactgtcttccacaatggwtgaactaatttatactcccaccaacagtgtaaaagccttcctgtttctccacatcctctccagcatctgttgtttcttgactttttaatgattgccatcc

SEQ ID NO: 20875 - DNA, 201 bp, Homo sapiens
ctcatccaatgccaagataatcatagctgcttccttttcttgaaatctctgggggagccatctgattgattgtcttaatacacttccaaaataagcttttktttggatctagcctttccttgaacttcagttcctgttaaggttctaagtagccattcgtgatagtcttaaaacatggtcatggagcatagcagttgacag

SEQ ID NO: 20876 - DNA, 201 bp, Homo sapiens
agttatttaacctgaaaaaaatgctgctactactactactactaccactaccactactactactactactactactactactactactactactactactagcaaacttttatctagtgattattgtatgtcaggctgtcttctaaatgttttatatatattaactcacttaaccttcctggtaaccttaagaaaaatgta

SEQ ID NO: 20877 - DNA, 201 bp, Homo sapiens
aagttatttaacctgaaaaaaatgctgctactactactactactaccactaccactactactactactactactactactactactactactactactactagcaaacttttatctagtgattattgtatgtcaggctgtcttctaaatgttttatatatattaactcacttaaccttcctggtaaccttaagaaaaatgt

SEQ ID NO: 20878 - DNA, 201 bp, Homo sapiens
aaagttatttaacctgaaaaaaatgctgctactactactactactaccactaccactactactactactactactactactactactactactactactactagcaaacttttatctagtgattattgtatgtcaggctgtcttctaaatgttttatatatattaactcacttaaccttcctggtaaccttaagaaaaatg

SEQ ID NO: 20879 - DNA, 201 bp, Homo sapiens
tttttttttaggcatatggatcaggctgtgatattgttattttggcaaatgactttgaatgtgtacagatcattcctggtgctaagcatggaaacatccargtcagctgtgtggagtgttctaaccaacaaggaagagtaagggatttaatttctttactgaatgtcatttaaaaatgtgtttaataatctcagaatcttc

SEQ ID NO: 20880 - DNA, 201 bp, Homo sapiens
caagttgacttgtaaccttaacaataataacagctgggaaagttatttaacctgaaaaaaatgctgctactactactactactaccactaccactactactactactactactactactactactactactactactactagcaaacttttatctagtgattattgtatgtcaggctgtcttctaaatgttttatatatat

SEQ ID NO: 20881 - DNA, 201 bp, Homo sapiens
cacaagttgacttgtaaccttaacaataataacagctgggaaagttatttaacctgaaaaaaatgctgctactactactactactaccactaccactactactactactactactactactactactactactactactactagcaaacttttatctagtgattattgtatgtcaggctgtcttctaaatgttttatatat

SEQ ID NO: 20882 - DNA, 201 bp, Homo sapiens
ccacaagttgacttgtaaccttaacaataataacagctgggaaagttatttaacctgaaaaaaatgctgctactactactactactaccactaccactactactactactactactactactactactactactactactactagcaaacttttatctagtgattattgtatgtcaggctgtcttctaaatgttttatata

SEQ ID NO: 20883 - DNA, 201 bp, Homo sapiens
gattccacaagttgacttgtaaccttaacaataataacagctgggaaagttatttaacctgaaaaaaatgctgctactactactactactaccactaccactactactactactactactactactactactactactactactactagcaaacttttatctagtgattattgtatgtcaggctgtcttctaaatgtttta

SEQ ID NO: 20884 - DNA, 201 bp, Homo sapiens
tgattccacaagttgacttgtaaccttaacaataataacagctgggaaagttatttaacctgaaaaaaatgctgctactactactactactaccactaccactactactactactactactactactactactactactactactactagcaaacttttatctagtgattattgtatgtcaggctgtcttctaaatgtttt

SEQ ID NO: 20885 - DNA, 201 bp, Homo sapiens
tgtcagtcatacatatggatcggagaagaatatgacagagaatccaaaaggtttgtctcatagtcacttttacatatagttttctgtaagaagtacccacyaaatggttatgcacatgatttgaattatttcaaaaggtatacgtgtatctccttcatttgggtaggtgacaaatataattggtttagctgccagtgaaag

SEQ ID NO: 20886 - DNA, 201 bp, Homo sapiens
gcttgctggctagcctatggcttttggtattaaattcttggtctttggaatcaagtgtcaacgccagatccagtcagttttatactgttgatcacgtggtytgccagggctgctctttcagaaggactgtagatggggcacttttctctagaaaggcctgtgaataagatgaacaatacatttgacatgataaagcataat

SEQ ID NO: 20887 - DNA, 201 bp, Homo sapiens
cctgttaatacctgctacatttcttgattttactagttgaatatctaggaagtagaatctgacccagttcactcttttaagccagaccacatcatagcttrctggctagcctatggcttttggtattaaattcttggtctttggaatcaagtgtcaacgccagatccagtcagttttatactgttgatcacgtggtctgcc

SEQ ID NO: 20888 - DNA, 201 bp, Homo sapiens
ttgattccacaagttgacttgtaaccttaacaataataacagctgggaaagttatttaacctgaaaaaaatgctgctactactactactactaccactaccactactactactactactactactactactactactactactactactagcaaacttttatctagtgattattgtatgtcaggctgtcttctaaatgttt

SEQ ID NO: 20889 - DNA, 201 bp, Homo sapiens
tttgttgattccacaagttgacttgtaaccttaacaataataacagctgggaaagttatttaacctgaaaaaaatgctgctactactactactactaccactaccactactactactactactactactactactactactactactactactagcaaacttttatctagtgattattgtatgtcaggctgtcttctaaat

SEQ ID NO: 20890 - DNA, 201 bp, Homo sapiens
ctttgttgattccacaagttgacttgtaaccttaacaataataacagctgggaaagttatttaacctgaaaaaaatgctgctactactactactactaccactaccactactactactactactactactactactactactactactactactagcaaacttttatctagtgattattgtatgtcaggctgtcttctaaa

SEQ ID NO: 20891 - DNA, 201 bp, Homo sapiens
agggagcctcatgactctgactggtgtcttatcctgctgtagctgagctggtatccaagatgcaaaacaaaatcctccccactcttctgtcgcctctcttmaagcagaaggaaggagtctcctttggagccgtgagctgtacagcctggggttagggaagggatgatgccagcacttttttagccatcccgcctggtgtct

SEQ ID NO: 20892 - DNA, 201 bp, Homo sapiens
gctttgttgattccacaagttgacttgtaaccttaacaataataacagctgggaaagttatttaacctgaaaaaaatgctgctactactactactactacyactaccactactactactactactactactactactactactactactactactagcaaacttttatctagtgattattgtatgtcaggctgtcttctaa

SEQ ID NO: 20893 - DNA, 201 bp, Homo sapiens
ttgttgtgtctctgccaggctttggtatcaggatgatgctggcctcataaaatgagttagggaggattccctctttttcttttgattggaatagtttcagraggaatggtaccagctcctccttgtacctctggtagaatttggctgtgaatccatctggtcctggatttttttggttggtaagctattaattattgcctc

SEQ ID NO: 20894 - DNA, 201 bp, Homo sapiens
ttttattggggtctatctctttctgtaactctaatatttgcttgatatatctgggtgccccagtgttgggtgcatatacatttaaaattgttatattctcktgctgaattgaccccttcagcattatatagtgaccttctttgtctcttcttacagtttttgtcttgaaaactattttgtctgatacatagtatcagaaaa

SEQ ID NO: 20895 - DNA, 201 bp, Homo sapiens
ttttatttatttgggtcttctctttctttttcttagtctgggaaaaaacttgtcaattttgttttatcttttcaaaaaattaactttttgttttattaatstttgtatgattttctttgtttcaatttaatttatgctctgatctttattatttcttttcctttaccaattttgggtttggtatgctcttgcttttctagt

SEQ ID NO: 20896 - DNA, 201 bp, Homo sapiens
aaatgtagacctatttttcctattacatttcatcttgctaagcacaactaaacagtccaatctctcagtatctttttgaatctggattatgttatttaatrtatttgtttttgctttatgactatgtcaccagcctgtttgaagagtgttatacctgcaccatctgagtcagttattaatatgataaataggcaggtctga

SEQ ID NO: 20897 - DNA, 201 bp, Homo sapiens
tagatacatttatgttttgacagtcactccacattcttcgtatgtaattgactcatcatgagctgactgtcaatatcccgaagtctttccccctccctgcyctctgctaaaccttgtcttctccattctgtatttgtacatttggatttggggtccaaatgtagacctatttttcctattacatttcatcttgctaagcac

SEQ ID NO: 20898 - DNA, 201 bp, Homo sapiens
gagtaagtggagaaataggtacttttatacagcttggggctataatctttttggaagacaatttgcagttgcaattaattttaatcactgatccagcataytatatcttagaatttatcctgtagggattcttggacacatacgcatatatcatctatacatacatgttcatcgaagcattgtttgaaatagtaaaagact

SEQ ID NO: 20899 - DNA, 201 bp, Homo sapiens
ctacttagaataaatctaatatttcttgcgtatgagagtacctcaagatattaaaagacagctttcttgtaacctgtgaaccttactacctcaggccaaayctgctccccctgtgcctatcaagtttctttatctgttttacatttgaccctggttactcttctgagcagttttcagtttgtctgtactctgagccttgta

SEQ ID NO: 20900 - DNA, 201 bp, Homo sapiens
attgataactagtacacatcggtaggtgatactgctgggaaactaagtcccacatttaatggcacacattcaatgggccattaaacccaaccccaaaggtwctattaagagttgtgttgggatctcaaatcaaagcaaaaagaaaaaaaaaagagttgtggacatgataaattatatcttacaattcgattagcatatttt

SEQ ID NO: 20901 - DNA, 201 bp, Homo sapiens
ctcaatcacaccacctttggcgttctgcctggttttacagatagttatgtcttggtgtcccctacttccttaccctgtgatttaagcatagtatgggttaraacatttgccatgaattggcctgtggcagggagctgatgatccttgttatcaaccattcaaagtttagcagatagtttggaaaatcaggcgattctgcta

SEQ ID NO: 20902 - DNA, 201 bp, Homo sapiens; identical to SEQ ID NO: 2739

SEQ ID NO: 20903 - DNA, 201 bp, Homo sapiens
ccaggtttctcattattgaagaagagagttacaagtgtagaaagtgggaaggcagccgggtgcaatgggtcacacctgtaatcccagcactttgggaggcygaggcgggcagatcacgaggtcaggagattgagaccatcctggctaacacagtgaaaccctgtctctactaaaaatacaaaaaattagctgggcatgttg

SEQ ID NO: 20904 - DNA, 201 bp, Homo sapiens
tgtatacataacgttttagaatctccttaaaagctagatgaagtagacatgtttctcaaggagattggactcatcagtcctttttgagagtggaaatgttyaaaccaagccttggagcttcgtttactcatagatagactcccataaattgagttcttttttaaagaatgaaatttatacatggtcttccttataaggaac

SEQ ID NO: 20905 - DNA, 201 bp, Homo sapiens
ttctcattatttatgttattacttttctgaaagatagtccttggctattttttaaactttactgcacatattaaaatattaattgaaataatgatcatacrtgatgattttttaaattaaaaattcatttggccttaaggcttgcagactattttgagatgtataggggcagttactattattccagtgtgacatgatttc

SEQ ID NO: 20906 - DNA, 201 bp, Homo sapiens
taataccctcttagatggattatcattggagagatgttcctttaggtccactgtcttctaaaaactgagccttgggagtaataacatttaatttaattcayactaaataattgttgttttcttcctgtgattttaggagaaacccattggttcgtactaaatcagtagtgttttcttcttgtgatctaaggagaaactcaa

SEQ ID NO: 20907 - DNA, 201 bp, Homo sapiens
aaaaagtcgtaagtgtgttttgcaagtaagcatagatggacacaaaaaactcataaacattctggcttagactcatttcacagatatatgtagctcatccrttagctgtagttcaaaaacaaaattccatacattttcttaggagtaatgattttggttttgtgctagcaacttcttcatatcatctctggccttgactgc

SEQ ID NO: 20908 - DNA, 201 bp, Homo sapiens
atgttagcaaattctaatggttataccttcaaaatgcgtccagaatctgattacttcttatctctactgctgccaccttggtgcaagacagcatcattttkttcccctggataatggcagttgaatcttaaatggtcttcctgccttttctgactctagcctatcctccttcagtttattttcaacatagtagctagaatg

SEQ ID NO: 20909 - DNA, 201 bp, Homo sapiens
agactttggttacgtcagtggttctcaaagtgtggtctcagaaccggcagcatcggcattccttgggaacttgtttgaaatgcagattcttgggtcttccstcagacccctcaatcagaaactctgggagtgagaaccaacaatctatgtcttaacaagctctccagatggttctaatgtgtgctgaagtttgagaactat

SEQ ID NO: 20910 - DNA, 201 bp, Homo sapiens
tccttcagtttattttcaacatagtagctagaatgctcctgttaaaatacaaataaaatcttgttagccccttattccagactttcacgtggctttttttyccactcagaataaaaacctgagtgcctgcaatgccctctattgctatttctttagcacctaaaacagaaggtggtacaaaaaagtactcaataaattagt

SEQ ID NO: 20911 - DNA, 201 bp, Homo sapiens
taaaagaattcatcgccagcaaatctgcactataagaaatatcaaaggaatataaagaaagtttctgaatcagaaggcaaaatgataccagatggaaatamggatctattcaaaggaataaagagtaccagcaattataactacataagtaaattacataaagacttttcctcattgtttaaatctctcctagacaattgt

SEQ ID NO: 20912 - DNA, 201 bp, Homo sapiens
aatatgcaaaacttactaaaactctacccaatccagtaagagtgcttacatctttaaaattgtcaaataggattttggtaatcactaaatttggcaaattsagaaaattgaccaataaaattggcaggctaatcctaaaaatgctgggtgcatttaaaaaaaatccctgagaaatgctgaagttatatatttataagaata

SEQ ID NO: 20913 - DNA, 201 bp, Homo sapiens
cagtttgggagattggcaagtgacctcttccttataaaagtgggaccttttatatgagcatttcagtctgtttggctatttagtgaggtaattagtgaggkaatgagcagtttgaagagtattcagagttgagcgtctgatgtaattaaagatttggcaaacatggccgggcacggtggctcacacctgtaatcccagcac

SEQ ID NO: 20914 - DNA, 201 bp, Homo sapiens; identical to SEQ ID NO: 2747

SEQ ID NO: 20915 - DNA, 201 bp, Homo sapiens
gtttccatgattgaagattttgaaaatgaaataatttttataatttttaaatacagtatgaaataaaagtgctttataagaaattacgttataacacatarcacaaatgattgtgtcccatatgattaggtaatacaatgagatatatgcattattttaaattgtcagaaatttattatagtaaacttagattactatttt

SEQ ID NO: 20916 - DNA, 201 bp, Homo sapiens
actccagtgaatctgggttcatagacctaggcaccaggcccgcctgcccaagaacacaagaagcaagcctgcccatgggccatagcagatagtggccagawtctctagacaggttgactgatgaagtccttgcccaaccaaagcaagcctgcaaagactcgaatcagtccctttctgacatgaatgcatggccacgtgaat

SEQ ID NO: 20917 - DNA, 201 bp, Homo sapiens
ttcaaatcaaacttacagaaatgaaaagtataatgtttgagataaaaaaatacactagatgggattcacagcagattagacattgcagagtgaaaaattaktgaatatgaaggcacaatagaaactatccaaaaggaaacacttttaaaaaacattggaaccaaataacaccagtgagctctgggacaactttgagcatcc

SEQ ID NO: 20918 - DNA, 201 bp, Homo sapiens
gggtggggacacagtcaaaccacatcaagatcttcctcaatattttgctgagaaaggaatcagtgtatgtgtatgagcaaattgctggcacccagaacaayagccatcgaaagggattagaggtaacaatctaatcacacaaagctaggaattcagcaggaggccccccttatctgtggctttgctttctgtggtttcagt

SEQ ID NO: 20919 - DNA, 201 bp, Homo sapiens
atatgttactttgctcttcgtttcttccttcctctcttacattccatttgagatcattttccttcttcctggagaatctccattagaatttccttggtatsaatctgttagtgttgtaatgttgtcttttgtttgtctaaaaaagcctttttttttcattcttttttaaacttttagtttcaggggtacatgtgcaggttt

SEQ ID NO: 20920 - DNA, 201 bp, Homo sapiens; identical to SEQ ID NO: 2730

SEQ ID NO: 20921 - DNA, 201 bp, Homo sapiens
ataaggaatctgatatgatcatggcattttctgttaataaggtaaaagctctcatcattatacacagtgtatttctccttagtgaaattgcttaaatcatygattctgcctttgctttataggcaaattgtaatgaaattgttttggcttcaacacatgatgttcaagaacttgatgttacttctctactggcctgtcagt

SEQ ID NO: 20922 - DNA, 201 bp, Homo sapiens
tttaatttctgggggacttttcagatgtaacttcaaagtaatttttttctgctattaaatttttaatttttaagaggttttaaaattctctgattttttttaaattacaaaatatttcataaattaaaaaagtatatataaaacatgttatataagatataataaagaataaacaaatacacatgtaccctactcctcaac

SEQ ID NO: 20923 - DNA, 201 bp, Homo sapiens
ttttatttggtgacagggtctggctctgtcgcccaggctggagtgcagtggtgcaatttcggctcactgcagccttgacctcctgggctcaattgatcctyccatctcaacctcccaagtagctgggactacaggtgcatgccagcgtgcctggctaatttttgtattttttgtagggatggggtttcaccacgctgccca

SEQ ID NO: 20924 - DNA, 201 bp, Homo sapiens
tcctaaatttcagggacaaacaccagtagataggccatgataatgacagctgacatttattgtggcttttttatttggtgacagggtctggctctgtcgcscaggctggagtgcagtggtgcaatttcggctcactgcagccttgacctcctgggctcaattgatccttccatctcaacctcccaagtagctgggactaca

SEQ ID NO: 20925 - DNA, 201 bp, Homo sapiens
agtgtctcaaaaaaaaagactttggttacgtcagtggttctcaaagtgtggtctcagaaccggcagcatcggcattccttgggaacttgtttgaaatgcarattcttgggtcttccctcagacccctcaatcagaaactctgggagtgagaaccaacaatctatgtcttaacaagctctccagatggttctaatgtgtgct

SEQ ID NO: 20926 - DNA, 201 bp, Homo sapiens
gagaagaatgtatactctgttgatttggtgtggtgagttctgtagatgtctattatgtctgcttggtgcagagctgagttcaagccctggtatccttgttwattttctgtcttgtcgatgtgtctattattgacagtggagtgttaaagtctcccactattactgtgtgggagtctaagtctctttgtaggtctttaagaa

SEQ ID NO: 20927 - DNA, 201 bp, Homo sapiens
catcagcaatatagcaggatgggactttccaatgctcaccccctcacagaaacaccaatttaaaggactatccatgcatgagaatacactcacaagagctraggaaaccaaatgagagattacagcacctgaatgttgcacagaaatcagaaaagatgctgtgaagaggataggaaagagttttacatgacccatccgtgc

SEQ ID NO: 20928 - DNA, 201 bp, Homo sapiens
aaagaattcagatttttttggtttaaaaaattaatataatatctgcattgtaaaaaagttataattccaacagtgttgaaatatagaaagtaaaactgaamgtttccagttcccagaagaattcgtataacttactggttatcctttattcaaaaaatattttggcacctagacattgtgcatacaggataaactagctat

SEQ ID NO: 20929 - DNA, 201 bp, Homo sapiens
gcctggccaacatggtaaaaccctgtctctactaaaaatacaaaaattagccaggcatggtggtgggcatctgtaatcccacctactcaggagcctgaggygaagaattgcttaaatgtatgacaacagcagcacaaaggccaggagagaactagaagtatactgttgtaaactttttacactatatgtgaagtgatatat

SEQ ID NO: 20930 - DNA, 201 bp, Homo sapiens
cctgacctcaagtgatctgcctgcctcagcctctcaaagtgctgggattacaggtatgagccaccatgcctggcctaaactttatcatatgtgtatatatwgagaggaaaacacatatatagggcttagtaccatctgcagtttcaagcatccatccactggagtcttggaacatctcccttgtagataaggtggggggac

SEQ ID NO: 20931 - DNA, 201 bp, Homo sapiens
attggtgcattttacaatcctcttgtaagacagaaaagttctccaagtccccattcgacccaggaagtccagctagcttcacctctcaatttcatagatgrggatactaatacttttgagaagttaaatgatttaatgaaggccacctagttagtactgtgatagaattaagactggaacacaaagctcccatttctccct

SEQ ID NO: 20932 - DNA, 201 bp, Homo sapiens
gtcccaacttaccacctcaagaaagtttccaggccacaggcagggagagaacccaggcagagcctaatggtttctccaagttgccaagatgatagaactgygagtctggggaatataatgaggatagagttcgcaggccaaaggccacagaggggcacagggagaggtacacagaaggtctgtattagtccattctcacac

SEQ ID NO: 20933 - DNA, 201 bp, Homo sapiens
ttgtaagacagaaaagttctccaagtccccattcgacccaggaagtccagctagcttcacctctcaatttcatagatggggatactaatacttttgagaarttaaatgatttaatgaaggccacctagttagtactgtgatagaattaagactggaacacaaagctcccatttctccctcccaccccgcaagatgtaaaaa

SEQ ID NO: 20934 - DNA, 201 bp, Homo sapiens
atttggcagtctattcattcataagtaagtatttactgaataccttctataccaaaagccattctaggaaatgggatacagtggagagccagacagagaargcacacaatgttgagatttagcggggcaagagctaacctcactataccttctccagacagatttgaagtttattgaatgaagtactaacctcgtacccaa

SEQ ID NO: 20935 - DNA, 201 bp, Homo sapiens
ttgctgcacccatcaacccatcatctacattaggtatttctcctaatgctatccctcccctagccccccgaccccctgacaggcctcagtgtgtgatgttycccccagtgtccatgtgttctcgttgttcaactcccactgatgagtgaggacatattgtttggttttctgtttgtgtgttagtttgcagagaataatggt

SEQ ID NO: 20936 - DNA, 201 bp, Homo sapiens
gtaaatttctgaatatatgagacttttaaagttacaaatatgcttactaatttctagcatagctgtattgtgtgcaagtggcatgcggtatgtacttctartctttttaagtttattgaaatttcagttggtcagtttttataagtttttttttttttttgagatggagtctcgctctgtcgcccaggctggagtgcagtg

SEQ ID NO: 20937 - DNA, 201 bp, Homo sapiens
aggaacacatttaactgaattaactcaaatagttaattgaattagagatgggctacatatggttaatatgaagccacaagaggatgtgaaggaaaatatgraaggaggacagtaaatgaatcgtgggagtggtgttatcatttcccacttagataagctcttaggaaagaggcagtgggtgggaaggttgggctttagtga

SEQ ID NO: 20938 - DNA, 201 bp, Homo sapiens
tagtggttcagaacatccataacaggctttatctcagtaataagcaaggtgtaagagaataaatgtcagaatttatcctgaagcatatccttcctcatctyttctgcatacacaaaataaaatttttaaaattttcttttaaagcttatgaaaaggaatctacataatgttaagagaatgacttcacacccagtccatcaa

SEQ ID NO: 20939 - DNA, 201 bp, Homo sapiens
ccagtattaacattggcgattaggacttgtacctaagtttttctcatggctacttagtttttaaaataaagattgtcctatgggtacataagaagattttkagttggaatttgtgttaagagaaaagggaatgttcacagtaacacatgaatgtttttcacagttcagatgatgttgattatcgtggttccactacaactc

SEQ ID NO: 20940 - DNA, 201 bp, Homo sapiens
cttcttgattctgccttttctttccttcccatcaccaaccctaagccattgcatcttcctctcatcagtctcttttattcctttcgaagtatccctctttmcaacttttccttatttctgtctcaccacccttacttcaaagggtggtttctttgcggttttctatggctttttactccactctgtgcctcttaatgtata

SEQ ID NO: 20941 - DNA, 201 bp, Homo sapiens
tcctgggttcatgccattctcctgccttagcctcccaagtagctgggactacaggcaccggccaccatgcccggctaattttttgtatttttattggagayggggtttcaccatgttagccaggatggtctcgatctcctgacctcatgatctgcccgcctcggcctcccaaagttctgggattacaggcgtgagccaccg

SEQ ID NO: 20942 - DNA, 201 bp, Homo sapiens
aaatgtggctagcatgattgagaaactgaattttaattttaattgatctaaatttaaatagttacatatggttagtgattgctgttttgaatagctcagayctgaaaaaaaaggtgttttattaagaaaaaaattatgaataaaacattaaggctgttaggacaaaataaaaactcgtcgttaggctcagaaatatgcaaa

SEQ ID NO: 20943 - DNA, 201 bp, Homo sapiens
tttagccaggcatagtggctcacacctgtaatcctagcactaggtgggggatctcctgagctcaggggtttgagaccagcttggcaacatggtgaaacccygtctctacaaaagatacaaaacaattatccaggtgtgatggtgtatgcttgtaatcccagctacttgcagggctgaggcaggaggattgcttgagcccag

SEQ ID NO: 20944 - DNA, 201 bp, Homo sapiens
caaattccataaactaaaatataggaatctaagatagtgatttaaaataaaagattttagccaggcatagtggctcacacctgtaatcctagcactaggtrggggatctcctgagctcaggggtttgagaccagcttggcaacatggtgaaaccccgtctctacaaaagatacaaaacaattatccaggtgtgatggtgta

SEQ ID NO: 20945 - DNA, 201 bp, Homo sapiens
caaaaaaattttaaaacgtaggtgcagtgctgtttgcctgtagttctagctgcttgaaaggctgaggtgagaggattgcttgagtccaggaggtcagcgtkgcagtgagccatgattgtgccactgcacaccagcctgggtgtcggactgagacagtgtctcaaaaaaaaagactttggttacgtcagtggttctcaaagt

SEQ ID NO: 20946 - DNA, 201 bp, Homo sapiens
tctgtctcaaaaaaaataaagatttggcaaacacaatcaatgagaagagaagaaatgaattatatttcgcttagaaaagtgaaaacagagagagtccatayggctcaatttcccgagataaagtataaaattgcttctcagtttttcctcatgcccagggcagtggaacctaccatacttgttctttttcccactcaccca

SEQ ID NO: 20947 - DNA, 201 bp, Homo sapiens
attgaataccctttatttctttctcttgcctgattgccctggccagaacttccagtactgtgttgaataggagtgttgagagagggcatccttgtcttgtrctggtttgcaaagggaatgcttccagtttttgcccatttagtatgatattggctgtgggtttgtcataaatagctcttattattttgagatacgttccat

SEQ ID NO: 20948 - DNA, 201 bp, Homo sapiens
taggggaaatatttcaaagtgctacctttctcactcatgatcagttcaagactattagtccaatgaatgtaatttaaaagtaagtgttcttacttctggaraagttattgtcttcctttaagacagacaaatacttttggcaataaaactaattttcttgacagtattcttgctacttaatatccctttagatcctccatt

SEQ ID NO: 20949 - DNA, 201 bp, Homo sapiens
aatgaatggaattaggaaattttttttccttagaatttaggagtttaccctgctatttctcatgcacatatagattatagggttctttcttcttagatgtyaagtttgtgtcttataatgaaatgtttggattctcatggcatgaacatagttatttgctatctatgtgcatataagtttcagaataataatatagatatt

SEQ ID NO: 20950 - DNA, 201 bp, Homo sapiens
tgtaaaagcgttcctatttctccacatcctctccagcatctgttgtttcctggctttttaatgatcaccattctaactgatgtgagatggtatctcattgkggttttgatttgcatttctctaatgaccagtgatgacgaacattttttttcatatgtttgttgcttatcagcttaaggagattttgggctgagacaatgg

SEQ ID NO: 20951 - DNA, 201 bp, Homo sapiens
cactgctctcctagacttgcagtcaccacaggtgcatctccactcccctgctgcactctagtgctctccctttgacactccagtcaaatcttagctgtttrttcattgccttggtcctttcttttcggaggatgaatgccaggtgtgtctagcagccatcttgctggcatcattctcttggtttatttttatggatgctca

SEQ ID NO: 20952 - DNA, 201 bp, Homo sapiens
gggtcaaatggtatttctggttctagatccttgaggaattcccacactgtcttacacaaatggttgaactaatttacactcccaccaacagtgtaaaagcrttcctatttctccacatcctctccagcatctgttgtttcctggctttttaatgatcaccattctaactgatgtgagatggtatctcattggggttttgat

SEQ ID NO: 20953 - DNA, 201 bp, Homo sapiens
aaagagttaagattgttattcaaaataatcataatagtttttattttatactttctaaagaaattacagtgaagcagtaattattagaaaagctttaaackatgtacaaaatctatatagtagttgaaaatggaaaaaattatgtgtaacaatatagatacttaatagcattgagaggcctatgttgtaatgtgactttca

SEQ ID NO: 20954 - DNA, 201 bp, Homo sapiens
ggagctttgtcccagaagggcacccgccagatgccgggcagagctctcctgtatgtggtgtctgtaggcccctactgtgaggtgtctccagtctgggtacrcgggggggtcagggacccacttgaggaggcagtctgtcctgtatcagagctcgaatgctgtgctgggagaattgctgctctctttagagctgtcaggcag

SEQ ID NO: 20955 - DNA, 201 bp, Homo sapiens
ttttgaaatgaattttttcattcagttttttccctctagtcctaagactccatattctgtttctattcttttgctagttactctagaaattacaggatgcrttcttaacttatttcacttattgaagccttatgagggtttacattctttgtagacaattcaagaaccttttgtattgctttttaactcccttcctgctta

SEQ ID NO: 20956 - DNA, 201 bp, Homo sapiens
tatattacctcttgaaaggccttacctccaaacacagtcacgttggtagttagagtttcaagctatgaattttggggttacacaatatagtccacaacacrtgttaacaatcagctgagctggtcctggaattgaaaattgaggagcctagcaaagacatgattgaggtggccaccctacttggtggtaatctcagctcaa

SEQ ID NO: 20957 - DNA, 201 bp, Homo sapiens
tttctttatccagtctatcattgatgggcatttgggttggttctaagtctttgctgttgtgaacagtgctacaataaacatacatgtgcatgtgtctttawagtagaatgatttataatcctttgggtatatacccagtaatgggattggtgggtcaaatggtatttctggttctagatccttgaggaattcccacactgt

SEQ ID NO: 20958 - DNA, 201 bp, Homo sapiens
taatttaaggatatagaatgtaatatgctatgtattgtcattttatattatatattttatatcagcaaaattatgcattttgtgttgccgtatattagttkctgaagcagaatatcaattatttgataaagtaattctctcacagcagacagagatttaaatagtgaaaaaattagtctgcctttcaggttataaaaaact

SEQ ID NO: 20959 - DNA, 201 bp, Homo sapiens
tgtgctttttatttgttccttttgttctttgctcctttttctcctttcttgtgtcttttgaaatgaattttttcattcagttttttccctctagtcctaaractccatattctgtttctattcttttgctagttactctagaaattacaggatgcattcttaacttatttcacttattgaagccttatgagggtttacatt

SEQ ID NO: 20960 - DNA, 201 bp, Homo sapiens
cttgttatttcctcatatggcttttcctttgtgtacatgcacttgcggtgtctttttctcttcttagggacgctagtcttatagggccccacccttaagayctcatttaaccttatattacctcttgaaaggccttacctccaaacacagtcacgttggtagttagagtttcaagctatgaattttggggttacacaatat

SEQ ID NO: 20961 - DNA, 201 bp, Homo sapiens
actttataatggcaataaaatctaagataaaatagtatgtaataagatttcaaaagttacatatcttatgtattgtaaaacttttttttttttttttttttaggcatatggatcaggctgtgatattgttattttggcaaatgactttgaatgtgtacagatcattcctggtgctaagcatggaaacatccaagtcagctg

SEQ ID NO: 20962 - DNA, 201 bp, Homo sapiens
caaaattttaattaatttaaggatatagaatgtaatatgctatgtattgtcattttatattatatattttatatcagcaaaattatgcattttgtgttgcygtatattagttgctgaagcagaatatcaattatttgataaagtaattctctcacagcagacagagatttaaatagtgaaaaaattagtctgcctttcagg

SEQ ID NO: 20963 - DNA, 201 bp, Homo sapiens
tcagtgctaagagaggatgaattaaacttggtaaaatgggtaagatctattggtctgttttgcggtctgaaacaaaatttggtgtaccacctggggtctgrattatttgagagaaggttaggggcatttgaaaggcaaattgtaaagctcagttaagtattcatgatgaaaatgattaaatatatagtatgaaattctaag

SEQ ID NO: 20964 - DNA, 201 bp, Homo sapiens
aaactcactcccagggagcggtgggagtttaatagtaacactcttgatatagtattcttggtaagattatagtactttgttaaacctctcaacatgcttartacaccttgatttatcaggttttgtttcttttttttggtctttgaagtttagacacttatcagtagttgtcaatgatctcaaactttgaccctgtaactt

SEQ ID NO: 20965 - DNA, 201 bp, Homo sapiens
aaacagtaaagagggctgagtttgaattatagtcatgtatttaccttgtgacataggaatttgattaaatcctgtgaaattcctttttcaaaaatattaargtgggattaataaccaacttctaggattgtggcagtcttgaaagaaagattaggaatatagaatgaaaatagtataatacttgtcacccagtaggttttt

SEQ ID NO: 20966 - DNA, 201 bp, Homo sapiens
gtatcttttagtaaaaagggaatttgcctccatagctgtaatactgttattgcatgtgaggaacatagataaaataatatcatgtaatataccattcatayacaaatatagattcctttcttaaatgcagattattttctttaaattcctccaatctagaacagtccctttctcaattgtcaaaaaaaaatctgttagtct

SEQ ID NO: 20967 - DNA, 201 bp, Homo sapiens
cctgttagtttttttgtttatgagcaaagatcacagcagaagtgaagaatttaaatgcaattaataaagagcaaaaaatttgagcaacagaaaacgaaackatagaaaaatgtcattagtaaagtggaaaaaacagtaaagagggctgagtttgaattatagtcatgtatttaccttgtgacataggaatttgattaaatc

SEQ ID NO: 20968 - DNA, 201 bp, Homo sapiens
agtaattgagaaggacagcaataataactctattctgcatatgtggcaccttcatcttaaatctgtacaagcatgtttaggtaagtaattatagttttatmcagagatgatacataacaaatttattttatagaatatgctttactttggttaattctgtaaaatgaagttccattaaactgtaaattgagttgctgaatt

SEQ ID NO: 20969 - DNA, 201 bp, Homo sapiens; identical to SEQ ID NO: 2738

SEQ ID NO: 20970 - DNA, 201 bp, Homo sapiens
ccgcctcggtctcccaaagtgctgggattacaggcataagccaccatgcctggccaaattgttttattttcctctaatttgatctttcttgagagtgtctrtaaactctctggagagtggctgttaactgtatgtctgtcctgatggggctccagggattattgtggagctgggatatgaccatatgagatggtcatggat

SEQ ID NO: 20971 - DNA, 201 bp, Homo sapiens
ctagtcttatagggccccacccttaagatctcatttaaccttatattacctcttgaaaggccttacctccaaacacagtcacgttggtagttagagtttcmagctatgaattttggggttacacaatatagtccacaacacatgttaacaatcagctgagctggtcctggaattgaaaattgaggagcctagcaaagacat

SEQ ID NO: 20972 - DNA, 201 bp, Homo sapiens
accaatattctctgtactccttctaaatggtcagtgttctgagcctagcaacaaaataatctaactagatgaaaacttattgtattcacctgcttataagrtgcataaagattcacctttacaccagagaaaggtatgtaaaaactgccccatgtccaatgcacttacattagagataaaaagccaaatgcataatgaatg

SEQ ID NO: 20973 - DNA, 201 bp, Homo sapiens
caattttaactctagcagcgctcattaccaatatgttgtcattatgagttttaatgattaaggaaagcttttattatcctgcattagatctcattttcagwtatgaagaatctaattttcagcagggaaaattatatatacaagtaatgtctttttttaaaaaatgcatgaaatttctacaaaattttttctttaccctac

SEQ ID NO: 20974 - DNA, 201 bp, Homo sapiens
tcaaaaaaaataaagatttggcaaacacaatcaatgagaagagaagaaatgaattatatttcgcttagaaaagtgaaaacagagagagtccatacggctcratttcccgagataaagtataaaattgcttctcagtttttcctcatgcccagggcagtggaacctaccatacttgttctttttcccactcacccacttacc

SEQ ID NO: 20975 - DNA, 201 bp, Homo sapiens
atatgaactcattttaagaaaactctttaatgaactataatatacatacagagaagtactcatataactcaatggatttttaggtatgtaggatatttcartcagttgcagtcattttttaaatgcttacatagtgctatattaggctagtaagtagcatttgaagtaggtcctgtgtccttttgacataacctcattatt

SEQ ID NO: 20976 - DNA, 201 bp, Homo sapiens
ggaaaagcctgtgtaagaactgttagtgctgtgcaggtgtggttatgctgtaggccacttgtgaccagatgcttagagtcattttcaaatcttcttgcacytccctaattcagcgtttcacgaagtctagttgactctgcactgtctaccagatttactccttttcatatccttaaccaccaccttattttacaatcttat

SEQ ID NO: 20977 - DNA, 201 bp, Homo sapiens
ttaaagaagtttctctgactacttacttgtgatgttgtttaaactttttcttgtctactgtattgcctgtacagtggaagttagctctacagacttgattrgatctgggttcaacattctgggtgatgccatgtacttcatatgtatcataccagaaaaaaaaatttggatatctcacttttagtcatattaagattcgga

SEQ ID NO: 20978 - DNA, 201 bp, Homo sapiens
taaactacagaaatagcaaatacaagatgaaggaagattgctcttacaaagcaagacagaggttctgcattgcatggttatttttaagctaatacaattaktaatgtaatagcagacatggttcaagaagaattagcagtttgggagattggcaagtgacctcttccttataaaagtgggaccttttatatgagcatttca

SEQ ID NO: 20979 - DNA, 201 bp, Homo sapiens
acatatctaaatgtagaaaaggtacagtgaaaatatggcattataatcttatgggaccaccatcatagtttatgtgtggtccattgtagaccgggtccgtygtagaatgttacgtggcacatgactgtaaaacatagttggatttttaaaaatacagcctgacaatttctgtgttcactagaactttcacttcatttatac

SEQ ID NO: 20980 - DNA, 201 bp, Homo sapiens
cattttagccctcaggatatttgtttctttaggactatgtttatggtctaagggatagaactaacatttattccaaatgtgaaaaggattagtttggtaargaagctaccaatagttttaaacaaggaaatgaagaaagagccaactatagttgaaagcaagtatagagttacatcataaattttctttagtgtcttgcac

SEQ ID NO: 20981 - DNA, 201 bp, Homo sapiens
acagtatttgtcattaggtttttacacataataaacattgtgatggatggcttgaggaatttaatatataagcttactctataatattctccaaatatgtrcttaaaatataaaatagccctttaaaagcattttctttacttagcacttagaaatgaacagaatgatgatttgaagcaacaaattcaggatacttttgtg

SEQ ID NO: 20982 - DNA, 201 bp, Homo sapiens
gtgtgagccaccaccctggccctgttaacaccatttctaaatgtctgagctaacactttaaatcatgaatcttgggtgaacatacccatatcagtaaattyagccctacctaactacatatttttttcttttgatctaataaccctagaatcaattttcttacatgctctctggaatcctactgatacaaataagaaagtt

SEQ ID NO: 20983 - DNA, 201 bp, Homo sapiens
aattgccgtcaagtttctctttacaaaatctatatataaggtcatttggtacttaaaaaatagtgcattagatattttataaagtcttgtttattttaggytccaatctgtgactttatttttatttttttagatagagtctcgctctgttgcccagactgtagtgcagtggtgtgatcagagctcactgcaaactccgcc

SEQ ID NO: 20984 - DNA, 201 bp, Homo sapiens
aaggcccaagatggtggtatcttacccaaaagggaattttaatttaattaggtgacatgtcttggggattttactgtttagggaagacattaattcaagcscaaggcttgaaattttctaaaccatctaaatgatgcaaagacagatgcgaatctctacaagtggccgggcgccatggctcatgcctgtaatcccagcact

SEQ ID NO: 20985 - DNA, 201 bp, Homo sapiens
tcgggaggcgcaggttgcaatgagccaagaccatgccattgcatttcagcctgggcagcaagagtgaaactccatctcaaaaaaaaaaaaaaaaaaaaaamcaagagactttgtcaaaaccagagaagcaaagaaggagattttgaaaatattattaatgtgtttgtttccattaaagccagaaaaataaaactataatta

SEQ ID NO: 20986 - DNA, 201 bp, Homo sapiens
agatcaatttgtggagaagtgacatctttgagtcttccaattatgaacatatgtctatatttatttagatcttctttgatttttcatcagtgtttatgcayatagatctgatacatgttttgttagaagtatttaatttttcagacctatgttaaaatggtatctttttaaacattttattttccaattgtttccagttgt

SEQ ID NO: 20987 - DNA, 201 bp, Homo sapiens
tatttattaaataatctttctttttctcccactgacttaagatgttacctttgtcagattaacttcttatacgtgtatgatttttgtattatatttttgcrtcaatctagactacatttttcttacttagtttaatatccactaaaaaaaatgggattttttttatttaaaaaaaattccccagctaatctcatctatttt

SEQ ID NO: 20988 - DNA, 201 bp, Homo sapiens
accttgcaaggtcaacaggaagaggggtgccacctaggacacgcaagtgcaaccagtggatgggatgaaagagaaaggacctagggaactaaagcctttaytggggtccagggtgttcttaaccaagcaagtttcctatgaggagttctaatttgtaggttggagcaagcaggcatgagtcatgctgtgactaagaggtgg

SEQ ID NO: 20989 - DNA, 201 bp, Homo sapiens
gaatgtatattctgtagctgttggatgaaatgttctgtaaatatctattgtttttgatagtacagattaagtctgatgtttctttgttgattttctgtctrgaagatatgtccaattctgagtgatgtcgaagtctcaagctatgattttattggggtctatctctttctgtaactctaatatttgcttgatatatctggg

SEQ ID NO: 20990 - DNA, 201 bp, Homo sapiens
gcttgcagtgagccaagatcgtgccactgcgctctagcctgggcaacagagtgagactccgtctcaaaaaaaaaaaaaaagaagtactaggtccaaggctrtaaacttaaataaggcttttaatacatattgccagattattttccacattactaatttgtactctcttgagaatagtgagaggatgcatctaactttacc

SEQ ID NO: 20991 - DNA, 201 bp, Homo sapiens
ggcgtgaacccgggaggcggagcttgcagtgagccaagatcgtgccactgcgctctagcctgggcaacagagtgagactccgtctcaaaaaaaaaaaaaaagaagtactaggtccaaggctataaacttaaataaggcttttaatacatattgccagattattttccacattactaatttgtactctcttgagaatagtga

SEQ ID NO: 20992 - DNA, 201 bp, Homo sapiens
atttccttaagaagtactaggtcaggcccggcatggtggctcacgcctgtaatcccagcactttgggaggccaaggtgggcagatcatgaggtcaggagaytgggaccatcctggctaacacggtgaaaccccgtctctactaaaaatacaaaaaattagccgggcgtggtggcaggtgcctgtagtcccagctactcggg

SEQ ID NO: 20993 - DNA, 201 bp, Homo sapiens
tgatatacccattgttacagtgttagctcctctagattctcaggaatatgctctttccatcatactgaaggtgttggaagtttaattacagtttaatagtwtaatcacaatttaatagtttaatcatactatttgagcaaagtttttgggacactgttacgactatttccctcaaaatatcaacatttagattaaatggtt

SEQ ID NO: 20994 - DNA, 201 bp, Homo sapiens
ttctttattagtcttgctagtggtctatcaattttgttgatcttttcaaaaaaccagcttctggattcattgatttttttgaagggttttttgtgtctctrtttccttcagttctgctctgatcttagttatttcttgccttctgctagcttttgactgtgtttgctcttgcttctctagttcttttaattgtgatgttag

SEQ ID NO: 20995 - DNA, 201 bp, Homo sapiens
caggattaacttcataggtggttttgtatatttctgtcaggaagctttttatgattttagttgatctttgcctacatttattatttcagtgaaagttttamattatgataatataatcctgtcattcatttttcatgtatttgctggaatgtctcttcatcaacctattcaattaccctgaagtacattttgagtcggaaa

SEQ ID NO: 20996 - DNA, 201 bp, Homo sapiens
gtgcattgttagtctttggcagtcaggaatagataagagggttctggttcagtgctaagagaggatgaattaaacttggtaaaatgggtaagatctattgrtctgttttgcggtctgaaacaaaatttggtgtaccacctggggtctggattatttgagagaaggttaggggcatttgaaaggcaaattgtaaagctcagt

SEQ ID NO: 20997 - DNA, 201 bp, Homo sapiens
attttacaaaaaaatgtgaaaatatttcttacttagtggcctgccattataagatagattgacatgtttaacagaaacaaaagaggattattatttattgratattctggtgctctttgagatgtacaaggcaataacaacacatcatccctgcctttagtgaatttgtagtccaatggggagagacagataaataaataa

SEQ ID NO: 20998 - DNA, 201 bp, Homo sapiens
ggaaacaacaggtgctggagaggatgtggagaaataggaacacttttacactgttggtgggactgtaaactagttcaaccattgtggaagtcagtgtggcrattcctcagggatctagaactagaaataccatttgacccagccatcccattactgggtatatacccaaaggactataaatcatgctgctataaagacaca

SEQ ID NO: 20999 - DNA, 201 bp, Homo sapiens
tgaaaaacagttctttttggaaaggttaagtgcttagttatttccatttaattgacagtttcagaatgaggagtctgcgcgctggttatctctagctgctrctgttgaatttattgttgttgttggatttctttgtcttttaagtatcaatatgaactcattttaagaaaactctttaatgaactataatatacatacaga

SEQ ID NO: 21000 - DNA, 201 bp, Homo sapiens
gtctgcaagaccctacgttcaaacaaggttacattccgagatgctgggtggacatgaattttgggaggacactatttaacccactactctgatcaactttsttttctcatcagttatatttgtagttgcatagtcaggaactttcaaagtctcttgagcctccagacttccttgagccattttgactttgagacccccatg

SEQ ID NO: 21001 - DNA, 201 bp, Homo sapiens
aacatgaaatactaatactgtgcagctattaagaagaatgaatataaacagagccaaagacaaaaaccacatgattatctcaatagatgcagaaaaagccwttgacaaaattcaacaacccttcatgctaaaaactctcaataaattaggtattgatgggacgtatttcaaaataataagagctatctatgacaaacccac

SEQ ID NO: 21002 - DNA, 201 bp, Homo sapiens
tgaaagtaaagttgttgattacaataccctaaatataccctaattatcctaaatattttccattacctaaatatttaagaatgtatcttttagtaaaaagrgaatttgcctccatagctgtaatactgttattgcatgtgaggaacatagataaaataatatcatgtaatataccattcatacacaaatatagattccttt

SEQ ID NO: 21003 - DNA, 201 bp, Homo sapiens
caaactgtctcaaggacaaaaaaccaaacactgcatattctcactcgtaggtgggaattgaacaatgacaacacatggacacaggaaggagaacatcacayaccgggacctgttgtggggtggggggacgggggagggatagcattaggagatatacctaatgctaaatgatgagttaatgggtgcagcacaccaacatgg

SEQ ID NO: 21004 - DNA, 201 bp, Homo sapiens
gcaatgattaggttttcttttgctgtttagtttgtatgttttgtttaggagatactaataatcctctagagcctgaatgtataatctggcagtaatttctrtttcttttttcaaaacaatttcccggttcttatgatgttcacagtgatgctatatatgatttcaagctctttgattgattccttttttccatagtgtttt

SEQ ID NO: 21005 - DNA, 201 bp, Homo sapiens
ccatcagagaaatgcaaatcaaaaccacaatgagataccatctcacaccagttagaatggcgatcattaaaaagtcaggaaacaacaggtgctggagaggwtgtggagaaataggaacacttttacactgctggtgggactgtaaactggttcaaccattgtggaagtcagtgtggcgattcctcagggatctagagctag

SEQ ID NO: 21006 - DNA, 201 bp, Homo sapiens
tctatagagaaagctttgctgaggagataacctttaaactgagaattgaatactacgaaggagacaactgtgaagttcaggggaaagagtgtttttggccragggaacaaacaccaagtgcaaatgctctgaaataggaattagcagggcttgttaaagagcaacagaaagctggagtgtagtggttagaccaaagtttga

SEQ ID NO: 21007 - DNA, 201 bp, Homo sapiens
taatagaaatatttgtattatctctatactgactcatttactgaattgcagtctcaactttcaaactttgcagggaaaagacctccttaataggtaattastattatataatatgctcagttagaaaagacggttgaggccggcatatgaatgcatggatttgtgagatccatgtgcattctctcatgagtttttacactg

SEQ ID NO: 21008 - DNA, 201 bp, Homo sapiens
atggcaataaaatctaagataaaatagtatgtaataagatttcaaaagttacatatcttatgtattgtaaaacttttttttttttttttttttaggcatayggatcaggctgtgatattgttattttggcaaatgactttgaatgtgtacagatcattcctggtgctaagcatggaaacatccaagtcagctgtgtggagt

SEQ ID NO: 21009 - DNA, 201 bp, Homo sapiens
acaaatttacaagaaaaaaacaaacaaccccatcaaaaagtgggcaaaggatatgaacagacacttctcaaaagaagacatttatgcagccaaaaaacatmtgaaaaaatgctcatcatcactggccatcagagaaatgcaaatcaaaaccacaatgagataccatctcacaccagttagaatggcgatcattaaaaagtc

SEQ ID NO: 21010 - DNA, 201 bp, Homo sapiens
aacttcccagcagctttgtttacactgtgagggtaaaaccatctactcaagcctcagcaatggcggatgcacctcctcccaccaagctcgagtgtcccagstcaacctcagatgctgtgatagcagtgagaatttcaagccagtggatcttagcttgctgggctccgtgggggtgggacccgctgaaccagacactggaga

SEQ ID NO: 21011 - DNA, 201 bp, Homo sapiens
aactcaatagagggtaacctcagtttcagagtgtttgccttgttaggccccatgttgggtacttttgtgaggtcctttaaaatgcagatgaaagtcagatycaagtggacatatactttttaatcacaggtcctttgtgtagtattcctccccagctactacctaggaaagaaggagaacccttctccctagagggagatg

SEQ ID NO: 21012 - DNA, 201 bp, Homo sapiens
tttaaggcatgtggaattgtgttggaaaatgcatgcctgatttctatcttgatatttcttaagcctggtttgaaccctgggaacacagttacagtcttcartggcttagtatttttagatggagcttttatactttagggtttactgagatgaactttggagagaaagtctaaacagaatgacttatgacctgcaggaaca

SEQ ID NO: 21013 - DNA, 201 bp, Homo sapiens
tatgtgtcagcagatttggtttatctggaggactttctccttgtcttgtacattgcccccttcttgttatttcctcatatggcttttcctttgtgtacatrcacttgcggtgtctttttctcttcttagggacgctagtcttatagggccccacccttaagatctcatttaaccttatattacctcttgaaaggccttacc

SEQ ID NO: 21014 - DNA, 201 bp, Homo sapiens
aacaaatttacaagaaaaaaacaaacaaccccatcaaaaagtgggcaaaggatatgaacagacacttctcaaaagaagacatttatgcagccaaaaaacayctgaaaaaatgctcatcatcactggccatcagagaaatgcaaatcaaaaccacaatgagataccatctcacaccagttagaatggcgatcattaaaaagt

SEQ ID NO: 21015 - DNA, 201 bp, Homo sapiens
ccacccagttcaaacttcccagcagctttgtttacactgtgagggtaaaaccatctactcaagcctcagcaatggcggatgcacctcctcccaccaagctygagtgtcccaggtcaacctcagatgctgtgatagcagtgagaatttcaagccagtggatcttagcttgctgggctccgtgggggtgggacccgctgaacc

SEQ ID NO: 21016 - DNA, 201 bp, Homo sapiens
aagttgtcataaatattaatttatgttggtatatatgacataatatacaattaactttaaaactttcaaatgtaaaatgtattaagaacaaattgagaaayagtattgtggctgggtgtggcagctcacacctgtaatcccagcactttaggaggttgaggcctgtaatcccagcgctcctggccagatcacttgagccca

SEQ ID NO: 21017 - DNA, 201 bp, Homo sapiens
ttcccccacgtgctctgtctcggggagctgtggtgggctccacccagttcaaacttcccagcagctttgtttacactgtgagggtaaaaccatctactcargcctcagcaatggcggatgcacctcctcccaccaagctcgagtgtcccaggtcaacctcagatgctgtgatagcagtgagaatttcaagccagtggatct

SEQ ID NO: 21018 - DNA, 201 bp, Homo sapiens
ttctttaatttgtgctatagttaatcatttaaaaaaaggatgaaagtattttcatagttatagccccaggacaggagttgacagggttgatacataggaawtactcattaatagattgaggtaaggatggagagggggaagatgtgaaagttgccagccactctttcaagtggaagatgtactattaacagtcatatagat

SEQ ID NO: 21019 - DNA, 201 bp, Homo sapiens
ttacctactcaaggctgggcaatggtgggcgcccctcccccagccgcactgccaccttgcagtttgatctcagactgctgtgctagcaatgagcgaggctytgtgggcgtaggaccctccgagccaggcgcgggatataatctcctggtgtgctgtttgctaagaccattgcaaaagcacagtattagggtgggagtgacc

SEQ ID NO: 21020 - DNA, 201 bp, Homo sapiens
gagggttctgctgccttttgtttagctgtgccctgcccccacaggtggagtctacagaggcaggcaggcctccttgaactgaggtgggctccacccagttsgagcttcccaccgctttgtttacctactcaaggctgggcaatggtgggcgcccctcccccagccgcactgccaccttgcagtttgatctcagactgctgt

SEQ ID NO: 21021 - DNA, 201 bp, Homo sapiens
ttgaccaggctgggatgtgtccaccagggatagcccacagggccgtggaagtgggctcttggctgcttggctggcctggtggtgtgctgccaggggcggcycgaaggactatttctcaggcgttgattgcaggcgcagggcctttggcaggccagaactctgagtgcagggagcaggggcgctgcacgctgtttctgaggt

SEQ ID NO: 21022 - DNA, 201 bp, Homo sapiens
gctcggagtagtttgatcgtctgaagccttcttctctcagctcgtcaaagtcattctccgtccagctttgttccgttgctgatgaggagctgctttccttyggaggaggagaggcgctctgatttttagagtttccagtttttctgctctgttttttccccatctttgtggttttatctacctttggtctttgatgatggt

SEQ ID NO: 21023 - DNA, 201 bp, Homo sapiens
ctgtagctgagctggtatccaagatgcaaaacaaaatcctccccactcttctgtcgcctctcttcaagcagaaggaaggagtctcctttggagccgtgagytgtacagcctggggttagggaagggatgatgccagcacttttttagccatcccgcctggtgtctcagtaggttgcatgcctccccagcccactgtctttg

SEQ ID NO: 21024 - DNA, 201 bp, Homo sapiens
ctttcagtggacagttgaaaatagatatgtgtgtgtctgtctatagatacatacataaacatacacacacatttgttttcctaactgtcagctgagaggcstagaagcagtgatacccctgtagcagtgaacacaactggcatctagatcttggtttctaaatacctttgtccactaaaaggaaccactatttcttggagg

SEQ ID NO: 21025 - DNA, 201 bp, Homo sapiens
gcagtgatgtataggtatagagatatgtagatatgatacggatgtttgtattggtgtgtctttgatcctaagccctttcagtggacagttgaaaatagatrtgtgtgtgtctgtctatagatacatacataaacatacacacacatttgttttcctaactgtcagctgagaggcctagaagcagtgatacccctgtagcag

SEQ ID NO: 21026 - DNA, 201 bp, Homo sapiens
gtccagcccgggctccggagatgcatctgcatcaggtcctcaccggagctgtcaaccctggagacaactgctactccgtgggcagcgtcggggatgtcccyttcacggtgagcggcggccgggagccctaggggaagataccaggggccagacgcgggggcagggacctcctgtccagggcgcacgcctcctcaggaggct

SEQ ID NO: 21027 - DNA, 201 bp, Homo sapiens
ttatatgaataatgtgtgtatgtatacatgcatatatttgtgtatatttaaacagacatagagcagtgatgtataggtatagagatatgtagatatgatasggatgtttgtattggtgtgtctttgatcctaagccctttcagtggacagttgaaaatagatatgtgtgtgtctgtctatagatacatacataaacataca

SEQ ID NO: 21028 - DNA, 201 bp, Homo sapiens
catatagttgatcatagtagccactgttgatcctttcaatttctttggcatcagttgtagtatcccttttttcatctctgattttatttatttgggtcttytctttctttttcttagtctgggaaaaaacttgtcaattttgttttatcttttcaaaaaattaactttttgttttattaatctttgtatgattttctttgt

SEQ ID NO: 21029 - DNA, 201 bp, Homo sapiens
ctcgcagcccgaggagggtcaggcgcggagcttgtcgcacctcccgcgcattctgtccagcccgggctccggagatgcatctgcatcaggtcctcaccggrgctgtcaaccctggagacaactgctactccgtgggcagcgtcggggatgtccccttcacggtgagcggcggccgggagccctaggggaagataccagggg

SEQ ID NO: 21030 - DNA, 201 bp, Homo sapiens
tttacagtctgtctttcatgagatagttttttatcttggtagatgtcctaatgcttaaatgtcagacctatggccaggtgttcttctcacaggaaacttayactggcagatacccttgtggttcttgtcctatccgtgtccagtttatttgaccaagacagccacgctctaggagaaccctgaccaagcggagaattaggt

SEQ ID NO: 21031 - DNA, 201 bp, Homo sapiens
cgcccccgcccccacctccgccccagtccgcagcggctacagcccgggaggctccaagggaactcccgcacgtctgcgcgcgcaatcacgggacggcgggkcggcgtggcgcgcgcaattgccctggaaaccacggcgcgcgcacgcgcaaacgcgggtgatggggggaagaaagactgagctgagagctttgccgcggga

SEQ ID NO: 21032 - DNA, 201 bp, Homo sapiens
caaaaatatgaaccaatattctctgtactccttctaaatggtcagtgttctgagcctagcaacaaaataatctaactagatgaaaacttattgtattcacytgcttataagatgcataaagattcacctttacaccagagaaaggtatgtaaaaactgccccatgtccaatgcacttacattagagataaaaagccaaatg

SEQ ID NO: 21033 - DNA, 201 bp, Homo sapiens
gagtgtttttggtagatttcttggacttttccatgtagataatcatctcattataaatgggaacaattttatctcttcctttctaatctgtatggcttttrtttttcttattttgttgcagtgactaaaacttccaactccatgttgaataagaagtgagattggatgttcttgccttcttcccatttttggaggaaaagc

SEQ ID NO: 21034 - DNA, 201 bp, Homo sapiens
aatggctgacaagcatatgaaaaaatgctcaacgtcactaatgatcagggaaatgcaaaccaaaaccacaatgcgataccaccttactcctgcaagaatgsccataatcaaaaaaccaaaaaataatagatgttggtggggatgtggtataaagggaacacttttacactgatgttgggaatgtaaactagtacaaccact

SEQ ID NO: 21035 - DNA, 201 bp, Homo sapiens
taaatagatctacattagtgttacacccacagaagcacacccacaattctttaatattatcacatattcagacagtattcacatttcaccagttgcatctkaaatgtttttatatagttgatttgttcaaatcaggatctaaaatatgattcataccttgcaagtggttgctatatcttcagtctcttttaatctataggc

SEQ ID NO: 21036 - DNA, 201 bp, Homo sapiens
aaagaccaagtcttcgtgatggtttagcatgctccatgcttaccaggactctcgtcactgcttcaacctcatcttctgctaactctcacccctgcacactscactccatctaatttgcctcattgtttttaaactagattttaaaaataaaacactgaaattttgataagccagttcaataatctacaaataataaaacag

SEQ ID NO: 21037 - DNA, 201 bp, Homo sapiens
cacataggaatgatggggtagcttttggattgaatcaccatagtttagacgtttaatttattaagtccagaaactgaatagtcatagtaaattcgaggatsatcagttacctgatgatgtaggagacaaattaaaatcacatgggagttatgtataaattagaagtcagcttattacataatcagcaccatctttttcgag

SEQ ID NO: 21038 - DNA, 201 bp, Homo sapiens
atggttttgggatgattcaagcacattatgtttatcattagattctcataaagagcatacagcctacatccctagcatgtgcagtttacaatagggcttgmgttcctatgagaatctaatgccaccgctgatctggcaggatgtggagctcaggcagtattgctcactcactcactgctcacctcctgctgtgaggcccag

SEQ ID NO: 21039 - DNA, 201 bp, Homo sapiens
gcacaatctcagctcactgcaatctcagcttcccaggttcaagtatttctcccatttcagcttcccaagtagctgggactacaggcacccatcaccatgcyggttaatttttgtatttttggtagagatgaagtttcaccattttgtccaggctggtctcgaactcctgacctcagatgatccacctgcctcggcctccca

SEQ ID NO: 21040 - DNA, 201 bp, Homo sapiens
gagcattccaggcagatgaatgcaaaggtcctgaggtagaattgagtttggccttttccaagaactacccagggaccatcatggctgtcatgaagagggartgttgtaggagatgagaatagaagagtagctggggcaagttcctttaggatcatggtaaaagcgttagttgttctaaagagaggaggtgacagaatctga

SEQ ID NO: 21041 - DNA, 201 bp, Homo sapiens
ggggacccctgctctaaagaaagcagcaatatctttattgtggtaatagtaccacagcaaagaaaagaaacacattcgcacaactttaaatacaatttttmggagttcagagacctactgaggccatctatgacttatgtctattagacttcaggttgaaaacttttagtttcaatgttcaaagcagagaatacttttctc

SEQ ID NO: 21042 - DNA, 201 bp, Homo sapiens
tgacctcctgggcttaggcagtcctcctgcctcagctgggaatacaggtgtgtaccatcacatctggctagtttttttttttttttttttttttttttggkagaaataaggtttcattatgttgcccaggctggtctcttttccctttatttatgatgccctaaattaaaaaaatttttcttcaaacatgaacagaaaggt

SEQ ID NO: 21043 - DNA, 201 bp, Homo sapiens
agttagtttgagactgtgtaaaatattatactttcacttgctaattttagcatctagtgatgatttttgcctgaatcaggtattactgtggggttactagmtggtgattttctaacactatcactcattttatgtattagttgaaattgtactttaaggaagagcttccccttcttaccttttgtttatctactcatttat

SEQ ID NO: 21044 - DNA, 201 bp, Homo sapiens
ggaccacaatggtaaacaaggacaaggtaaggtccttgctctgatgaaccattcagtatagtgggaaccagacagacattaaacatgccttaaaaccattraaatctcatgggccctcaattacagaatgcatgtgattcagtactgactgattatatgagtccctttttcttccacccttggattatttatgcattagac

SEQ ID NO: 21045 - DNA, 201 bp, Homo sapiens
tccctttgatacactgatttccttttttttggataaatacccattagtgggattgatgaactgtatggtagttctagttttgtttttttgagaaaactccrtactgttttccataaccactggcacctgagcaagctgcctgtaggcccaaggactggtcctcctggacctgtgactactggcgtcttgtatgctgcctgg

SEQ ID NO: 21046 - DNA, 201 bp, Homo sapiens
tggcagggataccacaaaaaagatgtgtctttctcagtaggagatatcaagaggcatatgatgtcatttggccccagctgctgttaactttgatcacttgktaaggtggtttctgccaagtttctccattgtaaagttactttttttttcctttgtaattaatcagtatcttgtgaagagttagtttgagactgtgtaaaa

SEQ ID NO: 21047 - DNA, 201 bp, Homo sapiens
gattatttatgcattagactctttagaaaatgcccctgtgcactttttcaagctgttagtgtgcaatagtttaagagattccattctagcagtaatcatgrttattatataaaatggtaggcattgcgtaactctggttcaacaggaaactagcaccagacataagttgttccattttgatgggaattactagtttggtag

SEQ ID NO: 21048 - DNA, 201 bp, Homo sapiens
ccatctatctaactgtgtatttgtaccaattaaccaatttctcttcatctccttttttagctcccacataagattgagaaaataacggtactttttctttstgtgcttgtcttatttcatgtaacataatgacttctagttccatttatgttactacaagttataggattttgtcctttgtacagccaaatagtattccac

SEQ ID NO: 21049 - DNA, 201 bp, Homo sapiens
atatttatctggaatattttatgtctttttgatatataatgtagggaaaagaatgtaagaattgtaaggacctgagtttgaacactttgcatttagtaacwgtaatcttgggcaaattaatgcacttgaatttttctttatacagtgatagtatctaccctccaggtttgttgcaaagataaagagagagtgatccaacac

SEQ ID NO: 21050 - DNA, 201 bp, Homo sapiens
ttagagttggacatgggaattttcccaacaatttaattctgtgttgtagtctattttcaagatcatatagtggtatttgcccaatattctatataaattcrttcattttctattttatttgacttttttacctttggtaaaacaactttgggttggtttcctttctccctcaggcctgatgatgttggggatggatggtgg

SEQ ID NO: 21051 - DNA, 201 bp, Homo sapiens
tactgtccataataacttataatatgaaattttctaattgtttttccttagaaacaatttctttttgcattggattagcagctatttaactaattatccaytgaaataaaaaatacttttgaaaaatgaaaaagtacattcctaaaatggaattatttaaattacttttacctacccatttacatatgatgtaaaagtctt

SEQ ID NO: 21052 - DNA, 201 bp, Homo sapiens
accctactgtactattgaacactagaacttattccatctatctaactgtgtatttgtaccaattaaccaatttctcttcatctccttttttagctcccacrtaagattgagaaaataacggtactttttctttgtgtgcttgtcttatttcatgtaacataatgacttctagttccatttatgttactacaagttatagga

SEQ ID NO: 21053 - DNA, 201 bp, Homo sapiens
ccttttatcccccagtccttgtggtgataactttcacattggtgaccttgtattagtctgttataatcattcattcattgattgacatgttgaatggaatyattcacaacactttttgcgtaagtgtcatttgaagtagctttctgttgtggattatgatttttcttggaaagaatgttagatgttggataagagttaaaa

SEQ ID NO: 21054 - DNA, 201 bp, Homo sapiens
cagagaaatatagaaagtaacaaatagtaaatgtaaattaccatcattaccatcctttttgtttttaagaaagaagagtttactgtccataataacttatratatgaaattttctaattgtttttccttagaaacaatttctttttgcattggattagcagctatttaactaattatccattgaaataaaaaatacttttg

SEQ ID NO: 21055 - DNA, 201 bp, Homo sapiens
gttagggtaggacaaatgcctgtaatatgaacattagcactttgctcagggcctcgtaaacggcaggctcacagtaagtaactgtttgattaaaatgtgtytgaaacaatcagctttattgtggcatgtgtataaaggtgggtgacagttactttagaagatttaaagcagagttagtagtctcatctaggattcagtctt

SEQ ID NO: 21056 - DNA, 201 bp, Homo sapiens
gcatgtttatagcagcacaatttgcagttgcaaaaatatagaaccagcccaaatgcccatcagtcaatgagtggataaagaaattgtggtatatatatatwcacaccatggaatgctattcagccataaaaaggaatgaaatgacattcgcagcaacctggatggaattggagaccattattctaagtgaagtaactcagg

SEQ ID NO: 21057 - DNA, 201 bp, Homo sapiens
tactgtgaggtgtctccagtctgggtacacgggggggtcagggacccacttgaggaggcagtctgtcctgtatcagagctcgaatgctgtgctgggagaaytgctgctctctttagagctgtcaggcagggacgtttaagtctgctgaagctgtgcctgcagccgccccttcccccacgtgctctgtctcggggagctgtg

SEQ ID NO: 21058 - DNA, 201 bp, Homo sapiens
ttgctgggtcaaatggtatttctagttcaagatccctgaggaattgccacactgacttccacaatggtcgaactagtttacagtcccaccagcagtgtaawagtgttcctatttctccacatcctctccagcacctgttgtttcctgactttttaatgatcgccattctaactggtgtgagatggtatctcattgtggttt

SEQ ID NO: 21059 - DNA, 201 bp, Homo sapiens
tatccatgtagattttaatttagtctggtgtgggactgagcagtctgtgtttctaacaggtttcctaggtgattttgatgcatccaatttgaactattgcyggatcagaaaaatggagtatagtacacattctctggaaaacatcaggcaattatggttatctagggaagagtaaaaagccttttcagtgactgagccgta

SEQ ID NO: 21060 - DNA, 201 bp, Homo sapiens
atagggaatatttgatcaaaaggtatattgtacttaagattttgatagatattgccaaattattttatccatgtagattttaatttagtctggtgtgggastgagcagtctgtgtttctaacaggtttcctaggtgattttgatgcatccaatttgaactattgccggatcagaaaaatggagtatagtacacattctctg

SEQ ID NO: 21061 - DNA, 201 bp, Homo sapiens
gacgtatttcaaaataataagagctatctatgacaaacccacagccaatatcatactgaatgggcaaaaactggaagcattccctttgaaaactggcacawgacagggatgccctctctcaccgctcctattcaacatagtgttggaagttctggccagggcaatcaggcaggagaaggaaataaagggtattcaattagg

SEQ ID NO: 21062 - DNA, 201 bp, Homo sapiens
ctccatcaggtcctttaaggacttctctgcattggttattctagttagccattcgtctattttttttttcaaggtttttaacttctttgccatgggttcgracgttctcctttagctcggagtagtttgatcgtctgaagccttcttctctcagctcgtcaaagtcattctccgtccagctttgttccgttgctgatgagg

SEQ ID NO: 21063 - DNA, 201 bp, Homo sapiens
tcaaatgctaccccttccctgcttttcttactgtagtgtggacttacatctcaatggtaggagttttatgtatcttggagttggcggtgccttgtggtggrtgggagttaataatggtaagggtttgtttgtaggtgtgaaaaactgcagaaagacaaatggaccaataatatgaatagtcagtttacagagaaagaaata

SEQ ID NO: 21064 - DNA, 201 bp, Homo sapiens
tacggtttttgtctttggttctgtttatatgctggattacatttattgatttgcgtatgttgaaccagccttgcatcccagggatgaagcccacttgatcrtggtggataagcttcttgatgtgctgctggatttggtttgccagtattttattgaggatttttgcatcaatgttcatcagggatattggtctaaaattct

SEQ ID NO: 21065 - DNA, 201 bp, Homo sapiens
gaatatgctctttccatcatactgaaggtgttggaagtttaattacagtttaatagtataatcacaatttaatagtttaatcatactatttgagcaaagtytttgggacactgttacgactatttccctcaaaatatcaacatttagattaaatggttttccagaaatttccaatagttacaaaaataatttgaagttgtc

SEQ ID NO: 21066 - DNA, 201 bp, Homo sapiens
cttcctcttttcctaattgaataccctttatttccttctcctgcctgattgccctggccagaacttccaacactatattgaataggagtggtgagagaggrcatccctgtcctgtgccagttttcaaagggaatgcttccagtttttgcccattcactatgatattggctgtgatatgacagaccgtcatagatagctctt

SEQ ID NO: 21067 - DNA, 201 bp, Homo sapiens
tactgctgaattcatctgaaaatagttgtggatatttaggagtaagtgataaaagtgcatcgaaaaatgaattcagtgaccctggatttaaactgagtagrcagtttgttggagtctattcatacactctcttttcttccaatagaagcaaaaatctacaaaatttagtatggattaatcatctatttaaagatactaaat

SEQ ID NO: 21068 - DNA, 201 bp, Homo sapiens
gtcaaaataaaaaactaaaagtaaaggaagtactgtatcataaaaggagattaatgatagattggactactttaaaattaggaacttcctcaaagatagcrttaaaagtgaaatgcaagttgtggagttggagaaaagaattgcaacatctatatttgacaaaggactagtatccagaatataacaatatctacaaataag

SEQ ID NO: 21069 - DNA, 201 bp, Homo sapiens
caatggtcgaactagtttacagtcccaccagcagtgtaaaagtgttcctatttctccacatcctctccagcacctgttgtttcctgactttttaatgatcrccattctaactggtgtgagatggtatctcattgtggttttgatctgcatttctctgatgaccagtgatgatgagcattttttcatgtgtcttttggctgc

SEQ ID NO: 21070 - DNA, 201 bp, Homo sapiens
aaatttctcttttgtactctttccctttatttcccagactggccgacacttagggaaaatagaaaataacctacatgaaatattgggggtgaatttccccygatattgttattagctataaattagttaaattggggatcatgtactaatgtgacgatttgattatggaataattgaactatagccattcttcctggcagt

SEQ ID NO: 21071 - DNA, 201 bp, Homo sapiens
gtgctagctgaatatactctatcctgtgatgtgccactgagtggccagtatggaacctgggcagtggtctcaaggtctttgctctgctgtttaagcttaarattatgcttgcacagcctggggatgagcccgggagtttacaagcaagtttgttgagttgcctttccagactcctctttctgtgactttcctggtactttc

SEQ ID NO: 21072 - DNA, 201 bp, Homo sapiens
gatgtctcccccggacacccagctttaaaatttctcttttgtactctttccctttatttcccagactggccgacacttagggaaaatagaaaataacctayatgaaatattgggggtgaatttcccccgatattgttattagctataaattagttaaattggggatcatgtactaatgtgacgatttgattatggaataat

SEQ ID NO: 21073 - DNA, 201 bp, Homo sapiens
tattgctcttttgatttcattcatattcactcttggttttctgttaatatcattgatatctgcttttttattgtttcctgccttctatgtgatttggaatygttttactcttctttttctaattgattaagatggaaacctatgttattgatttggggagtgcccacacttctttaaacatttttctactagccattttaa

SEQ ID NO: 21074 - DNA, 201 bp, Homo sapiens
taggttgccaaagcttcttttcaaaggaacaatgatgccttagatgctgcactattctacctttcaatgaagaagaaagcagtagtgtggggtctgtttargtaagttgccttgacacttaacgtgattcaacagaatgaagattgtgctgtgagtaagaaacctaatgcttttgaaaataattaggtatatgagcttcat

SEQ ID NO: 21075 - DNA, 201 bp, Homo sapiens
gcaacttcttcatatcatctctggccttgactgcatccacacttaagaggatctaatcagcaggaggtaatcatattatcatcatgtacctttcccataayaactcccatcattccttttatgtggatgaataaccaatgttttcagcaaaggccacttcctccatttaggttctaaattgggtgtgattttgtccaccag

SEQ ID NO: 21076 - DNA, 201 bp, Homo sapiens
ttggtaatttgtgtcttttctctttgcctatcttgctgaagtttttatgttatattgctcttttgatttcattcatattcactcttggttttctgttaatrtcattgatatctgcttttttattgtttcctgccttctatgtgatttggaattgttttactcttctttttctaattgattaagatggaaacctatgttatt

SEQ ID NO: 21077 - DNA, 201 bp, Homo sapiens
gtttctatcagccatggaagtagcaggggaacattattgttgattaattgattgtaattcttatgtcaaattgtgaatttaatattttatttatcatttargttgccaaagcttcttttcaaaggaacaatgatgccttagatgctgcactattctacctttcaatgaagaagaaagcagtagtgtggggtctgtttaggt

SEQ ID NO: 21078 - DNA, 201 bp, Homo sapiens
tctttttcagaagggttttaactatacgtttaatttatttaatagttaaaggactatcctagtaatatgtttcagcttgggtgtgtttttactgtttttgrttttagaggaattggtctttttcatctgtttcatttttataggtttgcgtatagagttgtttgtggcatttcgttattatacttttaatgtgtgcagggt

SEQ ID NO: 21079 - DNA, 201 bp, Homo sapiens
tgctggctgtaattaggatttttaccataattactggcttgcgaatggttatctctaggagcatgtattaatattataacctactggagattgtgaaacaraaccaactttttctgtctccacagtttctatcagccatggaagtagcaggggaacattattgttgattaattgattgtaattcttatgtcaaattgtgaa

SEQ ID NO: 21080 - DNA, 201 bp, Homo sapiens
aacttgccatattagtctggagtgagttttgactgatcagattggacaataaaaggctcagctgtaattccaggagacttaattagtcatttgcaaccttragatacagctatcaagaagccatttaaaggattcatgagggaagagaacaggtggatacaggcttcagattttgagtttgataccgagaggaagaaagag

SEQ ID NO: 21081 - DNA, 201 bp, Homo sapiens
ggccacaggcagggagagaacccaggcagagcctaatggtttctccaagttgccaagatgatagaactgcgagtctggggaatataatgaggatagagttygcaggccaaaggccacagaggggcacagggagaggtacacagaaggtctgtattagtccattctcacactgctataaggacatacctgagactaggtaat

SEQ ID NO: 21082 - DNA, 201 bp, Homo sapiens
tccagtctattattgatgggcatctaggttgattccctgtctttgcaattgtgaatagtgctgcagtggacatacgcatgcatgcgtcttcatggtataaygatttatattcctttggccatatacccaataatgggattgctgggttgaattgtagttctgtttttattttgtttcattcttttttttttgagactgagt

SEQ ID NO: 21083 - DNA, 201 bp, Homo sapiens
ccaggcaaccagaatcctgattttcatgtttattattttatttaaaaaagtttcactcatctaaattcccaaataaggtaatatttagttttccacagttytgaacttaacagagtttgtgtttttcttttttttcttttcttttttttttttttgagactgagtctcaatccgtcacccgggctagcgtgcaatggcaca

SEQ ID NO: 21084 - DNA, 201 bp, Homo sapiens
gagtgagcgaacatattccctttacacaatgtttatcaccagtatttctgtcagagaactgataaaattttttaaactactttgaaaaaaataattcactrtcacccacaggaaactacagtaaagcagctccagtctccactaccactgcctaccaccctacctctgctttcagcaagtattgcgtcaacaaaaacagtc

SEQ ID NO: 21085 - DNA, 201 bp, Homo sapiens
tggtgattgctgagattttggtgcacccatcacctgagcagtgtacactgtacccagtgtgtagtcttttattcttcaccctcctcccacccctcccaagyccccagagtccattatatatcattctgatcctttgcatcctcatagcttagctcccacttacaagtgagaacatacgacatatgattttctactcctgag

SEQ ID NO: 21086 - DNA, 201 bp, Homo sapiens
atgaagaagatgatgcctttttttcagatacacaaatacaggagcaccaagatccaaattcctataggtaaataagacttttctttctctcatttttttttggcttttctttttgtagaaaatatcaatgttattaattttaaataacattattatcctgaatttatataagaaatgacttatgtttccaggttacaaatt

SEQ ID NO: 21087 - DNA, 201 bp, Homo sapiens
cacagccttatgttctccttttctcttagattttggcccactaattcctcacagtattttttatttttttagctctttgagtgtttttacatctatgttcrttaagaatattaatctggggccgggcgcggtggctcacgcctgtaatcccagcactttgggaggccgaggcgggtggatcatgaggtcaggagatcgaga

SEQ ID NO: 21088 - DNA, 201 bp, Homo sapiens
cctgcctcagcctcctgagtagctggaattacaggtgcgtgccaccatgccaggctaatttttgtatttttagtagagacaggatttcacgatgttggccwggctggcttgaactcttgacctcaagtgatcctcctgcctcagcctcccaaggtattgggattataggcatgagccactgcacccggccatttgtcagta

SEQ ID NO: 21089 - DNA, 201 bp, Homo sapiens
ttgactcttttctcagtataatcccacataggaggtattctgggaacatgagttctctttgctctcattcagcttaattgctctaccagtctaaaatagcrgagctaccattttcggattttcttttaccaactttgggaaattctctttgcctctctcctttgttaaattttctgtttcttagcatcatttatcttcctt

SEQ ID NO: 21090 - DNA, 201 bp, Homo sapiens
tataaaatatcaaataatttttggataatgaagtgcagggtttgcagatgcacacacacacacacacacacacacacacacacacacacacacacaccccmcacacacattttttttagatatagagtcttgctctgtgacccaggctggaatacagtggtgtgatcatcatagctcactataacctcaaactcatgggct

SEQ ID NO: 21091 - DNA, 201 bp, Homo sapiens
aaggcgaatttcgtgaggcaagcttaaataaaaactctgaaaattctattcttattttcttctgcttttttttaaatattactatttaagctaattgttarggtaggacaaatgcctgtaatatgaacattagcactttgctcagggcctcgtaaacggcaggctcacagtaagtaactgtttgattaaaatgtgtctgaa

SEQ ID NO: 21092 - DNA, 201 bp, Homo sapiens
gttctgtgacatacaacttagcatgggatcctcaaggtatttagcaattgtatttaaaattatttaaattaaatatttgttttaaatgtatgataataatrtgatatagtctcccataataagaaaatgatcaatgtattatattttctttttgttgatgaatataatttttccttcttggtatacagtgctttgtgcaat

SEQ ID NO: 21093 - DNA, 201 bp, Homo sapiens
aaaaaaattatccaggtgtggtggcacgtgcctatagtccctgctgctaggaaggctgaggcaggagaatcgcttgaacccaggaggtggaggttgcagtratcctggactgcaccattgcactccagcttgggagtcagagcaagactccatctcaaaaaaaaaaaaaaaaaagtatctggaacatagtaggtattccta

SEQ ID NO: 21094 - DNA, 201 bp, Homo sapiens
caccagggatagcccacagggccgtggaagtgggctcttggctgcttggctggcctggtggtgtgctgccaggggcggctcgaaggactatttctcaggckttgattgcaggcgcagggcctttggcaggccagaactctgagtgcagggagcaggggcgctgcacgctgtttctgaggtcctgagtgtgggcatgtagct

SEQ ID NO: 21095 - DNA, 201 bp, Homo sapiens
gggggaagatgtgaaagttgccagccactctttcaagtggaagatgtactattaacagtcatatagattatgtgacgaagactagtcagggatgatgatargctcagcttttaacatgttatatttaggatgttggtgggacatgtaggtggagatatactgtattcatgttacttacattcttcttttcccaaagtgaat

SEQ ID NO: 21096 - DNA, 201 bp, Homo sapiens
tctctggttctactctggccacattggcatttttactgtttctcagttaaccttccctctttgagcctttgtgttgtttgttttctttgtcaggaatgttwttcctccagctatctccaaggatagctcccatagatcctttaggtctttgctcactaataccttgtcaatgaggtttaccttgaccaccctttaaaaaat

SEQ ID NO: 21097 - DNA, 201 bp, Homo sapiens
atttcattcattgaattttttagctctagtatttctgtttggttcttttgtatgatatctatctccttggtgaatttcaaattcacatcatgtattctttrcctgatttcatttagttgtatatctgtattcttttgtatctgaatgagtttccttaagactatgatttccttaagaattatttttctggcatttcatgtt

SEQ ID NO: 21098 - DNA, 201 bp, Homo sapiens
tctgttgatttggtgtggtgagttctgtagatgtctattatgtctgcttggtgcagagctgagttcaagccctggtatccttgttaattttctgtcttgtygatgtgtctattattgacagtggagtgttaaagtctcccactattactgtgtgggagtctaagtctctttgtaggtctttaagaacttgctttatgaatc

SEQ ID NO: 21099 - DNA, 201 bp, Homo sapiens
cactgcaacctcctcttcctgggttgaagcaattctcccaaccagcctccaagtagctgggactacaggcgtgcgccaccatgcctggctaatttttgtaktattagtagagacggggtttcaccacgttggccagactgccctcgaactcctgacctcaagtgatctgcctgtctcggcctcccaaaatgctgggattac

SEQ ID NO: 21100 - DNA, 201 bp, Homo sapiens
gtagaaatgagtgtaaaaaatactttgaaatatgcagtaactgtcatgtgatatgaaaacatctttgattctgttagagacaaaatcatatgtactgccartactactttgtttttttcaattagcatttatgaaaatagagaagtaattgtttttccccattaaggttcatgatgcctttgggtcttagttttcttggtt

SEQ ID NO: 21101 - DNA, 201 bp, Homo sapiens
tattgggagggtgtatgtgtccaggaatttatccatttcttctagattttctagtttatgtgtgtagaggtgtttattgtattctctgatggtagtttgtrtttctgtgggatcattggtgatatcccctttatcattttctattgtgtctatttgattcttctctttttttctttattagtctggctagtggtctatgta

SEQ ID NO: 21102 - DNA, 201 bp, Homo sapiens
gttacgtgtaaggctgccaacaaaatatcagtatttcttttctcaaaataagcacagatataagaaggaattcattcctgcaccaactaaaaaatgtgatmtctgatgtacaggaaaagttaattgttaaaggatataaatgatacagtttctacattaaatgttttatattccaaagcactggataaaagaggacatact

SEQ ID NO: 21103 - DNA, 201 bp, Homo sapiens
cacttgcatcgtgttccttacacatgttctttacacacatcatttgaaggcaggtgagggccaggcatcagttctcagcactcataaccagctcctagaaracctcagacaaaaagatgtagatgcttgcagttgaaactggcacaccaaaatgctaaggcatgatgggatacaaatgatgtgtcaaaagtatcttttata

SEQ ID NO: 21104 - DNA, 201 bp, Homo sapiens
tcctggactttttttggttggtaggctattaattattgcctcaatttcagaacctcttattggtctattcagggattcaacttcttcctggtttagtattkggagggtgtatgtgtccaggaatttatccatttcttctagattttctagtttatgtgtgtagaggtgtttattgtattctctgatggtagtttgtgtttc

SEQ ID NO: 21105 - DNA, 201 bp, Homo sapiens
atgtgagcttgggcagctcttatgacctcttgataaatttggtgtaccgtacatgtgaatggcctgatattcaaatatttttctttctaatgattaagttytagtgtccctatttttgtaggggaaatgaaaacaaatgtttggggaaaaagagatttggattttatgtatcacattattgatcttgtattcagaaacttt

SEQ ID NO: 21106 - DNA, 201 bp, Homo sapiens
tggtttcccaatttttgctgcacttctgtacaatctatgttcaaaccagcaggtggagtgatttaaaaaattgtttttttgagacagagtctctcactgtygcctaggctggagtgctgtggcgcaatcttggctcactgcaacctctgcctcctgggttcaagcaattcttgtgcctcagcctcccaagtgactgggatt

SEQ ID NO: 21107 - DNA, 201 bp, Homo sapiens
tggtcctggactttttttggttggtaggctattaattattgcctcaatttcagaacctcttattggtctattcagggattcaacttcttcctggtttagtmttgggagggtgtatgtgtccaggaatttatccatttcttctagattttctagtttatgtgtgtagaggtgtttattgtattctctgatggtagtttgtgt

SEQ ID NO: 21108 - DNA, 201 bp, Homo sapiens
cctaaaatgaagattatgatctttaccatggcctgtgaggctctgctgtatgatctggcccttccgtgcctctccagcttcattcccaccttaatgcctaygacactgatgtcctttcaaggccttgaatatgccaagctctttcctgcttccacgtctttttatgtgctgttccctctgtctagggaatacctacaatac

SEQ ID NO: 21109 - DNA, 201 bp, Homo sapiens
gctgtgaatccatctggtcctggactttttttggttggtaggctattaattattgcctcaatttcagaacctcttattggtctattcagggattcaacttyttcctggtttagtattgggagggtgtatgtgtccaggaatttatccatttcttctagattttctagtttatgtgtgtagaggtgtttattgtattctctg

SEQ ID NO: 21110 - DNA, 201 bp, Homo sapiens
tagatacttaatagcattgagaggcctatgttgtaatgtgactttcattgacctcagacatttctttgtttctaaaatgaattcatacagatggctacttrgactagtttggcttctttccaaggcttcccagagttcttgccagcattcccattattgattaccattctgtgtggttcacattcattatgtttcgttttt

SEQ ID NO: 21111 - DNA, 201 bp, Homo sapiens
gtagaaaatattattaaaagttgtacctaacttaccatagttaatatattttttattggatttccagatgtctttcatttattatgagtcaatataaatgytcttgttatctattctaatagttaattgtatttctccaaatcatttttcttttaagagtttagtagtcacatttttttttgtaaagataattttttgtaa

SEQ ID NO: 21112 - DNA, 201 bp, Homo sapiens
ctaaaccatctaaatgatgcaaagacagatgcgaatctctacaagtggccgggcgccatggctcatgcctgtaatcccagcactttgggaggctgtggtgsgtggataacctgaggtcaggagttcgagaccagcctggtcaactggtgaaaccctgtctctactaaaaatacgaaattagctgggcatagcgtcgtccca

SEQ ID NO: 21113 - DNA, 201 bp, Homo sapiens
atagtctactattgactggaagcttttccaataaaataaacaataaattaacacattttgtatgttataggtattgtatactctactctttttttttttttaaaccctgcatgtggcatccaatatgtgctatactcttttaaggaagagaagaaaaatgttactaagaaaaccttaaggaagagaaaataaattaaccgt

SEQ ID NO: 21114 - DNA, 201 bp, Homo sapiens
gaggaaagtgaaagacagaagtcaagaatttagaatggacttgttttctaagagaaattggcctttttgttcttggagtgtagcttcttgtttgtttaaayggatacatttaaaaccttgtgggcttgggcttagtgtcaaccagtaagtgaatatagggtttataagttcttatgtccctgcgtagattgttaattagcc

SEQ ID NO: 21115 - DNA, 201 bp, Homo sapiens
ctgctaggataattttcttcaagtgtcattttactatattactcttggcttaagaatatgtaattgtttttaatagctgtgttaggaaatgtaaacttgtyaagtattctccatctttgactttatttttaattatatgtactcctcactttggcccctctgttacatactgatcttcttactctaaactgcatttttatg

SEQ ID NO: 21116 - DNA, 201 bp, Homo sapiens
ggcgtggaggcgaagagacttggtgttggtctcggagcgtggaggtgaagagacttggtgttggtctcggagcgtggaggcgatgctgcgccttggctccscctgcccgctgtgctagggcagcgaggagctgctggagtctgtggctttaagcctgactctgtatctcctgataatgcaggatcttaattccaacaaaaa

SEQ ID NO: 21117 - DNA, 201 bp, Homo sapiens
acaccacctttggcgttctgcctggttttacagatagttatgtcttggtgtcccctacttccttaccctgtgatttaagcatagtatgggttagaacattygccatgaattggcctgtggcagggagctgatgatccttgttatcaaccattcaaagtttagcagatagtttggaaaatcaggcgattctgctaattcatg

SEQ ID NO: 21118 - DNA, 201 bp, Homo sapiens
aattttttcattcagttttttccctctagtcctaagactccatattctgtttctattcttttgctagttactctagaaattacaggatgcattcttaacttatttcacttattgaagccttatgagggtttacattctttgtagacaattcaagaaccttttgtattgctttttaactcccttcctgcttataatatatcc

SEQ ID NO: 21119 - DNA, 201 bp, Homo sapiens
gaattttttcattcagttttttccctctagtcctaagactccatattctgtttctattcttttgctagttactctagaaattacaggatgcattcttaacttatttcacttattgaagccttatgagggtttacattctttgtagacaattcaagaaccttttgtattgctttttaactcccttcctgcttataatatatc

SEQ ID NO: 21120 - DNA, 201 bp, Homo sapiens
tgaattttttcattcagttttttccctctagtcctaagactccatattctgtttctattcttttgctagttactctagaaattacaggatgcattcttaacttatttcacttattgaagccttatgagggtttacattctttgtagacaattcaagaaccttttgtattgctttttaactcccttcctgcttataatatat

SEQ ID NO: 21121 - DNA, 201 bp, Homo sapiens
atgaattttttcattcagttttttccctctagtcctaagactccatattctgtttctattcttttgctagttactctagaaattacaggatgcattcttaacttatttcacttattgaagccttatgagggtttacattctttgtagacaattcaagaaccttttgtattgctttttaactcccttcctgcttataatata

SEQ ID NO: 21122 - DNA, 201 bp, Homo sapiens
gctggagtgcagtggcgcgatctcggctcactgcaagctctgtctcctgggttcatgccattctcctgccttagcctcccaagtagctgggactacaggcrccggccaccatgcccggctaattttttgtatttttattggagacggggtttcaccatgttagccaggatggtctcgatctcctgacctcatgatctgccc

SEQ ID NO: 21123 - DNA, 201 bp, Homo sapiens
taagtttttttttttttttgagatggagtctcgctctgtcgcccaggctggagtgcagtggcgcgatctcggctcactgcaagctctgtctcctgggttcrtgccattctcctgccttagcctcccaagtagctgggactacaggcaccggccaccatgcccggctaattttttgtatttttattggagacggggtttcac

SEQ ID NO: 21124 - DNA, 201 bp, Homo sapiens
ggagggcaagatgccacataaaggggaactgaggcaccccagacaacaactagtatcaactgctagacatgaggccatcttggaccttctaccacagttcwctgcagttgtatgagtgaaaccagcagaacttcccaaccaattcacagaacatacgaaataataataattgttgttttaagccactgtgtttcagagggg

SEQ ID NO: 21125 - DNA, 201 bp, Homo sapiens
tagctgtattgtgtgcaagtggcatgcggtatgtacttctaatctttttaagtttattgaaatttcagttggtcagtttttataagtttttttttttttttgagatggagtctcgctctgtcgcccaggctggagtgcagtggcgcgatctcggctcactgcaagctctgtctcctgggttcatgccattctcctgcctta

SEQ ID NO: 21126 - DNA, 201 bp, Homo sapiens
cattagtacttaaaagtctaatagcgtcagtaaagattttgttgcctcttcaaacagcctagatccctgtcagtcttctcccaggtaaaaaaaaacaaacmaacccaaaacaaaaaacaatgttcaccaaaaagcatcagtattaggcagctttaaacttttaactgaaggcactaaaagcagaggaatgtacatcatgat

SEQ ID NO: 21127 - DNA, 201 bp, Homo sapiens
tgggactgtaaactggttcaaccattgtggaagtcagtgtggcgattcctcagggatctagagctagaaataccatctgacccagccatcccattactggstatatacccaaaggtttataaatcatgctgctataaagacacatgcacacgtatgtttactgcggcactattcacaatagcaaagacttggaaccaaccc

SEQ ID NO: 21128 - DNA, 201 bp, Homo sapiens
gactctgtatctcctgataatgcaggatcttaattccaacaaaaagatagaaaaattcatcctccgcgcccgaaagatttagaatggaaaggttagagtccagtggcttggagagctgtctcatttatcaggaggtcgtagtttggtaatcctcctagataatattttaatctgtaaggtagccttttttttaatatagta

SEQ ID NO: 21129 - DNA, 201 bp, Homo sapiens
tgtgaagaaagtcattggtagcttgatggatggcattgaatctataaattaccttgggcagtatggccattttcacgatattgattcttcctacccatgarcatggaatgttcttccatttatttgtatcctcttttatttcattgagcagtggtttgtagttctccttgaagaggtccttcatgtcctttgtaagatgaa

SEQ ID NO: 21130 - DNA, 201 bp, Homo sapiens
ttctttgaaaacataactataaatagctatctgagattctgtgtctaaactatatttcatctgcccaatcctttgtttttgaaatagattttgctgaggtwttttttctatttgaattatcactctaatgaataaccttgtaccttggcatgtaaatatttgcattcctgattatttcctcatgctagttttccagcagtg

SEQ ID NO: 21131 - DNA, 201 bp, Homo sapiens
ccagcactctgggaggccgaggtgggcggatcacgaggtcaggagatcgagaccatcctggctaacatggtgaaaccctgtctctactaaaaatacaaaarattagccgggcgtggtggcgggcgcctgtagtcccagctactcaggaggctgaggcaggagaatggcgtgaacccgggaggcagaggttgcagtgagctg

SEQ ID NO: 21132 - DNA, 201 bp, Homo sapiens
cctctcatcccagggatgaagccgacttgatcgtggtggataagctttttgatgtgctgctggattcggtttgccagtattttattgaggtttttcgcatygatgttcatcagggatattggcctgaaattttctttttttgttgtgtctctgccacgttttggtatcaggatgatgctggcctcataaaatgagttaggg

SEQ ID NO: 21133 - DNA, 201 bp, Homo sapiens
tgccacactgtcttccacaatggttgaactaatttatactcccaccaacagtgtaaaagccttcctgtttctccacatcctctccagcatctgttgtttcytgactttttaatgattgccatcctaactggcatgagatggtatctcattgtggttttgatttgcgtttctctaatgaccagtgatgatgagcattttttc

SEQ ID NO: 21134 - DNA, 201 bp, Homo sapiens
gtcaaatggtatttctggttctagatccttcaggaattgccacactgtcttccacaatggttgaactaatttatactcccaccaacagtgtaaaagccttyctgtttctccacatcctctccagcatctgttgtttcttgactttttaatgattgccatcctaactggcatgagatggtatctcattgtggttttgatttg

SEQ ID NO: 21135 - DNA, 201 bp, Homo sapiens
aattcagctgtgaatccatctggtcctggactttttttggttggtaggctattaattattgcctcaatttcagaacctcttattggtctattcagggattyaacttcttcctggtttagtattgggagggtgtatgtgtccaggaatttatccatttcttctagattttctagtttatgtgtgtagaggtgtttattgtat

SEQ ID NO: 21136 - DNA, 201 bp, Homo sapiens
ccaccccccttgtctgctatttttaatgagaatctcaagcctttacaaattaaaaaaatacaaacaaaaacttactgtccacttctctctctctcctcctrtcctagcaaaatataagcacatgtggcaggatcctgtgtgtattttctaccacattatgccctgtgtgcctggtctagagtaactgctcaacagacattt

SEQ ID NO: 21137 - DNA, 201 bp, Homo sapiens
ctcctttttgtacctctggtagaattcagctgtgaatccatctggtcctggactttttttggttggtaggctattaattattgcctcaatttcagaacctsttattggtctattcagggattcaacttcttcctggtttagtattgggagggtgtatgtgtccaggaatttatccatttcttctagattttctagtttatg

SEQ ID NO: 21138 - DNA, 201 bp, Homo sapiens
tgaaatatctaaaattacttaacatgtcttgcatttttggtctgcattatatttctgttgggcagtgctttgccatctgattaaatgttgttttgcttatwttatcctttcttatctaatatcttaattgtattctaagaatgtctttataatttgttttcaaaatgtggttttagatttttatgaatttttaaccttttt

SEQ ID NO: 21139 - DNA, 201 bp, Homo sapiens
tattaatttccggtgtggtgttttttgtttgtttgtttgtttgagacaagagacaaggtctcactctgtcacccaggatggagagcagtggtgcaatctcrgctcactgcagcctcaacctcctgggctcaacccatctttttcacctctgcctcctgagtagctggaacaacaggcgagcgccatcggctaatttttttt

SEQ ID NO: 21140 - DNA, 201 bp, Homo sapiens
agctcctttttgtacctctggtagaattcagctgtgaatccatctggtcctggactttttttggttggtaggctattaattattgcctcaatttcagaacytcttattggtctattcagggattcaacttcttcctggtttagtattgggagggtgtatgtgtccaggaatttatccatttcttctagattttctagttta

SEQ ID NO: 21141 - DNA, 201 bp, Homo sapiens
agaggatgaattaaacttggtaaaatgggtaagatctattggtctgttttgcggtctgaaacaaaatttggtgtaccacctggggtctggattatttgagrgaaggttaggggcatttgaaaggcaaattgtaaagctcagttaagtattcatgatgaaaatgattaaatatatagtatgaaattctaaggaggcatgttg

SEQ ID NO: 21142 - DNA, 201 bp, Homo sapiens
agattactaaatgcaaataattttatattgttaggacttgtcctcttcacttttttttcaaaaaattttttgaaactacaagaaagttgaaagaatagtayagcaaatatccatataccacttaccgagatttaccacatattaacatcttgtcatttattcttttgttctcctcctctgcctgtatagatatgtctttgc

SEQ ID NO: 21143 - DNA, 201 bp, Homo sapiens
atatataacaaatgatttcacatcagttatgtaatttccattacatctcatcggaattcatgtagaaaatattattaaaagttgtacctaacttaccatarttaatatattttttattggatttccagatgtctttcatttattatgagtcaatataaatgttcttgttatctattctaatagttaattgtatttctccaa

SEQ ID NO: 21144 - DNA, 201 bp, Homo sapiens
ttcagaaggaatggtaccagctcctttttgtacctctggtagaattcagctgtgaatccatctggtcctggactttttttggttggtaggctattaattaytgcctcaatttcagaacctcttattggtctattcagggattcaacttcttcctggtttagtattgggagggtgtatgtgtccaggaatttatccatttct

SEQ ID NO: 21145 - DNA, 201 bp, Homo sapiens
atctgaaaccagttcatcaggaagagattcacccagcagagaatgtagtaatttctagagttgggcacagaaatgggagtggctctgaagagatttatagrggtagtaacaggtccttgtgggaggacaggaaccatgtgattttgtttgtccccactgcttatgaagcgtgtgtctcactaaagccagggctagagttga

SEQ ID NO: 21146 - DNA, 201 bp, Homo sapiens
aaagtttcctttgtttttttttctgactgtaaattggaaaagagatttagtttttaaagatagtatgccatttatttatagtctagtatgtaaatgaattrtttaatgcttgtattgataaatatattttctggttcagatttatccctggatagagaatctgaggcaggtacaggatcatcagaacatgaagatggagaa

SEQ ID NO: 21147 - DNA, 201 bp, Homo sapiens
tttgcatattcatcataacattctttaattttcagataatagattgttgacagcaactgattctattcagttgtgggctcctccaggagatgatattctgsaagaggaggaagaaattgataatacagttcctcctgttttaaatgattggaagtgtgtctggcagtgcaagttagtgtctatttctattgttatattcat

SEQ ID NO: 21148 - DNA, 201 bp, Homo sapiens
cctcataaaatgagttagggaggattccctctttttttattgtttggaatagtttcagaaggaatggtaccagctcctttttgtacctctggtagaattcrgctgtgaatccatctggtcctggactttttttggttggtaggctattaattattgcctcaatttcagaacctcttattggtctattcagggattcaactt

SEQ ID NO: 21149 - DNA, 201 bp, Homo sapiens
tgaataccctttatttctttctcttgcctgattgccctggccagaacttccagtactgtgttgaataggagtgttgagagagggcatccttgtcttgtacyggtttgcaaagggaatgcttccagtttttgcccatttagtatgatattggctgtgggtttgtcataaatagctcttattattttgagatacgttccatca

SEQ ID NO: 21150 - DNA, 201 bp, Homo sapiens
gggattacaggtgtgagcccagcctattttgtttcattcttgaaaggccgttttgctgtcttttagcaggtagacaggtaggtagagcatggcagtgttttctttcagcaccttgaggattatagtcttctggtctctactgtttctgttgagacgtaaactgctaatttactgttggttctttgaaagttatatattttt

SEQ ID NO: 21151 - DNA, 201 bp, Homo sapiens
caggtttgttacataggtttacacgtgccatggtggtttgctgcacccatcaacctgtcatctatgttaggtctttctcctaattctttccccttcctagmcccctacccccaaacaggccctgatgtgttatgttcccctccctgtgtctatgtgttctcattgttcaactcccacttatgagtgagaacatgcggtgcc

SEQ ID NO: 21152 - DNA, 201 bp, Homo sapiens
agggtatagaaggtatgttccttctatacccactttttttagagttttcatcatgaagggctgttgaattttatcatgcttttttagcattaattgatgcwaaaaaatttttgtccttcattctgttgtccttcattctgttgatgaaatgtatcacattgattgatttgtatgtgttgaaccatccttgtgtccctgtta

SEQ ID NO: 21153 - DNA, 201 bp, Homo sapiens
acatccaagtcagctgtgtggagtgttctaaccaacaaggaagagtaagggatttaatttctttactgaatgtcatttaaaaatgtgtttaataatctcaraatcttcttatccttttatgcaaagcttgcgtataatttcttatgtattgcttgggtgattattagcagaagttgcaaagtgataggtttatacaaattg

SEQ ID NO: 21154 - DNA, 201 bp, Homo sapiens
tttatctcagtaataagcaaggtgtaagagaataaatgtcagaatttatcctgaagcatatccttcctcatcttttctgcatacacaaaataaaatttttwaaattttcttttaaagcttatgaaaaggaatctacataatgttaagagaatgacttcacacccagtccatcaatactgtaagtatttatgacctaataat

SEQ ID NO: 21155 - DNA, 201 bp, Homo sapiens
acctgctcctggggctctttgtatttccattgtgacttttgaggggctctcgggtacctgtagaatttctttgttacgtagtctgaaaccactgcatagartgtgctgtaaatttgattatgtgaaaatgatgctatgctgaagaagatacttggaggaaagcaactagtacattgttaagtggctgtctaagggcaaaca

SEQ ID NO: 21156 - DNA, 201 bp, Homo sapiens
attgtaaaacttttttttttttttttttttaggcatatggatcaggctgtgatattgttattttggcaaatgactttgaatgtgtacagatcattcctggkgctaagcatggaaacatccaagtcagctgtgtggagtgttctaaccaacaaggaagagtaagggatttaatttctttactgaatgtcatttaaaaatgtg

SEQ ID NO: 21157 - DNA, 201 bp, Homo sapiens
ggatgttaaattcatcccctactttagcctcctttgcactcattaccatgggatattaacacagtctgctctcacaaagcagtttttttacttcatatttsctcaacactttttcccctgctccttgtgcctatttttaacacaggggctggtaaactgtaagcaataatgaatgacaaagtttaaaattctttctaggtt

SEQ ID NO: 21158 - DNA, 201 bp, Homo sapiens
tttgatttttataaacacatgggttgaagatgttttatatagtggttatggcaggattttggtaacattggaagttttagtagaattaatgtcttcctgtstggtctttatcttcatttccctctttcattagcagccttatatggatcccttcagggcatgggtcactgattcagatgtcatcacatgtcagccctggct

SEQ ID NO: 21159 - DNA, 201 bp, Homo sapiens
cttgtctataagaatgtaagtgatcatttcctcctgtgagtgattttctccatatttttcttgcttgaaattctgtctttgcttttcttttggtgaacttyttgatttttataaacacatgggttgaagatgttttatatagtggttatggcaggattttggtaacattggaagttttagtagaattaatgtcttcctgtc

SEQ ID NO: 21160 - DNA, 201 bp, Homo sapiens
ccaaaaggtttgtctcatagtcacttttacatatagttttctgtaagaagtacccaccaaatggttatgcacatgatttgaattatttcaaaaggtatacrtgtatctccttcatttgggtaggtgacaaatataattggtttagctgccagtgaaagtctttgtctacattaactgaatgaattacacttccattaaacc

SEQ ID NO: 21161 - DNA, 201 bp, Homo sapiens
agaaatcctttccccgtttcttgcttttgtcaggtttgtcaaagatcagatggttgtagatatgtggcattatttctgagggctctgttctgttccattgrtctatatctctgttttggtaccagtaccatactgttttggttactgtagccttgtagtatagtttgaagtcaggtggcgtgatgcctccagctttgttct

SEQ ID NO: 21162 - DNA, 201 bp, Homo sapiens
caagaagactcctagcaactactcagaaactctggtaaggttctgaataatgtcttccccaaaaatgggaggtcagagaccaactacttgtatggtgttgrtgaaatcacttaaacatgtttaggtctttgatctgtaaaagaagttcttaaagatattctttaagtatttagaccacgaatgaaaattatatggacttct

SEQ ID NO: 21163 - DNA, 201 bp, Homo sapiens
taaataatcacatccatgatatactttatactattgttcagatgaaaacaccacctcatcccagtattgaagatgtgaaggtaatgtaaagtttatgatcrtttgatattatacaccctgagaaggtaaatatgttatacctgtcttttaattcgaacttaggggaaatatttcaaagtgctacctttctcactcatgatc

SEQ ID NO: 21164 - DNA, 201 bp, Homo sapiens
tgatctctctaaaattgagagaatgggaatcttttgagtaaattatagattttgtataaactgttggtctttacagaatgcttattctgtgctccatgatrtggtaaattaattgggattacaaaaatgaacacactccttctagcaccaacaggatcttcatggaatagaggtagggcaatgcaatggaaagagcaggaa

SEQ ID NO: 21165 - DNA, 201 bp, Homo sapiens
cttcctctggtaaaactagattctgaaaaagaatggaacaaaatcacttttgatctctctaaaattgagagaatgggaatcttttgagtaaattatagatyttgtataaactgttggtctttacagaatgcttattctgtgctccatgatgtggtaaattaattgggattacaaaaatgaacacactccttctagcaccaa

SEQ ID NO: 21166 - DNA, 201 bp, Homo sapiens
gcacatgacagggatgccctctctcaccgctcctattcaacatagtgttggaagttctggccagggcaatcaggcaggagaaggaaataaagggtattcarttaggaaaagaggaagtcaaattgtccctgtttgcagacgacatgattgtttatctagaaaaccccatcgtctcagcccaaaatctccttaagctgataa

SEQ ID NO: 21167 - DNA, 201 bp, Homo sapiens
cattgcaaaagcacagtattagggtgggagtgacccgattttccaggtgccgtctgtcaccgctttctttgactaggaaagggaattccctgaccccttgygcttcctgggtgaggcgatgcctcgccctgcttcggttcacgttcggtgcactgcatccactgtcctgcatccactttccgacactccccagtgagatga

SEQ ID NO: 21168 - DNA, 201 bp, Homo sapiens; identical to SEQ ID NO: 2744

SEQ ID NO: 21169 - DNA, 201 bp, Homo sapiens
tgttgaatattggcccccactctcttctggctcttgtagagtttatgccgagagatcagctgttagtctgatgggcttccatttgtgggtggacctttctytctggctgcgcttaacattttttccttcatttcaactttggttaatcagacaattatgtgtcttggagttgctcttgtcaaggagtatctttgtggcgtt

SEQ ID NO: 21170 - DNA, 201 bp, Homo sapiens
tgtgatgttagggtgtcagttttagatctttcctgctttctcttgtgggcatttagtgctataaatttccctctacacactgctttgaatgtgtcccagarattctggtatgtcatgtctttgttctcattggtttcaaagaacatctttatttctgccttcatttcgttatttacccagtagtcattcaggagcaggttg

SEQ ID NO: 21171 - DNA, 201 bp, Homo sapiens
ggtgtatatgtgccacattttcttaatccagtctatcattgttggacatttgggttggttccaagtctttgctattgtgaacagtgccgcagtaaacataygtgtgcatgtgtctttatagcagcatgatttataatcctttgggtatatacccagtaatgggattgctgggtcaaatggtatttctagttcaagatccct

SEQ ID NO: 21172 - DNA, 201 bp, Homo sapiens
tattattattatactttaagttttagggtacatgtgcacaacgtgcaggttagttacatatgtatacatgtgccatgttggtgtgctgcacccatcaactygtcatttaacattaggtatatctcctaatgctatcccacccccctcctcccacctcacaacaggccccggtgtgtgatgttccccttcctgtgtccatgt

SEQ ID NO: 21173 - DNA, 201 bp, Homo sapiens
attgtcttagtgggttttgtgaggttttatgagggattatgtaggtgcatgtttgtctgcttttttattattattattatactttaagttttagggtacaygtgcacaacgtgcaggttagttacatatgtatacatgtgccatgttggtgtgctgcacccatcaacttgtcatttaacattaggtatatctcctaatgct

SEQ ID NO: 21174 - DNA, 201 bp, Homo sapiens
acaatgaagatgcattcaatatattgctaggcaatttcatcgtcgtgcaaacatcataaagtgtacttacacaaacctagatagtttttttttttttttttaagactgactttcactcttgttgcccaggctggagtgcaatggcgcaatctctgctcactgcaacctccgttctcccgggtttaagtgattttcctgcct

SEQ ID NO: 21175 - DNA, 201 bp, Homo sapiens
tgcaagacagaacaatacatattttagaagggagaattcagaggaatacatgtagaggaaaatgtattgctaaccttgaggttgcaaaagatttcttaaawcatcaaatttttttttttttttttgagatggagtcttgctttgtcacccaggctggaatgcagtggtgcaatctcggctcactgcaagctccgcctccca

SEQ ID NO: 21176 - DNA, 201 bp, Homo sapiens
agcctggtcaactggtgaaaccctgtctctactaaaaatacgaaattagctgggcatagcgtcgtcccagctactcgggaggctgaggcagaagaattgcwtgaacccgggaggcagaggttgcagtgagctgagatcgcgccactgcactccagcctgggcgacaagaacaaaactcccatctcacatccacacccccac

SEQ ID NO: 21177 - DNA, 201 bp, Homo sapiens
tattttttaatgtgacttttaatgttcttatttagaaattgatattatattaactattttgtaaaatgtcccaaggtatactttataatggcaataaaatytaagataaaatagtatgtaataagatttcaaaagttacatatcttatgtattgtaaaacttttttttttttttttttttaggcatatggatcaggctgtg

SEQ ID NO: 21178 - DNA, 201 bp, Homo sapiens
tcagagcatttatgaagtagtgggtctaggaatgagtctttgggcttacagctgaggagaagcctcttgattaggttttggtccttggcacctggcagatratagttgcctgcgactgtcatagtacagtattgggtgggagatgggaccagtgtgatggtgtttaggttctcctttcgcagctttccttttcccgtgcaa

SEQ ID NO: 21179 - DNA, 201 bp, Homo sapiens
acttcattagcaattttaatttcaacccggtcctgagatcttgccctgcctccatttgtcttgtgatattttattaccttgtgaagcatatgatctctgtracccacaccctattcgtacactccctccccttttgaaaatcactaataaaaacttgctggttttgcggcttggggggcatcacggaacctgctgacatgt

SEQ ID NO: 21180 - DNA, 201 bp, Homo sapiens
gtgccatggtggtttgctgcacccatcaacccatcatctacattaggtatttctcctaatgctatccctcccctagccccccgaccccctgacaggcctcrgtgtgtgatgtttcccccagtgtccatgtgttctcgttgttcaactcccactgatgagtgaggacatattgtttggttttctgtttgtgtgttagtttgc

SEQ ID NO: 21181 - DNA, 201 bp, Homo sapiens
cgccatggctcatgcctgtaatcccagcactttgggaggctgtggtgcgtggataacctgaggtcaggagttcgagaccagcctggtcaactggtgaaacsctgtctctactaaaaatacgaaattagctgggcatagcgtcgtcccagctactcgggaggctgaggcagaagaattgcttgaacccgggaggcagaggtt

SEQ ID NO: 21182 - DNA, 201 bp, Homo sapiens
taggcctgacagtccaggcctaacttagttcagtaaaatgggaaactctgctagaatagtgaacttcaaactccattcttcttaccgcatttatctgctayaattcaccttattaagagtcctcaaatagctgttctgtgctttctgtttatgttttatggctgcatcaagtgggagagacatcactgtggttactttatt

SEQ ID NO: 21183 - DNA, 201 bp, Homo sapiens
ctgtgtcttgttgtctcttctcttgcaagttgagattttcttagttctttatatgagtaattttggattatgcctggacatttaaaaatattacgttatgygactctgggccttttgtaaatcctatggagaatgttgatatttttgttttagcaggaattagagctggctgggttgagatggaaaggtttgaccaacctt

SEQ ID NO: 21184 - DNA, 201 bp, Homo sapiens
tctcctgacctcgtgatctgcctgcctgggcctcccaaagtgctgggattacaggcgtgagtcactgcgcccggccgtattttgtccttttctactttctstcaggattatgtagaataggtgttatttcttttttaaatgttagtagaatttataagtgaaacaatctgggcctggagttttctttttcagaagggtttt

SEQ ID NO: 21185 - DNA, 201 bp, Homo sapiens
ctactaaaaatacaaaatattagccgggcgcggtggcgggcgcctgtagtcccagctactggggaggctgaggcgggagaatggcgtgaacccgggaagcrgagcttgcagtgagccgagattgcgccactgcagtccgcagtccggcctgggcgacagagcgagactccgtctcaaaaaaaaaaaaaaaaaaaaaaaaaa

SEQ ID NO: 21186 - DNA, 201 bp, Homo sapiens
tacaggtgcgcaccaccacatctggctaatttttgtatttttaggagagaagggtttcaccatgttggccaggctggtcttgaactcctgacctcaagcartctgcccacctcagcctccaaaagtgctgggattacaggtgtgagcccagcctattttgtttcattcttgaaaggccgttttgctgtcttttagcaggta

SEQ ID NO: 21187 - DNA, 201 bp, Homo sapiens
cattgattaacaatgaagatgcattcaatatattgctaggcaatttcatcgtcgtgcaaacatcataaagtgtacttacacaaacctagatagtttttttktttttttttaagactgactttcactcttgttgcccaggctggagtgcaatggcgcaatctctgctcactgcaacctccgttctcccgggtttaagtgatt

SEQ ID NO: 21188 - DNA, 201 bp, Homo sapiens
gctttaaaatttctcttttgtactctttccctttatttcccagactggccgacacttagggaaaatagaaaataacctacatgaaatattgggggtgaatktcccccgatattgttattagctataaattagttaaattggggatcatgtactaatgtgacgatttgattatggaataattgaactatagccattcttcct

SEQ ID NO: 21189 - DNA, 201 bp, Homo sapiens
tgggccttcacaaccccagatttcaggctagcacatgcagacccatcttgtaggcctgctccagcactagattggcagccattgaccccagtaccaggacrgccctggcagtcctgagctccagagcagctcagtgcatgctggcccatataaccccaggtttcaggcccaccccagcaccaggtagatacccctatcctc

SEQ ID NO: 21190 - DNA, 201 bp, Homo sapiens
gaagctatggcagaagaacataaattgtgaagatttcatggacatttattagttccccaaattaatactttcataatttcttacacctgtctttactgcartctctgaacataaattgtgaagatttcatggacatttatcacttccccagtcaatactcttatgatttcctatgcctgtctttactttaatctcttaatc

SEQ ID NO: 21191 - DNA, 201 bp, Homo sapiens
accagtttagcacttgcagcctcaggcttcagaccattctcaggctccaggcctgtcccactgccaggatggccccagtgacctgaggctccagactgccycaacacctggctggctggcaccagcagcctcaggctccaggctggccctgtaaccccagactccagaccggcctttgtagacctagtttccaggtcctcc

SEQ ID NO: 21192 - DNA, 201 bp, Homo sapiens
agtttctgacaaagatgcatgcttttgaaatgtattttttaatagttattttatattaaaaataaaattcttatgaaaaatatgattttttcccatatgtrtatatatattttttattatactttaagttctggggcacacgtgcagaacgtgtaggtttgttacataggtatacacgtgccatggtggtttgctgcaccc

SEQ ID NO: 21193 - DNA, 201 bp, Homo sapiens
agtcatgcctgaccaatttaatttccttctgtgaaaccaaggcagtacttaaaatgggatataatatagaatatctaaaattcagatttagtcagacttcwctagcttgtcagtttttttttttttttttttttttttagatggagtctcactctgtcacccaggctggagtgcagtggtgcaacctctgctcaccacaac

SEQ ID NO: 21194 - DNA, 201 bp, Homo sapiens
tgaaaagtgcctgttcatgtcttttgctcgtttttaaaggggttatttgttttctgcttgttcaattgtttccattccttatagatttgggatattagacscttgttgcatgcatagtttgcaaatcttacattctataggttgtctgtttactctgttgatagtttatacaatgtgtgcagaaattctttagtttaatta

SEQ ID NO: 21195 - DNA, 201 bp, Homo sapiens
tctcagctcactgctgcctccacctcccaggttcaagcgattcttctgcctcagcctcccaagtagctgggattacaggcaggtgccaggacgcccggctratttttgtatttttagtagagacagagtttcaccatgttggccaggctggtcttgaactgctgaccacaggtatctgcccaccttgacctcccaaagtgc

SEQ ID NO: 21196 - DNA, 201 bp, Homo sapiens
catttttatcattaatttctctgaactctcttgtagtttatttacccaatagcatctttcaatatctgtcagtattttcacctctgcactcatatggtccscacaaaaaacactataatagttaaggactgagtctggagtcagaggtacaattctcaattctatcacttagtagtgttagttaaaattgtatagttccta

SEQ ID NO: 21197 - DNA, 201 bp, Homo sapiens
aaagcctaatttcattttctctgctgtcagaacaggttctttggtgataccacatgcatttttagtaacctgtttcaatagtactatctacttgagcattstcattttctctcttttattttctttttagaaaggacctcccaaatgggtttgcttaaaagttaggtaagtgagaggagtagtatgatcatttttatcatt

SEQ ID NO: 21198 - DNA, 201 bp, Homo sapiens
acattaaaaacttttaatgaagttcaataatcaactattttcctgtaagaaaattatttttaactttttttgctttcaaaattcaaagatattttatggawcagttggaataaatatttgcaataaggcacagttatccttgagtataaggacagaaagcctaatttcattttctctgctgtcagaacaggttctttggtg

SEQ ID NO: 21199 - DNA, 201 bp, Homo sapiens
agtgtctttcaaagagaggacattaaaaacttttaatgaagttcaataatcaactattttcctgtaagaaaattatttttaactttttttgctttcaaaaytcaaagatattttatggaacagttggaataaatatttgcaataaggcacagttatccttgagtataaggacagaaagcctaatttcattttctctgctgt

SEQ ID NO: 21200 - DNA, 201 bp, Homo sapiens
atactgagtaatgggatgactaggttgaatggtagtttattttaagttctttgagaaatctccaaactgctttctacagtggctgacgtaatttgcatgcycaccaacagggtacaagcgttcccattgctccacagcttcactagcatctgttttttttttttttaactttttgatagtagctattctgactggtgtgag

SEQ ID NO: 21201 - DNA, 201 bp, Homo sapiens
ttttcagttcagactgctgaaaaagtttttctgtgatgctccctagcatctattctctttctcttatagaagtgagagactacatctctttgattaaattyatatttttaaatgttttctcttatggaaacacaccaggaaaatgcagctcagaaccgcaagcctgttatccattctctatgtctttgtcatgtgttatat

SEQ ID NO: 21202 - DNA, 201 bp, Homo sapiens
ggatacacattattttcagcaaacacaaaacatttatcaaaattgaccatatatgcataacataaattttagcagagaaaattttatgtaaatggaaactygaacatatattttaaaaatagtctatggtggaagaaaaatcacaataaatttagaaaatatttaaaattaagtataataaaatatagtaaaaccttgtga

SEQ ID NO: 21203 - DNA, 201 bp, Homo sapiens
tctttttataggtttggaggtacttgtttcatgaatctgggtgctccaatgctgagtgcatgtatatttggggcagttaagtcttcttgttgaattgaacmctttattattatgtagtgcctttctgtgtcatttttttactgttgttggtttaaaatctgttttatcttatataggaatagtgattctttctttttttct

SEQ ID NO: 21204 - DNA, 201 bp, Homo sapiens
ctaacgctctatgcactcatcagcatggcatcaaaatatgtaaagtaaaagttgacaggacttctaaaagacatagataaacctatactcatagcaggatrgtttaacattaaatctcaagaaataatagaataaaaagacaaaactcagaaaaggtaaataggatttaaataacatgattacaaatagatctagtggatg

SEQ ID NO: 21205 - DNA, 201 bp, Homo sapiens
ttacgacctctatgctatgtacaagatatatatctaaatcctaataacaaagagaagttaaaagtaaaatttagaaaaatcacaccataaaacactaacawaaataagctaatgtaatcattttaatatatactaaatagattttttttttttgagacggagtctcgctttgtcacccacactggagtgcagtggtgtgat

SEQ ID NO: 21206 - DNA, 201 bp, Homo sapiens
accacccccatcattcaattatctcccactgagtccctcccataacacatgggaattatgggagctacaattcaagatgagatttgggtggggacacagcmagaccatatcattctgaatataagttctttatcagacatatgttttataaatattttctgccagccagaggcttgtcatttcattttctttacagtgtct

SEQ ID NO: 21207 - DNA, 201 bp, Homo sapiens
aatgacagccaagcgaaaggggaaaccccttataaaaacatcaagtttcatgagacttattcactaccatgagaacagtatgggggaaaccacccccatcwttcaattatctcccactgagtccctcccataacacatgggaattatgggagctacaattcaagatgagatttgggtggggacacagccagaccatatcat

SEQ ID NO: 21208 - DNA, 201 bp, Homo sapiens
aagaaaaagaggtttaattgactgacagttccacatggctggaaaggcctcacaataatggcagagacaaaagtcacgtcttacatggtggcagtgaagasagaatgacagccaagcgaaaggggaaaccccttataaaaacatcaagtttcatgagacttattcactaccatgagaacagtatgggggaaaccaccccca

SEQ ID NO: 21209 - DNA, 201 bp, Homo sapiens
ctttgtcatgtgttatatcacaagttctaaaaactgtggtattttttcatataccagcaagtacagtaccattcctcaggcctatttgtacagatttgggrtattatcaagttgtgaccggcatccccaaacccttttctctagataggtaggaagaacaccctaaaatgaaaaagtataaaagatctcttcagccctggg

SEQ ID NO: 21210 - DNA, 201 bp, Homo sapiens
cggataaaatgtgaaggcatttggtgcctatggagggatggtggtgagcactgctaagtagtgatgaggcagggaatgagaaagatggatgctttgtaaaygagtttctctttagtcacagtattgaccagatccagctttagctccacaagaaattgagcactcttttgaaatagcataggtaagtctttgcatatttta

SEQ ID NO: 21211 - DNA, 201 bp, Homo sapiens
tattttagatacagggtctccctatgttgcccaggccggtctcaaacttttgggctcgagcggtcttcccgcctcaatctcccaaattgctaggattacarggatgagccacaacccctggcaacttttattatagtatattgttttaattgttctattttattattagttatttttgtaatcttttactgtgcttgattt

SEQ ID NO: 21212 - DNA, 201 bp, Homo sapiens
acatttttttactttttatttttttaatttttatttattttagatacagggtctccctatgttgcccaggccggtctcaaacttttgggctcgagcggtcytcccgcctcaatctcccaaattgctaggattacaaggatgagccacaacccctggcaacttttattatagtatattgttttaattgttctattttattat

SEQ ID NO: 21213 - DNA, 201 bp, Homo sapiens
ccaaggttaattatctcaaaacaattatgtaatcttcctcttttagaaatccttgtcttttctaatgtccctgaatacacacataatttactatggcacawgtattctcattgcaatattactcccaaataaatatcattttcttttagagcatctccctctgtttgctatttagctagacagtaggcaattattttctaa

SEQ ID NO: 21214 - DNA, 201 bp, Homo sapiens
acgttttcagaattttggtaatccactttttttcggtagtttttgaaagagtggggcggggtgaggaaccttgactcttcacaatgaacacattagtcccygcttatctgcagtttcagtgacccaaggtcaaccacagtccaaaaataggtgtgtacagtacagtaaggtatcttgagagagtgagagacaccacactat

SEQ ID NO: 21215 - DNA, 201 bp, Homo sapiens
  misc_feature (101)..(101): n is a, c, g, or t
acccttgttcctgatccttggatccaaggttaattatctcaaaacaattatgtaatcttcctcttttagaaatccttgtcttttctaatgtccctgaatanacacataatttactatggcacaagtattctcattgcaatattactcccaaataaatatcattttcttttagagcatctccctctgtttgctatttagcta

SEQ ID NO: 21216 - DNA, 201 bp, Homo sapiens
  misc_feature (101)..(101): n is a, c, g, or t
ataacaagagctaccagaaaagactctacaaaacaacaacattgcacaaaggccactgcaaccctacacaaaaagatacttctgcaaggacatctgctcanaacctccttgtctaaccttagacaggtgtcacccttgttcctgatccttggatccaaggttaattatctcaaaacaattatgtaatcttcctcttttaga

SEQ ID NO: 21217 - DNA, 201 bp, Homo sapiens
gtaataaaatacaaacattcataattcacaaattatatctttattaaataaaaatagctttgtattcatctagctaaatggctacttattatcttataatyaagataaagtgttttatttatattaattttgaattagacaatctttcttgagtctccacgttttcagaattttggtaatccactttttttcggtagtttt

SEQ ID NO: 21218 - DNA, 201 bp, Homo sapiens
ataagttaggtgttttgttttagtaacataccagttcaagaggccagtctcatacttgccaagatagcttagtctatgctgtactaacaagatccccaaakctcagggactccacgtaggagaagtttttgttgtttgtttttgtttttgatttctgttacatgtcctgtgctcatagtggtcacaaaagaatccaggctg

SEQ ID NO: 21219 - DNA, 201 bp, Homo sapiens
cttcagccctgggtcaagaatgcaaatggaagaccacatgccacatagctacatatttaaaggtcataaatatacaaacctaacaaactgttaaaggagayattttctattctatcttgacaaatataccattataacaacaaaatagaaaatatctacctattttaagttataattgaaacttgcaaatcattaaagatg

SEQ ID NO: 21220 - DNA, 201 bp, Homo sapiens
tgcctgccaccatgcccggctaattttttgtagttttagtagagacttggtttcaccatgtgttagccatgctggtctcgatctcctgacctcatgatccrcccgcctcggcctcccaaagtgctgggatttcaggcgtgaggctaaatagattttaaggaaaaagacattagaatagataatgtcacctcatgtgagtag

SEQ ID NO: 21221 - DNA, 201 bp, Homo sapiens
cctcccagtagctgggactacaggtgcccgccaccatgccaggctaattgtttgtattaatagtagagatggggtttcaccgtgttagccagggtggtctygatctcctgaccttgtgatgcacctgccttagcctcccaaagtgctgggattacaggcgtgagccaccgtgcccagccatggctgagttttaaccaggct

SEQ ID NO: 21222 - DNA, 201 bp, Homo sapiens; identical to SEQ ID NO: 2822

SEQ ID NO: 21223 - DNA, 201 bp, Homo sapiens; identical to SEQ ID NO: 2823

SEQ ID NO: 21224 - DNA, 201 bp, Homo sapiens
tgtatttctacattattaggaatttgaaacttatttgaggaaattattggcagattctattgtaaattaaaaacatatactacagcatacttagatgttarttgtaaatctacaatcttttgtttggcaatggctcttcaattctaaatcattcattgagatgggtgatttaggtaattattttattatctcaagtactcc

SEQ ID NO: 21225 - DNA, 201 bp, Homo sapiens
cttgtctataaaagattttatttctccttcagttataaaggttagtttgatggaatatacaattattggttggaaaattttctttcctttaagaatgcttwaagtaggcctccaatctctcctggcttgtaaggtttctgctgagctatatacttggccttatggggttccctttgtatgtgatctgatctttttctctag

SEQ ID NO: 21226 - DNA, 201 bp, Homo sapiens
gcttgtctataaaagattttatttctccttcagttataaaggttagtttgatggaatatacaattattggttggaaaattttctttcctttaagaatgctktaagtaggcctccaatctctcctggcttgtaaggtttctgctgagctatatacttggccttatggggttccctttgtatgtgatctgatctttttctcta

SEQ ID NO: 21227 - DNA, 201 bp, Homo sapiens
atctgtccaatcttctcagtggggtgttgaagtcccccaatattattgagtgggtatctaaatctttttataggtttggaggtacttgtttcatgaatctkggtgctccaatgctgagtgcatgtatatttggggcagttaagtcttcttgttgaattgaaccctttattattatgtagtgcctttctgtgtcattttttt

SEQ ID NO: 21228 - DNA, 201 bp, Homo sapiens
gctgtagttttgtcatagatggctcttattattttgaggtatgttccttcaatgcctaattatttgagcgttttttcaagagtccagaatttccttgttarttttctgcctcaatgatctgtccaatcttctcagtggggtgttgaagtcccccaatattattgagtgggtatctaaatctttttataggtttggaggtac

SEQ ID NO: 21229 - DNA, 201 bp, Homo sapiens
ggagtgatgggagtggggacccttttcttgttccagttctcaaggggaatgctttcagtttttgcatgttcagtgtaatgttagctgtagttttgtcataratggctcttattattttgaggtatgttccttcaatgcctaattatttgagcgttttttcaagagtccagaatttccttgttaattttctgcctcaatgat

SEQ ID NO: 21230 - DNA, 201 bp, Homo sapiens
cagttctctttcacctccttggttagctgtagtcctagttgttttttttttttttttttttttttttttttttttttttttgaggctattgtaaatgggaytgcattcttgatttggctctcagcttgaagatttttattgtatagaaatgctactgatttttgtgaattgatttgtatcctgaaactttacagaagtcct

SEQ ID NO: 21231 - DNA, 201 bp, Homo sapiens
aaggtaaaggttcagtttaattattttgcttatggctagccagatatcccagcaccatttactgaatacggagtcctttccccattgtttatttttgtcarttttgtcaaacatcagatggctgtagttgtgtgtctttatttctgggttctctattctgttccattggtctatgtgtctgtttttataatattaccatgc

SEQ ID NO: 21232 - DNA, 201 bp, Homo sapiens
cccatcctgagttaatttttgtatatggtgaaaggtaaaggttcagtttaattattttgcttatggctagccagatatcccagcaccatttactgaatacrgagtcctttccccattgtttatttttgtcaattttgtcaaacatcagatggctgtagttgtgtgtctttatttctgggttctctattctgttccattggt

SEQ ID NO: 21233 - DNA, 201 bp, Homo sapiens
  misc_feature (101)..(101): n is a, c, g, or t
catggtgccaggatgagctggggagagctggctcttggcctcatggcctcatgaccggcaagtggccaaggcagaaaggggtcagatattccacagcaccngcatcccagtgaatccctctcattcatgtcttcgttgagtcacttactcattcattcactggggaaaggggaaaaaccacctactggggatcggagtttg

SEQ ID NO: 21234 - DNA, 201 bp, Homo sapiens; identical to SEQ ID NO: 13519

SEQ ID NO: 21235 - DNA, 201 bp, Homo sapiens; identical to SEQ ID NO: 13923

SEQ ID NO: 21236 - DNA, 201 bp, Homo sapiens; identical to SEQ ID NO: 13797

SEQ ID NO: 21237 - DNA, 201 bp, Homo sapiens
tgcagacccctgactccagcacgtctgggctgccaggtaggcacacgccgccctcgggccagaagctgcggatgtcggcgtcccggtagccttggttcttsccagactgttccagaatgatcgccttggcggcggtgtccatgcccacatgcacgacgagctgtgtgaacgggtaacagcagagagaacccaggaaaacga

SEQ ID NO: 21238 - DNA, 201 bp, Homo sapiens; identical to SEQ ID NO: 2836

SEQ ID NO: 21239 - DNA, 201 bp, Homo sapiens
acgagctgtgtgaacgggtaacagcagagagaacccaggaaaacgaggcccaccctgctcaccaaatgtgcagaaggggccactccttttgagagcccggstctgtgcaaaacatctcaaaccccaaatccactgggaaaccccaggatcccccaccagtgtctcctaattaatatggctggaaagaaaaacagctggatt

SEQ ID NO: 21240 - DNA, 201 bp, Homo sapiens
ctggaaagaaatttgaatacataaattacgaaactctgtactgcagttccgactgatttgtagacttttttcctataccttccactaacaacagtcaggcyaaggcaagtctgatctgcatgaccccaaggcagaggacttcagttcttcacatttcccatgtgctttttggtctttcacagctgacatgcccacctcggg

SEQ ID NO: 21241 - DNA, 201 bp, Homo sapiens; identical to SEQ ID NO: 2843

SEQ ID NO: 21242 - DNA, 201 bp, Homo sapiens
tccaggtgtacttgcaaagggagtcccctaaaggctactccaaatgcaaaaagcgtgctggcggccttgactgcttcctttggttttcttgtgggtttttktttgtttttttttttttttttttttgagacacagttttgttcttattgaccaggctggagtgcaatagtgcaatctcggctcactgcaacctccgcctcc

SEQ ID NO: 21243 - DNA, 201 bp, Homo sapiens; identical to SEQ ID NO: 1694

SEQ ID NO: 21244 - DNA, 201 bp, Homo sapiens
gcaagtctgatctgcatgaccccaaggcagaggacttcagttcttcacatttcccatgtgctttttggtctttcacagctgacatgcccacctcggggggrtgctggtgagaacccagtgggcctcacgcagaatgtgggtcactggaggagctccaaagtcctagttactttctagctgctgctcagtgatctctgtctg

SEQ ID NO: 21245 - DNA, 201 bp, Homo sapiens
atcgccttggcggcggtgtccatgcccacatgcacgacgagctgtgtgaacgggtaacagcagagagaacccaggaaaacgaggcccaccctgctcaccaratgtgcagaaggggccactccttttgagagcccggctctgtgcaaaacatctcaaaccccaaatccactgggaaaccccaggatcccccaccagtgtctc

SEQ ID NO: 21246 - DNA, 201 bp, Homo sapiens; identical to SEQ ID NO: 2837

SEQ ID NO: 21247 - DNA, 201 bp, Homo sapiens; identical to SEQ ID NO: 2839

SEQ ID NO: 21248 - DNA, 201 bp, Homo sapiens
actgttccagaatgatcgccttggcggcggtgtccatgcccacatgcacgacgagctgtgtgaacgggtaacagcagagagaacccaggaaaacgaggccyaccctgctcaccaaatgtgcagaaggggccactccttttgagagcccggctctgtgcaaaacatctcaaaccccaaatccactgggaaaccccaggatcc

SEQ ID NO: 21249 - DNA, 201 bp, Homo sapiens
agtttctcaatgcacagttgagtgctacatacaggattgaaacattcaattttctctagaggagcaatcccccggtcagttccctttggctggaaggaccrtggttgagttttcttcgaactgggctctgtgcttgggctttcccacctcttccagcatttcctggatgatgactctcaaggctcttcccagcaggctggc

SEQ ID NO: 21250 - DNA, 201 bp, Homo sapiens; identical to SEQ ID NO: 13978

SEQ ID NO: 21251 - DNA, 201 bp, Homo sapiens; identical to SEQ ID NO: 1687

SEQ ID NO: 21252 - DNA, 201 bp, Homo sapiens; identical to SEQ ID NO: 2842

SEQ ID NO: 21253 - DNA, 201 bp, Homo sapiens; identical to SEQ ID NO: 13485

SEQ ID NO: 21254 - DNA, 201 bp, Homo sapiens; identical to SEQ ID NO: 13410

SEQ ID NO: 21255 - DNA, 201 bp, Homo sapiens
ttgccagactgttccagaatgatcgccttggcggcggtgtccatgcccacatgcacgacgagctgtgtgaacgggtaacagcagagagaacccaggaaaaygaggcccaccctgctcaccaaatgtgcagaaggggccactccttttgagagcccggctctgtgcaaaacatctcaaaccccaaatccactgggaaacccc

SEQ ID NO: 21256 - DNA, 201 bp, Homo sapiens; identical to SEQ ID NO: 2826

SEQ ID NO: 21257 - DNA, 201 bp, Homo sapiens; identical to SEQ ID NO: 2827

SEQ ID NO: 21258 - DNA, 201 bp, Homo sapiens; identical to SEQ ID NO: 13544

SEQ ID NO: 21259 - DNA, 201 bp, Homo sapiens; identical to SEQ ID NO: 1692

SEQ ID NO: 21260 - DNA, 201 bp, Homo sapiens; identical to SEQ ID NO: 13546

SEQ ID NO: 21261 - DNA, 201 bp, Homo sapiens; identical to SEQ ID NO: 13547

SEQ ID NO: 21262 - DNA, 201 bp, Homo sapiens; identical to SEQ ID NO: 13549

SEQ ID NO: 21263 - DNA, 201 bp, Homo sapiens; identical to SEQ ID NO: 13551

SEQ ID NO: 21264 - DNA, 201 bp, Homo sapiens; identical to SEQ ID NO: 2835

SEQ ID NO: 21265 - DNA, 201 bp, Homo sapiens
ggccagaagctgcggatgtcggcgtcccggtagccttggttcttgccagactgttccagaatgatcgccttggcggcggtgtccatgcccacatgcacgaygagctgtgtgaacgggtaacagcagagagaacccaggaaaacgaggcccaccctgctcaccaaatgtgcagaaggggccactccttttgagagcccggct

SEQ ID NO: 21266 - DNA, 201 bp, Homo sapiens; identical to SEQ ID NO: 13288

SEQ ID NO: 21267 - DNA, 201 bp, Homo sapiens; identical to SEQ ID NO: 13641

SEQ ID NO: 21268 - DNA, 201 bp, Homo sapiens; identical to SEQ ID NO: 13492

SEQ ID NO: 21269 - DNA, 201 bp, Homo sapiens; identical to SEQ ID NO: 1686

SEQ ID NO: 21270 - DNA, 201 bp, Homo sapiens; identical to SEQ ID NO: 13563

SEQ ID NO: 21271 - DNA, 201 bp, Homo sapiens; identical to SEQ ID NO: 13493

SEQ ID NO: 21272 - DNA, 201 bp, Homo sapiens; identical to SEQ ID NO: 2840

SEQ ID NO: 21273 - DNA, 201 bp, Homo sapiens; identical to SEQ ID NO: 2841

SEQ ID NO: 21274 - DNA, 201 bp, Homo sapiens; identical to SEQ ID NO: 13495

SEQ ID NO: 21275 - DNA, 201 bp, Homo sapiens; identical to SEQ ID NO: 1690

SEQ ID NO: 21276 - DNA, 201 bp, Homo sapiens; identical to SEQ ID NO: 13320

SEQ ID NO: 21277 - DNA, 201 bp, Homo sapiens; identical to SEQ ID NO: 2824

SEQ ID NO: 21278 - DNA, 201 bp, Homo sapiens
ggctgaaataatacgccagatgtagaaggaccagcgccgcatgactccctcatatgagctacctacagtcagattcatagggatggagggtggagtggtgrgcaccaagtgctgggaggaagaaggaatagggagttaataggtacagagtttcagtttgggatgaggagaaagttctggagatggatggtggtgatggtt

SEQ ID NO: 21279 - DNA, 201 bp, Homo sapiens; identical to SEQ ID NO: 13878

SEQ ID NO: 21280 - DNA, 201 bp, Homo sapiens; identical to SEQ ID NO: 13568

SEQ ID NO: 21281 - DNA, 201 bp, Homo sapiens; identical to SEQ ID NO: 2830

SEQ ID NO: 21282 - DNA, 201 bp, Homo sapiens; identical to SEQ ID NO: 2834

SEQ ID NO: 21283 - DNA, 201 bp, Homo sapiens; identical to SEQ ID NO: 2838

SEQ ID NO: 21284 - DNA, 201 bp, Homo sapiens; identical to SEQ ID NO: 13335

SEQ ID NO: 21285 - DNA, 201 bp, Homo sapiens; identical to SEQ ID NO: 2825

SEQ ID NO: 21286 - DNA, 201 bp, Homo sapiens; identical to SEQ ID NO: 13339

SEQ ID NO: 21287 - DNA, 201 bp, Homo sapiens
gctgagctatgtggggcacgtgtgttcacgcatgttgcctggaagcgttctccagaaaagcattgcctcttctctgacagctgagctttctcagcatgcarattgccagtaaagacgacagggaagctatctgtttctccctccattaaatcatctggaaagaaatttgaatacataaattacgaaactctgtactgcagt

SEQ ID NO: 21288 - DNA, 201 bp, Homo sapiens; identical to SEQ ID NO: 1681

SEQ ID NO: 21289 - DNA, 201 bp, Homo sapiens; identical to SEQ ID NO: 14087

SEQ ID NO: 21290 - DNA, 201 bp, Homo sapiens; identical to SEQ ID NO: 14086

SEQ ID NO: 21291 - DNA, 201 bp, Homo sapiens
aagggagtcccctaaaggctactccaaatgcaaaaagcgtgctggcggccttgactgcttcctttggttttcttgtgggtttttgtttgtttttttttttktttttttttgagacacagttttgttcttattgaccaggctggagtgcaatagtgcaatctcggctcactgcaacctccgcctcctgggttcaagcgattc

SEQ ID NO: 21292 - DNA, 201 bp, Homo sapiens; identical to SEQ ID NO: 13585

SEQ ID NO: 21293 - DNA, 201 bp, Homo sapiens; identical to SEQ ID NO: 2833

SEQ ID NO: 21294 - DNA, 201 bp, Homo sapiens; identical to SEQ ID NO: 2832

SEQ ID NO: 21295 - DNA, 201 bp, Homo sapiens
atgttatggcatgctgccaggcagtctgaaatataacactggagcccagtcctgggggccccttgcttgccagtgtcctgggacagaattgcccatagcasagacagatctccacattagcaaccatgcagccagacctgtgcacaccgcccagcaccacctccccccatcccccaatatgtgggctttgatctgttttct

SEQ ID NO: 21296 - DNA, 201 bp, Homo sapiens
tcccacctcttccagcatttcctggatgatgactctcaaggctcttcccagcaggctggccgggagcccgcgcgatagtggagggacatggatgagtgccrcgcagccctttccatgatgcagagacaggtaataggtataatcacagacgtatctgcaaccacaggaaatgccacattaattctcggaccagcctctaac

SEQ ID NO: 21297 - DNA, 201 bp, Homo sapiens; identical to SEQ ID NO: 1689

SEQ ID NO: 21298 - DNA, 201 bp, Homo sapiens
aaattattcttacagggtaatgtattctctttttgtggggggagggttggagggaggagaggcaagctagtaagtggtgaggctaccacagcagagtcttygtgttttggtggaatcctgaatctttttattttatattttatttatgtatttatttatttttatgagacagagtctggctgtatcacccaggctggagtg

SEQ ID NO: 21299 - DNA, 201 bp, Homo sapiens
ttctagcaaatgatccaggtgtacttgcaaagggagtcccctaaaggctactccaaatgcaaaaagcgtgctggcggccttgactgcttcctttggttttyttgtgggtttttgtttgtttttttttttttttttttttgagacacagttttgttcttattgaccaggctggagtgcaatagtgcaatctcggctcactgc

SEQ ID NO: 21300 - DNA, 201 bp, Homo sapiens; identical to SEQ ID NO: 13373

SEQ ID NO: 21301 - DNA, 201 bp, Homo sapiens; identical to SEQ ID NO: 1693

SEQ ID NO: 21302 - DNA, 201 bp, Homo sapiens; identical to SEQ ID NO: 1695

SEQ ID NO: 21303 - DNA, 201 bp, Homo sapiens
ggtcagttccctttggctggaaggaccatggttgagttttcttcgaactgggctctgtgcttgggctttcccacctcttccagcatttcctggatgatgactctcaaggctcttcccagcaggctggccgggagcccgcgcgatagtggagggacatggatgagtgccgcgcagccctttccatgatgcagagacaggtaa

SEQ ID NO: 21304 - DNA, 201 bp, Homo sapiens; identical to SEQ ID NO: 2828

SEQ ID NO: 21305 - DNA, 201 bp, Homo sapiens
gagcaatcccccggtcagttccctttggctggaaggaccatggttgagttttcttcgaactgggctctgtgcttgggctttcccacctcttccagcatttsctggatgatgactctcaaggctcttcccagcaggctggccgggagcccgcgcgatagtggagggacatggatgagtgccgcgcagccctttccatgatgc

SEQ ID NO: 21306 - DNA, 201 bp, Homo sapiens
atgaattttttaaatgtagtcaagtgaaaaatggtagttgtaagcacaccaacgtaacaagaaatttcccagagctcacctaccttcactcacttcctccaaaaaaaaaaaaaaaagcgatgttaccaatgggactcccaaaggaaatctgcccctagaaaacactgaacaggtagaatcttgctgggagaagcttggcac

SEQ ID NO: 21307 - DNA, 201 bp, Homo sapiens; identical to SEQ ID NO: 2831

SEQ ID NO: 21308 - DNA, 201 bp, Homo sapiens; identical to SEQ ID NO: 2829

SEQ ID NO: 21309 - DNA, 201 bp, Homo sapiens
tgtgactgtaaaatggtgcagcccctgtgcaaaacaaaatggcagttccttaaaaaattaaacacagaattagcattgaatccaggaattcacctctggakattgacctgaaagcaaggactcggatacatatttgcacgccagtgtttgtagcagcatgatttgcaagaaccaaaaggagcaagtaacgtaagtgttcat

SEQ ID NO: 21310 - DNA, 201 bp, Homo sapiens
ggaggacatgaggctgaaataatacgccagatgtagaaggaccagcgccgcatgactccctcatatgagctacctacagtcagattcatagggatggaggstggagtggtgagcaccaagtgctgggaggaagaaggaatagggagttaataggtacagagtttcagtttgggatgaggagaaagttctggagatggatgg

SEQ ID NO: 21311 - DNA, 201 bp, Homo sapiens; identical to SEQ ID NO: 1702

SEQ ID NO: 21312 - DNA, 201 bp, Homo sapiens
tgttaaaagaaatgctctaaagcagcttaccaacacagaatgcaagccacatctgtaattttaaattttcaagtagccacattaagaattaaaaagagtcrggcatggtggctcacacctgtaatcctaacactttgggaggctgaggcgggcggatcatctgaggtcaggagtttgagaccagcctggccaacatggtgg

SEQ ID NO: 21313 - DNA, 201 bp, Homo sapiens; identical to SEQ ID NO: 2849

SEQ ID NO: 21314 - DNA, 201 bp, Homo sapiens
atccatgcaaacagacagaggcatttaaaaaatatggtatttaatgatttaatgtcagtatcatacaagaatctatggatatttcttaaatgctcccaaayaccaaacttgcaaacaaaataaattcagtttcggaaccaaataaatagagtttacatatgactagggtgactccactggcaccccgatatagacatatgt

SEQ ID NO: 21315 - DNA, 201 bp, Homo sapiens
tccctgaagtgataaagagttagaaccagacacacacttctgcattcagctgctgtctttccttgtgagtggaaaaacacactcagtacattctctgcaaycctgcttaaaacctcttctaaagcttctttgacacagttattcaaaagcttctaaaagtagtatcgacgtattacaaaataatccaatcatttcaagttc

SEQ ID NO: 21316 - DNA, 201 bp, Homo sapiens
atggccaggggtaaggcaggggtgggaggaggaagggcaggagacccaacggatggtgctgcctggacagtccctgaagtgataaagagttagaaccagayacacacttctgcattcagctgctgtctttccttgtgagtggaaaaacacactcagtacattctctgcaatcctgcttaaaacctcttctaaagcttcttt

SEQ ID NO: 21317 - DNA, 201 bp, Homo sapiens
gagaaaattatacattctcagaattccattcataaaggactactggtcacaaaagaatggccaggggtaaggcaggggtgggaggaggaagggcaggagayccaacggatggtgctgcctggacagtccctgaagtgataaagagttagaaccagacacacacttctgcattcagctgctgtctttccttgtgagtggaaa

SEQ ID NO: 21318 - DNA, 201 bp, Homo sapiens
taaagaagcattcttctgagaaaattatacattctcagaattccattcataaaggactactggtcacaaaagaatggccaggggtaaggcaggggtgggargaggaagggcaggagacccaacggatggtgctgcctggacagtccctgaagtgataaagagttagaaccagacacacacttctgcattcagctgctgtct

SEQ ID NO: 21319 - DNA, 201 bp, Homo sapiens
agaaatatttggtgagctaaagaagcattcttctgagaaaattatacattctcagaattccattcataaaggactactggtcacaaaagaatggccagggrtaaggcaggggtgggaggaggaagggcaggagacccaacggatggtgctgcctggacagtccctgaagtgataaagagttagaaccagacacacacttct

SEQ ID NO: 21320 - DNA, 201 bp, Homo sapiens
gtctcagcagctgctaaaacacgtccaagcactttgcatctatccggaaatccagaatggcagcctgggttcacagatctgctgccaagggcagatgtatscgcactgcagctgggccctcctccccaggggccccatgggcacaagcagctcagggtgggccagcgagcctcagtcacactggctgccctcagccccacc

SEQ ID NO: 21321 - DNA, 201 bp, Homo sapiens; identical to SEQ ID NO: 2851

SEQ ID NO: 21322 - DNA, 201 bp, Homo sapiens
aggaggatctttttcccccctcagcaaacaagaaatatttggtgagctaaagaagcattcttctgagaaaattatacattctcagaattccattcataaasgactactggtcacaaaagaatggccaggggtaaggcaggggtgggaggaggaagggcaggagacccaacggatggtgctgcctggacagtccctgaagtg

SEQ ID NO: 21323 - DNA, 201 bp, Homo sapiens
actgtcccccataagccctcacacctcctaccaagctccaaggactgttctgttcttctgcctactcccgcaatgcagttcaaacgtttaccagggctctrcagtgagctacttttccaaagacagaaaagcaaggctatgtgcaatcagacgaaactccagctctcattgtaacatccagcttaaagccatatgttagcc

SEQ ID NO: 21324 - DNA, 201 bp, Homo sapiens
tcatgtctgcatacttaacatagatttaatatttctccaggccaaagatcatatgcagagtttttctttgactggaggacagaagagacaaggagagaagragaacgtctggaattcctttgttcttggagacaactccagagaacaattctcaataagaaaagttataaaaagcttcaatcagcaccctcacgtttctga

SEQ ID NO: 21325 - DNA, 201 bp, Homo sapiens
ctctcaaaatggcagtctgttaggtcaagtttggctgttttgttaatcgcctatcaacagaaacagctttgctaggcacacccagaagttcatctctcctmatcacccacctttggcacccagtgacttttccaaggaggatctttttcccccctcagcaaacaagaaatatttggtgagctaaagaagcattcttctgag

SEQ ID NO: 21326 - DNA, 201 bp, Homo sapiens
gaggagagagagagagacagagagagagaccaagcaacacgaacacacaggcagatcaggaagcaagaaatcttctcagagcagaccacggaaaccctcartaacttactcaattttagagtttgaggaaacggcacaggtagtccgatgcaagccccccgagttcaaagaaaggaaatggaagtacagggcagacaggtg

SEQ ID NO: 21327 - DNA, 201 bp, Homo sapiens; identical to SEQ ID NO: 2852

SEQ ID NO: 21328 - DNA, 201 bp, Homo sapiens
ccttgagaggaaaaggcaaggctagagttcggccaggtgagccgtgccggctggtcagcacgggagagcaccactggggccaaggacacagcaggcaggcrggagggagtggcacatggagtgtggcatgttgtcacggggtagctgttgaccactcaggagcttcacactgtaccacatgcctatcctatagggacttgc

SEQ ID NO: 21329 - DNA, 201 bp, Homo sapiens
actgcacagccaccagtacacctcgaagccaattaatcctgcaaaacaaattcctctcaaaatggcagtctgttaggtcaagtttggctgttttgttaatygcctatcaacagaaacagctttgctaggcacacccagaagttcatctctcctcatcacccacctttggcacccagtgacttttccaaggaggatcttttt

SEQ ID NO: 21330 - DNA, 201 bp, Homo sapiens
gccgagaatgtcacactggcatacacatgaggaaagcaagacagaggtattaacgcaacaaagaaagaggcttttcaagcacaggaagaaaccagaacaawtgtacaaataggtttaactggtgagagctgaaggggctccagatattttccaaatacttggcatgcaaaaatcaccacaagtcagtggttctgaaagctt

SEQ ID NO: 21331 - DNA, 201 bp, Homo sapiens; identical to SEQ ID NO: 2846

SEQ ID NO: 21332 - DNA, 201 bp, Homo sapiens; identical to SEQ ID NO: 2848

SEQ ID NO: 21333 - DNA, 201 bp, Homo sapiens
tgcagttctccaggcgcttcagctgctgatagtcgttgcggatgtcgatgcctggcccgcagactgaagggagacaagagggtaaacgtctcagttagaargaaataatttttaaactattttccaaacaataatacagttggttttcaggaatcctgtattattattaaagaaatgaggttcaattgttcactgcagagc

SEQ ID NO: 21334 - DNA, 201 bp, Homo sapiens
accaaggcccaggcaatttaaataacttgctcatttctagtcgccactcttagacttggacccagaatgcaggcctcacccctaccccaggggtcttcaawcagtagctcatcagaaacagccaaaaacctatggcaagaccaaagtaactacctacctagttcgtgaacaactctccacttaatgacgtttcatatggca

SEQ ID NO: 21335 - DNA, 201 bp, Homo sapiens
agaagagtttccagccgcggatgaccgtgaggttggggaagaggtctccgaggctctcgaggccagccactcggaacagcagcaagtactcggtaatgacmgtgagcttggggaagcggtagctgcggtagtcctcggccttggagatgagcaggatgtggaggtagccctcgatcaccgtgcagttctccaggcgcttca

SEQ ID NO: 21336 - DNA, 201 bp, Homo sapiens
aattaccatttctctctaatgaccacttactcccttcttacacattttcatcagctctttattctacactgagtatttccaagaattaggataacactacygcccaataagatagagttggggttacccaaataagcaacagaagctttccagtgggaccgagtcaagtcaagggtctcaagtccccccaccctaaagcac

SEQ ID NO: 21337 - DNA, 201 bp, Homo sapiens
aaattagacgggcatggtggcacatgcttgtaattccagctacttgggaggctgaggcaagagaatcgcttgaacccaggagacggaggttgcagtgagcygagatcgcgccgctgcactccagcctgggtgatgagagcgaaactccgcctcaaaaaaaaaaaaaaaagaataaaaaggaaacaggcaggtgaaatttaa

SEQ ID NO: 21338 - DNA, 201 bp, Homo sapiens; identical to SEQ ID NO: 2850

SEQ ID NO: 21339 - DNA, 201 bp, Homo sapiens
acgtttaccagggctctgcagtgagctacttttccaaagacagaaaagcaaggctatgtgcaatcagacgaaactccagctctcattgtaacatccagcttaaagccatatgttagccagtggcaggtacagattagaacccagaatggtctagattttgggtttctacttggggttccttcttccatataaatgatctct

SEQ ID NO: 21340 - DNA, 201 bp, Homo sapiens
cccaattcggacaagccacagttcaagtactcaataagccacgtggcttactcaataagcggctaccacactggacaatgcaggtctaaatggaatctacrcaaaccaagaggaagttctgattcaactagaaaatctccaagaaatatgcccatgcctgagttttcaggacaaggggaagggaagtcaatttcccggaaa

SEQ ID NO: 21341 - DNA, 201 bp, Homo sapiens
gtgccacagacagaaaaatcccatctcccacccaccagcctccctggaacaaacaccttggctgtctctcgctacctccaagtcaggggaacattccaacyaggatggtgctcagagaccccaccttttatagccagagtccctgattcacaccatatgcccaaaggaggcgtgtttctaagtgatgcttccaacttcacc

SEQ ID NO: 21342 - DNA, 201 bp, Homo sapiens
ttagttatggtagtgaacatatatagtcaacacagcttaagactcagaattttagatggtctcagaatgcaactcttagatagtttaatttaaaaaaaaaatagcagcagctgccaccatttaccaaaaacctatgtgcttggaaacatgttagatgcttttcaaatactgtcctattcctgtctcactgaaggaaggtga

SEQ ID NO: 21343 - DNA, 201 bp, Homo sapiens
ctacttgggaggctgaggcaagagaatcgcttgaacccaggagacggaggttgcagtgagctgagatcgcgccgctgcactccagcctgggtgatgagagmgaaactccgcctcaaaaaaaaaaaaaaaagaataaaaaggaaacaggcaggtgaaatttaagaacacattttacttaatctaatatatccaaaatgttat

SEQ ID NO: 21344 - DNA, 201 bp, Homo sapiens
gttaaaagaaatgctctaaagcagcttaccaacacagaatgcaagccacatctgtaattttaaattttcaagtagccacattaagaattaaaaagagtcgrgcatggtggctcacacctgtaatcctaacactttgggaggctgaggcgggcggatcatctgaggtcaggagtttgagaccagcctggccaacatggtggt

SEQ ID NO: 21345 - DNA, 201 bp, Homo sapiens
tcgagaccagcctggttaacatggtgaaaccccgtctctactaaaaatacaaaaattagctgggtgtggtggtgcgggcctgtaatcccagctactcaggmggctgaggcagtagaatcacttgaacctgggagcccggaggttgcaatgagccaagatcgcaccactgcactccagcctgggtgacagagtaagactctt

SEQ ID NO: 21346 - DNA, 201 bp, Homo sapiens
ctgctctacttaatactgcctgtgccacagacagaaaaatcccatctcccacccaccagcctccctggaacaaacaccttggctgtctctcgctacctccragtcaggggaacattccaaccaggatggtgctcagagaccccaccttttatagccagagtccctgattcacaccatatgcccaaaggaggcgtgtttcta

SEQ ID NO: 21347 - DNA, 201 bp, Homo sapiens; identical to SEQ ID NO: 2847

SEQ ID NO: 21348 - DNA, 201 bp, Homo sapiens
gtcatcactgcacagccaccagtacacctcgaagccaattaatcctgcaaaacaaattcctctcaaaatggcagtctgttaggtcaagtttggctgttttrttaatcgcctatcaacagaaacagctttgctaggcacacccagaagttcatctctcctcatcacccacctttggcacccagtgacttttccaaggaggat

SEQ ID NO: 21349 - DNA, 201 bp, Homo sapiens
actggagggattttgcgactggagttacaggaggctgaggagctggcatctgaaagtccatgcttcacgcttttcaaatgcactatgtataaccaagctcrtttccaaaaacagaatctgaactagctcataataaaccattcaccttttattttttgctgaaggggtcagagcatcatcccaattaccatttctctctaa

SEQ ID NO: 21350 - DNA, 201 bp, Homo sapiens
ccctcacgtttctgatttaaagttggggtgggggagcgtggaataaaaagagagggaactaaacatgtacgaaactcattctagcgtgagacgttgtcagrtactttgctgacattttatcataaaactctctctcggtggccacgggttacagcagggaacctaaaacctagacttgggaccccaagtcctcgcttcaca

SEQ ID NO: 21351 - DNA, 201 bp, Homo sapiens
aactccagagaacaattctcaataagaaaagttataaaaagcttcaatcagcaccctcacgtttctgatttaaagttggggtgggggagcgtggaataaaragagagggaactaaacatgtacgaaactcattctagcgtgagacgttgtcaggtactttgctgacattttatcataaaactctctctcggtggccacggg

SEQ ID NO: 21352 - DNA, 201 bp, Homo sapiens
gtcacggcacagaaggagtttaaaggacagtgccaagtgaaaaccgcgcaacagcacgacaaaatcgagtaggctcaacgatttcacacacacccttgacrtgtttctccagatgttctccgtagttctacagccagccaacagaagattacctgaatgggattcttctgtgcttaatgttttcgaatggccatcttaatg

SEQ ID NO: 21353 - DNA, 201 bp, Homo sapiens
tgttcttggagacaactccagagaacaattctcaataagaaaagttataaaaagcttcaatcagcaccctcacgtttctgatttaaagttggggtgggggrgcgtggaataaaaagagagggaactaaacatgtacgaaactcattctagcgtgagacgttgtcaggtactttgctgacattttatcataaaactctctct

SEQ ID NO: 21354 - DNA, 201 bp, Homo sapiens
gagggatcacgtccatagagggagtagagtctactacgctgccagacactgcagagtcacggcacagaaggagtttaaaggacagtgccaagtgaaaaccrcgcaacagcacgacaaaatcgagtaggctcaacgatttcacacacacccttgacgtgtttctccagatgttctccgtagttctacagccagccaacagaa

SEQ ID NO: 21355 - DNA, 201 bp, Homo sapiens
gctgaaagatgcaatcaatttaatatttccctctgcccatttacatgacttatttgtttcggcagatcttctttgccacaaatccttcatttgcccattcrtgtctgcatacttaacatagatttaatatttctccaggccaaagatcatatgcagagtttttctttgactggaggacagaagagacaaggagagaaggag

SEQ ID NO: 21356 - DNA, 201 bp, Homo sapiens
agtaccaggagctgaaagatgcaatcaatttaatatttccctctgcccatttacatgacttatttgtttcggcagatcttctttgccacaaatccttcatytgcccattcatgtctgcatacttaacatagatttaatatttctccaggccaaagatcatatgcagagtttttctttgactggaggacagaagagacaagg

SEQ ID NO: 21357 - DNA, 201 bp, Homo sapiens
aaatgcaacacgactgcaccctgcccagcggaactcgtgcactcagaagagaagggaggtcaaggaggaggagaggagagagagaggcagagagaaagcarcagtcagcatcattcttacttttctggcagcggtttgtggtccagcagcggtagttgtactcattgttgatggtggtcttctcacacatcggcttctcct

SEQ ID NO: 21358 - DNA, 201 bp, Homo sapiens
aactccctcatctttccattatttcaaatgacaaccttttcccactactttatctttgcattaagtaccaggagctgaaagatgcaatcaatttaatattkccctctgcccatttacatgacttatttgtttcggcagatcttctttgccacaaatccttcatttgcccattcatgtctgcatacttaacatagatttaat

SEQ ID NO: 21359 - DNA, 201 bp, Homo sapiens
ctggcttctgggcacactatgtaggatgagagaatcaaatccattcagtcctaatctactgccccacttaataaacaaaaaatgttaagaacatgcatttwaaaaaaaatctaaatgccttcataatatagatacagcaagtcttcccataatgctaatgaaggcttctcacaagagtttaatgagctagtatccagtatc

SEQ ID NO: 21360 - DNA, 201 bp, Homo sapiens
tctcactgaacttctctattccagggccgatgcctttgttttaatggcagcgcatcatcgactaaccaaatccacaggtactgcacaggtctgaaggatcyggctctgagggataccgaggcatccggggctccctctgtcttctttctgtgtacacaaggtaccttcagtgactgcaaggaaaatcctcttgctttctac

SEQ ID NO: 21361 - DNA, 201 bp, Homo sapiens
ctattctcatgatagtgaataagtctgacgagatctgatgggtttatcagggtttccacttttgcttcttccacattttctcttgctgccaccatgtaagmagtaccttttgcctcctgccatgattctgaggcctccccagccatgtggaattgtaagtccaattaaaacctctttttcttcacagtcttgggtacgtct

SEQ ID NO: 21362 - DNA, 201 bp, Homo sapiens
aaattctacaatttagaaaagcaatacagaaggaccatttagttatggtagtgaacatatatagtcaacacagcttaagactcagaattttagatggtctyagaatgcaactcttagatagtttaatttaaaaaaaaaatagcagcagctgccaccatttaccaaaaacctatgtgcttggaaacatgttagatgcttttc

SEQ ID NO: 21363 - DNA, 201 bp, Homo sapiens
tgacatcctgaaaacctaacagcggccaagctgaccccgcagaagaagtgatctaacctggatggtcacccttccctgcctaagactcaccctttccaccsgccccagaagcccttattcctccttgacttgaaaagacaactgtcccccataagccctcacacctcctaccaagctccaaggactgttctgttcttctgc

SEQ ID NO: 21364 - DNA, 201 bp, Homo sapiens
agttattggacaccgcatccaggatcagggaccagtccacagtggagaggtaacagaggtcagcatttttctcaatcctgatggccccccgagtaatgttyctcaggttgtaaagcccaatatccttgagattggtcatctcgaagatgaccagggcgtagttgtagaagagtttccagccgcggatgaccgtgaggttgg

SEQ ID NO: 21365 - DNA, 201 bp, Homo sapiens
tgctctctcccactttagtaacccctgcttcataactgtctgtgccagaaagccacagtgagcccccagtggcccctgtattacccacccagagagacaasctctcccctccatgaaactcatttctgggacccacacctaaactttaacacaaatcagaaaagttgagactccttaaaaatgcgttttgcaagctcacag

SEQ ID NO: 21366 - DNA, 201 bp, Homo sapiens
ggctcctaccccagtgcaataggcagatccatgagagctctcactggggctgctggagaactggctgctctctcccactttagtaacccctgcttcataamtgtctgtgccagaaagccacagtgagcccccagtggcccctgtattacccacccagagagacaagctctcccctccatgaaactcatttctgggacccac

SEQ ID NO: 21367 - DNA, 201 bp, Homo sapiens
aaaagctgacggtgatggctcctaccccagtgcaataggcagatccatgagagctctcactggggctgctggagaactggctgctctctcccactttagtmacccctgcttcataactgtctgtgccagaaagccacagtgagcccccagtggcccctgtattacccacccagagagacaagctctcccctccatgaaact

SEQ ID NO: 21368 - DNA, 201 bp, Homo sapiens
gtagaaaggggagtggggcagtaaatggccagggaacaggagacagtgggctggagggtgtcccaggttctaaccccagctgggccttcagagccctggtrtggtctgggctaacctctcaatccttttccaagtcttaagtttccttccaactcactgtgattcttccagagaattacacagggcaggtgaaattatttc

SEQ ID NO: 21369 - DNA, 201 bp, Homo sapiens
tccccgcccaaatctcaacttgaattgtgtctcccagaattttcatgtgttatgggaaggacccaggtgaggtaattgaatcatgagggctggtctttccygtgctattctcatgatagtgaataagtctgacgagatctgatgggtttatcagggtttccacttttgcttcttccacattttctcttgctgccaccatgt

SEQ ID NO: 21370 - DNA, 201 bp, Homo sapiens
gtagagtgtctcgtcacaccgcataagttgtctctctcttttaaatgtcaagtgtttttatcttatctcacaacagaatcctagtttgtgtcatctcatastgcctagcatgagacttgcacaaaacgggggcaccttaattgtgcagctgagggacacgatggaaactctggccaaggaactagcaaggaaacctgcaaa

SEQ ID NO: 21371 - DNA, 201 bp, Homo sapiens
cgaacacagtccttgctaagagggtgatatgatttggctgtgtccccgcccaaatctcaacttgaattgtgtctcccagaattttcatgtgttatgggaargacccaggtgaggtaattgaatcatgagggctggtctttcctgtgctattctcatgatagtgaataagtctgacgagatctgatgggtttatcagggttt

SEQ ID NO: 21372 - DNA, 201 bp, Homo sapiens
ttttcccactactttatctttgcattaagtaccaggagctgaaagatgcaatcaatttaatatttccctctgcccatttacatgacttatttgtttcggcrgatcttctttgccacaaatccttcatttgcccattcatgtctgcatacttaacatagatttaatatttctccaggccaaagatcatatgcagagtttttc

SEQ ID NO: 21373 - DNA, 201 bp, Homo sapiens
gtacgtctttatcagcagcatgaaaacagactaatacagagggtaatcaccacaggaatccagacggggagtggggtcagttcactggtacaaggatcttsatcaaaggaactcatttcccacctgatccctattcactccagggtccacatctaggagtcccaaagaccggcatgcatgggttgggtcaacaggctgcct

SEQ ID NO: 21374 - DNA, 201 bp, Homo sapiens; identical to SEQ ID NO: 2853

SEQ ID NO: 21375 - DNA, 201 bp, Homo sapiens
accctaatgctaatgcctaagttctatgttctgcttggtaattagctcactctgccttgatctcttattgcgttacctcagcattctcactatagttctayaactaggaatgattataactcttactgggtcattttgcaaatgaagaatttggaaattgaagttaattacttaaactcacacatgtactaagtggggcag

SEQ ID NO: 21376 - DNA, 201 bp, Homo sapiens
caaaggacatattgttccttcttggttaaaagttacatagaaaatttactagaagttagatggcattatttacaggggttggctaacaggcaagttcattygcataaatctgatcaggagagtctgaatctctttgtgctccttcacaccttcccctggtgctggaaaccaaagctggtttccctagtaaccagcacctat

SEQ ID NO: 21377 - DNA, 201 bp, Homo sapiens
tgcagcacaccaacgtggcacatgaatacatatgtaacaaacctgcacgttgtgcacatgtaccctagaacttaaagtataataattaaaaaaaaagacakagatctgctgattagagattgtaaagacaacacttctccaatcagacagctcttagcttctggcttctagctctgtcctgcaattgtttctaaaccactt

SEQ ID NO: 21378 - DNA, 201 bp, Homo sapiens
cacagtggaatattattcaactataaaaaagaatgaaatcctgtcatttgcaacaacatggatagaactggaggtcattatgttaagtgaaataagctagrcacagaaagacaaatattgcacattctcaatcatatgcgggaactaagaacaaagtggatctcatggacatagagagtggaatgttggttaccaaaggct

SEQ ID NO: 21379 - DNA, 201 bp, Homo sapiens
acaagttaattggtgcagcacaccaacgtggcacatgaatacatatgtaacaaacctgcacgttgtgcacatgtaccctagaacttaaagtataataattwaaaaaaaagacagagatctgctgattagagattgtaaagacaacacttctccaatcagacagctcttagcttctggcttctagctctgtcctgcaattgt

SEQ ID NO: 21380 - DNA, 201 bp, Homo sapiens
gggcagggatagcattaggagatatacctaatgtaaatgacaagttaattggtgcagcacaccaacgtggcacatgaatacatatgtaacaaacctgcacrttgtgcacatgtaccctagaacttaaagtataataattaaaaaaaaagacagagatctgctgattagagattgtaaagacaacacttctccaatcagaca

SEQ ID NO: 21381 - DNA, 201 bp, Homo sapiens
aagccatcattttcagcaaactatctcaaggacaaaaaaccaaacactgcctgttctcactcataggtgggaattgaacaatgagaacacttggacacagraaagggaacatcacacaccggggcctgtcgtggggtggggggaggggcagggatagcattaggagatatacctaatgtaaatgacaagttaattggtgca

SEQ ID NO: 21382 - DNA, 201 bp, Homo sapiens
tgggtattttattctctttgaagcagttgtgaatgggagttcactcatgatttggctctctgtctgttattggtgtataggaatgcttgtgatttttgcamattgattttgtatcctgagactttgctgaagttgcttatcagcttaaggagcttttgggctgagaccatggggttttctaaatatacaatcatgtcatct

SEQ ID NO: 21383 - DNA, 201 bp, Homo sapiens
agtcattggtagcttgatggggatggcattgaatctataaattaccttgggcagtatggtcattttcacgatattgattcttcctacccatgagcatggawtgtttttccatttgtttgtgtcctcttttatttcgttgagcattggtttgtagttctgcttgaagaggtccttcacatcccttgtaagttggattcctgg

SEQ ID NO: 21384 - DNA, 201 bp, Homo sapiens
ttggctcaccaagataagtgtcctggcaagggacacatatactcacagaaaagggcactcttttctaatttacacaagcaccatagagactagaagtggtrcatgtgaggctaagagtgatggtttaaaaagaattggatttttactagagatgggttttctccatgttggtcaggctggtctcgaactcccaacctcagg

SEQ ID NO: 21385 - DNA, 201 bp, Homo sapiens
ccatgctgttttggttactgtagccttgtagtatagtttgaagtcaggtagcatgaagcctccagctttgttcttttggcttaggattgtcttggcaatgygggctcttttttggttccatatgaactttaaagtagtttcttccaattctgtgaagaaagtcattggtagcttgatggggatggcattgaatctataaat

SEQ ID NO: 21386 - DNA, 201 bp, Homo sapiens
taacacaattgactaatattaaaaagagctgggctgggcgcggtggctctcgcctgtaatcccagcactttgggaggccaagatgggaggatcacaaggtsaggagatggagatcatcctggctaacacggtgaaaccctgtctctactaaaaatacaaaaaattagccaggtgtggtggcaggcacctgttgtcccagct

SEQ ID NO: 21387 - DNA, 201 bp, Homo sapiens
ccaccatgcccagataaattttttttgcattttttgtagagctagagttttgccatgttgcccaggcagatcttgaactcctaagcttaagctatctgccyaccttggcctcccaaagtactaggattgcaggtgtgagccactgtgcccaactatttaacaatgtttctacctatcttttcattagatagcattccattt

SEQ ID NO: 21388 - DNA, 201 bp, Homo sapiens
ttgaccaggaaaccaggttgacctgcccagggccttagcagccagcctgcccaagaggcttttcagcaaaatgctcaggtgtgtccagagccctctgaccygaagggcctcaaggagaacctctagattatgctggactgaagccctcatcaagctgctcctattcgcagaggctcaagaccatggcaaggtggggtgctc

SEQ ID NO: 21389 - DNA, 201 bp, Homo sapiens
aaaataaatgccctgtagggcagtatttgaggaataggatattggtgagagagattcactactaagaggttcctatttttgttaactgcattcctggtcaygaaatcatgttaatcctagtgctacacatggggttgaccaggaaaccaggttgacctgcccagggccttagcagccagcctgcccaagaggcttttcagc

SEQ ID NO: 21390 - DNA, 201 bp, Homo sapiens
tttcttactaagttaacagacacagacccagaaagaaaataaagttgtgttaacagtaaaagtcattgcatttgtgtcataattctaaccgaatgaaaacrtcacaagcgatgttcatagaattgcaaaccagacaaaactgacctgaggtttgagaggagctgaatgagacaggatgatgggaggagtgagttttaatct

SEQ ID NO: 21391 - DNA, 201 bp, Homo sapiens
tgagaatagaggaagcttgatgtgggcctcagtccaacttaatctggaaagtctgcctaaggcatattttagagagggaggacacattttggggcacatawgttttatattgttgcaccccaaaatatatataactattatgtctcaataaaataaataaattgatgaattagttaattaaaaataaaaataaatgccctg

SEQ ID NO: 21392 - DNA, 201 bp, Homo sapiens
tagaatcttttcatctgatatagtgtcaggagaaggataactgagaaaaaaaaagaggaccctattctcagatgcatcttccaccatttaaatacctgtarctgcctgctgcgaagaggtctgcaggaaggacagagaccactttctattagttcctccatgtggtgagaagataatctggccgcctgagccacagtccca

SEQ ID NO: 21393 - DNA, 201 bp, Homo sapiens
gaactcactttctagctcttcttccctccccagaggttgggggatggggctgaaagttccaaccctctaatcatgccttggtctttttggcaaccagcccmcataatgaactatctaggggcccccagtagtgtgacttcattaacataaactcaggcatggttgaaaggggtctgttatgaataagaaaacatgcttcct

SEQ ID NO: 21394 - DNA, 201 bp, Homo sapiens
gctatttacatgggaaacaagatcaccaggaaatcctccctgaatctaaacccctcacttgcctaagaagcaccaaaggacacaggacaaacctgaggagsctctcagctggaaccaagcactatgtagcaactgtgtctctcaagaaactatgaggtcaacctcttggtgctcctggacttttgtttctagcatattttt

SEQ ID NO: 21395 - DNA, 201 bp, Homo sapiens
tctgtattaacagccattccccatcactcacattactgtctgagttccgcctcctgtcagatcaacagaggcattagattctcaaaagagcacgaaccctrttgtgaactctgcatccgatgaacctaggttgcgcattccttatgagaatctaatgcctgctgatctgccactgtctcccatcacccccagatgggaccg

SEQ ID NO: 21396 - DNA, 201 bp, Homo sapiens
atctgctctccctggctctggaactctttggagctgccaggtgtctaccacagggattggattatttatattcattaagctcaatgtcaatctttttccaygggcagtgctgattccatggccttctccacagtctacggcaaaggaaaaactccttagaataacttgtacacacaacagaagcattctacttgtacattc

SEQ ID NO: 21397 - DNA, 201 bp, Homo sapiens
gctgtgcagaagctctttagtttaattagatcccatttgtcaattttggcttttgttgccattgtttctggagttttagacatgaaatccttgcccatgcstatgtcctgaatggtattgcctaggttttcttctagggtttttatggttttaggtctaacatttaaatctttaatccatcttgaattaatttttgtataa

SEQ ID NO: 21398 - DNA, 201 bp, Homo sapiens
tggtagtttcttttgctgtgcagaagctctttagtttaattagatcccatttgtcaattttggcttttgttgccattgtttctggagttttagacatgaartccttgcccatgcgtatgtcctgaatggtattgcctaggttttcttctagggtttttatggttttaggtctaacatttaaatctttaatccatcttgaat

SEQ ID NO: 21399 - DNA, 201 bp, Homo sapiens
ggcgtcttcctctcacccatccactgaaggcctggatctccctctctatctatctctctctctctctctcacacacacacacacacacacacacacaaacacacacacacacaatgataatgccaaccctaatgctaatgcctaagttctatgttctgcttggtaattagctcactctgccttgatctcttattgcgttac

SEQ ID NO: 21400 - DNA, 201 bp, Homo sapiens
tgaaaatggatttattatgtgatccactgctggatatatatttttaaaaattgacatcaagttatcaaagcgatatctgtattctcatgttcattggagcrccattcacaatagccaagatataaaaacaaactaagtgtccatcagtggatgaataaagaaaatgtagcttatagacacagtggaatattattcaactat

SEQ ID NO: 21401 - DNA, 201 bp, Homo sapiens
gagcttgcagtgagctaagatcatgccactgtactccagcctgggcaacagagccagactccatcaaaaaaaaaaaaaaaaaagcgagggggggcgggtgyggctaaatatagaaattcagtcaagtgctagaggaaaaaaattttagtgctttactgaattggctaacaggcaagttcatttgcttaaatctgatgagga

SEQ ID NO: 21402 - DNA, 201 bp, Homo sapiens
ttgagatgtcactttacatgggggttgctaattgaagcccttgaaatttctgatttagaaaacagggtcttggaagagatccagttcgtggacacaaagtrcagtgtgggaatgcacaacatactagcttatgtgaaacactggaagggccagaatgagaaagcactagagaaagaagttgaatgagaacacaccaaccaa

SEQ ID NO: 21403 - DNA, 201 bp, Homo sapiens
taaaaatgctgattatcatggagtcaaagataggcttgagcagttgagatgtcactttacatgggggttgctaattgaagcccttgaaatttctgatttaraaaacagggtcttggaagagatccagttcgtggacacaaagtacagtgtgggaatgcacaacatactagcttatgtgaaacactggaagggccagaatga

SEQ ID NO: 21404 - DNA, 201 bp, Homo sapiens
tttgtagagctagagttttgccatgttgcccaggcagatcttgaactcctaagcttaagctatctgcccaccttggcctcccaaagtactaggattgcagstgtgagccactgtgcccaactatttaacaatgtttctacctatcttttcattagatagcattccatttccatcagaaaatcacgcaaatacttcctgttt

SEQ ID NO: 21405 - DNA, 201 bp, Homo sapiens
agaaaggtgagaaagagcttctccttgccccaggttcatttctcctgacagcattattgcttttttgatgcatgtcatctgctatggcatcctgagaaacsaaagtgtcatatagcattgaggagttcaaaacctatctaactgcattagttttccaactaatctaagtcactggcagatttaatccctttcagccagtat

SEQ ID NO: 21406 - DNA, 201 bp, Homo sapiens
atctttttggtggacacaattcaaccctccaatatgtcatagataggactgggcataaaggagtagttggctcaaaagctgctcctaaccaattctctttkggcatgttgatgactctaagaaataattctttgtaagaaaaaggagaagaccatgcctgacactgagtttattcagaaaagtcactttgcccaccgtctt

SEQ ID NO: 21407 - DNA, 201 bp, Homo sapiens
acatagtaccacaaattgggtggcttaaaaccacagaaatttgttctctctcagttttggagcccaagagcctaaaatcaaggtatcagcagagccatgckccctttgaaactccccgcagcatccttccttgcctcctcttaggtgccatgctctctcttcacatggcatccttccttgtgtttttatatcttccctccg

SEQ ID NO: 21408 - DNA, 201 bp, Homo sapiens
caattaccctgatttgatgattacacactgtataaatgtatcaaaatatcagttctttcagtgaatggagcaaaggaggatgcccatcagccagcaggtgycaggggttttctcaggtgagctgcccttttgtccatttttggcactgctggagaggagcagcccaacccgtccgtgatcttgggcctctgagaatagagg

SEQ ID NO: 21409 - DNA, 201 bp, Homo sapiens
gctctcaacacaaagaaaaaataaattattgagatgatggacatcccaattaccctgatttgatgattacacactgtataaatgtatcaaaatatcagttytttcagtgaatggagcaaaggaggatgcccatcagccagcaggtgtcaggggttttctcaggtgagctgcccttttgtccatttttggcactgctggaga

SEQ ID NO: 21410 - DNA, 201 bp, Homo sapiens
tttgttaatgggcacaaaaatgtcattaaatagaaggaataatttctagtgttcgatagtacagtagggtggctataagttattgcatatttcaaaatagstagaagaattggaatgctctcaacacaaagaaaaaataaattattgagatgatggacatcccaattaccctgatttgatgattacacactgtataaatgt

SEQ ID NO: 21411 - DNA, 201 bp, Homo sapiens
tgattgaatcattggccactggtgactgaactcactttctagctcttcttccctccccagaggttgggggatggggctgaaagttccaaccctctaatcaygccttggtctttttggcaaccagcccacataatgaactatctaggggcccccagtagtgtgacttcattaacataaactcaggcatggttgaaaggggtc

SEQ ID NO: 21412 - DNA, 201 bp, Homo sapiens
ttgctgcttgaggggtttttatggaggttcacaatatataggtaagattttgatgactgattgaatcattggccactggtgactgaactcactttctagcycttcttccctccccagaggttgggggatggggctgaaagttccaaccctctaatcatgccttggtctttttggcaaccagcccacataatgaactatcta

SEQ ID NO: 21413 - DNA, 201 bp, Homo sapiens
cacctatccacgtggttgtggcagcaatatcagcacttctcctttatcactgcacccctttgtcactcttgatatgtcttgtgttaggtacctggcacctkccagaccaatcagacttctgagaatttgcaattggaattgacaacttccattttcagtctactaggtcagctgttcaaaggagatttatattcagggagt

SEQ ID NO: 21414 - DNA, 201 bp, Homo sapiens
ggaatgtcatgggaagtctgaagctaacacaattgactaatattaaaaagagctgggctgggcgcggtggctctcgcctgtaatcccagcactttgggagsccaagatgggaggatcacaaggtgaggagatggagatcatcctggctaacacggtgaaaccctgtctctactaaaaatacaaaaaattagccaggtgtgg

SEQ ID NO: 21415 - DNA, 201 bp, Homo sapiens; identical to SEQ ID NO: 2854

SEQ ID NO: 21416 - DNA, 201 bp, Homo sapiens
cctctctatctatctctctctctctctctcacacacacacacacacacacacacacaaacacacacacacacaatgataatgccaaccctaatgctaatgyctaagttctatgttctgcttggtaattagctcactctgccttgatctcttattgcgttacctcagcattctcactatagttctataactaggaatgatta

SEQ ID NO: 21417 - DNA, 201 bp, Homo sapiens
aacagtcccctgatcccctacctctgcctgccctccagccccatcaccagcttcttgctcagggagacttccgccctcctcactgaggcaacatgaagccygaggcccagatgggggctgaacaggtagggcacatcagttaatgccagtgaggtcagcttctgccctccagcaatacatgtgcaggggttgctgctttcc

SEQ ID NO: 21418 - DNA, 201 bp, Homo sapiens
agcagcagaaagacgtcacactgagagtatctggagaccttcatgttggaggagtgatgctcaagttagtagaacagatcagtaagttactcttgctttayggtttctctgtattagaaaccctgtctgttgcatcaccactaatggctggtgtaggtttttctgatcatttatcttgtaatgccctggagagcaatcccc

SEQ ID NO: 21419 - DNA, 201 bp, Homo sapiens
tttggacactttggatatggtggtactgataaagagttggagattactgagaagaatgaaatgtcagttgtacagtacttctgtgtggactttgattggargctattgctactcccttgtgacacagtggtataaggatacatttctataagagaaataatcttgattaaacaaagtcagatgctttctcagaaagggcca

SEQ ID NO: 21420 - DNA, 201 bp, Homo sapiens; identical to SEQ ID NO: 4936

SEQ ID NO: 21421 - DNA, 201 bp, Homo sapiens
cagtatatgaacgaaatgatgagagaacttaatggaatcagtgcacttaccttcaacaaagctgctcagaaactaaaagtccaaattaattggtttttacstggaatgatagccactagtgtagttaaaggttatcagcaattctgatcagcaattataaatatatttgattaatgggagaaatggggattaccatagttt

SEQ ID NO: 21422 - DNA, 201 bp, Homo sapiens
cccaaaaaagagaaaaagtatgagcaggattgggaatgccagggttgggcagtgggggctggtatggtatatgaagtagggtgagagcagaaaccgtttcytgagcatctctgcattcctcactccagtcacaatgcctagcatacaataactgttgagtgaacaaatgaatggaaactttcattacagaatgtaagttgc

SEQ ID NO: 21423 - DNA, 201 bp, Homo sapiens
tgcccccctgggttcaagcaattctcctgcctcagctttctgagtagctgggattacaggcatgcgccaccatgcccagctaaatttgtatttttttagtmgagattgggtttctccatgttggtcaggctggtctcgaactcctgacctcaggtaatctgcccaccttggcctcccaaagtgctgggattacaggcatga

SEQ ID NO: 21424 - DNA, 201 bp, Homo sapiens
cttgctttacggtttctctgtattagaaaccctgtctgttgcatcaccactaatggctggtgtaggtttttctgatcatttatcttgtaatgccctggagrgcaatcccccacccctcatcccagaggagagaaagaaatagcccaggctgggtgccgtggctcacacctgtaatcccagcacttggggaggccaaggtgt

SEQ ID NO: 21425 - DNA, 201 bp, Homo sapiens
aaaacatatccacaagcatgcttgtaaatcaaattacattcttcagttcagaaaaggagactgatgcttaagcaaaatctacccccaatcctacagtacascaagtactgtcactttctcatcttataatttcggggtgggataattggtttgtatttttaatcattggcagtttttgttttcttggccctttccaaagac

SEQ ID NO: 21426 - DNA, 201 bp, Homo sapiens
aaaagttgttaagccttgaattgtaaaaggccatgaggagctggagatcagttgttggtttccattttcgcacacaatgaaattgactctgcagctccagraccctccaagctgggccctctctcattttacttaattgtgctttcatttttgcagatatatcccaagactggtcagactttgctctttggtgggaacaga

SEQ ID NO: 21427 - DNA, 201 bp, Homo sapiens
acacccatgaagccactgcaaatttacaaggcaccctacaagtagaaactaaaatctacagtgaggactagagagcttctctggctttcagagagattcakactggccacaggtccttagtaacaggtgctgattaaaatctcagatacgtaaaatgctagaattcaacatttcaaaaataatagactcagccgggcgcag

SEQ ID NO: 21428 - DNA, 201 bp, Homo sapiens
cagtaacactggatgtgcttatcaaagggcaaaacgatactaaaagcttaaagctttatgtcaccaaattacctttctactaacggcatctgtgaaagggytgatatccccacatcctcaccaacatcaaacattatcagtatttgtaatgtaggtagatgtgataggaaaatggaaattaggtcatcttgttttcgtttg

SEQ ID NO: 21429 - DNA, 201 bp, Homo sapiens
tggaagtaaaatgggccagagggccaggcgcagtggctcacgcctgtaattccagcactttgtggggctgagatgggtaggtcgtttgagcacaggagttygagaccagcctgggcaacatggcgaaaccatctctacaaaaaaacacaaacattagccaggtgtggtggcacatgcctgtagtcccagctacttgggagg

SEQ ID NO: 21430 - DNA, 201 bp, Homo sapiens
tgtaaactgcccaggtcacccacccttcctgggtggccccagccctctttgaaaataaatccaacaggaaggcgactggcgggaccggtggtgatcctgargtgagccataccaggtgtggcccagacttccgcatgcagcctgcccttgggtctcctggagtctcccctggtcgggagcctcagccttctggagactgac

SEQ ID NO: 21431 - DNA, 201 bp, Homo sapiens
aatcccagctacttgggaggctaaggcaggagaattgctcgagcccaggaggtggaggctgcagtgagctgagactgcaccactgcactctagccagggcracaaagcaagactgtgtctcagaaaaaaaaaaaaaaggagtaattccatctaattaagagtatcatcatgaaaaaatcagttgatgctgaaatttgacta

SEQ ID NO: 21432 - DNA, 201 bp, Homo sapiens
cgctttctaatttggaagtaaccctagaaggtggaaaagcggacagccttttggtatgaactttttctgatcacccagaactgtggctttcttctgattgmcaagtataaatgaacttttctttattagaagagaatatttcatctgattttgaaaaaaaaaaaaaaaaaaagatgctcttcacctaacaagcttcaacct

SEQ ID NO: 21433 - DNA, 201 bp, Homo sapiens
atcccactaaattttcaacttagcagccagagggatccttttaaaatctaaatcagattttgtgaagcctctgctcaaaaccatctgggacaggtgtgacrgcttatgcctgtaatcccagcactttgggaggcaaaggcaggaggattgcctaagttcgggagttcaagactagtctgggcaacataacaagaccctgtc

SEQ ID NO: 21434 - DNA, 201 bp, Homo sapiens
tccagcgcttggaaattagcaatttgaaattatttttgaaaaaacaaagtgtgttttctttgacacaaacatctgatctgatctgcttgaaatctgcagcrtgttccacatttctgggtggtggtttaaacattcactatctttgaatttgcaggcccaagaagttactaccaaaagctttcaaacaatattggtttatct

SEQ ID NO: 21435 - DNA, 201 bp, Homo sapiens
cgctggtttcaactcctttctcactgacttggtcacagatttcctggcatatcctgccttatcatgagctcttttgtctctttccagttctatattaaaamacacacacacacacacaccagcaagcaaagatccccagcggcaatagaacagcagaagcctctgattctgatggctgagtgttgagggcactttgcttta

SEQ ID NO: 21436 - DNA, 201 bp, Homo sapiens
tgggaggcagagattgcgatgagccgagatcacaccattgcactccagcttgggtgaaagagcgagactcctccatctcaaaaaaacaaaaacaaaacaarcaaaacaaacaaacaaacaaaaaccgaaaagaaaaagctatcctgacatttgcacacacatctcatgttgcatcaagactcagtgattggccgggtgtgg

SEQ ID NO: 21437 - DNA, 201 bp, Homo sapiens
tctggagaccttcatgttggaggagtgatgctcaagttagtagaacagatcagtaagttactcttgctttacggtttctctgtattagaaaccctgtctgktgcatcaccactaatggctggtgtaggtttttctgatcatttatcttgtaatgccctggagagcaatcccccacccctcatcccagaggagagaaagaaa

SEQ ID NO: 21438 - DNA, 201 bp, Homo sapiens
tgtgatgatggagacagagacaggggtgatgcaggtgcaggccaaggagtcccaaagacggccagcaaacaccagaagccaggaagaggcaaggacggatycatccctgcgcccttcagagacagcatggccctgccgccatcttgattttggacttctaggctccagaactgtgggagaataaatttctgtttcaagcca

SEQ ID NO: 21439 - DNA, 201 bp, Homo sapiens
tcctgggccaatagagaatcttaaataattagatctaaatagtaaccccttcttaagaaagagcaagaaaactatgctaagtaggttttgttatttatttktattgttggttgttggaatgatggacgagggtggagggtttactgaactgactagacagggagaaacagggattcaaggagtgaaggagtggagaggtgg

SEQ ID NO: 21440 - DNA, 201 bp, Homo sapiens
cagacggaccttgagtgtattgttcttatgggggatctggagctaacagggtgatcacagagcagccggtgcatgtgaagagaggttgatgtctgtttctrttcagctggccgcccggatcctggaggcgcaccagaacgtggcccagatgcccctggtcgaagccaagctgcggttcatccaggcgtggcagtcactgcc

SEQ ID NO: 21441 - DNA, 201 bp, Homo sapiens
tttgccatgtaggccgggctggtctcgaactcctgacctcaggtgatcgcttgcatcagcctcccaaagtgctgagattacaggtgtgagctacagcaccygaccctattattttttctttttcttttttaattattttatctttaaatttttttatttgatttaattttttaaatgttttttattttactttaagttctg

SEQ ID NO: 21442 - DNA, 201 bp, Homo sapiens
tatctgtgaatactaattctttaccactacagatatgcaaagtatattttgtgggatgtagggtagttaataagtgtgttggtccccatgggccagtgggrtaaatccaaggtgacccaccaggcttacattgtcttttgtagaatgtcactcttctcttttttttttttttttgagatggagttttgctcttgttgccca

SEQ ID NO: 21443 - DNA, 201 bp, Homo sapiens
aattatccattaattaatgttatcagcttgctcctccatttttcaaaaccaaagcaaatctgaggggcttgtattcaaagtctttatttcagatacacacytgatgtttatctaacagatgcctcagaactcagttttgtctctgatctttgtccttcaggctgcgaagttgtgcccgatgtaaatgtagcaggaagaaaa

SEQ ID NO: 21444 - DNA, 201 bp, Homo sapiens
tccacccacattccattggccaaagcagaagacatgactgagcctgcagtcaagggatgggaattcctccctggtgggaggaactgtaaagttatatggcraaggttgtggatggcagtggtggggggtgtattagtccattctcacattgctataaagaactacctgagactgggagagaaaagaggtttaattgactcc

SEQ ID NO: 21445 - DNA, 201 bp, Homo sapiens
gaggtaagagtaccctatatcttgctgtggctcatcgtaagtcagggcagacgcggtggctcaaacctgtaatcccagcactttgggaggctgaggcgggyggatcacctgaggtcaggagttcgagaccagcctggccaagatggtgaaaccccatctctactaaaaataccaaaattagccaggcgtggtggcacatgc

SEQ ID NO: 21446 - DNA, 201 bp, Homo sapiens
tgaatggaaaaatgaagtatgtaaatttagatgatttgagaccatttttataaaactttttgtcttcaaagttaagatgccaaatttgatatctggagcayctggaaccttgcagagtgttttgaagaggaggttacaatgaaaaacaaaacaaaaaagaaattttgctctgcaagtctactgacaagtcccgtttccttc

SEQ ID NO: 21447 - DNA, 201 bp, Homo sapiens
atatggcacaatagaagtattcctttcacttacctgagctgaagtttgctgcatctgattaacagagaatggcctcagttgtttcagaatctttgtattgygggatataaatatacctcattacacacacacctctgtttttgtctctagtatgatgctgtccgaataaaccaactctatgagcaagccaggtgggccatt

SEQ ID NO: 21448 - DNA, 201 bp, Homo sapiens
cttttaaaattatgcttttctgtctcctgcagcatcatttttcacatcagtttccccttcttgcaaccccctccagctgctctccccaagctctgccctamtttgcagtaaaacttcttgaatgtattgtacgtacctactacctccaattccttgcttccattctctcttgaaaccactccagttaggttttctctccct

SEQ ID NO: 21449 - DNA, 201 bp, Homo sapiens
tgggcccctctgacaacacatgggaattcaagatgagatttgggtggagacacatccaaaccatatcaggaagaaaggggagagggaggtaaagttggtgrtaaataggtaacaagaatagcataatgctagtaatgactgaagctggggagcccatgaaggggacattataccattccctttgctttagatacatttgaa

SEQ ID NO: 21450 - DNA, 201 bp, Homo sapiens
gaccaacatggtgaaaccccatctctactaaaagtacaaaacttagccaggcaaggtgatgggcgcctgtaatcccagctactgggaatcgcttgaggcargggaatcgcttgaacctgggaggcagaggttgcagtgagccaagaccgtgccattgcactccagctgggcaacaagaacagaactctgtcttaaacaaac

SEQ ID NO: 21451 - DNA, 201 bp, Homo sapiens
tttgagatgaagtcttgctatgttgccctggctggtctcaaactcctaggctcaaacaattctccaacctcagcctcccaagtagctaggattatagacgygggccacagtgcccagcttgacttatattattttaaatggtgccaaatttaaagtcaaaactcattttagtgtaagtaatgttaatattttcttgaagat

SEQ ID NO: 21452 - DNA, 201 bp, Homo sapiens
ccaagaactaagctgggtactgagaactcaaaactgttgtatattaaaataatgttttcaaattaatgagataaaatacataggactacaaaatgaaacasttatattaaactgtagtagccaaaccctttttgaaaatgtatatagtaatatatttttagttaattgaataaagaagatttgtagttctcataaccacca

SEQ ID NO: 21453 - DNA, 201 bp, Homo sapiens
ttatgaaaattaggatgaatttatttgtgtgatcgcctgtttagccctgcagggtgagactgatacatggaccctggtctctgaatttttatcctttggtygctactgagcacagtaagctgctaccaaattagccggagtctctgaggatctttgcgcctagcgtggcatgcactgcccccctccatttgcaggaatggt

SEQ ID NO: 21454 - DNA, 201 bp, Homo sapiens
acggccagcaaacaccagaagccaggaagaggcaaggacggatccatccctgcgcccttcagagacagcatggccctgccgccatcttgattttggacttmtaggctccagaactgtgggagaataaatttctgtttcaagccacaaggcttatggtaattttgttacaccagttctaggaaaataatgcagccagaatct

SEQ ID NO: 21455 - DNA, 201 bp, Homo sapiens
agtacaggaaaagcacatctgttctaaaaagaggcttggaagatactgaaagctgctcctgggccaatagagaatcttaaataattagatctaaatagtamccccttcttaagaaagagcaagaaaactatgctaagtaggttttgttatttatttttattgttggttgttggaatgatggacgagggtggagggtttact

SEQ ID NO: 21456 - DNA, 201 bp, Homo sapiens
cctgcagggtgagactgatacatggaccctggtctctgaatttttatcctttggtcgctactgagcacagtaagctgctaccaaattagccggagtctctraggatctttgcgcctagcgtggcatgcactgcccccctccatttgcaggaatggtcaaacaagatgggagtggctcagagagctggagttcttttttttt

SEQ ID NO: 21457 - DNA, 201 bp, Homo sapiens
atggcatttcagagtgtgtctttctcatctttataccatcctgtctcctggtttttgtttttgtattttaataagctatctattaagccatttgaaattcrtggaaattggccaggcacagtggctcacgcctgtaatcccagcactttgggaggccaaggcaggtggatcacctgaggtcaggagttcaagatcagcctg

SEQ ID NO: 21458 - DNA, 201 bp, Homo sapiens
taaatccagtgacccttggatatctaatgagcatctcatctttacatgtccaaagttccggatcttccccctaaactggctccccgctacatacttcttcrtctcagtagaaggcaactcctcgccctagatgttcaggccaaatcctttggagtcattcttgactctgctctttctcttacaccaacatcctgcccatag

SEQ ID NO: 21459 - DNA, 201 bp, Homo sapiens
cattcttttttcttcttcttcttctttttttgagacagagtctcactctattacccaggctagagtgcaatggtgtgatctcagctcactgcaacctccayctcctgggttgaagcaattctcccaccttagcctcccgagtagctgggattacaggtgcccatcatcacgcctggctacattttgtatttttgtagagac

SEQ ID NO: 21460 - DNA, 201 bp, Homo sapiens; identical to SEQ ID NO: 2872

SEQ ID NO: 21461 - DNA, 201 bp, Homo sapiens
agaattccttctgctttgatttattttaaagttcatatccacaattttttctatgagtttggagagccagcattaacctgaaaatgaactaaattgacttdttaagaaaactgtaaaagaaaagcatttttctttatctatgttaattgttcataagatttatctaattatccattaattaatgttatcagcttgctcctc

SEQ ID NO: 21462 - DNA, 201 bp, Homo sapiens
ccaggttcaagtgattctcctgcctcagcctcccaagtagctgggactacaagtgcctgccaccacgcctggctaatttttttgtattttttagtacagayggggtttcaccatgttagccaggatggtcttgatctcctgacctcgtgatccacccgcctcggcctcccaaagtgctggaattacaagtgtcagccacca

SEQ ID NO: 21463 - DNA, 201 bp, Homo sapiens
cccctgaaactcagctaaatgtgggaaaggaaattttaaaaggagggttttttttaggataactacatttccaaaaccagagggtaaacatcacatattgwttttatgaaatctgtaacttcttttcggtttttttttttttggtttttttttttaagagatcgggtgtggggagggtggccggggtgggggggtgtctca

SEQ ID NO: 21464 - DNA, 201 bp, Homo sapiens
ctcctccctcactgaccagttcttttggtctccttggctggttctttctcatctttccaatctcttataataccagagtgcacagtcctcagttttttggttttttttttttttaattagaggcaggatctcactctgtcacagtggcacaatcatggctcactataacctcaaactcctgggctcatgtgatcctctcac

SEQ ID NO: 21465 - DNA, 201 bp, Homo sapiens
aggccgagatgggaaagatcacttgaggctgggagttcgagaccagcctgggcaacataatgagaccctgtctctacagaaaattaaaaaaaaaaaaaacaaaaaaaaaaaaacgctgaactagccaggtgtgatggtgtgcacctgtagtttcagctactcagccagggatgatcagttgaggttcgaggttacagtgag

SEQ ID NO: 21466 - DNA, 201 bp, Homo sapiens
ttgccgttttgaagtcatcagacttctagcaggtttataagctgaaaacttaatagagaactttatattgggtaaatatttatcaaaatcatcaatcaggaaaaaaaaatccacttcttttctccttcaagcagctttcttattctacctaaattaactctatagaatttttagcaaaaaggtgctagaggaaaaaatcat

SEQ ID NO: 21467 - DNA, 201 bp, Homo sapiens
tctactcatttatttcccttttgtgttcagtgaatacggaatatggccacatctctcattcagtctaatctacccataccccagacatgacatgacttactttttttttttttttttttttaactgagacagggtcttgctctgtcacccaggttagagtgcagtggtgcaatcatggcttactgcagcctggatctccca

SEQ ID NO: 21468 - DNA, 201 bp, Homo sapiens
catagtaaagtgaaaaagactcattatcatttaaataatttttactttaaatgtttaaaacagccaggagcagtagcattatttctttctgtttaaaagtragagagaactgacatctcaagttttgtttcagttctgccaatttggattccagtgttccagttaccccctgaaacatttcagttgtgaacgttctttcct

SEQ ID NO: 21469 - DNA, 201 bp, Homo sapiens
ccttatgccgcctgagctggtcttaaactcctgggctcgagcaatcctactgtcttggcctcctaggtgttgagattacaggcctgaaccaccacacccakttgatttacctttttgaaggtactagttcaaaggtgagtttatcagtgtatgggtaattgacaacagatttttttttcaatatttgcaacttgaatgtat

SEQ ID NO: 21470 - DNA, 201 bp, Homo sapiens
gccagggttgggcagtgggggctggtatggtatatgaagtagggtgagagcagaaaccgtttcctgagcatctctgcattcctcactccagtcacaatgcytagcatacaataactgttgagtgaacaaatgaatggaaactttcattacagaatgtaagttgcagtcttgtccctggtgtgcaaatggcaagcatgagga

SEQ ID NO: 21471 - DNA, 201 bp, Homo sapiens
cttgtataaagtttcatttaaaaaatcctatcggattctgcttgggattgcactgggcttgcagatcagcatggggatcccttctattacactgtttactwattacactgtttatcatataaaccatttttactatctattactaccaatatgtagtaataaaagagagagaaaataatggaatcaaatttgggttgtgaa

SEQ ID NO: 21472 - DNA, 201 bp, Homo sapiens
ttttcaaatgcaaaaagtatgccgagattccaaatgtcaccagattcatgtcggttcctcacatacaccatcacagttaacacttcagttgcatcaggtgytgtgataagctcttcatgtagatgaactcattctgtcctcacaaaagccctgggttcccagactacgacggtccccatcacacagaggcagtgcacgcag

SEQ ID NO: 21473 - DNA, 201 bp, Homo sapiens
tggaggctgcagtgagctgagactgcaccactgcactctagccagggcaacaaagcaagactgtgtctcagaaaaaaaaaaaaaaggagtaattccatctrattaagagtatcatcatgaaaaaatcagttgatgctgaaatttgactatgtcctgaatattagatgatgttatgaaattattgttaattttgttagaggt

SEQ ID NO: 21474 - DNA, 201 bp, Homo sapiens
ttcttttcctccacggtatctaaatgtaaatgatggtaagatttagtccctattttccatttttttttttttgagacagagatttgctcttgttgcccaarctgtaatataatggtgtgacctcggctcattacaatctccacttcccgggttcaagtgattctcctgcctcagcctctggagtagctgggattaacaggt

SEQ ID NO: 21475 - DNA, 201 bp, Homo sapiens
gcagttagctgtgggaggagaggctggaccaaaaaggtctgggagccagagaaatgaggtgcttagagtgttgttgtttttttctttgttttaatttttgkttttgttttttgagatggagtttcactcttgttgcccaggctggagagcaatggcgtgatctcagctaaccacaacctccgcctcccaggttcaagcgat

SEQ ID NO: 21476 - DNA, 201 bp, Homo sapiens
agctgtgggaggagaggctggaccaaaaaggtctgggagccagagaaatgaggtgcttagagtgttgttgtttttttctttgttttaatttttgtttttgktttttgagatggagtttcactcttgttgcccaggctggagagcaatggcgtgatctcagctaaccacaacctccgcctcccaggttcaagcgattctcct

SEQ ID NO: 21477 - DNA, 201 bp, Homo sapiens
taaaattttatttttaactcacaagatttatttttgggggctgggcatagtggctcaccttgtaatcccagcactttgggaggccaaggcaggaggcttayccgagcccaggagttcaagaccagcttgggcaacacagcaagaccccatctctacaaagattttaaaaaattagctgggcatggtggcacatgcctgtag

SEQ ID NO: 21478 - DNA, 201 bp, Homo sapiens
taggggaggctattggaagagagcaaagacctcttccaggcagtgctacagaggtcaggaggcagaactaatggtgggatattctgggaagccaggagggytggggatgaaggtctgaccaggtgcttacaaaggggccctgaatctctgtgctaccagcttaatttcctgaaatgtcactaaagaaccaacattattggc

SEQ ID NO: 21479 - DNA, 201 bp, Homo sapiens
atcctcccacctcagcctcccaagtagctaggatcacaggcacataccaccacacccagctaatttctattattttaaaaatttttttcttcaacttttattttaagttcaggggtacatgtgcaggtttgttacgtagtaaacatgtgccatggtggtttgctgcacagatcatcgcataatttttatgattttttgttt

SEQ ID NO: 21480 - DNA, 201 bp, Homo sapiens
tcacttgaacccgggaggcggagggtgcagcagtgagccaagatcgtgccactgcactcctgcctggggacagaacaagactccatctcaaaaaaatatakgtgtgtgtgtgtgtgtgtgtgtgtgtgtgtgtgtgttgtgtgcgcgcgcgcgcgcgcgcactgaccacagtctaagttctaatgggccataagcagggtt

SEQ ID NO: 21481 - DNA, 201 bp, Homo sapiens
gaaatacatagccaagtggtcttggagaagtgggtgaatggaaaaatgaagtatgtaaatttagatgatttgagaccatttttataaaactttttgtcttyaaagttaagatgccaaatttgatatctggagcacctggaaccttgcagagtgttttgaagaggaggttacaatgaaaaacaaaacaaaaaagaaattttg

SEQ ID NO: 21482 - DNA, 201 bp, Homo sapiens
ttatctatatatattgtgtatatgtatgggtgtgtatatatatgatacacatttatatacacacaagtcactacataaaattacaagtttaaaaattaacytaggccaagaagaacgcttaaaaccagtcgaattctttagcacaatgcagatattttcaattgaaaagagaaaaaccatattggtatgaatagatagagc

SEQ ID NO: 21483 - DNA, 201 bp, Homo sapiens
gagaagtgggtgaatggaaaaatgaagtatgtaaatttagatgatttgagaccatttttataaaactttttgtcttcaaagttaagatgccaaatttgatrtctggagcacctggaaccttgcagagtgttttgaagaggaggttacaatgaaaaacaaaacaaaaaagaaattttgctctgcaagtctactgacaagtcc

SEQ ID NO: 21484 - DNA, 201 bp, Homo sapiens
gtgttttgaagaggaggttacaatgaaaaacaaaacaaaaaagaaattttgctctgcaagtctactgacaagtcccgtttccttcccacattccaatctaygtctgcctttttgttcagcagacaccagcatttgccacaatgctgtcatccactgactttacatttgcttcctgggagcttgtggtccgcgttgaccatc

SEQ ID NO: 21485 - DNA, 201 bp, Homo sapiens
taaataggttgaagggaagaactgagtatacccacagaccagcaacatctggagcctgttaagaaatgtatggcccctccctagacctgctgaatagaatstgcattttaataggatccctgggggatttgtgtacaccctcagagaagccctttcttaggagtttgagtgcattgatgtttcttaaaaataggccttatg

SEQ ID NO: 21486 - DNA, 201 bp, Homo sapiens
gttaaaatgggatggatagtaccccaaaaaagagaaaaagtatgagcaggattgggaatgccagggttgggcagtgggggctggtatggtatatgaagtarggtgagagcagaaaccgtttcctgagcatctctgcattcctcactccagtcacaatgcctagcatacaataactgttgagtgaacaaatgaatggaaact

SEQ ID NO: 21487 - DNA, 201 bp, Homo sapiens
accccatctctacaaagattttaaaaaattagctgggcatggtggcacatgcctgtagtcctagctacttgggaggctgagatgagaggatcccttgagcyccaggagttcaaggtggcagtgagctatgatcatgccatcacactccagcctcagtgaccctgtctcaaaaaaaaaaaaaaaaattggcttctacattta

SEQ ID NO: 21488 - DNA, 201 bp, Homo sapiens
ctaagcaccaagaacaaagtctgaaatgatgctgtaggactaacacgagaagggagtcaccattgaagcatctgaacctgactttactgcacctgctaccrccacccactagccctgacatcacttctgcattgggactttaacctttcagcctccagaaaaccatcgccactgccactaccaccaccatagtcattcctg

SEQ ID NO: 21489 - DNA, 201 bp, Homo sapiens
caagatcgtgccactgcactcctgcctggggacagaacaagactccatctcaaaaaaatatatgtgtgtgtgtgtgtgtgtgtgtgtgtgtgtgtgtgttktgtgcgcgcgcgcgcgcgcgcactgaccacagtctaagttctaatgggccataagcagggtttcatgatgttaagaggtagggaagtgggaccagatgac

SEQ ID NO: 21490 - DNA, 201 bp, Homo sapiens
ggtaacaatatttgtcactgggtttctacaggtatggttttggggatttcttactgtgattgtaggatgtggtcgcaaacaatagggtcattcttttttcytcttcttcttctttttttgagacagagtctcactctattacccaggctagagtgcaatggtgtgatctcagctcactgcaacctccacctcctgggttga

SEQ ID NO: 21491 - DNA, 201 bp, Homo sapiens
aggaggttacaatgaaaaacaaaacaaaaaagaaattttgctctgcaagtctactgacaagtcccgtttccttcccacattccaatctatgtctgcctttktgttcagcagacaccagcatttgccacaatgctgtcatccactgactttacatttgcttcctgggagcttgtggtccgcgttgaccatcccaatgaagag

SEQ ID NO: 21492 - DNA, 201 bp, Homo sapiens
ctttgggaggctgaggcaggcagagcacctgagatcaggagttcgaggccagcctgaccaacatggtgaaaccccatctctactaaaagtacaaaacttakccaggcaaggtgatgggcgcctgtaatcccagctactgggaatcgcttgaggcaggggaatcgcttgaacctgggaggcagaggttgcagtgagccaaga

SEQ ID NO: 21493 - DNA, 201 bp, Homo sapiens
gcggatcacttgagctctcaggagttcaagaccagtctagccaacatgatgaaaccccagctctactaaaaatacaaaaattagccggccgtggtggcacrtgcctgtaatcccagctacccgggaggctggggcatgaggaccgcttgaacccaagagacagaggctgcagtgagacaagattgcgccactgcactccag

SEQ ID NO: 21494 - DNA, 201 bp, Homo sapiens
aatgttttgtgtcaccacggtgtgcaaaaagacacaaatccaaacaggtactgttaatcttgttagggcaattgtttgcagtaaattctttatgcaaacaraaataaaaggaggatttccggctgggcatggtggctcacacctgtaattccagcactttgggaggccaaggtgggtgggtcacttgaagttgggagttca

SEQ ID NO: 21495 - DNA, 201 bp, Homo sapiens
gggtgtcaccacagggataaaatgagctgatgggcaatgtgtaaaagaaagacgttcaagatctgtgatctataaagaaaaaaggaagcaggacctttgtyggttgtttaaaaaactggaaaaaggaaagggagagggagcaaggaagggaagtctattagttcattttcatgctgctgataaagacatatctgagactgg

SEQ ID NO: 21496 - DNA, 201 bp, Homo sapiens
aaggtgctagaggaaaaaatcatttgtgtttaacaagttaaagcagcagagactttcaaagttctctactcatttatttcccttttgtgttcagtgaatayggaatatggccacatctctcattcagtctaatctacccataccccagacatgacatgacttactttttttttttttttttttttaactgagacagggtct

SEQ ID NO: 21497 - DNA, 201 bp, Homo sapiens
caaatctgaggggcttgtattcaaagtctttatttcagatacacacctgatgtttatctaacagatgcctcagaactcagttttgtctctgatctttgtcyttcaggctgcgaagttgtgcccgatgtaaatgtagcaggaagaaaatttggaatcaagttactaatccctgttgccgatggtatgaatgaaatgtatttg

SEQ ID NO: 21498 - DNA, 201 bp, Homo sapiens
agcctgagacatcaaggctgcagtgagccatgatcatgccactgcactctgacctgggggagagcaagaccctttctcaaaaaaaaaaaaaaaaaaaaaarcctaggacacataatatggataaaactcacaaacataatgttgaacacaagaagccagacacaaaatagtgcacatggtctgattccatttatataaagt

SEQ ID NO: 21499 - DNA, 201 bp, Homo sapiens
agttcaagaccactctgggcaacgtagcaaaaccccatctctactaaaaatacaaaaaaaaattagctgggcgtggtggtgtgcagctgtagtcccagctrctcaggaggctgaggcactagaattacttgaacctgggaggtggaggttgcagtgagctgagatcgcgccactgccctccagcctaggcgacacagtgag

SEQ ID NO: 21500 - DNA, 201 bp, Homo sapiens
gcctgagacatcaaggctgcagtgagccatgatcatgccactgcactctgacctgggggagagcaagaccctttctcaaaaaaaaaaaaaaaaaaaaaagsctaggacacataatatggataaaactcacaaacataatgttgaacacaagaagccagacacaaaatagtgcacatggtctgattccatttatataaagta

SEQ ID NO: 21501 - DNA, 201 bp, Homo sapiens
gagttcgagaccagcctaaccaaaatggagaaaccccgtctctactaaaaatacaaaattagccaggtgtggtggcacctgcctgtaatcccagctactcrggaggctgaggcaggagaatcacttgaacctgggaggcagagattgcgatgagccgagatcacaccattgcactccagcttgggtgaaagagcgagactc

SEQ ID NO: 21502 - DNA, 201 bp, Homo sapiens
aagtgtggtccttggcccagcagcatttgtcagaaaggcagaatctcacagggccaggactagggtggcacaggtgaggcatcccgggcacagcatttaargaggccctcactgtcagggtcgtacagggcacctcctcggctcaccctaatcccagctctgaggtccacccagacctttctgagtcagagtctgcctttt

SEQ ID NO: 21503 - DNA, 201 bp, Homo sapiens
ggcatttttgctgcgctccccaagcgcagcttctccatgtgtccagtgggctctccgaacctactgtgttgagagaatccagtgcagcctgcaagcaaagygcctgatacgtggtgaagcgtggtgtgggcctgaacaactttccggtgacaactcctcctttaccagctacttccccctgcacctccctctatctctaac

SEQ ID NO: 21504 - DNA, 201 bp, Homo sapiens
gtgtttttggtaatattctaatgaggatttgaaagcaaagtaaatgattacataaaatagtatattgcatacaccacagtggactggaagcacacatcacmgctgataccaaaaatgtaaagttttcaagtaaacagaagcagtcagatgttctcttttcctgattatctctttgtaatagttttaaaggctcagcgtggc

SEQ ID NO: 21505 - DNA, 201 bp, Homo sapiens
gcgaggctggacgctacgggctcctggaaaggaggtgggtgctccggagctagggctggggagctagaggttgggaggctttcatgggcaccagtggctcytgagcccccttagcccctttctttctgcagcctcttgtacttaaatagctgttgattgaaaataatttcgtctggatgtgaccaccttctccggccctac

SEQ ID NO: 21506 - DNA, 201 bp, Homo sapiens
caggcatggtggcacatgcctgtaatcccagctactcaggaggcggaggcaggagaaccccttgaaccagggagttggaggttgcagtgagccgagatcgygccacagcactctagcctggcaacagagcgagactccgtctccaaaaaaaaaaattgccccaaattacatatgaatggttcctctcttctccaagaggaa

SEQ ID NO: 21507 - DNA, 201 bp, Homo sapiens; identical to SEQ ID NO: 2866

SEQ ID NO: 21508 - DNA, 201 bp, Homo sapiens
aataaggaacccataattgaagatattctaaacctggagagttctccaacagcttcaggttcatcaggtaagacttgttacaggtgttttgttgtttgaaygtacagtaaaactcaagagagaaatatatctctcctcccacccccaccaaacaaaggagaaataaaattgcagaactgatgtgatgaggaaaggctatct

SEQ ID NO: 21509 - DNA, 201 bp, Homo sapiens
ttgccaatgaatgcaaaattttagtaccactgaccacaaatttgggataaaagagtgatatttagaaaacaggtaactggctggtcacggtgcctcatgcytgtaatcccagcactttgggaggctgaggtgggtggatcacttgagctcagaagtttgagaccagcctgggcaatatggtgagactccatctccattaaa

SEQ ID NO: 21510 - DNA, 201 bp, Homo sapiens
acggtgcctcatgcttgtaatcccagcactttgggaggctgaggtgggtggatcacttgagctcagaagtttgagaccagcctgggcaatatggtgagacyccatctccattaaaaatacaaaaaataaataaataaataacctgggcatgctgctgcatgcttgtggtcccagctactcagaaggctgagatgggaggat

SEQ ID NO: 21511 - DNA, 201 bp, Homo sapiens
tgtgtgattctttcctgaattcagttttttatggggcatgcaagaggagggcaggtgaaaattctggaggagaagcatccttttctttttatatcaaaacwatcaaatctctagcttgcttgcaagattgagggctttctttcttcattttttgtttgtttgttttgttttgtttttttagacagagtcttgctctgtcac

SEQ ID NO: 21512 - DNA, 201 bp, Homo sapiens
tactaattctttaccactacagatatgcaaagtatattttgtgggatgtagggtagttaataagtgtgttggtccccatgggccagtgggataaatccaargtgacccaccaggcttacattgtcttttgtagaatgtcactcttctcttttttttttttttttgagatggagttttgctcttgttgcccaggctggagtg

SEQ ID NO: 21513 - DNA, 201 bp, Homo sapiens
agagagaatgaatggatgagaatggattgtctttgtagagctgcagacggaccttgagtgtattgttcttatgggggatctggagctaacagggtgatcayagagcagccggtgcatgtgaagagaggttgatgtctgtttctgttcagctggccgcccggatcctggaggcgcaccagaacgtggcccagatgcccctgg

SEQ ID NO: 21514 - DNA, 201 bp, Homo sapiens
aaatctgtaacttcttttcggtttttttttttttggtttttttttttaagagatcgggtgtggggagggtggccggggtgggggggtgtctcactttgccrcccaggctggtctcgaactcctgatctcaagcaatcctcccacctcagcctcccaaagtgctgggtttacaggcatgagccaccacacctggctacgact

SEQ ID NO: 21515 - DNA, 201 bp, Homo sapiens
gaatggattgtctttgtagagctgcagacggaccttgagtgtattgttcttatgggggatctggagctaacagggtgatcacagagcagccggtgcatgtraagagaggttgatgtctgtttctgttcagctggccgcccggatcctggaggcgcaccagaacgtggcccagatgcccctggtcgaagccaagctgcggtt

SEQ ID NO: 21516 - DNA, 201 bp, Homo sapiens
ggtcatactggattaaggtgagtcctaaattcaatatgactggtgtccttaaaaaaaggaaaaggtaggctgggggcagtggctcatgcctgtaatcccakcactttgggaggctgaggcaggcagagcacctgagatcaggagttcgaggccagcctgaccaacatggtgaaaccccatctctactaaaagtacaaaact

SEQ ID NO: 21517 - DNA, 201 bp, Homo sapiens
agatctcttgatactcttaaggtccaggtagaacagagaagtagggcctcattcttaatcctaaagagaaatatttagaggctgaagattaaaccaagacyttattacctgtatcttttggttaaaggtgctgtctttattattctgaaaatactattcattttggagaatctgagtattaaacaacaatatgttccttag

SEQ ID NO: 21518 - DNA, 201 bp, Homo sapiens
taattggtgcatttataatcaatttttatatgacatagaacaataagtaaatcgaatacatggcaataattattaatgacctgtatctatatgtatttaargtaaaactatatattataatgactgaaataggaattattttgcttttttttattttttgagctttattatgggaagatatacatttttgtaggaggaatg

SEQ ID NO: 21519 - DNA, 201 bp, Homo sapiens
aatgctagaattcaacatttcaaaaataatagactcagccgggcgcaggggctcatgcctgtaatcacagtactttgggaggctgaggcgggtggatcgcytgaggttagaagttcgagactagcctggccaacatggtgaaaccccatctctactaaaaatacaaaaattagccaggcatgatggcatgtgcctgcaatc

SEQ ID NO: 21520 - DNA, 201 bp, Homo sapiens
actaccatttccagggaacaaggtagagagggggactaactttttattgaacactcttttgtccctttcaaattcattcataatgaattcatttatcacayaccttttgcccctttttaaatgtgttcaaaatttgtgaattaaaaaaacacacattttagaactctgatagttcatagtattttagtgttcagtacagga

SEQ ID NO: 21521 - DNA, 201 bp, Homo sapiens
gagagactccatctcaaaaaaaaaataaaaataaaaataaagtgcctgcgaagcaccctgcccctcaacacagggagacagagagtgcttgggcaaaatcyttgtatctaaactgtagacagaaaatgtgttgggagtttttttaaccaggcgtgcagcaaagtcgacaccaccagagggcgcaaagagagcaaagatgtt

SEQ ID NO: 21522 - DNA, 201 bp, Homo sapiens
atctattaagccatttgaaattcgtggaaattggccaggcacagtggctcacgcctgtaatcccagcactttgggaggccaaggcaggtggatcacctgargtcaggagttcaagatcagcctgaccaacatggagaaaccccatctctactaaaaatacaaaaattagccaggcgaagtggagcgcacctgtaatcccag

SEQ ID NO: 21523 - DNA, 201 bp, Homo sapiens
tcgtctggatgtgaccaccttctccggccctacgcatctggccgcaaaataaactttcagttcagccgcaggtgctgccttaatgggagtaaggggcatgytttatccacccaacatccgccccaggatcctgcagagctggcaaaagacaggtcgggtggccttcgaacaccaagcaccttcagatattccaggggaagg

SEQ ID NO: 21524 - DNA, 201 bp, Homo sapiens
aacatctgatctgatctgcttgaaatctgcagcgtgttccacatttctgggtggtggtttaaacattcactatctttgaatttgcaggcccaagaagttaytaccaaaagctttcaaacaatattggtttatctttaaagacacatccatagcatactttaaaaataaggaacttgaacaaggagaaccactagaaaaact

SEQ ID NO: 21525 - DNA, 201 bp, Homo sapiens
gagtgtattgttcttatgggggatctggagctaacagggtgatcacagagcagccggtgcatgtgaagagaggttgatgtctgtttctgttcagctggccrcccggatcctggaggcgcaccagaacgtggcccagatgcccctggtcgaagccaagctgcggttcatccaggcgtggcagtcactgcctgagtttggcct

SEQ ID NO: 21526 - DNA, 201 bp, Homo sapiens
taccttaataaaattgatttctttaaaagataatatggaagattgcctattgccagaatagttgagagaaggtcaaaagaagtcaatagagagaaaatgargattgaagcattgggtggacgaaggaaatacatagccaagtggtcttggagaagtgggtgaatggaaaaatgaagtatgtaaatttagatgatttgagac

SEQ ID NO: 21527 - DNA, 201 bp, Homo sapiens
cgtttttcatttttgtaatctacgacacaaacagaaaagtgaaaaatacacatatgtacagcttaacaaattagtattcaattgtcacccaagtcaccacygaaatcaagaaacagaactttgccagccacctaggggacctcaacagggcccccattctcctcccaatcctccttactcccacacccagttaactatcag

SEQ ID NO: 21528 - DNA, 201 bp, Homo sapiens
tttattgatactttatcaatcattacaccagtaccataccattttaattactgcaactttataataggttttaatatctgggaggagaagtgctttactcmacattgttctttttcaatttcttggcaatatttgaacattatgtcttccaccagcctcaacttgagaatcagcttgtataaagtttcatttaaaaaatcc

SEQ ID NO: 21529 - DNA, 201 bp, Homo sapiens
tggggatcccttctattacactgtttacttattacactgtttatcatataaaccatttttactatctattactaccaatatgtagtaataaaagagagagraaataatggaatcaaatttgggttgtgaagaagcagcagcagccctggaagtaaaatgggccagagggccaggcgcagtggctcacgcctgtaattccag

SEQ ID NO: 21530 - DNA, 201 bp, Homo sapiens
atatatttgccacaaactctattaaattatttatatgtttcatatgatttataggagtactgtgtatatgatggacatcattttttatatttattacaaayttttttaattattcaaatatttcaaatattttttcaatctgtatcctatattttataaatttgtaaccttctttaggatattttttaccattaaaaatgt

SEQ ID NO: 21531 - DNA, 201 bp, Homo sapiens
acacatacacgggctctttcatttactctcataatagtgctattataataagggttgtattcatttcccttcaatagctacttatgccagctttggtttgrataaagtggtagtttgttttctcagcccaaattttgggctctcggtcaacttggacctccagctgcagcagagggcccctcctggcaaagcagtttctct

SEQ ID NO: 21532 - DNA, 201 bp, Homo sapiens
tgaccggccaagaaaattctttaccgataaaaaccttatttctatttacttggtcatccatttcaaccagacaagcttgaccaaagttgtggcctttttcyggaacattgcaaaaagtttctgaatgcttttgacttcaggagacaaacgaaaaccctccaataaaacaaagaaaactgttttgtcatctctttctcctta

SEQ ID NO: 21533 - DNA, 201 bp, Homo sapiens
ccaggggaagggtcggggactgtttccccctcatctttcctccttcctgctctccatccctccatgctttcgtttctttgactgtctgcgaagggcttttsagcactctgccagtaactttgcttcttgttttggtctccttagatgcgttttcccggctgaagtttgctgctatccttgacaagtaacagcttgctgcag

SEQ ID NO: 21534 - DNA, 201 bp, Homo sapiens
cttgtggtcccagctactcagaaggctgagatgggaggattgcttgagccctgagggtggaagttgcggtgtgccaagattgtgccactgcactcaggctrggtgacagagcaagaccctgtctcaaaaaaaaaaaaagaaaagaaaaaagataagttaaatcactcaaatacacttctctcttcatgattctatcattgt

SEQ ID NO: 21535 - DNA, 201 bp, Homo sapiens
tagtagagacagggttttgccatgttggccaggctggtctcaaactcctggcctcaagtgatccgcctgcctcagccacccaaaatgctgggattacaggmatgagccaccacacccggccaagattgagggctttcttgcatagtgtattccaatgaaaagaacaaattgtacaaattagagccagctgatttataaatc

SEQ ID NO: 21536 - DNA, 201 bp, Homo sapiens; identical to SEQ ID NO: 4934

SEQ ID NO: 21537 - DNA, 201 bp, Homo sapiens
gctgcacttagtcaattctacttttagtgttgttacttgtagcatcccacttccggtaacacgttctttgtcagtaagagctcttaggcacaaataacagratccactatggctagcttaaacagaaaaataattaggcaagtcgtcatcatcatcatagatgacagggtcttgctccatcatagtggacacaacctgaca

SEQ ID NO: 21538 - DNA, 201 bp, Homo sapiens
tgaatccatatcacttatgctaccctgaactgtcacaggctttcggtgtgacttatactctcaaaattgccctcatatttggccagtggatactatctaargtctcaagatgttgcattgaatatataatatagttcatggaaagaagaaacaaatgaaggaaggagagagagctcgtaggagggaagaggggagggagat

SEQ ID NO: 21539 - DNA, 201 bp, Homo sapiens
gccctcgctgcaagcgaggttgggaatttgagttctgacttctagactgggattaagacataaagatttccacaaatattaaggaggccattccaaggatratgggcagccatgagtatgactgatatttgctacaatcatcaagatattttcaagttagaaaagcaaaatgcagaacaatatgtatagactactatcact

SEQ ID NO: 21540 - DNA, 201 bp, Homo sapiens
ctattatctctagggaagggaactcaataatcaaggatgggaggaagatttaattatcactgtatactctcttgtaccctttgattaagaaggatgcaatstaaggaaggagaacaggggatggaggagaagagggatggaaggagggaggcactgtgtttcttgcttctctcattctcaaaggtgggctccagcatggcc

SEQ ID NO: 21541 - DNA, 201 bp, Homo sapiens
tccagtctcgaaaacatggatatgaacccagaatgttttgtgtcaccacggtgtgcaaaaagacacaaatccaaacaggtactgttaatcttgttagggcmattgtttgcagtaaattctttatgcaaacagaaataaaaggaggatttccggctgggcatggtggctcacacctgtaattccagcactttgggaggccaa

SEQ ID NO: 21542 - DNA, 201 bp, Homo sapiens
aaaggagggttttttttaggataactacatttccaaaaccagagggtaaacatcacatattgattttatgaaatctgtaacttcttttcggtttttttttktttggtttttttttttaagagatcgggtgtggggagggtggccggggtgggggggtgtctcactttgccgcccaggctggtctcgaactcctgatctcaa

SEQ ID NO: 21543 - DNA, 201 bp, Homo sapiens
ttttatgaaatctgtaacttcttttcggtttttttttttttggtttttttttttaagagatcgggtgtggggagggtggccggggtgggggggtgtctcaytttgccgcccaggctggtctcgaactcctgatctcaagcaatcctcccacctcagcctcccaaagtgctgggtttacaggcatgagccaccacacctggc

SEQ ID NO: 21544 - DNA, 201 bp, Homo sapiens
tgagccaccacacctagctaactttcttttaggagatgggatctcactgtgttacccaggctgctctcaatctcttggcttcaagtaatccccttgcctcrgcctcccagagtgctgggatttcagatgtgaatcactgcacccagccaggcctcagttcttaaagcattcctcttctcaatctctactcaccttcttggg

SEQ ID NO: 21545 - DNA, 201 bp, Homo sapiens
cccttccactcctgtcaccccagaatctctcagtggtaggagacagaaagggaacattcctctttgttatttcacccatctttccttctcatgcaccctayagccaaggactcttgagtccaggaaatcatagctggaaaatctgaaaaactgaaaaagtgaagcccttggccctcacttgcttcaaagtttttccaattc

SEQ ID NO: 21546 - DNA, 201 bp, Homo sapiens
agatgggatctcactgtgttacccaggctgctctcaatctcttggcttcaagtaatccccttgcctcggcctcccagagtgctgggatttcagatgtgaaycactgcacccagccaggcctcagttcttaaagcattcctcttctcaatctctactcaccttcttgggttcagccattcttttgacttcatttatatgcca

SEQ ID NO: 21547 - DNA, 201 bp, Homo sapiens
cacattcagctggggctaatgcatcagacagcacagatatgaatatttctctcattgcagaaagttctagacagtaatacagagctggcattggggcaaaycatctggtaaaaggagaagtggtgcaggtagtcaggacgtatggattctcaagctggccccataaccaagcctgtgactttttttttttttttttgagac

SEQ ID NO: 21548 - DNA, 201 bp, Homo sapiens
tggcaaagatcaaaaagttacatactatcttggcaagagtgtcaggaaatgggctctgtcatagactgcttgcaggtcaaagtataaattagtctatagasggcaatttggcagtatcagaattacagttctacatagctttgattcagcaaatccactcctaggtgtttatagcacagttatactcacacatgcaaactg

SEQ ID NO: 21549 - DNA, 201 bp, Homo sapiens
tgatgtctgtttctgttcagctggccgcccggatcctggaggcgcaccagaacgtggcccagatgcccctggtcgaagccaagctgcggttcatccaggcrtggcagtcactgcctgagtttggcctcacctactaccttgtcaggtgattacaatgttcacttgtttctcacactttccattcaattttaagtggctttt

SEQ ID NO: 21550 - DNA, 201 bp, Homo sapiens
cctaggtcataggcctgtgccctcgctgcaagcgaggttgggaatttgagttctgacttctagactgggattaagacataaagatttccacaaatattaargaggccattccaaggatgatgggcagccatgagtatgactgatatttgctacaatcatcaagatattttcaagttagaaaagcaaaatgcagaacaatat

SEQ ID NO: 21551 - DNA, 201 bp, Homo sapiens
cttccgcctcctcctccaccaccaccatcacagagccggtccagagtgatcctgcttggtgttcctgcctctaccctgatcccactaaattttcaacttakcagccagagggatccttttaaaatctaaatcagattttgtgaagcctctgctcaaaaccatctgggacaggtgtgacggcttatgcctgtaatcccagca

SEQ ID NO: 21552 - DNA, 201 bp, Homo sapiens
gatctcccaggctcaagcgatcctcccacctcagcctcccaagtagctaggatcacaggcacataccaccacacccagctaatttctattattttaaaaawttttttcttcaacttttattttaagttcaggggtacatgtgcaggtttgttacgtagtaaacatgtgccatggtggtttgctgcacagatcatcgcataa

SEQ ID NO: 21553 - DNA, 201 bp, Homo sapiens
agcgtggcatgcactgcccccctccatttgcaggaatggtcaaacaagatgggagtggctcagagagctggagttcttttttttttttttttttttttggktgagacagagtcttgctctgtcacccaggctggagtgcagtggcacgatcttggctgactgcaacctccacctcccgggttcaagcgattcttttgcctc

SEQ ID NO: 21554 - DNA, 201 bp, Homo sapiens
tgggaaaggaaattttaaaaggagggttttttttaggataactacatttccaaaaccagagggtaaacatcacatattgattttatgaaatctgtaacttyttttcggtttttttttttttggtttttttttttaagagatcgggtgtggggagggtggccggggtgggggggtgtctcactttgccgcccaggctggtct

SEQ ID NO: 21555 - DNA, 201 bp, Homo sapiens
ttgaaaacaggcaccagcctacattacagaatgaactttgaacaaggttcactttgaaagtttaatcagtgacctaggtgtagcaggagttacccactctwatataaaaattataaaatcttttgtttgcatataaaagtagtcatttctaattcagatttttaacttgaatgatagttatagggagtacttgatccactt

SEQ ID NO: 21556 - DNA, 201 bp, Homo sapiens
gggagagaaaagaggtttaattgactcctagttccacaggctatacaggaggcatggctggggaggcctcaggaaacttacaatcttagcggaaggtgaargggaagcaagcacatcttcacattgtgacaggagagggagagagtgaagggggaagtgccacacacttttaaaccatcagatctcatgagaactcactca

SEQ ID NO: 21557 - DNA, 201 bp, Homo sapiens
aaaactcatcagctatacattcacgatttgtgctcttatctatatatattgtgtatatgtatgggtgtgtatatatatgatacacatttatatacacacargtcactacataaaattacaagtttaaaaattaacctaggccaagaagaacgcttaaaaccagtcgaattctttagcacaatgcagatattttcaattgaa

SEQ ID NO: 21558 - DNA, 201 bp, Homo sapiens
gctttgggaggccgagatgggaaagatcacttgaggctgggagttcgagaccagcctgggcaacataatgagaccctgtctctacagaaaattaaaaaaamaaaaaacaaaaaaaaaaaaacgctgaactagccaggtgtgatggtgtgcacctgtagtttcagctactcagccagggatgatcagttgaggttcgaggtt

SEQ ID NO: 21559 - DNA, 201 bp, Homo sapiens
ggtgtccttaaaaaaaggaaaaggtaggctgggggcagtggctcatgcctgtaatcccagcactttgggaggctgaggcaggcagagcacctgagatcagsagttcgaggccagcctgaccaacatggtgaaaccccatctctactaaaagtacaaaacttagccaggcaaggtgatgggcgcctgtaatcccagctactg

SEQ ID NO: 21560 - DNA, 201 bp, Homo sapiens; identical to SEQ ID NO: 2862

SEQ ID NO: 21561 - DNA, 201 bp, Homo sapiens
gtcgggggaaaaaaaaaaaaaaccttgagtctttggtggcaagctaaatttcccagtaggtataatgctggacttcaacagggatgggacccattccaccrgtgacatctaatgtgactttaagtagcttggcattagactactgggttaactctctgttaatacttgagagcttagtgataaattggtgctgaggagttt

SEQ ID NO: 21562 - DNA, 201 bp, Homo sapiens
atctctggaaggtttcaggggaaacaggtaactattatctctagggaagggaactcaataatcaaggatgggaggaagatttaattatcactgtatactcycttgtaccctttgattaagaaggatgcaatgtaaggaaggagaacaggggatggaggagaagagggatggaaggagggaggcactgtgtttcttgcttct

SEQ ID NO: 21563 - DNA, 201 bp, Homo sapiens
gccctctctcattttacttaattgtgctttcatttttgcagatatatcccaagactggtcagactttgctctttggtgggaacagaagcattgctggcttytgaaaacccactggaccctggacaaatatggggtccaggcagatgcaaagcttctcttcacccctcagcataaaatgctgcgccttcgtctgccgaattt

SEQ ID NO: 21564 - DNA, 201 bp, Homo sapiens
cctgtgccctgtagactcttgcaaagctagacaggaaaattatgtgtgcattctgcctacttcaagtaattgctacagaacactcacctattaggaagcamatgtttaagcccttctgggtattgcagccatttaagtggagttaagccaagtggaacattattggcataaatcaggtacatctccacaaagcttaaaact

SEQ ID NO: 21565 - DNA, 201 bp, Homo sapiens
ttggtaatattctaatgaggatttgaaagcaaagtaaatgattacataaaatagtatattgcatacaccacagtggactggaagcacacatcacagctgakaccaaaaatgtaaagttttcaagtaaacagaagcagtcagatgttctcttttcctgattatctctttgtaatagttttaaaggctcagcgtggcatttct

SEQ ID NO: 21566 - DNA, 201 bp, Homo sapiens
tgctagtaatgactgaagctggggagcccatgaaggggacattataccattccctttgctttagatacatttgaaatatttttataataatttttctaacyagaaatttcactagactgaatctccctccaccgttttctccccccacctactttggaggtctctgttcccctttccccttctgtttcttcaaaagggatg

SEQ ID NO: 21567 - DNA, 201 bp, Homo sapiens
acgaaatgatgagagaacttaatggaatcagtgcacttaccttcaacaaagctgctcagaaactaaaagtccaaattaattggtttttacctggaatgatmgccactagtgtagttaaaggttatcagcaattctgatcagcaattataaatatatttgattaatgggagaaatggggattaccatagtttcagttcccag

SEQ ID NO: 21568 - DNA, 201 bp, Homo sapiens
ttcatttatatgccaattactctgaaatatatatcttgagcccagaactgtctcttgaactggagattcataaatccagtgacccttggatatctaatgarcatctcatctttacatgtccaaagttccggatcttccccctaaactggctccccgctacatacttcttcatctcagtagaaggcaactcctcgccctaga

SEQ ID NO: 21569 - DNA, 201 bp, Homo sapiens; identical to SEQ ID NO: 2869

SEQ ID NO: 21570 - DNA, 201 bp, Homo sapiens
ttccctcctaccctcccagccctgagtaatcatcagtctgttttctgtctctgtggatttgcctattctggaaacttcctataagtggaattacacaaaaygtggtactttatgaataatttttttcacttagcatagtattttcagaattcattcattcattcctattgtagcatgtatcatattttatgtctttttaat

SEQ ID NO: 21571 - DNA, 201 bp, Homo sapiens
ataaaccatttttactatctattactaccaatatgtagtaataaaagagagagaaaataatggaatcaaatttgggttgtgaagaagcagcagcagccctrgaagtaaaatgggccagagggccaggcgcagtggctcacgcctgtaattccagcactttgtggggctgagatgggtaggtcgtttgagcacaggagtttg

SEQ ID NO: 21572 - DNA, 201 bp, Homo sapiens
gcctgaggcaggagaatcgcttgaacccgggaggcgggggttgcagtgagccaagatcgtgccactgcactccagcttgggtgacagagcaagactcggtstcgggggaaaaaaaaaaaaaaccttgagtctttggtggcaagctaaatttcccagtaggtataatgctggacttcaacagggatgggacccattccaccg

SEQ ID NO: 21573 - DNA, 201 bp, Homo sapiens
cagcctggccagcatggtgaaaccctgtctctactaaaaatacaaaaattaaccgggcgtggtggcacacgcctgtaatctcagctacttgggaggctgargcagagaattgcttgaacccgggaggcagaggttgcagtgagctaagatcatgccactgcactccagcctgggtgacagagcaagactccatctcaaaaa

SEQ ID NO: 21574 - DNA, 201 bp, Homo sapiens
ttgcagataatctcaaattatttaggtaagtaaacttttatggggaaaaggagttactcataacaaagtcttgaagataaagagtgcaggagtttaaattrtatatccctgaggcaggttcatggttcaaaggtaaaatgtgcgctttgccatcagacaaacaatgggttgagtcgtagctctaccacacacaccagctag

SEQ ID NO: 21575 - DNA, 201 bp, Homo sapiens
tattattttaaatggtgccaaatttaaagtcaaaactcattttagtgtaagtaatgttaatattttcttgaagatttatatccctggattctcatatcatrgttcttgatccccctgccttgcagtaagtcctggtttatacagtaaaaccatgacccctatatatgaccccatcaatggaacaccagcatcatccaccat

SEQ ID NO: 21576 - DNA, 201 bp, Homo sapiens
taaatggtgccaaatttaaagtcaaaactcattttagtgtaagtaatgttaatattttcttgaagatttatatccctggattctcatatcatagttcttgmtccccctgccttgcagtaagtcctggtttatacagtaaaaccatgacccctatatatgaccccatcaatggaacaccagcatcatccaccatgacttggt

SEQ ID NO: 21577 - DNA, 201 bp, Homo sapiens
cggtctctggttgataaagccaagctcaatgcagggtaaggacacggctccttttacttctctctgagctagtgccgacacagtaagagatgggatgtcaygtttcattttcaagttggtaggcctagggattgtgctttatttgcaaaagttagtgctgattttagcaacaaaggggaaaaattcagcctttggtcattt

SEQ ID NO: 21578 - DNA, 201 bp, Homo sapiens
aggttgtcatggtttgaggctaggattttaattcccatgtagggatagaagatgaacctttcagtcctgtgtgaagcaggaagtgagaactgaagcgcctscctaaaggtggaaatgagcaaaggctgcccttctgttgaatgaaaaatagaaaaactacccattagccaaagaaagcagtaaggaagttcatccttgcat

SEQ ID NO: 21579 - DNA, 201 bp, Homo sapiens
gtgccgcctgggtgcacactcattctttctgtcactgcctcacctccaggaccattcccctttaccaactgttcagtccctacctgtcatttaaggcccarccacatgctgtctcctgctcaagtattaccttcaagatcggccccctccttgtagctctgtcctgacactttgctcactccaacatcacattgtcccttt

SEQ ID NO: 21580 - DNA, 201 bp, Homo sapiens
gctctgtcctgacactttgctcactccaacatcacattgtccctttatttgaggcttggtctcccccagcagactgtcaactcttttaggatggtgatttygtgttggtcatcctctttccccagtttttatttctcaactctagaactctactatgcattgtacaggaacccctagccacatgtggatatctaaatgtgg

SEQ ID NO: 21581 - DNA, 201 bp, Homo sapiens
ttgtctttgtagagctgcagacggaccttgagtgtattgttcttatgggggatctggagctaacagggtgatcacagagcagccggtgcatgtgaagagargttgatgtctgtttctgttcagctggccgcccggatcctggaggcgcaccagaacgtggcccagatgcccctggtcgaagccaagctgcggttcatccag

SEQ ID NO: 21582 - DNA, 201 bp, Homo sapiens
tggtctcccccagcagactgtcaactcttttaggatggtgattttgtgttggtcatcctctttccccagtttttatttctcaactctagaactctactatrcattgtacaggaacccctagccacatgtggatatctaaatgtggacaggattttaaattaattaaaattaaaatgtggcactaacagccacattcagctg

SEQ ID NO: 21583 - DNA, 201 bp, Homo sapiens
ctcctgagtagctggaactacaggctcatgcaaccatgcccagctaatttttatgtttttagtaaagacggggtttcactatattggccaggttggtctcraactactgacctcatgatcctcccacctcggcctcccaaagtgctgggattacaggcatgagccatcgcatctggccagaactgaagttcttaatgctga

SEQ ID NO: 21584 - DNA, 201 bp, Homo sapiens
ctggtcaccaattctattttcactgcacatctccccctgaagtctattagaataacaaatgaggggtgagataagtcctttgaacttctgcctcttccttscttctgatgagcccttttgaagagctgagagtcagcggtacaatggcccagtgtcgacgatataaactggatgactggtcctctgagtgcgcagggtcac

SEQ ID NO: 21585 - DNA, 201 bp, Homo sapiens; identical to SEQ ID NO: 2856

SEQ ID NO: 21586 - DNA, 201 bp, Homo sapiens
tcaagtgattctcctgcctcagcctctggagtagctgggattaacaggtgcgcaccaccacacctggctaatttttgtatttttagtagagacagggtttygccatgtaggccgggctggtctcgaactcctgacctcaggtgatcgcttgcatcagcctcccaaagtgctgagattacaggtgtgagctacagcacccga

SEQ ID NO: 21587 - DNA, 201 bp, Homo sapiens
agcccttttgaagagctgagagtcagcggtacaatggcccagtgtcgacgatataaactggatgactggtcctctgagtgcgcagggtcactgtgttgcaygctcccatcactgttttgtgcctgttgctcttttccatttactgccagacacttggaggagcttgccttggtcagcctttctgtacagaccctttctcat

SEQ ID NO: 21588 - DNA, 201 bp, Homo sapiens
tgctgctgataaagacatatctgagactgggcaatttacaaaagaaagaagtttaatggacttacagttccacatggctggggaggcctcacaatcatggmggaaggcaaggaggagcaagtcacgtcttacatggatggcagcaggcaaagagagagcttgtgcggggaaacaccctataaaaccatcagatctcatgag

SEQ ID NO: 21589 - DNA, 201 bp, Homo sapiens; identical to SEQ ID NO: 2858

SEQ ID NO: 21590 - DNA, 201 bp, Homo sapiens
ttttttattcttttatatgacttttaagtaaaagatttatatggatttgagtacggtcctgttgtgtcctctccaacctactgtctccaaaaaggtgactktttcctctcttatgaaaagggactgcaactctgaggtctaacatgtgtctctcctcacagcgccaagattccgggtcgttccctcccgtggtgtggggag

SEQ ID NO: 21591 - DNA, 201 bp, Homo sapiens
gtgaagacattctgtttcaagtttttaatgattttatttcaattataatatcctatatttgccaacaatgttcaactaacctttttaaattaaatgtactwtcaaacccataataattcctgaatatggtaatgtttaagcgaaaacagattcaacttctaaattttataacttctttattaaaatttaagtgttcacaag

SEQ ID NO: 21592 - DNA, 201 bp, Homo sapiens
tgtagccccagctactcgtgaggctgaggcaagagaatcgcttgaacctgggaggcagaggctgcagtgagccgagactgcaccactgcactaaagcctargtgatagagcaagactctggctcaaaaacaaaacaaaacaaagcagaacaaaatgcttcagtgagcatttcctttgagcctcaggtcagtgctcagaaag

SEQ ID NO: 21593 - DNA, 201 bp, Homo sapiens
acaaacaaactaactaacaaaggaaaagagcaggaaaggccatgtgatgatggagacagagacaggggtgatgcaggtgcaggccaaggagtcccaaagayggccagcaaacaccagaagccaggaagaggcaaggacggatccatccctgcgcccttcagagacagcatggccctgccgccatcttgattttggacttct

SEQ ID NO: 21594 - DNA, 201 bp, Homo sapiens; identical to SEQ ID NO: 2861

SEQ ID NO: 21595 - DNA, 201 bp, Homo sapiens
ttatcagcttattttcaaataagtgtgatggtttgtgtgacagtttggatcattgttcagcaaatattttctcccctctcctctcctaccatgggtggcayatactacctgcccacttactgttggacttggccgtttgacttcctttggcccagaggctgccactgtgcttttgcaatccttttgcactcctgcctccac

SEQ ID NO: 21596 - DNA, 201 bp, Homo sapiens
actccacccagtctgggcaacagagtgaaaccctgtctcaaaaaaaaaaaaaaaaattctaacgagagcctggagagcctgtctcgctcgttcttatgcasgtcattcaccacccagcatcgcctccgctgccccttcccctaccctgccccaggctttgctgcatagagcagcagcaatgattagctttgttaatgtgtc

SEQ ID NO: 21597 - DNA, 201 bp, Homo sapiens
acggtttacttacttctagaggaaccaccagaaccagtgtcactgttttccaaatgacagcctggctgcagctgctcttccaagcatgagccttgaatgcrgtctagtaaacatgattatttgcattctgctgttccatctttctcagtgtgtccagagtttatgatgtggtggtaattcatgtccaagagtatagcacat

SEQ ID NO: 21598 - DNA, 201 bp, Homo sapiens
gtgctgtaagatcctgaaaagttttctgtattccagaacagttatatttaattcagtgtcactttaatgcctattctaatttctgaaggtcactgtgagcrtcctgataaccatctattaattgaaatatttaattaaccagtacactcaactcacattattgtgacaatcagagaattccttctgctttgatttatttta

SEQ ID NO: 21599 - DNA, 201 bp, Homo sapiens
tggccgcccggatcctggaggcgcaccagaacgtggcccagatgcccctggtcgaagccaagctgcggttcatccaggcgtggcagtcactgcctgagttyggcctcacctactaccttgtcaggtgattacaatgttcacttgtttctcacactttccattcaattttaagtggcttttggggagccccagttttctcat

SEQ ID NO: 21600 - DNA, 201 bp, Homo sapiens
aggcgtggcagtcactgcctgagtttggcctcacctactaccttgtcaggtgattacaatgttcacttgtttctcacactttccattcaattttaagtggyttttggggagccccagttttctcatttagcatagaatatagaatgctttttatttgagaatattgcccttttataaatagtcctgacactttgggctgct

SEQ ID NO: 21601 - DNA, 201 bp, Homo sapiens
tccattcaattttaagtggcttttggggagccccagttttctcatttagcatagaatatagaatgctttttatttgagaatattgcccttttataaatagycctgacactttgggctgctcataaacattttccataccttctgttctaagttccaatacccctgaaactcagctaaatgtgggaaaggaaattttaaaag

SEQ ID NO: 21602 - DNA, 201 bp, Homo sapiens; identical to SEQ ID NO: 2875

SEQ ID NO: 21603 - DNA, 201 bp, Homo sapiens
cataatgtttatcattttaaccatttttagatgtacaattcagtagcattaaggatagtcacagtgttgtgcaactattaccactatccattttctctctyttttttttttttctgagatagtctctctctgtcacccaggctgtgatcatagctccctgtagcctcaaactcctgggctcaagcaatcctcccacctcag

SEQ ID NO: 21604 - DNA, 201 bp, Homo sapiens
gaatgccagggttgggcagtgggggctggtatggtatatgaagtagggtgagagcagaaaccgtttcctgagcatctctgcattcctcactccagtcacartgcctagcatacaataactgttgagtgaacaaatgaatggaaactttcattacagaatgtaagttgcagtcttgtccctggtgtgcaaatggcaagcatg

SEQ ID NO: 21605 - DNA, 201 bp, Homo sapiens
cctttttgttcagcagacaccagcatttgccacaatgctgtcatccactgactttacatttgcttcctgggagcttgtggtccgcgttgaccatcccaatraagagcagcagaaagacgtcacactgagagtatctggagaccttcatgttggaggagtgatgctcaagttagtagaacagatcagtaagttactcttgct

SEQ ID NO: 21606 - DNA, 201 bp, Homo sapiens
ctaaattttataacttctttattaaaatttaagtgttcacaagccttttaatgcaaatcgctaaagcctgtactatattgcatgaaatccctccgtggaakagcacgcattctatctctgtacctatttcacagatgaggaaactgtcatttccatgtctgttttattaaccactgtattctctgagcccaggcccattgg

SEQ ID NO: 21607 - DNA, 201 bp, Homo sapiens
ccccacttcgccagcgcccgctcctcggctcggcccggggtagtttgtagggacgcagctctccacgtgcgcgactgcgaggctggacgctacgggctccyggaaaggaggtgggtgctccggagctagggctggggagctagaggttgggaggctttcatgggcaccagtggctcctgagcccccttagcccctttcttt

SEQ ID NO: 21608 - DNA, 201 bp, Homo sapiens
ttactcataacaaagtcttgaagataaagagtgcaggagtttaaattatatatccctgaggcaggttcatggttcaaaggtaaaatgtgcgctttgccatsagacaaacaatgggttgagtcgtagctctaccacacacaccagctaggtgaccttgagcaatatattatgtctctgagcctccattttccaatctataaa

SEQ ID NO: 21609 - DNA, 201 bp, Homo sapiens
ctacgggctcctggaaaggaggtgggtgctccggagctagggctggggagctagaggttgggaggctttcatgggcaccagtggctcctgagcccccttascccctttctttctgcagcctcttgtacttaaatagctgttgattgaaaataatttcgtctggatgtgaccaccttctccggccctacgcatctggccgca

SEQ ID NO: 21610 - DNA, 201 bp, Homo sapiens
gtaagaggcactgtcttcttcttggtcctgactttaggtctggtctgcaaaggctcacctcagcttccactgtttccccaactgccatcttcaaaacaaaycttgtcccttgtcatttctaaggagaggttcctgctcagtccttgatttttatcctgtggaccaagcttgtgtctggaatgcataagtgaatcatggcaa

SEQ ID NO: 21611 - DNA, 201 bp, Homo sapiens
gttcatagtacatgctcagtgaatggcagcgtgaaccctcagtgaatggctgggttcacatcagcaataataaacacatccgccatactagagcttctagyaggttccatctgggaggctcagtacgctgataccatttgaaggcttataatttaaaagccatttctctctagaactttgatcctgggcttacagagagta

SEQ ID NO: 21612 - DNA, 201 bp, Homo sapiens
aaacaccccatgaaggtattctcattttataatttttgaaagtattataggtgtattcattggttccaaaaccaaaaatcaacatttgaacccagaatagrtaatatatagtgatatatagtgagtaatctatttttcccattaaaccataaactattcactcattcagcaaatatttattgagcacctactgtgtcccag

SEQ ID NO: 21613 - DNA, 201 bp, Homo sapiens
gcttgtgtctggaatgcataagtgaatcatggcaaaagggcaaattttggcttttcttcgataaaatctccaggagaaattactgtactgcttctcctacrcaattggcttggcttttttttaactctactgtgaatttgcaactgtccaggttttttgtttttgtttttgttttttcattgcctgctaaaaccaaatcca

SEQ ID NO: 21614 - DNA, 201 bp, Homo sapiens
ataaagcactttgaagactgtaagataaaatgcaaatataagctattattatgtgcttactgattttttgttatacaggttcagtatcccttatccaaaaygcttgagaccagaagtgttttgaatttcagaatttgttttttacactttttcaggtttggggatatttgcattatactcaccagttgagcatccctaatc

SEQ ID NO: 21615 - DNA, 201 bp, Homo sapiens
gcacctgatggatgataggatcactcagcccaaggactcatagggtccttggggacccttccagcagtttctttgccaagagactcccccgattcaatccsctgcttcagaactaagcttgagctaaaaagaatgcagctgagtcatctgccccctgaaaaaccattaggaacatgtaagtgacttcacagtcaaataagc

SEQ ID NO: 21616 - DNA, 201 bp, Homo sapiens
ctacaagacctttgctcttgaactcacatttctctcccctccttcactgtgtcagccacatgggcctcctggcaggtccttaagcacattaaaaaaaaaawttttttaagtggctgtgccctctgcctggaatactctttccccagatatccacgcggctcacatcctcatgcatatccattttttgatcaaatgtcacct

SEQ ID NO: 21617 - DNA, 201 bp, Homo sapiens
cattgttcagcaaatattttctcccctctcctctcctaccatgggtggcacatactacctgcccacttactgttggacttggccgtttgacttcctttggyccagaggctgccactgtgcttttgcaatccttttgcactcctgcctccactgtgagaacaggattccccaggtcatcacctgagccactgaatggaatcc

SEQ ID NO: 21618 - DNA, 201 bp, Homo sapiens
ataagccagataatggcagatcattggtataaatatagaggagcagggttaaatatgtatttgtctaaaaagtggaagaaatcaaacgaatcgtactccaraaggggacaaggacactgaagctgagggtcacaagggctgttgtctctggctctttggcctccagcctctgcccgcttaattggtgaggagctccctctt

SEQ ID NO: 21619 - DNA, 201 bp, Homo sapiens
gtgaggagctccctcttcatagcctaaaaagtgaaaccgatttgaatctaacagccacacagaaactgtcaacccaaaggtgacaggaagactcaggatartgggacatggcattggaggacactgtgatcctcaaccactttagtacttatggcagtattcccttccccctctctcaaaattatgagtgctatagataaa

SEQ ID NO: 21620 - DNA, 201 bp, Homo sapiens
aagactcctactctgtgctgcataaatagagggatatagaaattttagatgtaatttgtgttctcgtggcagctacaatcaaatctaagaagaagaaagarcacccatgaagccactgcaaatttacaaggcaccctacaagtagaaactaaaatctacagtgaggactagagagcttctctggctttcagagagattcat

SEQ ID NO: 21621 - DNA, 201 bp, Homo sapiens
actctgtctcaaaaaataaataaaataataataataataatagactcaaaaaatgaagaatccagaaaagattggtacattttaataaaaaatgaaaattktacatctggccaaaaaaaaaaaaaaaaactataacaaagtaaaagtctttacaacacatactacaaacaaaagatgaatttctctaatatgtaaagagct

SEQ ID NO: 21622 - DNA, 201 bp, Homo sapiens
gacttccccatttaaagattacagaaagtattccctcatgtgtccatctaataatagtcatggtttttctgtttagctgttttataatagctttttgagayataatttacatgccatacatttacctgtttaatatgtacaattcagtggtttttagtatattcagagttgtgcaaccattaaccaccatctaatttcaga

SEQ ID NO: 21623 - DNA, 201 bp, Homo sapiens
catacatttacctgtttaatatgtacaattcagtggtttttagtatattcagagttgtgcaaccattaaccaccatctaatttcagaacattttcatcacygcagtaagaaactccatacccattagcggtcactccccagttccctcctaccctcccagccctgagtaatcatcagtctgttttctgtctctgtggattt

SEQ ID NO: 21624 - DNA, 201 bp, Homo sapiens
aattcattcattcattcctattgtagcatgtatcatattttatgtctttttaatgctaactaatatttccttgtttatgtatactacattcattcatcaaycaatgaacatttggattgttttcactgtttgactattatgaataatactgccatgaatattcatgtatacatttgggattttttctttgacttttttatt

SEQ ID NO: 21625 - DNA, 201 bp, Homo sapiens
gcttgcatcagcctcccaaagtgctgagattacaggtgtgagctacagcacccgaccctattattttttctttttcttttttaattattttatctttaaakttttttatttgatttaattttttaaatgttttttattttactttaagttctgggatacatgtgcagaacatgcaggtgtgttatatacgtatacatgtac

SEQ ID NO: 21626 - DNA, 201 bp, Homo sapiens
gtatttaaggtaaaactatatattataatgactgaaataggaattattttgcttttttttattttttgagctttattatgggaagatatacatttttgtargaggaatgtaataatatacatatattaaagatattaaagataagaggctttaatggcatcctttttaaacatcaactttattgaagtataatttgcatac

SEQ ID NO: 21627 - DNA, 201 bp, Homo sapiens
agggtgatcacagagcagccggtgcatgtgaagagaggttgatgtctgtttctgttcagctggccgcccggatcctggaggcgcaccagaacgtggcccakatgcccctggtcgaagccaagctgcggttcatccaggcgtggcagtcactgcctgagtttggcctcacctactaccttgtcaggtgattacaatgttcac

SEQ ID NO: 21628 - DNA, 201 bp, Homo sapiens
tactttctttgcccctcaccccacacgctgtgagtcaggctttcccagttcaggcacctgatggatgataggatcactcagcccaaggactcatagggtcyttggggacccttccagcagtttctttgccaagagactcccccgattcaatccgctgcttcagaactaagcttgagctaaaaagaatgcagctgagtcatc

SEQ ID NO: 21629 - DNA, 201 bp, Homo sapiens; identical to SEQ ID NO: 2873

SEQ ID NO: 21630 - DNA, 201 bp, Homo sapiens
ctcaagtgatctgcccacctctgcctcccaaagtgctgggattacaggtgtgagccactgtgcccagccagaatttcattcctttttaaggctgaatagcrttctattgtatgtggacagcacattttatttatccattctgctgtttctaccttttggctattatgaatattgctgctgtaaacattgttgtacaagtat

SEQ ID NO: 21631 - DNA, 201 bp, Homo sapiens
ccaccagagggcgcaaagagagcaaagatgttttctggaagcgtttaatggaagtgatggttttctgtgtgttttagagggatatccatctgttatccacytcagcagccctcagctccaggggccagtccagcaaagcactttttttttcatcattccttgtcagagtttaagcttctctgtgccttcctcttccaggtg

SEQ ID NO: 21632 - DNA, 201 bp, Homo sapiens
acaccaaggttcctttcttctcccattcttgatgcagaagtccgcccctctggcatgagataccctgatctgcccccacggccaggtttcttccacaaacygcatactaataatttcttttctctgcctatctccaacccctgtcctccccctagctcattctcacgtttcctattttgaatgacccaacctttaggcctg

SEQ ID NO: 21633 - DNA, 201 bp, Homo sapiens
accagaacaaatttttaatttaaaatgctcctcataatccacacacgctcacatcctctgtaagacactagtcttgcaattattatctcttccctactgtkagcacaatcagtgatgagaaagagccagttgtaacatgactaaccatgaacctcagaacgattcaggttaaaatgtcattttccccacacgggaaggaga

SEQ ID NO: 21634 - DNA, 201 bp, Homo sapiens
gagcttctagtaggttccatctgggaggctcagtacgctgataccatttgaaggcttataatttaaaagccatttctctctagaactttgatcctgggctyacagagagtagtcaccttagtttatctacctgtttaagtacttctgataaactcctccatcacctcaggttgacctgaaactgctaaaaaggcagagaag

SEQ ID NO: 21635 - DNA, 201 bp, Homo sapiens
cacttctttgtgtccttggacctttttttttttttttgagatggagtctcgctctgtcaccaggctggagtgcagtggtgcaatctcggctcactgcaacytccacctcccaggttcaagtgattctcctgcctcagcctcccaagtagctgggactacaagtgcctgccaccacgcctggctaatttttttgtatttttt

SEQ ID NO: 21636 - DNA, 201 bp, Homo sapiens
cgttgtctgctgaaacacaggattttgcaggcgagtccgaggttgatgaaatagaagcggcgctttctaatttggaagtaaccctagaaggtggaaaagcrgacagccttttggtatgaactttttctgatcacccagaactgtggctttcttctgattgacaagtataaatgaacttttctttattagaagagaatattt

SEQ ID NO: 21637 - DNA, 201 bp, Homo sapiens
accttagtttatctacctgtttaagtacttctgataaactcctccatcacctcaggttgacctgaaactgctaaaaaggcagagaaggagttttatttttycatggaaataatgaactgccacctctgcaatggtgccagcgtatgttaggttgaaagaaacaaggctctttgaagtcctgtcagttccttatttcacttt

SEQ ID NO: 21638 - DNA, 201 bp, Homo sapiens; identical to SEQ ID NO: 4937

SEQ ID NO: 21639 - DNA, 201 bp, Homo sapiens
catggaaataatgaactgccacctctgcaatggtgccagcgtatgttaggttgaaagaaacaaggctctttgaagtcctgtcagttccttatttcactttrtggtttgttgacttttcttaaccaacgggcacttcactggggcagttggctttaaaggaaacacaagttgcttttgataacacatgatgcaaagaaagaa

SEQ ID NO: 21640 - DNA, 201 bp, Homo sapiens; identical to SEQ ID NO: 4938

SEQ ID NO: 21641 - DNA, 201 bp, Homo sapiens
tcgtgtaatcccagctactcgggaagctgaggcaggagaatcacttgaacctgggaggcagaggttgcagtgagctgagatcgcgccattgcactccagcmtgggcaacagagcaagagtccatctcaaaaataaataaacaaacaaacataataagaaagaaattatttagagtaaaaatggaaaacagttctgtatcat

SEQ ID NO: 21642 - DNA, 201 bp, Homo sapiens
aaaattagccggccgtggtggcacgtgcctgtaatcccagctacccgggaggctggggcatgaggaccgcttgaacccaagagacagaggctgcagtgagmcaagattgcgccactgcactccagcctgggtgacagagcaagacttcatctcaaaaaacaaaacaaaaaaaagaactgtcttaactacagccctcaacat

SEQ ID NO: 21643 - DNA, 201 bp, Homo sapiens
tgctgactaaacatgtaggtattcccagattgaacttatttagttctcacaaattaataattaaaattatgcttctataggagtgggttaaaagttgcacrgatgagctgattcatgtagaatcattgtctgtggacactccacagacctcagacagagggaccccagagctctccaactgcaccaactttagaagtttat

SEQ ID NO: 21644 - DNA, 201 bp, Homo sapiens
tcctccccctagctcattctcacgtttcctattttgaatgacccaacctttaggcctgccactggcaccaccaaccttgtctagtccactgtataaagttytctggccccaacagataccaataccacagctggatacctttccccaaaatagtttttaataacagtagagtctatattgactagctgtagatatcgctga

SEQ ID NO: 21645 - DNA, 201 bp, Homo sapiens
ttttcggtttttttttttttggtttttttttttaagagatcgggtgtggggagggtggccggggtgggggggtgtctcactttgccgcccaggctggtctmgaactcctgatctcaagcaatcctcccacctcagcctcccaaagtgctgggtttacaggcatgagccaccacacctggctacgactttctttcatgtcag

SEQ ID NO: 21646 - DNA, 201 bp, Homo sapiens
aatgcctattctaatttctgaaggtcactgtgagcgtcctgataaccatctattaattgaaatatttaattaaccagtacactcaactcacattattgtgrcaatcagagaattccttctgctttgatttattttaaagttcatatccacaattttttctatgagtttggagagccagcattaacctgaaaatgaactaaa

SEQ ID NO: 21647 - DNA, 201 bp, Homo sapiens
atgcttctgactatagaaacataaggaacggctgggcgtggtggcccacgcctgtaatgccagcactttgggaggccaaggcaggtggatcacgagatcargagttcaagaccagcctggccagcatggtgaaaccctgtctctactaaaaatacaaaaattaaccgggcgtggtggcacacgcctgtaatctcagctact

SEQ ID NO: 21648 - DNA, 201 bp, Homo sapiens
tcggcctcccaaagtgctggaattacaagtgtcagccaccacacctggtattttttttttttgacaaagtattgttctgtcgcccaggctcgagtgcgttkgtgcaatcttggctcactgcaacctgcatctcctgagttcaagggatctcctgcttcagcctcccaagtagctgggattacaggcatctgccactacgca

SEQ ID NO: 21649 - DNA, 201 bp, Homo sapiens
gaacacgggaggcagaggttgcagtgagctgagattacaccactgcactccagcctgggcaacagagtgagactccatctcaaaaaaaaaaaaaaaattaractgacatggtggtgcgcacctgtaatcccagctacttgggaggctgaggcaggagaatcgcttgaacccaggaggcagaagttgcagtgagccgagatc

SEQ ID NO: 21650 - DNA, 201 bp, Homo sapiens
gtcctcacaaaagccctgggttcccagactacgacggtccccatcacacagaggcagtgcacgcagcccaggtaagtgcaggatctttcccaggacacacrtgtagacagtagcagagccaggtgtggccccaggtggaggcttagtgttaaaatctacatcacatatcagcatttcatttccagcgcttggaaattagca

SEQ ID NO: 21651 - DNA, 201 bp, Homo sapiens
gtggtgcaatctcggctcactgcaacctccacctcccaggttcaagtgattctcctgcctcagcctcccaagtagctgggactacaagtgcctgccaccaygcctggctaatttttttgtattttttagtacagatggggtttcaccatgttagccaggatggtcttgatctcctgacctcgtgatccacccgcctcggcc

SEQ ID NO: 21652 - DNA, 201 bp, Homo sapiens
tccagctgggcgcggtggctcacgcctgtaatcctagcactttgggaggccaaagtggacggattgcctgagctcaagagttcaagaccactctgggcaaygtagcaaaaccccatctctactaaaaatacaaaaaaaaattagctgggcgtggtggtgtgcagctgtagtcccagctactcaggaggctgaggcactaga

SEQ ID NO: 21653 - DNA, 201 bp, Homo sapiens
tatttcatctgattttgaaaaaaaaaaaaaaaaaaagatgctcttcacctaacaagcttcaacctagtgaactaacttttcatgggttagctccacaaggkactatattttcatctctactaatgacaatacttttgtgttatatttcttcctagaggtaagttggcatggtgtgaaggagccactgctgagggctccact

SEQ ID NO: 21654 - DNA, 201 bp, Homo sapiens
atcatcagtctgttttctgtctctgtggatttgcctattctggaaacttcctataagtggaattacacaaaatgtggtactttatgaataatttttttcayttagcatagtattttcagaattcattcattcattcctattgtagcatgtatcatattttatgtctttttaatgctaactaatatttccttgtttatgtat

SEQ ID NO: 21655 - DNA, 201 bp, Homo sapiens
aagtgagaactgaagcgcctgcctaaaggtggaaatgagcaaaggctgcccttctgttgaatgaaaaatagaaaaactacccattagccaaagaaagcagkaaggaagttcatccttgcatggggttctgtgtggaaatgaaaagtatctcttgagaaatcagagccaaggctgtgtcacacacagatgtagatataattt

SEQ ID NO: 21656 - DNA, 201 bp, Homo sapiens
atctttacatgtccaaagttccggatcttccccctaaactggctccccgctacatacttcttcatctcagtagaaggcaactcctcgccctagatgttcargccaaatcctttggagtcattcttgactctgctctttctcttacaccaacatcctgcccataggcaactcctagtgactctaccttcaaagtacacacag

SEQ ID NO: 21657 - DNA, 201 bp, Homo sapiens
ctcacctactaccttgtcaggtgattacaatgttcacttgtttctcacactttccattcaattttaagtggcttttggggagccccagttttctcatttarcatagaatatagaatgctttttatttgagaatattgcccttttataaatagtcctgacactttgggctgctcataaacattttccataccttctgttcta

SEQ ID NO: 21658 - DNA, 201 bp, Homo sapiens
tgttatccacctcagcagccctcagctccaggggccagtccagcaaagcactttttttttcatcattccttgtcagagtttaagcttctctgtgccttccycttccaggtggtcatcgagtttgaccaaaacgtctttactgctttcacctgcctgagtgcagattgcaagattgtgcacgagtacattggcggctacatt

SEQ ID NO: 21659 - DNA, 201 bp, Homo sapiens
aaaatgaagtatgtaaatttagatgatttgagaccatttttataaaactttttgtcttcaaagttaagatgccaaatttgatatctggagcacctggaacyttgcagagtgttttgaagaggaggttacaatgaaaaacaaaacaaaaaagaaattttgctctgcaagtctactgacaagtcccgtttccttcccacattc

SEQ ID NO: 21660 - DNA, 201 bp, Homo sapiens
gggccagtccagcaaagcactttttttttcatcattccttgtcagagtttaagcttctctgtgccttcctcttccaggtggtcatcgagtttgaccaaaaygtctttactgctttcacctgcctgagtgcagattgcaagattgtgcacgagtacattggcggctacattttcttgtccacccgctccaaggaccagaatg

SEQ ID NO: 21661 - DNA, 201 bp, Homo sapiens
atggattgtctttgtagagctgcagacggaccttgagtgtattgttcttatgggggatctggagctaacagggtgatcacagagcagccggtgcatgtgargagaggttgatgtctgtttctgttcagctggccgcccggatcctggaggcgcaccagaacgtggcccagatgcccctggtcgaagccaagctgcggttca

SEQ ID NO: 21662 - DNA, 201 bp, Homo sapiens
cttcctcctttttgtgtctcatagtgtctcgtggtgtggctttgcagaattgttaggtttttagagaggtccccgcaagctctgtcttatttctacccagstttatcaggtagcaaccctgttctcactggtctctgaagatttctgggtctgaaggatgcataggaggcccatctattgcccccagaaagacagcttaag

SEQ ID NO: 21663 - DNA, 201 bp, Homo sapiens
accccaaaaatattaagtcacttcacctccactaagcctaagagcaaaacccaaaaatgttttcacaaatttagagcactattgtgtcactcagctattgytttgtaacaaacaatcacagtgtaacaaaatcacaatgacattctaacaataaacatttgccatgcagtggctcacacctgtaatcccagcactttggga

SEQ ID NO: 21664 - DNA, 201 bp, Homo sapiens
gtggtgtggctttgcagaattgttaggtttttagagaggtccccgcaagctctgtcttatttctacccaggtttatcaggtagcaaccctgttctcactgktctctgaagatttctgggtctgaaggatgcataggaggcccatctattgcccccagaaagacagcttaagtgacttgtccaagttcacccccagtccagg

SEQ ID NO: 21665 - DNA, 201 bp, Homo sapiens
ttctgaggatgaaaaacaggaactctgcatctcaggtggcttccagtctcgaaaacatggatatgaacccagaatgttttgtgtcaccacggtgtgcaaaragacacaaatccaaacaggtactgttaatcttgttagggcaattgtttgcagtaaattctttatgcaaacagaaataaaaggaggatttccggctgggca

SEQ ID NO: 21666 - DNA, 201 bp, Homo sapiens
ccctgcatcctcatttgttatccccgcctagcactatggctctgccccactgtatacaatggatggtttcccaaaacatatccacaagcatgcttgtaaaycaaattacattcttcagttcagaaaaggagactgatgcttaagcaaaatctacccccaatcctacagtacagcaagtactgtcactttctcatcttataa

SEQ ID NO: 21667 - DNA, 201 bp, Homo sapiens
ctgaggatgaaaaacaggaactctgcatctcaggtggcttccagtctcgaaaacatggatatgaacccagaatgttttgtgtcaccacggtgtgcaaaaaracacaaatccaaacaggtactgttaatcttgttagggcaattgtttgcagtaaattctttatgcaaacagaaataaaaggaggatttccggctgggcatg

SEQ ID NO: 21668 - DNA, 201 bp, Homo sapiens
tcctattcactgaaatatctcattgaatatcagtccccaacgtttgtcccaaacaagcaactccttctgctttacttaccccaacaaaggagtgaggaagsgcggagtcgtactggatacccactatgtgcgcgcatatgtgtccatgtgcggacacacacacactcacctgtaaccctgaagtcaaccccgcatagtgaa

SEQ ID NO: 21669 - DNA, 201 bp, Homo sapiens
aaaaccacataaatacttgaactgaccaggcccagctttcagtctcacctctgcctctgctagctctgtgacccgggcatttttgctgcgctccccaagcrcagcttctccatgtgtccagtgggctctccgaacctactgtgttgagagaatccagtgcagcctgcaagcaaagtgcctgatacgtggtgaagcgtggtg

SEQ ID NO: 21670 - DNA, 201 bp, Homo sapiens
caggcccagctttcagtctcacctctgcctctgctagctctgtgacccgggcatttttgctgcgctccccaagcgcagcttctccatgtgtccagtgggcwctccgaacctactgtgttgagagaatccagtgcagcctgcaagcaaagtgcctgatacgtggtgaagcgtggtgtgggcctgaacaactttccggtgaca

SEQ ID NO: 21671 - DNA, 201 bp, Homo sapiens
cattttgaatgaatttatttgattccatcttatttttcttctctctgatgtcagttttacttaaagaccatctgcaggatagccttcattcttttttcacrctgtctatatcccaataaaaatgcccccctgcagaaagttaattcttcattgtccattcctctgaaatgattcagaaatactggtagtatttttaagaag

SEQ ID NO: 21672 - DNA, 201 bp, Homo sapiens
ggccaagcctgtatcatggaaaattccagatgaagttagaggcagcttagcatcctgccgctaatttaaaacattctgcccagtgctttgggaggccgagrtgggaaagatcacttgaggctgggagttcgagaccagcctgggcaacataatgagaccctgtctctacagaaaattaaaaaaaaaaaaaacaaaaaaaaa

SEQ ID NO: 21673 - DNA, 201 bp, Homo sapiens
ggtgcccaacacagagtcagtaatcattttgaatgaatttatttgattccatcttatttttcttctctctgatgtcagttttacttaaagaccatctgcargatagccttcattcttttttcacgctgtctatatcccaataaaaatgcccccctgcagaaagttaattcttcattgtccattcctctgaaatgattcaga

SEQ ID NO: 21674 - DNA, 201 bp, Homo sapiens
ttccccacacgggaaggagacctctgtttaggagatgttcagtattccaagggaatagtcctcaaagaaaaaaatggctaatggattcatttatatttatracatttctgtttataacatttctaaaacgtctgttttcattttagtaccacattagcaaactgtcgttgtctgctgaaacacaggattttgcaggcgagt

SEQ ID NO: 21675 - DNA, 201 bp, Homo sapiens
cactgcactccagcctgggtgacagagcaagacttcatctcaaaaaacaaaacaaaaaaaagaactgtcttaactacagccctcaacatgataaataccarttttttggtttttgtttgtttgtttgagacgaagtcttgctctgtcacccaagctggagtgcggtggcgtgatctcggctcactgcagcctccgcctcct

SEQ ID NO: 21676 - DNA, 201 bp, Homo sapiens
gcagtggtgcaatctcggctcactgcaacctccacctcccaggttcaagtgattctcctgcctcagcctcccaagtagctgggactacaagtgcctgccaycacgcctggctaatttttttgtattttttagtacagatggggtttcaccatgttagccaggatggtcttgatctcctgacctcgtgatccacccgcctcg

SEQ ID NO: 21677 - DNA, 201 bp, Homo sapiens
gtccttggcccagcagcatttgtcagaaaggcagaatctcacagggccaggactagggtggcacaggtgaggcatcccgggcacagcatttaaggaggccytcactgtcagggtcgtacagggcacctcctcggctcaccctaatcccagctctgaggtccacccagacctttctgagtcagagtctgccttttaacaaga

SEQ ID NO: 21678 - DNA, 201 bp, Homo sapiens
agcagtgtgttaagcagcatcattgtggaatagctgactaatgcaggatgagatatccccaaaaaggagaataagaaatctatcccattctagcggtatcytaagacacagctgatggcatttcagagtgtgtctttctcatctttataccatcctgtctcctggtttttgtttttgtattttaataagctatctattaag

SEQ ID NO: 21679 - DNA, 201 bp, Homo sapiens
cttgagtctttggtggcaagctaaatttcccagtaggtataatgctggacttcaacagggatgggacccattccaccggtgacatctaatgtgactttaartagcttggcattagactactgggttaactctctgttaatacttgagagcttagtgataaattggtgctgaggagtttttcaacacttatccaccgtttac

SEQ ID NO: 21680 - DNA, 201 bp, Homo sapiens
ttcattttgcaaaataaaagattgaaaattgactccaatattgatgaagggtaaagattctattttaatgccaacgttaaaggaggggaaagattgacatyggtgctaacattgaaagggagaaaatattttaactctgacttcaatttggacactttggatatggtggtactgataaagagttggagattactgagaaga

SEQ ID NO: 21681 - DNA, 201 bp, Homo sapiens
aacaaacaaactaactaacaaaggaaaagagcaggaaaggccatgtgatgatggagacagagacaggggtgatgcaggtgcaggccaaggagtcccaaagrcggccagcaaacaccagaagccaggaagaggcaaggacggatccatccctgcgcccttcagagacagcatggccctgccgccatcttgattttggacttc

SEQ ID NO: 21682 - DNA, 201 bp, Homo sapiens
tttgggaggccgaggcgggcagatcacaaggtcaggagatcgagaccatcctggccaacatagtgaaaccccatctctactaaaaatacaaaaattagccrggcatggtggcacatgcctgtaatcccagctactcaggaggcggaggcaggagaaccccttgaaccagggagttggaggttgcagtgagccgagatcgtg

SEQ ID NO: 21683 - DNA, 201 bp, Homo sapiens
tgcccagtgctttgggaggccgagatgggaaagatcacttgaggctgggagttcgagaccagcctgggcaacataatgagaccctgtctctacagaaaathaaaaaaaaaaaaaacaaaaaaaaaaaaacgctgaactagccaggtgtgatggtgtgcacctgtagtttcagctactcagccagggatgatcagttgaggt

SEQ ID NO: 21684 - DNA, 201 bp, Homo sapiens
gaatcgcttgaacctgggaggcagaggttgcagtggcccgagatcgtgccactataccccagcctgggtgacagagagagactccatctcaaaaaaaaaawaaaaataaaaataaagtgcctgcgaagcaccctgcccctcaacacagggagacagagagtgcttgggcaaaatccttgtatctaaactgtagacagaaaa

SEQ ID NO: 21685 - DNA, 201 bp, Homo sapiens
tatgattttttgttttttggtggagatgtgggtctccttatgccgcctgagctggtcttaaactcctgggctcgagcaatcctactgtcttggcctcctargtgttgagattacaggcctgaaccaccacacccagttgatttacctttttgaaggtactagttcaaaggtgagtttatcagtgtatgggtaattgacaac

SEQ ID NO: 21686 - DNA, 201 bp, Homo sapiens; identical to SEQ ID NO: 2880

SEQ ID NO: 21687 - DNA, 201 bp, Homo sapiens
ttattttccttcatcttatctggcatatgtacctcatacttatgatcttctccctcccacagtcagaaattttccatccgtttagtttactactatatctyccatgcctagaagggtgcccaacacagagtcagtaatcattttgaatgaatttatttgattccatcttatttttcttctctctgatgtcagttttactta

SEQ ID NO: 21688 - DNA, 201 bp, Homo sapiens
cctgtatcatggaaaattccagatgaagttagaggcagcttagcatcctgccgctaatttaaaacattctgcccagtgctttgggaggccgagatgggaargatcacttgaggctgggagttcgagaccagcctgggcaacataatgagaccctgtctctacagaaaattaaaaaaaaaaaaaacaaaaaaaaaaaaacgc

SEQ ID NO: 21689 - DNA, 201 bp, Homo sapiens
tcatggaaaattccagatgaagttagaggcagcttagcatcctgccgctaatttaaaacattctgcccagtgctttgggaggccgagatgggaaagatcayttgaggctgggagttcgagaccagcctgggcaacataatgagaccctgtctctacagaaaattaaaaaaaaaaaaaacaaaaaaaaaaaaacgctgaact

SEQ ID NO: 21690 - DNA, 201 bp, Homo sapiens
taaaacattctgcccagtgctttgggaggccgagatgggaaagatcacttgaggctgggagttcgagaccagcctgggcaacataatgagaccctgtctcyacagaaaattaaaaaaaaaaaaaacaaaaaaaaaaaaacgctgaactagccaggtgtgatggtgtgcacctgtagtttcagctactcagccagggatgat

SEQ ID NO: 21691 - DNA, 201 bp, Homo sapiens
acaagtgatttcaatgggcagccaaggttgtgaaccagcaaagtctctaagtctttcttctagtgcttagagtttatgacttgcagctaggaaagggttcsgggcagtggctgtaggaaaattcaggcagacttttattcattaaagagcctgcaggccgggtgcagtggctcacgcctataatcccaacactttgggggt

SEQ ID NO: 21692 - DNA, 201 bp, Homo sapiens
ggtggcacacacctgtaatcccaactacttgggaggctgaggcatgagaatcgcttgaacctgggaggcagaggttgcagtggcccgagatcgtgccactrtaccccagcctgggtgacagagagagactccatctcaaaaaaaaaataaaaataaaaataaagtgcctgcgaagcaccctgcccctcaacacagggagac

SEQ ID NO: 21693 - DNA, 201 bp, Homo sapiens
aagcaccctgcccctcaacacagggagacagagagtgcttgggcaaaatccttgtatctaaactgtagacagaaaatgtgttgggagtttttttaaccagrcgtgcagcaaagtcgacaccaccagagggcgcaaagagagcaaagatgttttctggaagcgtttaatggaagtgatggttttctgtgtgttttagaggga

SEQ ID NO: 21694 - DNA, 201 bp, Homo sapiens; identical to SEQ ID NO: 2864

SEQ ID NO: 21695 - DNA, 201 bp, Homo sapiens
cagcctaggcgacacagtgagactgtctctaaaacaaaaacaaaacaacagaaaaaacagactttcctattcactgaaatatctcattgaatatcagtccycaacgtttgtcccaaacaagcaactccttctgctttacttaccccaacaaaggagtgaggaagcgcggagtcgtactggatacccactatgtgcgcgcat

SEQ ID NO: 21696 - DNA, 201 bp, Homo sapiens
gtggctcaaacctgtaatcccagcactttgggaggctgaggcgggcggatcacctgaggtcaggagttcgagaccagcctggccaagatggtgaaaccccmtctctactaaaaataccaaaattagccaggcgtggtggcacatgcctgtagtcccagctacttgggaggctgaggcaggaggaccacttgaagaggtgaa

SEQ ID NO: 21697 - DNA, 201 bp, Homo sapiens; identical to SEQ ID NO: 2876

SEQ ID NO: 21698 - DNA, 201 bp, Homo sapiens
ggtttatctttaaagacacatccatagcatactttaaaaataaggaacttgaacaaggagaaccactagaaaaactaaatcttagaggtaagagtaccctrtatcttgctgtggctcatcgtaagtcagggcagacgcggtggctcaaacctgtaatcccagcactttgggaggctgaggcgggcggatcacctgaggtca

SEQ ID NO: 21699 - DNA, 201 bp, Homo sapiens; identical to SEQ ID NO: 2877

SEQ ID NO: 21700 - DNA, 201 bp, Homo sapiens
gccaagatcgtgccactgcactcctgcctggggacagaacaagactccatctcaaaaaaatatatgtgtgtgtgtgtgtgtgtgtgtgtgtgtgtgtgtgttgtgtgcgcgcgcgcgcgcgcgcactgaccacagtctaagttctaatgggccataagcagggtttcatgatgttaagaggtagggaagtgggaccagatg

SEQ ID NO: 21701 - DNA, 201 bp, Homo sapiens
gatttagcttgatacttacttatgagaaactactggagatgtaactgctatgcaaaataaatccaaaaaaagcctcatctgactggctgccaagaaaccckatggaggactggaagattcagttgctcacctggagagcattccaggcccaaaagggaaaaactgctgaagaagaaagtgaggtccatagtgatgactgag

SEQ ID NO: 21702 - DNA, 201 bp, Homo sapiens
aaactttttgtcttcaaagttaagatgccaaatttgatatctggagcacctggaaccttgcagagtgttttgaagaggaggttacaatgaaaaacaaaacaaaaaagaaattttgctctgcaagtctactgacaagtcccgtttccttcccacattccaatctatgtctgcctttttgttcagcagacaccagcatttgcc

SEQ ID NO: 21703 - DNA, 201 bp, Homo sapiens
tgtaactgctatgcaaaataaatccaaaaaaagcctcatctgactggctgccaagaaacccgatggaggactggaagattcagttgctcacctggagagcrttccaggcccaaaagggaaaaactgctgaagaagaaagtgaggtccatagtgatgactgagaaaagcttcacctcttaaaaccaggagccctcaaacccc

SEQ ID NO: 21704 - DNA, 201 bp, Homo sapiens
ccaagatcgtgccactgcactcctgcctggggacagaacaagactccatctcaaaaaaatatatgtgtgtgtgtgtgtgtgtgtgtgtgtgtgtgtgtgtkgtgtgcgcgcgcgcgcgcgcgcactgaccacagtctaagttctaatgggccataagcagggtttcatgatgttaagaggtagggaagtgggaccagatga

SEQ ID NO: 21705 - DNA, 201 bp, Homo sapiens
tcaagagatgtgttgatggacataaatggggccggtaacagggaaggcaaattaagttcaaaaatatagacagctatgactgcaccactgcactccagccsgggcgacaaagcacgaccctgagaaaattttattctctaaaaataaaattttaaaataaatatataaatatatatataatataaataaataaatatatat

SEQ ID NO: 21706 - DNA, 201 bp, Homo sapiens
aaaataaggaacttgaacaaggagaaccactagaaaaactaaatcttagaggtaagagtaccctatatcttgctgtggctcatcgtaagtcagggcagacrcggtggctcaaacctgtaatcccagcactttgggaggctgaggcgggcggatcacctgaggtcaggagttcgagaccagcctggccaagatggtgaaacc

SEQ ID NO: 21707 - DNA, 201 bp, Homo sapiens
aggttaaaatgggatggatagtaccccaaaaaagagaaaaagtatgagcaggattgggaatgccagggttgggcagtgggggctggtatggtatatgaagyagggtgagagcagaaaccgtttcctgagcatctctgcattcctcactccagtcacaatgcctagcatacaataactgttgagtgaacaaatgaatggaaa

SEQ ID NO: 21708 - DNA, 201 bp, Homo sapiens; identical to SEQ ID NO: 2885

SEQ ID NO: 21709 - DNA, 201 bp, Homo sapiens
ataattcaaggtcacacataaaatcttgaccacaggctgggcacggtggatcacacctgtaatcttaacactttgggaggccgaggcaggtagatcacaargtcaagagatcaagaccatcctggccaacatcatgaaacctggtctctactaaaaatacaaaaattgtagtcccagctgctcgggagactgaggcaggag

SEQ ID NO: 21710 - DNA, 201 bp, Homo sapiens
tagtccctattttccatttttttttttttgagacagagatttgctcttgttgcccaagctgtaatataatggtgtgacctcggctcattacaatctccacytcccgggttcaagtgattctcctgcctcagcctctggagtagctgggattaacaggtgcgcaccaccacacctggctaatttttgtatttttagtagaga

SEQ ID NO: 21711 - DNA, 201 bp, Homo sapiens
agcagaagcctctgattctgatggctgagtgttgagggcactttgctttagtgacatgcagtttatagatatccctttgtgcaattctcctgtcagcccayagagggtagaaatggcttcctctacaaaggagaaaggttcagaaggtgaacttgcccagggtcacactgccaatgagcagtgtttgtcttgactccagaa

SEQ ID NO: 21712 - DNA, 201 bp, Homo sapiens
agaatcgcttgaacctgggaggcagaggttgcagtggcccgagatcgtgccactataccccagcctgggtgacagagagagactccatctcaaaaaaaaawtaaaaataaaaataaagtgcctgcgaagcaccctgcccctcaacacagggagacagagagtgcttgggcaaaatccttgtatctaaactgtagacagaaa

SEQ ID NO: 21713 - DNA, 201 bp, Homo sapiens
tcccagcactttgggaggccaaggcaggaggcttacccgagcccaggagttcaagaccagcttgggcaacacagcaagaccccatctctacaaagattttwaaaaattagctgggcatggtggcacatgcctgtagtcctagctacttgggaggctgagatgagaggatcccttgagctccaggagttcaaggtggcagtg

SEQ ID NO: 21714 - DNA, 201 bp, Homo sapiens
tctccaacttactctgtgagctccaaaaacacccataattccccatgtgctgcagtgtcttcagtcatcacagaggaaaagtcctatagccgcttctcccyagccactgcaaatgacaaaagctgcatggggacttaacaggatagtgtctctcttcttcacccctggaagttgggcggggaggcctctggctgccctctg

SEQ ID NO: 21715 - DNA, 201 bp, Homo sapiens
tgaactgactagacagggagaaacagggattcaaggagtgaaggagtggagaggtggcagaactcatgtggtttccagcttgaggtttctattttcttttyttttttttttttttttttttttcttgagacacagtttcactctgtcacctaggctggggtacagtggcacgatcttggctcaatgcaacctctgcctccc

SEQ ID NO: 21716 - DNA, 201 bp, Homo sapiens; identical to SEQ ID NO: 2865

SEQ ID NO: 21717 - DNA, 201 bp, Homo sapiens
ctttggcccagaggctgccactgtgcttttgcaatccttttgcactcctgcctccactgtgagaacaggattccccaggtcatcacctgagccactgaatrgaatccatgtagcagatctaaatggagtccacagcctggagccaagccgagctagatcagctgacccacagacaatttgtgtgggaacaaattcttgtta

SEQ ID NO: 21718 - DNA, 201 bp, Homo sapiens
cgcctgctcgccctggctccagccctcacctgccgcagccttagctgagcagccgccgccactgggcgccccccgctccccacttcgccagcgcccgctcstcggctcggcccggggtagtttgtagggacgcagctctccacgtgcgcgactgcgaggctggacgctacgggctcctggaaaggaggtgggtgctccgga

SEQ ID NO: 21719 - DNA, 201 bp, Homo sapiens
tgttggtttccattttcgcacacaatgaaattgactctgcagctccaggaccctccaagctgggccctctctcattttacttaattgtgctttcatttttrcagatatatcccaagactggtcagactttgctctttggtgggaacagaagcattgctggcttctgaaaacccactggaccctggacaaatatggggtcca

SEQ ID NO: 21720 - DNA, 201 bp, Homo sapiens
ctgactttacatttgcttcctgggagcttgtggtccgcgttgaccatcccaatgaagagcagcagaaagacgtcacactgagagtatctggagaccttcaygttggaggagtgatgctcaagttagtagaacagatcagtaagttactcttgctttacggtttctctgtattagaaaccctgtctgttgcatcaccactaa

SEQ ID NO: 21721 - DNA, 201 bp, Homo sapiens
ggggagcattaattcccggaatatgtgggctgttgcagtgcagaccctggtgagccatcagagcaaagcctctggcagaaagatgcatggtctagattccrccagaagccaggtgtgctgaaatggtgaggaccaagaagaaatgggcagggcatgagggtgtcaccacagggataaaatgagctgatgggcaatgtgtaa

SEQ ID NO: 21722 - DNA, 201 bp, Homo sapiens
ctaatgtgactttaagtagcttggcattagactactgggttaactctctgttaatacttgagagcttagtgataaattggtgctgaggagtttttcaacayttatccaccgtttactatgctccctgtttaaacaaagaaagaaatcttcagggttacactcttcaccttgtagcgtgtcagatgtcaacattatcaacct

SEQ ID NO: 21723 - DNA, 201 bp, Homo sapiens
cctcccgggttcaaacaattttcctgcctgcctcagcctcccaagtagctgagattacagccatgtgccacaacacctggctaatttttgcgtttttagtrgagacagggtttcaccatgttgcccaggctggtctcaaactcctgacctcaggtgattcacccgccttggcctcccaaggtgctggaattacaggtatga

SEQ ID NO: 21724 - DNA, 201 bp, Homo sapiens
cctcaggttgacctgaaactgctaaaaaggcagagaaggagttttatttttccatggaaataatgaactgccacctctgcaatggtgccagcgtatgttargttgaaagaaacaaggctctttgaagtcctgtcagttccttatttcactttatggtttgttgacttttcttaaccaacgggcacttcactggggcagttg

SEQ ID NO: 21725 - DNA, 201 bp, Homo sapiens
gacagccggccatggtgactcacacctgcaatcccaacaatttaggaggctaagatgggaggatggcttgagcccaggagttcaagaccagctcaggcagytaaatttaaaaattagccaggcacggtggttcacacctgtagtcccagcttgggagcctgagacatcaaggctgcagtgagccatgatcatgccactgca

SEQ ID NO: 21726 - DNA, 201 bp, Homo sapiens
gtccaagttcacccccagtccagggcacacttggcataaagccctgcatcctcatttgttatccccgcctagcactatggctctgccccactgtatacaayggatggtttcccaaaacatatccacaagcatgcttgtaaatcaaattacattcttcagttcagaaaaggagactgatgcttaagcaaaatctacccccaa

SEQ ID NO: 21727 - DNA, 201 bp, Homo sapiens
actgccctccagcctaggcgacacagtgagactgtctctaaaacaaaaacaaaacaacagaaaaaacagactttcctattcactgaaatatctcattgaayatcagtccccaacgtttgtcccaaacaagcaactccttctgctttacttaccccaacaaaggagtgaggaagcgcggagtcgtactggatacccactatg

SEQ ID NO: 21728 - DNA, 201 bp, Homo sapiens
ggactcaatgcaaataaaaatatattttaggtgtctgttgccgttttgaagtcatcagacttctagcaggtttataagctgaaaacttaatagagaacttyatattgggtaaatatttatcaaaatcatcaatcaggaaaaaaaaatccacttcttttctccttcaagcagctttcttattctacctaaattaactctata

SEQ ID NO: 21729 - DNA, 201 bp, Homo sapiens
gttcctcacatacaccatcacagttaacacttcagttgcatcaggtgttgtgataagctcttcatgtagatgaactcattctgtcctcacaaaagccctgsgttcccagactacgacggtccccatcacacagaggcagtgcacgcagcccaggtaagtgcaggatctttcccaggacacacgtgtagacagtagcagagc

SEQ ID NO: 21730 - DNA, 201 bp, Homo sapiens
gaacccagaatagataatatatagtgatatatagtgagtaatctatttttcccattaaaccataaactattcactcattcagcaaatatttattgagcacytactgtgtcccaggcattgtggtgagtgctagggatatagtagcaatacagagctaaaatccctgccacctggagcttacattttagcaggcagagacag

SEQ ID NO: 21731 - DNA, 201 bp, Homo sapiens
ggccgtttgacttcctttggcccagaggctgccactgtgcttttgcaatccttttgcactcctgcctccactgtgagaacaggattccccaggtcatcacytgagccactgaatggaatccatgtagcagatctaaatggagtccacagcctggagccaagccgagctagatcagctgacccacagacaatttgtgtggga

SEQ ID NO: 21732 - DNA, 201 bp, Homo sapiens
gacatagaacaataagtaaatcgaatacatggcaataattattaatgacctgtatctatatgtatttaaggtaaaactatatattataatgactgaaatargaattattttgcttttttttattttttgagctttattatgggaagatatacatttttgtaggaggaatgtaataatatacatatattaaagatattaaag

SEQ ID NO: 21733 - DNA, 201 bp, Homo sapiens
ttgcctcggcctcccagagtgctgggatttcagatgtgaatcactgcacccagccaggcctcagttcttaaagcattcctcttctcaatctctactcaccytcttgggttcagccattcttttgacttcatttatatgccaattactctgaaatatatatcttgagcccagaactgtctcttgaactggagattcataaat

SEQ ID NO: 21734 - DNA, 201 bp, Homo sapiens
tttctagatattagaagatcagaagagctttccttgttaaagccgtctggtgactattttaagaagaagaagaaaaaagacaaaaataataaggaacccayaattgaagatattctaaacctggagagttctccaacagcttcaggttcatcaggtaagacttgttacaggtgttttgttgtttgaacgtacagtaaaact

SEQ ID NO: 21735 - DNA, 201 bp, Homo sapiens
acgtagaagaagatgtattttaaaaatgaaagaaaagccctgcagtcaatcacagatgagtgcatatagcaagcacacaaaatgtccggggggcctgcagrtacagtgttggagacactaaagcctagaatgacttaatggtcatcagagatgttaaggaccacaaaatgcagtgtgtggctatgtttaggcacaaagaga

SEQ ID NO: 21736 - DNA, 201 bp, Homo sapiens
agtaatcaacatctttgctctgtgtataatgctttcaccccaaattatggcaaagtaccagatggaccatttgcagcaactaagtaaattcaagcgctgtwtaaattcctatacctttttttttttgagttctgtatcgcatatggaggaaagcacaaatatttattcaccatccttgtttataagtacagtgtgggaaat

SEQ ID NO: 21737 - DNA, 201 bp, Homo sapiens
aagattgttatcaagtgtactactttttagccttaattgatgtagacatttatttaaaaatattctttagttatggatttactttatataagttggatttkttttctgaataaatctgatccatgcagtattttgtctagccagtagacaaaccatgcatagctgaaccatatggaagagcctggaatttatggtaaaatg

SEQ ID NO: 21738 - DNA, 201 bp, Homo sapiens
gttatctagacttttgaaattgaagagggcttctttttatctctacttcagttcttatatgccttctaaataccaggtattgtggtaggcactagggacasaaaaactaagaagaaatcgactctgtcctcatagaactcatcatccagtatgggattccagcttgcaaaaaagtgtagtaggaccagttaaaatagacgt

SEQ ID NO: 21739 - DNA, 201 bp, Homo sapiens
attacagacatgagccacgcactcgacttaatcttgtcttttagttccgttttttttttttctgagtttcatcactttcttctcactcgttcatgtttttkgtccgtgtcttttcttagttttggaatttctggctcaaggtggcttttcgcatccctcatcctgcctatttctttatctgtattttattctctattttgg

SEQ ID NO: 21740 - DNA, 201 bp, Homo sapiens
ttagcaggtggaaaaaagggaagagaaggtgattataattcttctaatgtgccaaaaattcacattctttatatatactaactcatttaatcttcacatctttgatgcccacaataatgtgtcagtcacgtagaggatgttttgaatgggggcaaaaccaaaggcaacgaaagtagtttattataataccctggttgagaa

SEQ ID NO: 21741 - DNA, 201 bp, Homo sapiens
tattaaaagagaccaggtcctttctgtagaaccctgagcaaatgtgtattgattaacttaattaaaggaagattatgacttgtgcactgcactgtgtgttrtcttactgtatggtttaagggatctttaaagcatatgtgctaatggccttctcttttaaaccagcgtgaatctgaggttatttcattaatgtggtaagca

SEQ ID NO: 21742 - DNA, 201 bp, Homo sapiens
tttttttggatttagggattgctccccatgccaaaaaacccctacgggcacacctcctagcccagctaatttaaaacaaacaaacaaaccaacaaaagaatttttttttttttttttttgttagagatggtatctcactttgttgcccagactggtcttgaactactggcttcaagcagtcctcctgcctttatctcccga

SEQ ID NO: 21743 - DNA, 201 bp, Homo sapiens
gcgtaggagcagcatgatcttacatatattttaaattttaagtattgaaaataggctttaggtagtcaaggatggaagcagtgagaccacctaaaggccasagtggtaacccaggtgagaaatgaagactctttgcactgttggtagcagcagagatggagggaactgggtgaactctgaatgtatttgaaggaccagcca

SEQ ID NO: 21744 - DNA, 201 bp, Homo sapiens
ggtgctctgtggctatctaggggtttgtaaaatgcaccaatcagtgctctgtaaaaacgcaccaatcagcgctctgtagctagctagagatttgtaaaatrgaccaatcagcagcctgtaaaatggaccaatcagcacactgtaaaatggaccaatcagctctctgtaaaatggaccaatcagcaggacatgggcggggac

SEQ ID NO: 21745 - DNA, 201 bp, Homo sapiens
cagcacactgtaaaatggaccaatcagctctctgtaaaatggaccaatcagcaggacatgggcggggacaaataagggaataaacctggccaccccagccvgcagcagcaacatttattgtgaagagggaatgctgcttctcactctttgggtccctgctgtctttaagagctgtaacactcaccacgaaggttggcagct

SEQ ID NO: 21746 - DNA, 201 bp, Homo sapiens
ttaattaatttgggtgtgctaatttatttatcacttaattgtatttccattttgtgatgaaagtaggccattgtttctgacacttatccaattctcctttraaggaagtacttttgtgtatttctgcttataaaaagcaacacctggaaattttttttttttttttttttttttttagatggagtctccttctgtcaccca

SEQ ID NO: 21747 - DNA, 201 bp, Homo sapiens
aattatgttcttcgggtctgtttgcctacatgggtaatttctagaattaaagcactattaatttttcagttgccagttgtgatgcccccttttaaatattaaaaaaaaatcggtatttgatcaaatctgagtattttcaatactcattttctttgacacttccatagaattcagaaatgtttttaattgatttttttcttc

SEQ ID NO: 21748 - DNA, 201 bp, Homo sapiens
tcactgcagcctctaactcctgggctgaagtgatcctcccacctcagcctcccaagtagctggcaccacaagcgtgcaccaccacaataggctaatttgtgtgtgtgtgtgtgtgtgtgtgtgtgtgtgtgtgatgaggtctccctatattgcccaggctgtgtcaagtgtcaaagcactttttatgggttaaatcattta

SEQ ID NO: 21749 - DNA, 201 bp, Homo sapiens
tggggaagctggaagactgggaatgagttaaatgtatatgagttttctagtgctgtagtaaataaatgtgtggtagaaatgaaaattttcttgcggaaagyatttaaaacaaggacaaactgtagttatattagtttgcctaagtattcaggtgtataggaaattctgaagatactttttgttggctaattgccattaagt

SEQ ID NO: 21750 - DNA, 201 bp, Homo sapiens
cagtggggttttctaaatatacaatcatgtcatctgcaaacagagacaattggacttcctcttttcctaattgaataccctttatttccttctcttgcctrattgccctggccagaacttccaatagtatgttgaataggagtggtgagagagggcatcgttttcttgtgctggttttcaaagggaatgcttccagttttt

SEQ ID NO: 21751 - DNA, 201 bp, Homo sapiens
actgcagcctctaactcctgggctgaagtgatcctcccacctcagcctcccaagtagctggcaccacaagcgtgcaccaccacaataggctaatttgtgtgtgtgtgtgtgtgtgtgtgtgtgtgtgtgtgatgaggtctccctatattgcccaggctgtgtcaagtgtcaaagcactttttatgggttaaatcatttaat

SEQ ID NO: 21752 - DNA, 201 bp, Homo sapiens
ctatattaagcactgtgctaggatgcagaatcatctatgccaaatagaaccatatgttaaaatgacatttattaaaatgaaacttgacctgcacatcacasatgtgtattacagcttaattctaaatacaaacaactaaagaaaactatccaaattatttagttgaactagaactttatacagttttccttaggatatact

SEQ ID NO: 21753 - DNA, 201 bp, Homo sapiens
gttactgttgtcttttctaagctatattgaaatataccatacactgttattagctatagttgccctgctgtataatagaacacctgaacatattcctcttwactttctgattctttcataatgacatttagcttaaaacacaaacacattgtacggtggtacaaaaatattttcttttttatatccttatagatgtttttc

SEQ ID NO: 21754 - DNA, 201 bp, Homo sapiens
ctctaaggttccagtcatcttctaagatatatggcttgcaaatgatacagtggggctaattttgactcacactgttaagcctgtgtgtttgtgtgtggggkgtgtgtgtgtgtatgtgtgcatgcacatacacgcacacatacctatgtaaatacaacatccctgctggtgcttattcctgagatgggattccttgagcag

SEQ ID NO: 21755 - DNA, 201 bp, Homo sapiens
acctcaggtgatccacctgcctcggcctcccaaagtgctgggattacaggcatgagccactgtgcccatcccggaaactttgtaaaacacagaaaagtgtaaaaaaaaaaaaaaaaattacccatgttattgacgctcaaaacaactttgcaataaccccagagatgtattttcaacaaaattagtaccatactttagtaa

SEQ ID NO: 21756 - DNA, 201 bp, Homo sapiens
ggggagacccagttcaatccatagcacttgtaaaggttaaataacttattcaaggtcacacaggtagcaacctagatacttcttccctgtgcatatatttwtatatatatatatatatatatatatatatatatatatatatatatggaattttctagaggaaagggagcttgaataaggttcatatagcttctaaacact

SEQ ID NO: 21757 - DNA, 201 bp, Homo sapiens
gggtagccataactgttacacacatagacagggattcatacatcatgtgttctggggaatttttccaacagaaattaaatcagtggtgcactatcttatgrggacattagagaagatattcatttattcaggaagtatttgtggatagttcagtttaacaaataacacagtaccagctctgtccctaggctacagggacat

SEQ ID NO: 21758 - DNA, 201 bp, Homo sapiens
tgtccatgcgtacacactatttagcttccacttgtaagtgaaaacatgagtatttggctttcttgtttcatttaagataaccgcctctaattctatctatrttgctgcaatagacatgattttattctttttcgtggattaatgggttatcatgagattgggactggtggctgtgtaaccagaggaagagagacctgagct

SEQ ID NO: 21759 - DNA, 201 bp, Homo sapiens
gggaggaacttttcaggaagtaactaacataggcctctttccttccgagtgctgtataagcagtctcatgctggtgttgctttgagcatgcattttccgtrttgtataatgtattgctttagggtacacactgggcctgtgaagactgggcctatgtttcctgctgcttttgatacaggatcagaaaatgtttggaccccc

SEQ ID NO: 21760 - DNA, 201 bp, Homo sapiens
cctgtcctgcattcttaaccactaggcccaactgcctctccctttctctatgaattatttaattttatagcccagtttttgtacttataccataaaaatctttttttttttttttttttttgagacagagtttccctctgttgcccaggctggcgtgcagtgtgcagtggaacgatcttggctcactgcagcctccgcctt

SEQ ID NO: 21761 - DNA, 201 bp, Homo sapiens
ggagacccagttcaatccatagcacttgtaaaggttaaataacttattcaaggtcacacaggtagcaacctagatacttcttccctgtgcatatatttatatatatatatatatatatatatatatatatatatatatatatatggaattttctagaggaaagggagcttgaataaggttcatatagcttctaaacactgc

SEQ ID NO: 21762 - DNA, 201 bp, Homo sapiens
tattccctgggtctgtcccctgtgtcactctccatcttctccagtaggcatcccctgctgagggaacagacagatacatagtcaatcagctgggtagccayaactgttacacacatagacagggattcatacatcatgtgttctggggaatttttccaacagaaattaaatcagtggtgcactatcttatggggacattag

SEQ ID NO: 21763 - DNA, 201 bp, Homo sapiens
ttagtgaaggaatatggaagtatgttacttaattggactctgtaaattcagaatctctaaattttaaaaatcttttaaaatttttattgagctatacatayatacattcaaatgtataaatctgtacacatatttttaaatatttgtatatttatatgaatttttacatgtgtatacataagtgtaaccatgacccaaatc

SEQ ID NO: 21764 - DNA, 201 bp, Homo sapiens
tctcctcagtgttgctcaagccagaaatttagacgaaggaaacttgaacctttccctgtctttagaattgtaccattacctcagctagttctgtgcatttyctaattcgatttttccagcagtgttgtgagtctcttagaacagttattaattaatactttcactttgcagacggggacacttggagaagttgggagaatt

SEQ ID NO: 21765 - DNA, 201 bp, Homo sapiens
ctgtcctgcattcttaaccactaggcccaactgcctctccctttctctatgaattatttaattttatagcccagtttttgtacttataccataaaaatctttttttttttttttttttttgagacagagtttccctctgttgcccaggctggcgtgcagtgtgcagtggaacgatcttggctcactgcagcctccgccttc

SEQ ID NO: 21766 - DNA, 201 bp, Homo sapiens
cctatttagaatactaccatgaggaattagttatgataataaacaaagtaagatatcatgtcttccctaactctgcttactttgtaattgtcagatgtatrtaattcctgtacggctgaaaacgaaacccattatttcataataaagatgattgtaatgaactaagcaactttaaattccatcagttattaacaggtgaaa

SEQ ID NO: 21767 - DNA, 201 bp, Homo sapiens
tgtgttatttaaaaaatgtcaatactctatatttctttaggaacaaagtccctagaactggaattattgggccaaaggttatgaatacttttaagttatcgtgtgtgtgtgtgtgtgtgtgttatcttcaactaatttttaaaaatgtgaacttctaccagctcgatgtctatttaataaaagtaattgatgtgttctgag

SEQ ID NO: 21768 - DNA, 201 bp, Homo sapiens
tgacaaaagctctttatgtcatgctcaaaacttctctctttttttttgagacagagtattggtctgtcacccaggctggagagtacagtggtgtgatcttrgctcattgcaacctccacctcccgggttcaagcaattctcctgcctcagcctccctagtagctgggattacaggtgcccgccaccacgcctggctaattt

SEQ ID NO: 21769 - DNA, 201 bp, Homo sapiens
gcaccattggtagctcactttcttctgtaatgaatatatatgtaaagcagaatgcctgtggtgcttcatgctgtgaggaatccagctttaaaactatggtstaggtagtgtgctgctagagaacgtgagtaactgttgtgtgaggggattatggacttgtttttaacctttttttttttttgaaatagggcctcattctgt

SEQ ID NO: 21770 - DNA, 201 bp, Homo sapiens
tatgccaaattcttcagaaacttggtggcttaagacatcaaccattttatttctcatagttttgtgagtcaggaattcatgaaggctccaatgcacagtgyttctacttgacatggcattggctgagaacattcacttggccacgcatctgcagcatggactggttagaaggtccaagaagactttattatgtatctggca

SEQ ID NO: 21771 - DNA, 201 bp, Homo sapiens
ccatctactcaggaggctgaggcaggagaatcgcttgaacctgggaggcagaggttgcagtgaggactcagtctggaaagaaagagagagaagaaggaggragaggaggaagaggaggaggaagaggaggagaaggagagagaaagaaggaggggaaggagggagggagggagaaatcactgctctgaactcttagcttcc

SEQ ID NO: 21772 - DNA, 201 bp, Homo sapiens
gtgttatttaaaaaatgtcaatactctatatttctttaggaacaaagtccctagaactggaattattgggccaaaggttatgaatacttttaagttatcgtgtgtgtgtgtgtgtgtgtgttatcttcaactaatttttaaaaatgtgaacttctaccagctcgatgtctatttaataaaagtaattgatgtgttctgagc

SEQ ID NO: 21773 - DNA, 201 bp, Homo sapiens
tgttatttaaaaaatgtcaatactctatatttctttaggaacaaagtccctagaactggaattattgggccaaaggttatgaatacttttaagttatcgtgtgtgtgtgtgtgtgtgtgttatcttcaactaatttttaaaaatgtgaacttctaccagctcgatgtctatttaataaaagtaattgatgtgttctgagct

SEQ ID NO: 21774 - DNA, 201 bp, Homo sapiens
aacagttttaggtttatagaaaagtagagcaggaagtacagagagttcctttatattccccgcttctctgcattttaccctatttaacatcttgtattagygtctgtttgttagaattgatgaaccagtattgagatgtcattattaactaaattccatagtttacattagagttcactctttgtgttgtacagttctaat

SEQ ID NO: 21775 - DNA, 201 bp, Homo sapiens
gttatttaaaaaatgtcaatactctatatttctttaggaacaaagtccctagaactggaattattgggccaaaggttatgaatacttttaagttatcgtgtgtgtgtgtgtgtgtgtgttatcttcaactaatttttaaaaatgtgaacttctaccagctcgatgtctatttaataaaagtaattgatgtgttctgagctt

SEQ ID NO: 21776 - DNA, 201 bp, Homo sapiens
ggggacagatagtggttgggattcagtttgtcggaggctactgccaactgcagcttttggttttaagtcttgccactggccctttaaaatggaactaacckggggggacagaatcctgattacgtgctgatgtgtgatgtatgatttggacagttttacacacacacagacacacacctacttttctgttgacctgctgat

SEQ ID NO: 21777 - DNA, 201 bp, Homo sapiens
caccatgcccggctaattttttgtatttttagtagagacagggtttcactgtgttagccaggatgctctcgatctcctgacctcgtgatctgcctgcctcsgcctcctaaagtcccaaagtgctgggattacaggtgtgagccactgcgcctggcctgggtcttgttttttaattcattcagctactgtgtgtgtttaatc

SEQ ID NO: 21778 - DNA, 201 bp, Homo sapiens
gatgtgtgatgtatgatttggacagttttacacacacacagacacacacctacttttctgttgacctgctgatgtacaatttggatggtttacacacacgmacacacacacacacacacgtgcacacacacaatttttctacttttctgttgatttcctttgccaaccttttgtttggtgggaagtcagaggaggcagcct

SEQ ID NO: 21779 - DNA, 201 bp, Homo sapiens
cagtattgacccctttattaatgaccttttttgtctttttgtacagtttttgacttaaagtctattttgtctggtatcggtatagcaaatcctactctgtwgtgttttccatttgtatggaatatctttttccatatctttacttttagtcagtgtgtctttataggcgaagtgagtttcttgaatgcaccaatattactg

SEQ ID NO: 21780 - DNA, 201 bp, Homo sapiens
ataccatgggtaacagaagaaagacctaaataatcatatgttttcatcccaagagctagaaaaaggagaaaactcggccgggggcagtggctcacacctgyaatcccagcactttgggaggctgaggtgggtggatcaccagaggtcaggagttgaagatcagcctggccaccatggtgaaaccctgtccctactaaaaat

SEQ ID NO: 21781 - DNA, 201 bp, Homo sapiens
ctttctcccaaggtaaatgcaaaattagcaaaaaaatgtagaatgagctgagccacagaaaggtatgcggcctccctgggtcctcacttagacttctcctraagagagctcccatgagctccaaaggacagagcttatggttgtcctgttctttattctgttggtggggcctagaacactgcctgctgatcaatcgttatg

SEQ ID NO: 21782 - DNA, 201 bp, Homo sapiens
ctgtgggagacaactgtggaaaaacatactgccctaaacgatatcatgagaaatagtctaccctagaagcaggagtggaagaaggggggatgagaggagawtagggttgcctaagctgctgcttcatggccgtgacccccagcattgattctgtacctttcctttttcttcctgtccactccaggcggagaacccggagtg

SEQ ID NO: 21783 - DNA, 201 bp, Homo sapiens
tcgacttaatcttgtcttttagttccgttttttttttttctgagtttcatcactttcttctcactcgttcatgttttttgtccgtgtcttttcttagtttkggaatttctggctcaaggtggcttttcgcatccctcatcctgcctatttctttatctgtattttattctctattttggtgtcttgtatttcctcagtgct

SEQ ID NO: 21784 - DNA, 201 bp, Homo sapiens
ccctcatcctgcctatttctttatctgtattttattctctattttggtgtcttgtatttcctcagtgcttcctatgaattattcatttgagcccctctctkgggcatttaataatttattatttatctttgagatttttttttttttggttatccaggctggagagcagtggtgcaatcatacctctctgcagccttgaac

SEQ ID NO: 21785 - DNA, 201 bp, Homo sapiens
ggcatcatttcccaaaataggggccaatatcagtgagagccaggggacatgcagagctgtaggataaatattaatatgatgcttcttcctgcagcatcaartttttcttagaaacagtgtgtttaaattacagcagatacattaaggagtagaatgcaaagttcacgtgagttttatgctaaacatgaaacttcaaaagat

SEQ ID NO: 21786 - DNA, 201 bp, Homo sapiens
ctactctgcccggcctgttatgtgatttttgatgcaagaaaattttttttccatcccagtgttctaagagaatctcctatgttttcttctttaacccgtcraaagtccatttttatatatggtattaactgaggatctaattttatctttcttctatatagtctgttggctcaggctgtttattgaatcctttttctactg

SEQ ID NO: 21787 - DNA, 201 bp, Homo sapiens
tttcttgtgcctaaacagaatttctacacctaaatatatggaattattgtacaaacccctcttgaatttcatcttagttgcaataaaacatttctgtaatwtgccactctctatttttgttttgcaagtattttctaagttagaaactccatctgtcttgttatcatgccgtgtaatatattctagatattgcattgccct

SEQ ID NO: 21788 - DNA, 201 bp, Homo sapiens
gtgtcttgtatttcctcagtgcttcctatgaattattcatttgagcccctctcttgggcatttaataatttattatttatctttgagattttttttttttkggttatccaggctggagagcagtggtgcaatcatacctctctgcagccttgaaccctaggctcaaagggatcctgctgcctcagcctcccagatagcact

SEQ ID NO: 21789 - DNA, 201 bp, Homo sapiens
accagagaaagagtgtgtctttccattcttcacccttgaaactaagtttagatctacaaaatgcagtgggtgagggagacagatcctgacagggaaatccraaagaagatggagggctggctgaagtgacatggaaggactctccattacttggtgggattgattttagaaaaatgttctaaatataaactggatgtgctt

SEQ ID NO: 21790 - DNA, 201 bp, Homo sapiens
atcttaacagtagtaagtcttccagtccgtgcacatgggatgcgtttccattcatttatttgtttccattaattataattttttaatttagcaacaatttyatagctttcattatatagcttatatatattatagctttcattatataaagctttcattacataagtttttcatctttttcgttaattcctgattattctt

SEQ ID NO: 21791 - DNA, 201 bp, Homo sapiens
agctccatcacatatacagtgtctgagaaatgtcaataatgttcatagttcttttgtaaacatgagtttggacagctatcattctggttgtgtattgtccyttggttatagtcattagagaaaggcttcttggctgaataggccagagatgttactcaatattacatttcttaaacctttgtgttttatgtggcaaagtta

SEQ ID NO: 21792 - DNA, 201 bp, Homo sapiens
gctttagggtttaaagttcatgctctcaaccatcaccgctgactttcaacctcagtcagaccacatacacattttcaaacatttagccagtgcttctgaarttgtggtattggaaaaaaaaaaaaaagaaattgttggaaatgaacaaattggcttaaataattattacacattttttattattgggcagtaatgaaactt

SEQ ID NO: 21793 - DNA, 201 bp, Homo sapiens
tctctccatcattagtgtttactgagctgatggagaccgcagtcaggcctgcttatcacagctcatcttagatgactttacatcactttcagagctacatkgggcatccctcctcacttctttgaaatgaggaatccaggggtctcaaggaagctatgaagttattgtgtccatttttaaattttcttcccattctctttg

SEQ ID NO: 21794 - DNA, 201 bp, Homo sapiens
tagagccacataaggaagggcagggggaaagaatttgaattatctcagtgttttttttttttttgtttttttaaaggagatagaatttgctcttgctattyatttcaagaaattggtgatcttgcatcagccggcttgtttttgaaagatgtttttcttggcatccatgcaaactaacgatatgaactgtatcaaacccag

SEQ ID NO: 21795 - DNA, 201 bp, Homo sapiens
tgtgggcctcagaaccccatgaaataactgcagtgtgaaggatttgggggaaagactggttttacgcttaaattattagagagttatccatgatattaaastgtcaaaaaggaaagaattgagaattcccatgaaagcagagaagaacgtgaaattggcactgagtaagaaagtatattgtcttttcattcattctgttac

SEQ ID NO: 21796 - DNA, 201 bp, Homo sapiens
gtgtttctgacaaggcaaggagtgaaaggaaagtgacaaatagatgttgtgggcctcagaaccccatgaaataactgcagtgtgaaggatttgggggaaasactggttttacgcttaaattattagagagttatccatgatattaaagtgtcaaaaaggaaagaattgagaattcccatgaaagcagagaagaacgtgaaa

SEQ ID NO: 21797 - DNA, 201 bp, Homo sapiens
aagtatttcattgacttgtacctttgctgtttgtcacaacaataatcatgattctttcatctcaagccttgatttgaaacagcctggagctggtccagacmaagcccatctagtcattgtatctaggcctgtcgatatcctcttgtttgtttttgtttcatttggttttcttttcttttctttttttttttgagacggaat

SEQ ID NO: 21798 - DNA, 201 bp, Homo sapiens
aagctctttatgtcatgctcaaaacttctctctttttttttgagacagagtattggtctgtcacccaggctggagagtacagtggtgtgatcttggctcaytgcaacctccacctcccgggttcaagcaattctcctgcctcagcctccctagtagctgggattacaggtgcccgccaccacgcctggctaatttttatgt

SEQ ID NO: 21799 - DNA, 201 bp, Homo sapiens
tttgggaggccaaggtggacggatcacctgaggtcaggaattctagaccagcctggccaacatggtgaaaccccatctctactaaaaatacaaaaattagyggggtgtggtggcacacgcctgtaatcccagctacccaggaggctgaggcaggagagtctctggtaccaggaagcagaggctgcagtgagccaaaatcgc

SEQ ID NO: 21800 - DNA, 201 bp, Homo sapiens
catggtgaaaccccatctctacaaaaaatataaaaattagctgggcgtggtggcatgcacctgtagtcccagatactctggaggctgaggcaggagaatcrcttgaacctgagaggcggaggttgcagtgagccgagatcgcgccactgcattccagcctagtgacagagcaagactccatttcaaaataaaaaagattat

SEQ ID NO: 21801 - DNA, 201 bp, Homo sapiens
tagctcaatttggtttgaatggcaggttgaagcagggaagaactgggagaaaatgtggaatacaggtcaagtctttaaaaggccttggatgtcaatgttgraagtttggacttgattctgttagcactagtgaacacacaaggttttttttttattattattaaatacagaatagtgatatgatccaactaagaactgggg

SEQ ID NO: 21802 - DNA, 201 bp, Homo sapiens
agagtagcagaaaacaatactgtgttcttctttatatcatatcagaaggcacatgatgtccattttgtcccattattagtgatgctggccgtcgaattttaaaagctttttaggatatgaatgtaaggaatacttatttaataagcaattatttttattcaaataaataaaacatcactgctgtcattgcagcttctacaa

SEQ ID NO: 21803 - DNA, 201 bp, Homo sapiens
gaacaaatggaatataggtattataacagttttaatgtccttgtgtactaattttatcatctgtgtcatttctgggtttccattgattaatttttttttcmctcttcctttacatgccttgtagtttttttttttttttctttttgagacagagtctagctctcttgcccaggctggagcgcagtagtgtgatctctgctc

SEQ ID NO: 21804 - DNA, 201 bp, Homo sapiens
aggcacccgccaccatgccctggggctaattttttgtgtttttagtggagacagggttttaccatgttagccaggatggtctcgatctcctgacctcgtgrtctgcctgccttggcctctcaaagtgctgggattacaggtatgagccaccgcgcccggccagatccatgctttaaacatttgaaagcaatgagagtcagt

SEQ ID NO: 21805 - DNA, 201 bp, Homo sapiens
ttgattcttctactcatagtattgttatcttgtctctctcttttcatgcacaccttccctctaactaatctctaaatgagggtagatcttgggtgagcaarggaaccagacaacttgtaacattaccagaagtacagagagcctctgtcctctatggtaatgatcatttaagctctcttacggttttaacccccctgttaa

SEQ ID NO: 21806 - DNA, 201 bp, Homo sapiens
tggaatataggtattataacagttttaatgtccttgtgtactaattttatcatctgtgtcatttctgggtttccattgattaatttttttttccctcttcytttacatgccttgtagtttttttttttttttctttttgagacagagtctagctctcttgcccaggctggagcgcagtagtgtgatctctgctcactgcaa

SEQ ID NO: 21807 - DNA, 201 bp, Homo sapiens
tagcgccactgcactctagcctgggcagtaaagcaagactgtctcaaaaatacatacatatatatatatatatattatatatatatatatatatatatatatattatatatatatatatatatattttatatatatatatataaatatatatataaattatatatatattatatatatagttgaggctttatttaatgcag

SEQ ID NO: 21808 - DNA, 201 bp, Homo sapiens
atatcattctcatcaactaatgtttgttttgttcccatcctgctgtaaaaaaagaattagaacgtaggcccggttgtccaggagctggtgtggtgaaaaastggctggttagctcctgtctctggcacttttagccaagaaaccactgtaatagtacagatagaagaaaacaattcatggaaaaaagtaatgggatatgct

SEQ ID NO: 21809 - DNA, 201 bp, Homo sapiens
gttgtgattcatagattatttattttgttcccaataatatatcagacaacacttccgtcacactttatattttcaaagcacattcacacatttctccagtcctaacaatatcctggcaaggcgggtattcttattgtcttacctgttttacaaagaaaaaaacagacccagaaaagttaagtcacttaccaaaggtcaagc

SEQ ID NO: 21810 - DNA, 201 bp, Homo sapiens
aaccagaaaaaacacacggcatcttttagagatatatgctactcacaggttccctgtaacctcaacttgagtgtcagcctactggtgggggatattgacckttagctagaaaagaatataagaatgatttattctacccaccagcatgttacagatttacatctgatgggaagatagaggcacatagttgtcatcgtaaga

SEQ ID NO: 21811 - DNA, 201 bp, Homo sapiens
cctagaggaagagagtttcagacagaaggaggcacactcacaaaggtcctgagacaaaatcaagcttggcggttttaagagcagagaggaggctgatatgyttgtaggctgatgaacaagctgggtggggaggactgaaagaataaggcacaggagacaggctggagcccaatcctgtggagtcatgaagcctgacacatt

SEQ ID NO: 21812 - DNA, 201 bp, Homo sapiens
cgccactgcactctagcctgggcagtaaagcaagactgtctcaaaaatacatacatatatatatatatatattatatatatatatatatatatatatatattatatatatatatatatatattttatatatatatatataaatatatatataaattatatatatattatatatatagttgaggctttatttaatgcagcca

SEQ ID NO: 21813 - DNA, 201 bp, Homo sapiens
tttaggtaacttaagacattgtgcctagatgttgacagagatacaaagaaaagacctggctgacaggcggcagagaaggcaaataactgctaaatgaaatycttgagagatacaaactgctgtatgggttttaattagagtgagatatcatagttgacagtcgagatagatggtaatctcccagaagacaggcatcatggc

SEQ ID NO: 21814 - DNA, 201 bp, Homo sapiens
cactctagcctgggcagtaaagcaagactgtctcaaaaatacatacatatatatatatatatattatatatatatatatatatatatatatattatatatatatatatatatattttatatatatatatataaatatatatataaattatatatatattatatatatagttgaggctttatttaatgcagccaggtttgta

SEQ ID NO: 21815 - DNA, 201 bp, Homo sapiens
tctttgcttttgaacattattcaatattttctaggtgccagattaacttggttattttattttcactacaataaactttaaaccatgtacatatttaacamcctaagctgtttatcaacttctatagcataagaagaggcaaggaaaacacctacaggagagcagtatagacgccatccccaggaaccgtcactgtataaa

SEQ ID NO: 21816 - DNA, 201 bp, Homo sapiens
actggaattaagtcacctctatacataatacaagagataaagaagaagtgtaagacacaatattgttcttagattgcttcctagttgagatcaaactaatrtaattttaacagcactggcatttcaagacaatttatgattaagttttaaattctgtgattcagattgcttttaattgtcaatcttaaagaaaattaaaga

SEQ ID NO: 21817 - DNA, 201 bp, Homo sapiens
aatgagtggtatttccaaggttcgttctttccaggtgctttctaactaacctgcacaatgtgcacatgtaccctaaaacttaaagtgtaataataaaaaawaaataaataaataaataaaaagaaaattcaataaaatacataataaaaatgtatcattaaaagtccagaaaaaaaaaaaagactccatggaaaaaattgg

SEQ ID NO: 21818 - DNA, 201 bp, Homo sapiens
gaaattttcccaatgaaaagctttaaaaatcacacttaatccttacattacttcatatcaggtcagttcttttacctccagataataatgcttggagttargcagtgtcacacaacaagcaagtggcagattcagtattcaaacctgggtttatctcactttgaagtctgtgtcccacccttgccactcaaggaaaacact

SEQ ID NO: 21819 - DNA, 201 bp, Homo sapiens
ctttaacaatattttctagagaaaattaatcataaacatataactttatgtaagtttgcataagcttatgcataccttttaagcatgtattaaagagagtrttctttttactaaaggtatcgtctcttggttaattacttctgttttaataaacagattattctttgctgaagaaagttttccttataatatgtaactctt

SEQ ID NO: 21820 - DNA, 201 bp, Homo sapiens
ctcaaggtttctcaaaaaatacaagaaacacgatgtagtagattattcagaataatcactcatttcccttctacttttgtgggagaggagtatttcctacsctttttgttggggccttggcttttgccatcattagggtacatgacacaagcaggggcttcaaacgtgcttatgctgttgagtgtggcctttcgtgccact

SEQ ID NO: 21821 - DNA, 201 bp, Homo sapiens
accattgccccaccatctttgggctccattatgctcagcactggcttccatactcaaggtcacccgatgtttgagaagagctactgcagccccagttgccrtggcttcattccatgaagagagaaggcaaaagagtctctgccaactaagattgcttaagagagcttccttgatgcccatctactgatttcagtttacatc

SEQ ID NO: 21822 - DNA, 201 bp, Homo sapiens
agctttttgtcctactcagaagagctgaggctttgataattagcctgatgcactgtgaattgctaagagtccaacttttttcatggaaggaaccgaagacraaatgagagaataaaagcagagaggagggaagaggaatacagcttagattagaaatggtccctacagcagcattattagtaaatatctcattttctggat

SEQ ID NO: 21823 - DNA, 201 bp, Homo sapiens
taactatattcacattagtgttaccttttattgcctttacctttgaaagctttttgtcctactcagaagagctgaggctttgataattagcctgatgcacygtgaattgctaagagtccaacttttttcatggaaggaaccgaagacaaaatgagagaataaaagcagagaggagggaagaggaatacagcttagattaga

SEQ ID NO: 21824 - DNA, 201 bp, Homo sapiens
taatagctgatatttaccaagtgctgataatgtatatctcacatattcttacaataactctctatgtgaagtacaatgaccacctgctttacagataaagraactgaggcagagtaaagttaagtaacttgtcctaggtaatctagccaggaagtggaaagctgggattgaatctaggccatcctgctacacaaactgcat

SEQ ID NO: 21825 - DNA, 201 bp, Homo sapiens
cattttatttcttaaataacaaagggcattaagcaaataaggcaaaatattagcatttgttaaaattgtggtgctatatacatagctgttatattattttytaaaatatagatatgtatagttgtagtcaacaacctcaaaataatagttgttgtaatgagagtagaaaattttgccaaggaacaattaaaacataataca

SEQ ID NO: 21826 - DNA, 201 bp, Homo sapiens
tacaaccaaaacctctcaataaaactgttttcttatttacgagggagactttattccattttttggattgagagagatgctttttatttttcgccctactstgtgctgtaaaattatctctggagatttaattgtgtttttgaatggttattcctagtttttaacgcagggctgtctgtaaaatgaagatagcttcttctc

SEQ ID NO: 21827 - DNA, 201 bp, Homo sapiens
gtatatgtgccgaggctctgagaattaactgcttaaagaactgccttctggagggagaagagcacaagatcacaattaaccatatacacatcttactgtgygaggtcattgagcaatacaggagggattttatacattttagcaactatcttcaaaacctgagctatagttgtattctgcccccttcctctgggcaaaagt

SEQ ID NO: 21828 - DNA, 201 bp, Homo sapiens
acacatctgaggttccaaaacctgtgtgaggtaggaagatgttgtactctttcctttgcagttgtgtagggtaggactttggaatataaaatgactctgaygggaaaacacaactcaaaattgttaggaccaatcttagaatccaaggctttgattcatatgccagcgtctttccactacttcagtggttctcagccttgg

SEQ ID NO: 21829 - DNA, 201 bp, Homo sapiens
acagttctgaatgttttttaacaacaacaacaacaacaaaatagcgcatgtgacacttcctttacttctttgtcccattcctcctcttttctaaaataaayaaatatgtgtataaaacaagaaaaaaaaagtgtgggatagtatctgctttactgagaacagcagaagtagctatttttctctattttgcctaggaagtat

SEQ ID NO: 21830 - DNA, 201 bp, Homo sapiens
tagtttcagctacttgggagactgaggcaggagaatcacttgaacctgggaaatggaggctgcagtgagccgagatcgcgccactgcactccatcttgggygacagagcaagacttcatctccaaaaaatatataaataaataaagtatgtgaaacttttaactgtatgtctggtatttttaaaaatttttatttttaaat

SEQ ID NO: 21831 - DNA, 201 bp, Homo sapiens
caacaatctactccctatctccatgagattcattttttttttttaccttaccacatatgtgtgagaacacacaacatgtctttctgtgcctgggttttttyatttaacataacgacttgcagttctatctatgttgttgcaaatgacagcttcccattctttttaatggctgagtgatatttcaatgtgtgcatgtattgt

SEQ ID NO: 21832 - DNA, 201 bp, Homo sapiens
cactgttgtgcagccaatctccagaaatatctcatcttgcaaagctggaactgtgtgcccattaaacaactcctctttgtccacctccaccaacccctggyggcccccattctactttctgtttctattaatttgactactgtggatacctcatataagtggaatcatatagtatttgtcttttgtgactagttatttcac

SEQ ID NO: 21833 - DNA, 201 bp, Homo sapiens
tttttcatgcccttcttagtaagtttttgcttttataaagtcagatctgccttcttgaaagttccaacctgtttattttaatactgtcttctaggaccacrgaatataattttaactcctttttcatcatgtagcttttcacatgtcacaagatactaatcatattcctccccacacctccatttctctcacctaaacatt

SEQ ID NO: 21834 - DNA, 201 bp, Homo sapiens
tataatttaaaatgaatgaaaacatttggaagctattaaactgggctttctttgctaagagctattctcttgagaaaaagaaaaaaaatcatgagtagttygatcagatgttcgatacaggaccaaaaatacatgtgtactcttggaagtttttgatttgttttattctgaacaataatgaaccattcacaagaccatagc

SEQ ID NO: 21835 - DNA, 201 bp, Homo sapiens
attgattcaccttggtgagtatcatttatacatcagtgagtaccttggttgcaaaattacctttggagtttaaatgtcattgcaaagttgtattggaaagrtaattttgttttggtaggccacagggttttgctttctgatactgtaaaatttatatctacttgccattttcatcatataagtgagaggtttaaatgctat

SEQ ID NO: 21836 - DNA, 201 bp, Homo sapiens
catcctggctaacacagtgaaaccctgtgtctactaaaaatacagaaaaattagctgggcatggtggtgggcacctgtagtcccagctactcaggaggctsgggcaggagaatggcatgaacccgggaggtagagcttgcagtgagccgagatcacgccactgcactccagcctgggcaatagagcacgactccatctcaa

SEQ ID NO: 21837 - DNA, 201 bp, Homo sapiens
acaaagatagcttcatttccccataggaggttctttttttcaaaatgttcctgatgagaaagaaacaaattcacggccctgagtctaataatacaggattkctgagccactcatcctgctaggtctggaagattgcttcgtctccaagagttgccttgagtgcactgcctggttctgtcccctcgatcttggcaaagttac

SEQ ID NO: 21838 - DNA, 201 bp, Homo sapiens
gttgacttttcatgctcttctttctagggaactttttgagaatgcatttaagcaaagcgagtaaataaaccacaaaaatcagaaaacgtcgtgtctaaaaragacttgatccagctcagaacagtgaaaaggtaaccatgaagcaggcttagagaggaaccagtccaaattgggataatgagatacagctgttctggagaa

SEQ ID NO: 21839 - DNA, 201 bp, Homo sapiens
catctagggccttgtcttcttgaagaacatacttactgtggaaatacaggtgaaaattccgcatcaaacagagataccaaataacagctctaaatagacartgatgcatttgctctctccttcttgttagtgtagtttaatttcctgagaagctttacacatacccctgagcttttctgtcacagctaattgtgcaacttc

SEQ ID NO: 21840 - DNA, 201 bp, Homo sapiens
aaagaagcagaaaagcaatgatttgtcaaaagtggcagaggaagttaggtgacaaaaagaaaaaaaactatcagattctaagaaaattgattttcaacctrgaattgtttatctaaccacactaccagttccatgtaagggaagaatacggacgttttcagacatacaagttctcagaaaacttatcttccatgcagtctt

SEQ ID NO: 21841 - DNA, 201 bp, Homo sapiens
tttcccaagttcacaaaactagtaagtaaataccctagtaaccttttttattgtatcatcagctcaaaaagaatattaagagttttttttaaaaaaagatrtgattctacaggataaatgttaagtgggttacccatgcagtaagtgacagagaagaaataaattgctcaggatagcttcatagagggtagaggatttagc

SEQ ID NO: 21842 - DNA, 201 bp, Homo sapiens
acctctgcatccacagtatctactgtatactacctggtttgtcattgatgctgaaatatttgttgagcaagtaaacaaatttaaaaaggacttcgaaaggsactatataagcagtgaggatgatacaaagagtcataagacacagtctttgacatcaaggagcctacagtctaggtgaggttaataaatactaataatggt

SEQ ID NO: 21843 - DNA, 201 bp, Homo sapiens
gtcctcatctatacgaaaattagaaaaataatgactgtactttgtgagtttctcataaataatgactaaaagtttctgagtttcccacacaataaaacatktaacctttttgttctgagattattttctttccacttaaggagtgttaaaataccttcttttatcaaatcttggtaataataaatggtaattgttttgttt

SEQ ID NO: 21844 - DNA, 201 bp, Homo sapiens
agtaaagcaagactgtctcaaaaatacatacatatatatatatatatattatatatatatatatatatatatatatattatatatatatatatatatattwtatatatatatatataaatatatatataaattatatatatattatatatatagttgaggctttatttaatgcagccaggtttgtaaaagactgctgtgtt

SEQ ID NO: 21845 - DNA, 201 bp, Homo sapiens
tcaaaaatacatacatatatatatatatatattatatatatatatatatatatatatatattatatatatatatatatatattttatatatatatatatawatatatatataaattatatatatattatatatatagttgaggctttatttaatgcagccaggtttgtaaaagactgctgtgttggatactttgaaccaag

SEQ ID NO: 21846 - DNA, 201 bp, Homo sapiens
ttataatccactttattttgctgctgaaatcgttctagctttggacatcagtaacttctttgactggcttctgttatttcctaagtctccatctttgtgattttttttttttttaagcatctccttactttctggcactacaaggtgctcctggctcatcttgtatattgcctgccccagccctagaatcagccatttttc

SEQ ID NO: 21847 - DNA, 201 bp, Homo sapiens
tgttttgttttactacaaatggcccactgggaatattcccttcagttaagatgtactgagcacccagcatgggccaactagcatgataggcaggttagtaktgtgtgtgtgtgtgtgtgtgtgtgtgtgtgtgtaaaatacaatattatatataatatacatattatactatattttatatatatcttatatatactagat

SEQ ID NO: 21848 - DNA, 201 bp, Homo sapiens
ctttgacacacacaaatcctcgaaggaatgattttttgtgtgaaatggttatagctgtcaatcacttattctctgtgtcatggtttctgtgctcttttcargttgttagggggtgattatggattcctgtcaaatgagatgtctgctgtgtattcaacatgaagcagtttgtatttttctcagtctattgctctcctgtct

SEQ ID NO: 21849 - DNA, 201 bp, Homo sapiens
ccatttctctttgggaaatgccgtatttatgtatgaacagtcttatagaatcatacgttcagacatgagagggcttaaaggttatctaggttacccccccmcacacacacacacccatgtcaaaatccattttatatcactccaacagatggtcatccggcctctgctgaatacagaccttagcaggaaacttcccattcc

SEQ ID NO: 21850 - DNA, 201 bp, Homo sapiens
atgacttcatggttttccatagtatagatagatcataatttaataaatcagagggattggaaaaaaatctgtagtcaaacagctaaagccatccctttaargttattctaacacataaaaaccttccaccaagctctttgacacacacaaatcctcgaaggaatgattttttgtgtgaaatggttatagctgtcaatcact

SEQ ID NO: 21851 - DNA, 201 bp, Homo sapiens
tttgtcgttagtaatactaaagcagtctcagcttttgggttttaagtttaataaataaattttttattcaaagttggcaataaagtcattgtatagagcatttttttttttttttgagacggagtcttgctctgtcacccaggctggaatgcagtggtgcaatctctgctcacctcaacctctgcctcccgggttcaagcc

SEQ ID NO: 21852 - DNA, 201 bp, Homo sapiens
tatttattttcttaatatcatacagtacctatagttgtataagtttattttacacaactgcatatcataatgaaaaataagctacaccaaacatttttctrtgttaccaagttttttatatacataattcctaatgacttcatggttttccatagtatagatagatcataatttaataaatcagagggattggaaaaaaat

SEQ ID NO: 21853 - DNA, 201 bp, Homo sapiens
atctcccactgcatctaaccagacttcctcctctgacatgttgattgatacatttgtatctctttcctaatgaatcatgccccattgtgggttattggagcctcctgctgaatagacctcacctttgctagcaaaaggaatagtaaaggttctcctctgtgaattttgggggctgtttattggctctaaaggagtggctga

SEQ ID NO: 21854 - DNA, 201 bp, Homo sapiens
cccttctcttctctattccaagagaagagaaaccttacctgacacctccttgcttttgcctgaggtcaattgtttaatgtctctgctctgaacagatttcrattcttcaagaggaaatcatatggcaatttgagaaataaccaggataatcaataagctggtatactcaggggaaggagttcaatgctatataaagtatgg

SEQ ID NO: 21855 - DNA, 201 bp, Homo sapiens
tttattcctttactttcttaataaaacttgctttcactttactctgtggactcaccctgaattatttcttgtgtgagatccaagaaccctctcttggggtstggatcaggacccctttctggtaacagaaatattttagtactattgggagattttggctgaggtcttctatttcagaagttttaacatcaatagccagtg

SEQ ID NO: 21856 - DNA, 201 bp, Homo sapiens
gactactgccagggctttagtcagatgccttactgtgaactcttacttctccaggccaccccagtgtgtctgccaagtcttcatcgagtaccattttcccrgggagggggcacagtatagggtggtaaagagaaaatcaaattgggactcaaaaggcctagattcttctttttcctttcaaatctcatttctttctttctt

SEQ ID NO: 21857 - DNA, 201 bp, Homo sapiens
tttttattcctttactttcttaataaaacttgctttcactttactctgtggactcaccctgaattatttcttgtgtgagatccaagaaccctctcttgggrtctggatcaggacccctttctggtaacagaaatattttagtactattgggagattttggctgaggtcttctatttcagaagttttaacatcaatagccag

SEQ ID NO: 21858 - DNA, 201 bp, Homo sapiens
attacctagctcagaacacacattcaggtgcatcagccacacaggatcattctaaggagatgcttaaattattgctctcaggtgtgcttgccctatgctckgtgtgtgtgtgtgtgtgtgtgtgtgtgtgtgtgtgtgtgcgcgcgtgtgtgatggtgctggagatgtgtgtctgaagtcatagacatatttctctgacca

SEQ ID NO: 21859 - DNA, 201 bp, Homo sapiens
tttatgctaatgtcacagacatttatcatataagcattttgactctagattttgttatcattggtattcattatattatacctgatgtattatattgttayaggttctctcctttccaataacaggttgttaaacagaatatccagctatacttggaggaaaaataatctattgaatataggtgctttaaaactgcttgtc

SEQ ID NO: 21860 - DNA, 201 bp, Homo sapiens
tctgtaaggcactgtgttgggcactcagaatatcacagtgagcaaactggacattgttcctgatcttgcagtgcttatagtatgttgaattgttttccttmtctcaaaaacttgattacctgttgcttacagatgacagtaggtcagttcattagtatattttgctgaggtgctgatagaacataagaacaatgactggga

SEQ ID NO: 21861 - DNA, 201 bp, Homo sapiens
tagctagtttagtcttcattaattccaaaccccactccatttttagcaccatttttcttttcctagtctttgtcccgctttttggtaattttaaaagctcstcttctcttgtctgacttatttaagtagcatgaattaatttgctacctctgactcttttctataagttttagctaactgtaacaagatactttttcactc

SEQ ID NO: 21862 - DNA, 201 bp, Homo sapiens
ttgtctagcatccaggaagaatcaggtcacatggacttgaaggatgtggagattttattgagtgatggaagtggctgtcagcgggatggggagctggaaargagatggagtggaaagaggatcttccctcatctccaaccgtccccagctgaactcctttcgacattcagttgcttcttctcttttctccttctctgctgc

SEQ ID NO: 21863 - DNA, 201 bp, Homo sapiens
ttttttccataatttttaattttttaaaattaaaagcattgcgatataattcacatataagtcaccattttaaagaatataactcaataggttttagtatrtccacagggttttgcaactatcaccactgtctaattccagaacatgttcgtcactccaggaagaaaactggcctttagcaatcactcaccattagcagtc

SEQ ID NO: 21864 - DNA, 201 bp, Homo sapiens
acagcacgggttggaagaacaatgatgaaggagaagtagtgaggatattgatttagtaagtgaaagggcactgaaagaacgaagtcttagaatattagagraagaattgatggaaacatgacttttaattttttttttaatcaatcttgatgtttattttggatctaaaataaggaaccaagtataagactgctttgaaat

SEQ ID NO: 21865 - DNA, 201 bp, Homo sapiens
ctgggcttctgggacaggtggggacttggagaacttttctgtctagctacaggattgtaaatgcaccaatcagcactctgtcaaaatggaccagtcagctstctgtaaaatggaccaatcagctctctgtaaaatggaccaatcagtaggatgtgggtggggccagattagggaataaaagcaggccacccgagccaacag

SEQ ID NO: 21866 - DNA, 201 bp, Homo sapiens
gggatgccatccttccagttgcccagaccagaatcccaggagtatcccttttctcacacaccttagaagcaacccatcagcatgtcctgttggcttttcaraaaatatccagaatctaaccattgctcaccaccttcataactactgccctggtctaagctgtcaacatctcttgcctggattaggcttcctaatggtctt

SEQ ID NO: 21867 - DNA, 201 bp, Homo sapiens
tgaggttgaaactttagatctctaattgtttctgttagattccatttattggaaaaattatatttcgaggatttttcccccggtttctgtatgccttccaraaacccagggacttcttgaaattctagttttcctgtacaggttgaatctccctgattttgaattagaaaattcaaaatctgaaatgctccaagtttgaca

SEQ ID NO: 21868 - DNA, 201 bp, Homo sapiens; identical to SEQ ID NO: 2905

SEQ ID NO: 21869 - DNA, 201 bp, Homo sapiens
ggggtgggaaaaatgaggggaaggggaaagatgacaagaaacttctaccaccaaatcttcttgaataagcatgcaagtgtaactcgtaattcaagctaatccattgtgttgagaagagctatacacctttgtttattcttttagaaaataattagccaaaaccctgtaccccataatctgtatttaagcataacaaaaatg

SEQ ID NO: 21870 - DNA, 201 bp, Homo sapiens
agctaatccattgtgttgagaagagctatacacctttgtttattcttttagaaaataattagccaaaaccctgtaccccataatctgtatttaagcataayaaaaatgcctttgatttattcatagttcactgtcaagactggaaaagtattttttaagcatacttttatggctaagcttaccatagcctatgtaatttta

SEQ ID NO: 21871 - DNA, 201 bp, Homo sapiens
accccacacccaccccaatcccccagcccccagcctccagcaaccgctgttctaccctctacttctataagttcaactcttttagagtccccatataagtraaatcatgcaatatttgtctttctgtgcctggccattggatacatttaaaatagtgatttttaacagtgtcagtctttagggtatgccaaaatttatatc

SEQ ID NO: 21872 - DNA, 201 bp, Homo sapiens
aatcatgcaatatttgtctttctgtgcctggccattggatacatttaaaatagtgatttttaacagtgtcagtctttagggtatgccaaaatttatatctkttgcatctatttaaatgcatgctaaaaaaattaaatgtcaacttaaaaagggaaggagaatatagtttttcaaaattattttaaaggatacaccaataac

SEQ ID NO: 21873 - DNA, 201 bp, Homo sapiens
agagaatggaataaaatattttaactattaaaacttaggcccgatgcagtggctcacgcctgtaatctcagcactttgagaggccgaggcaggcggatcaygaggtcaggagatcgagaccatcctggaccatcctggttaacacggtgaaaccccgtctctactaaaaatacaaaaaaaattagccgggcgtggtggcag

SEQ ID NO: 21874 - DNA, 201 bp, Homo sapiens
gagtcagaagctgcttccagcctcgtaaataatgagcacataactaacagaacctgatcttcccagcagaaataagtcagcctacttcacagtatgcaatrtggtcaatgaatcagtggttgctgagtgaactgcacttcccccagctggaggagaaacaagcttttttaggagcgatagagcatgcaataggatgtagat

SEQ ID NO: 21875 - DNA, 201 bp, Homo sapiens
agggtacatgtgcacaaagtgcaggtttgttacatatgtatgcatgtgccatattggtgtgctgcacccattaactcttcattaaacattaggtatatctyctaatgctatccctcccccttccccccaccccacaacaggccccggtgtgtgatgttccccttcctgtgtccacacaatggatagttttcaaagcaacta

SEQ ID NO: 21876 - DNA, 201 bp, Homo sapiens
tattatgtgtaactttatgctggtatttattccattgtattgtaatttagacttttaaaatatattatttcattagttattggtttaactgtctttctttaaaaaaaaatattgtttttcaattgtagcttcacatcaaggttatttggggaaacttcaaaacatacatcctgggttttccatactaggtccactgagagt

SEQ ID NO: 21877 - DNA, 201 bp, Homo sapiens
gtcattctcaggtagacatatacactatcataaagctctctgaccagcattgagtatggtgtcaaagatgttctgatgtttctttcctcttttcctatgtrtgttgctccatcttaactgactttttggttttgtttttgtgtttgttttgttttatttggcagcataatactattatctttgcatccctaattgtcatta

SEQ ID NO: 21878 - DNA, 201 bp, Homo sapiens
cagttcttatatgccttctaaataccaggtattgtggtaggcactagggacacaaaaactaagaagaaatcgactctgtcctcatagaactcatcatccartatgggattccagcttgcaaaaaagtgtagtaggaccagttaaaatagacgttggcaaacgcaaaggttgtggcccttgagtgcacatttaaatcacatg

SEQ ID NO: 21879 - DNA, 201 bp, Homo sapiens
atttaaaccatatcactaagtttgtttaatattctcagagagagttatgcagtttaaaaagcaaacaaggagatggttatttttttttcctatctttggtwttttcctgccttatagtgattgtaaattgttttctaataattccccatactcaagcttcattctttttttgtcttcctctacaagcacagggtgaatttt

SEQ ID NO: 21880 - DNA, 201 bp, Homo sapiens
ggaaactccaaaaatttctgttgcttgggtcccgcagcccagagattgtgatttacttggtcttgggtatggcttgggcatctggtttttaaaatagcttscccaagtgattctaatctttagtcaaggttgaaaacctctggtataggggtgatgaggcacaaaaaaagaggactcagatgtaccaagggaggagctggg

SEQ ID NO: 21881 - DNA, 201 bp, Homo sapiens
tcaacatttctctctttttaagactctggctgtcactgattttttaactgtctctatagttttaccttttccagaatttgtatcattggaatcatacaagmagtagctttttcagactggcttcttacactcagcaatatgcttaagattcattcatggcttttcacgacttgataactcatttcttcttatcattgaata

SEQ ID NO: 21882 - DNA, 201 bp, Homo sapiens
ttgtaatccacttccttttctctcatctttataaaaatctttgcaagcagccctcttctctgctgcctaataataaaatattgtgagtctagtaataatcycaccccctttttggtgagtttatttctctttataccagtgcttctaaagttttaatattcactttcatcaccaggcacatcttaaaatgcacattctgat

SEQ ID NO: 21883 - DNA, 201 bp, Homo sapiens
ggactacaggcacgctccaccacacctggctattttttgtatttttagtagagacggagtttcaccatgttggacaggatggtctccatctcctggcctcrcgatccacctgcctcagcctcccaaagtgctgggattacaggcgtgagccactacgcctggctggaaactttcatttccttaccaagtttgtggttccat

SEQ ID NO: 21884 - DNA, 201 bp, Homo sapiens
atacatatttggtctaatacattcctcaccttacataaatctccagaaaagctataggaaggaaacacattcccctgacacgacaggatgtaaaatggatrtaaaccaattactttttgcagttcccagagtctcaggaatactgacccttctgacttcattttcaagcaagaactctccacccccatcttgtaaggaaaa

SEQ ID NO: 21885 - DNA, 201 bp, Homo sapiens
tttgatttcctgtcagaagtttggtgcgaatagatttaaaaagcccttttcttgtttctaacttgtagaaattctggataaaaaaattataactttaaaartattttaaatatgtaaccaaactcaaaaggatgaaagagaattctccagatgccatgaatgaaagaggaattaaaagccagaaacagacaaatgtggaag

SEQ ID NO: 21886 - DNA, 201 bp, Homo sapiens
acccatccatgttggtgagggaggatcttctttactaagtctactgattaaaatgctaatctcttctagaaacaccctcacagacacaccagaaatgttawaccagttatctgagcatctcttagcccagtcaagctgacatataaaattaaacatcacaactgaggattgttttttttctcttttaacaactaaatattt

SEQ ID NO: 21887 - DNA, 201 bp, Homo sapiens
attagccgggtgtggtggcaggtgcctgtagtccccagctactcaggaggctgaggcaggagaatggtgtgaacccaagaggcgaggcttgcagtgagccragattgcaccactgcactcaagcctgggcgacagagcgagactccgtctcaaaaaaaaaaaaaaatttatacatgtgtgtttctatgtgtgtgtgtgtat

SEQ ID NO: 21888 - DNA, 201 bp, Homo sapiens
atgcatgcctggctaatttttaatttttttttggtagagacacggcctcactgctgttacccaggctggtcttgaattcctggcctcaagcaatcctcccrccttggcctcacaaagtgttaggattataggcatgtgccactgcacccagcctgaagtttttgtaatggtgtaagataattctagagtttggtagtcaaa

SEQ ID NO: 21889 - DNA, 201 bp, Homo sapiens
ccgggtgtggtggcaggtgcctgtagtccccagctactcaggaggctgaggcaggagaatggtgtgaacccaagaggcgaggcttgcagtgagccaagatygcaccactgcactcaagcctgggcgacagagcgagactccgtctcaaaaaaaaaaaaaaatttatacatgtgtgtttctatgtgtgtgtgtgtatgtgtg

SEQ ID NO: 21890 - DNA, 201 bp, Homo sapiens
ttctcttcactaaaacgtgaagttgttttttggagaacatatggacagtatagaaaagcacaaagcatgatacatttctgcagttgacattttggcatatagatatccaaccttttttctgctcatatatttatttattttcttaatatcatacagtacctatagttgtataagtttattttacacaactgcatatcataa

SEQ ID NO: 21891 - DNA, 201 bp, Homo sapiens
tctcttcactaaaacgtgaagttgttttttggagaacatatggacagtatagaaaagcacaaagcatgatacatttctgcagttgacattttggcatatagatatccaaccttttttctgctcatatatttatttattttcttaatatcatacagtacctatagttgtataagtttattttacacaactgcatatcataat

SEQ ID NO: 21892 - DNA, 201 bp, Homo sapiens
tttaggtctatttggtatatgattgactctttccttttaacctgtcacattctctatcccaattagaagtcgaaagcaaagttaagtagaagaggacactsttcattgatattccaatgtggtagacttgacagagtgccttgatttagcactttagagtaccatagaatatggcatgagccaaaaagactgaaaagtcac

SEQ ID NO: 21893 - DNA, 201 bp, Homo sapiens
taaggtctcagggtggttatatcacctgtctgtgccaaactgagatggagcaggtcttcagaatcccagtttaattttctttctactacgtcagttagagycactaattggaccgttcatgccgtattcctattaaaccattccagcagggttggcatattttgttttaatggaagcactttaatgcttacaagcaagttg

SEQ ID NO: 21894 - DNA, 201 bp, Homo sapiens
tgttgctttttctctttcttctccttctgatattcccattatgcatatgttataccttcttaaactgtcttatagttcttggattgtatgttttttaactrtctcagagttcttagatattctgttgttttattcttcttttctctttctggttcagttttgaaagtttctattgacatttcttcagtgtctccagttctt

SEQ ID NO: 21895 - DNA, 201 bp, Homo sapiens
ctaggttcaagtgagtctcctgcctcagcctcccaagtacctgggattacaggtgtgtgccaccacacctggctaatttttgcatttttagtagagatggsttttcaccatgttgggtcaggctggtctggaattcctgacctcaagtgatctgcctgccttggcctcccaaagtgctgggattacagccgtgagctactc

SEQ ID NO: 21896 - DNA, 201 bp, Homo sapiens
actattgcgggaacttaatttcatattattggcaaatttgcataccatcagatgacttattttgcaatttggttatttgattatttgattcatttagtgatttttagaaatgttcaagtcagccaatataaaataaccatggtttccctttccgcctgtttcaggcttggctactgctatagtgacccttttccagtcatt

SEQ ID NO: 21897 - DNA, 201 bp, Homo sapiens
agttaacctataatcatacactacagtgccatatttttatgaactttttattatgaaaattttctgtagcatcatgttaaactttctcaaaaccatgattyttgaaagtgcatgtgtaatttaacctaaattcttcctgtttatgtttttcttccttattattcacagtatctgaaagaaacttgttagctagttaattat

SEQ ID NO: 21898 - DNA, 201 bp, Homo sapiens
ctgaagatttatagactagtgttccacacattttttgaaggaatttttacattagggctttgttcttttccttgaaattgataagaaataaaattttgggrgactaatactggaagcaactttattgaccaagagtactccacaatctagcctttagcctccatcttagtccattgtgtgtgctcctttttgaattgctga

SEQ ID NO: 21899 - DNA, 201 bp, Homo sapiens
attcccagatcaaatccagtgttgttcagatataactgcaaagtttgtacaaacgaatttgaatcgccacaatactggctcattgcattacaaagaaagacagagctgagtatgggaattttatttaattcatatttgtgtactcaagactcaaatgagtcagcgataaaaatattcttttcagttagttcttttgctttt

SEQ ID NO: 21900 - DNA, 201 bp, Homo sapiens
caagccagctaaatgagaagggcacaaggaatctgtgtctctcaacacaaaaggctgcaattgccaaaccaatggaatgaatgtagatatgtcattgaaartaaatggaaaaggccgaggtgtcggtccacccccatcccccaaccgcacagttgcgcaatattccagcatgttttttatgcattcccgatggtgacttaa

SEQ ID NO: 21901 - DNA, 201 bp, Homo sapiens
ccactggagatggcagtaatcaaaggctttttctgcctgacaactggggctgagggtttcttaatgatggtatattggctgtgaagagaggggtgtccatrattcaagcaataccctcaactagaactaattgatagtttaaaccaaggagtccagagtacaaccttttgtaacacttccgtcacctttcaggtactagtt

SEQ ID NO: 21902 - DNA, 201 bp, Homo sapiens
ctgttttgatgcctgccattccattctgcaggctttctgtgcatgtctgatgatccttggctaaccatttgtgtgtaagaggcaggcactacaaacctgaytggaagctcagaacatgttatggagcttgtccataatgattgggtagggactcagcagtttcttcagtgaaacctcaaatgtcactatctgtataggtct

SEQ ID NO: 21903 - DNA, 201 bp, Homo sapiens
cacaaaaggctgcaattgccaaaccaatggaatgaatgtagatatgtcattgaaaataaatggaaaaggccgaggtgtcggtccacccccatcccccaacygcacagttgcgcaatattccagcatgttttttatgcattcccgatggtgacttaatattttctatgagatggaatgtgaatattctcatgctagagctca

SEQ ID NO: 21904 - DNA, 201 bp, Homo sapiens
cactatcatgcctctctgcagtctcaacctcctgggctccagtaatcctactgactcagcctcttgaatagttgggactacaggcatgtgccactataccyggctgattttttaatttatggtggagacagtgtctccctgtgttgccaaggttggtcttgaactcctgagctccagcagccctccaccttggcctcccaa

SEQ ID NO: 21905 - DNA, 201 bp, Homo sapiens
aaataaaacattttactgatcaaggggcatttaaagcatgacagtgttaaagtatgccccggctggcaaagcggacttcctgtggctaactgaggtgctcrttaaacagatcaggtggccgtggctgggtgagggagcagtcatgtactctgtgttttgcagagatgctgttaaagtgtcacaggacctccctttctacga

SEQ ID NO: 21906 - DNA, 201 bp, Homo sapiens
agggctgcacaaatgggaaacaccagttcctgtcctcagggagcttatgtgcaaatgagaggatagaaaacgaacaaatagataacgttgaacaacatttrtgtagtctctatgtatcgagtgtctgctttgtgctgaggattgttctagattttcaggtgtagaagtgaagaaaacataaacatttctgtccttgtggag

SEQ ID NO: 21907 - DNA, 201 bp, Homo sapiens
agtttagttccagaatcagtatgctcttaacctttttggaagccatgtgttgacctctttatattttaaaattaactgggcatttttttttttttgagacrgagtttaattcttgttgcccaggctggagtgcaatggcgcgatctaagctcactgcagcctccgcctcccgggttcaagcgattctcctgcctcagcctc

SEQ ID NO: 21908 - DNA, 201 bp, Homo sapiens
tattgccaagtccaggtgaaaaaagatgagggtttaaatataggttaatagcagtgaacctggacaggaaatgacagatttattaagatattaaggagatrgaattggcaggatgtggtgactgggtaattaggatgactctgcattcctgagttgaataacaggatggcttgaatagggaacattagatgctcagtggta

SEQ ID NO: 21909 - DNA, 201 bp, Homo sapiens
gcctaacccttgtgggacttgggggcaaggggaactgatgtgaacatgctgcgcttacgccgcttgctgtgctgtgagtgtgatcaagtcttttggacttsaggagctctaggagttttgtgtcttctgccagcacctgtgaaactgtggctaacctcttagctttcgagtagaataaaatctcagccttcaccattcttg

SEQ ID NO: 21910 - DNA, 201 bp, Homo sapiens
aaaacagaacttggaaataaatgttcaccgcctaccattgcttggcatcatgcattcaatccttgaaggaacccaatgacttagattttattattgttggragaccattctcctcagggctcttgtgtttctgaagttcttgtgagccaagcactgattgccctaagttttaggttattttgccaaggatgtttgtttagc

SEQ ID NO: 21911 - DNA, 201 bp, Homo sapiens
cttacataaatattttcttgaaaaaggaaaataggaggcagaacccccagtaggcccaatttcctctctaatcttcattttagtaaccctttctattcccyaaataactcctaatgatccagtaatgtgttaacagtgacagctgatgccagaaaaggtgttctctctgggcctgacattttccttaatggtaattctaac

SEQ ID NO: 21912 - DNA, 201 bp, Homo sapiens
tgatccgccacctcggcctcccgaagtgctgggattacaggcgtgagccactgtgcctggcctccttccagatttctaatttcactttaattctctctccsccccgcccaccctcccccccaaaagcataaaccaaagagtatctgagacaggtctcaatcagtttaggaagtttattttgccaaggttaaggacgcagcc

SEQ ID NO: 21913 - DNA, 201 bp, Homo sapiens
tgaagtccactcatttgtaactactaggacaatgtagaaataccctaaaattattgtcagatcagcagatgcaaccatcagaggtagattttctttggtcrtttaaatgtatagaggattagaagacagcaattctgtgtgcaagtttctgcaggaatgcctctaatctgtcatccgttttctttgccccgcactgtgctg

SEQ ID NO: 21914 - DNA, 201 bp, Homo sapiens
atgcattcccgatggtgacttaatattttctatgagatggaatgtgaatattctcatgctagagctcactatcatggactctttgtgccttaatagtaaaygaaaaataaaatgcaaatcctccagctgtttgtttttctgccttggcacaaatgaaaataaaaatttccctacccaagatctcttgggaatctgtcgtgt

SEQ ID NO: 21915 - DNA, 201 bp, Homo sapiens
gagcccaggagtttgagaccagactgggcaacacagggagacctcatctctacaaaaaagaaaaaaaaaattaattagccaggtgtggccccatttgtacaaaaaaaaatttttttttaattagctgggcatggtcatgtacacatgtggtcccagctactagggaggctaaggtgggaggaacgcttgagcctgggatgt

SEQ ID NO: 21916 - DNA, 201 bp, Homo sapiens
ctgtgaggctgcagctaaaccaggcataccacaagcagcttccacacctggcaccagggaacacggtggtacacggaagtttggagacaccaggaactgcrgagccccaaaggggatgtcacagccctggctcggggagctcctacatctgggcttcccaaggggccgcagctcttctctcctctcttctgtccttgttgc

SEQ ID NO: 21917 - DNA, 201 bp, Homo sapiens
agcagcttccacacctggcaccagggaacacggtggtacacggaagtttggagacaccaggaactgcggagccccaaaggggatgtcacagccctggctcrgggagctcctacatctgggcttcccaaggggccgcagctcttctctcctctcttctgtccttgttgcttgcaacttggtgagcaaggggagtgtctcagc

SEQ ID NO: 21918 - DNA, 201 bp, Homo sapiens
actcagatgtaccaagggaggagctggggcaatgcttgacaagtagaggcaaacaaggaggatgagaaaaaggctttctaggctgagatgacacacagaarcaggaaataatagatcccatttggaaaactttggaatactcatcatgggtagtgtgttcaaccagcatgggcaagagattggctaggaatcgtgaacaga

SEQ ID NO: 21919 - DNA, 201 bp, Homo sapiens
ctgaatgaaattcactcagctgtatctcgagggtggacctttctcttggcagcctcatcacctgtaccaaaaggtacacctattttcctcttcctcttggraacagatacaaatagttacacagttggctctgtctgtggctcattgagctgtgaattaatgagtacattatggttctggtagggatgattaaccttgctt

SEQ ID NO: 21920 - DNA, 201 bp, Homo sapiens
gcctgaaatcttctaccttgcttttatttgccaaattggctacttaatcaaatgaatcaaccatttttcttatttttgcaagtactatcatttcttttccttttttttttctccctcacatttcaaaaactgatagtaacaattattaatgtcttatagtactgggacgttcctctctagtcatccatttatctctgctaa

SEQ ID NO: 21921 - DNA, 201 bp, Homo sapiens
tctgtcaccaaacaattgaatccaattagccccacctgcacctggttgtttacctaatgaaagactcagcaccccagctgtgtccagggaccatgcacacycgcacttcccaactgttccagagaggaagcggtacacatcagagccaggcgacaccagcagatgttttctgaatgaaattcactcagctgtatctcgagg

SEQ ID NO: 21922 - DNA, 201 bp, Homo sapiens
tgatggtaatttgtatttctgtgggatcagtggtaatctcccctttataattttttattgcatctatttgattcttctcttcttcattagtctggctagcrgtctatctattttgttaatcttcttaaaaaaccagctcctggattcactgatttttttttgaagtgtttttcgtctctctgtctctttcaattctgctct

SEQ ID NO: 21923 - DNA, 201 bp, Homo sapiens
atttggaccagtcttgtccaaggttcatttgttgagcttggctcctagtttttgaagtatcttgaaagattcagtctgggaaagtacacatcatgccctgkctgtcaccaaacaattgaatccaattagccccacctgcacctggttgtttacctaatgaaagactcagcaccccagctgtgtccagggaccatgcacacc

SEQ ID NO: 21924 - DNA, 201 bp, Homo sapiens
tcccagagacggtttgttatgatttccgttcttttgcatttgctgaggcatgttttacttccaattatgtggtcagtttttagaataagtgcagtgtggtrctgagaataatgtatattctgttgacttgggatggagagttctgtagatgtctattaggtccacttggtccagagctgagttcaagtcctggatatcctt

SEQ ID NO: 21925 - DNA, 201 bp, Homo sapiens
ccctaattgtcattatcacttgtgttgctggacatttcactgcggtttcgtctgctgcaggtccagtcattcacagtctaaattggacgacggcactttamtttggaccagtcttgtccaaggttcatttgttgagcttggctcctagtttttgaagtatcttgaaagattcagtctgggaaagtacacatcatgccctgt

SEQ ID NO: 21926 - DNA, 201 bp, Homo sapiens
agatccactgttaatctgatgggcttccctttgtgggtaacccgacctttctttctggctacccttaacatttttccttcatttcaaccttggtgaatctracaattatgtgtcttggggttgctcttctcgaggagtatctttgtggtgttctctgtatttcctgaatttgaatgttggcctctcttgctaggctgggga

SEQ ID NO: 21927 - DNA, 201 bp, Homo sapiens
ggaatactgttgctgtcctatttgtcaacgaaccactaatagaaatttcttaggaacatactgtactagatgcctaggaaaagaaaatatattaaaaaccrgtgtaactccaactgattaccccatcatagttcttattacttcagaaaactattaaaagaacactaataagttttccatgcatgggttcatttttataac

SEQ ID NO: 21928 - DNA, 201 bp, Homo sapiens
tttattccatttgtaccttggtcctatgaagtatgtcctgttgtatcctcctccttgttttggatagggaaactgaggtccagagaatttaagtaccatgmcccttgtattagggttctctagagggacagaactgataggatagatgtatatatgaaggggaatttagtaagaagtactgagtcacacgatcataaagtg

SEQ ID NO: 21929 - DNA, 201 bp, Homo sapiens
gatcgttccttttcattttttttctctaatcttggcttcacgctttatttcattaagttgatcttcagtctctgatatcctttcttccacttgattgattyggctattgctacttgtgtattattcacgaagctgtcatgctgtgtttttcagctccatcaggtcgtttctgttcttctctaaactggttattctagttag

SEQ ID NO: 21930 - DNA, 201 bp, Homo sapiens
actgtcattgcaaagcctttttcccttggtcctcttggatggtttctgttttccatgggccttctccagagttatcagaagttgtcattctcaggtagacrtatacactatcataaagctctctgaccagcattgagtatggtgtcaaagatgttctgatgtttctttcctcttttcctatgtatgttgctccatcttaac

SEQ ID NO: 21931 - DNA, 201 bp, Homo sapiens
atttgttcttttttactttttttttttttttaagacaggatctcactctgtcacccaggttgccgtgcagtgacgtgattagggctcactgcagctgtgayctcctgggctcaagtagtcctcccacctcagcctcccaaggagctgggatcacaggcatgcaccacgattcctggctgttttctctattttttttttttt

SEQ ID NO: 21932 - DNA, 201 bp, Homo sapiens
ctcatctctgatgggaggaaaaataatatagagggaataatgataaggctgggtcaagagtgtctttggaagacgttcacttctcacctatgcataaatartgaggctatggagtatgtctgtggtagttttaacctgaaaaatttatgaagcagtagtaacaaaaaaactaccttagcgccaataaacctaagtagaaaa

SEQ ID NO: 21933 - DNA, 201 bp, Homo sapiens
gagatgggagttttatccataagcccctgactggggctgctgcctttctttcagagatgccctgcccagggaggaggaatctagagaggcagtctagctayagaggctttggggcactgtggtggtctccgtccagttcaaacttcccagtggctttgtttacactgtgaggggaaaactgcctactcaagcctcagaaat

SEQ ID NO: 21934 - DNA, 201 bp, Homo sapiens
agcactttgggtggcctaggtgggtggatcaccttgaggtcaggatttcgagaccagcctggccaacatggtaaaaccccgtctctactaaatatacaaawattagctgggcatggtggcaggttcctgtaatcccatctactcaggaggctgaggcaggagaatcgcttgaacctgggaggcagaggttgcagtgaggac

SEQ ID NO: 21935 - DNA, 201 bp, Homo sapiens
aaaaggtgagggcagagtcagattgtggcacactgaagagttaataggaggtgggactggagaaagtcagtgttgagattcttttgaagtgtttgttgagractaacagggagcaggtaggacaaagggcctgaggagaacagcgcgaatttggaaaaattgctgagaaagggaaggaggtagccaagcaccagggaaagg

SEQ ID NO: 21936 - DNA, 201 bp, Homo sapiens
tatttttatagtcagattatttgttgttttttttgttttcgttttttgttttttgtttttgctattgagttgtttgagtcccttacatattctggttattmatcccttgccaggtatatactttgaaaataatttgtttcattatatatgttgtctcttcactttgttgattgtttcctttgctttgtagaagcttttttg

SEQ ID NO: 21937 - DNA, 201 bp, Homo sapiens
tggctcacacctgtaatctcagcactttgggtggcctaggtgggtggatcaccttgaggtcaggatttcgagaccagcctggccaacatggtaaaaccccrtctctactaaatatacaaaaattagctgggcatggtggcaggttcctgtaatcccatctactcaggaggctgaggcaggagaatcgcttgaacctgggag

SEQ ID NO: 21938 - DNA, 201 bp, Homo sapiens
acaaaaaggttttgcatatgctgctgtatctgcctctctccaggaagcggagcatgggtcactgacagacagatggctgccacaagcgccaccagcggccrgaaactcctcccaccagctcccattcctgcaaaacaaatgaggaggggtgcttttcttgaatgctgtgcctggactttctctcccttgacccagccctac

SEQ ID NO: 21939 - DNA, 201 bp, Homo sapiens
ttatcctagcagtatgtaagcaactgagctagctgcaacataatgttttatttcttttatttaatattttctgttgggagttgggcagggaatgatttcamtggggcattgtgttttcatccttagtgtgtctgcagctaaaggcaaacaactctttctcaatcttgtgttgtgggcagtcagagagtgtatataaatatt

SEQ ID NO: 21940 - DNA, 201 bp, Homo sapiens
catcactcgttcattgaatctcgatttgagtgcgcgattctgtcttacagactgaatctgtctaaacatcagcatagctggaattatggacacaatgagtwttcatgctcagatgttgcttccattataaaactaatttctgtatgttccaaaagtgttatcttactgggttaaaataacactgagtagtcacagtaagag

SEQ ID NO: 21941 - DNA, 201 bp, Homo sapiens
aaaatgaattgtgtaagagaagacagaatttgaaaacagaaggacagagaaaatgaaaaggtatgagacctcagagtgggggcacgaggagctgtttgtasccagaggtttctggttgaactcaggttcctaaactctgagttgtacaggaagtagtaaaagttttttaaatgtccttctagttctcttttaaccaactag

SEQ ID NO: 21942 - DNA, 201 bp, Homo sapiens
gctaaactaggactctgtgcttttacattgcagtgataattgggattcatgatgtttgcccgagtctagaatatcccatccattaccaaagaagaatactwctacaattagtatagttagcattatatatattttgctgtattctgtctttgaaaaatcagtaactcaatatgatatatctgagaataagcaagaatatct

SEQ ID NO: 21943 - DNA, 201 bp, Homo sapiens
taaattagaaacattagattagcaatgttgatttaaatgataaagtgatgttttaaaaaatcattttgggccagacacagtggcttatgcctgtaatcccrgcactttgggaggcctgaggtgcacagatcacttgaggtcaggagtttgagaccagcctggccaatatggtgaaaccccctctctactaaaaatacaaaa

SEQ ID NO: 21944 - DNA, 201 bp, Homo sapiens
atgcatgggttcatttttataaccaattgctaaattgctaagttgcctttttattcactttcaaatttacaaacaatttccaagtctgtgctttcatttaytaatgcaaagctctttgcatatatatatgtatgtgtgtgtgtcctggtaaattgttatgccttccttattcaatagctttgggtctcttattctgaaaaa

SEQ ID NO: 21945 - DNA, 201 bp, Homo sapiens
cactgaccctccatttcttcttttctaaagatgtgcatgtaatacctattttaatgatttgttcaggggattaaataagtgtaaaatgcctagaaccgcaraaaacttagtatttttgagatatcaagaaaactggataccttatagctgatcaataaatactaggttctttcccttttcccattaaatgccatatcttga

SEQ ID NO: 21946 - DNA, 201 bp, Homo sapiens
aaggtctgatccatttgcttttggtataattgaaggatcattgactgggttaacatgcactgagctccagtactatccttgccatttactagtgggtatgygacactgggcaacttacaatatctcaggcactgattgattctttattgataaggtaggggtagtattatatatcccagtttataggatgattatgagaat

SEQ ID NO: 21947 - DNA, 201 bp, Homo sapiens
aaagatgagtaaaagaagaaaaagttttcttataatcttgtcatttaaggataactgtatatacatttaggcatatcatggtgctatatcttccacagagrttaaatgtttaggatacaatgaattggcatttgtatcaggaatgcattcccatttaagtgaaaagaaacctgctaagagtatgattttattattcataat

SEQ ID NO: 21948 - DNA, 201 bp, Homo sapiens
tttgaacaatttctggtatgtttaaggtttatttttagttattttggtgaattatgtatttttttcaatttttctgttttgtttcatttttattttatttwttttattttattttattttattttattttattttattttattttattttacttagagatggagtcttgctctgtcgccaggctggagtgcagtggcacca

SEQ ID NO: 21949 - DNA, 201 bp, Homo sapiens
ttgaacaatttctggtatgtttaaggtttatttttagttattttggtgaattatgtatttttttcaatttttctgttttgtttcatttttattttatttawtttattttattttattttattttattttattttattttattttattttacttagagatggagtcttgctctgtcgccaggctggagtgcagtggcaccat

SEQ ID NO: 21950 - DNA, 201 bp, Homo sapiens
atttttagttattttggtgaattatgtatttttttcaatttttctgttttgtttcatttttattttatttattttattttattttattttattttattttwttttattttattttattttacttagagatggagtcttgctctgtcgccaggctggagtgcagtggcaccatcttggctcactgcaacctccgcctcccgg

SEQ ID NO: 21951 - DNA, 201 bp, Homo sapiens
acaggtggtatttgattacatgtataaattttttagtggtgatttctgagattttggtgcacccacaggagcagtgtacacggtacccaatggtgtagtcyttttttttttttttttttttcagacagagttttgctctcgttgcccaggctggagtgcaatggggcgatctcagctcactgcaacctctgcttcccggtt

SEQ ID NO: 21952 - DNA, 201 bp, Homo sapiens
gttgttggttttttaaaaaaaatattcccagctccttgaaccttggctcttataagaaatgtggggaaaatgtgtatatatatatatatatatatatatakatagagagagagagagagagagagagagagagagagagagaaagagagagagaatatgtattctatgtaagaatatgtattgtgtattcttatgagaata

SEQ ID NO: 21953 - DNA, 201 bp, Homo sapiens
taggtgctgctggtggttcttacgaggctcttaaaccaaagtctgtactgtacatgtgtgcttctgaaaaagaagaacagaatattgggtctcataattayattttacttcccagcggcatctgttcttatcatagtagcaccaggctctactagctcagtcaatacttgtatattaacaagagacaatcgatagaaaaat

SEQ ID NO: 21954 - DNA, 201 bp, Homo sapiens
tgttggttttttaaaaaaaatattcccagctccttgaaccttggctcttataagaaatgtggggaaaatgtgtatatatatatatatatatatatatatakagagagagagagagagagagagagagagagagagagagaaagagagagagaatatgtattctatgtaagaatatgtattgtgtattcttatgagaatatg

SEQ ID NO: 21955 - DNA, 201 bp, Homo sapiens
ccccaatgtgtgttcttggtgcctttgtcaaaatgaattggctgttaagtgtgtgagtttatttctgggttctctattctgttccattggtctatgtgtcygttttttatgccaataccatgctgtttgggttaccatagctttgtagtacaatttgaaatcaaagtagtgtgatgccttcagctttcttgtttttgctca

SEQ ID NO: 21956 - DNA, 201 bp, Homo sapiens
caggaacttatccatctcctgtaggttttctagttaatgctcataaaggtgttcatagccttgaatgatcttttgtatttctttggtattggttgtaatakctcccatttcgtgtctaattcagtttatttggatctccttcttttcttgattaatcttgctaatggtctataaattttttctatcttttcaaagaaccag

SEQ ID NO: 21957 - DNA, 201 bp, Homo sapiens
gagaaacacttggcttacacatcagtgaagcagaagggggatccaggaaagttggagcagctgcctcatgaaaagttgctaagcagcaacattaaggctgmagctgctgagtgtctaaaacagactggctactgctttacttccacccttcactgctctagcaaaaatgtctcttttagcccaccctagccctaaacacac

SEQ ID NO: 21958 - DNA, 201 bp, Homo sapiens
cttggctcttataagaaatgtggggaaaatgtgtatatatatatatatatatatatatatatagagagagagagagagagagagagagagagagagagagraagagagagagaatatgtattctatgtaagaatatgtattgtgtattcttatgagaatatgtgaatatatatacacatatatacataaatatattttttc

SEQ ID NO: 21959 - DNA, 201 bp, Homo sapiens
cctcactttacaaaataaaataataaggcagagaaaatttaaataattagctcttggtcacataaagtaaatgttggagccaggacttaaagccaaacttygaggctctagagagctaagaaaacttttgaatgagatcaccaaattattgttggttgggaatctttgagaaattgtgaggacatggggatacaatagaag

SEQ ID NO: 21960 - DNA, 201 bp, Homo sapiens
tgctctgtgtataatgctttcaccccaaattatggcaaagtaccagatggaccatttgcagcaactaagtaaattcaagcgctgtttaaattcctatacctttttttttttgagttctgtatcgcatatggaggaaagcacaaatatttattcaccatccttgtttataagtacagtgtgggaaatattttgtggaaattc

SEQ ID NO: 21961 - DNA, 201 bp, Homo sapiens
agatgttggcttgatgtaagatggtcaaatctttcggagatggaacaggctgccttgaaaggtattgagtttcctttcgccagcatttgtgtaagtgtgcrgccagaatgtggacagccacttgaaggtgcacagaagatggaggcacagaccagatggttgggccacatgacagtgaaggcctcttccaactctgaggtt

SEQ ID NO: 21962 - DNA, 201 bp, Homo sapiens
cagcgtatgttctctgtaggtcctggcctcatgaaacttgcattactgtggggcaagatgcaaagtaataaataagtaaaatatatataaagtatttcagwtgataatatatgctgtagttaaaaaaaaaaaaaaagagtaggcatggggaggggaccagagggtgccagagtctaatggaggtaatccgaaattttagag

SEQ ID NO: 21963 - DNA, 201 bp, Homo sapiens
agcgtatgttctctgtaggtcctggcctcatgaaacttgcattactgtggggcaagatgcaaagtaataaataagtaaaatatatataaagtatttcagawgataatatatgctgtagttaaaaaaaaaaaaaaagagtaggcatggggaggggaccagagggtgccagagtctaatggaggtaatccgaaattttagagt

SEQ ID NO: 21964 - DNA, 201 bp, Homo sapiens
agtaggaacttgtttgctgtgaccaaatctttccttttcaaagatagtggtttgcgagcagctggttttttgtttgctttgggttggtttgttttgttgtkgtggtttatttgtttgtttttgtgtgtgtggttttttgtttgagttggttttgttgtttgttttgtgtgtgtgtgtgtgtgtgtgtttgtttgttttagc

SEQ ID NO: 21965 - DNA, 201 bp, Homo sapiens
agtatttcagatgataatatatgctgtagttaaaaaaaaaaaaaaagagtaggcatggggaggggaccagagggtgccagagtctaatggaggtaatccgwaattttagagtgttaatggaagtccttaatgagatggtaacatttgaggaaaaacctaaaggaagagtaggagcaagccatgcagctatctagggaaaga

SEQ ID NO: 21966 - DNA, 201 bp, Homo sapiens
caggaaataaatgctgactccaggccctgtttgagtaaggcagacatgatctctcaatcacatgaacaatttacaggctttggtgaatattctttgaattyctaaaataacccctaagttgcggctgggtgcggtggctcacgcctgtaatcccagcactttgggaggcccaggcaggtggatcacaaggtcaagagatcg

SEQ ID NO: 21967 - DNA, 201 bp, Homo sapiens
tcagatgataatatatgctgtagttaaaaaaaaaaaaaaagagtaggcatggggaggggaccagagggtgccagagtctaatggaggtaatccgaaatttkagagtgttaatggaagtccttaatgagatggtaacatttgaggaaaaacctaaaggaagagtaggagcaagccatgcagctatctagggaaagagcgtac

SEQ ID NO: 21968 - DNA, 201 bp, Homo sapiens
cttctccatgtagcttactctcaactggcataaacacagattgattattaatcttttactttttaaaaattgattctggaagcatctatatgaactgttaattattctagggattatgtggcaaaactggaatggatgtgtgaatagtattcatgtgttactaacgtataaagacagaaatatagtcatatattattaacc

SEQ ID NO: 21969 - DNA, 201 bp, Homo sapiens
gataatatatgctgtagttaaaaaaaaaaaaaaagagtaggcatggggaggggaccagagggtgccagagtctaatggaggtaatccgaaattttagagtkttaatggaagtccttaatgagatggtaacatttgaggaaaaacctaaaggaagagtaggagcaagccatgcagctatctagggaaagagcgtaccaggaa

SEQ ID NO: 21970 - DNA, 201 bp, Homo sapiens
ttctccatgtagcttactctcaactggcataaacacagattgattattaatcttttactttttaaaaattgattctggaagcatctatatgaactgttaattattctagggattatgtggcaaaactggaatggatgtgtgaatagtattcatgtgttactaacgtataaagacagaaatatagtcatatattattaacct

SEQ ID NO: 21971 - DNA, 201 bp, Homo sapiens
aatatatgctgtagttaaaaaaaaaaaaaaagagtaggcatggggaggggaccagagggtgccagagtctaatggaggtaatccgaaattttagagtgttwatggaagtccttaatgagatggtaacatttgaggaaaaacctaaaggaagagtaggagcaagccatgcagctatctagggaaagagcgtaccaggaaaga

SEQ ID NO: 21972 - DNA, 201 bp, Homo sapiens
taaatacttgtggggtgttaaagttatttggactttgtcctgtacgtaactgaaggattttaagcagaggagtgagatggtcagatttatattctaagtayatcatttcagcagcagtataggacttggatttgaggaagataaaactggaggccttgccaatcaactggaaggtgattgctaagaaagtggtagggggct

SEQ ID NO: 21973 - DNA, 201 bp, Homo sapiens
gccgtaggcatcatcctcaagattgtcttttcccttctgaaaacaagtcatctatttataaactgctgatttctttgggacattatctccatcatctttayataaagaatcaataattttgatgcaggattttttattccttagttcagctaaaatccaagttattgtctcacgaccagaaaaaattaggcatgcgaacac

SEQ ID NO: 21974 - DNA, 201 bp, Homo sapiens
aatagagacatagactgtgatgtgagggcagtttagttccatgatttcttggctgtatgatatagggttggttgtttaatctatcttcatctttctaatgkggatagtagtagtggcagcaccaccagcagctatttcatagagttgctgaagattatttaagtatccgataagtggtaactatggtgacagttgtctgcc

SEQ ID NO: 21975 - DNA, 201 bp, Homo sapiens
gctactgattagcaatcattttcttacgcttattcacacataaatacttaatagcaaaatatataacataccattaaaatagtgaaaaaataatgtgttcrgggtatctaagcagcacagcagcatcaccagaacacccgcatcagctgctgaaccacagccagctttgtcgccaccaacgatgctggtttgttcattctc

SEQ ID NO: 21976 - DNA, 201 bp, Homo sapiens
gtccactaccgctgtttgctgccatcgcagacccgccgctgacttccatccctccagatccggcagggtgtccactgtgctcctgatccaccaaggcgccyattgccgcccccgatcgggctaaaggcttgccattgctcctgcacagataagtgtccgggttcgtcctaatcaagctgaacactagtcactgggttccac

SEQ ID NO: 21977 - DNA, 201 bp, Homo sapiens
tacttcctggtccagtcttctctgagatttaaagtgccatagttcaaaaatgtctcaggagtagaaggttacattcattcatcaaggctcagttgggagamcagaagccattttaggtatttcaagcaagaaggaatttaatgtagggaatacgatgttttagaaattgctgaaagggcttagacagccgttggaaggata

SEQ ID NO: 21978 - DNA, 201 bp, Homo sapiens
tgtgatacctcatacaattgtgagacccatagagataatatatacatgaacaatggccaatacagactacagaggaggatgcaaacaaagttagcagttakttttatcatttgtattatatcacatagcaggtgttctatcatatcatttgattaatcttcaaacctaatgtgatgtaatattatttatcccatgcttaaa

SEQ ID NO: 21979 - DNA, 201 bp, Homo sapiens
gttagttttatcatttgtattatatcacatagcaggtgttctatcatatcatttgattaatcttcaaacctaatgtgatgtaatattatttatcccatgcytaaatgaaaaaactgaagttgagacaggttcagaaatttccagtcatgcatcttaggtaaaagatgtgggattcatgcctaaatctgccagagaatgaaa

SEQ ID NO: 21980 - DNA, 201 bp, Homo sapiens
gtgcaatggcgcaatttggctcacccaacctttgcctgccgggttcaagcgattcttctgcctcagcctcccgagtagctgggattacaggcatgcaccaygacgcccagctaattttgtacttttagtagagatggggtttctccatgttggtcaggctcccgacctcaggtgatccgccacctcggcctcccgaagtgc

SEQ ID NO: 21981 - DNA, 201 bp, Homo sapiens
cctggcccctttaccatttcttgatggaactaatggattcccaccccacagcctttatgaatggactgaggccattgaattcaggattcttactttggtgygtagctgtggctgcctccctaggaccagggcacagaaatttcacagtaaccaatgagagagaccaggggccagctccaagccagagtcatttcattcagg

SEQ ID NO: 21982 - DNA, 201 bp, Homo sapiens
aatcaaatgaatcaaccatttttcttatttttgcaagtactatcatttcttttccttttttttttctccctcacatttcaaaaactgatagtaacaattaytaatgtcttatagtactgggacgttcctctctagtcatccatttatctctgctaagaatttctcttaggattaaatagtatgattactatttccacatat

SEQ ID NO: 21983 - DNA, 201 bp, Homo sapiens
agatgggagtagggtaaatgatactatgctgttgtgaatttcttatataattcatgaagaggtataatgtttagggtagcctatgataagttaaggatgcrtatttcaatccctagagcaaacattaaaattctaagatagatacgtagctgagaagccagttgaggggataaaattgaacagtgaataaatatttgatta

SEQ ID NO: 21984 - DNA, 201 bp, Homo sapiens
tactgcacgtctttctacttcttctcaactctctgattgcttatataagtgacgtcttctgaaggaaagttcagcattttttctcagatatgataataatrtatgctaagatcttggccaggcacggtggctcacacctgtaatcccagcactttgggaagccaaggtgggcggatcacttgaggtcaagagtttgctgcc

SEQ ID NO: 21985 - DNA, 201 bp, Homo sapiens
tctccatgtagcttactctcaactggcataaacacagattgattattaatcttttactttttaaaaattgattctggaagcatctatatgaactgttaattattctagggattatgtggcaaaactggaatggatgtgtgaatagtattcatgtgttactaacgtataaagacagaaatatagtcatatattattaacctt

SEQ ID NO: 21986 - DNA, 201 bp, Homo sapiens
ggtttaattggaatcacagttccatgtggctgggcagcctcacaatcatggcggaacgcaaggaggagtaagtcacatcttacatggatggcagcaggccmaaaaaaaaaaaaaaaatgcatgtgcagggaaattcccatttttaaaaccatcaggtctcatgagacttatcactatcatgagaacagcacaggaaagacc

SEQ ID NO: 21987 - DNA, 201 bp, Homo sapiens
ggaactccccattctgctaaaacacacagtgtatggcaaagatgaggtattatgaagcctgatgtagttagaagacaaggcaaggagagtattatcagaaytattatattatagaacctccaaaaggtggtgataaatggtataagtagatctttcagtaaatatagactgtctttatatgagaaacttcctgaaaggaaa

SEQ ID NO: 21988 - DNA, 201 bp, Homo sapiens
aaaaccacaatgagataccatctcacaccagtcagaatagctattattaaaaagtcagaaaaataacaaatgctggtaaggttgtggaaaaaagggaacayttataccctcttggtgggagtgtaaattagttcaaccattgtgaaaaacaggtggcgattcctcaaagggctaaaaacagaactaccgttctacccagca

SEQ ID NO: 21989 - DNA, 201 bp, Homo sapiens
gtttaattggaatcacagttccatgtggctgggcagcctcacaatcatggcggaacgcaaggaggagtaagtcacatcttacatggatggcagcaggccamaaaaaaaaaaaaaaatgcatgtgcagggaaattcccatttttaaaaccatcaggtctcatgagacttatcactatcatgagaacagcacaggaaagacct

SEQ ID NO: 21990 - DNA, 201 bp, Homo sapiens
tttcaagaacctttgtaaccactcattcttaatctcttatccctgcctcaagccgtagttgacagaccagcctttatattctcagttttacaaggcatgadcatgaaatgcaaaagtttggcagtttcccaaggtcaaaatcagtcaatgacaaaaatccagaccacatctgtctgttctcagagtgcagaccagagtgtc

SEQ ID NO: 21991 - DNA, 201 bp, Homo sapiens
cagagtaaattgggaaatgcgatggtttacatggcttccactgccagatagaaagaaatataccagttgataaaattcagtaataaaaccaaatcttgtayggcctgatctgatggactttttaaagatctttatataaatagatttaaataatattacatctctccaattaaaccttcatttgaccttgctgtcccgttt

SEQ ID NO: 21992 - DNA, 201 bp, Homo sapiens
caagcacaacagaaagaaataatttaagaaatacatagtataaactgaatgtcagggaacatttctgcagtgagaactatcggaccataggatattccccyaggaaaattgggttgaatttcattggacatttgatcctgacagaattgaatgtgtatcagtagggaaatagactgaatatccctgtaggcatttttcatt

SEQ ID NO: 21993 - DNA, 201 bp, Homo sapiens
atgtgctttttttcaaacagcttccttattaatcaatagtgcataaagactttttccagacagcccaggaaaatgtagcaaaggggcgagatgtgcgaatygtatgtgtgtaacagccccaaaggatactacggtaatgataatagactcaacattcagattacatttcagactttcaagaacctttgtaaccactcattc

SEQ ID NO: 21994 - DNA, 201 bp, Homo sapiens
ggacaaactaatgcctgtgtgtatggatgaattaatgaggaaggaagtactgtaggcctgtttcttttcatagtcaagatcgtgcttaaagcatttgctcmccacacgtacaggagagtaaaacagatctagacgctggctactgcttttgcatgacctataaaggtcttataaggctctgaacagtaattcaaaatgtaa

SEQ ID NO: 21995 - DNA, 201 bp, Homo sapiens
ttaagaaatacatagtataaactgaatgtcagggaacatttctgcagtgagaactatcggaccataggatattcccctaggaaaattgggttgaatttcaytggacatttgatcctgacagaattgaatgtgtatcagtagggaaatagactgaatatccctgtaggcatttttcatttctctcttctctgattctgggcc

SEQ ID NO: 21996 - DNA, 201 bp, Homo sapiens
agacagatcctgacagggaaatccaaaagaagatggagggctggctgaagtgacatggaaggactctccattacttggtgggattgattttagaaaaatgytctaaatataaactggatgtgctttttttcaaacagcttccttattaatcaatagtgcataaagactttttccagacagcccaggaaaatgtagcaaagg

SEQ ID NO: 21997 - DNA, 201 bp, Homo sapiens
gtgactgatgaaagtgtcttaaaatagctcttaaaaagttagtggccagatacggtggctcttgcctgtaatcccagcactttgggaggccgaggcaggcrgatcacgaagtcaggagatcgagaccatcctggctaacgcggtgaaaccccgtctctactaaaaaatacaaaaaattagctgggtgtggtggcaggcgcc

SEQ ID NO: 21998 - DNA, 201 bp, Homo sapiens
ttatgtcccccctaccccatattcatatgttgaaagccagtccccaatgtgatggtatttggagatggaggctttgggaagtaattaagtcatgatagcakagccctcatgaatggaattagtgcccttgtaaaagaggccccagagagctccctcgacagttctgccacgtggggttacagcaagaatatggccatctat

SEQ ID NO: 21999 - DNA, 201 bp, Homo sapiens
agtacaagagaaaggaaaggcaattggaaatttttaggaaaaaaagcaactatacaggaaatgtgtggcctgcatgcaaagtgaacttctagaagcacccyctttgagaggcctcaaggctgtgatatagttaggctttgtgtccccacccaaatctcatcttgaattgtaatccccataatctgtacatgtcaagggaga

SEQ ID NO: 22000 - DNA, 201 bp, Homo sapiens
tgacctcaggtgatccacctgtctcagcctcccaaagtgctgggattacaggcgtgagccactgcgcctggccaaaaagttttcttaaaagggtcattaayagtgtcatcgtaaaagtgggagtaggcaggagatttgttgaagtaaaaatagtggtttaggtagttaatttaaattacaaagaacagcattttcacacaa

SEQ ID NO: 22001 - DNA, 201 bp, Homo sapiens
ggtggaagtccctggaaatagcaatttgtatctcagcatgaacctaagacttaaacgtgacaactgttaatctcacctttcccttaattgataagtgttcmtaccagtagacctattacagacaagttgtctgtgctgcccctgtatgagtttaatgacaaacgtaattcagaaaaaaaggccacggtgactttctagttt

SEQ ID NO: 22002 - DNA, 201 bp, Homo sapiens
ttacatgtgactcacggtgcaacctccatgcctttattctggctgttctgattcattcttcaactcccagccttcaaaacacatcgcactcccacccctcytctggaataattgactgctccagttgaccctcatttttcagtcttccgaagtcattgccatgttacttgaaacctccataatgaagcacatggcgtaaaa

SEQ ID NO: 22003 - DNA, 201 bp, Homo sapiens
caacctccttgattatatattctactccataccatctaggaagtcttttttttttttaagtgaagcccctgtgcttcagtctaaacctcattcttcttttrtactctcttcagaaattaaataattactattaatgactattttctctataaaatattgtaatgcatccaaaaatatttctgtagcctcttctaatttttt

SEQ ID NO: 22004 - DNA, 201 bp, Homo sapiens
agattgagtgacacagagcatgctaggaaaaaaaaaaaaaggaaagtgaaaggacacatgacaaatatgggccatctacgactgggcacactgtcgattaygacagaggcctgaggaagccagggaaccggataaattgtcaagagcctgtgtggtgtaatagaaaggttacaggctttgggctcaggagatgcagattta

SEQ ID NO: 22005 - DNA, 201 bp, Homo sapiens
aaagtaacaaggacctagactggaaagaaaatactcagtaaagtattaatacatagtctctgtgcaagggactttatggtcacagctcatctagtcagtcrcaacagttctgttgaattagattctctgcctttcagatgaagaaacagaggttcaggaaagttaataacgtggcaaaggccacagagcataaagtggtag

SEQ ID NO: 22006 - DNA, 201 bp, Homo sapiens
cagatttaagtcagagccctgctgctgattagctgtgtgacctggacctcatcttttccacacctaaatcttgtttcctggaaaatggaaataatatcagyaatgctgccctggccaggcacggtggctcatgcctataatcccagcactttgggagactgaggtggtggatcacctgaggtcaggagttcgagaccagcc

SEQ ID NO: 22007 - DNA, 201 bp, Homo sapiens
acaaggacctagactggaaagaaaatactcagtaaagtattaatacatagtctctgtgcaagggactttatggtcacagctcatctagtcagtcgcaacarttctgttgaattagattctctgcctttcagatgaagaaacagaggttcaggaaagttaataacgtggcaaaggccacagagcataaagtggtagtgcaca

SEQ ID NO: 22008 - DNA, 201 bp, Homo sapiens
gtggcatgatcgtaatcactagttagctagtgctggggcaaggactggaatagatgcctcagagatgtcatgttatgtctgtgctgtcacacagcacatamaggagcagataattattttcttaatgacaccctggctgcatttggtaggggtgggattttttcccccaagcaactattactgaaacacatcactgctgtt

SEQ ID NO: 22009 - DNA, 201 bp, Homo sapiens
agtcgcaacagttctgttgaattagattctctgcctttcagatgaagaaacagaggttcaggaaagttaataacgtggcaaaggccacagagcataaagtrgtagtgcacatgtgaaaagcactagctctgtctcagtcttcagcccaaagaagaggcaatggaattaaagaggaaataggaaacctgaaaaatgcttcac

SEQ ID NO: 22010 - DNA, 201 bp, Homo sapiens
gacaacctgtgagtctccaacttattggctatttttttcttaagtgatgtttgtgtgtgtgtgtatgtgtttatgtgtatttatttgttttaactagcctrttaggtcttatttaacatccagtaaagctctgtttttaagccagatatttatgcttcagagtaggttggaaccccttgtgtaatcacctagtatatttct

SEQ ID NO: 22011 - DNA, 201 bp, Homo sapiens
ctaccggttcaagcgattctgctgtctcagtctcctgagtagctgggattacaagtgcacactgccacgtctggctatttttttgtgttttagtagagacrgggtatcaccatgttgcccaggctggtctcgaactcctaagctcaggcaatccacccgcctcagcctcccaaagtgctgggattacaggcgtgagccacc

SEQ ID NO: 22012 - DNA, 201 bp, Homo sapiens
tgagccaagatcccaccattgcatgccagactgggcgacaagagtgaaactcagtctcaaaaaagtgtgtgtgtgtgtatatatgtatgtgtatatatatrtgtgtatatgtgtgtgtgtatgtatatgtgtgtgtgcacatatgtgtgtgtgtgtgtatgtgtatacacacacaaaggggacttcaaaaggtcatggata

SEQ ID NO: 22013 - DNA, 201 bp, Homo sapiens
gtatatagaagtatacattttctgctgactagatttaatatttaaatgatcttatttatattggattttactctctttatatgccaaggaagggcttactsagaaggaggtagttgcgtaaagacctgagaaggtagggaagtgaggtctgcagttctggggaaagagtgttgacagcagagggaacaagatgaacacagg

SEQ ID NO: 22014 - DNA, 201 bp, Homo sapiens
tagtggcgcccgcctttagtcccagctacttgggaggctgaggtgggagatgcacctgtgtgtatgaggttgaggttgcagtgagccaaaatcacgccackgcactccagcacagacaccagagtggtgtcaaaaaaaaaaaaaaatatagaagatgcgatgcatatagatatacaactattttttcacactacagactag

SEQ ID NO: 22015 - DNA, 201 bp, Homo sapiens
aaaattttgttcttttggaacttgcagggaaatacagatattaataatatcatatctattattttattaatgaatcataagatacagataatagatcattyggtgacaagcaccatgaaggtaaagtggactgaagggctcattaagaaagggatctctgaaggtgatatttgagcagaggccaaaagaaatatgggaacg

SEQ ID NO: 22016 - DNA, 201 bp, Homo sapiens
atgacttaatgaactcctcaccagagaaagagtgtgtctttccattcttcacccttgaaactaagtttagatctacaaaatgcagtgggtgagggagacaratcctgacagggaaatccaaaagaagatggagggctggctgaagtgacatggaaggactctccattacttggtgggattgattttagaaaaatgttctaa

SEQ ID NO: 22017 - DNA, 201 bp, Homo sapiens
aagatcctaatatttcttagaaggagagaaatcctttactcacaggaactgtacacacatgttcacacatatgcacaagcatgcctgctatccataagcawttgtcatctttcagatgatggaagctgtttgagacccttaagggactgtagtcatgactcctgtcttttcagtatccctttccccttatcactgtgatcc

SEQ ID NO: 22018 - DNA, 201 bp, Homo sapiens
acacagaaccacgagttccaatgaggagcagtggaagattgtacctgaaggcgctgattgtgctattcaatctggcctcttatctagaaaaacccttagayacttgggtgctttaaaacctgggataagcccaggaaccagtgtgaaatcatgacttaatgaactcctcaccagagaaagagtgtgtctttccattcttca

SEQ ID NO: 22019 - DNA, 201 bp, Homo sapiens
acgcacacacacacacacacattagttgggtgtgataacctacacctgtagtcctagctgcttgggttgctgaagagggaggatcccttgagctcatgagwtcaaggctgcaatgagttatgatcatgctactctactccagcttgagtgatagggcaagaccctgtctctaaaaaacatttttaaaaagagaaaattaaa

SEQ ID NO: 22020 - DNA, 201 bp, Homo sapiens
ttcagtgggcagctggaggttccaggggattctggtgggaaagaatgtagtcaatctgtctggctccaagggcctgactgggaagaagttgaatctctgtrggagacaactgtggaaaaacatactgccctaaacgatatcatgagaaatagtctaccctagaagcaggagtggaagaaggggggatgagaggagaatagg

SEQ ID NO: 22021 - DNA, 201 bp, Homo sapiens
gtagtcaacaacctcaaaataatagttgttgtaatgagagtagaaaattttgccaaggaacaattaaaacataatacaagttgcagaaatgctttggtgcmtgcttacattttgttgagatctgacaaacgggaagtaaaatttggtcataaaagtctaagttggagaatcatttattagtacagatactaaggaaaggtt

SEQ ID NO: 22022 - DNA, 201 bp, Homo sapiens
ggaggggcagaggttgcagtgagccgagatcgcgccgctgcactccagcctgggagacagagcgagactccgtctcaaaaaaaaaaaaaaaaacttggctmcctgggccgatgcagaggctcacgcctgtaatcccagcactttggaaggccaaggcgggtggatcacgaggtcaggagatcgagaccatcctggctaaca

SEQ ID NO: 22023 - DNA, 201 bp, Homo sapiens
ggagtttcctaacaagggaaggattcagagagaggctaggatgtgaagatggaaggtctgactgcgtgtcaactgaaaccttttttacacttaaggtgttraatggttttgtactcagaacattgatggggtaaaaaaatctcatttataattaagagcagaataaatgtagtgactataagaaaccaggctaggttagaa

SEQ ID NO: 22024 - DNA, 201 bp, Homo sapiens
agaaatgtttgagatgcctgttaggcaccagaatagacataaaaagggagccggcaatacaacctggagttgagatgagagttttggagtcatcagcatayaggtgggatttaaagtcatgagaaaggctgagaggtgagatctcaataggagcacaagtagatgaaaaagagaagctgtccaagaattggaccttgggta

SEQ ID NO: 22025 - DNA, 201 bp, Homo sapiens
taaggtgttaaatggttttgtactcagaacattgatggggtaaaaaaatctcatttataattaagagcagaataaatgtagtgactataagaaaccaggckaggttagaatacatgtagtgactataagaatcaaggttaggttctgcttgtacacagaatggagccaaggatctaagacaattggggaacatctatgcca

SEQ ID NO: 22026 - DNA, 201 bp, Homo sapiens
aatctcatttataattaagagcagaataaatgtagtgactataagaaaccaggctaggttagaatacatgtagtgactataagaatcaaggttaggttctrcttgtacacagaatggagccaaggatctaagacaattggggaacatctatgccatagtttacgtccttttttctgcctctgtactagtgacatcaaggac

SEQ ID NO: 22027 - DNA, 201 bp, Homo sapiens
ctttggagcctcaggttgtgaggactaaatcaggtgtatgtgaaaggacctggtatatagtaagtgttaaatgctaattgttccatataattatggtcctycttaataataaacattaatagaatcattagtgaatctttggctgaattatatttctatcatacgtagagttgttcccaattctaacctatatttctcgta

SEQ ID NO: 22028 - DNA, 201 bp, Homo sapiens
gatgaatcatgtaatgaggattttgggtggttatggacttgtagcaccaccagcagcatatgagctgatgtatggttagtaggactgaaaaaatgtcaagraagaggaggaaaggagactcatggtatggaacagattaaggacttatttacagatgcagtgaaggaacacgtttgaaatgctccaattcttcaagttggt

SEQ ID NO: 22029 - DNA, 201 bp, Homo sapiens
tcacaggagaacatggaactgcagcaaacatctcaattaatggatcaatcctcacaacagtattggctgcggacagatgtcttctgtatagttaagaagtsagggttccagtttataggatttgcatttttataacagctttatcaagatataatttacataccataaacattaacccttttaacgtatgcaattcattgg

SEQ ID NO: 22030 - DNA, 201 bp, Homo sapiens
agtgaggatattgatttagtaagtgaaagggcactgaaagaacgaagtcttagaatattagagaaagaattgatggaaacatgacttttaatttttttttkaatcaatcttgatgtttattttggatctaaaataaggaaccaagtataagactgctttgaaatcataatctgaacattattttaaacatttcactagcaa

SEQ ID NO: 22031 - DNA, 201 bp, Homo sapiens
gaacctgggaggcagaggttgcagtgagccaagatcgtaccactgcattctagccaggacgacagagtaagactatgtcttaaaaaaaaaaacaaaaaaaracggctcagattgtcccctcctaagtcattgccctcaccacaggcatttcctaattttatttgatttttttttttttctgagtttgtttccttgtgttat

SEQ ID NO: 22032 - DNA, 201 bp, Homo sapiens
ctgctgctgagctcacacctcttgtggaatggggaacacacaggcaaacgggtgccagggctgggacaaacgcttttgggctccagccccatggcagtgtytaggggtgtgttaaaattaatgctcttttagcagttgccatctctggacagcctcttacaccctgccctcttggtacctgagtttttgtctagcatccag

SEQ ID NO: 22033 - DNA, 201 bp, Homo sapiens
cagaggttgcagtgagccaagatcgtaccactgcattctagccaggacgacagagtaagactatgtcttaaaaaaaaaaacaaaaaaagacggctcagatkgtcccctcctaagtcattgccctcaccacaggcatttcctaattttatttgatttttttttttttctgagtttgtttccttgtgttatctattaatacag

SEQ ID NO: 22034 - DNA, 201 bp, Homo sapiens
taagtatcatgtttatgtaatatatgtattcctctcccccctttatatctgcatcccatgtcttgtttccagtaggatttaactggtatgtggttgataasttaacttttaaatgtatgtaatagccagagccttttaaagttatcttaaaatgttcactgtaaagcttcgttaatagctgctctaaatctgtttgtcaag

SEQ ID NO: 22035 - DNA, 201 bp, Homo sapiens
aagatcgtaccactgcattctagccaggacgacagagtaagactatgtcttaaaaaaaaaaacaaaaaaagacggctcagattgtcccctcctaagtcatkgccctcaccacaggcatttcctaattttatttgatttttttttttttctgagtttgtttccttgtgttatctattaatacaggtagtaagtacgtggtcc

SEQ ID NO: 22036 - DNA, 201 bp, Homo sapiens
tctaggaaaggaaatggtgggagagaggctttacgctatatgcttattttgtaccattatctttttacgtaacaaaaaatattatgtgccaggcgctgttmtaagcactttataaatattaacttgcttagtcttcttaacaattctatgagctaggtgctatcaatatcctcattttacagatgaggaaactgaaggctt

SEQ ID NO: 22037 - DNA, 201 bp, Homo sapiens
gcttagaaaggacaggcagtgaatacaaatgatttgttcaagaaattcaacaatgaaaaggagaaaagacacgaggggagagatggagtggacatgggatsacataaagggtttggggtttgtttcttgatttgtttttccaaaatgggagaaggaggatgtttgaagcagacatgaaagaaccagtgaaaagggaagata

SEQ ID NO: 22038 - DNA, 201 bp, Homo sapiens
agaggttcaggaaagttaataacgtggcaaaggccacagagcataaagtggtagtgcacatgtgaaaagcactagctctgtctcagtcttcagcccaaagragaggcaatggaattaaagaggaaataggaaacctgaaaaatgcttcacatgctttagagagacagtgtaatgactaggaaaatagactgcagaacagcg

SEQ ID NO: 22039 - DNA, 201 bp, Homo sapiens
tactttccagcttttattttagattcaggggtgtgtatgcaggtttgttacatgggtaaattgcatgtcatggggatttagcctacagaatattttgtcamccagttaagaaacatagtacccgatgggtagtattttgattctaaccctcctcctacccttcaccctcaagtagtcccatgtctactgctcccttctttg

SEQ ID NO: 22040 - DNA, 201 bp, Homo sapiens
gtcagaagacagtgtctaaaattaacatcaacaagtagccgtttcaacagattctttagagagatggtgaaaaactactggaagaatttagaaacagtagkaccttttttttttttttttttttttttttgagacggagtctccatctgtcgcccaggctggagtgcagtggcaccatctcggctcactgcaacctccgcc

SEQ ID NO: 22041 - DNA, 201 bp, Homo sapiens
gtactttttattttaatttattttattttttaattattttttctaagatggagtcttggtctgttacccaggctggagtgcaatgccatgatcttggctcrctgcaacctccacctcccaggttcaagcaattctcctgcctctgcctcccaagtagctgagactacaggtgcgcactaccacgcccagccaattttttat

SEQ ID NO: 22042 - DNA, 201 bp, Homo sapiens
ggacagggcccacgaaacacatacacagttacgtaatgttcttgtgtgaagacctctccctaagtgtgctattgcagataagaaggccaacaaaggtcagrcatggtggctcacacctgtaatcccagcactttgggaggctgaggcaggcagatcaggaggtcaggagttcgagaccagcctggccaacatagtgaaacc

SEQ ID NO: 22043 - DNA, 201 bp, Homo sapiens
tgtctccatagtttcgtcttttgcagaatgttatatacttgaaatcatacagtatgtttcctcttgagaatgacttattttgcttagcaatgtgcatttargtttcctccatggtttttttattttgtggtattattgctcatttcttttttatctctgaattatgttccatttcataggtgtaccactctattcactcat

SEQ ID NO: 22044 - DNA, 201 bp, Homo sapiens
aaaaaagccttggtatgtccttttattttcagattatctctggatgtgcctactttcttttggaagctggggttacttttattttagttaggttgagcacyctgtttcttggttttaaactttagctggagttctagagctagaagcttggaccaagtgacctatcagctggataggaaatttgcaagcattggggaaggt

SEQ ID NO: 22045 - DNA, 201 bp, Homo sapiens
tatattagtttttaagtaactttcccctggtttttccttgccatcttgattttgtctcttatttctctaatgccctatgttctttcgatttaaatattatracattagtttcttcctttctgttgcctccaatgggggttgttattatctaatatactctggtttcaagctttaatagccatgagaatcgcctggaatgct

SEQ ID NO: 22046 - DNA, 201 bp, Homo sapiens
tgaaggagattgggttggattaccactgttcctttcagtcagtatttgaacctcggttttggtttccatcttcaagatgttatagttgtttaaaggaaatrtaccatatttcatcagttctttttttttttttttttttttttgagatggagtctcgctgtctcgccaggctggagtgcagtggggcgatctcggcttact

SEQ ID NO: 22047 - DNA, 201 bp, Homo sapiens
tatttatttttgtagagacagggtctcactatgttgcccaggctggtctcaaactcctggcctcaagtgatcttgccacttcacccatccccaagtgctgkggttataggcatgaggcaccatgcccaacctagagcaggtcttaagcctctttcctccgcttatggtggatagagttgtatcaccccaaaagttatgttc

SEQ ID NO: 22048 - DNA, 201 bp, Homo sapiens
tttggaaaatgagatattcttccttcagttcattgtgagagaaggaaacagcaagaatgcttcttgcagtgtttctgaaaaattatttaactggatttaawgggcttattccattctttgaagagctttttaattactctctatctttgtgcagtccaacaacagttacaatctttatttaaaggctttaaaaatcctcat

SEQ ID NO: 22049 - DNA, 201 bp, Homo sapiens
aaatgtttatcttcacccagcaaaagtaagaatgtagctgagagaaaatagaaggtgagagacagaaatatggtttggggtaaagaaggagataaaaaggktttttttcttttttcttttctttactttttttttttttttttgagacagagtctcactctgttggccaggctggagtgcagtggcatgatctgggctcac

SEQ ID NO: 22050 - DNA, 201 bp, Homo sapiens
ctcaaatgagaggaaatctacctagaccttgtgtctgctgactgttggaatatgaagactgccttttagcctattatttaaacatatgtgctaatgaaatmattttctgagttttactgctagtaatcaatttcatgtacacatatgccagctcaactccttgttaccatataatgcaaatctgtttttctgagatggaac

SEQ ID NO: 22051 - DNA, 201 bp, Homo sapiens
cagcaactttctggatgataggaagaagatggaacattgttaatggataaagtagttggggaaaaggaaaccctcagtctggaatgtgcaacgaggacctyggagaagttccatgttcataatcagcagttcaaaaaaaaaatgtcagagtgccaagagaaaccgaaaatagagactaatgaaaattttctagacataaaa

SEQ ID NO: 22052 - DNA, 201 bp, Homo sapiens
atgtacacatatgccagctcaactccttgttaccatataatgcaaatctgtttttctgagatggaacttcaacctgtatcactatctggcttcctgaaacwcataaaataataaatgaattactaaggtaaacataaatcgttttccatgattatttttgtatttacagtattttacaaaagatgattctctttgtcagaa

SEQ ID NO: 22053 - DNA, 201 bp, Homo sapiens
aacatagtgaaaccccatctctactaaaaatacaaaaattagctggtgtggtggtgcacacctgtaatcccagctactcaggaggctgaggcaggagaatygcttgaacctgggaggtggaagttgcagtgagcccagatcacaccattgcactccagcctaggcgacagagcgacactctgtctcaaaaaaaaaaaaaag

SEQ ID NO: 22054 - DNA, 201 bp, Homo sapiens
agtatcctcttttgatcttattttctttagctctaaatgggatttcaaatttaaatgtgctttggttagcagattaacataaacgtttattaattcagatratttactaatattttatttgttaatataagagaaaattatttctcttgtattcctgaatgaatttttttctttcatttgtttgatggactcagtacttaa

SEQ ID NO: 22055 - DNA, 201 bp, Homo sapiens
gaaactactgaaagaatctctttcaagttagccttcgttggaataaattccttgaaaaagaggtagttcatcagctaggacccaactctatatatatatayacacacacacacacacacacacacacacacacacacaggcaaattgtgttcttggaagtgctggtggtggtttcttctatatttttggttacttttagct

SEQ ID NO: 22056 - DNA, 201 bp, Homo sapiens
agtacagaaccactctatatactatgattaagttataggccagacacagtggcacctgtctgtaatcccagcactttgggatgccgaggcaggtggatcasttgagctctggagttcaagacaagcctgagcaacgtggtgaaaacctatctctacaaaaaatataaaaattagccatgcatcgtggtcacagctacttgg

SEQ ID NO: 22057 - DNA, 201 bp, Homo sapiens
tcctacttcctccctcctcttctcctcctccttctccccctcattctcctcctcctcctttcttccttctccccctccttctcctccttctcctcctcctyctccttcttcctcctccctcttctcctccttctccgcctcttctccccctacttctccttcctcctccctcctcttctcctcctccttctcctgctcctc

SEQ ID NO: 22058 - DNA, 201 bp, Homo sapiens
ccgaggcaggtggatcacttgagctctggagttcaagacaagcctgagcaacgtggtgaaaacctatctctacaaaaaatataaaaattagccatgcatcktggtcacagctacttgggaggctgaggcgggaggattgcttgagctggggaggttgaggctgcagtgagtcaagattttgccattgcactccagctgggc

SEQ ID NO: 22059 - DNA, 201 bp, Homo sapiens
tcctaatttggcgcaggcggaaggcctgcctggaattttgaagaggtgtagtaagatgcacaccacaggtttacacctgaaaacaactaatcctattccawctgggctggggtgtaatgagatagagctacttatcaagagtataatgagatgcaaaagccattggaactgagctggaaatttatttaaaagtgaactaag

SEQ ID NO: 22060 - DNA, 201 bp, Homo sapiens
tgtcctatttgtcaacgaaccactaatagaaatttcttaggaacatactgtactagatgcctaggaaaagaaaatatattaaaaaccagtgtaactccaaytgattaccccatcatagttcttattacttcagaaaactattaaaagaacactaataagttttccatgcatgggttcatttttataaccaattgctaaatt

SEQ ID NO: 22061 - DNA, 201 bp, Homo sapiens
aattcagatgatctcaaggtcatatagaatattctccatgtgagtctatatgctagatcatcaagtaagtctcaatacatttaaaagaattgaaatcacayaaagtatatcctctgaccgcaacagaattaaacaaaaaaagggaagaaatttggaggtccccaaatatttggaaataagacaacaaacttctgaatatac

SEQ ID NO: 22062 - DNA, 201 bp, Homo sapiens
gaggtgtagtaagatgcacaccacaggtttacacctgaaaacaactaatcctattccatctgggctggggtgtaatgagatagagctacttatcaagagtrtaatgagatgcaaaagccattggaactgagctggaaatttatttaaaagtgaactaagacgcaaacaccaggaaagaatttctgctaatggaggtaggtg

SEQ ID NO: 22063 - DNA, 201 bp, Homo sapiens
tgccaccatacccggctatttttttgtttttgacgtggagtctcactctgtcgctaggctggagtgtagtggcatgatctcagctcactgcaacctccgamtcctgggttcaagcgattctcctgccttaccctcccgagtagctgggattacagccacgcaccaccatgcccagctaatttttgtatttttattagagac

SEQ ID NO: 22064 - DNA, 201 bp, Homo sapiens
tcctcctattcatccctccctccctcaacagcctgaacccctggcaaccactgatctttttattgtctccatagtttcgtcttttgcagaatgttatatasttgaaatcatacagtatgtttcctcttgagaatgacttattttgcttagcaatgtgcatttaagtttcctccatggtttttttattttgtggtattattg

SEQ ID NO: 22065 - DNA, 201 bp, Homo sapiens
ccagtgaaactcataggacccagaagaggcaaatgcagactacgtaacagtgatatcttgaaaattctgggcaaatgcaagattcctacagaggataagtyccattgaagtagagcttccagaacaaagtagcagaccacatgaggaaatacaccatcatgagaaaagaaggcaaatgcaacaaacaggacacttgacatc

SEQ ID NO: 22066 - DNA, 201 bp, Homo sapiens
aagaactcaatttgtactacctgcgtagggagaaaaagccttaagccaaaaataaaaaataaaaaaggaaaaaaaattacaaacctatttggaaccagtgwaactcataggacccagaagaggcaaatgcagactacgtaacagtgatatcttgaaaattctgggcaaatgcaagattcctacagaggataagtcccattg

SEQ ID NO: 22067 - DNA, 201 bp, Homo sapiens
agattcactcaaaggtaggttgggagtagttttctcatttcatgggagtgaaattagagagaggtggagatgtgcccaagtgagtctatgtcagaaccagrattagaattttggaggcagaccaaggagaataagtggcagtgggaattaggaactgctgcatacagtagtaccagtgaagactactaaccagattatagg

SEQ ID NO: 22068 - DNA, 201 bp, Homo sapiens
atcctggctaacacagtgaaaccctgtgtctactaaaaatacagaaaaattagctgggcatggtggtgggcacctgtagtcccagctactcaggaggctgrggcaggagaatggcatgaacccgggaggtagagcttgcagtgagccgagatcacgccactgcactccagcctgggcaatagagcacgactccatctcaat

SEQ ID NO: 22069 - DNA, 201 bp, Homo sapiens
aaaaacccagcatctctccttctactagatttccttttttttttttttttttttttttgagacggagtttcgctcttattgcccaggctggagtgcaatgkcgcaatttggctcacccaacctttgcctgccgggttcaagcgattcttctgcctcagcctcccgagtagctgggattacaggcatgcaccacgacgccca

SEQ ID NO: 22070 - DNA, 201 bp, Homo sapiens
gtgcaactgccattgacaatgagtataattgagcaggcatctgctttattttcaaaatgaagaatttttcctttcctttccttactgcagaatattttagrttttatacaatggggaaattagactgctctattgaaaaaaataactttttctgttattttttctgttattaacattctattcatagtagctctatgagga

SEQ ID NO: 22071 - DNA, 201 bp, Homo sapiens
gggttgtttgtttttttcttgtaaatttgtttgagttcattgtagattctggatattagccctttgtcagatgagtaggtggtgaaaattttctcccattytgtaggttgcctgttcactctgatggtagtttcttttgctgtgcagaagctctttagtttaattagatcccatttgtcaattttggcttttgttgccatt

SEQ ID NO: 22072 - DNA, 201 bp, Homo sapiens
attgacaatgagtataattgagcaggcatctgctttattttcaaaatgaagaatttttcctttcctttccttactgcagaatattttagattttatacaayggggaaattagactgctctattgaaaaaaataactttttctgttattttttctgttattaacattctattcatagtagctctatgaggaaaactcgataa

SEQ ID NO: 22073 - DNA, 201 bp, Homo sapiens
aggctgaggcaggagaatcgcttgaacctgggaggtggaggttgcagtgagccaagatcgtgccattgcactccagcctgggttacaagagcaagacttcrtctcaaaaaaaaaaaaaaaatccctttactaatttgaatatcaaaataaaactttacctaaatttaaaatagtattttccagctggtgatgaatggtatt

SEQ ID NO: 22074 - DNA, 201 bp, Homo sapiens
caaaatgtggtatatccatgcagcagaatattatgtggccatagtggacttgaagtactgatacgtgctacatgctgccaagtctgtcctgcagactctgrccaagcgacagatggaagaagttcactggcacaggtattttgcctaacaatgcggctagaggaccccacagcttagcaccgctgatgagagtgcagtgca

SEQ ID NO: 22075 - DNA, 201 bp, Homo sapiens
aggtgagattgcttgagcctgagaggcagaggttgcagtgagctgagatcatgccactgcacttcagcctgtgtgacaaagtgagaccatgtctcaaaaaragaaaaaaaaaaaaaaacaacaaaaccacattggtgagggcctgctaagtgtaagacatcttaggtgttggaagtagtggaagttgggtacaaagaaata

SEQ ID NO: 22076 - DNA, 201 bp, Homo sapiens
gcattcgcaacgtggctgtttggtgcaagaggcctgtcttggctttctacgtgccttcctcactaagcttaattatttctagcttttcattagttaattakttaatatgttttcttgagacagagtcttgctttgtcacccaggccagagtgcagtggcacgatcttggctcaccgtaacctccacctcccaggttcaatt

SEQ ID NO: 22077 - DNA, 201 bp, Homo sapiens
tgagattgcttgagcctgagaggcagaggttgcagtgagctgagatcatgccactgcacttcagcctgtgtgacaaagtgagaccatgtctcaaaaaaagraaaaaaaaaaaaaacaacaaaaccacattggtgagggcctgctaagtgtaagacatcttaggtgttggaagtagtggaagttgggtacaaagaaatataa

SEQ ID NO: 22078 - DNA, 201 bp, Homo sapiens
cctcccggatttaagtgtttctcctgcctcagcctcctgagtagctgggattgcaagcatgtgccaccacacccagctaatattttttatttttcgtggaratgagatttcaccatgctgtccaggctggtcaagaactcctgacctcaggtgatccacccacctcggcctcccaaagtgctgggattacaggcatgagcc

SEQ ID NO: 22079 - DNA, 201 bp, Homo sapiens
ccacgtgggtcagactggtctcggacccctgacctcaagtgatcctcctgcttcggcctcccaaagtgctgggattacaggcgtgagccaccagtgccgarccctgcttgattattaaatccaaattgtcctcctgctatcttaaaagaaatgaaatttctcagtagtagcaaacaatgtcaatctatttgagaccattaa

SEQ ID NO: 22080 - DNA, 201 bp, Homo sapiens
tgctgtccactaccgctgtttgctgccatcgcagacccgccgctgacttccatccctccagatccggcagggtgtccactgtgctcctgatccaccaaggsgcccattgccgcccccgatcgggctaaaggcttgccattgctcctgcacagataagtgtccgggttcgtcctaatcaagctgaacactagtcactgggtt

SEQ ID NO: 22081 - DNA, 201 bp, Homo sapiens
gactgggcgacaagagtgaaactcagtctcaaaaaagtgtgtgtgtgtgtatatatgtatgtgtatatatatgtgtgtatatgtgtgtgtgtatgtatatrtgtgtgtgcacatatgtgtgtgtgtgtgtatgtgtatacacacacaaaggggacttcaaaaggtcatggataaaaggaattaaaagatacaaaataaaaa

SEQ ID NO: 22082 - DNA, 201 bp, Homo sapiens
taaaatctttaaggcccatcacatatttataatttaggtccttgccttggtgtgttttcctcagtgctcccaaccatagaaaagcaggacaagtttacagytgctattcgtctaagtctgatgcttctttcccataagttgttttgggaattaagcatcttgctgaaagtgaatgtgccattttgaaaatcttagcaaatt

SEQ ID NO: 22083 - DNA, 201 bp, Homo sapiens
tatagattttgtggaggaataggacgtaggagatgacatcaaggaggaagaaaagataaaaaggaagcaagacagttccatgcacagaccagtcagctacrgtgaagcatcctgcaaactggcaaactgattatcagcagtggctgtcaccaggctctgccccagcaggtgagagttgctacctgccaatttgtttagaca

SEQ ID NO: 22084 - DNA, 201 bp, Homo sapiens
gcatattgcttatagaaaatatagctcctcttttttttccccatgtaccttatggtcttatattaacagtattttaaatgcaaaacaaacgtatgtttccmctcaaattctggtctctttttctgtataatctttgttgttgttgttgttgatattgacaagagaataacataattattgatttcttatagctgctttaga

SEQ ID NO: 22085 - DNA, 201 bp, Homo sapiens
tgatgaggggtgggagattatacaatataacatttgaactataaaatgctaagtaattttaacaaaaaataatagcaaacattcaatgacaaggtatattytaaaatgcgtgtgcacacacacacacacacacacgctattcactttcaccataacccaagaagtagatatcataatcttcatttttacaaattgggaaac

SEQ ID NO: 22086 - DNA, 201 bp, Homo sapiens
atggaaaggttttattcagatcagccatttctctttttcctggaggcattcttaatctccgtgttctaacctttaacaatataggcttcagttgccgtgtratgatttccattgcctggaatctacatgtttaaattcttccaaagaattgtgcaccttctgtttttctcagttgcagatggagtcaaaccagaaaaaaaa

SEQ ID NO: 22087 - DNA, 201 bp, Homo sapiens
tgttaatgaaaataaacattactttgaacttgcaagtggtattccaccaaagttaaaaacatctatgaagtcttacttttccaacttgaatttatccatasataattaaaagtaaaatgtcctagacttgagaaattttttattatccaaatagctcttacatgcccccaaaagatctccacagagtgcaagagactttat

SEQ ID NO: 22088 - DNA, 201 bp, Homo sapiens
tctcagaagatagaactgaagaaatatccatgaaggtgggaaaaaaagacaaaaaagaaaaaggaccctaggaagcagcaggatattccataactaaattwtaggtctacagagaaaaaaaggagagaaaatagagagggccataaaaaaaattaagaaaaattcccaaaatggaaaacaggaattctcaaaatgaaagga

SEQ ID NO: 22089 - DNA, 201 bp, Homo sapiens
tagagttccatgacataaagccagagagcggtttgagagatctagagccctgcctcaactcctagctctcaaaagagactatcacaggaaagctatctaaraggaaacaaattagctcccatccaattccataaagatactgtaaacatgtctgagatatgcagtatataacaggcattttaatatttgttgattggacaa

SEQ ID NO: 22090 - DNA, 201 bp, Homo sapiens
ggaacctgtccttgctgcatctggcctgtacatgtggcattgtattacactttgtgagtgtgcttttatgggagggatccgggtgtgtgtggaaaagatayattgcagctgaagggaagaaaaaaatctgtcctgggagggtaatttgttccttgggagtgctgaataaactgtgttgtacacctgaagttgaactgtgac

SEQ ID NO: 22091 - DNA, 201 bp, Homo sapiens
acaaataaaaatatagtagttcctccttatccacaattttgctatctgtgacttcagttacccatagtcaattgtggtccaaaaatattaaatattaagaragcattttatggcttatttttggtatatccaaattgccagcatcactacttttggactctggggccattattaagtaaaataagggttacttgaacagaa

SEQ ID NO: 22092 - DNA, 201 bp, Homo sapiens
attagcaaggtgtggtggtgcgcacctgtattccaagctactcgggagtctgaggcagggaaatcactagaacctgggaggcagagattgtggtgagcccrgatcacacccctgcactccagcctggctacagagcaagactccatcttaacaaaaagaaaaaaaataaaatattctttaaaagtacatttcttcaattgg

SEQ ID NO: 22093 - DNA, 201 bp, Homo sapiens
aggagaatcgcttgaacctggaaggtggaggttgcagtgagccgagatcgcgccactgtactccaacctgggagacacagcgagactccgtctcaaaaaawaaaaaataaataaataaataaataaataaataattaaataaatgagtcagtaataaataaataaaaatttaaaaagtatcatcatggagttaagggtgct

SEQ ID NO: 22094 - DNA, 201 bp, Homo sapiens
gccacaaatgtcttaggaaaagggaaaagaaagaaaccctagcccaggaggatacctgggaaaaactgaggcttccactcaaaagatacagcgactttaartaatcattttgcagaaatcacttttggattcccttgtatctgcatctctgctatagagtataaagcatattagtttaaaagactattatttcaactaagt

SEQ ID NO: 22095 - DNA, 201 bp, Homo sapiens
agaatcgcttgaacctggaaggtggaggttgcagtgagccgagatcgcgccactgtactccaacctgggagacacagcgagactccgtctcaaaaaaaaawaaataaataaataaataaataaataaataattaaataaatgagtcagtaataaataaataaaaatttaaaaagtatcatcatggagttaagggtgctgca

SEQ ID NO: 22096 - DNA, 201 bp, Homo sapiens
tttaatgttcctgtttagaaatcgagaacaaatgtggagttttctggacagcagcacttttgttgcaactcctggtatgtgccaaagctgtgaactacccstgaacgagtactgtaccttaagtcgtccatgagaaggcatctttgtggttagaagagtttcctcccaacttacctgctccctccatcatcctccatctgg

SEQ ID NO: 22097 - DNA, 201 bp, Homo sapiens
caaactgggtcacacagattctccatcttgggaatttggatttgggaccaaatgatgacagtttagtccttgctgacctaacgtaaagagattagaatccraggaaattgtggtacagctgacttctactgtacgagtagcagagaatgttccttgcagaggacagagggaactcagatctgaagagagaaggaaagttat

SEQ ID NO: 22098 - DNA, 201 bp, Homo sapiens
cggatttaagtgtttctcctgcctcagcctcctgagtagctgggattgcaagcatgtgccaccacacccagctaatattttttatttttcgtggagatgaratttcaccatgctgtccaggctggtcaagaactcctgacctcaggtgatccacccacctcggcctcccaaagtgctgggattacaggcatgagccaccac

SEQ ID NO: 22099 - DNA, 201 bp, Homo sapiens
ccaacaaaagaatttttttttttttttttttgttagagatggtatctcactttgttgcccagactggtcttgaactactggcttcaagcagtcctcctgcytttatctcccgaagttttgggattacaaggatgagccactgcacctgtccagaatcctttttctcatggaatattaaactaagatattatttctctgagc

SEQ ID NO: 22100 - DNA, 201 bp, Homo sapiens
attattaaaatcaaactattagcgatgtctcttgataacttgctctgactttgtgcaagtcacttaaccagttttctcagttgtaaaaggaagaaggtaartgattttttttttttgaatctcatttatctccaaagctctaggttcttggattatcagtcacttgcccactatatgttcctcacagcagagtctggggac

SEQ ID NO: 22101 - DNA, 201 bp, Homo sapiens
taaccagttttctcagttgtaaaaggaagaaggtaaatgattttttttttttgaatctcatttatctccaaagctctaggttcttggattatcagtcactkgcccactatatgttcctcacagcagagtctggggactagttagaggttcggagtgtggtctctggaatttggcttactacctaggtgactttgggcacag

SEQ ID NO: 22102 - DNA, 201 bp, Homo sapiens
aagctctaggttcttggattatcagtcacttgcccactatatgttcctcacagcagagtctggggactagttagaggttcggagtgtggtctctggaattkggcttactacctaggtgactttgggcacagtaactccttctatgtgtcacattcattttcttaaactgtgaatataatatacctaacctcatagggccat

SEQ ID NO: 22103 - DNA, 201 bp, Homo sapiens
ctattagaatctagtaggagataatgttgaataggaagattaagaccaactaaaaaggggtcataaaaaaataacattctgaaaatgtagatgttggatarcagatatggaatcattataagtgagcaaggaagcagtgtttacggaagatgaatttggcagaggaatacaacatagattaatgcttatccttcctcattc

SEQ ID NO: 22104 - DNA, 201 bp, Homo sapiens
ctttccattttgtgtgtgtgtcttcaatttctttcatcagtgttttataattttccttgtagatgtcttttactttgattaaatttattcgtaggtttttyttattgtaaattggattttttttcttgatttctttggtggattgattgctgttcgcatctagaaatgctactggatttttgttttgttttgttttgtttt

SEQ ID NO: 22105 - DNA, 201 bp, Homo sapiens
tatcaagaagcaaaattcccttctaagtgttgaattcaaaaccatttgtgaagaaggcttttggaagcagaaaacttttgaaggccattctgggttttctygtccatttcttcacaccctagggtggccatgaaactcaagatcagaccagatctcttggggttcctggagtcaccataaaaaataaattggctttctgta

SEQ ID NO: 22106 - DNA, 201 bp, Homo sapiens
ttttggaatttctggctcaaggtggcttttcgcatccctcatcctgcctatttctttatctgtattttattctctattttggtgtcttgtatttcctcagkgcttcctatgaattattcatttgagcccctctcttgggcatttaataatttattatttatctttgagatttttttttttttggttatccaggctggagag

SEQ ID NO: 22107 - DNA, 201 bp, Homo sapiens
tttgtccgtgtcttttcttagttttggaatttctggctcaaggtggcttttcgcatccctcatcctgcctatttctttatctgtattttattctctatttkggtgtcttgtatttcctcagtgcttcctatgaattattcatttgagcccctctcttgggcatttaataatttattatttatctttgagattttttttttt

SEQ ID NO: 22108 - DNA, 201 bp, Homo sapiens
cctgtttctatttctttctgaggctttggtttctgtttgtgttttattaatatgacaatatttattacaaaccacattaaactctagttgggtagaatcarggaataaataaatgtggaatcttattacttaaaagtaaatgaattctaaaagaagggaccagcctatgaacactaagatgttgtcattccagcagttatc

SEQ ID NO: 22109 - DNA, 201 bp, Homo sapiens
aatgcaatggctaatctttatgagaaagaagaaactttacagcacattttgagtaacttagtgcatgggctcagtgggccacctgctgggacaccaccttytaatgggttccacaattaaggcattgctgggtcttgcctttgcacagccaaaaccagatgatgacgctgttgtcctcttcacagacacagccccctattt

SEQ ID NO: 22110 - DNA, 201 bp, Homo sapiens
gtcccctccctttgtatgggagctctgttttcactctattaaatcttgcaactgcattcttctgctctgtgtttactacggctcgagctgagctttcgctygctgtccactaccgctgtttgctgccatcgcagacccgccgctgacttccatccctccagatccggcagggtgtccactgtgctcctgatccaccaaggc

SEQ ID NO: 22111 - DNA, 201 bp, Homo sapiens
aatttgaacctgccctctgccttaatcccttttctctcctgcgtattttcactaatttaaacattgccagaatcctgtgctgttctcatacttctatgatkccttattttaagttcaaaatgtcatgatcttacccagtgtgtatgtttaatggattaatgtatcattttctttctggccattagccacatgaacaactag

SEQ ID NO: 22112 - DNA, 201 bp, Homo sapiens
cactccagcctaggcgacagagcgacactctgtctcaaaaaaaaaaaaaaggccaacgaaatacgccttaccagaaggggtgctggaaacaaagcaaaccrttttctcattcttatacagaggtacaaatgggagggacatgtggactgctgcctgcatcactagtcactgtgccatggagtaggcccacaggagtaggag

SEQ ID NO: 22113 - DNA, 201 bp, Homo sapiens
ttacaaatggaggcacaggaatgtctgtctgagttcaagcattaaactacttgaacactattcatagcatgtgctaagtgggtgatagctcctggggcatrattctttcactgggggtgccttagacctggaacactaacatagtgcctacctttcagcataaggagtaataaatagtgaaggggtaaacaagtagataaa

SEQ ID NO: 22114 - DNA, 201 bp, Homo sapiens
agaaataattaaactgaccttaggataaaggtcaggccacaaggctccactctttcacagtattaccataatattttcccactgccagattttgaagatgsctgggtgaacatgtccccactcgttctccgtaagcatactcatctaactacagctgtcaaccttaatagttgcgctacaagcagtttctggaagaaaaat

SEQ ID NO: 22115 - DNA, 201 bp, Homo sapiens
aaaaaaaaaaaggccaacgaaatacgccttaccagaaggggtgctggaaacaaagcaaaccattttctcattcttatacagaggtacaaatgggagggacrtgtggactgctgcctgcatcactagtcactgtgccatggagtaggcccacaggagtaggaggggtcctgagatgggaaatcaacatgaccatgaagaagg

SEQ ID NO: 22116 - DNA, 201 bp, Homo sapiens
tacgtattgaaaaaagtaatagcggtaaagcagtatcttgcagctttttactttgagtcccagtggattagcgattttactttactctagaaatgacagtrtagtgatgattatttttcttttgggactgataagaaaagaaatggtgcccaattatattagtcattagtattctttgttataagtattatgggaagcttg

SEQ ID NO: 22117 - DNA, 201 bp, Homo sapiens
cctgagttatatatatattaaaaaaacttacatgcatttgctagtcaggccagtttaacttatgtgagagccaaaaatcttacataattattaacagtttwatgatgatagattattgattataattaaacctaggctgtcagactaatcaatggtaagtttagtcttaggccttgagttgctaggtcagatctggttttc

SEQ ID NO: 22118 - DNA, 201 bp, Homo sapiens
aagtcattatactgagaccttgaaggttttctagcccagacactccaacacatgatcttttctctagcatcccttcatcttgaattttgtccaccctaacwtactgttagtaatacagaactctccaccttttgaggaaacccattccatctctcaatgaaattagctattagaaagccttcctttaatgcaaaacgcagt

SEQ ID NO: 22119 - DNA, 201 bp, Homo sapiens
cttgaggcaagttgtgagaagaaatgtgggaatgattgacagctggcttggttaccttctattgagtaaatatataattatgccattttttaaaaatgttrtttttttgagaagacagtaattgcactagtctattgtataattgttaaagcaatgctatttgcttatttgtctttaatcaatgggtttggactcacattg

SEQ ID NO: 22120 - DNA, 201 bp, Homo sapiens
aggaaacagagaccaaaacaaacaggaaaagcaacttagaggaaacagggattatccagaaattaagaaaaacttaaaaaatgaaaattaatatccctagmagaaataagagaagatattgtattcatgaaacaagagtagtatagtatatgaaaggaactttcagaaaacaagaactcttagaaataaaaaataaagtga

SEQ ID NO: 22121 - DNA, 201 bp, Homo sapiens
ggaaaaagtaacataagttcccactctggtccatgggactggcagcctggcccccaggcttcagacctttctttacttaaaggtggggcttcaccggggayctggccctgtctgccctggagcttgtctgcctcctgctgctgttcatggtgcccaggctgtttgtgccaaggggcacctacaggcctgcaccatgctgcc

SEQ ID NO: 22122 - DNA, 201 bp, Homo sapiens
gaattctttttggaaagttactgttataattatgcactgtatcatgcatgttatacagtgactcctggcagaaaaactgcatacctacagaagtcctagcrcctaaagaaaaaacatgaacctaattgtttatacctagtgttgcttgacaatatctatgaagcaaagttagtggccaagcttatttgagtgtcttagcta

SEQ ID NO: 22123 - DNA, 201 bp, Homo sapiens
agtgaaaccacgtctctactaaaaatacaaaaaattagccaggcgtggtggcgggtgcttgtagtcccagctactcgggaggctgaggcaggagaacggcrtgaacccgggaggtggagcttgcagtgagccgagatcatgccactgcactccagcttgggtgacagagtgagactctgtctccaaaacaaaacaaaacaa

SEQ ID NO: 22124 - DNA, 201 bp, Homo sapiens
caaagtttgaaaaaaaaaggttacagctgatctgaaagggaaatttttgacttggcttagaaagcaagcaataaattgtttatggatatcattccccacarcatgtctgctgaaagaggactgataaaagcaaggcaattgatgggatgaatcattcactcatttatgattatctaccatttctagattataggaatgtta

SEQ ID NO: 22125 - DNA, 201 bp, Homo sapiens
ttgttaaatggcactattgataaacctgaaaggcatccttgactcctccttctttgccatagacaatctgtcaccagatcctactgatgctgcctcctaartgccttacaaacccatttactgtttctttttaaaatgtcccttgcggctgggcacggtggctcacgcctgtaatcccagcactttgggaggctgagatgg

SEQ ID NO: 22126 - DNA, 201 bp, Homo sapiens
tttgtggaccctttcacagacaaaacaagattgataggctcaacatgttttcagtttgaggtttattcacatcagaaatctactgcccaactggcaagccrtcatcagaggattctcagctagccaaccatacgctttaggtcagcaatgagatgggctcacctgattagagaacttcatggcattctgttgtccttcata

SEQ ID NO: 22127 - DNA, 201 bp, Homo sapiens
atttcagaaaaatctgtaggcatctaatgaaatgattggtgttttatccttacctttcagtgctttctcctgctcaagacagccacacgaacacggatctycccccagtgtcagagcagatcatgcagactctcagtgaacttgccaaatcgttccaggatatggctgaccgctgcttgcttgtcttacatctggaagtga

SEQ ID NO: 22128 - DNA, 201 bp, Homo sapiens
cctcttaaatcatcaacatattattttttaagagttatcaagtgttcaagagctaacatttggcttagagtaagcctattcatatgccaaataatttggawgaagtacagaaacctattgctttgggtcttcaaatggatgatcttaacaaagtatgattctctgtgtttctttattgcatgttatgggccatgaatttgt

SEQ ID NO: 22129 - DNA, 201 bp, Homo sapiens
gttactgttgagtttttattccagactttcttttgattatttttggtcctgagcaattttaaaaggcacatagtagaaactgctggttgcttagtatccarttacccaccttttctcctccttttttaccccttcttattgtatttaaggtggcagtgtttccagtgatacatttctcagtgttttctgcagttgggtgca

SEQ ID NO: 22130 - DNA, 201 bp, Homo sapiens
gtggggttttctaaatatacaatcatgtcatctgcaaacagagacaattggacttcctcttttcctaattgaataccctttatttccttctcttgcctgaktgccctggccagaacttccaatagtatgttgaataggagtggtgagagagggcatcgttttcttgtgctggttttcaaagggaatgcttccagtttttgc

SEQ ID NO: 22131 - DNA, 201 bp, Homo sapiens
agtagtagttttgtttattccatacatctttcctactgtccttgccctcatctctgaataccttctctgatatgctccagtcctctgtcttacctatgaarcatccattgatcatttcccttcaagaactcattgcatttcttgtttttaccactcatttgacatatctaatagttatatttttcttcctctactgaatcc

SEQ ID NO: 22132 - DNA, 201 bp, Homo sapiens
ctgtgtatgaacattagagactaattcatcaattcttcaacaaatgttttcttagtacacactattgtcagactctgctttaggtgcttgagatacaagarcaaacaaaacaaagttcctgcaatcttttaatttttttgaatatttcattgagataaaatttataatataatattttatagaattgtacaattatcacta

SEQ ID NO: 22133 - DNA, 201 bp, Homo sapiens
tttaggaagacagctcaaatttcagcctgactctgtgcactctcttctgagctttgcttctctggaagcttaggactctcacgatccactgtgccccactmgctagcacacctagcagttcaccctttaccagttcttcttcttcttctccttcttcttctccttattctccttattctcctacttcctccctcctcttct

SEQ ID NO: 22134 - DNA, 201 bp, Homo sapiens
ccgttcaaaataatttctttccaaatttgggagtacttagatttaagcacacctctgtgcgtgaagacaatgacagcatttaaacaacactatttcttctmtatgaactagtactaatcatttccagtggcctaagctcttttgtggaccctttcacagacaaaacaagattgataggctcaacatgttttcagtttgagg

SEQ ID NO: 22135 - DNA, 201 bp, Homo sapiens
ttatattggaacctcaaatttaaaatatccaaaactgagataccaatattccacactctatgttcaacaccttctttcccttagtctttgcatttcaattwgtgggatgccatccttccagttgcccagaccagaatcccaggagtatcccttttctcacacaccttagaagcaacccatcagcatgtcctgttggctttt

SEQ ID NO: 22136 - DNA, 201 bp, Homo sapiens
accccgggtcacctgtgagcaggtctctgcgttgactgctttgatgtgttacctgcctggcccttaacgcctgccttccttcctgaactctactgactgcrccccaacccctgccctctctgcccacattttcaacctgcgtcttcttctcatcaccagcttgctgtttacgcaccttctgttctttctactctagcaccc

SEQ ID NO: 22137 - DNA, 201 bp, Homo sapiens
atttagttttttcctagcaggaatcatttaggagatttcctggttgggagagagggttcatttcatatgggtgcctcttattattgtcatttcctgactgytgcccatagttcttgactgactgtagtactcactgtcttaccatgccttcctgtttatttatttatttatgcccattttggatttatttttctctttgac

SEQ ID NO: 22138 - DNA, 201 bp, Homo sapiens
aagactgaagtttcagggaagaaactgtctcataagaaagtcattactttttcatgcccttcttagtaagtttttgcttttataaagtcagatctgccttyttgaaagttccaacctgtttattttaatactgtcttctaggaccacagaatataattttaactcctttttcatcatgtagcttttcacatgtcacaagat

SEQ ID NO: 22139 - DNA, 201 bp, Homo sapiens
tgggcttctcgctctgtggaacagaatttgacctatagtgtgggtctaagaggaattgaaccacacagccaagattctttctagatatgagtggtgaaatstcccacagccaagattctttctagatatgaatggtgaaatctcccacagccaagattctttctagatatgaatggtgaaattgaaattttgtataatttc

SEQ ID NO: 22140 - DNA, 201 bp, Homo sapiens
gttcactttttctcccctttcttgatcctttttatttaatcattcccaggaaaggttctttctactgctctgccttttttcttttatttttgttgcttccrttgtcactccatattttttgtctttaccgttttgattttcaccctatagaaagtttgtgtgccaaataccaaataagaatgatgggatattatgcaagca

SEQ ID NO: 22141 - DNA, 201 bp, Homo sapiens
tttcaaagccagagatgcagcccatctttctcgtgattcctcattcaactgccagactgacagcaggaaattctaccatgatccttatgagtcagggcagmgttttctcttttctaaagagggtctcactgaaggactttagagaaagcaaaaacaggagatgagagaaagagagaaggaaataacttgaggaaagtcaga

SEQ ID NO: 22142 - DNA, 201 bp, Homo sapiens
gggccaacagagtaaaggagcaatccaattatccttgtttattagagaactaaattgagtcataagaaaggaaggggctacccaaacctaccccagagatrgttatcaatagcatacttgggaccagaacaaggccctttctcccaataatcagaggcatctcctcatgctcatcttccctgcaatgttttagattttaaa

SEQ ID NO: 22143 - DNA, 201 bp, Homo sapiens
aataatctctttatcatcatttcaatggggtttcaagagggagggagaataaatgtgtattttgtatctgctttctttacctagaagtaaattctcccctygataacatctctccttcctgctccctgtgccctgacttaaaagaccctgccctgcctctcccagcaggcacctggaggaatatggaacacccgcccccgc

SEQ ID NO: 22144 - DNA, 201 bp, Homo sapiens
cactcttatttcaagagacaaaatataccaacaaatgagacagaagctactaaaagtgcttttcaagctttcttagcagtgaaaagtcttttcaactgcartcttacatgaaaacatatgaaacttatgtgaaacagagaaaggggtaactgctgtccatgaaatacaaggtccttttgtgttctaagtcagaccctgcaa

SEQ ID NO: 22145 - DNA, 201 bp, Homo sapiens
aataatattatattttaaatttatgttgaacctccattaaatttaaagctttttttttttaagtagggcatgccctctttttctagtaagttgtctgattrtgggcacccaataactttcttacaaataataatgttgataaatagtaattatagtggagatgttgcgtaacctgaccatgataaggtcaagttgtctcta

SEQ ID NO: 22146 - DNA, 201 bp, Homo sapiens
gaatgtagtgattgattatccagagtgctaccatgacaaggtaaaccaactgaatagctggaaaattgtgtgtaatcatatagcatcacagaggctctgcrctgagcacaaccattagaattaaaccatggcattctaatcattccctgctggtacttcctgttcatccccaaaaccttgacctccagtgggtatgcagag

SEQ ID NO: 22147 - DNA, 201 bp, Homo sapiens
tgaagttcttattgggaacctgggtgataaattaatccctccacaagacatccttcgtgacgtcagtgacctcaaagccttggccaacatgcatgaaagcstggaatggttggcaagtcgaacaaagtcagctttctccaatctttctacatcccagagtaagtatctagtaggaagctgttgtggggacagttgaggaac

SEQ ID NO: 22148 - DNA, 201 bp, Homo sapiens
agtacagatactaaggaaaggttgtcaaccatgtcagatcacacagagagggagcaaatgtagttaaataaaaaacaacaaaactttatatttggcaattyttattaatatcctcctaggatgcagttttcattttaggagcaaggttcaaaatcaaattgtagggagtatacaatatatgctctatgagaaaaaaagact

SEQ ID NO: 22149 - DNA, 201 bp, Homo sapiens
ttttggtaattttaaaagctcctcttctcttgtctgacttatttaagtagcatgaattaatttgctacctctgactcttttctataagttttagctaactstaacaagatactttttcactcttctccatatttagttcagatctgtctttgtctgtagatctttgaagagtcatttgtgaaactacattaggtgtttctt

SEQ ID NO: 22150 - DNA, 201 bp, Homo sapiens
taaatattatgacattagtttcttcctttctgttgcctccaatgggggttgttattatctaatatactctggtttcaagctttaatagccatgagaatcgyctggaatgcttgttaaaagtccagatttctgagtcttagcccagaaattctaattcatttggtttgtgaagagcctagatatgaagagccaaacatccca

SEQ ID NO: 22151 - DNA, 201 bp, Homo sapiens
aagatcccaccattgcatgccagactgggcgacaagagtgaaactcagtctcaaaaaagtgtgtgtgtgtgtatatatgtatgtgtatatatatgtgtgtrtatgtgtgtgtgtatgtatatgtgtgtgtgcacatatgtgtgtgtgtgtgtatgtgtatacacacacaaaggggacttcaaaaggtcatggataaaagga

SEQ ID NO: 22152 - DNA, 201 bp, Homo sapiens
tctattattgctcactccatgtccatgcgtacacactatttagcttccacttgtaagtgaaaacatgagtatttggctttcttgtttcatttaagataacygcctctaattctatctatattgctgcaatagacatgattttattctttttcgtggattaatgggttatcatgagattgggactggtggctgtgtaaccag

SEQ ID NO: 22153 - DNA, 201 bp, Homo sapiens
tatcactaagtttgtttaatattctcagagagagttatgcagtttaaaaagcaaacaaggagatggttatttttttttcctatctttggtattttcctgcmttatagtgattgtaaattgttttctaataattccccatactcaagcttcattctttttttgtcttcctctacaagcacagggtgaattttattcttgaat

SEQ ID NO: 22154 - DNA, 201 bp, Homo sapiens
tttccattatgtagtttaagaaatttcactggggccaagatcgcgccactgcactccagcctgagtgacagagctagactctgtctaaaaaaaaaaaaaawttcactggaattgtcccaacaagagagaaggtagcacggattgggtggttcaggtgcttgatgagtagaaaaggcagggattcggtgacatagtttatcc

SEQ ID NO: 22155 - DNA, 201 bp, Homo sapiens
ttatggcatccagttttgtaatatttcatattataatgtagtttgattcgatgagttaactttagcaagcagaaagatactacaagcatgataatagtaayacttgctaccctcatagaactatatgaaataaaattctactgagtgtaaaaaaataatgttagaacttgacaggaagacttgatatgcattagcttgtgc

SEQ ID NO: 22156 - DNA, 201 bp, Homo sapiens
aatcctaaagatatttttcagctttcatttctgagccttaaatttaaggtacctgaactaacatttcactaaggcatgtttgaaacccatattatggatgrgtatctatgactttatctgatgctttttatactgttgtatagattgtagtatgactttgtttctcagtaccttccagtgatttgtttgccatttgctgat

SEQ ID NO: 22157 - DNA, 201 bp, Homo sapiens
cctaaagatatttttcagctttcatttctgagccttaaatttaaggtacctgaactaacatttcactaaggcatgtttgaaacccatattatggatgagtrtctatgactttatctgatgctttttatactgttgtatagattgtagtatgactttgtttctcagtaccttccagtgatttgtttgccatttgctgatctg

SEQ ID NO: 22158 - DNA, 201 bp, Homo sapiens
ttatatgaagatatttattgagcacctatgtacaaggcattatagaagacatcttaggtacaggaaatatagcaaactcttaactctgcccctcatcaccrctgcccccttgaacctcccctccttccctcctaagtttgttaatcaaaagtgagtaatagagccaggatttgaatccaggagagtctgatttaaaagcac

SEQ ID NO: 22159 - DNA, 201 bp, Homo sapiens
gtatcaaagaagaagaaaaaatttctcatattacatgttcacttgttttgttttgtttttagaagtggccattccaactcacagcctttatttattttaamtttttgatgtttttcttgttagcttttaatcagtctgagaaaatcctaggtatatttaattttcccctattctgttttacacaaactaaagctcttcctt

SEQ ID NO: 22160 - DNA, 201 bp, Homo sapiens
tgtgcattaatgaaggtattaagtgagatcagttctaaagccagcatccttagaattcactagatgcttcttttctgcatttgttgacttgccgttctcawtaccctctgtttgtttttcagcctgtgtcctatcgagggtagccattcagaataaattcattttgctagttatatttttctagaggcactgcatcaaacg

SEQ ID NO: 22161 - DNA, 201 bp, Homo sapiens
ttgatgtttttcttgttagcttttaatcagtctgagaaaatcctaggtatatttaattttcccctattctgttttacacaaactaaagctcttcctttttkattaggatagttagtttcaagtgacataaagaactttcgttactttgctagttaaatgttaccttaaagccttattgtaggtgaggaaatatcccttttt

SEQ ID NO: 22162 - DNA, 201 bp, Homo sapiens
accctgggacatcttggccctactgatgctgtgttgtttgaaaattactactagaatacccagaaacagtgctttcaggaagtcctgggatgtctggcagyatatgtgaacgtaaggggcaacacaattaccgtactctggctcagaattagtgtcgtggacccatgtcttagtgtacctcgtgtaactgttaacactggg

SEQ ID NO: 22163 - DNA, 201 bp, Homo sapiens
ctcattgtggagtgcagcagcatgatctcggctcattgcaacctctacctcccaggttcaagtgattctcatatctcagcctccggagtagctgagactayaggggcgcaccaccacactcagataattttttgtatttttaatagagatggggtttcgccatgttggccaggctggtcttcaactcctgacctcaggtga

SEQ ID NO: 22164 - DNA, 201 bp, Homo sapiens
aaaaattagctgggcatgggggcaggcatctgtaatcccagctcctcgggaggctgaggcaggagaatcgcttgaacttaggaggtggaggttgcagtgasccatgattgtgccattgcactctagcctgggcaacacggcaagactccatctcaaaaaaacaaaaaaaagataaatgttaggtttctaaacatatattct

SEQ ID NO: 22165 - DNA, 201 bp, Homo sapiens
ctagctgattattggattataatggcttctctattcctaaggctatatatatatctaaatatatatatatctaaatatatctaaatatatctaaatatatmtaaatatatataaatatatatataaatatatataaatatatatatataaatatatatatatataaatatatatataaatatatatattttttttatcagc

SEQ ID NO: 22166 - DNA, 201 bp, Homo sapiens
acctctgtcctatgccctctccacttctaaatgtgcatgcatccacgtgtgcactcatagtcgtacctgtaacacactttgaggaaatatctacaaacttrtcttttcttctttggagatatccaatatcctattgaataagacaaagccattttggggttatgtttaaggttgagggcaggagggtatactttggatgca

SEQ ID NO: 22167 - DNA, 201 bp, Homo sapiens
acacaggatcattctaaggagatgcttaaattattgctctcaggtgtgcttgccctatgctctgtgtgtgtgtgtgtgtgtgtgtgtgtgtgtgtgtgtgygcgcgcgtgtgtgatggtgctggagatgtgtgtctgaagtcatagacatatttctctgaccatatagaaccttagattcttagcagcatctctgaactgt

SEQ ID NO: 22168 - DNA, 201 bp, Homo sapiens
ctcatggagttgctgtgaggattaaatgaaataccttacgagatcctttgtttagcaatctaaacactggaaacatacgagcaatagaattgtctcaaaarcatgtattaaaacaaccctcactgttatagtgattttcagtaatgcactgtgggtggtgatagtgggacccacagggcctcaaataactacttagtattg

SEQ ID NO: 22169 - DNA, 201 bp, Homo sapiens
ctgtgtcatagtgtcaagtggaacatgcttgtttatttggtactcacgcagtgttgtttatactgaaatacttgaatgtatgtgctcacctgctgtttttyttctgccttttaaaagtcttggagtacatcattataacaaagcaatttttttttgattttgcattgcaagtttttgtttctctctaataatgcagtttac

SEQ ID NO: 22170 - DNA, 201 bp, Homo sapiens
tctgtgcctggccattggatacatttaaaatagtgatttttaacagtgtcagtctttagggtatgccaaaatttatatcttttgcatctatttaaatgcakgctaaaaaaattaaatgtcaacttaaaaagggaaggagaatatagtttttcaaaattattttaaaggatacaccaataacaattgtaaaagccactattc

SEQ ID NO: 22171 - DNA, 201 bp, Homo sapiens
ttgatgggctattacctgactgctgggtcaaagttagtcttgctctgtattgggcaatctaaatttaagccttgaagagtgtccagattgtacagaatttytgatttgtatctggtcaatactgtcagaattcagttttttttttttttttttttttttttgccagtatttggttgatgggcattagttagctgataaaag

SEQ ID NO: 22172 - DNA, 201 bp, Homo sapiens
tgaggcaggagaatcacttgaacctgggaaatggaggctgcagtgagccgagatcgcgccactgcactccatcttgggcgacagagcaagacttcatctcmaaaaaatatataaataaataaagtatgtgaaacttttaactgtatgtctggtatttttaaaaatttttatttttaaatttttatatatttacttattttt

SEQ ID NO: 22173 - DNA, 201 bp, Homo sapiens
caagatattagacatcgacatagatcattttcagtaccctagaagacttgcttatattgacagtcaatccctttccctgagagataaccattattgtgaaytctatccctacagatagattggttttgcctatggtttaacttcatataaatggaatcatatagtatgtcctctttggtgcctgacatttgtgtgacatga

SEQ ID NO: 22174 - DNA, 201 bp, Homo sapiens
gctggagtgcattggcgcgatctcagctcactgcagcctccacctccccggtttaagcgattctcttccctcagcctcctgagtagctgggactacaggcrcatgccaccgcgcccagctaattttatatttttagtagagacggagtttcactgtgttagccagcattgtctcaatctgctgacctcatgatccgccttt

SEQ ID NO: 22175 - DNA, 201 bp, Homo sapiens
aaaggcttgacgataaaatgcagccagagtgtaaattgtgaaatggagctctaggctcaattgatcctccactgctagcaacttgagattgtgcatttcckttctagaatgaaaattatgcccttttaagaatacttagtcaatttttaatcttcaaattggtgggtttttttaaataaaaaaagccagaagtttacatgg

SEQ ID NO: 22176 - DNA, 201 bp, Homo sapiens
catgtgcaggtgcaggattttatatgcacatgttttcattctgcttgggtaaacacctagaagtggaaagtctggatcatatggtcattcggggtttattyttttgggaaactgccaaactagctgctcattttttttttttttacagaatttataccacttatttacagtcgaaaacatttagttaagatatttttactt

SEQ ID NO: 22177 - DNA, 201 bp, Homo sapiens
ctatttttggagatatgatagtcctccactttttgccatttgagaccctctgaagagtcttcttctagcatgactctattctactcaaaaatctctttttwtctttctcttctcttcttttttcactttttctgaggaacgagttgtcttctgctatatcaagcgaagctccccatttgtgtttttgattataaattctcc

SEQ ID NO: 22178 - DNA, 201 bp, Homo sapiens
caggttagttacatacgtatacatgtgccatgctggtgcgctgcacccactaactcgtcatctagcattaggtatatctcccaatgctatccctccccccytcccccaccccacaacagtccccagagtgtgatgttccccttcctgtgtacgtgtgatctcattgttcagttcccacctatgagtgagaatatgtggtat

SEQ ID NO: 22179 - DNA, 201 bp, Homo sapiens
cgagaccatcctggccaacatggtgaaacctcgcctccactaaaaatacaaaaaaattagctgggcatggtggcatgtgtctgtagtcccagctactcggkaggctgaggcaggagaatcacttgaacccaggaggtggaggttgcagtgagccgagattgcgctactgcactccagcctggcaacagagcgagactccgt

SEQ ID NO: 22180 - DNA, 201 bp, Homo sapiens
acaaaagcagagagggaaacccaatgtctgcttactcagaaaggactcagaggaggctggctcaagtttaggtcaatgaagagagtctatcaccagctctrctgtaaaaccaaagttagctgttttataaatgtgttgtactgactgcatatgtgttctgttttaaaaacagaagaaaatgaatgagttatttcattaaaa

SEQ ID NO: 22181 - DNA, 201 bp, Homo sapiens
agattacaggcatgcatcaccagtttggttttttttagtagagacgggtttcactgtgttgttaggctggtcttgaacccctgccctcaagtgatctgccygccttggcctcccaaagtgctgggattacaggcatgagcaaccacgcccgtcctctagcttttacagtgagagacgtgtgacttttcctttcacttgaac

SEQ ID NO: 22182 - DNA, 201 bp, Homo sapiens
agcagaactgggttatgagctttattgtcctttggaaaacggtggctgcatgtgtctggtggggaagaagtagtaaagacatcatctctattcattcactrttgattcagtgagagtcacagccctcctccataggattcctgaagtctctagtccctggagtttatgcaaagagctagacagttccacaagcttacattt

SEQ ID NO: 22183 - DNA, 201 bp, Homo sapiens
tggtggaaatagggccagagaaccactcctcctgatcaaggctgcccagaaagattcctcagttcagaaggatgaactggatagctttgcctattacaggyatggcattgatgtaatattgagttaacaatattattttggccgggcgcggtggtggctcacccctgtaatcccagcactttgggaggccgaggtgggcgg

SEQ ID NO: 22184 - DNA, 201 bp, Homo sapiens
taaacttacttttcagtgaaattctgttgtcccagcgtatctcacggggctttttatccatgaaacaacttctgggtgacactgcccaatgctatatttaygtaatttgtttagaatattttatttctcccggcaccatcaggctcagggcagatgttccactattgcgggaacttaatttcatattattggcaaatttgc

SEQ ID NO: 22185 - DNA, 201 bp, Homo sapiens
tgctaaatcatatttactcttcttagaacaataaaaattgatcactatggtagatacagttgagaataaggaagatgtatgatgatgcttccttttatttmttttttcctaattgtattataaacatcttatgaaatcaaggtaatttcattaaaattcttatgattgggtcttaatttcctatagacattcaagccttaa

SEQ ID NO: 22186 - DNA, 201 bp, Homo sapiens
gaggggttttgtcacaagaattgacaggtcttagcctgttggaggtaaaggggagggagaaggccatggtgatcccccaattctgccctgggcagctggcratggcagtgcctttctctgagctagagactgagagcagaagcagctttctggagaaagatgttaagtttaggttcgaatttgtggcatttgaggtcccaa

SEQ ID NO: 22187 - DNA, 201 bp, Homo sapiens
gtgttcactctgggcaaatgaacaacatatggacatttgaaatatatgtgtgttcaaaattctgtcatgtgaggttagttgtggaattcgatagtccattytgtatttgttccatgtgaaaagggccttataatggcatcaccagttgttcattaatctcctttcccttatgtaaagtctccttttgtcctccctctgcca

SEQ ID NO: 22188 - DNA, 201 bp, Homo sapiens
gcatggtggctgtattctcagtaagatcattgggaaaatagtctgatactaatgaaatatttgaatgaagaaaaaacatcatgttctatcccaacataacktcttttagttccataccctccagctcttttcctcatgcatgtgtattcttataaaaccacttgtactattttgtattctgcttttctcttacacagcata

SEQ ID NO: 22189 - DNA, 201 bp, Homo sapiens
tagaaagcaagcaataaattgtttatggatatcattccccacaacatgtctgctgaaagaggactgataaaagcaaggcaattgatgggatgaatcattcrctcatttatgattatctaccatttctagattataggaatgttattgaggaccattaactccatatccacttaaatatgtcatgaatcattttttaaaatt

SEQ ID NO: 22190 - DNA, 201 bp, Homo sapiens
gtacaatatgataattgtgtaaaaagctgtaaacatagaaaagaacaagaaaatacaccaagacattgataatgttttgacttttaagaaatattttttcyttgctgttttaattttgttatgcaattaacatctatttttatatcatgtatatattaataattacatatttacaagtgttgtataccgatttataaagtc

SEQ ID NO: 22191 - DNA, 201 bp, Homo sapiens
gttgaactgcaacacctcttcataggcctccaataggctctgcaattttgcatttctttatttactcattctatgcaaattccttcatgtgtgaaatgccmttctgtccttctttgcctcttgaaatcttatccctctactaggagccctttcaaatgccctctcctaaatgagtacttccccttccctccacttctcttc

SEQ ID NO: 22192 - DNA, 201 bp, Homo sapiens
aaacattttttattatgaggaatatagatttttttaattaagaaaaagtgcaattcagaaagaatgctattgtccatcttgaagtctttattgtctccccyacaactcttccccagtgtcaactgcgaatgggcaatcaggctgctgtccaggagagagaggccctagggtatgtaaaatactgcagagaaatctactgtg

SEQ ID NO: 22193 - DNA, 201 bp, Homo sapiens
ggggtaggaggtcaaatatttgaaagtatgtaattagatcccttccttctctgtcagataagaaggatatgggcggtaagcaatgaggagatacagaaagrgcaaatgtttttttaaagaaatagctactaagataaatggggagatgaacctgatcagagacaggtataaagaatgtcagagaacattgaggggtacacc

SEQ ID NO: 22194 - DNA, 201 bp, Homo sapiens
atacgcttggatgtctgatacttgggccggttaacttctctgaacatgactttccacatcttcattgagtgtttatcacaaaacattgtgagaattgcacrtgcaaatgcaggtaaagaggctactcaatcctggtgcatagtcatttacaaataagttggtttccaccatggcacacgtatgcctgtgtaacaaacccac

SEQ ID NO: 22195 - DNA, 201 bp, Homo sapiens
tttttaagctcttttcctcattcttagtcttcctgagactattttatttcttgctttctcatttagctaccaatatttgcccatagtggtactcaacatgraatgcccaaatctgccctctgtttatttccccctactcctgtccttcctgttgatagctgggtcattctgcccattctgcctgatactttaacttcatct

SEQ ID NO: 22196 - DNA, 201 bp, Homo sapiens
agggccaagagaattaatttatatttttaaacattattttataaatatattttgttgttgattttttatatttagtctgctaagattatagatttaaaatrgtgagttttaccaggatctttaatgattcttgttgcctatcaagcagaattctttgagcacagtatttatcagaacttctcctgagattgaagatcatgt

SEQ ID NO: 22197 - DNA, 201 bp, Homo sapiens
atgaatacaaatggtgttgtctttatgttgttgcaaaataaagcaacaatgcagcatcctccttaaaggctactctctctccttttctgatcctgccaacygagatgacatggtttgtatgttagtttcggttccatattaatttattcagtcatttttcaggagttaattgaacatcttgtctcttgttccagacatttg

SEQ ID NO: 22198 - DNA, 201 bp, Homo sapiens
aacctctgcctcccgggttcaagccattctcctgcctcagcctcccgagtagctgggattacatatataggtcatttctaaggactatagtctgttacaartatccctttagttgaaagaatccattaagcgaccttttctcaggatagcttttcaaccacctgctaatatttgactacatgaattttcatttcctcatat

SEQ ID NO: 22199 - DNA, 201 bp, Homo sapiens
tccattcctttaatagatacgatatgatttggccttctctgtatcttcaaataagcagtcctcaaacatccttatgatctctcctgctgccttagaagatktgagataatggagggatgatgaagcaatcatacaaaatctattgattcaccttggtgagtatcatttatacatcagtgagtaccttggttgcaaaattac

SEQ ID NO: 22200 - DNA, 201 bp, Homo sapiens
gccatctatattaggcattacctcctttcaaccacagccacctctagggagagatggcagattggactgtttctgcagactctgtttgctgaaactcagtrgtgacttagaatgggagtaatgaggagggatagtttccttaactagtgatagaaatgatcatacatgtatgatcagcacagtccagctacatggaagtat

SEQ ID NO: 22201 - DNA, 201 bp, Homo sapiens
cgaatttgattttctgttgttcccaacaaagtgagaggtgatcctaggttttattttgctgttggagaatttaaaattgtggtaagtttttatcgctcacktaacatgtcaccagtttctcccgcctccacccatgtctattctttggtgcttacatttgtactttaccgataaggggattttatgtagatctattcttat

SEQ ID NO: 22202 - DNA, 201 bp, Homo sapiens
aaaattgtggtaagtttttatcgctcacttaacatgtcaccagtttctcccgcctccacccatgtctattctttggtgcttacatttgtactttaccgatmaggggattttatgtagatctattcttattttatgtaatatagataataaatttttaatacatcatataatataaattccataggaaatagctgtttaggg

SEQ ID NO: 22203 - DNA, 201 bp, Homo sapiens
gcggtggctcacacctgtaatcccagcactttgggaggcctagacagacagatcacttgaggtcaggagttcaagaccagcctaaccaacatggcgaaatmccatctctacttaaaatacaaaaattggccaggcatgatggcaggtgcctgtaatcgcagctactcaagaggctgaggcaggagaatcatttgaacccgg

SEQ ID NO: 22204 - DNA, 201 bp, Homo sapiens
taatggcctctattcttaaactctttagcatgcatttcccaagaagaaagacattctcttatgtacccatatcattaccatatgtattagttttatgttgyggccttgtaaccaattaccactgttgtcaatagtcttggccatttgagtctgtcctgacctttcccctgctctgttctttattacaggggaactgacttt

SEQ ID NO: 22205 - DNA, 201 bp, Homo sapiens
tatacgtgcttatacttttacgtgaattacaaattgggtaaagatagaaatttgtttctacagaactgccaggaattatattacacattgagaccactgayttttgacactggccactttgtccatttgaattttgctgctgagttactcttttgggcataattctgcagagtggaagtctttaaagataaaggaagggct

SEQ ID NO: 22206 - DNA, 201 bp, Homo sapiens
aatttataaagaacaaaagcatatttggctcatgcttctagagactggaaagtcccagagcatggcactggcatctggtgagggtcattccgtagcagaarggcaaaaggcagaaatgaacacaggagacagaaatatgggcctgaatttattcttttattctgagctcactcctgtgataactaattcattcccgtgata

SEQ ID NO: 22207 - DNA, 201 bp, Homo sapiens
tttaatcatgtccacgaatgtataatactttgtacagccaataaaagcaagtaagaattttcagtcctgtagaggactttaatgcaagggacaacaaataygttagatatgcccaaaggacatgactagtaagagaagcgcttcagttttgaaagtaagataaaatgtgtaagttgacataatctttaggaaagtgaatac

SEQ ID NO: 22208 - DNA, 201 bp, Homo sapiens
cagcatgaccattgcttctcagaaatgtaaattttctcactcttgtgaatatcatacttacacctcatgctggctactctcctcttcttctcttcatgatytttctcattataactttgtccgttgcacccagatacatccgaaaagttgtcacctgcagagatgctatttggtgaagatttgaaacctcttaacggttaa
